United States Patent Application Publication US 2007/0048756 A1 - sequence listing, part 19

SEQ ID NO: 653991 - DNA, 33 bp, Homo sapien
ggccctcttaggaaaaccaattagggtcaacag

SEQ ID NO: 653992 - DNA, 33 bp, Homo sapien
ggccctcttaggaaaatcaattagggtcaacag

SEQ ID NO: 653993 - DNA, 33 bp, Homo sapien
tcccaaacaatgtagcaagaccaggatgagcac

SEQ ID NO: 653994 - DNA, 33 bp, Homo sapien
tcccaaacaatgtagccagaccaggatgagcac

SEQ ID NO: 653995 - DNA, 33 bp, Homo sapien
ggaaagtgggtaccacaggatggctattgtcag

SEQ ID NO: 653996 - DNA, 33 bp, Homo sapien
ggaaagtgggtaccaccggatggctattgtcag

SEQ ID NO: 653997 - DNA, 33 bp, Homo sapien
aatttgggtggagacaaaatcataccatattat

SEQ ID NO: 653998 - DNA, 33 bp, Homo sapien
aatttgggtggagacacaatcataccatattat

SEQ ID NO: 653999 - DNA, 33 bp, Homo sapien; identical to SEQ ID NO: 653997

SEQ ID NO: 654000 - DNA, 33 bp, Homo sapien; identical to SEQ ID NO: 653998

SEQ ID NO: 654001 - DNA, 33 bp, Homo sapien
ctggaaagacggattccaaaagttctggggtct

SEQ ID NO: 654002 - DNA, 33 bp, Homo sapien
ctggaaagacggattcgaaaagttctggggtct

SEQ ID NO: 654003 - DNA, 33 bp, Homo sapien
ctatcaataactctcacgtgaatctgttgatct

SEQ ID NO: 654004 - DNA, 33 bp, Homo sapien
ctatcaataactctcaggtgaatctgttgatct

SEQ ID NO: 654005 - DNA, 33 bp, Homo sapien
attatagggaatgccaacgagcagtgcttagct

SEQ ID NO: 654006 - DNA, 33 bp, Homo sapien
attatagggaatgccaccgagcagtgcttagct

SEQ ID NO: 654007 - DNA, 33 bp, Homo sapien
caccctctggtagacaccaatatctgttgttcc

SEQ ID NO: 654008 - DNA, 33 bp, Homo sapien
caccctctggtagacagcaatatctgttgttcc

SEQ ID NO: 654009 - DNA, 33 bp, Homo sapien
ctccaagacttgaatacaatggtggtaaggcaa

SEQ ID NO: 654010 - DNA, 33 bp, Homo sapien
ctccaagacttgaatataatggtggtaaggcaa

SEQ ID NO: 654011 - DNA, 33 bp, Homo sapien
agagctctgatagatacgttaatggagattaat

SEQ ID NO: 654012 - DNA, 33 bp, Homo sapien
agagctctgatagatatgttaatggagattaat

SEQ ID NO: 654013 - DNA, 33 bp, Homo sapien
gagcacaccacagtgaaccctcaagattacaat

SEQ ID NO: 654014 - DNA, 33 bp, Homo sapien
gagcacaccacagtgagccctcaagattacaat

SEQ ID NO: 654015 - DNA, 33 bp, Homo sapien
tgaactcctgaacaacacagagtggctaagaaa

SEQ ID NO: 654016 - DNA, 33 bp, Homo sapien
tgaactcctgaacaacgcagagtggctaagaaa

SEQ ID NO: 654017 - DNA, 33 bp, Homo sapien
tgagacaatggtcaaacgcacaaggagctaagg

SEQ ID NO: 654018 - DNA, 33 bp, Homo sapien
tgagacaatggtcaaatgcacaaggagctaagg

SEQ ID NO: 654019 - DNA, 33 bp, Homo sapien
tattcctgggcatacaatagttcacaaatagaa

SEQ ID NO: 654020 - DNA, 33 bp, Homo sapien
tattcctgggcatacagtagttcacaaatagaa

SEQ ID NO: 654021 - DNA, 33 bp, Homo sapien
ttcattaatgggagaaagaagtttgcgatgatc

SEQ ID NO: 654022 - DNA, 33 bp, Homo sapien
ttcattaatgggagaatgaagtttgcgatgatc

SEQ ID NO: 654023 - DNA, 33 bp, Homo sapien
gagaggagaggtagaaatggcttcacactggca

SEQ ID NO: 654024 - DNA, 33 bp, Homo sapien
gagaggagaggtagaagtggcttcacactggca

SEQ ID NO: 654025 - DNA, 33 bp, Homo sapien
ttgtccaagctcaagaaaaaagcagggaaaagc

SEQ ID NO: 654026 - DNA, 33 bp, Homo sapien
ttgtccaagctcaagagaaaagcagggaaaagc

SEQ ID NO: 654027 - DNA, 33 bp, Homo sapien
aattctcctcaagtgaccatttacgctttagaa

SEQ ID NO: 654028 - DNA, 33 bp, Homo sapien
aattctcctcaagtgatcatttacgctttagaa

SEQ ID NO: 654029 - DNA, 33 bp, Homo sapien
ggttgcaataaaagaactgatggcaaatggacc

SEQ ID NO: 654030 - DNA, 33 bp, Homo sapien
ggttgcaataaaagaagtgatggcaaatggacc

SEQ ID NO: 654031 - DNA, 33 bp, Homo sapien
gttcaacttgtacccactgaactttgtgctcat

SEQ ID NO: 654032 - DNA, 33 bp, Homo sapien
gttcaacttgtacccattgaactttgtgctcat

SEQ ID NO: 654033 - DNA, 33 bp, Homo sapien
gaggaaacaaaggcataaagagagaaattgttt

SEQ ID NO: 654034 - DNA, 33 bp, Homo sapien
gaggaaacaaaggcatgaagagagaaattgttt

SEQ ID NO: 654035 - DNA, 33 bp, Homo sapien
gcagtaaagtgcaaaactcagtgctgttggctc

SEQ ID NO: 654036 - DNA, 33 bp, Homo sapien
gcagtaaagtgcaaaagtcagtgctgttggctc

SEQ ID NO: 654037 - DNA, 33 bp, Homo sapien
tggtttaaaagactgaacaaacatatttgagac

SEQ ID NO: 654038 - DNA, 33 bp, Homo sapien
tggtttaaaagactgagcaaacatatttgagac

SEQ ID NO: 654039 - DNA, 33 bp, Homo sapien
tttatattcattagcccagttaactcttctgca

SEQ ID NO: 654040 - DNA, 33 bp, Homo sapien
tttatattcattagcctagttaactcttctgca

SEQ ID NO: 654041 - DNA, 33 bp, Homo sapien
gaattcatgagggaaaaaaacagaccaatccac

SEQ ID NO: 654042 - DNA, 33 bp, Homo sapien
gaattcatgagggaaagaaacagaccaatccac

SEQ ID NO: 654043 - DNA, 33 bp, Homo sapien
cagggcctttttaagaaatagaggcaacatgaa

SEQ ID NO: 654044 - DNA, 33 bp, Homo sapien
cagggcctttttaagacatagaggcaacatgaa

SEQ ID NO: 654045 - DNA, 33 bp, Homo sapien
catgcatgtgcgagtacgttttttgattaatga

SEQ ID NO: 654046 - DNA, 33 bp, Homo sapien
catgcatgtgcgagtatgttttttgattaatga

SEQ ID NO: 654047 - DNA, 33 bp, Homo sapien
aaaacgataactatacacattgcagattctaag

SEQ ID NO: 654048 - DNA, 33 bp, Homo sapien
aaaacgataactatactcattgcagattctaag

SEQ ID NO: 654049 - DNA, 33 bp, Homo sapien
tcagatagaaactttagaactaggtattcaact

SEQ ID NO: 654050 - DNA, 33 bp, Homo sapien
tcagatagaaactttataactaggtattcaact

SEQ ID NO: 654051 - DNA, 33 bp, Homo sapien
ccagatcccagttccacgctcagatctctttga

SEQ ID NO: 654052 - DNA, 33 bp, Homo sapien
ccagatcccagttccatgctcagatctctttga

SEQ ID NO: 654053 - DNA, 33 bp, Homo sapien
agtatgtccagaggaaagcatccaaaatggtga

SEQ ID NO: 654054 - DNA, 33 bp, Homo sapien
agtatgtccagaggaaggcatccaaaatggtga

SEQ ID NO: 654055 - DNA, 33 bp, Homo sapien
catatttagtcacaaagttcatcaatgcttgtg

SEQ ID NO: 654056 - DNA, 33 bp, Homo sapien
catatttagtcacaaatttcatcaatgcttgtg

SEQ ID NO: 654057 - DNA, 33 bp, Homo sapien
ttaaacaggataactcaattgataagaccattt

SEQ ID NO: 654058 - DNA, 33 bp, Homo sapien
ttaaacaggataactccattgataagaccattt

SEQ ID NO: 654059 - DNA, 33 bp, Homo sapien
cctgaaatatgcctaacaataagctgcctagtt

SEQ ID NO: 654060 - DNA, 33 bp, Homo sapien
cctgaaatatgcctaataataagctgcctagtt

SEQ ID NO: 654061 - DNA, 33 bp, Homo sapien
tggctaaagatttggacgtggatgacctgatga

SEQ ID NO: 654062 - DNA, 33 bp, Homo sapien
tggctaaagatttggatgtggatgacctgatga

SEQ ID NO: 654063 - DNA, 33 bp, Homo sapien
atgtggatacttcagacggaagaaaagaaatcc

SEQ ID NO: 654064 - DNA, 33 bp, Homo sapien
atgtggatacttcagagggaagaaaagaaatcc

SEQ ID NO: 654065 - DNA, 33 bp, Homo sapien
ggctttcctgactaacacagttctccatgacct

SEQ ID NO: 654066 - DNA, 33 bp, Homo sapien
ggctttcctgactaacgcagttctccatgacct

SEQ ID NO: 654067 - DNA, 33 bp, Homo sapien
cttagagtctaatacacagcttatcacagagta

SEQ ID NO: 654068 - DNA, 33 bp, Homo sapien
cttagagtctaatacagagcttatcacagagta

SEQ ID NO: 654069 - DNA, 33 bp, Homo sapien
aggcaagcaaattttacgactcttgaattaatt

SEQ ID NO: 654070 - DNA, 33 bp, Homo sapien
aggcaagcaaattttatgactcttgaattaatt

SEQ ID NO: 654071 - DNA, 33 bp, Homo sapien
gcagtttaccagcagaaaaacccctgtactacc

SEQ ID NO: 654072 - DNA, 33 bp, Homo sapien
gcagtttaccagcagacaaacccctgtactacc

SEQ ID NO: 654073 - DNA, 33 bp, Homo sapien
acctatgtctgctatacccaaaagttttctaga

SEQ ID NO: 654074 - DNA, 33 bp, Homo sapien
acctatgtctgctatatccaaaagttttctaga

SEQ ID NO: 654075 - DNA, 33 bp, Homo sapien
atgtgacaacttaacaatgctggtcacaaaata

SEQ ID NO: 654076 - DNA, 33 bp, Homo sapien
atgtgacaacttaacagtgctggtcacaaaata

SEQ ID NO: 654077 - DNA, 33 bp, Homo sapien
cgtattttctttccccagctcaatgttgctcca

SEQ ID NO: 654078 - DNA, 33 bp, Homo sapien
cgtattttctttccccggctcaatgttgctcca

SEQ ID NO: 654079 - DNA, 33 bp, Homo sapien
aatattatgccttagagaaaatcctaaactgac

SEQ ID NO: 654080 - DNA, 33 bp, Homo sapien
aatattatgccttagataaaatcctaaactgac

SEQ ID NO: 654081 - DNA, 33 bp, Homo sapien
tgctgtcagcagccaacgttagtcagctccagc

SEQ ID NO: 654082 - DNA, 33 bp, Homo sapien
tgctgtcagcagccaatgttagtcagctccagc

SEQ ID NO: 654083 - DNA, 33 bp, Homo sapien
gaaagtacttctcatgccatcacatatatatgt

SEQ ID NO: 654084 - DNA, 33 bp, Homo sapien
gaaagtacttctcatggcatcacatatatatgt

SEQ ID NO: 654085 - DNA, 33 bp, Homo sapien
caacagaaatgactgcaaatgttgaaagtactt

SEQ ID NO: 654086 - DNA, 33 bp, Homo sapien
caacagaaatgactgcgaatgttgaaagtactt

SEQ ID NO: 654087 - DNA, 33 bp, Homo sapien
tacatgtggacagcaacaaaagagtcaatgcca

SEQ ID NO: 654088 - DNA, 33 bp, Homo sapien
tacatgtggacagcaataaaagagtcaatgcca

SEQ ID NO: 654089 - DNA, 33 bp, Homo sapien
atacaattatgttgacactggagtataactaaa

SEQ ID NO: 654090 - DNA, 33 bp, Homo sapien
atacaattatgttgacgctggagtataactaaa

SEQ ID NO: 654091 - DNA, 33 bp, Homo sapien
atggacacttgcctgaaaaactcttagcttttc

SEQ ID NO: 654092 - DNA, 33 bp, Homo sapien
atggacacttgcctgagaaactcttagcttttc

SEQ ID NO: 654093 - DNA, 33 bp, Homo sapien
ctactgggaccactgcacaaaaatattatgatg

SEQ ID NO: 654094 - DNA, 33 bp, Homo sapien
ctactgggaccactgcgcaaaaatattatgatg

SEQ ID NO: 654095 - DNA, 33 bp, Homo sapien
acaaaatgccagttgaactgtttttatagcatg

SEQ ID NO: 654096 - DNA, 33 bp, Homo sapien
acaaaatgccagttgatctgtttttatagcatg

SEQ ID NO: 654097 - DNA, 33 bp, Homo sapien
tccagaaatttcatcacagttgctcaaataaca

SEQ ID NO: 654098 - DNA, 33 bp, Homo sapien
tccagaaatttcatcagagttgctcaaataaca

SEQ ID NO: 654099 - DNA, 33 bp, Homo sapien
attttctgttgtcatacgtaagggttgggcagc

SEQ ID NO: 654100 - DNA, 33 bp, Homo sapien
attttctgttgtcatatgtaagggttgggcagc

SEQ ID NO: 654101 - DNA, 33 bp, Homo sapien
cacgagaatggctgccacttttacaaggaatca

SEQ ID NO: 654102 - DNA, 33 bp, Homo sapien
cacgagaatggctgccgcttttacaaggaatca

SEQ ID NO: 654103 - DNA, 33 bp, Homo sapien
atggtaggcttcatagacaaaatggcataagag

SEQ ID NO: 654104 - DNA, 33 bp, Homo sapien
atggtaggcttcataggcaaaatggcataagag

SEQ ID NO: 654105 - DNA, 33 bp, Homo sapien
agtgcaagaatttcccaaaatgattgaatcatc

SEQ ID NO: 654106 - DNA, 33 bp, Homo sapien
agtgcaagaatttccccaaatgattgaatcatc

SEQ ID NO: 654107 - DNA, 33 bp, Homo sapien
cactggaaagtcgcaacagaaaccacaagattt

SEQ ID NO: 654108 - DNA, 33 bp, Homo sapien
cactggaaagtcgcaatagaaaccacaagattt

SEQ ID NO: 654109 - DNA, 33 bp, Homo sapien
ctttcctattagcaaactatgttgaacaaatat

SEQ ID NO: 654110 - DNA, 33 bp, Homo sapien
ctttcctattagcaaattatgttgaacaaatat

SEQ ID NO: 654111 - DNA, 33 bp, Homo sapien
cacttaaagatgcaataaatgctggccgggaac

SEQ ID NO: 654112 - DNA, 33 bp, Homo sapien
cacttaaagatgcaatcaatgctggccgggaac

SEQ ID NO: 654113 - DNA, 33 bp, Homo sapien
gctttagctcaggatacagtctaaccttgagat

SEQ ID NO: 654114 - DNA, 33 bp, Homo sapien
gctttagctcaggatatagtctaaccttgagat

SEQ ID NO: 654115 - DNA, 33 bp, Homo sapien
tatactcatggtataacggactaaaaagcacat

SEQ ID NO: 654116 - DNA, 33 bp, Homo sapien
tatactcatggtataatggactaaaaagcacat

SEQ ID NO: 654117 - DNA, 33 bp, Homo sapien
tggggtaagcaaacagcataaggaattatgacg

SEQ ID NO: 654118 - DNA, 33 bp, Homo sapien
tggggtaagcaaacagtataaggaattatgacg

SEQ ID NO: 654119 - DNA, 33 bp, Homo sapien
catagagggttaggcaaaaaatacttgtgtttg

SEQ ID NO: 654120 - DNA, 33 bp, Homo sapien
catagagggttaggcagaaaatacttgtgtttg

SEQ ID NO: 654121 - DNA, 33 bp, Homo sapien
aaaaatggaatcccaactgttaagatctttagg

SEQ ID NO: 654122 - DNA, 33 bp, Homo sapien
aaaaatggaatcccaagtgttaagatctttagg

SEQ ID NO: 654123 - DNA, 33 bp, Homo sapien
cccagacattaccactaacatagtctctttact

SEQ ID NO: 654124 - DNA, 33 bp, Homo sapien
cccagacattaccactgacatagtctctttact

SEQ ID NO: 654125 - DNA, 33 bp, Homo sapien
gccatagtttactctacagtttcgcttatcact

SEQ ID NO: 654126 - DNA, 33 bp, Homo sapien
gccatagtttactctatagtttcgcttatcact

SEQ ID NO: 654127 - DNA, 33 bp, Homo sapien
taggacatactttataaccttgaccagcaaaaa

SEQ ID NO: 654128 - DNA, 33 bp, Homo sapien
taggacatactttatacccttgaccagcaaaaa

SEQ ID NO: 654129 - DNA, 33 bp, Homo sapien
tcatttattttctgtagaataccatccttagta

SEQ ID NO: 654130 - DNA, 33 bp, Homo sapien
tcatttattttctgtataataccatccttagta

SEQ ID NO: 654131 - DNA, 33 bp, Homo sapien
ttgtccaaactataaactcttgcaaacttgtgt

SEQ ID NO: 654132 - DNA, 33 bp, Homo sapien
ttgtccaaactataaattcttgcaaacttgtgt

SEQ ID NO: 654133 - DNA, 33 bp, Homo sapien
taccttgtactttagaaaaatgtgtggattata

SEQ ID NO: 654134 - DNA, 33 bp, Homo sapien
taccttgtactttagagaaatgtgtggattata

SEQ ID NO: 654135 - DNA, 33 bp, Homo sapien
cattacttggttataccgactgaggtagtgtgg

SEQ ID NO: 654136 - DNA, 33 bp, Homo sapien
cattacttggttatactgactgaggtagtgtgg

SEQ ID NO: 654137 - DNA, 33 bp, Homo sapien
aagctattccaaagtcacataaagaataacaat

SEQ ID NO: 654138 - DNA, 33 bp, Homo sapien
aagctattccaaagtcccataaagaataacaat

SEQ ID NO: 654139 - DNA, 33 bp, Homo sapien
tgggcactaggatgagacaagctcaaaagtagt

SEQ ID NO: 654140 - DNA, 33 bp, Homo sapien
tgggcactaggatgagtcaagctcaaaagtagt

SEQ ID NO: 654141 - DNA, 33 bp, Homo sapien
gatgggagaaagttaacagccctgagatttttt

SEQ ID NO: 654142 - DNA, 33 bp, Homo sapien
gatgggagaaagttaatagccctgagatttttt

SEQ ID NO: 654143 - DNA, 33 bp, Homo sapien
ttttatcctttatttgaatcccattgtttagaa

SEQ ID NO: 654144 - DNA, 33 bp, Homo sapien
ttttatcctttatttgtatcccattgtttagaa

SEQ ID NO: 654145 - DNA, 33 bp, Homo sapien
ggcctcaacaaactagccatgctgtaaagaaag

SEQ ID NO: 654146 - DNA, 33 bp, Homo sapien
ggcctcaacaaactagtcatgctgtaaagaaag

SEQ ID NO: 654147 - DNA, 33 bp, Homo sapien
ctcttctgtgggaagcaaaaacactgtgcacct

SEQ ID NO: 654148 - DNA, 33 bp, Homo sapien
ctcttctgtgggaagcgaaaacactgtgcacct

SEQ ID NO: 654149 - DNA, 33 bp, Homo sapien
catagactgattcctaagtggaaggtcaaatcc

SEQ ID NO: 654150 - DNA, 33 bp, Homo sapien
catagactgattcctacgtggaaggtcaaatcc

SEQ ID NO: 654151 - DNA, 33 bp, Homo sapien
atgacacgtagcaataagcacagtaaccaagct

SEQ ID NO: 654152 - DNA, 33 bp, Homo sapien
atgacacgtagcaataggcacagtaaccaagct

SEQ ID NO: 654153 - DNA, 33 bp, Homo sapien
ggcatgagagtgattacgtagggcctattataa

SEQ ID NO: 654154 - DNA, 33 bp, Homo sapien
ggcatgagagtgattatgtagggcctattataa

SEQ ID NO: 654155 - DNA, 33 bp, Homo sapien
tttaaaatcagaacaacaaaaggtggttattta

SEQ ID NO: 654156 - DNA, 33 bp, Homo sapien
tttaaaatcagaacaagaaaaggtggttattta

SEQ ID NO: 654157 - DNA, 33 bp, Homo sapien
aaaccactcaggagagcccttaactatttgttc

SEQ ID NO: 654158 - DNA, 33 bp, Homo sapien
aaaccactcaggagaggccttaactatttgttc

SEQ ID NO: 654159 - DNA, 33 bp, Homo sapien
tatttcctgattgatacagtgagatttcacata

SEQ ID NO: 654160 - DNA, 33 bp, Homo sapien
tatttcctgattgatatagtgagatttcacata

SEQ ID NO: 654161 - DNA, 33 bp, Homo sapien
aaataggtatctgtaacctggacttgaacacta

SEQ ID NO: 654162 - DNA, 33 bp, Homo sapien
aaataggtatctgtaatctggacttgaacacta

SEQ ID NO: 654163 - DNA, 33 bp, Homo sapien
caaacatgacttttggcattcagtctgttcctc

SEQ ID NO: 654164 - DNA, 33 bp, Homo sapien
caaacatgacttttgggattcagtctgttcctc

SEQ ID NO: 654165 - DNA, 33 bp, Homo sapien
ttggctttattatagacggtctttgctcctcct

SEQ ID NO: 654166 - DNA, 33 bp, Homo sapien
ttggctttattatagatggtctttgctcctcct

SEQ ID NO: 654167 - DNA, 33 bp, Homo sapien
agttaaagcagcttaaccataccagctgagaaa

SEQ ID NO: 654168 - DNA, 33 bp, Homo sapien
agttaaagcagcttaatcataccagctgagaaa

SEQ ID NO: 654169 - DNA, 33 bp, Homo sapien
ataggcctctaggaaaacagtgaatacataggg

SEQ ID NO: 654170 - DNA, 33 bp, Homo sapien
ataggcctctaggaaaccagtgaatacataggg

SEQ ID NO: 654171 - DNA, 33 bp, Homo sapien
tgttggatgatccagaagttaagaagtgataat

SEQ ID NO: 654172 - DNA, 33 bp, Homo sapien
tgttggatgatccagaggttaagaagtgataat

SEQ ID NO: 654173 - DNA, 33 bp, Homo sapien
caattacactgtaaaccgcttgagtccataaca

SEQ ID NO: 654174 - DNA, 33 bp, Homo sapien
caattacactgtaaactgcttgagtccataaca

SEQ ID NO: 654175 - DNA, 33 bp, Homo sapien
catggcggtacagataacttttcaaggtaataa

SEQ ID NO: 654176 - DNA, 33 bp, Homo sapien
catggcggtacagatatcttttcaaggtaataa

SEQ ID NO: 654177 - DNA, 33 bp, Homo sapien
atgcaaacacgaaggacataccccatggccatc

SEQ ID NO: 654178 - DNA, 33 bp, Homo sapien
atgcaaacacgaaggagataccccatggccatc

SEQ ID NO: 654179 - DNA, 33 bp, Homo sapien
gccaattaatcaaaggaaacagtatcatcctct

SEQ ID NO: 654180 - DNA, 33 bp, Homo sapien
gccaattaatcaaaggcaacagtatcatcctct

SEQ ID NO: 654181 - DNA, 33 bp, Homo sapien
attagccagggaccaaattactactgagcgata

SEQ ID NO: 654182 - DNA, 33 bp, Homo sapien
attagccagggaccaacttactactgagcgata

SEQ ID NO: 654183 - DNA, 33 bp, Homo sapien
taggatgaaaataaaagtgttctgtacatcttt

SEQ ID NO: 654184 - DNA, 33 bp, Homo sapien
taggatgaaaataaaattgttctgtacatcttt

SEQ ID NO: 654185 - DNA, 33 bp, Homo sapien
atgaagccttgatctcaacactgtggagtgcct

SEQ ID NO: 654186 - DNA, 33 bp, Homo sapien
atgaagccttgatctcgacactgtggagtgcct

SEQ ID NO: 654187 - DNA, 33 bp, Homo sapien
aagaactttatccttacatgcatcaggaaacaa

SEQ ID NO: 654188 - DNA, 33 bp, Homo sapien
aagaactttatccttatatgcatcaggaaacaa

SEQ ID NO: 654189 - DNA, 33 bp, Homo sapien
gctactaatcctataaatcctatacatctatta

SEQ ID NO: 654190 - DNA, 33 bp, Homo sapien
gctactaatcctataactcctatacatctatta

SEQ ID NO: 654191 - DNA, 33 bp, Homo sapien
tacctgtttgagcatagtagtctaaataaaagc

SEQ ID NO: 654192 - DNA, 33 bp, Homo sapien
tacctgtttgagcatattagtctaaataaaagc

SEQ ID NO: 654193 - DNA, 33 bp, Homo sapien
ctaaccttgaaagtgacatgccatatgatattg

SEQ ID NO: 654194 - DNA, 33 bp, Homo sapien
ctaaccttgaaagtgatatgccatatgatattg

SEQ ID NO: 654195 - DNA, 33 bp, Homo sapien
tctcatgagattgcaaccaaaccgtcagctgtg

SEQ ID NO: 654196 - DNA, 33 bp, Homo sapien
tctcatgagattgcaagcaaaccgtcagctgtg

SEQ ID NO: 654197 - DNA, 33 bp, Homo sapien
tgctaccagatgattacgaattaggacttattg

SEQ ID NO: 654198 - DNA, 33 bp, Homo sapien
tgctaccagatgattatgaattaggacttattg

SEQ ID NO: 654199 - DNA, 33 bp, Homo sapien
attgtattatgttcaactgtaatgcaaaaaatg

SEQ ID NO: 654200 - DNA, 33 bp, Homo sapien
attgtattatgttcaattgtaatgcaaaaaatg

SEQ ID NO: 654201 - DNA, 33 bp, Homo sapien
aacaatatagccactacctttatcaagagctta

SEQ ID NO: 654202 - DNA, 33 bp, Homo sapien
aacaatatagccactatctttatcaagagctta

SEQ ID NO: 654203 - DNA, 33 bp, Homo sapien
atttgacaataaaggcaagatctaattacattt

SEQ ID NO: 654204 - DNA, 33 bp, Homo sapien
atttgacaataaaggctagatctaattacattt

SEQ ID NO: 654205 - DNA, 33 bp, Homo sapien
tcagtttgcatcagtaagaaactaaactacaaa

SEQ ID NO: 654206 - DNA, 33 bp, Homo sapien
tcagtttgcatcagtaggaaactaaactacaaa

SEQ ID NO: 654207 - DNA, 33 bp, Homo sapien
gaccccggaggcttcaatatcaaccaggaaaat

SEQ ID NO: 654208 - DNA, 33 bp, Homo sapien
gaccccggaggcttcagtatcaaccaggaaaat

SEQ ID NO: 654209 - DNA, 33 bp, Homo sapien
aaggtacctgacatgagggatcctttgttctca

SEQ ID NO: 654210 - DNA, 33 bp, Homo sapien
aaggtacctgacatgatggatcctttgttctca

SEQ ID NO: 654211 - DNA, 33 bp, Homo sapien
atgatgggctttaaacaccttaaaatatttgac

SEQ ID NO: 654212 - DNA, 33 bp, Homo sapien
atgatgggctttaaacgccttaaaatatttgac

SEQ ID NO: 654213 - DNA, 33 bp, Homo sapien
ctgaatgcctcttagcaccaaatatggctccaa

SEQ ID NO: 654214 - DNA, 33 bp, Homo sapien
ctgaatgcctcttagccccaaatatggctccaa

SEQ ID NO: 654215 - DNA, 33 bp, Homo sapien
tttagaagaagaaccaaagtaaagtggaagatg

SEQ ID NO: 654216 - DNA, 33 bp, Homo sapien
tttagaagaagaaccagagtaaagtggaagatg

SEQ ID NO: 654217 - DNA, 33 bp, Homo sapien
ccattattctgttctgcagctcaaacgtgcttt

SEQ ID NO: 654218 - DNA, 33 bp, Homo sapien
ccattattctgttctggagctcaaacgtgcttt

SEQ ID NO: 654219 - DNA, 33 bp, Homo sapien
gggagcagtgtccagaacaatcctaggcagtac

SEQ ID NO: 654220 - DNA, 33 bp, Homo sapien
gggagcagtgtccagagcaatcctaggcagtac

SEQ ID NO: 654221 - DNA, 33 bp, Homo sapien
caaggcccttgtgccaaatttagttatattttg

SEQ ID NO: 654222 - DNA, 33 bp, Homo sapien
caaggcccttgtgccacatttagttatattttg

SEQ ID NO: 654223 - DNA, 33 bp, Homo sapien
cacctttctctactaaggtacatctttctgaag

SEQ ID NO: 654224 - DNA, 33 bp, Homo sapien
cacctttctctactaatgtacatctttctgaag

SEQ ID NO: 654225 - DNA, 33 bp, Homo sapien
ttagaaattattcccacagttgacctaattcta

SEQ ID NO: 654226 - DNA, 33 bp, Homo sapien
ttagaaattattcccagagttgacctaattcta

SEQ ID NO: 654227 - DNA, 33 bp, Homo sapien
ttcatttatctgaatacgtactgttactccgca

SEQ ID NO: 654228 - DNA, 33 bp, Homo sapien
ttcatttatctgaatatgtactgttactccgca

SEQ ID NO: 654229 - DNA, 33 bp, Homo sapien
cagtgctgaatgcctgcagttgcttataacaat

SEQ ID NO: 654230 - DNA, 33 bp, Homo sapien
cagtgctgaatgcctgtagttgcttataacaat

SEQ ID NO: 654231 - DNA, 33 bp, Homo sapien
ttatgtagagtattcacgtgctctgtattacac

SEQ ID NO: 654232 - DNA, 33 bp, Homo sapien
ttatgtagagtattcatgtgctctgtattacac

SEQ ID NO: 654233 - DNA, 33 bp, Homo sapien
ctggtagattccaagaacattcatgacacctct

SEQ ID NO: 654234 - DNA, 33 bp, Homo sapien
ctggtagattccaagagcattcatgacacctct

SEQ ID NO: 654235 - DNA, 33 bp, Homo sapien
tctagattaggctctaagtttcatgagtgctag

SEQ ID NO: 654236 - DNA, 33 bp, Homo sapien
tctagattaggctctaggtttcatgagtgctag

SEQ ID NO: 654237 - DNA, 33 bp, Homo sapien
acctaccctgaaaaaactgagtcccatctttgg

SEQ ID NO: 654238 - DNA, 33 bp, Homo sapien
acctaccctgaaaaaattgagtcccatctttgg

SEQ ID NO: 654239 - DNA, 33 bp, Homo sapien
tttggccttattgatacattttgactttaggca

SEQ ID NO: 654240 - DNA, 33 bp, Homo sapien
tttggccttattgatagattttgactttaggca

SEQ ID NO: 654241 - DNA, 33 bp, Homo sapien
acatcagagtagagagaaaaataggcaaatgag

SEQ ID NO: 654242 - DNA, 33 bp, Homo sapien
acatcagagtagagaggaaaataggcaaatgag

SEQ ID NO: 654243 - DNA, 33 bp, Homo sapien
actttagtacagatacaaaagttgaactcgaga

SEQ ID NO: 654244 - DNA, 33 bp, Homo sapien
actttagtacagatacgaaagttgaactcgaga

SEQ ID NO: 654245 - DNA, 33 bp, Homo sapien
ttcagggtagaagaaacgattagagaaggtcct

SEQ ID NO: 654246 - DNA, 33 bp, Homo sapien
ttcagggtagaagaaatgattagagaaggtcct

SEQ ID NO: 654247 - DNA, 33 bp, Homo sapien
ctgtttttaacaagcacgagagattcaaaaacc

SEQ ID NO: 654248 - DNA, 33 bp, Homo sapien
ctgtttttaacaagcatgagagattcaaaaacc

SEQ ID NO: 654249 - DNA, 33 bp, Homo sapien
caaacaaaaaaaacaacgcttgcagtaagccag

SEQ ID NO: 654250 - DNA, 33 bp, Homo sapien
caaacaaaaaaaacaatgcttgcagtaagccag

SEQ ID NO: 654251 - DNA, 33 bp, Homo sapien
tctgttagcacatctcgctgaatgaacccagtt

SEQ ID NO: 654252 - DNA, 33 bp, Homo sapien
tctgttagcacatctctctgaatgaacccagtt

SEQ ID NO: 654253 - DNA, 33 bp, Homo sapien
gagagtctacaaaccaatcagcaggagaatttt

SEQ ID NO: 654254 - DNA, 33 bp, Homo sapien
gagagtctacaaaccagtcagcaggagaatttt

SEQ ID NO: 654255 - DNA, 33 bp, Homo sapien
cactgtagccagcttaaagatttcattcattca

SEQ ID NO: 654256 - DNA, 33 bp, Homo sapien
cactgtagccagcttagagatttcattcattca

SEQ ID NO: 654257 - DNA, 33 bp, Homo sapien
aaaaattagctgtttcaattagcaacatcaaga

SEQ ID NO: 654258 - DNA, 33 bp, Homo sapien
aaaaattagctgtttccattagcaacatcaaga

SEQ ID NO: 654259 - DNA, 33 bp, Homo sapien
aaattttctctctgcaaccattcaatttgaaga

SEQ ID NO: 654260 - DNA, 33 bp, Homo sapien
aaattttctctctgcagccattcaatttgaaga

SEQ ID NO: 654261 - DNA, 33 bp, Homo sapien
tggaagggaagttgaggaaagtctgttacctag

SEQ ID NO: 654262 - DNA, 33 bp, Homo sapien
tggaagggaagttgagtaaagtctgttacctag

SEQ ID NO: 654263 - DNA, 33 bp, Homo sapien
gtccagtctataagtaaaacttcctttgtatta

SEQ ID NO: 654264 - DNA, 33 bp, Homo sapien
gtccagtctataagtacaacttcctttgtatta

SEQ ID NO: 654265 - DNA, 33 bp, Homo sapien
taaatgtctcactcgaccccaaatctcatgaat

SEQ ID NO: 654266 - DNA, 33 bp, Homo sapien
taaatgtctcactcgatcccaaatctcatgaat

SEQ ID NO: 654267 - DNA, 33 bp, Homo sapien
cagagacgctcctaacaagagctgacacaagga

SEQ ID NO: 654268 - DNA, 33 bp, Homo sapien
cagagacgctcctaacgagagctgacacaagga

SEQ ID NO: 654269 - DNA, 33 bp, Homo sapien
attcataagattacaaaagcctctagagatttt

SEQ ID NO: 654270 - DNA, 33 bp, Homo sapien
attcataagattacaagagcctctagagatttt

SEQ ID NO: 654271 - DNA, 33 bp, Homo sapien
cttttaactagtggcaaataaattcttcattaa

SEQ ID NO: 654272 - DNA, 33 bp, Homo sapien
cttttaactagtggcacataaattcttcattaa

SEQ ID NO: 654273 - DNA, 33 bp, Homo sapien
tgcagcaccatttggccattgacctaatcaaac

SEQ ID NO: 654274 - DNA, 33 bp, Homo sapien
tgcagcaccatttggctattgacctaatcaaac

SEQ ID NO: 654275 - DNA, 33 bp, Homo sapien
aatctatctttgtagaagttttcaaaattgagc

SEQ ID NO: 654276 - DNA, 33 bp, Homo sapien
aatctatctttgtagaggttttcaaaattgagc

SEQ ID NO: 654277 - DNA, 33 bp, Homo sapien
ctatcaccaagaataacagcagtcagagaaagc

SEQ ID NO: 654278 - DNA, 33 bp, Homo sapien
ctatcaccaagaataagagcagtcagagaaagc

SEQ ID NO: 654279 - DNA, 33 bp, Homo sapien
agggactggttagaaactcacttcctcatatag

SEQ ID NO: 654280 - DNA, 33 bp, Homo sapien
agggactggttagaaagtcacttcctcatatag

SEQ ID NO: 654281 - DNA, 33 bp, Homo sapien
gagcgaaagaagccaccataatacagcaatgat

SEQ ID NO: 654282 - DNA, 33 bp, Homo sapien
gagcgaaagaagccacgataatacagcaatgat

SEQ ID NO: 654283 - DNA, 33 bp, Homo sapien
ctcctggagttattgaaagaataaaatgaggag

SEQ ID NO: 654284 - DNA, 33 bp, Homo sapien
ctcctggagttattgagagaataaaatgaggag

SEQ ID NO: 654285 - DNA, 33 bp, Homo sapien
gcgaagataccctcacaaagaggccactgaaag

SEQ ID NO: 654286 - DNA, 33 bp, Homo sapien
gcgaagataccctcaccaagaggccactgaaag

SEQ ID NO: 654287 - DNA, 33 bp, Homo sapien
atagttataatcattaccggatattcacctctg

SEQ ID NO: 654288 - DNA, 33 bp, Homo sapien
atagttataatcattagcggatattcacctctg

SEQ ID NO: 654289 - DNA, 33 bp, Homo sapien
atgtgacttgtgtaccaataatctatctatcac

SEQ ID NO: 654290 - DNA, 33 bp, Homo sapien
atgtgacttgtgtaccgataatctatctatcac

SEQ ID NO: 654291 - DNA, 33 bp, Homo sapien
attttcacgtatgatacatttatcaggacataa

SEQ ID NO: 654292 - DNA, 33 bp, Homo sapien
attttcacgtatgatagatttatcaggacataa

SEQ ID NO: 654293 - DNA, 33 bp, Homo sapien
cacagtttggttaaaaagttcaccgcttcaccg

SEQ ID NO: 654294 - DNA, 33 bp, Homo sapien
cacagtttggttaaaaggttcaccgcttcaccg

SEQ ID NO: 654295 - DNA, 33 bp, Homo sapien
actgagaaaatattataaaatgtccaaatcaat

SEQ ID NO: 654296 - DNA, 33 bp, Homo sapien
actgagaaaatattattaaatgtccaaatcaat

SEQ ID NO: 654297 - DNA, 33 bp, Homo sapien
gattataatttttgccacctatagcaacccaag

SEQ ID NO: 654298 - DNA, 33 bp, Homo sapien
gattataatttttgccgcctatagcaacccaag

SEQ ID NO: 654299 - DNA, 33 bp, Homo sapien
ctaatcaatgtgtgaaaaatgggtaatgctcac

SEQ ID NO: 654300 - DNA, 33 bp, Homo sapien
ctaatcaatgtgtgaataatgggtaatgctcac

SEQ ID NO: 654301 - DNA, 33 bp, Homo sapien
gctgcaatctaactagcactttcctccttcagc

SEQ ID NO: 654302 - DNA, 33 bp, Homo sapien
gctgcaatctaactagtactttcctccttcagc

SEQ ID NO: 654303 - DNA, 33 bp, Homo sapien
gaggtaacctcatcccaaattgagacgtgaggt

SEQ ID NO: 654304 - DNA, 33 bp, Homo sapien
gaggtaacctcatcccgaattgagacgtgaggt

SEQ ID NO: 654305 - DNA, 33 bp, Homo sapien
tatgtcaaaacaacaccgactagaatacgtgaa

SEQ ID NO: 654306 - DNA, 33 bp, Homo sapien
tatgtcaaaacaacactgactagaatacgtgaa

SEQ ID NO: 654307 - DNA, 33 bp, Homo sapien
aaagacattccaataaaatacagggtgacttac

SEQ ID NO: 654308 - DNA, 33 bp, Homo sapien
aaagacattccaataacatacagggtgacttac

SEQ ID NO: 654309 - DNA, 33 bp, Homo sapien
ccccttggcatgaaaagcctgggcatcagcaag

SEQ ID NO: 654310 - DNA, 33 bp, Homo sapien
ccccttggcatgaaaatcctgggcatcagcaag

SEQ ID NO: 654311 - DNA, 33 bp, Homo sapien
ctaaagactcattcataaaacagtacttcaatg

SEQ ID NO: 654312 - DNA, 33 bp, Homo sapien
ctaaagactcattcatgaaacagtacttcaatg

SEQ ID NO: 654313 - DNA, 33 bp, Homo sapien
atccctgaccgaggccaatgaagaattctgtca

SEQ ID NO: 654314 - DNA, 33 bp, Homo sapien
atccctgaccgaggccgatgaagaattctgtca

SEQ ID NO: 654315 - DNA, 33 bp, Homo sapien
gctgtggctgtcgatacatagttgcatttatgt

SEQ ID NO: 654316 - DNA, 33 bp, Homo sapien
gctgtggctgtcgatatatagttgcatttatgt

SEQ ID NO: 654317 - DNA, 33 bp, Homo sapien
atgactacaagttcggaaagactgattaacttg

SEQ ID NO: 654318 - DNA, 33 bp, Homo sapien
atgactacaagttcgggaagactgattaacttg

SEQ ID NO: 654319 - DNA, 33 bp, Homo sapien
tgtagtcataaaataactgattgcccaaagtgg

SEQ ID NO: 654320 - DNA, 33 bp, Homo sapien
tgtagtcataaaataattgattgcccaaagtgg

SEQ ID NO: 654321 - DNA, 33 bp, Homo sapien
gagttgccccttttcaataaatcctggttttgt

SEQ ID NO: 654322 - DNA, 33 bp, Homo sapien
gagttgccccttttcagtaaatcctggttttgt

SEQ ID NO: 654323 - DNA, 33 bp, Homo sapien
gttgttcaatcttaagaaattgttggttattgt

SEQ ID NO: 654324 - DNA, 33 bp, Homo sapien
gttgttcaatcttaagtaattgttggttattgt

SEQ ID NO: 654325 - DNA, 33 bp, Homo sapien
agtctatctaactccaaagtcaatgcttttctg

SEQ ID NO: 654326 - DNA, 33 bp, Homo sapien
agtctatctaactccagagtcaatgcttttctg

SEQ ID NO: 654327 - DNA, 33 bp, Homo sapien
acagcaaggaatagaacgtatatctcctgactg

SEQ ID NO: 654328 - DNA, 33 bp, Homo sapien
acagcaaggaatagaatgtatatctcctgactg

SEQ ID NO: 654329 - DNA, 33 bp, Homo sapien
gtgttgggagtgctaaaaagtgtctatcatgtg

SEQ ID NO: 654330 - DNA, 33 bp, Homo sapien
gtgttgggagtgctaagaagtgtctatcatgtg

SEQ ID NO: 654331 - DNA, 33 bp, Homo sapien
gtctggtgtgggcaaaatgtagtttccagccca

SEQ ID NO: 654332 - DNA, 33 bp, Homo sapien
gtctggtgtgggcaaagtgtagtttccagccca

SEQ ID NO: 654333 - DNA, 33 bp, Homo sapien
gctcacccttccagtcaccattagtgctatttt

SEQ ID NO: 654334 - DNA, 33 bp, Homo sapien
gctcacccttccagtcgccattagtgctatttt

SEQ ID NO: 654335 - DNA, 33 bp, Homo sapien
ctgcatagtgagactgaatgtttttcaggagtt

SEQ ID NO: 654336 - DNA, 33 bp, Homo sapien
ctgcatagtgagactgcatgtttttcaggagtt

SEQ ID NO: 654337 - DNA, 33 bp, Homo sapien
taagattatattgtaaagggagtcagacaatgt

SEQ ID NO: 654338 - DNA, 33 bp, Homo sapien
taagattatattgtaaggggagtcagacaatgt

SEQ ID NO: 654339 - DNA, 33 bp, Homo sapien
gagataactaaagatcactgtcaccttatacaa

SEQ ID NO: 654340 - DNA, 33 bp, Homo sapien
gagataactaaagatcgctgtcaccttatacaa

SEQ ID NO: 654341 - DNA, 33 bp, Homo sapien
ctgatgcataattacactaaagatcataattat

SEQ ID NO: 654342 - DNA, 33 bp, Homo sapien
ctgatgcataattacagtaaagatcataattat

SEQ ID NO: 654343 - DNA, 33 bp, Homo sapien
acacggaggattggaacctgaattgtcacaaat

SEQ ID NO: 654344 - DNA, 33 bp, Homo sapien
acacggaggattggaatctgaattgtcacaaat

SEQ ID NO: 654345 - DNA, 33 bp, Homo sapien
gaagctcatttgtccactgataccgggattcac

SEQ ID NO: 654346 - DNA, 33 bp, Homo sapien
gaagctcatttgtccattgataccgggattcac

SEQ ID NO: 654347 - DNA, 33 bp, Homo sapien
atgtgcaaatgcatcaataagtgtaagcacata

SEQ ID NO: 654348 - DNA, 33 bp, Homo sapien
atgtgcaaatgcatcagtaagtgtaagcacata

SEQ ID NO: 654349 - DNA, 33 bp, Homo sapien
catgattttccacttccatgataataatgatgg

SEQ ID NO: 654350 - DNA, 33 bp, Homo sapien
catgattttccacttcgatgataataatgatgg

SEQ ID NO: 654351 - DNA, 33 bp, Homo sapien
aaggacattttccctcaaaatttcagataaaaa

SEQ ID NO: 654352 - DNA, 33 bp, Homo sapien
aaggacattttccctcgaaatttcagataaaaa

SEQ ID NO: 654353 - DNA, 33 bp, Homo sapien
aagcaaaccagtgcaaccctaagcaaacgtata

SEQ ID NO: 654354 - DNA, 33 bp, Homo sapien
aagcaaaccagtgcaatcctaagcaaacgtata

SEQ ID NO: 654355 - DNA, 33 bp, Homo sapien
aaaaaaaatttcaacaacaagcttcacgagctt

SEQ ID NO: 654356 - DNA, 33 bp, Homo sapien
aaaaaaaatttcaacatcaagcttcacgagctt

SEQ ID NO: 654357 - DNA, 33 bp, Homo sapien
ggaaaaatgaagaaaaataaggcaggaggactg

SEQ ID NO: 654358 - DNA, 33 bp, Homo sapien
ggaaaaatgaagaaaagtaaggcaggaggactg

SEQ ID NO: 654359 - DNA, 33 bp, Homo sapien
aagacccatgtgagaaagcagtccggccacttc

SEQ ID NO: 654360 - DNA, 33 bp, Homo sapien
aagacccatgtgagaacgcagtccggccacttc

SEQ ID NO: 654361 - DNA, 33 bp, Homo sapien
tataagtgtatatgcaaccaaaataggatttca

SEQ ID NO: 654362 - DNA, 33 bp, Homo sapien
tataagtgtatatgcacccaaaataggatttca

SEQ ID NO: 654363 - DNA, 33 bp, Homo sapien
gatattctagttttatcaaagcaaagtctggtt

SEQ ID NO: 654364 - DNA, 33 bp, Homo sapien
gatattctagttttatgaaagcaaagtctggtt

SEQ ID NO: 654365 - DNA, 33 bp, Homo sapien
atcattcagaggtcaccggatactacataaagt

SEQ ID NO: 654366 - DNA, 33 bp, Homo sapien
atcattcagaggtcactggatactacataaagt

SEQ ID NO: 654367 - DNA, 33 bp, Homo sapien
atttccttagccaccactgaatcctacgttctt

SEQ ID NO: 654368 - DNA, 33 bp, Homo sapien
atttccttagccaccattgaatcctacgttctt

SEQ ID NO: 654369 - DNA, 33 bp, Homo sapien
atcctttgtacttccaagttgagaaaagagttg

SEQ ID NO: 654370 - DNA, 33 bp, Homo sapien
atcctttgtacttccaggttgagaaaagagttg

SEQ ID NO: 654371 - DNA, 33 bp, Homo sapien
atggaaagatggaccactattgaatcctttgta

SEQ ID NO: 654372 - DNA, 33 bp, Homo sapien
atggaaagatggaccattattgaatcctttgta

SEQ ID NO: 654373 - DNA, 33 bp, Homo sapien
aggtactgactgtagccagaaaggcatttaaca

SEQ ID NO: 654374 - DNA, 33 bp, Homo sapien
aggtactgactgtagctagaaaggcatttaaca

SEQ ID NO: 654375 - DNA, 33 bp, Homo sapien
accagtgggttggtgccattaaggaaggaactg

SEQ ID NO: 654376 - DNA, 33 bp, Homo sapien
accagtgggttggtgctattaaggaaggaactg

SEQ ID NO: 654377 - DNA, 33 bp, Homo sapien
ccatgcagatattttaacaccaactttttagta

SEQ ID NO: 654378 - DNA, 33 bp, Homo sapien
ccatgcagatattttagcaccaactttttagta

SEQ ID NO: 654379 - DNA, 33 bp, Homo sapien
atctctttctgtttaacaataagtgacctcaag

SEQ ID NO: 654380 - DNA, 33 bp, Homo sapien
atctctttctgtttaataataagtgacctcaag

SEQ ID NO: 654381 - DNA, 33 bp, Homo sapien
tatcagctaaatgtcaagtactctgttgggcac

SEQ ID NO: 654382 - DNA, 33 bp, Homo sapien
tatcagctaaatgtcatgtactctgttgggcac

SEQ ID NO: 654383 - DNA, 33 bp, Homo sapien
ctggaagtcatcaagaccttggagagtttataa

SEQ ID NO: 654384 - DNA, 33 bp, Homo sapien
ctggaagtcatcaagagcttggagagtttataa

SEQ ID NO: 654385 - DNA, 33 bp, Homo sapien
ttgcattgagtaaagacgctgatgaaaagctaa

SEQ ID NO: 654386 - DNA, 33 bp, Homo sapien
ttgcattgagtaaagatgctgatgaaaagctaa

SEQ ID NO: 654387 - DNA, 33 bp, Homo sapien
tatcaggatagttaaaagtattgtagaacacaa

SEQ ID NO: 654388 - DNA, 33 bp, Homo sapien
tatcaggatagttaaaggtattgtagaacacaa

SEQ ID NO: 654389 - DNA, 33 bp, Homo sapien
tattttaagagcatacaatgatggaaaagatta

SEQ ID NO: 654390 - DNA, 33 bp, Homo sapien
tattttaagagcatactatgatggaaaagatta

SEQ ID NO: 654391 - DNA, 33 bp, Homo sapien
gcctttaaatctcaaaatagagtgtgcttgata

SEQ ID NO: 654392 - DNA, 33 bp, Homo sapien
gcctttaaatctcaaagtagagtgtgcttgata

SEQ ID NO: 654393 - DNA, 33 bp, Homo sapien
ggattgctagggaaaaagaggaaacaggacaat

SEQ ID NO: 654394 - DNA, 33 bp, Homo sapien
ggattgctagggaaaacgaggaaacaggacaat

SEQ ID NO: 654395 - DNA, 33 bp, Homo sapien
aagtttaggaggaacgcatctgtaccatgtggg

SEQ ID NO: 654396 - DNA, 33 bp, Homo sapien
aagtttaggaggaacgtatctgtaccatgtggg

SEQ ID NO: 654397 - DNA, 33 bp, Homo sapien
tagtgtaaccttcataagttttgctgtccttga

SEQ ID NO: 654398 - DNA, 33 bp, Homo sapien
tagtgtaaccttcatatgttttgctgtccttga

SEQ ID NO: 654399 - DNA, 33 bp, Homo sapien
gttagagcttagaggccatccagttccctccac

SEQ ID NO: 654400 - DNA, 33 bp, Homo sapien
gttagagcttagaggctatccagttccctccac

SEQ ID NO: 654401 - DNA, 33 bp, Homo sapien
ctatgaggaggcaacgacattatcctagttcac

SEQ ID NO: 654402 - DNA, 33 bp, Homo sapien
ctatgaggaggcaacggcattatcctagttcac

SEQ ID NO: 654403 - DNA, 33 bp, Homo sapien
tctaaggttagaaatgccaagtaactggcaaca

SEQ ID NO: 654404 - DNA, 33 bp, Homo sapien
tctaaggttagaaatgtcaagtaactggcaaca

SEQ ID NO: 654405 - DNA, 33 bp, Homo sapien
aaatatgtttgttgaaattaaagtgatttaatg

SEQ ID NO: 654406 - DNA, 33 bp, Homo sapien
aaatatgtttgttgaatttaaagtgatttaatg

SEQ ID NO: 654407 - DNA, 33 bp, Homo sapien
tccaatttattaaacaacagtgggaaattagct

SEQ ID NO: 654408 - DNA, 33 bp, Homo sapien
tccaatttattaaacatcagtgggaaattagct

SEQ ID NO: 654409 - DNA, 33 bp, Homo sapien
acgttagcatgttaaacttactgttagtcagca

SEQ ID NO: 654410 - DNA, 33 bp, Homo sapien
acgttagcatgttaaagttactgttagtcagca

SEQ ID NO: 654411 - DNA, 33 bp, Homo sapien
aatgcattcccctcttcaagaacagctcctttt

SEQ ID NO: 654412 - DNA, 33 bp, Homo sapien
aatgcattcccctctttaagaacagctcctttt

SEQ ID NO: 654413 - DNA, 33 bp, Homo sapien
gatagctaaagggtacaggatctttctttgtgg

SEQ ID NO: 654414 - DNA, 33 bp, Homo sapien
gatagctaaagggtacgggatctttctttgtgg

SEQ ID NO: 654415 - DNA, 33 bp, Homo sapien
tgttgaatgggaaatcaaataaaaagcaccaag

SEQ ID NO: 654416 - DNA, 33 bp, Homo sapien
tgttgaatgggaaatcgaataaaaagcaccaag

SEQ ID NO: 654417 - DNA, 33 bp, Homo sapien
aagattttgcctggtacgtagaggcttaagatg

SEQ ID NO: 654418 - DNA, 33 bp, Homo sapien
aagattttgcctggtatgtagaggcttaagatg

SEQ ID NO: 654419 - DNA, 33 bp, Homo sapien
gtggcaatttaaacaccagttacatttatgctt

SEQ ID NO: 654420 - DNA, 33 bp, Homo sapien
gtggcaatttaaacactagttacatttatgctt

SEQ ID NO: 654421 - DNA, 33 bp, Homo sapien
gaaaaaaagggcacaaagcactattaatgctgt

SEQ ID NO: 654422 - DNA, 33 bp, Homo sapien
gaaaaaaagggcacaaggcactattaatgctgt

SEQ ID NO: 654423 - DNA, 33 bp, Homo sapien
ggagtacaaacagggaaaccacaagcatgacat

SEQ ID NO: 654424 - DNA, 33 bp, Homo sapien
ggagtacaaacagggacaccacaagcatgacat

SEQ ID NO: 654425 - DNA, 33 bp, Homo sapien
atcttttagggcatcacctgactggctccaaga

SEQ ID NO: 654426 - DNA, 33 bp, Homo sapien
atcttttagggcatcatctgactggctccaaga

SEQ ID NO: 654427 - DNA, 33 bp, Homo sapien
gctcaaaagatttccactcacagagggaatgtg

SEQ ID NO: 654428 - DNA, 33 bp, Homo sapien
gctcaaaagatttccattcacagagggaatgtg

SEQ ID NO: 654429 - DNA, 33 bp, Homo sapien
tgcatggccctacctagctcaatttaaatgtca

SEQ ID NO: 654430 - DNA, 33 bp, Homo sapien
tgcatggccctacctatctcaatttaaatgtca

SEQ ID NO: 654431 - DNA, 33 bp, Homo sapien
aaagggaaaacaactccatttggaatatgaatc

SEQ ID NO: 654432 - DNA, 33 bp, Homo sapien
aaagggaaaacaactcgatttggaatatgaatc

SEQ ID NO: 654433 - DNA, 33 bp, Homo sapien
aaatgactctacaacagcatagaaaggtaaagt

SEQ ID NO: 654434 - DNA, 33 bp, Homo sapien
aaatgactctacaacatcatagaaaggtaaagt

SEQ ID NO: 654435 - DNA, 33 bp, Homo sapien
gcttggcaaataaagagacttagatatgacagc

SEQ ID NO: 654436 - DNA, 33 bp, Homo sapien
gcttggcaaataaagatacttagatatgacagc

SEQ ID NO: 654437 - DNA, 33 bp, Homo sapien
ggctccatgcagatggaaaacatgtgttaaggc

SEQ ID NO: 654438 - DNA, 33 bp, Homo sapien
ggctccatgcagatgggaaacatgtgttaaggc

SEQ ID NO: 654439 - DNA, 33 bp, Homo sapien
gacagaccaatacaacaaagcataaagaatgcc

SEQ ID NO: 654440 - DNA, 33 bp, Homo sapien
gacagaccaatacaacgaagcataaagaatgcc

SEQ ID NO: 654441 - DNA, 33 bp, Homo sapien
ggtattatgtccttcaaacttgattggaatttt

SEQ ID NO: 654442 - DNA, 33 bp, Homo sapien
ggtattatgtccttcacacttgattggaatttt

SEQ ID NO: 654443 - DNA, 33 bp, Homo sapien
ctttatgaaagtctgagggctttattactgcct

SEQ ID NO: 654444 - DNA, 33 bp, Homo sapien
ctttatgaaagtctgatggctttattactgcct

SEQ ID NO: 654445 - DNA, 33 bp, Homo sapien
atgttacctctgattaagaagcctatgtttttc

SEQ ID NO: 654446 - DNA, 33 bp, Homo sapien
atgttacctctgattaggaagcctatgtttttc

SEQ ID NO: 654447 - DNA, 33 bp, Homo sapien
gtgtggtttcggaaaaaaatcagagagaaaatg

SEQ ID NO: 654448 - DNA, 33 bp, Homo sapien
gtgtggtttcggaaaagaatcagagagaaaatg

SEQ ID NO: 654449 - DNA, 33 bp, Homo sapien
cctaagggcatagttaccatcacttttctggtc

SEQ ID NO: 654450 - DNA, 33 bp, Homo sapien
cctaagggcatagttagcatcacttttctggtc

SEQ ID NO: 654451 - DNA, 33 bp, Homo sapien
cactgcccttactataacccatggcattaaccc

SEQ ID NO: 654452 - DNA, 33 bp, Homo sapien
cactgcccttactataccccatggcattaaccc

SEQ ID NO: 654453 - DNA, 33 bp, Homo sapien
tacacatttggtgcaaaagtccacaattccatg

SEQ ID NO: 654454 - DNA, 33 bp, Homo sapien
tacacatttggtgcaacagtccacaattccatg

SEQ ID NO: 654455 - DNA, 33 bp, Homo sapien
tgggatggattgattccacatacgggggttctt

SEQ ID NO: 654456 - DNA, 33 bp, Homo sapien
tgggatggattgattctacatacgggggttctt

SEQ ID NO: 654457 - DNA, 33 bp, Homo sapien
acaatactccatgaaaattaggcagtggtttac

SEQ ID NO: 654458 - DNA, 33 bp, Homo sapien
acaatactccatgaaagttaggcagtggtttac

SEQ ID NO: 654459 - DNA, 33 bp, Homo sapien
gattaaaaaaaaattcaattctggctatgctgg

SEQ ID NO: 654460 - DNA, 33 bp, Homo sapien
gattaaaaaaaaattctattctggctatgctgg

SEQ ID NO: 654461 - DNA, 33 bp, Homo sapien
aaagaggaaaatcaccacatgggtttatacagg

SEQ ID NO: 654462 - DNA, 33 bp, Homo sapien
aaagaggaaaatcaccgcatgggtttatacagg

SEQ ID NO: 654463 - DNA, 33 bp, Homo sapien
aagatgtggaaacttccaataattagccactga

SEQ ID NO: 654464 - DNA, 33 bp, Homo sapien
aagatgtggaaacttctaataattagccactga

SEQ ID NO: 654465 - DNA, 33 bp, Homo sapien
aattaattctcatgcacactgttattaactcta

SEQ ID NO: 654466 - DNA, 33 bp, Homo sapien
aattaattctcatgcatactgttattaactcta

SEQ ID NO: 654467 - DNA, 33 bp, Homo sapien
caacttcttgctagcacgataatctacaataac

SEQ ID NO: 654468 - DNA, 33 bp, Homo sapien
caacttcttgctagcatgataatctacaataac

SEQ ID NO: 654469 - DNA, 33 bp, Homo sapien
tagcagaattatattccattgtacctctcatta

SEQ ID NO: 654470 - DNA, 33 bp, Homo sapien
tagcagaattatattcgattgtacctctcatta

SEQ ID NO: 654471 - DNA, 33 bp, Homo sapien
acaagcaattgatagaagcaaatttagaaagtt

SEQ ID NO: 654472 - DNA, 33 bp, Homo sapien
acaagcaattgatagaggcaaatttagaaagtt

SEQ ID NO: 654473 - DNA, 33 bp, Homo sapien
agcactggcagcgcaaatcattggtaattcact

SEQ ID NO: 654474 - DNA, 33 bp, Homo sapien
agcactggcagcgcaactcattggtaattcact

SEQ ID NO: 654475 - DNA, 33 bp, Homo sapien
gtacagatcttccctaaggctgtgaatgacaag

SEQ ID NO: 654476 - DNA, 33 bp, Homo sapien
gtacagatcttccctacggctgtgaatgacaag

SEQ ID NO: 654477 - DNA, 33 bp, Homo sapien
tttatggtgtagtttacactgagcttgcaggcc

SEQ ID NO: 654478 - DNA, 33 bp, Homo sapien
tttatggtgtagtttatactgagcttgcaggcc

SEQ ID NO: 654479 - DNA, 33 bp, Homo sapien
agtgttggaaataatacgctttacaagtttcta

SEQ ID NO: 654480 - DNA, 33 bp, Homo sapien
agtgttggaaataatatgctttacaagtttcta

SEQ ID NO: 654481 - DNA, 33 bp, Homo sapien
agctcattgttacctacgcagatttattcagac

SEQ ID NO: 654482 - DNA, 33 bp, Homo sapien
agctcattgttacctatgcagatttattcagac

SEQ ID NO: 654483 - DNA, 33 bp, Homo sapien
aaaaccatcagccaaaattgaagagctaaaaaa

SEQ ID NO: 654484 - DNA, 33 bp, Homo sapien
aaaaccatcagccaaagttgaagagctaaaaaa

SEQ ID NO: 654485 - DNA, 33 bp, Homo sapien
aatatcataatgtccactcataattgctaaatg

SEQ ID NO: 654486 - DNA, 33 bp, Homo sapien
aatatcataatgtccagtcataattgctaaatg

SEQ ID NO: 654487 - DNA, 33 bp, Homo sapien
atattatgcagtataaagtaatcaggaaaatga

SEQ ID NO: 654488 - DNA, 33 bp, Homo sapien
atattatgcagtataaggtaatcaggaaaatga

SEQ ID NO: 654489 - DNA, 33 bp, Homo sapien
tgagaaccaaccaagaagtcattgcagaactcc

SEQ ID NO: 654490 - DNA, 33 bp, Homo sapien
tgagaaccaaccaagatgtcattgcagaactcc

SEQ ID NO: 654491 - DNA, 33 bp, Homo sapien
aactaaacactcttcactctacattctctttgt

SEQ ID NO: 654492 - DNA, 33 bp, Homo sapien
aactaaacactcttcattctacattctctttgt

SEQ ID NO: 654493 - DNA, 33 bp, Homo sapien
gcaaaggctactgcagaacttccttctccatgt

SEQ ID NO: 654494 - DNA, 33 bp, Homo sapien
gcaaaggctactgcaggacttccttctccatgt

SEQ ID NO: 654495 - DNA, 33 bp, Homo sapien
ccctggctcatgtaaaatccttctagccccact

SEQ ID NO: 654496 - DNA, 33 bp, Homo sapien
ccctggctcatgtaaagtccttctagccccact

SEQ ID NO: 654497 - DNA, 33 bp, Homo sapien
gaactttccaaaaatacagtctttgttctagcc

SEQ ID NO: 654498 - DNA, 33 bp, Homo sapien
gaactttccaaaaatatagtctttgttctagcc

SEQ ID NO: 654499 - DNA, 33 bp, Homo sapien
tgatttaactctcctaacttcaaccaggcattc

SEQ ID NO: 654500 - DNA, 33 bp, Homo sapien
tgatttaactctcctaccttcaaccaggcattc

SEQ ID NO: 654501 - DNA, 33 bp, Homo sapien
gagttaaatcaattgaaaccctagcaagagggg

SEQ ID NO: 654502 - DNA, 33 bp, Homo sapien
gagttaaatcaattgagaccctagcaagagggg

SEQ ID NO: 654503 - DNA, 33 bp, Homo sapien
gactgcagtgctcttcaacatagatcatcatat

SEQ ID NO: 654504 - DNA, 33 bp, Homo sapien
gactgcagtgctcttccacatagatcatcatat

SEQ ID NO: 654505 - DNA, 33 bp, Homo sapien
ttcctctaagctctgccgaggttaaatgtctgg

SEQ ID NO: 654506 - DNA, 33 bp, Homo sapien
ttcctctaagctctgctgaggttaaatgtctgg

SEQ ID NO: 654507 - DNA, 33 bp, Homo sapien
atacagaagcaagaaacagattttctcctctcc

SEQ ID NO: 654508 - DNA, 33 bp, Homo sapien
atacagaagcaagaaagagattttctcctctcc

SEQ ID NO: 654509 - DNA, 33 bp, Homo sapien
acaagacaaatgactgaagattattttaataaa

SEQ ID NO: 654510 - DNA, 33 bp, Homo sapien
acaagacaaatgactggagattattttaataaa

SEQ ID NO: 654511 - DNA, 33 bp, Homo sapien
caggagaaaaagacaaacatgatagaaattgta

SEQ ID NO: 654512 - DNA, 33 bp, Homo sapien
caggagaaaaagacaagcatgatagaaattgta

SEQ ID NO: 654513 - DNA, 33 bp, Homo sapien
gcaaaagatataaacacgacgagaggttccatt

SEQ ID NO: 654514 - DNA, 33 bp, Homo sapien
gcaaaagatataaacatgacgagaggttccatt

SEQ ID NO: 654515 - DNA, 33 bp, Homo sapien
ttttaaaaacaattaaaggatcaagcaataatg

SEQ ID NO: 654516 - DNA, 33 bp, Homo sapien
ttttaaaaacaattaatggatcaagcaataatg

SEQ ID NO: 654517 - DNA, 33 bp, Homo sapien
ggacaaatatctatcacctttttcaggttcaat

SEQ ID NO: 654518 - DNA, 33 bp, Homo sapien
ggacaaatatctatcatctttttcaggttcaat

SEQ ID NO: 654519 - DNA, 33 bp, Homo sapien
ttgtgatcaccatcaacttactcaaaaataaca

SEQ ID NO: 654520 - DNA, 33 bp, Homo sapien
ttgtgatcaccatcaatttactcaaaaataaca

SEQ ID NO: 654521 - DNA, 33 bp, Homo sapien
aaccaaattctagataataagcaacactcaaag

SEQ ID NO: 654522 - DNA, 33 bp, Homo sapien
aaccaaattctagatactaagcaacactcaaag

SEQ ID NO: 654523 - DNA, 33 bp, Homo sapien
gcttctcaaagctgaccaaagtaagtggattga

SEQ ID NO: 654524 - DNA, 33 bp, Homo sapien
gcttctcaaagctgactaaagtaagtggattga

SEQ ID NO: 654525 - DNA, 33 bp, Homo sapien
acaagctccttgaggactaaatttatatctgtt

SEQ ID NO: 654526 - DNA, 33 bp, Homo sapien
acaagctccttgaggattaaatttatatctgtt

SEQ ID NO: 654527 - DNA, 33 bp, Homo sapien
agaggagaaaacacaccatctagaactctgaga

SEQ ID NO: 654528 - DNA, 33 bp, Homo sapien
agaggagaaaacacacgatctagaactctgaga

SEQ ID NO: 654529 - DNA, 33 bp, Homo sapien
ctcctgcttaaatgaacgttggtatgctagatg

SEQ ID NO: 654530 - DNA, 33 bp, Homo sapien
ctcctgcttaaatgaatgttggtatgctagatg

SEQ ID NO: 654531 - DNA, 33 bp, Homo sapien
ataaatcattctgtggaagaagtctgggaaatc

SEQ ID NO: 654532 - DNA, 33 bp, Homo sapien
ataaatcattctgtggtagaagtctgggaaatc

SEQ ID NO: 654533 - DNA, 33 bp, Homo sapien
gttaaggaagaaaaaaatgatagaaggaaagga

SEQ ID NO: 654534 - DNA, 33 bp, Homo sapien
gttaaggaagaaaaaattgatagaaggaaagga

SEQ ID NO: 654535 - DNA, 33 bp, Homo sapien
aaagtgcaaagtgacacggggaataaattggag

SEQ ID NO: 654536 - DNA, 33 bp, Homo sapien
aaagtgcaaagtgacatggggaataaattggag

SEQ ID NO: 654537 - DNA, 33 bp, Homo sapien
gcggaagttaatagcaatgatctcaggacttcc

SEQ ID NO: 654538 - DNA, 33 bp, Homo sapien
gcggaagttaatagcagtgatctcaggacttcc

SEQ ID NO: 654539 - DNA, 33 bp, Homo sapien
gtcccctataccagagaattctcctcacaatcc

SEQ ID NO: 654540 - DNA, 33 bp, Homo sapien
gtcccctataccagaggattctcctcacaatcc

SEQ ID NO: 654541 - DNA, 33 bp, Homo sapien
cttctgcctacgaacaataaggttttctaaatc

SEQ ID NO: 654542 - DNA, 33 bp, Homo sapien
cttctgcctacgaacactaaggttttctaaatc

SEQ ID NO: 654543 - DNA, 33 bp, Homo sapien
atggattgactatgtacgtatgcaaaagtaagc

SEQ ID NO: 654544 - DNA, 33 bp, Homo sapien
atggattgactatgtatgtatgcaaaagtaagc

SEQ ID NO: 654545 - DNA, 33 bp, Homo sapien
cagaaaaaacaagagaccaaataactgcagtta

SEQ ID NO: 654546 - DNA, 33 bp, Homo sapien
cagaaaaaacaagagagcaaataactgcagtta

SEQ ID NO: 654547 - DNA, 33 bp, Homo sapien
cactgcataataataaggagatcctagcaacaa

SEQ ID NO: 654548 - DNA, 33 bp, Homo sapien
cactgcataataataatgagatcctagcaacaa

SEQ ID NO: 654549 - DNA, 33 bp, Homo sapien
aattgaactaaaccacaagcaacaggccttaca

SEQ ID NO: 654550 - DNA, 33 bp, Homo sapien
aattgaactaaaccacgagcaacaggccttaca

SEQ ID NO: 654551 - DNA, 33 bp, Homo sapien
agactgccggacaaaacctaaagcgtttgccct

SEQ ID NO: 654552 - DNA, 33 bp, Homo sapien
agactgccggacaaaatctaaagcgtttgccct

SEQ ID NO: 654553 - DNA, 33 bp, Homo sapien
gggagacaggaagagacagtctatacaatgacc

SEQ ID NO: 654554 - DNA, 33 bp, Homo sapien
gggagacaggaagagagagtctatacaatgacc

SEQ ID NO: 654555 - DNA, 33 bp, Homo sapien
agggttaaagactatgcagtttcacattatgta

SEQ ID NO: 654556 - DNA, 33 bp, Homo sapien
agggttaaagactatggagtttcacattatgta

SEQ ID NO: 654557 - DNA, 33 bp, Homo sapien
ttaaactctagcataaaccactaaatgtccaaa

SEQ ID NO: 654558 - DNA, 33 bp, Homo sapien
ttaaactctagcataatccactaaatgtccaaa

SEQ ID NO: 654559 - DNA, 33 bp, Homo sapien
gaagtgagttatgaagcagagatataatgaagt

SEQ ID NO: 654560 - DNA, 33 bp, Homo sapien
gaagtgagttatgaagtagagatataatgaagt

SEQ ID NO: 654561 - DNA, 33 bp, Homo sapien
tatacaccagtagaccaaaatatggtttgaaca

SEQ ID NO: 654562 - DNA, 33 bp, Homo sapien
tatacaccagtagaccgaaatatggtttgaaca

SEQ ID NO: 654563 - DNA, 33 bp, Homo sapien
ctgggatggcttcaccgaactactctggaccct

SEQ ID NO: 654564 - DNA, 33 bp, Homo sapien
ctgggatggcttcacctaactactctggaccct

SEQ ID NO: 654565 - DNA, 33 bp, Homo sapien
gtgtcaaattgagtcaagattgtggctttctca

SEQ ID NO: 654566 - DNA, 33 bp, Homo sapien
gtgtcaaattgagtcaggattgtggctttctca

SEQ ID NO: 654567 - DNA, 33 bp, Homo sapien
gctatgatactaacaccgcaaattatttactac

SEQ ID NO: 654568 - DNA, 33 bp, Homo sapien
gctatgatactaacactgcaaattatttactac

SEQ ID NO: 654569 - DNA, 33 bp, Homo sapien
acctgtgagacaatcacgctgaaagttagatac

SEQ ID NO: 654570 - DNA, 33 bp, Homo sapien
acctgtgagacaatcatgctgaaagttagatac

SEQ ID NO: 654571 - DNA, 33 bp, Homo sapien
actaaatattaaaacactgagctacaatacttt

SEQ ID NO: 654572 - DNA, 33 bp, Homo sapien
actaaatattaaaacattgagctacaatacttt

SEQ ID NO: 654573 - DNA, 33 bp, Homo sapien
ctactaacatgtttcccgaaccccttcctggct

SEQ ID NO: 654574 - DNA, 33 bp, Homo sapien
ctactaacatgtttcctgaaccccttcctggct

SEQ ID NO: 654575 - DNA, 33 bp, Homo sapien
gttgaaattgtgagaaacttttcgcttttacat

SEQ ID NO: 654576 - DNA, 33 bp, Homo sapien
gttgaaattgtgagaaccttttcgcttttacat

SEQ ID NO: 654577 - DNA, 33 bp, Homo sapien
tctgaaatgtttcaacaactgaatctatttgaa

SEQ ID NO: 654578 - DNA, 33 bp, Homo sapien
tctgaaatgtttcaacgactgaatctatttgaa

SEQ ID NO: 654579 - DNA, 33 bp, Homo sapien
ctggtattggtacacactgctgggatacttgag

SEQ ID NO: 654580 - DNA, 33 bp, Homo sapien
ctggtattggtacacattgctgggatacttgag

SEQ ID NO: 654581 - DNA, 33 bp, Homo sapien
gtaccacatcaagagaatactctgtgggacaaa

SEQ ID NO: 654582 - DNA, 33 bp, Homo sapien
gtaccacatcaagagactactctgtgggacaaa

SEQ ID NO: 654583 - DNA, 33 bp, Homo sapien
aagccagctgtatcaccggagtctacttttatt

SEQ ID NO: 654584 - DNA, 33 bp, Homo sapien
aagccagctgtatcactggagtctacttttatt

SEQ ID NO: 654585 - DNA, 33 bp, Homo sapien
ttacttgatcctcacaacgttgacaggaattac

SEQ ID NO: 654586 - DNA, 33 bp, Homo sapien
ttacttgatcctcacagcgttgacaggaattac

SEQ ID NO: 654587 - DNA, 33 bp, Homo sapien
atggaggaaaatttaacaagatatgccgagtgg

SEQ ID NO: 654588 - DNA, 33 bp, Homo sapien
atggaggaaaatttaagaagatatgccgagtgg

SEQ ID NO: 654589 - DNA, 33 bp, Homo sapien
tttgtcatggaacagcacatgaagttttgtcta

SEQ ID NO: 654590 - DNA, 33 bp, Homo sapien
tttgtcatggaacagcgcatgaagttttgtcta

SEQ ID NO: 654591 - DNA, 33 bp, Homo sapien
cctcttataccaaataaccaagttgtaaataca

SEQ ID NO: 654592 - DNA, 33 bp, Homo sapien
cctcttataccaaatagccaagttgtaaataca

SEQ ID NO: 654593 - DNA, 33 bp, Homo sapien
aaacagtaactgaaaaatgagaactcttatgga

SEQ ID NO: 654594 - DNA, 33 bp, Homo sapien
aaacagtaactgaaaagtgagaactcttatgga

SEQ ID NO: 654595 - DNA, 33 bp, Homo sapien
ttgccaatttacaccaacacaatcagtgtataa

SEQ ID NO: 654596 - DNA, 33 bp, Homo sapien
ttgccaatttacaccaccacaatcagtgtataa

SEQ ID NO: 654597 - DNA, 33 bp, Homo sapien
aaaattgaagagaacacgcaaagtgtgtatatg

SEQ ID NO: 654598 - DNA, 33 bp, Homo sapien
aaaattgaagagaacatgcaaagtgtgtatatg

SEQ ID NO: 654599 - DNA, 33 bp, Homo sapien
gtgccttaatcctaaagaattatctgggaagtg

SEQ ID NO: 654600 - DNA, 33 bp, Homo sapien
gtgccttaatcctaaataattatctgggaagtg

SEQ ID NO: 654601 - DNA, 33 bp, Homo sapien
atgtcactagaaattacaaaagtgttgcgagta

SEQ ID NO: 654602 - DNA, 33 bp, Homo sapien
atgtcactagaaattataaaagtgttgcgagta

SEQ ID NO: 654603 - DNA, 33 bp, Homo sapien
tttcacagcacaagaaagaaaggttattcctcc

SEQ ID NO: 654604 - DNA, 33 bp, Homo sapien
tttcacagcacaagaacgaaaggttattcctcc

SEQ ID NO: 654605 - DNA, 33 bp, Homo sapien
tcctgcattttcacatcatgattgaaagactaa

SEQ ID NO: 654606 - DNA, 33 bp, Homo sapien
tcctgcattttcacattatgattgaaagactaa

SEQ ID NO: 654607 - DNA, 33 bp, Homo sapien
agaaggtgaaaataaaatggtctcttcatgatt

SEQ ID NO: 654608 - DNA, 33 bp, Homo sapien
agaaggtgaaaataaactggtctcttcatgatt

SEQ ID NO: 654609 - DNA, 33 bp, Homo sapien
accaatacagctttcacccaaagcagaaagtaa

SEQ ID NO: 654610 - DNA, 33 bp, Homo sapien
accaatacagctttcatccaaagcagaaagtaa

SEQ ID NO: 654611 - DNA, 33 bp, Homo sapien
atccaatggcagataaaaaatgccagggtataa

SEQ ID NO: 654612 - DNA, 33 bp, Homo sapien
atccaatggcagataagaaatgccagggtataa

SEQ ID NO: 654613 - DNA, 33 bp, Homo sapien
taatgttcacactgaaccatacttattttagaa

SEQ ID NO: 654614 - DNA, 33 bp, Homo sapien
taatgttcacactgaatcatacttattttagaa

SEQ ID NO: 654615 - DNA, 33 bp, Homo sapien
tgtaaaggcattgggaaccacataagccttttt

SEQ ID NO: 654616 - DNA, 33 bp, Homo sapien
tgtaaaggcattgggagccacataagccttttt

SEQ ID NO: 654617 - DNA, 33 bp, Homo sapien
ctgcctgtttctcttcaaatgttattcatcctg

SEQ ID NO: 654618 - DNA, 33 bp, Homo sapien
ctgcctgtttctcttcgaatgttattcatcctg

SEQ ID NO: 654619 - DNA, 33 bp, Homo sapien
tggcttaatgtctttcaactgtatgaatttata

SEQ ID NO: 654620 - DNA, 33 bp, Homo sapien
tggcttaatgtctttcgactgtatgaatttata

SEQ ID NO: 654621 - DNA, 33 bp, Homo sapien
tctctcctaagacaaaataggttagaggcacct

SEQ ID NO: 654622 - DNA, 33 bp, Homo sapien
tctctcctaagacaaagtaggttagaggcacct

SEQ ID NO: 654623 - DNA, 33 bp, Homo sapien
ttttgcaaccttaatgcaatattggatctgatc

SEQ ID NO: 654624 - DNA, 33 bp, Homo sapien
ttttgcaaccttaatggaatattggatctgatc

SEQ ID NO: 654625 - DNA, 33 bp, Homo sapien
cctggggcaggtagaacatgaaagagataaggt

SEQ ID NO: 654626 - DNA, 33 bp, Homo sapien
cctggggcaggtagaagatgaaagagataaggt

SEQ ID NO: 654627 - DNA, 33 bp, Homo sapien
gagtggtaacagggaaatctcagtgcaactaat

SEQ ID NO: 654628 - DNA, 33 bp, Homo sapien
gagtggtaacagggaactctcagtgcaactaat

SEQ ID NO: 654629 - DNA, 33 bp, Homo sapien
aaatattactggacaacaggaggaagagaacgt

SEQ ID NO: 654630 - DNA, 33 bp, Homo sapien
aaatattactggacaagaggaggaagagaacgt

SEQ ID NO: 654631 - DNA, 33 bp, Homo sapien
aaaagaagtgtctgtacctacactccttcccca

SEQ ID NO: 654632 - DNA, 33 bp, Homo sapien
aaaagaagtgtctgtatctacactccttcccca

SEQ ID NO: 654633 - DNA, 33 bp, Homo sapien
aacagttaagatgaagaataagatgaaaccttt

SEQ ID NO: 654634 - DNA, 33 bp, Homo sapien
aacagttaagatgaaggataagatgaaaccttt

SEQ ID NO: 654635 - DNA, 33 bp, Homo sapien
agcttttgctataaacgcatcttccctgacttt

SEQ ID NO: 654636 - DNA, 33 bp, Homo sapien
agcttttgctataaactcatcttccctgacttt

SEQ ID NO: 654637 - DNA, 33 bp, Homo sapien
catgcctcactttccccatttctaaacgagagt

SEQ ID NO: 654638 - DNA, 33 bp, Homo sapien
catgcctcactttcccgatttctaaacgagagt

SEQ ID NO: 654639 - DNA, 33 bp, Homo sapien
agagtagagcataccacagtgctgttttataac

SEQ ID NO: 654640 - DNA, 33 bp, Homo sapien
agagtagagcataccatagtgctgttttataac

SEQ ID NO: 654641 - DNA, 33 bp, Homo sapien
tgtaggtcctcctccccaatctaaaaatgactt

SEQ ID NO: 654642 - DNA, 33 bp, Homo sapien
tgtaggtcctcctcccgaatctaaaaatgactt

SEQ ID NO: 654643 - DNA, 33 bp, Homo sapien
gcacaagctggtataaaaaattacatatagttg

SEQ ID NO: 654644 - DNA, 33 bp, Homo sapien
gcacaagctggtataataaattacatatagttg

SEQ ID NO: 654645 - DNA, 33 bp, Homo sapien
tatagttgtcatttcacagtaggatccagtcat

SEQ ID NO: 654646 - DNA, 33 bp, Homo sapien
tatagttgtcatttcagagtaggatccagtcat

SEQ ID NO: 654647 - DNA, 33 bp, Homo sapien
tactttattgttcaaaccaggacatttttgaga

SEQ ID NO: 654648 - DNA, 33 bp, Homo sapien
tactttattgttcaaatcaggacatttttgaga

SEQ ID NO: 654649 - DNA, 33 bp, Homo sapien
aagtggaacctcaacaatgacagcaagtctacc

SEQ ID NO: 654650 - DNA, 33 bp, Homo sapien
aagtggaacctcaacactgacagcaagtctacc

SEQ ID NO: 654651 - DNA, 33 bp, Homo sapien
tcttccctcaaatctaccaacctgcctgcactt

SEQ ID NO: 654652 - DNA, 33 bp, Homo sapien
tcttccctcaaatctagcaacctgcctgcactt

SEQ ID NO: 654653 - DNA, 33 bp, Homo sapien
taacccattcatttcaatacttcgtctgtatca

SEQ ID NO: 654654 - DNA, 33 bp, Homo sapien
taacccattcatttcagtacttcgtctgtatca

SEQ ID NO: 654655 - DNA, 33 bp, Homo sapien
agtattttggtgcaaaactcacacattgtatca

SEQ ID NO: 654656 - DNA, 33 bp, Homo sapien
agtattttggtgcaaacctcacacattgtatca

SEQ ID NO: 654657 - DNA, 33 bp, Homo sapien
gattttctattaagcacctccccttggatttct

SEQ ID NO: 654658 - DNA, 33 bp, Homo sapien
gattttctattaagcatctccccttggatttct

SEQ ID NO: 654659 - DNA, 33 bp, Homo sapien
tcagcagggactaaacacctccacaaagaaagc

SEQ ID NO: 654660 - DNA, 33 bp, Homo sapien
tcagcagggactaaacgcctccacaaagaaagc

SEQ ID NO: 654661 - DNA, 33 bp, Homo sapien
atcatgctacaagtgaccaatcaatgtccctct

SEQ ID NO: 654662 - DNA, 33 bp, Homo sapien
atcatgctacaagtgatcaatcaatgtccctct

SEQ ID NO: 654663 - DNA, 33 bp, Homo sapien
gtaaattcacttttgacgtctggtagcttcttt

SEQ ID NO: 654664 - DNA, 33 bp, Homo sapien
gtaaattcacttttgatgtctggtagcttcttt

SEQ ID NO: 654665 - DNA, 33 bp, Homo sapien
aactctcattctccaacagcttagactagcttc

SEQ ID NO: 654666 - DNA, 33 bp, Homo sapien
aactctcattctccaatagcttagactagcttc

SEQ ID NO: 654667 - DNA, 33 bp, Homo sapien
aaaatcatgactaaataaaaaagaggaggagga

SEQ ID NO: 654668 - DNA, 33 bp, Homo sapien
aaaatcatgactaaattaaaaagaggaggagga

SEQ ID NO: 654669 - DNA, 33 bp, Homo sapien
cataaagaagttgactaagcatgaaatttcatc

SEQ ID NO: 654670 - DNA, 33 bp, Homo sapien
cataaagaagttgactgagcatgaaatttcatc

SEQ ID NO: 654671 - DNA, 33 bp, Homo sapien
tgcagaaacaagtacaacccacattcaagtagc

SEQ ID NO: 654672 - DNA, 33 bp, Homo sapien
tgcagaaacaagtacagcccacattcaagtagc

SEQ ID NO: 654673 - DNA, 33 bp, Homo sapien
tttctgaagatattgcaacaattaatttttagg

SEQ ID NO: 654674 - DNA, 33 bp, Homo sapien
tttctgaagatattgcgacaattaatttttagg

SEQ ID NO: 654675 - DNA, 33 bp, Homo sapien
caaattaaagttctggaagatgagttggtagta

SEQ ID NO: 654676 - DNA, 33 bp, Homo sapien
caaattaaagttctggcagatgagttggtagta

SEQ ID NO: 654677 - DNA, 33 bp, Homo sapien
gtttcctaccttgaaactcctgctaatgataac

SEQ ID NO: 654678 - DNA, 33 bp, Homo sapien
gtttcctaccttgaaagtcctgctaatgataac

SEQ ID NO: 654679 - DNA, 33 bp, Homo sapien
tcccattatatcatgaagatctggttaacttgt

SEQ ID NO: 654680 - DNA, 33 bp, Homo sapien
tcccattatatcatgaggatctggttaacttgt

SEQ ID NO: 654681 - DNA, 33 bp, Homo sapien
ggttaacttgttcataagaatgttaaaactgaa

SEQ ID NO: 654682 - DNA, 33 bp, Homo sapien
ggttaacttgttcatacgaatgttaaaactgaa

SEQ ID NO: 654683 - DNA, 33 bp, Homo sapien
ccttgctttttcttgacctactctctattgttg

SEQ ID NO: 654684 - DNA, 33 bp, Homo sapien
ccttgctttttcttgatctactctctattgttg

SEQ ID NO: 654685 - DNA, 33 bp, Homo sapien
attattgaaactcactaaattgatttcacaacc

SEQ ID NO: 654686 - DNA, 33 bp, Homo sapien
attattgaaactcactgaattgatttcacaacc

SEQ ID NO: 654687 - DNA, 33 bp, Homo sapien
agttactgagcatcatcagattttagaaattct

SEQ ID NO: 654688 - DNA, 33 bp, Homo sapien
agttactgagcatcattagattttagaaattct

SEQ ID NO: 654689 - DNA, 33 bp, Homo sapien
ttgtactgagcagatacgaaggagtaggaagga

SEQ ID NO: 654690 - DNA, 33 bp, Homo sapien
ttgtactgagcagatatgaaggagtaggaagga

SEQ ID NO: 654691 - DNA, 33 bp, Homo sapien
tagctcacctcaagtcaaacaccagtgttctta

SEQ ID NO: 654692 - DNA, 33 bp, Homo sapien
tagctcacctcaagtcgaacaccagtgttctta

SEQ ID NO: 654693 - DNA, 33 bp, Homo sapien
tgagtcattaaaacacaatgttactgacttgat

SEQ ID NO: 654694 - DNA, 33 bp, Homo sapien
tgagtcattaaaacaccatgttactgacttgat

SEQ ID NO: 654695 - DNA, 33 bp, Homo sapien
aaggcaactatcactcaaaacagatcattagca

SEQ ID NO: 654696 - DNA, 33 bp, Homo sapien
aaggcaactatcactcgaaacagatcattagca

SEQ ID NO: 654697 - DNA, 33 bp, Homo sapien
gtgcctcctactgttacgcccatttgattcttc

SEQ ID NO: 654698 - DNA, 33 bp, Homo sapien
gtgcctcctactgttatgcccatttgattcttc

SEQ ID NO: 654699 - DNA, 33 bp, Homo sapien
catctaaaaggagagaatatttgcataaatcaa

SEQ ID NO: 654700 - DNA, 33 bp, Homo sapien
catctaaaaggagagactatttgcataaatcaa

SEQ ID NO: 654701 - DNA, 33 bp, Homo sapien
aattctgaacaccataataaagttgaggtagtg

SEQ ID NO: 654702 - DNA, 33 bp, Homo sapien
aattctgaacaccatactaaagttgaggtagtg

SEQ ID NO: 654703 - DNA, 33 bp, Homo sapien
atagtgcttggtgttacatgtggcaaggagagg

SEQ ID NO: 654704 - DNA, 33 bp, Homo sapien
atagtgcttggtgttagatgtggcaaggagagg

SEQ ID NO: 654705 - DNA, 33 bp, Homo sapien
gaattaagttcacatcagagacatgataatatc

SEQ ID NO: 654706 - DNA, 33 bp, Homo sapien
gaattaagttcacatcggagacatgataatatc

SEQ ID NO: 654707 - DNA, 33 bp, Homo sapien
tcatcttgtggttaaagatcatttaggtaggtg

SEQ ID NO: 654708 - DNA, 33 bp, Homo sapien
tcatcttgtggttaaatatcatttaggtaggtg

SEQ ID NO: 654709 - DNA, 33 bp, Homo sapien
ccttagatgagctgtaagcatattagttaaaaa

SEQ ID NO: 654710 - DNA, 33 bp, Homo sapien
ccttagatgagctgtacgcatattagttaaaaa

SEQ ID NO: 654711 - DNA, 33 bp, Homo sapien
agaatctttgtgcctcaattccagtatccaatg

SEQ ID NO: 654712 - DNA, 33 bp, Homo sapien
agaatctttgtgcctccattccagtatccaatg

SEQ ID NO: 654713 - DNA, 33 bp, Homo sapien
ttaatgtatcctaaaaagttgtatctcttaatg

SEQ ID NO: 654714 - DNA, 33 bp, Homo sapien
ttaatgtatcctaaaacgttgtatctcttaatg

SEQ ID NO: 654715 - DNA, 33 bp, Homo sapien
ttatcccaggtcactagtacaatgatcactacc

SEQ ID NO: 654716 - DNA, 33 bp, Homo sapien
ttatcccaggtcactattacaatgatcactacc

SEQ ID NO: 654717 - DNA, 33 bp, Homo sapien
atctttaattgggagcggcaacaaaagattaga

SEQ ID NO: 654718 - DNA, 33 bp, Homo sapien
atctttaattgggagctgcaacaaaagattaga

SEQ ID NO: 654719 - DNA, 33 bp, Homo sapien
ttcagcatccatgtaacactacctaccattgtc

SEQ ID NO: 654720 - DNA, 33 bp, Homo sapien
ttcagcatccatgtaatactacctaccattgtc

SEQ ID NO: 654721 - DNA, 33 bp, Homo sapien
aagtgaaacaatgactaagaaagctttggagtt

SEQ ID NO: 654722 - DNA, 33 bp, Homo sapien
aagtgaaacaatgactgagaaagctttggagtt

SEQ ID NO: 654723 - DNA, 33 bp, Homo sapien
aataataatttagaaacgaggaatgtgatccac

SEQ ID NO: 654724 - DNA, 33 bp, Homo sapien
aataataatttagaaatgaggaatgtgatccac

SEQ ID NO: 654725 - DNA, 33 bp, Homo sapien
acatactgatacagcacctacacatagccatgt

SEQ ID NO: 654726 - DNA, 33 bp, Homo sapien
acatactgatacagcatctacacatagccatgt

SEQ ID NO: 654727 - DNA, 33 bp, Homo sapien
gtgcttgaccttaaatcaatgcttaaggtatgc

SEQ ID NO: 654728 - DNA, 33 bp, Homo sapien
gtgcttgaccttaaattaatgcttaaggtatgc

SEQ ID NO: 654729 - DNA, 33 bp, Homo sapien
taatagatgtaagtcaagaactatggaattgtc

SEQ ID NO: 654730 - DNA, 33 bp, Homo sapien
taatagatgtaagtcatgaactatggaattgtc

SEQ ID NO: 654731 - DNA, 33 bp, Homo sapien
aaaggggccaaatagcactcagatgacagggga

SEQ ID NO: 654732 - DNA, 33 bp, Homo sapien
aaaggggccaaatagcgctcagatgacagggga

SEQ ID NO: 654733 - DNA, 33 bp, Homo sapien
tgaagtcaagctgcgtaaatctcaggagaagta

SEQ ID NO: 654734 - DNA, 33 bp, Homo sapien
tgaagtcaagctgcgtgaatctcaggagaagta

SEQ ID NO: 654735 - DNA, 33 bp, Homo sapien
tgttattttatctaaccgtgaaagggcgtaaat

SEQ ID NO: 654736 - DNA, 33 bp, Homo sapien
tgttattttatctaactgtgaaagggcgtaaat

SEQ ID NO: 654737 - DNA, 33 bp, Homo sapien
atgtagctaggccacaaaaatctgttttgggta

SEQ ID NO: 654738 - DNA, 33 bp, Homo sapien
atgtagctaggccacagaaatctgttttgggta

SEQ ID NO: 654739 - DNA, 33 bp, Homo sapien
agatttcttcagtgtcaaaccctctttacaaca

SEQ ID NO: 654740 - DNA, 33 bp, Homo sapien
agatttcttcagtgtcgaaccctctttacaaca

SEQ ID NO: 654741 - DNA, 33 bp, Homo sapien
cttttgaattaggaaacaatttgtcaatgaatc

SEQ ID NO: 654742 - DNA, 33 bp, Homo sapien
cttttgaattaggaaagaatttgtcaatgaatc

SEQ ID NO: 654743 - DNA, 33 bp, Homo sapien
gaatattggaggatagaagttcatacaacagaa

SEQ ID NO: 654744 - DNA, 33 bp, Homo sapien
gaatattggaggataggagttcatacaacagaa

SEQ ID NO: 654745 - DNA, 33 bp, Homo sapien
tggagaacttggttggaaaataccaggcttcat

SEQ ID NO: 654746 - DNA, 33 bp, Homo sapien
tggagaacttggttggcaaataccaggcttcat

SEQ ID NO: 654747 - DNA, 33 bp, Homo sapien
tctcagtagacatcgacaaggcagtaaataaat

SEQ ID NO: 654748 - DNA, 33 bp, Homo sapien
tctcagtagacatcgataaggcagtaaataaat

SEQ ID NO: 654749 - DNA, 33 bp, Homo sapien
ggacaaggagtcatcacgtagggccaatttggg

SEQ ID NO: 654750 - DNA, 33 bp, Homo sapien
ggacaaggagtcatcatgtagggccaatttggg

SEQ ID NO: 654751 - DNA, 33 bp, Homo sapien
atgaggctctgaattaagaaccagatgtggcaa

SEQ ID NO: 654752 - DNA, 33 bp, Homo sapien
atgaggctctgaattaggaaccagatgtggcaa

SEQ ID NO: 654753 - DNA, 33 bp, Homo sapien
aagcttagttcatgtgaagtgtgcaagtaggca

SEQ ID NO: 654754 - DNA, 33 bp, Homo sapien
aagcttagttcatgtggagtgtgcaagtaggca

SEQ ID NO: 654755 - DNA, 33 bp, Homo sapien
gattttcttttaaatgcattcgcaatttgctct

SEQ ID NO: 654756 - DNA, 33 bp, Homo sapien
gattttcttttaaatgtattcgcaatttgctct

SEQ ID NO: 654757 - DNA, 33 bp, Homo sapien
gtaaatcagttttaaccttgctagcctaatgtt

SEQ ID NO: 654758 - DNA, 33 bp, Homo sapien
gtaaatcagttttaacgttgctagcctaatgtt

SEQ ID NO: 654759 - DNA, 33 bp, Homo sapien
aaaccatgaattgttcactttaacatgtttaaa

SEQ ID NO: 654760 - DNA, 33 bp, Homo sapien
aaaccatgaattgttcgctttaacatgtttaaa

SEQ ID NO: 654761 - DNA, 33 bp, Homo sapien
aattatgttttctctccaactttctcaggcacc

SEQ ID NO: 654762 - DNA, 33 bp, Homo sapien
aattatgttttctctcgaactttctcaggcacc

SEQ ID NO: 654763 - DNA, 33 bp, Homo sapien
ttttctctgaaactaactgacaatgaggcaaat

SEQ ID NO: 654764 - DNA, 33 bp, Homo sapien
ttttctctgaaactaagtgacaatgaggcaaat

SEQ ID NO: 654765 - DNA, 33 bp, Homo sapien
attatcccttgcaaatcaatcagccatgtgact

SEQ ID NO: 654766 - DNA, 33 bp, Homo sapien
attatcccttgcaaatgaatcagccatgtgact

SEQ ID NO: 654767 - DNA, 33 bp, Homo sapien
atatttggtgttgtcacgaagtcctccaataaa

SEQ ID NO: 654768 - DNA, 33 bp, Homo sapien
atatttggtgttgtcatgaagtcctccaataaa

SEQ ID NO: 654769 - DNA, 33 bp, Homo sapien
gccatccatctttacactgacagatttttaaat

SEQ ID NO: 654770 - DNA, 33 bp, Homo sapien
gccatccatctttacattgacagatttttaaat

SEQ ID NO: 654771 - DNA, 33 bp, Homo sapien
ttcccattggcgcctccgaatgcagctgcttct

SEQ ID NO: 654772 - DNA, 33 bp, Homo sapien
ttcccattggcgcctctgaatgcagctgcttct

SEQ ID NO: 654773 - DNA, 33 bp, Homo sapien
taggaatacagctagcaagcaatgtgaaggacc

SEQ ID NO: 654774 - DNA, 33 bp, Homo sapien
taggaatacagctagcgagcaatgtgaaggacc

SEQ ID NO: 654775 - DNA, 33 bp, Homo sapien
cattaattaaacttacagaagtggtttgatata

SEQ ID NO: 654776 - DNA, 33 bp, Homo sapien
cattaattaaacttactgaagtggtttgatata

SEQ ID NO: 654777 - DNA, 33 bp, Homo sapien
gggcctgaaatggataataggtacaaatgccat

SEQ ID NO: 654778 - DNA, 33 bp, Homo sapien
gggcctgaaatggatagtaggtacaaatgccat

SEQ ID NO: 654779 - DNA, 33 bp, Homo sapien
tgaaaaccttgtatacactgaaaccataacttg

SEQ ID NO: 654780 - DNA, 33 bp, Homo sapien
tgaaaaccttgtatacgctgaaaccataacttg

SEQ ID NO: 654781 - DNA, 33 bp, Homo sapien
tctatatagaaagcaccaagtattttcatggta

SEQ ID NO: 654782 - DNA, 33 bp, Homo sapien
tctatatagaaagcacgaagtattttcatggta

SEQ ID NO: 654783 - DNA, 33 bp, Homo sapien
actggagaatttagtagtacaacacctctctct

SEQ ID NO: 654784 - DNA, 33 bp, Homo sapien
actggagaatttagtattacaacacctctctct

SEQ ID NO: 654785 - DNA, 33 bp, Homo sapien
aagggtcaagaaaaaaattataggccaggcatg

SEQ ID NO: 654786 - DNA, 33 bp, Homo sapien
aagggtcaagaaaaaagttataggccaggcatg

SEQ ID NO: 654787 - DNA, 33 bp, Homo sapien
acccctgaaggtacagaaacatacaagtgtcaa

SEQ ID NO: 654788 - DNA, 33 bp, Homo sapien
acccctgaaggtacaggaacatacaagtgtcaa

SEQ ID NO: 654789 - DNA, 33 bp, Homo sapien
atacatttcacagccaaggcataacattctgaa

SEQ ID NO: 654790 - DNA, 33 bp, Homo sapien
atacatttcacagccagggcataacattctgaa

SEQ ID NO: 654791 - DNA, 33 bp, Homo sapien
caagtagcttctccacaaaagagagggagagag

SEQ ID NO: 654792 - DNA, 33 bp, Homo sapien
caagtagcttctccacgaaagagagggagagag

SEQ ID NO: 654793 - DNA, 33 bp, Homo sapien
aatttgtttctaaagccagaatacaaaaaaaaa

SEQ ID NO: 654794 - DNA, 33 bp, Homo sapien
aatttgtttctaaagcgagaatacaaaaaaaaa

SEQ ID NO: 654795 - DNA, 33 bp, Homo sapien
ttagtggcatagttgtaaaaatctgaagaataa

SEQ ID NO: 654796 - DNA, 33 bp, Homo sapien
ttagtggcatagttgttaaaatctgaagaataa

SEQ ID NO: 654797 - DNA, 33 bp, Homo sapien
aaagatgggtatttaaccttctgcacgcagata

SEQ ID NO: 654798 - DNA, 33 bp, Homo sapien
aaagatgggtatttaatcttctgcacgcagata

SEQ ID NO: 654799 - DNA, 33 bp, Homo sapien
tgtttttgtgcctgaaataactcactaaaaata

SEQ ID NO: 654800 - DNA, 33 bp, Homo sapien
tgtttttgtgcctgaagtaactcactaaaaata

SEQ ID NO: 654801 - DNA, 33 bp, Homo sapien
ggccctcagagatacccagtgatatagtttgta

SEQ ID NO: 654802 - DNA, 33 bp, Homo sapien
ggccctcagagatacctagtgatatagtttgta

SEQ ID NO: 654803 - DNA, 33 bp, Homo sapien
aacatgatctcctcaacttaggtaatttacagt

SEQ ID NO: 654804 - DNA, 33 bp, Homo sapien
aacatgatctcctcaatttaggtaatttacagt

SEQ ID NO: 654805 - DNA, 33 bp, Homo sapien
agagcaggtaatagtgaatgaagaggtgtacat

SEQ ID NO: 654806 - DNA, 33 bp, Homo sapien
agagcaggtaatagtgtatgaagaggtgtacat

SEQ ID NO: 654807 - DNA, 33 bp, Homo sapien
tatatgtgaactagaacataacagcgtggtagt

SEQ ID NO: 654808 - DNA, 33 bp, Homo sapien
tatatgtgaactagaatataacagcgtggtagt

SEQ ID NO: 654809 - DNA, 33 bp, Homo sapien
gggcatatttggaagtcaacatttatttctgaa

SEQ ID NO: 654810 - DNA, 33 bp, Homo sapien
gggcatatttggaagtgaacatttatttctgaa

SEQ ID NO: 654811 - DNA, 33 bp, Homo sapien
tgtcagaagagattaactcaaacaggaggcagc

SEQ ID NO: 654812 - DNA, 33 bp, Homo sapien
tgtcagaagagattaattcaaacaggaggcagc

SEQ ID NO: 654813 - DNA, 33 bp, Homo sapien
tcccacctctcaataccatcacttcactaagtt

SEQ ID NO: 654814 - DNA, 33 bp, Homo sapien
tcccacctctcaatacgatcacttcactaagtt

SEQ ID NO: 654815 - DNA, 33 bp, Homo sapien
actactatgaaaagaccgcacgtgacagaattg

SEQ ID NO: 654816 - DNA, 33 bp, Homo sapien
actactatgaaaagactgcacgtgacagaattg

SEQ ID NO: 654817 - DNA, 33 bp, Homo sapien
tggtgatagtaatacccgcttcataagttcagt

SEQ ID NO: 654818 - DNA, 33 bp, Homo sapien
tggtgatagtaatacctgcttcataagttcagt

SEQ ID NO: 654819 - DNA, 33 bp, Homo sapien
ctcatgccctctataccgatacatgtttggtca

SEQ ID NO: 654820 - DNA, 33 bp, Homo sapien
ctcatgccctctatactgatacatgtttggtca

SEQ ID NO: 654821 - DNA, 33 bp, Homo sapien
ctgagatatcaacatcaaagtagcatataacct

SEQ ID NO: 654822 - DNA, 33 bp, Homo sapien
ctgagatatcaacatcgaagtagcatataacct

SEQ ID NO: 654823 - DNA, 33 bp, Homo sapien
ctccttttccggtaacagacataactaatgttt

SEQ ID NO: 654824 - DNA, 33 bp, Homo sapien
ctccttttccggtaacggacataactaatgttt

SEQ ID NO: 654825 - DNA, 33 bp, Homo sapien
aatatgtgggttatcaataacaggtcgctggaa

SEQ ID NO: 654826 - DNA, 33 bp, Homo sapien
aatatgtgggttatcagtaacaggtcgctggaa

SEQ ID NO: 654827 - DNA, 33 bp, Homo sapien
tatttgtccgttagtaactttctaatatattcc

SEQ ID NO: 654828 - DNA, 33 bp, Homo sapien
tatttgtccgttagtagctttctaatatattcc

SEQ ID NO: 654829 - DNA, 33 bp, Homo sapien
ttcttcctgatctgaaccaccaggtaacacagg

SEQ ID NO: 654830 - DNA, 33 bp, Homo sapien
ttcttcctgatctgaatcaccaggtaacacagg

SEQ ID NO: 654831 - DNA, 33 bp, Homo sapien
atttttgtgttgtagagaattttactcatcaaa

SEQ ID NO: 654832 - DNA, 33 bp, Homo sapien
atttttgtgttgtagataattttactcatcaaa

SEQ ID NO: 654833 - DNA, 33 bp, Homo sapien
atgcagaaaggttaaagaaagacattgattgac

SEQ ID NO: 654834 - DNA, 33 bp, Homo sapien
atgcagaaaggttaaataaagacattgattgac

SEQ ID NO: 654835 - DNA, 33 bp, Homo sapien
aaaacagagtcaaagacgggtgcatagcagttt

SEQ ID NO: 654836 - DNA, 33 bp, Homo sapien
aaaacagagtcaaagatgggtgcatagcagttt

SEQ ID NO: 654837 - DNA, 33 bp, Homo sapien
aagtcccaggtccggcaacacagacgttttttg

SEQ ID NO: 654838 - DNA, 33 bp, Homo sapien
aagtcccaggtccggcgacacagacgttttttg

SEQ ID NO: 654839 - DNA, 33 bp, Homo sapien
aaatctcacccataccactttggcttccatctt

SEQ ID NO: 654840 - DNA, 33 bp, Homo sapien
aaatctcacccataccgctttggcttccatctt

SEQ ID NO: 654841 - DNA, 33 bp, Homo sapien
taatatttcatatataagattggcaaactcact

SEQ ID NO: 654842 - DNA, 33 bp, Homo sapien
taatatttcatatataggattggcaaactcact

SEQ ID NO: 654843 - DNA, 33 bp, Homo sapien
tatcaatagttccgtgaaaaatatctctctttg

SEQ ID NO: 654844 - DNA, 33 bp, Homo sapien
tatcaatagttccgtgcaaaatatctctctttg

SEQ ID NO: 654845 - DNA, 33 bp, Homo sapien
acctgcagagctgtcaatctacaagtgtttggc

SEQ ID NO: 654846 - DNA, 33 bp, Homo sapien
acctgcagagctgtcagtctacaagtgtttggc

SEQ ID NO: 654847 - DNA, 33 bp, Homo sapien
agggcaggtctgatacaggaaataaactatctt

SEQ ID NO: 654848 - DNA, 33 bp, Homo sapien
agggcaggtctgatacgggaaataaactatctt

SEQ ID NO: 654849 - DNA, 33 bp, Homo sapien
tttggttgtttcaccaaatctctaccagaatgt

SEQ ID NO: 654850 - DNA, 33 bp, Homo sapien
tttggttgtttcaccagatctctaccagaatgt

SEQ ID NO: 654851 - DNA, 33 bp, Homo sapien
ctcttcacatcaagataaaattagctcctaggg

SEQ ID NO: 654852 - DNA, 33 bp, Homo sapien
ctcttcacatcaagatgaaattagctcctaggg

SEQ ID NO: 654853 - DNA, 33 bp, Homo sapien
aagaattatctggagactcatcattatctgcta

SEQ ID NO: 654854 - DNA, 33 bp, Homo sapien
aagaattatctggagattcatcattatctgcta

SEQ ID NO: 654855 - DNA, 33 bp, Homo sapien
tgaataaatactcaacaatcagtctatctaatg

SEQ ID NO: 654856 - DNA, 33 bp, Homo sapien
tgaataaatactcaacgatcagtctatctaatg

SEQ ID NO: 654857 - DNA, 33 bp, Homo sapien
tttatctacaaggctactaactcaatcagggga

SEQ ID NO: 654858 - DNA, 33 bp, Homo sapien
tttatctacaaggctattaactcaatcagggga

SEQ ID NO: 654859 - DNA, 33 bp, Homo sapien
caagtggaacaacccacattaagtaggctgtag

SEQ ID NO: 654860 - DNA, 33 bp, Homo sapien
caagtggaacaacccatattaagtaggctgtag

SEQ ID NO: 654861 - DNA, 33 bp, Homo sapien
ttgttgttttacattccagagaggagtgatttc

SEQ ID NO: 654862 - DNA, 33 bp, Homo sapien
ttgttgttttacattctagagaggagtgatttc

SEQ ID NO: 654863 - DNA, 33 bp, Homo sapien
ggaattatgcaggtaaacgtgtgctagtcagtt

SEQ ID NO: 654864 - DNA, 33 bp, Homo sapien
ggaattatgcaggtaatcgtgtgctagtcagtt

SEQ ID NO: 654865 - DNA, 33 bp, Homo sapien
cagcacacacttggccaaattcctggaagatca

SEQ ID NO: 654866 - DNA, 33 bp, Homo sapien
cagcacacacttggccgaattcctggaagatca

SEQ ID NO: 654867 - DNA, 33 bp, Homo sapien
ggacaagctttgttcacggcatggaagaatggc

SEQ ID NO: 654868 - DNA, 33 bp, Homo sapien
ggacaagctttgttcatggcatggaagaatggc

SEQ ID NO: 654869 - DNA, 33 bp, Homo sapien
aaatgtaacaggcttacgagaaatgagggaaat

SEQ ID NO: 654870 - DNA, 33 bp, Homo sapien
aaatgtaacaggcttatgagaaatgagggaaat

SEQ ID NO: 654871 - DNA, 33 bp, Homo sapien
cagcaaacaaagaatcaatcaaaaggctggaga

SEQ ID NO: 654872 - DNA, 33 bp, Homo sapien
cagcaaacaaagaatcgatcaaaaggctggaga

SEQ ID NO: 654873 - DNA, 33 bp, Homo sapien
tgttacaggtaaggaaaaacaatggtgcacaag

SEQ ID NO: 654874 - DNA, 33 bp, Homo sapien
tgttacaggtaaggaagaacaatggtgcacaag

SEQ ID NO: 654875 - DNA, 33 bp, Homo sapien
gtttggatagtcgaataagctgtgttacatcca

SEQ ID NO: 654876 - DNA, 33 bp, Homo sapien
gtttggatagtcgaatgagctgtgttacatcca

SEQ ID NO: 654877 - DNA, 33 bp, Homo sapien
atggtaaccacagaaaatacactgcagttttta

SEQ ID NO: 654878 - DNA, 33 bp, Homo sapien
atggtaaccacagaaagtacactgcagttttta

SEQ ID NO: 654879 - DNA, 33 bp, Homo sapien
caatgctccttagtcacaaaggcccaatgattc

SEQ ID NO: 654880 - DNA, 33 bp, Homo sapien
caatgctccttagtcataaaggcccaatgattc

SEQ ID NO: 654881 - DNA, 33 bp, Homo sapien
cgacttgacaagatcacatagctagtaagagtc

SEQ ID NO: 654882 - DNA, 33 bp, Homo sapien
cgacttgacaagatcagatagctagtaagagtc

SEQ ID NO: 654883 - DNA, 33 bp, Homo sapien
aaaaaattgtatcagccaagagaaacttccctt

SEQ ID NO: 654884 - DNA, 33 bp, Homo sapien
aaaaaattgtatcagcgaagagaaacttccctt

SEQ ID NO: 654885 - DNA, 33 bp, Homo sapien
tttgagaatagatctacatggtacaggaaggaa

SEQ ID NO: 654886 - DNA, 33 bp, Homo sapien
tttgagaatagatctatatggtacaggaaggaa

SEQ ID NO: 654887 - DNA, 33 bp, Homo sapien
ctctgcttataatgtcacaactaccccaactgg

SEQ ID NO: 654888 - DNA, 33 bp, Homo sapien
ctctgcttataatgtcgcaactaccccaactgg

SEQ ID NO: 654889 - DNA, 33 bp, Homo sapien
aactacctggggaaaccggataaggctgcaaaa

SEQ ID NO: 654890 - DNA, 33 bp, Homo sapien
aactacctggggaaactggataaggctgcaaaa

SEQ ID NO: 654891 - DNA, 33 bp, Homo sapien
tttcatgggacagttcaaataagagaaatccaa

SEQ ID NO: 654892 - DNA, 33 bp, Homo sapien
tttcatgggacagttcgaataagagaaatccaa

SEQ ID NO: 654893 - DNA, 33 bp, Homo sapien
gtggcttgcatgaaccgaaaacatggctacttt

SEQ ID NO: 654894 - DNA, 33 bp, Homo sapien
gtggcttgcatgaacctaaaacatggctacttt

SEQ ID NO: 654895 - DNA, 33 bp, Homo sapien
tttttcatatcacgtaaaagttaagaaaaattc

SEQ ID NO: 654896 - DNA, 33 bp, Homo sapien
tttttcatatcacgtagaagttaagaaaaattc

SEQ ID NO: 654897 - DNA, 33 bp, Homo sapien
tggcagtcatggcagcaagcatatggatagcag

SEQ ID NO: 654898 - DNA, 33 bp, Homo sapien
tggcagtcatggcagcgagcatatggatagcag

SEQ ID NO: 654899 - DNA, 33 bp, Homo sapien
agaccagtttgctggaaaactcagaagggagac

SEQ ID NO: 654900 - DNA, 33 bp, Homo sapien
agaccagtttgctggataactcagaagggagac

SEQ ID NO: 654901 - DNA, 33 bp, Homo sapien
tgaaaaagataagggaagcattctcctgtaagt

SEQ ID NO: 654902 - DNA, 33 bp, Homo sapien
tgaaaaagataagggatgcattctcctgtaagt

SEQ ID NO: 654903 - DNA, 33 bp, Homo sapien
ttttgaagaaatatcaatgagaaggaatccctt

SEQ ID NO: 654904 - DNA, 33 bp, Homo sapien
ttttgaagaaatatcagtgagaaggaatccctt

SEQ ID NO: 654905 - DNA, 33 bp, Homo sapien
tacagagagcttgacacggacttttggttttgg

SEQ ID NO: 654906 - DNA, 33 bp, Homo sapien
tacagagagcttgacagggacttttggttttgg

SEQ ID NO: 654907 - DNA, 33 bp, Homo sapien
tgtgctcaatgactcacaagacctggttggtgg

SEQ ID NO: 654908 - DNA, 33 bp, Homo sapien
tgtgctcaatgactcagaagacctggttggtgg

SEQ ID NO: 654909 - DNA, 33 bp, Homo sapien
ccacatatagtgcagaagaacgaaggttttgta

SEQ ID NO: 654910 - DNA, 33 bp, Homo sapien
ccacatatagtgcagatgaacgaaggttttgta

SEQ ID NO: 654911 - DNA, 33 bp, Homo sapien
tttccacagtgtgatacagtagctaataaaaaa

SEQ ID NO: 654912 - DNA, 33 bp, Homo sapien
tttccacagtgtgatatagtagctaataaaaaa

SEQ ID NO: 654913 - DNA, 33 bp, Homo sapien
atgccattgacagtggaacacctaagctagttc

SEQ ID NO: 654914 - DNA, 33 bp, Homo sapien
atgccattgacagtgggacacctaagctagttc

SEQ ID NO: 654915 - DNA, 33 bp, Homo sapien
cagccaagcatttttacgtgccgttttcttatg

SEQ ID NO: 654916 - DNA, 33 bp, Homo sapien
cagccaagcatttttatgtgccgttttcttatg

SEQ ID NO: 654917 - DNA, 33 bp, Homo sapien
caaagaaaagatatgaagcagagaaaatggggg

SEQ ID NO: 654918 - DNA, 33 bp, Homo sapien
caaagaaaagatatgaggcagagaaaatggggg

SEQ ID NO: 654919 - DNA, 33 bp, Homo sapien
agggaagctcaaacaccaaactttcagaaactg

SEQ ID NO: 654920 - DNA, 33 bp, Homo sapien
agggaagctcaaacactaaactttcagaaactg

SEQ ID NO: 654921 - DNA, 33 bp, Homo sapien
ttcatctcgcttttcaaataaggacaccaaagc

SEQ ID NO: 654922 - DNA, 33 bp, Homo sapien
ttcatctcgcttttcagataaggacaccaaagc

SEQ ID NO: 654923 - DNA, 33 bp, Homo sapien
attcctgccatcaaaaatcagattggcaaacac

SEQ ID NO: 654924 - DNA, 33 bp, Homo sapien
attcctgccatcaaaattcagattggcaaacac

SEQ ID NO: 654925 - DNA, 33 bp, Homo sapien
atgtcagtgtttgcaaaattgagttggttaaac

SEQ ID NO: 654926 - DNA, 33 bp, Homo sapien
atgtcagtgtttgcaagattgagttggttaaac

SEQ ID NO: 654927 - DNA, 33 bp, Homo sapien
ttagtgtgaacttttccacagtattttgcatga

SEQ ID NO: 654928 - DNA, 33 bp, Homo sapien
ttagtgtgaacttttctacagtattttgcatga

SEQ ID NO: 654929 - DNA, 33 bp, Homo sapien
taaaccgtgtatgtgcaagaaaaaaatttcaaa

SEQ ID NO: 654930 - DNA, 33 bp, Homo sapien
taaaccgtgtatgtgccagaaaaaaatttcaaa

SEQ ID NO: 654931 - DNA, 33 bp, Homo sapien
ctaagaaaagtgaaaccgacactaaaggcttag

SEQ ID NO: 654932 - DNA, 33 bp, Homo sapien
ctaagaaaagtgaaactgacactaaaggcttag

SEQ ID NO: 654933 - DNA, 33 bp, Homo sapien
tgtaactgcctgatggaaccgttgctccatctg

SEQ ID NO: 654934 - DNA, 33 bp, Homo sapien
tgtaactgcctgatgggaccgttgctccatctg

SEQ ID NO: 654935 - DNA, 33 bp, Homo sapien
gagcgagcacacacaactgcgttcacacaactt

SEQ ID NO: 654936 - DNA, 33 bp, Homo sapien
gagcgagcacacacaattgcgttcacacaactt

SEQ ID NO: 654937 - DNA, 33 bp, Homo sapien
gcttgcatcatagcacaatttttaacttgcttt

SEQ ID NO: 654938 - DNA, 33 bp, Homo sapien
gcttgcatcatagcaccatttttaacttgcttt

SEQ ID NO: 654939 - DNA, 33 bp, Homo sapien
ttttctgaagtcgagacaaattgttgtaagagt

SEQ ID NO: 654940 - DNA, 33 bp, Homo sapien
ttttctgaagtcgagataaattgttgtaagagt

SEQ ID NO: 654941 - DNA, 33 bp, Homo sapien
aaatgtttgcaatggaaaataagaaaggaaaga

SEQ ID NO: 654942 - DNA, 33 bp, Homo sapien
aaatgtttgcaatggagaataagaaaggaaaga

SEQ ID NO: 654943 - DNA, 33 bp, Homo sapien
ccgaagtattccaatcacaaatttgcattatat

SEQ ID NO: 654944 - DNA, 33 bp, Homo sapien
ccgaagtattccaatcgcaaatttgcattatat

SEQ ID NO: 654945 - DNA, 33 bp, Homo sapien
ccaaatataccaagaacgaacaatcagtaaata

SEQ ID NO: 654946 - DNA, 33 bp, Homo sapien
ccaaatataccaagaatgaacaatcagtaaata

SEQ ID NO: 654947 - DNA, 33 bp, Homo sapien
aatatgaatgctttaaaaatgacactattaaaa

SEQ ID NO: 654948 - DNA, 33 bp, Homo sapien
aatatgaatgctttaacaatgacactattaaaa

SEQ ID NO: 654949 - DNA, 33 bp, Homo sapien
tcctctaatggatggactaaagaaaagaatagc

SEQ ID NO: 654950 - DNA, 33 bp, Homo sapien
tcctctaatggatggattaaagaaaagaatagc

SEQ ID NO: 654951 - DNA, 33 bp, Homo sapien
tagaacaactaactaacgcacaagtcctcattc

SEQ ID NO: 654952 - DNA, 33 bp, Homo sapien
tagaacaactaactaatgcacaagtcctcattc

SEQ ID NO: 654953 - DNA, 33 bp, Homo sapien
aaaggcatcattcctgaatggcaagaagccaac

SEQ ID NO: 654954 - DNA, 33 bp, Homo sapien
aaaggcatcattcctggatggcaagaagccaac

SEQ ID NO: 654955 - DNA, 33 bp, Homo sapien
gaggaacacctgcaaaaaataacagcttagtcc

SEQ ID NO: 654956 - DNA, 33 bp, Homo sapien
gaggaacacctgcaaacaataacagcttagtcc

SEQ ID NO: 654957 - DNA, 33 bp, Homo sapien
aatcattccttgtccaaagttttacaaatttgg

SEQ ID NO: 654958 - DNA, 33 bp, Homo sapien
aatcattccttgtccagagttttacaaatttgg

SEQ ID NO: 654959 - DNA, 33 bp, Homo sapien
agatatccaatgtctaccacatacagcctttag

SEQ ID NO: 654960 - DNA, 33 bp, Homo sapien
agatatccaatgtctagcacatacagcctttag

SEQ ID NO: 654961 - DNA, 33 bp, Homo sapien
atcccatgtaagtggcaaatgataaccaaaatt

SEQ ID NO: 654962 - DNA, 33 bp, Homo sapien
atcccatgtaagtggcgaatgataaccaaaatt

SEQ ID NO: 654963 - DNA, 33 bp, Homo sapien
aactacagagtggttcaagacagcatttaatta

SEQ ID NO: 654964 - DNA, 33 bp, Homo sapien
aactacagagtggttcgagacagcatttaatta

SEQ ID NO: 654965 - DNA, 33 bp, Homo sapien
gcatttgctaaccacaacgaggaacggagggca

SEQ ID NO: 654966 - DNA, 33 bp, Homo sapien
gcatttgctaaccacatcgaggaacggagggca

SEQ ID NO: 654967 - DNA, 33 bp, Homo sapien
tgcataattagcttacacattttcatttcatga

SEQ ID NO: 654968 - DNA, 33 bp, Homo sapien
tgcataattagcttacccattttcatttcatga

SEQ ID NO: 654969 - DNA, 33 bp, Homo sapien
gtttgggagacttggcacagcattactgactgc

SEQ ID NO: 654970 - DNA, 33 bp, Homo sapien
gtttgggagacttggcccagcattactgactgc

SEQ ID NO: 654971 - DNA, 33 bp, Homo sapien
catacttgtttctgaccgaaaagcaaccagttc

SEQ ID NO: 654972 - DNA, 33 bp, Homo sapien
catacttgtttctgactgaaaagcaaccagttc

SEQ ID NO: 654973 - DNA, 33 bp, Homo sapien
tatacgctttttgagaggcgggacaatatcttg

SEQ ID NO: 654974 - DNA, 33 bp, Homo sapien
tatacgctttttgagatgcgggacaatatcttg

SEQ ID NO: 654975 - DNA, 33 bp, Homo sapien
tataggttcaaaaacaaacagttcagtggtcac

SEQ ID NO: 654976 - DNA, 33 bp, Homo sapien
tataggttcaaaaacacacagttcagtggtcac

SEQ ID NO: 654977 - DNA, 33 bp, Homo sapien
ttctcatctctgaaaaatgataaaaagatgtgt

SEQ ID NO: 654978 - DNA, 33 bp, Homo sapien
ttctcatctctgaaaattgataaaaagatgtgt

SEQ ID NO: 654979 - DNA, 33 bp, Homo sapien
atctcacagattgatacgaattctcaatctgga

SEQ ID NO: 654980 - DNA, 33 bp, Homo sapien
atctcacagattgatatgaattctcaatctgga

SEQ ID NO: 654981 - DNA, 33 bp, Homo sapien
tttttgtggctcatcaatcatctccggtgtggc

SEQ ID NO: 654982 - DNA, 33 bp, Homo sapien
tttttgtggctcatcagtcatctccggtgtggc

SEQ ID NO: 654983 - DNA, 33 bp, Homo sapien
tgttcgggttattttaaactgagatgtgaaatc

SEQ ID NO: 654984 - DNA, 33 bp, Homo sapien
tgttcgggttattttacactgagatgtgaaatc

SEQ ID NO: 654985 - DNA, 33 bp, Homo sapien
tagctgacattcttagcccttagccgacattct

SEQ ID NO: 654986 - DNA, 33 bp, Homo sapien
tagctgacattcttagtccttagccgacattct

SEQ ID NO: 654987 - DNA, 33 bp, Homo sapien
accatttgcccattcaatatatctgattaatca

SEQ ID NO: 654988 - DNA, 33 bp, Homo sapien
accatttgcccattcagtatatctgattaatca

SEQ ID NO: 654989 - DNA, 33 bp, Homo sapien
aaagttttcatgactgcagagagaaaagtaaaa

SEQ ID NO: 654990 - DNA, 33 bp, Homo sapien
aaagttttcatgactggagagagaaaagtaaaa

SEQ ID NO: 654991 - DNA, 33 bp, Homo sapien
ggaactgagaggtatgaatgtctagggtgagat

SEQ ID NO: 654992 - DNA, 33 bp, Homo sapien
ggaactgagaggtatggatgtctagggtgagat

SEQ ID NO: 654993 - DNA, 33 bp, Homo sapien
tgctctgaagattagaaagcctgtatgcagttt

SEQ ID NO: 654994 - DNA, 33 bp, Homo sapien
tgctctgaagattagagagcctgtatgcagttt

SEQ ID NO: 654995 - DNA, 33 bp, Homo sapien
aagtaatgtaacattcacttcttaagctgaata

SEQ ID NO: 654996 - DNA, 33 bp, Homo sapien
aagtaatgtaacattcgcttcttaagctgaata

SEQ ID NO: 654997 - DNA, 33 bp, Homo sapien
gcctccatgaatctaaacatttttctttttgct

SEQ ID NO: 654998 - DNA, 33 bp, Homo sapien
gcctccatgaatctaagcatttttctttttgct

SEQ ID NO: 654999 - DNA, 33 bp, Homo sapien
tgaagaaggccaagggaagtcattgagtaatac

SEQ ID NO: 655000 - DNA, 33 bp, Homo sapien
tgaagaaggccaagggcagtcattgagtaatac

SEQ ID NO: 655001 - DNA, 33 bp, Homo sapien
gaagattaagcaaaaacgtcctacttgagcaaa

SEQ ID NO: 655002 - DNA, 33 bp, Homo sapien
gaagattaagcaaaaatgtcctacttgagcaaa

SEQ ID NO: 655003 - DNA, 33 bp, Homo sapien
gcttctgggtatgaatcaaatgttagctcccag

SEQ ID NO: 655004 - DNA, 33 bp, Homo sapien
gcttctgggtatgaattaaatgttagctcccag

SEQ ID NO: 655005 - DNA, 33 bp, Homo sapien
tatacattgtattgtcaaatagtcaaatattca

SEQ ID NO: 655006 - DNA, 33 bp, Homo sapien
tatacattgtattgtccaatagtcaaatattca

SEQ ID NO: 655007 - DNA, 33 bp, Homo sapien
ccttgtgattctttacacatgaaatgctattct

SEQ ID NO: 655008 - DNA, 33 bp, Homo sapien
ccttgtgattctttacgcatgaaatgctattct

SEQ ID NO: 655009 - DNA, 33 bp, Homo sapien
ttttatatttaaattacgaacattgccaacaca

SEQ ID NO: 655010 - DNA, 33 bp, Homo sapien
ttttatatttaaattatgaacattgccaacaca

SEQ ID NO: 655011 - DNA, 33 bp, Homo sapien
aaatggaataagctcacgaagtgggaaaggaaa

SEQ ID NO: 655012 - DNA, 33 bp, Homo sapien
aaatggaataagctcatgaagtgggaaaggaaa

SEQ ID NO: 655013 - DNA, 33 bp, Homo sapien
ggttttgccccttcaaagttatgttcactctgt

SEQ ID NO: 655014 - DNA, 33 bp, Homo sapien
ggttttgccccttcaaggttatgttcactctgt

SEQ ID NO: 655015 - DNA, 33 bp, Homo sapien
agagtatcaagatcacagaactactagtttcct

SEQ ID NO: 655016 - DNA, 33 bp, Homo sapien
agagtatcaagatcacggaactactagtttcct

SEQ ID NO: 655017 - DNA, 33 bp, Homo sapien
aaagggatatgtactcagaccttgcacattgat

SEQ ID NO: 655018 - DNA, 33 bp, Homo sapien
aaagggatatgtactccgaccttgcacattgat

SEQ ID NO: 655019 - DNA, 33 bp, Homo sapien
tggtgattgcaaataagatggatgctccaacaa

SEQ ID NO: 655020 - DNA, 33 bp, Homo sapien
tggtgattgcaaataatatggatgctccaacaa

SEQ ID NO: 655021 - DNA, 33 bp, Homo sapien
ctgaaccaaagatcagaatggagtgactggaga

SEQ ID NO: 655022 - DNA, 33 bp, Homo sapien
ctgaaccaaagatcaggatggagtgactggaga

SEQ ID NO: 655023 - DNA, 33 bp, Homo sapien
gatctttggttcaggacgtagcaaactaaatta

SEQ ID NO: 655024 - DNA, 33 bp, Homo sapien
gatctttggttcaggatgtagcaaactaaatta

SEQ ID NO: 655025 - DNA, 33 bp, Homo sapien
atgtgtgatgggaaagccctgctgaggggaatt

SEQ ID NO: 655026 - DNA, 33 bp, Homo sapien
atgtgtgatgggaaagtcctgctgaggggaatt

SEQ ID NO: 655027 - DNA, 33 bp, Homo sapien
tctttcatacgagtcacaaactaaggtcttgac

SEQ ID NO: 655028 - DNA, 33 bp, Homo sapien
tctttcatacgagtcataaactaaggtcttgac

SEQ ID NO: 655029 - DNA, 33 bp, Homo sapien
tttcttcagatagtacaccagaggcctcatgag

SEQ ID NO: 655030 - DNA, 33 bp, Homo sapien
tttcttcagatagtacgccagaggcctcatgag

SEQ ID NO: 655031 - DNA, 33 bp, Homo sapien
agcctgaaggtattctaaaaagccgcctgtgaa

SEQ ID NO: 655032 - DNA, 33 bp, Homo sapien
agcctgaaggtattctgaaaagccgcctgtgaa

SEQ ID NO: 655033 - DNA, 33 bp, Homo sapien
caacatggtaacctccggcacatcttttaaaat

SEQ ID NO: 655034 - DNA, 33 bp, Homo sapien
caacatggtaacctcctgcacatcttttaaaat

SEQ ID NO: 655035 - DNA, 33 bp, Homo sapien
cattaggatgtaagagaaattatggaaagcttt

SEQ ID NO: 655036 - DNA, 33 bp, Homo sapien
cattaggatgtaagaggaattatggaaagcttt

SEQ ID NO: 655037 - DNA, 33 bp, Homo sapien
tctagcagcctacccacgtatcatatacaatca

SEQ ID NO: 655038 - DNA, 33 bp, Homo sapien
tctagcagcctacccatgtatcatatacaatca

SEQ ID NO: 655039 - DNA, 33 bp, Homo sapien
acttactcatccttcacatttgctcatccccag

SEQ ID NO: 655040 - DNA, 33 bp, Homo sapien
acttactcatccttcagatttgctcatccccag

SEQ ID NO: 655041 - DNA, 33 bp, Homo sapien
ccctgcacaaaagctacgcagggagtcacatta

SEQ ID NO: 655042 - DNA, 33 bp, Homo sapien
ccctgcacaaaagctatgcagggagtcacatta

SEQ ID NO: 655043 - DNA, 33 bp, Homo sapien
tgtgagttgctacaagacatcccccctaaataa

SEQ ID NO: 655044 - DNA, 33 bp, Homo sapien
tgtgagttgctacaagtcatcccccctaaataa

SEQ ID NO: 655045 - DNA, 33 bp, Homo sapien
attattaacactcccaataaatcctcaagatcc

SEQ ID NO: 655046 - DNA, 33 bp, Homo sapien
attattaacactcccagtaaatcctcaagatcc

SEQ ID NO: 655047 - DNA, 33 bp, Homo sapien
taccacaaagataatacggtgatggaaattttt

SEQ ID NO: 655048 - DNA, 33 bp, Homo sapien
taccacaaagataatatggtgatggaaattttt

SEQ ID NO: 655049 - DNA, 33 bp, Homo sapien
agacagtgaaatgatacgtgtgttgatctgtgc

SEQ ID NO: 655050 - DNA, 33 bp, Homo sapien
agacagtgaaatgatatgtgtgttgatctgtgc

SEQ ID NO: 655051 - DNA, 33 bp, Homo sapien
ctttaaatcccaccgcaagctctgttctcaaga

SEQ ID NO: 655052 - DNA, 33 bp, Homo sapien
ctttaaatcccaccgctagctctgttctcaaga

SEQ ID NO: 655053 - DNA, 33 bp, Homo sapien
cactctcttttgttagaaatactatcagtggct

SEQ ID NO: 655054 - DNA, 33 bp, Homo sapien
cactctcttttgttagcaatactatcagtggct

SEQ ID NO: 655055 - DNA, 33 bp, Homo sapien
tccaaatagtaggaacaaagtagattttataga

SEQ ID NO: 655056 - DNA, 33 bp, Homo sapien
tccaaatagtaggaacgaagtagattttataga

SEQ ID NO: 655057 - DNA, 33 bp, Homo sapien
ccctcagatacaaacacagctggtacccatagc

SEQ ID NO: 655058 - DNA, 33 bp, Homo sapien
ccctcagatacaaacatagctggtacccatagc

SEQ ID NO: 655059 - DNA, 33 bp, Homo sapien
ataaagtgatgccaaacgtggacccagtgacca

SEQ ID NO: 655060 - DNA, 33 bp, Homo sapien
ataaagtgatgccaaatgtggacccagtgacca

SEQ ID NO: 655061 - DNA, 33 bp, Homo sapien
tacaacaaatatggagaagccaaatattccgtc

SEQ ID NO: 655062 - DNA, 33 bp, Homo sapien
tacaacaaatatggagtagccaaatattccgtc

SEQ ID NO: 655063 - DNA, 33 bp, Homo sapien
aatgacagagcttcacaatctgtgcttttttgg

SEQ ID NO: 655064 - DNA, 33 bp, Homo sapien
aatgacagagcttcactatctgtgcttttttgg

SEQ ID NO: 655065 - DNA, 33 bp, Homo sapien
ttgaatatgggaactaggctttctctgatactg

SEQ ID NO: 655066 - DNA, 33 bp, Homo sapien
ttgaatatgggaactatgctttctctgatactg

SEQ ID NO: 655067 - DNA, 33 bp, Homo sapien
cttcattcttgctttacagattttcccacttct

SEQ ID NO: 655068 - DNA, 33 bp, Homo sapien
cttcattcttgctttatagattttcccacttct

SEQ ID NO: 655069 - DNA, 33 bp, Homo sapien
gtctctgcaatattcaagaggctgaaaacaatg

SEQ ID NO: 655070 - DNA, 33 bp, Homo sapien
gtctctgcaatattcaggaggctgaaaacaatg

SEQ ID NO: 655071 - DNA, 33 bp, Homo sapien
tcttcacatttgctcgcagatatacaagcatct

SEQ ID NO: 655072 - DNA, 33 bp, Homo sapien
tcttcacatttgctcgtagatatacaagcatct

SEQ ID NO: 655073 - DNA, 33 bp, Homo sapien
cctgcaggatgaggcaaaatggaatcttaatta

SEQ ID NO: 655074 - DNA, 33 bp, Homo sapien
cctgcaggatgaggcacaatggaatcttaatta

SEQ ID NO: 655075 - DNA, 33 bp, Homo sapien
aataaaagcactcaccaaaagtgatattcaaaa

SEQ ID NO: 655076 - DNA, 33 bp, Homo sapien
aataaaagcactcaccgaaagtgatattcaaaa

SEQ ID NO: 655077 - DNA, 33 bp, Homo sapien
gctgcttgccactaaccgaacagaatttaccag

SEQ ID NO: 655078 - DNA, 33 bp, Homo sapien
gctgcttgccactaactgaacagaatttaccag

SEQ ID NO: 655079 - DNA, 33 bp, Homo sapien
cattcttgaacaaatggattctaattaacaatg

SEQ ID NO: 655080 - DNA, 33 bp, Homo sapien
cattcttgaacaaatgtattctaattaacaatg

SEQ ID NO: 655081 - DNA, 33 bp, Homo sapien
atctttggtgtaggacaagagagagaagatggc

SEQ ID NO: 655082 - DNA, 33 bp, Homo sapien
atctttggtgtaggacgagagagagaagatggc

SEQ ID NO: 655083 - DNA, 33 bp, Homo sapien
tatggacaacagccatcaattggtacaagtttt

SEQ ID NO: 655084 - DNA, 33 bp, Homo sapien
tatggacaacagccatgaattggtacaagtttt

SEQ ID NO: 655085 - DNA, 33 bp, Homo sapien
taatttcacttgatacaaaattccagattgact

SEQ ID NO: 655086 - DNA, 33 bp, Homo sapien
taatttcacttgatacgaaattccagattgact

SEQ ID NO: 655087 - DNA, 33 bp, Homo sapien
cttactggagtagtccaaacttcttgcttcttt

SEQ ID NO: 655088 - DNA, 33 bp, Homo sapien
cttactggagtagtccgaacttcttgcttcttt

SEQ ID NO: 655089 - DNA, 33 bp, Homo sapien
aaatacacggttatgaagatatagccttaggag

SEQ ID NO: 655090 - DNA, 33 bp, Homo sapien
aaatacacggttatgaggatatagccttaggag

SEQ ID NO: 655091 - DNA, 33 bp, Homo sapien
tctggatcacaaaaaaatacatgtagacatatt

SEQ ID NO: 655092 - DNA, 33 bp, Homo sapien
tctggatcacaaaaaactacatgtagacatatt

SEQ ID NO: 655093 - DNA, 33 bp, Homo sapien
gaatgtggatatacaccattactgcagaagagt

SEQ ID NO: 655094 - DNA, 33 bp, Homo sapien
gaatgtggatatacactattactgcagaagagt

SEQ ID NO: 655095 - DNA, 33 bp, Homo sapien
caaataataaaatgaaacactttcaagcatttg

SEQ ID NO: 655096 - DNA, 33 bp, Homo sapien
caaataataaaatgaagcactttcaagcatttg

SEQ ID NO: 655097 - DNA, 33 bp, Homo sapien
tatgaacagttgttcaaattgattcttctataa

SEQ ID NO: 655098 - DNA, 33 bp, Homo sapien
tatgaacagttgttcagattgattcttctataa

SEQ ID NO: 655099 - DNA, 33 bp, Homo sapien
ggaaggtaaaaatggcacaacaatttttaaaag

SEQ ID NO: 655100 - DNA, 33 bp, Homo sapien
ggaaggtaaaaatggcgcaacaatttttaaaag

SEQ ID NO: 655101 - DNA, 33 bp, Homo sapien
ttacatcctggaaaaacgatcatggttaatgtg

SEQ ID NO: 655102 - DNA, 33 bp, Homo sapien
ttacatcctggaaaaaggatcatggttaatgtg

SEQ ID NO: 655103 - DNA, 33 bp, Homo sapien
attcttcaatcaatcaatcaccagcacttaaaa

SEQ ID NO: 655104 - DNA, 33 bp, Homo sapien
attcttcaatcaatcagtcaccagcacttaaaa

SEQ ID NO: 655105 - DNA, 33 bp, Homo sapien
gcatgagtggagaagtagttaccttttaccttg

SEQ ID NO: 655106 - DNA, 33 bp, Homo sapien
gcatgagtggagaagtcgttaccttttaccttg

SEQ ID NO: 655107 - DNA, 33 bp, Homo sapien
gtttacagattatggcaatggcagataagataa

SEQ ID NO: 655108 - DNA, 33 bp, Homo sapien
gtttacagattatggcgatggcagataagataa

SEQ ID NO: 655109 - DNA, 33 bp, Homo sapien
gctccagattacaggacggaatatacttaaagt

SEQ ID NO: 655110 - DNA, 33 bp, Homo sapien
gctccagattacaggatggaatatacttaaagt

SEQ ID NO: 655111 - DNA, 33 bp, Homo sapien
ctaactcagaatgatacaggaaagggaattctg

SEQ ID NO: 655112 - DNA, 33 bp, Homo sapien
ctaactcagaatgatataggaaagggaattctg

SEQ ID NO: 655113 - DNA, 33 bp, Homo sapien
caaatattccatgctgcagaagtgtttgtgtac

SEQ ID NO: 655114 - DNA, 33 bp, Homo sapien
caaatattccatgctgtagaagtgtttgtgtac

SEQ ID NO: 655115 - DNA, 33 bp, Homo sapien
tgctgtattatctgaacaagatgccagaccaag

SEQ ID NO: 655116 - DNA, 33 bp, Homo sapien
tgctgtattatctgaataagatgccagaccaag

SEQ ID NO: 655117 - DNA, 33 bp, Homo sapien
taagtaagattggaggccattgaaagacagaac

SEQ ID NO: 655118 - DNA, 33 bp, Homo sapien
taagtaagattggaggtcattgaaagacagaac

SEQ ID NO: 655119 - DNA, 33 bp, Homo sapien
aattcaaagaacaagcaaagactgatgagacag

SEQ ID NO: 655120 - DNA, 33 bp, Homo sapien
aattcaaagaacaagcgaagactgatgagacag

SEQ ID NO: 655121 - DNA, 33 bp, Homo sapien
aagcagaaaaacctaaatccattcttctggaag

SEQ ID NO: 655122 - DNA, 33 bp, Homo sapien
aagcagaaaaacctaactccattcttctggaag

SEQ ID NO: 655123 - DNA, 33 bp, Homo sapien
ccattatcctgactcagatgcttctcatttgtt

SEQ ID NO: 655124 - DNA, 33 bp, Homo sapien
ccattatcctgactcatatgcttctcatttgtt

SEQ ID NO: 655125 - DNA, 33 bp, Homo sapien
caaccagcactttgaaccaacataccatatggc

SEQ ID NO: 655126 - DNA, 33 bp, Homo sapien
caaccagcactttgaatcaacataccatatggc

SEQ ID NO: 655127 - DNA, 33 bp, Homo sapien
gctcaacactaatcagcaaaatgcaaatcaaaa

SEQ ID NO: 655128 - DNA, 33 bp, Homo sapien
gctcaacactaatcagtaaaatgcaaatcaaaa

SEQ ID NO: 655129 - DNA, 33 bp, Homo sapien
aagcttttagtcatgacagaaaggaaagggagc

SEQ ID NO: 655130 - DNA, 33 bp, Homo sapien
aagcttttagtcatgatagaaaggaaagggagc

SEQ ID NO: 655131 - DNA, 33 bp, Homo sapien
accaattccgaacacaataatgctaagatctga

SEQ ID NO: 655132 - DNA, 33 bp, Homo sapien
accaattccgaacacagtaatgctaagatctga

SEQ ID NO: 655133 - DNA, 33 bp, Homo sapien
gtccaataatttgataagatggctcatagaaat

SEQ ID NO: 655134 - DNA, 33 bp, Homo sapien
gtccaataatttgataggatggctcatagaaat

SEQ ID NO: 655135 - DNA, 33 bp, Homo sapien
tcaaatttgagaaatgaaagaacaacgaactct

SEQ ID NO: 655136 - DNA, 33 bp, Homo sapien
tcaaatttgagaaatggaagaacaacgaactct

SEQ ID NO: 655137 - DNA, 33 bp, Homo sapien
ctactagatggcaagaatactttcaccagtttt

SEQ ID NO: 655138 - DNA, 33 bp, Homo sapien
ctactagatggcaagagtactttcaccagtttt

SEQ ID NO: 655139 - DNA, 33 bp, Homo sapien
gctcactttccacttacggcatttccaccaaga

SEQ ID NO: 655140 - DNA, 33 bp, Homo sapien
gctcactttccacttatggcatttccaccaaga

SEQ ID NO: 655141 - DNA, 33 bp, Homo sapien
ctttcatctgattaccagccatttgcgtatctt

SEQ ID NO: 655142 - DNA, 33 bp, Homo sapien
ctttcatctgattaccggccatttgcgtatctt

SEQ ID NO: 655143 - DNA, 33 bp, Homo sapien
aaaaggcaacttaccaaatgggacaaaatattt

SEQ ID NO: 655144 - DNA, 33 bp, Homo sapien
aaaaggcaacttaccacatgggacaaaatattt

SEQ ID NO: 655145 - DNA, 33 bp, Homo sapien
gtacaaaggacagagaagatttggccccatcta

SEQ ID NO: 655146 - DNA, 33 bp, Homo sapien
gtacaaaggacagagaggatttggccccatcta

SEQ ID NO: 655147 - DNA, 33 bp, Homo sapien
tttggctattttaagggatttgtcttctagcgc

SEQ ID NO: 655148 - DNA, 33 bp, Homo sapien
tttggctattttaaggtatttgtcttctagcgc

SEQ ID NO: 655149 - DNA, 33 bp, Homo sapien
agaagccataattatcccacacaattttagttt

SEQ ID NO: 655150 - DNA, 33 bp, Homo sapien
agaagccataattatctcacacaattttagttt

SEQ ID NO: 655151 - DNA, 33 bp, Homo sapien
atggattggaatgggaaaaaaattagaagtggg

SEQ ID NO: 655152 - DNA, 33 bp, Homo sapien
atggattggaatgggacaaaaattagaagtggg

SEQ ID NO: 655153 - DNA, 33 bp, Homo sapien
attcagtaactcactacctcattcactcacaga

SEQ ID NO: 655154 - DNA, 33 bp, Homo sapien
attcagtaactcactagctcattcactcacaga

SEQ ID NO: 655155 - DNA, 33 bp, Homo sapien
ttttcatagagggctgcaaaaatctaaaagttt

SEQ ID NO: 655156 - DNA, 33 bp, Homo sapien
ttttcatagagggctggaaaaatctaaaagttt

SEQ ID NO: 655157 - DNA, 33 bp, Homo sapien
gaaattgtagcaactgaaattctaatacactgc

SEQ ID NO: 655158 - DNA, 33 bp, Homo sapien
gaaattgtagcaactggaattctaatacactgc

SEQ ID NO: 655159 - DNA, 33 bp, Homo sapien
aagggtgaggtgtcaagtaaaatcactcagagg

SEQ ID NO: 655160 - DNA, 33 bp, Homo sapien
aagggtgaggtgtcaattaaaatcactcagagg

SEQ ID NO: 655161 - DNA, 33 bp, Homo sapien
acaattggaattgctggaaaaaagttaatatgg

SEQ ID NO: 655162 - DNA, 33 bp, Homo sapien
acaattggaattgctgtaaaaaagttaatatgg

SEQ ID NO: 655163 - DNA, 33 bp, Homo sapien
tctgttgttggaccaaattctgcaggtttcact

SEQ ID NO: 655164 - DNA, 33 bp, Homo sapien
tctgttgttggaccaagttctgcaggtttcact

SEQ ID NO: 655165 - DNA, 33 bp, Homo sapien
tcaagatgcaggacaacaccttctttactcttt

SEQ ID NO: 655166 - DNA, 33 bp, Homo sapien
tcaagatgcaggacaataccttctttactcttt

SEQ ID NO: 655167 - DNA, 33 bp, Homo sapien
tgtggaggtggctataaaaataaaatagtcctt

SEQ ID NO: 655168 - DNA, 33 bp, Homo sapien
tgtggaggtggctatagaaataaaatagtcctt

SEQ ID NO: 655169 - DNA, 33 bp, Homo sapien
aactcacctaaactgacgggaagagaaatgctg

SEQ ID NO: 655170 - DNA, 33 bp, Homo sapien
aactcacctaaactgatgggaagagaaatgctg

SEQ ID NO: 655171 - DNA, 33 bp, Homo sapien
tgatacgctttcctgacatcctcatacaaaaat

SEQ ID NO: 655172 - DNA, 33 bp, Homo sapien
tgatacgctttcctgagatcctcatacaaaaat

SEQ ID NO: 655173 - DNA, 33 bp, Homo sapien
aactttgagaaaaaaaatttaagctgtcaaaga

SEQ ID NO: 655174 - DNA, 33 bp, Homo sapien
aactttgagaaaaaaattttaagctgtcaaaga

SEQ ID NO: 655175 - DNA, 33 bp, Homo sapien
atcatacgtaatttgaggccaaactcgagtaat

SEQ ID NO: 655176 - DNA, 33 bp, Homo sapien
atcatacgtaatttgatgccaaactcgagtaat

SEQ ID NO: 655177 - DNA, 33 bp, Homo sapien
gatgcttagaaaattgcagcaaggaccagagaa

SEQ ID NO: 655178 - DNA, 33 bp, Homo sapien
gatgcttagaaaattgtagcaaggaccagagaa

SEQ ID NO: 655179 - DNA, 33 bp, Homo sapien
ataaacagtgccataactgtacattgttattgc

SEQ ID NO: 655180 - DNA, 33 bp, Homo sapien
ataaacagtgccataattgtacattgttattgc

SEQ ID NO: 655181 - DNA, 33 bp, Homo sapien
atgaggattctgcaccactagcaaacttttgcc

SEQ ID NO: 655182 - DNA, 33 bp, Homo sapien
atgaggattctgcacctctagcaaacttttgcc

SEQ ID NO: 655183 - DNA, 33 bp, Homo sapien
gcactgtcctagtaaaagttctccatgaggatt

SEQ ID NO: 655184 - DNA, 33 bp, Homo sapien
gcactgtcctagtaaaggttctccatgaggatt

SEQ ID NO: 655185 - DNA, 33 bp, Homo sapien
ggatgcttcctttggagaataagagaatacaaa

SEQ ID NO: 655186 - DNA, 33 bp, Homo sapien
ggatgcttcctttggataataagagaatacaaa

SEQ ID NO: 655187 - DNA, 33 bp, Homo sapien
aagaacttttgttatacgccatgtgcaagattg

SEQ ID NO: 655188 - DNA, 33 bp, Homo sapien
aagaacttttgttatatgccatgtgcaagattg

SEQ ID NO: 655189 - DNA, 33 bp, Homo sapien
aactctctgctataaaatatttacaattgctcg

SEQ ID NO: 655190 - DNA, 33 bp, Homo sapien
aactctctgctataaattatttacaattgctcg

SEQ ID NO: 655191 - DNA, 33 bp, Homo sapien
aaatatttttagtcctcactggaaattagcatg

SEQ ID NO: 655192 - DNA, 33 bp, Homo sapien
aaatatttttagtccttactggaaattagcatg

SEQ ID NO: 655193 - DNA, 33 bp, Homo sapien
acaaaattattagacaataacctctctacacta

SEQ ID NO: 655194 - DNA, 33 bp, Homo sapien
acaaaattattagacagtaacctctctacacta

SEQ ID NO: 655195 - DNA, 33 bp, Homo sapien
aaatactgtattataaccatgtagggccactat

SEQ ID NO: 655196 - DNA, 33 bp, Homo sapien
aaatactgtattataatcatgtagggccactat

SEQ ID NO: 655197 - DNA, 33 bp, Homo sapien
gttatctggccttcaacatgaggaataattatt

SEQ ID NO: 655198 - DNA, 33 bp, Homo sapien
gttatctggccttcaatatgaggaataattatt

SEQ ID NO: 655199 - DNA, 33 bp, Homo sapien
gtggttagaacagagacgggcacagtttaacaa

SEQ ID NO: 655200 - DNA, 33 bp, Homo sapien
gtggttagaacagagatgggcacagtttaacaa

SEQ ID NO: 655201 - DNA, 33 bp, Homo sapien
aatctctttatatgtacgtcctattggttctct

SEQ ID NO: 655202 - DNA, 33 bp, Homo sapien
aatctctttatatgtatgtcctattggttctct

SEQ ID NO: 655203 - DNA, 33 bp, Homo sapien
aacatgccatctaggaagaataggctctcatca

SEQ ID NO: 655204 - DNA, 33 bp, Homo sapien
aacatgccatctaggacgaataggctctcatca

SEQ ID NO: 655205 - DNA, 33 bp, Homo sapien
ctcatatctatggtgaaacacttaattgctatg

SEQ ID NO: 655206 - DNA, 33 bp, Homo sapien
ctcatatctatggtgatacacttaattgctatg

SEQ ID NO: 655207 - DNA, 33 bp, Homo sapien
agtcataatatttccactgaaactttcctgaat

SEQ ID NO: 655208 - DNA, 33 bp, Homo sapien
agtcataatatttccattgaaactttcctgaat

SEQ ID NO: 655209 - DNA, 33 bp, Homo sapien
tcctggtgtgaggaaaaacccatggcaatgatg

SEQ ID NO: 655210 - DNA, 33 bp, Homo sapien
tcctggtgtgaggaaagacccatggcaatgatg

SEQ ID NO: 655211 - DNA, 33 bp, Homo sapien
tagatgtcctagaggtaaaaatgttagtaccat

SEQ ID NO: 655212 - DNA, 33 bp, Homo sapien
tagatgtcctagaggtgaaaatgttagtaccat

SEQ ID NO: 655213 - DNA, 33 bp, Homo sapien
tctgtagctcacctaaataggagtatacccagt

SEQ ID NO: 655214 - DNA, 33 bp, Homo sapien
tctgtagctcacctaagtaggagtatacccagt

SEQ ID NO: 655215 - DNA, 33 bp, Homo sapien
tataaatcaattattaccctgttctgaagcttc

SEQ ID NO: 655216 - DNA, 33 bp, Homo sapien
tataaatcaattattatcctgttctgaagcttc

SEQ ID NO: 655217 - DNA, 33 bp, Homo sapien
atgagagttctgaatgcagagggctggtcagaa

SEQ ID NO: 655218 - DNA, 33 bp, Homo sapien
atgagagttctgaatggagagggctggtcagaa

SEQ ID NO: 655219 - DNA, 33 bp, Homo sapien
tgctacctgagattagacagataggctactggg

SEQ ID NO: 655220 - DNA, 33 bp, Homo sapien
tgctacctgagattaggcagataggctactggg

SEQ ID NO: 655221 - DNA, 33 bp, Homo sapien
cgacattctcaacagcaaactgaaaatagaatg

SEQ ID NO: 655222 - DNA, 33 bp, Homo sapien
cgacattctcaacagcgaactgaaaatagaatg

SEQ ID NO: 655223 - DNA, 33 bp, Homo sapien
caactcaggtaaggcaagagatctgtacatacc

SEQ ID NO: 655224 - DNA, 33 bp, Homo sapien
caactcaggtaaggcaggagatctgtacatacc

SEQ ID NO: 655225 - DNA, 33 bp, Homo sapien
gtagatgttacaaatacacatgcagtgagaatg

SEQ ID NO: 655226 - DNA, 33 bp, Homo sapien
gtagatgttacaaatagacatgcagtgagaatg

SEQ ID NO: 655227 - DNA, 33 bp, Homo sapien
ttttgtcagtgattcactccacttctgggactc

SEQ ID NO: 655228 - DNA, 33 bp, Homo sapien
ttttgtcagtgattcattccacttctgggactc

SEQ ID NO: 655229 - DNA, 33 bp, Homo sapien
agaaattgtatcactccgacttctgcttctgat

SEQ ID NO: 655230 - DNA, 33 bp, Homo sapien
agaaattgtatcactctgacttctgcttctgat

SEQ ID NO: 655231 - DNA, 33 bp, Homo sapien
cagttctggatgtcagcagtcggaaatggtttt

SEQ ID NO: 655232 - DNA, 33 bp, Homo sapien
cagttctggatgtcagtagtcggaaatggtttt

SEQ ID NO: 655233 - DNA, 33 bp, Homo sapien
attccttaaaattctcacctagtctattccagg

SEQ ID NO: 655234 - DNA, 33 bp, Homo sapien
attccttaaaattctcccctagtctattccagg

SEQ ID NO: 655235 - DNA, 33 bp, Homo sapien
catctgaagcattcaacaagaaacacaacagca

SEQ ID NO: 655236 - DNA, 33 bp, Homo sapien
catctgaagcattcaagaagaaacacaacagca

SEQ ID NO: 655237 - DNA, 33 bp, Homo sapien
cataattgccctattcaactctgatctaaattt

SEQ ID NO: 655238 - DNA, 33 bp, Homo sapien
cataattgccctattcgactctgatctaaattt

SEQ ID NO: 655239 - DNA, 33 bp, Homo sapien
ggtgtccagatactcaagatgcaacaatcccct

SEQ ID NO: 655240 - DNA, 33 bp, Homo sapien
ggtgtccagatactcatgatgcaacaatcccct

SEQ ID NO: 655241 - DNA, 33 bp, Homo sapien
cagccatgtgctgctaaatacactcaccctacc

SEQ ID NO: 655242 - DNA, 33 bp, Homo sapien
cagccatgtgctgctagatacactcaccctacc

SEQ ID NO: 655243 - DNA, 33 bp, Homo sapien
aagctttttagaggtacgatggccacttttaga

SEQ ID NO: 655244 - DNA, 33 bp, Homo sapien
aagctttttagaggtatgatggccacttttaga

SEQ ID NO: 655245 - DNA, 33 bp, Homo sapien
gaatgacctatgtgtgaatgtcagctaatgaac

SEQ ID NO: 655246 - DNA, 33 bp, Homo sapien
gaatgacctatgtgtgtatgtcagctaatgaac

SEQ ID NO: 655247 - DNA, 33 bp, Homo sapien
aatgacatagcaattccactcatgaatatatac

SEQ ID NO: 655248 - DNA, 33 bp, Homo sapien
aatgacatagcaattctactcatgaatatatac

SEQ ID NO: 655249 - DNA, 33 bp, Homo sapien
atcccaggtgatccaagtattttggtatacatc

SEQ ID NO: 655250 - DNA, 33 bp, Homo sapien
atcccaggtgatccaattattttggtatacatc

SEQ ID NO: 655251 - DNA, 33 bp, Homo sapien
ttatatttatgtgaaacgtttgaatattctcca

SEQ ID NO: 655252 - DNA, 33 bp, Homo sapien
ttatatttatgtgaaatgtttgaatattctcca

SEQ ID NO: 655253 - DNA, 33 bp, Homo sapien
cctctgccccctgccagatctgtactcttgttt

SEQ ID NO: 655254 - DNA, 33 bp, Homo sapien
cctctgccccctgccatatctgtactcttgttt

SEQ ID NO: 655255 - DNA, 33 bp, Homo sapien
ttaccacttggaatgaagcatatgtaatctaaa

SEQ ID NO: 655256 - DNA, 33 bp, Homo sapien
ttaccacttggaatgatgcatatgtaatctaaa

SEQ ID NO: 655257 - DNA, 33 bp, Homo sapien
atttatgtattgctcccaggtggatgtaactag

SEQ ID NO: 655258 - DNA, 33 bp, Homo sapien
atttatgtattgctcctaggtggatgtaactag

SEQ ID NO: 655259 - DNA, 33 bp, Homo sapien
ccatggagcatatcacagaaaaggtgacattgg

SEQ ID NO: 655260 - DNA, 33 bp, Homo sapien
ccatggagcatatcacggaaaaggtgacattgg

SEQ ID NO: 655261 - DNA, 33 bp, Homo sapien
aaaaacctcatccaaccggtgtcagtcaaggaa

SEQ ID NO: 655262 - DNA, 33 bp, Homo sapien
aaaaacctcatccaactggtgtcagtcaaggaa

SEQ ID NO: 655263 - DNA, 33 bp, Homo sapien
tttctgttaaagttcaccgtggcaatgtaaatt

SEQ ID NO: 655264 - DNA, 33 bp, Homo sapien
tttctgttaaagttcatcgtggcaatgtaaatt

SEQ ID NO: 655265 - DNA, 33 bp, Homo sapien
acacattttgaaagccaatgattttataagttt

SEQ ID NO: 655266 - DNA, 33 bp, Homo sapien
acacattttgaaagccgatgattttataagttt

SEQ ID NO: 655267 - DNA, 33 bp, Homo sapien
tctcttgcaaatactacggaaatttggcattca

SEQ ID NO: 655268 - DNA, 33 bp, Homo sapien
tctcttgcaaatactatggaaatttggcattca

SEQ ID NO: 655269 - DNA, 33 bp, Homo sapien
ttctgggaagggttctcaataagtgtatgttga

SEQ ID NO: 655270 - DNA, 33 bp, Homo sapien
ttctgggaagggttctgaataagtgtatgttga

SEQ ID NO: 655271 - DNA, 33 bp, Homo sapien
gtaaaacccgatcatacgttctatttactgaga

SEQ ID NO: 655272 - DNA, 33 bp, Homo sapien
gtaaaacccgatcatatgttctatttactgaga

SEQ ID NO: 655273 - DNA, 33 bp, Homo sapien
caaagagagatttcagaacaggaaaaggagtaa

SEQ ID NO: 655274 - DNA, 33 bp, Homo sapien
caaagagagatttcaggacaggaaaaggagtaa

SEQ ID NO: 655275 - DNA, 33 bp, Homo sapien
cgtctttgcctgtcaaactcctctttagtcact

SEQ ID NO: 655276 - DNA, 33 bp, Homo sapien
cgtctttgcctgtcaacctcctctttagtcact

SEQ ID NO: 655277 - DNA, 33 bp, Homo sapien
gaagacaggaaatagacgctgggtggccaaagc

SEQ ID NO: 655278 - DNA, 33 bp, Homo sapien
gaagacaggaaatagatgctgggtggccaaagc

SEQ ID NO: 655279 - DNA, 33 bp, Homo sapien
ccccaactgctcagcaagtcattcaggccacct

SEQ ID NO: 655280 - DNA, 33 bp, Homo sapien
ccccaactgctcagcaggtcattcaggccacct

SEQ ID NO: 655281 - DNA, 33 bp, Homo sapien
aaatcatattactatccgagcctatcttttaca

SEQ ID NO: 655282 - DNA, 33 bp, Homo sapien
aaatcatattactatctgagcctatcttttaca

SEQ ID NO: 655283 - DNA, 33 bp, Homo sapien
aagctctgttaacacactaaacctgcttacttg

SEQ ID NO: 655284 - DNA, 33 bp, Homo sapien
aagctctgttaacacattaaacctgcttacttg

SEQ ID NO: 655285 - DNA, 33 bp, Homo sapien
cccatgtcatgtatacaagtggttcgagtgatt

SEQ ID NO: 655286 - DNA, 33 bp, Homo sapien
cccatgtcatgtatacgagtggttcgagtgatt

SEQ ID NO: 655287 - DNA, 33 bp, Homo sapien
caagtaagctactcaaataacaggcacagtcaa

SEQ ID NO: 655288 - DNA, 33 bp, Homo sapien
caagtaagctactcaagtaacaggcacagtcaa

SEQ ID NO: 655289 - DNA, 33 bp, Homo sapien
ttttccagtggctaaaaatagtttcttttagta

SEQ ID NO: 655290 - DNA, 33 bp, Homo sapien
ttttccagtggctaaatatagtttcttttagta

SEQ ID NO: 655291 - DNA, 33 bp, Homo sapien
gccagaaaacatggcacagttgtacagacattg

SEQ ID NO: 655292 - DNA, 33 bp, Homo sapien
gccagaaaacatggcagagttgtacagacattg

SEQ ID NO: 655293 - DNA, 33 bp, Homo sapien
ctaatggagtggatataaaagactgaaatgtgg

SEQ ID NO: 655294 - DNA, 33 bp, Homo sapien
ctaatggagtggatatgaaagactgaaatgtgg

SEQ ID NO: 655295 - DNA, 33 bp, Homo sapien
atactctaccttgacaataacatccagatatac

SEQ ID NO: 655296 - DNA, 33 bp, Homo sapien
atactctaccttgacactaacatccagatatac

SEQ ID NO: 655297 - DNA, 33 bp, Homo sapien
agtgggaccatttaaactgatgcattagaagac

SEQ ID NO: 655298 - DNA, 33 bp, Homo sapien
agtgggaccatttaaattgatgcattagaagac

SEQ ID NO: 655299 - DNA, 33 bp, Homo sapien
taagcactgatgtgggacatttagccagatgtc

SEQ ID NO: 655300 - DNA, 33 bp, Homo sapien
taagcactgatgtggggcatttagccagatgtc

SEQ ID NO: 655301 - DNA, 33 bp, Homo sapien
gcagaaagggactttgaagttgtagtgcaggct

SEQ ID NO: 655302 - DNA, 33 bp, Homo sapien
gcagaaagggactttgcagttgtagtgcaggct

SEQ ID NO: 655303 - DNA, 33 bp, Homo sapien
ggcctcagtcctataaccacagggaagtgaagt

SEQ ID NO: 655304 - DNA, 33 bp, Homo sapien
ggcctcagtcctataagcacagggaagtgaagt

SEQ ID NO: 655305 - DNA, 33 bp, Homo sapien
cctcaaccctttcttaataaccatctcctagtc

SEQ ID NO: 655306 - DNA, 33 bp, Homo sapien
cctcaaccctttcttagtaaccatctcctagtc

SEQ ID NO: 655307 - DNA, 33 bp, Homo sapien
tcctggattatttgcgccctttgagtatccagc

SEQ ID NO: 655308 - DNA, 33 bp, Homo sapien
tcctggattatttgcgtcctttgagtatccagc

SEQ ID NO: 655309 - DNA, 33 bp, Homo sapien
aaggagtctgattgcacattcagtccacaaagg

SEQ ID NO: 655310 - DNA, 33 bp, Homo sapien
aaggagtctgattgcatattcagtccacaaagg

SEQ ID NO: 655311 - DNA, 33 bp, Homo sapien
gttacttttcttgaaacagcacatctgaggaaa

SEQ ID NO: 655312 - DNA, 33 bp, Homo sapien
gttacttttcttgaaagagcacatctgaggaaa

SEQ ID NO: 655313 - DNA, 33 bp, Homo sapien
tgccttctgttcctcacaaaagaaaaacatgaa

SEQ ID NO: 655314 - DNA, 33 bp, Homo sapien
tgccttctgttcctcataaaagaaaaacatgaa

SEQ ID NO: 655315 - DNA, 33 bp, Homo sapien
gaaaaatacacaaaaacagcgtaagaaaagact

SEQ ID NO: 655316 - DNA, 33 bp, Homo sapien
gaaaaatacacaaaaatagcgtaagaaaagact

SEQ ID NO: 655317 - DNA, 33 bp, Homo sapien
cctaagctttatcacacggggttattgtgaaga

SEQ ID NO: 655318 - DNA, 33 bp, Homo sapien
cctaagctttatcacatggggttattgtgaaga

SEQ ID NO: 655319 - DNA, 33 bp, Homo sapien
tgtattatgagaagtacctgagaaaatatgtgt

SEQ ID NO: 655320 - DNA, 33 bp, Homo sapien
tgtattatgagaagtatctgagaaaatatgtgt

SEQ ID NO: 655321 - DNA, 33 bp, Homo sapien
gggctaaatgcagcaacagacataaagttagca

SEQ ID NO: 655322 - DNA, 33 bp, Homo sapien
gggctaaatgcagcaatagacataaagttagca

SEQ ID NO: 655323 - DNA, 33 bp, Homo sapien
attgcaataaaaaccactctacatttttcaaag

SEQ ID NO: 655324 - DNA, 33 bp, Homo sapien
attgcaataaaaaccagtctacatttttcaaag

SEQ ID NO: 655325 - DNA, 33 bp, Homo sapien
gtggatctccatcccacagagtcctgtagcagg

SEQ ID NO: 655326 - DNA, 33 bp, Homo sapien
gtggatctccatcccatagagtcctgtagcagg

SEQ ID NO: 655327 - DNA, 33 bp, Homo sapien
gtcgtgtctaaacaggaaactcaaggacggttt

SEQ ID NO: 655328 - DNA, 33 bp, Homo sapien
gtcgtgtctaaacaggcaactcaaggacggttt

SEQ ID NO: 655329 - DNA, 33 bp, Homo sapien
actttacctcagaaagacttcaagtttgcttgc

SEQ ID NO: 655330 - DNA, 33 bp, Homo sapien
actttacctcagaaaggcttcaagtttgcttgc

SEQ ID NO: 655331 - DNA, 33 bp, Homo sapien
tcaagtttgcttgcagaagtgagtaccagaaga

SEQ ID NO: 655332 - DNA, 33 bp, Homo sapien
tcaagtttgcttgcagcagtgagtaccagaaga

SEQ ID NO: 655333 - DNA, 33 bp, Homo sapien
cctgggtttggctaccagcgcagattaatagtt

SEQ ID NO: 655334 - DNA, 33 bp, Homo sapien
cctgggtttggctaccggcgcagattaatagtt

SEQ ID NO: 655335 - DNA, 33 bp, Homo sapien
gaggtgcccaaactcacagcaacttaggaagca

SEQ ID NO: 655336 - DNA, 33 bp, Homo sapien
gaggtgcccaaactcatagcaacttaggaagca

SEQ ID NO: 655337 - DNA, 33 bp, Homo sapien
gtccatctctgttccaaaaaaatgtggccaaaa

SEQ ID NO: 655338 - DNA, 33 bp, Homo sapien
gtccatctctgttccataaaaatgtggccaaaa

SEQ ID NO: 655339 - DNA, 33 bp, Homo sapien
aacttccctgtgctcactgacccacatggaatt

SEQ ID NO: 655340 - DNA, 33 bp, Homo sapien
aacttccctgtgctcattgacccacatggaatt

SEQ ID NO: 655341 - DNA, 33 bp, Homo sapien
gcacctttgatgaaaccggtaatcatccagatt

SEQ ID NO: 655342 - DNA, 33 bp, Homo sapien
gcacctttgatgaaactggtaatcatccagatt

SEQ ID NO: 655343 - DNA, 33 bp, Homo sapien
ataccaggcattcaataatagaaaacagaggcc

SEQ ID NO: 655344 - DNA, 33 bp, Homo sapien
ataccaggcattcaatgatagaaaacagaggcc

SEQ ID NO: 655345 - DNA, 33 bp, Homo sapien
tctgtgcctttgctcacggtattttcttagctt

SEQ ID NO: 655346 - DNA, 33 bp, Homo sapien
tctgtgcctttgctcatggtattttcttagctt

SEQ ID NO: 655347 - DNA, 33 bp, Homo sapien; identical to SEQ ID NO: 655345

SEQ ID NO: 655348 - DNA, 33 bp, Homo sapien; identical to SEQ ID NO: 655346

SEQ ID NO: 655349 - DNA, 33 bp, Homo sapien
acaaaacatcagggggaacacaagattcacata

SEQ ID NO: 655350 - DNA, 33 bp, Homo sapien
acaaaacatcaggggggacacaagattcacata

SEQ ID NO: 655351 - DNA, 33 bp, Homo sapien
gctgaacattaaacaaccaaacagagcaaacaa

SEQ ID NO: 655352 - DNA, 33 bp, Homo sapien
gctgaacattaaacaatcaaacagagcaaacaa

SEQ ID NO: 655353 - DNA, 33 bp, Homo sapien
accttatctcactgaacagggtatgggaaattt

SEQ ID NO: 655354 - DNA, 33 bp, Homo sapien
accttatctcactgaatagggtatgggaaattt

SEQ ID NO: 655355 - DNA, 33 bp, Homo sapien
aacaggcattctcaacagctttcaagttctggt

SEQ ID NO: 655356 - DNA, 33 bp, Homo sapien
aacaggcattctcaacggctttcaagttctggt

SEQ ID NO: 655357 - DNA, 33 bp, Homo sapien
actggactcctgtgcacataggttaggaagaag

SEQ ID NO: 655358 - DNA, 33 bp, Homo sapien
actggactcctgtgcatataggttaggaagaag

SEQ ID NO: 655359 - DNA, 33 bp, Homo sapien
aaagacgtaagaccaaacaggatggtgtagtga

SEQ ID NO: 655360 - DNA, 33 bp, Homo sapien
aaagacgtaagaccaatcaggatggtgtagtga

SEQ ID NO: 655361 - DNA, 33 bp, Homo sapien
agttttgggtccctaaggtcacatgtaaacatt

SEQ ID NO: 655362 - DNA, 33 bp, Homo sapien
agttttgggtccctaatgtcacatgtaaacatt

SEQ ID NO: 655363 - DNA, 33 bp, Homo sapien
aggacaggaaaggcaaggctgatgtcagagcaa

SEQ ID NO: 655364 - DNA, 33 bp, Homo sapien
aggacaggaaaggcaatgctgatgtcagagcaa

SEQ ID NO: 655365 - DNA, 33 bp, Homo sapien
aacagaagagagaaaagaaacaagtaaaattca

SEQ ID NO: 655366 - DNA, 33 bp, Homo sapien
aacagaagagagaaaataaacaagtaaaattca

SEQ ID NO: 655367 - DNA, 33 bp, Homo sapien
gccggtgagacaccagaaactgtgagtaaatgg

SEQ ID NO: 655368 - DNA, 33 bp, Homo sapien
gccggtgagacaccagcaactgtgagtaaatgg

SEQ ID NO: 655369 - DNA, 33 bp, Homo sapien
atgttctaccttctgacagatcacagggtgagc

SEQ ID NO: 655370 - DNA, 33 bp, Homo sapien
atgttctaccttctgatagatcacagggtgagc

SEQ ID NO: 655371 - DNA, 33 bp, Homo sapien
tgggttctacctccaaaattttctggaggcttg

SEQ ID NO: 655372 - DNA, 33 bp, Homo sapien
tgggttctacctccaagattttctggaggcttg

SEQ ID NO: 655373 - DNA, 33 bp, Homo sapien
caacactatgagttagacagacaatatattgat

SEQ ID NO: 655374 - DNA, 33 bp, Homo sapien
caacactatgagttaggcagacaatatattgat

SEQ ID NO: 655375 - DNA, 33 bp, Homo sapien
tattgatcccatttcaaagacaaggagagaggt

SEQ ID NO: 655376 - DNA, 33 bp, Homo sapien
tattgatcccatttcacagacaaggagagaggt

SEQ ID NO: 655377 - DNA, 33 bp, Homo sapien
taaaaatgaagaaacaaccaattcttactcagg

SEQ ID NO: 655378 - DNA, 33 bp, Homo sapien
taaaaatgaagaaacatccaattcttactcagg

SEQ ID NO: 655379 - DNA, 33 bp, Homo sapien
aaaatttgtaggtttccctctatccatccattg

SEQ ID NO: 655380 - DNA, 33 bp, Homo sapien
aaaatttgtaggtttctctctatccatccattg

SEQ ID NO: 655381 - DNA, 33 bp, Homo sapien
tgagccataggaaaaaaaaggatatgttaatcc

SEQ ID NO: 655382 - DNA, 33 bp, Homo sapien
tgagccataggaaaaagaaggatatgttaatcc

SEQ ID NO: 655383 - DNA, 33 bp, Homo sapien
aacaacaataacaaaacgaacatagtcttaact

SEQ ID NO: 655384 - DNA, 33 bp, Homo sapien
aacaacaataacaaaatgaacatagtcttaact

SEQ ID NO: 655385 - DNA, 33 bp, Homo sapien
tggaaactaaggcacacctgattccagatttgg

SEQ ID NO: 655386 - DNA, 33 bp, Homo sapien
tggaaactaaggcacagctgattccagatttgg

SEQ ID NO: 655387 - DNA, 33 bp, Homo sapien
ttgacgaaacaaaggcacaaattcaaatccact

SEQ ID NO: 655388 - DNA, 33 bp, Homo sapien
ttgacgaaacaaaggctcaaattcaaatccact

SEQ ID NO: 655389 - DNA, 33 bp, Homo sapien
agaagtggttaacagcaagacacaattaatgcc

SEQ ID NO: 655390 - DNA, 33 bp, Homo sapien
agaagtggttaacagcgagacacaattaatgcc

SEQ ID NO: 655391 - DNA, 33 bp, Homo sapien
gtaagaaaaaataaagaagcaagtcttggaagc

SEQ ID NO: 655392 - DNA, 33 bp, Homo sapien
gtaagaaaaaataaagcagcaagtcttggaagc

SEQ ID NO: 655393 - DNA, 33 bp, Homo sapien
gcatagtggggctgtaagagggctactatccta

SEQ ID NO: 655394 - DNA, 33 bp, Homo sapien
gcatagtggggctgtaggagggctactatccta

SEQ ID NO: 655395 - DNA, 33 bp, Homo sapien
ttagtttgcctagaacaaattccacctttctct

SEQ ID NO: 655396 - DNA, 33 bp, Homo sapien
ttagtttgcctagaaccaattccacctttctct

SEQ ID NO: 655397 - DNA, 33 bp, Homo sapien; identical to SEQ ID NO: 655395

SEQ ID NO: 655398 - DNA, 33 bp, Homo sapien; identical to SEQ ID NO: 655396

SEQ ID NO: 655399 - DNA, 33 bp, Homo sapien
ccctattataaaacaccgaagttgccaaattca

SEQ ID NO: 655400 - DNA, 33 bp, Homo sapien
ccctattataaaacactgaagttgccaaattca

SEQ ID NO: 655401 - DNA, 33 bp, Homo sapien
tggttatacagtcctaaagcttaaaggacactt

SEQ ID NO: 655402 - DNA, 33 bp, Homo sapien
tggttatacagtcctagagcttaaaggacactt

SEQ ID NO: 655403 - DNA, 33 bp, Homo sapien
ccacgttgttagtcttcaagaccatgcacaata

SEQ ID NO: 655404 - DNA, 33 bp, Homo sapien
ccacgttgttagtctttaagaccatgcacaata

SEQ ID NO: 655405 - DNA, 33 bp, Homo sapien
ttagttaaaaagcgtaagacctattatttgaca

SEQ ID NO: 655406 - DNA, 33 bp, Homo sapien
ttagttaaaaagcgtacgacctattatttgaca

SEQ ID NO: 655407 - DNA, 33 bp, Homo sapien
cagagttctcgccttccgaaagtcccatttgct

SEQ ID NO: 655408 - DNA, 33 bp, Homo sapien
cagagttctcgccttctgaaagtcccatttgct

SEQ ID NO: 655409 - DNA, 33 bp, Homo sapien
gatgagaagacctgacaacctccgaaggagcag

SEQ ID NO: 655410 - DNA, 33 bp, Homo sapien
gatgagaagacctgaccacctccgaaggagcag

SEQ ID NO: 655411 - DNA, 33 bp, Homo sapien
taccatgggaaactacacggcaataaaatggaa

SEQ ID NO: 655412 - DNA, 33 bp, Homo sapien
taccatgggaaactacgcggcaataaaatggaa

SEQ ID NO: 655413 - DNA, 33 bp, Homo sapien
aaccaaagaaatcagcagaagaccataaaaaca

SEQ ID NO: 655414 - DNA, 33 bp, Homo sapien
aaccaaagaaatcagcggaagaccataaaaaca

SEQ ID NO: 655415 - DNA, 33 bp, Homo sapien
agttcacaggcaagcacgagagataatcatctc

SEQ ID NO: 655416 - DNA, 33 bp, Homo sapien
agttcacaggcaagcaggagagataatcatctc

SEQ ID NO: 655417 - DNA, 33 bp, Homo sapien
agcatctaatgacacacactcaaaatgggtaaa

SEQ ID NO: 655418 - DNA, 33 bp, Homo sapien
agcatctaatgacacagactcaaaatgggtaaa

SEQ ID NO: 655419 - DNA, 33 bp, Homo sapien
cttcctccctcccgccaatgtttgttaagcacc

SEQ ID NO: 655420 - DNA, 33 bp, Homo sapien
cttcctccctcccgccgatgtttgttaagcacc

SEQ ID NO: 655421 - DNA, 33 bp, Homo sapien
tatagaatttgcctacgaaaatttgccttgctc

SEQ ID NO: 655422 - DNA, 33 bp, Homo sapien
tatagaatttgcctactaaaatttgccttgctc

SEQ ID NO: 655423 - DNA, 33 bp, Homo sapien
cactttaatgcagtgacactcaggtataaaact

SEQ ID NO: 655424 - DNA, 33 bp, Homo sapien
cactttaatgcagtgatactcaggtataaaact

SEQ ID NO: 655425 - DNA, 33 bp, Homo sapien
gtctcaccagactcggccaagtaaccagtgcac

SEQ ID NO: 655426 - DNA, 33 bp, Homo sapien
gtctcaccagactcgggcaagtaaccagtgcac

SEQ ID NO: 655427 - DNA, 33 bp, Homo sapien
ccttataaaagagactcagcgcactaactagtt

SEQ ID NO: 655428 - DNA, 33 bp, Homo sapien
ccttataaaagagactgagcgcactaactagtt

SEQ ID NO: 655429 - DNA, 33 bp, Homo sapien
tactacaacactagagaattgtggtattcctta

SEQ ID NO: 655430 - DNA, 33 bp, Homo sapien
tactacaacactagaggattgtggtattcctta

SEQ ID NO: 655431 - DNA, 33 bp, Homo sapien
ataaaatgaagtagaaacttggcagtgatcctg

SEQ ID NO: 655432 - DNA, 33 bp, Homo sapien
ataaaatgaagtagaagcttggcagtgatcctg

SEQ ID NO: 655433 - DNA, 33 bp, Homo sapien
tggtaatagtcaatgaagaggattagtgttgga

SEQ ID NO: 655434 - DNA, 33 bp, Homo sapien
tggtaatagtcaatgaggaggattagtgttgga

SEQ ID NO: 655435 - DNA, 33 bp, Homo sapien
gttgtatttcttttcaataatgtgagtggtcag

SEQ ID NO: 655436 - DNA, 33 bp, Homo sapien
gttgtatttcttttcagtaatgtgagtggtcag

SEQ ID NO: 655437 - DNA, 33 bp, Homo sapien
tattttctccaatcaccatttatttcacaagca

SEQ ID NO: 655438 - DNA, 33 bp, Homo sapien
tattttctccaatcactatttatttcacaagca

SEQ ID NO: 655439 - DNA, 33 bp, Homo sapien
cctggttttgttaccaacttgaccaaggataaa

SEQ ID NO: 655440 - DNA, 33 bp, Homo sapien
cctggttttgttaccagcttgaccaaggataaa

SEQ ID NO: 655441 - DNA, 33 bp, Homo sapien
catgtttccaatttgactaggaagacattagca

SEQ ID NO: 655442 - DNA, 33 bp, Homo sapien
catgtttccaatttgattaggaagacattagca

SEQ ID NO: 655443 - DNA, 33 bp, Homo sapien
cctgtgtcacattaaaattattggcaaatgtgt

SEQ ID NO: 655444 - DNA, 33 bp, Homo sapien
cctgtgtcacattaaagttattggcaaatgtgt

SEQ ID NO: 655445 - DNA, 33 bp, Homo sapien
aatcttgcttttttcacgggggaagctaccatg

SEQ ID NO: 655446 - DNA, 33 bp, Homo sapien
aatcttgcttttttcatgggggaagctaccatg

SEQ ID NO: 655447 - DNA, 33 bp, Homo sapien
attagagaggcttcaccgcaaatgaactagagc

SEQ ID NO: 655448 - DNA, 33 bp, Homo sapien
attagagaggcttcactgcaaatgaactagagc

SEQ ID NO: 655449 - DNA, 33 bp, Homo sapien
ccccttcctcatgggcacatctaaattccaaag

SEQ ID NO: 655450 - DNA, 33 bp, Homo sapien
ccccttcctcatgggcgcatctaaattccaaag

SEQ ID NO: 655451 - DNA, 33 bp, Homo sapien
atccgttggaagaaaaagcaacggttcagtatt

SEQ ID NO: 655452 - DNA, 33 bp, Homo sapien
atccgttggaagaaaaggcaacggttcagtatt

SEQ ID NO: 655453 - DNA, 33 bp, Homo sapien
gtctctatccaaaacactgttagccccagcttt

SEQ ID NO: 655454 - DNA, 33 bp, Homo sapien
gtctctatccaaaacattgttagccccagcttt

SEQ ID NO: 655455 - DNA, 33 bp, Homo sapien
caaatagcaccttgtacataggaaatcccgaag

SEQ ID NO: 655456 - DNA, 33 bp, Homo sapien
caaatagcaccttgtatataggaaatcccgaag

SEQ ID NO: 655457 - DNA, 33 bp, Homo sapien
tgttatttacagacccagaaagaagagggcagc

SEQ ID NO: 655458 - DNA, 33 bp, Homo sapien
tgttatttacagacccggaaagaagagggcagc

SEQ ID NO: 655459 - DNA, 33 bp, Homo sapien
tcctttacaatgaaacaatcactcattttacct

SEQ ID NO: 655460 - DNA, 33 bp, Homo sapien
tcctttacaatgaaactatcactcattttacct

SEQ ID NO: 655461 - DNA, 33 bp, Homo sapien
ggcagtttgtcctcacccatttcctggaggaga

SEQ ID NO: 655462 - DNA, 33 bp, Homo sapien
ggcagtttgtcctcactcatttcctggaggaga

SEQ ID NO: 655463 - DNA, 33 bp, Homo sapien
ttggcacttagtcattgaagcctacccttgtca

SEQ ID NO: 655464 - DNA, 33 bp, Homo sapien
ttggcacttagtcatttaagcctacccttgtca

SEQ ID NO: 655465 - DNA, 33 bp, Homo sapien
cagactgggtaagatgaaacagaagaaaatact

SEQ ID NO: 655466 - DNA, 33 bp, Homo sapien
cagactgggtaagatgtaacagaagaaaatact

SEQ ID NO: 655467 - DNA, 33 bp, Homo sapien
ggttctcaaagtaaaaactgcccagaaatatgt

SEQ ID NO: 655468 - DNA, 33 bp, Homo sapien
ggttctcaaagtaaaacctgcccagaaatatgt

SEQ ID NO: 655469 - DNA, 33 bp, Homo sapien
caatgaatctgcacaagttaagttggctagtat

SEQ ID NO: 655470 - DNA, 33 bp, Homo sapien
caatgaatctgcacaatttaagttggctagtat

SEQ ID NO: 655471 - DNA, 33 bp, Homo sapien
aactgtaatgaagaagactaaattgaccagtta

SEQ ID NO: 655472 - DNA, 33 bp, Homo sapien
aactgtaatgaagaaggctaaattgaccagtta

SEQ ID NO: 655473 - DNA, 33 bp, Homo sapien
atcgaacaatgcacacactgtgttaactcacag

SEQ ID NO: 655474 - DNA, 33 bp, Homo sapien
atcgaacaatgcacaccctgtgttaactcacag

SEQ ID NO: 655475 - DNA, 33 bp, Homo sapien
agaactgtgaatcaagaaagttcccattaattg

SEQ ID NO: 655476 - DNA, 33 bp, Homo sapien
agaactgtgaatcaaggaagttcccattaattg

SEQ ID NO: 655477 - DNA, 33 bp, Homo sapien
aaataaccagatctcactcactatcacaagaac

SEQ ID NO: 655478 - DNA, 33 bp, Homo sapien
aaataaccagatctcagtcactatcacaagaac

SEQ ID NO: 655479 - DNA, 33 bp, Homo sapien
tggatcataaggtagcactatttttagtttttt

SEQ ID NO: 655480 - DNA, 33 bp, Homo sapien
tggatcataaggtagcgctatttttagtttttt

SEQ ID NO: 655481 - DNA, 33 bp, Homo sapien
ccaaaacagatacacagaccaatagaaccgaac

SEQ ID NO: 655482 - DNA, 33 bp, Homo sapien
ccaaaacagatacacataccaatagaaccgaac

SEQ ID NO: 655483 - DNA, 33 bp, Homo sapien
caaatacttgtgacaaaggagagtggatacact

SEQ ID NO: 655484 - DNA, 33 bp, Homo sapien
caaatacttgtgacaagggagagtggatacact

SEQ ID NO: 655485 - DNA, 33 bp, Homo sapien
tgtggtgagattgggaaaattttcatgaactat

SEQ ID NO: 655486 - DNA, 33 bp, Homo sapien
tgtggtgagattgggacaattttcatgaactat

SEQ ID NO: 655487 - DNA, 33 bp, Homo sapien
atctggtatagccacaataatgttgaaccaagt

SEQ ID NO: 655488 - DNA, 33 bp, Homo sapien
atctggtatagccacagtaatgttgaaccaagt

SEQ ID NO: 655489 - DNA, 33 bp, Homo sapien
atgcagagaagacaaacattccagtggttcctt

SEQ ID NO: 655490 - DNA, 33 bp, Homo sapien
atgcagagaagacaaatattccagtggttcctt

SEQ ID NO: 655491 - DNA, 33 bp, Homo sapien
aaaatgtgtcagattacacaaactattttgtaa

SEQ ID NO: 655492 - DNA, 33 bp, Homo sapien
aaaatgtgtcagattatacaaactattttgtaa

SEQ ID NO: 655493 - DNA, 33 bp, Homo sapien
gtggcccaaagactgacaaggagcaagagatgt

SEQ ID NO: 655494 - DNA, 33 bp, Homo sapien
gtggcccaaagactgataaggagcaagagatgt

SEQ ID NO: 655495 - DNA, 33 bp, Homo sapien
caaatgatcctccaaaacacagatgttccattt

SEQ ID NO: 655496 - DNA, 33 bp, Homo sapien
caaatgatcctccaaagcacagatgttccattt

SEQ ID NO: 655497 - DNA, 33 bp, Homo sapien
agttgctgtgatcactaaatgagataaaagata

SEQ ID NO: 655498 - DNA, 33 bp, Homo sapien
agttgctgtgatcactcaatgagataaaagata

SEQ ID NO: 655499 - DNA, 33 bp, Homo sapien
tctggaaaagtctgtacgtcacggggcataatt

SEQ ID NO: 655500 - DNA, 33 bp, Homo sapien
tctggaaaagtctgtatgtcacggggcataatt

SEQ ID NO: 655501 - DNA, 33 bp, Homo sapien
gccatctacagctctcaacatttaattaatcaa

SEQ ID NO: 655502 - DNA, 33 bp, Homo sapien
gccatctacagctctcgacatttaattaatcaa

SEQ ID NO: 655503 - DNA, 33 bp, Homo sapien
aaaatggagcctcctcacctttcttcttttgct

SEQ ID NO: 655504 - DNA, 33 bp, Homo sapien
aaaatggagcctcctcgcctttcttcttttgct

SEQ ID NO: 655505 - DNA, 33 bp, Homo sapien
ccactcccaccagtaaataaaaatggcatctcc

SEQ ID NO: 655506 - DNA, 33 bp, Homo sapien
ccactcccaccagtaagtaaaaatggcatctcc

SEQ ID NO: 655507 - DNA, 33 bp, Homo sapien
aatgatgaacagacacactatggttgtttggac

SEQ ID NO: 655508 - DNA, 33 bp, Homo sapien
aatgatgaacagacacgctatggttgtttggac

SEQ ID NO: 655509 - DNA, 33 bp, Homo sapien
tgtgtcctgattcgtcaccttttctcccctctt

SEQ ID NO: 655510 - DNA, 33 bp, Homo sapien
tgtgtcctgattcgtcgccttttctcccctctt

SEQ ID NO: 655511 - DNA, 33 bp, Homo sapien
acactctgtatgcaaacctccacttctcaacat

SEQ ID NO: 655512 - DNA, 33 bp, Homo sapien
acactctgtatgcaaatctccacttctcaacat

SEQ ID NO: 655513 - DNA, 33 bp, Homo sapien
cttattatcagtggacaaatttgtaaatctcag

SEQ ID NO: 655514 - DNA, 33 bp, Homo sapien
cttattatcagtggacgaatttgtaaatctcag

SEQ ID NO: 655515 - DNA, 33 bp, Homo sapien
cccaaagcagcaaaatcaagtagtccaggagga

SEQ ID NO: 655516 - DNA, 33 bp, Homo sapien
cccaaagcagcaaaattaagtagtccaggagga

SEQ ID NO: 655517 - DNA, 33 bp, Homo sapien
cttctttagtctgatacggagttcgaagttgct

SEQ ID NO: 655518 - DNA, 33 bp, Homo sapien
cttctttagtctgatatggagttcgaagttgct

SEQ ID NO: 655519 - DNA, 33 bp, Homo sapien
tactgactttaaacccaggctgtgtgtaagctg

SEQ ID NO: 655520 - DNA, 33 bp, Homo sapien
tactgactttaaaccccggctgtgtgtaagctg

SEQ ID NO: 655521 - DNA, 33 bp, Homo sapien
acctatagaaagagaaagttattgctaatattt

SEQ ID NO: 655522 - DNA, 33 bp, Homo sapien
acctatagaaagagaaggttattgctaatattt

SEQ ID NO: 655523 - DNA, 33 bp, Homo sapien
gctcaacagcaggcaaagtaagtaacttcttca

SEQ ID NO: 655524 - DNA, 33 bp, Homo sapien
gctcaacagcaggcaaggtaagtaacttcttca

SEQ ID NO: 655525 - DNA, 33 bp, Homo sapien
aagccacccaaagagaataattggcctacgaga

SEQ ID NO: 655526 - DNA, 33 bp, Homo sapien
aagccacccaaagagagtaattggcctacgaga

SEQ ID NO: 655527 - DNA, 33 bp, Homo sapien
gcaagtactggactaaaggtgatgtggttggtg

SEQ ID NO: 655528 - DNA, 33 bp, Homo sapien
gcaagtactggactaagggtgatgtggttggtg

SEQ ID NO: 655529 - DNA, 33 bp, Homo sapien
acaaaccatagctgcaagcaaccataagaacag

SEQ ID NO: 655530 - DNA, 33 bp, Homo sapien
acaaaccatagctgcacgcaaccataagaacag

SEQ ID NO: 655531 - DNA, 33 bp, Homo sapien
gatctcacaaaagtaacgttaagcaacagaagc

SEQ ID NO: 655532 - DNA, 33 bp, Homo sapien
gatctcacaaaagtaatgttaagcaacagaagc

SEQ ID NO: 655533 - DNA, 33 bp, Homo sapien
tttttgtttgtggtaaacctgtaccaagcaaat

SEQ ID NO: 655534 - DNA, 33 bp, Homo sapien
tttttgtttgtggtaatcctgtaccaagcaaat

SEQ ID NO: 655535 - DNA, 33 bp, Homo sapien
gagattggtgatatacaggcttgtccataaggt

SEQ ID NO: 655536 - DNA, 33 bp, Homo sapien
gagattggtgatataccggcttgtccataaggt

SEQ ID NO: 655537 - DNA, 33 bp, Homo sapien
ggctccaccaagaaagacttctgaggtttgact

SEQ ID NO: 655538 - DNA, 33 bp, Homo sapien
ggctccaccaagaaaggcttctgaggtttgact

SEQ ID NO: 655539 - DNA, 33 bp, Homo sapien
cacaaaaatcctcaaaaaatagtagcaacccga

SEQ ID NO: 655540 - DNA, 33 bp, Homo sapien
cacaaaaatcctcaaataatagtagcaacccga

SEQ ID NO: 655541 - DNA, 33 bp, Homo sapien
cagaagcagagtccagaccttgtctatgaatca

SEQ ID NO: 655542 - DNA, 33 bp, Homo sapien
cagaagcagagtccaggccttgtctatgaatca

SEQ ID NO: 655543 - DNA, 33 bp, Homo sapien
taattttccctataacactctcttacttgtctc

SEQ ID NO: 655544 - DNA, 33 bp, Homo sapien
taattttccctataactctctcttacttgtctc

SEQ ID NO: 655545 - DNA, 33 bp, Homo sapien
aaccaagtgatgccaaaattatagagatgggaa

SEQ ID NO: 655546 - DNA, 33 bp, Homo sapien
aaccaagtgatgccaagattatagagatgggaa

SEQ ID NO: 655547 - DNA, 33 bp, Homo sapien
tagaatgcataacaaagtgggtacacctgaccc

SEQ ID NO: 655548 - DNA, 33 bp, Homo sapien
tagaatgcataacaaattgggtacacctgaccc

SEQ ID NO: 655549 - DNA, 33 bp, Homo sapien
aagccagaaagaggaacaaaaatatgcattgta

SEQ ID NO: 655550 - DNA, 33 bp, Homo sapien
aagccagaaagaggaataaaaatatgcattgta

SEQ ID NO: 655551 - DNA, 33 bp, Homo sapien
gcttccctttgctgaacgaacgagggtagaatt

SEQ ID NO: 655552 - DNA, 33 bp, Homo sapien
gcttccctttgctgaaggaacgagggtagaatt

SEQ ID NO: 655553 - DNA, 33 bp, Homo sapien
tgagtatgcaccaccaaaggtttgtaaggctgc

SEQ ID NO: 655554 - DNA, 33 bp, Homo sapien
tgagtatgcaccaccacaggtttgtaaggctgc

SEQ ID NO: 655555 - DNA, 33 bp, Homo sapien
gtatattctaaaaagacgaaagcgctactgtaa

SEQ ID NO: 655556 - DNA, 33 bp, Homo sapien
gtatattctaaaaagaggaaagcgctactgtaa

SEQ ID NO: 655557 - DNA, 33 bp, Homo sapien
acaagtggcctacagcaatgctcagatttttgt

SEQ ID NO: 655558 - DNA, 33 bp, Homo sapien
acaagtggcctacagcgatgctcagatttttgt

SEQ ID NO: 655559 - DNA, 33 bp, Homo sapien
atagctgaattgattcactaaagatatgaagag

SEQ ID NO: 655560 - DNA, 33 bp, Homo sapien
atagctgaattgattccctaaagatatgaagag

SEQ ID NO: 655561 - DNA, 33 bp, Homo sapien
catcgggtcatgggataatcatgctgttggtat

SEQ ID NO: 655562 - DNA, 33 bp, Homo sapien
catcgggtcatgggattatcatgctgttggtat

SEQ ID NO: 655563 - DNA, 33 bp, Homo sapien
actcagccaggctgcacgagtaatgagtaccaa

SEQ ID NO: 655564 - DNA, 33 bp, Homo sapien
actcagccaggctgcatgagtaatgagtaccaa

SEQ ID NO: 655565 - DNA, 33 bp, Homo sapien
tgttccatatgttggaaatactggacccaaaca

SEQ ID NO: 655566 - DNA, 33 bp, Homo sapien
tgttccatatgttggagatactggacccaaaca

SEQ ID NO: 655567 - DNA, 33 bp, Homo sapien
gatagaacctagttccaactctcaccgttttat

SEQ ID NO: 655568 - DNA, 33 bp, Homo sapien
gatagaacctagttccgactctcaccgttttat

SEQ ID NO: 655569 - DNA, 33 bp, Homo sapien
atgaccacgggaagaaatcgggtatagttaaag

SEQ ID NO: 655570 - DNA, 33 bp, Homo sapien
atgaccacgggaagaagtcgggtatagttaaag

SEQ ID NO: 655571 - DNA, 33 bp, Homo sapien
tcacagttgttatacccctgctctcagcactgt

SEQ ID NO: 655572 - DNA, 33 bp, Homo sapien
tcacagttgttatacctctgctctcagcactgt

SEQ ID NO: 655573 - DNA, 33 bp, Homo sapien
aaggacaatagtgatactaatcttgtagctagg

SEQ ID NO: 655574 - DNA, 33 bp, Homo sapien
aaggacaatagtgatattaatcttgtagctagg

SEQ ID NO: 655575 - DNA, 33 bp, Homo sapien
aatgagcaaatagaacaatcagccaatgctcaa

SEQ ID NO: 655576 - DNA, 33 bp, Homo sapien
aatgagcaaatagaacgatcagccaatgctcaa

SEQ ID NO: 655577 - DNA, 33 bp, Homo sapien
tacatctgtaaatgtgaagtgaagctatggtgt

SEQ ID NO: 655578 - DNA, 33 bp, Homo sapien
tacatctgtaaatgtggagtgaagctatggtgt

SEQ ID NO: 655579 - DNA, 33 bp, Homo sapien
agggtcttctgaaatacagtgaaagtaaagatg

SEQ ID NO: 655580 - DNA, 33 bp, Homo sapien
agggtcttctgaaatatagtgaaagtaaagatg

SEQ ID NO: 655581 - DNA, 33 bp, Homo sapien
acaactctctcaccagcagttgatgcctttatg

SEQ ID NO: 655582 - DNA, 33 bp, Homo sapien
acaactctctcaccagtagttgatgcctttatg

SEQ ID NO: 655583 - DNA, 33 bp, Homo sapien
atgtgggccaagtccaaaggaaaccaccaagca

SEQ ID NO: 655584 - DNA, 33 bp, Homo sapien
atgtgggccaagtccagaggaaaccaccaagca

SEQ ID NO: 655585 - DNA, 33 bp, Homo sapien
tttatacaggagtaaacactaaagaccatatgc

SEQ ID NO: 655586 - DNA, 33 bp, Homo sapien
tttatacaggagtaaatactaaagaccatatgc

SEQ ID NO: 655587 - DNA, 33 bp, Homo sapien
atgctaatggttcttaagagacatatactaaaa

SEQ ID NO: 655588 - DNA, 33 bp, Homo sapien
atgctaatggttcttaggagacatatactaaaa

SEQ ID NO: 655589 - DNA, 33 bp, Homo sapien
ttcaacaccaaaggtgaacaccgatggacctac

SEQ ID NO: 655590 - DNA, 33 bp, Homo sapien
ttcaacaccaaaggtggacaccgatggacctac

SEQ ID NO: 655591 - DNA, 33 bp, Homo sapien
ttctaaacctgtataacactcagtgagatcttc

SEQ ID NO: 655592 - DNA, 33 bp, Homo sapien
ttctaaacctgtataatactcagtgagatcttc

SEQ ID NO: 655593 - DNA, 33 bp, Homo sapien
ctgcaaaactgggcaagaactgccaagaagttt

SEQ ID NO: 655594 - DNA, 33 bp, Homo sapien
ctgcaaaactgggcaataactgccaagaagttt

SEQ ID NO: 655595 - DNA, 33 bp, Homo sapien
gtttaaaaattacaaccgacactctctgcatcc

SEQ ID NO: 655596 - DNA, 33 bp, Homo sapien
gtttaaaaattacaactgacactctctgcatcc

SEQ ID NO: 655597 - DNA, 33 bp, Homo sapien
tagtgcatctgaaatacgattctataacaccta

SEQ ID NO: 655598 - DNA, 33 bp, Homo sapien
tagtgcatctgaaatatgattctataacaccta

SEQ ID NO: 655599 - DNA, 33 bp, Homo sapien
atctctaggttgcttacctctaggttgcttgta

SEQ ID NO: 655600 - DNA, 33 bp, Homo sapien
atctctaggttgcttatctctaggttgcttgta

SEQ ID NO: 655601 - DNA, 33 bp, Homo sapien
atggttcttttgtgcacgtcctgaaaatcaaga

SEQ ID NO: 655602 - DNA, 33 bp, Homo sapien
atggttcttttgtgcatgtcctgaaaatcaaga

SEQ ID NO: 655603 - DNA, 33 bp, Homo sapien
cggttctctttccagcactaactttacctgctt

SEQ ID NO: 655604 - DNA, 33 bp, Homo sapien
cggttctctttccagcgctaactttacctgctt

SEQ ID NO: 655605 - DNA, 33 bp, Homo sapien
tgaagaaaggaggcacaaatgcatcaggagggg

SEQ ID NO: 655606 - DNA, 33 bp, Homo sapien
tgaagaaaggaggcacgaatgcatcaggagggg

SEQ ID NO: 655607 - DNA, 33 bp, Homo sapien
agttgccactattctaacctagttgccactttc

SEQ ID NO: 655608 - DNA, 33 bp, Homo sapien
agttgccactattctagcctagttgccactttc

SEQ ID NO: 655609 - DNA, 33 bp, Homo sapien
gggctaaagataatgacgattgaaagaaaagca

SEQ ID NO: 655610 - DNA, 33 bp, Homo sapien
gggctaaagataatgaggattgaaagaaaagca

SEQ ID NO: 655611 - DNA, 33 bp, Homo sapien
cagttatgaactcaagacaaactaagctgcctc

SEQ ID NO: 655612 - DNA, 33 bp, Homo sapien
cagttatgaactcaaggcaaactaagctgcctc

SEQ ID NO: 655613 - DNA, 33 bp, Homo sapien
acaatcaaacttaaacagataaggagctgcttc

SEQ ID NO: 655614 - DNA, 33 bp, Homo sapien
acaatcaaacttaaacggataaggagctgcttc

SEQ ID NO: 655615 - DNA, 33 bp, Homo sapien
ggactgtcctgggaaacctggaatgtagggtgt

SEQ ID NO: 655616 - DNA, 33 bp, Homo sapien
ggactgtcctgggaaatctggaatgtagggtgt

SEQ ID NO: 655617 - DNA, 33 bp, Homo sapien
cgggaccgcgagttaaaaggagaaggcgcgccc

SEQ ID NO: 655618 - DNA, 33 bp, Homo sapien
cgggaccgcgagttaagaggagaaggcgcgccc

SEQ ID NO: 655619 - DNA, 33 bp, Homo sapien
tcttggactccatgtaataaccatgtacaagtt

SEQ ID NO: 655620 - DNA, 33 bp, Homo sapien
tcttggactccatgtagtaaccatgtacaagtt

SEQ ID NO: 655621 - DNA, 33 bp, Homo sapien
ctaatccagtgcctgacacaacaaaattcttaa

SEQ ID NO: 655622 - DNA, 33 bp, Homo sapien
ctaatccagtgcctgagacaacaaaattcttaa

SEQ ID NO: 655623 - DNA, 33 bp, Homo sapien
ttctgagtgagtttcacgacaaacaatggaacc

SEQ ID NO: 655624 - DNA, 33 bp, Homo sapien
ttctgagtgagtttcatgacaaacaatggaacc

SEQ ID NO: 655625 - DNA, 33 bp, Homo sapien
tccaagactgatttagaacgacctgtctgtttt

SEQ ID NO: 655626 - DNA, 33 bp, Homo sapien
tccaagactgatttaggacgacctgtctgtttt

SEQ ID NO: 655627 - DNA, 33 bp, Homo sapien
tttattcttcctctaaactccagatccacattg

SEQ ID NO: 655628 - DNA, 33 bp, Homo sapien
tttattcttcctctaagctccagatccacattg

SEQ ID NO: 655629 - DNA, 33 bp, Homo sapien
tgagaaagaaaagccacagtggtgatgccaaac

SEQ ID NO: 655630 - DNA, 33 bp, Homo sapien
tgagaaagaaaagccatagtggtgatgccaaac

SEQ ID NO: 655631 - DNA, 33 bp, Homo sapien
tgctgagaatttatccgaaattaagtcagacaa

SEQ ID NO: 655632 - DNA, 33 bp, Homo sapien
tgctgagaatttatcctaaattaagtcagacaa

SEQ ID NO: 655633 - DNA, 33 bp, Homo sapien
gtcaattgttaaatgtcaaaaccaggccaggca

SEQ ID NO: 655634 - DNA, 33 bp, Homo sapien
gtcaattgttaaatgtgaaaaccaggccaggca

SEQ ID NO: 655635 - DNA, 33 bp, Homo sapien
tgagatcatgggtaaactgctgccctcaaaata

SEQ ID NO: 655636 - DNA, 33 bp, Homo sapien
tgagatcatgggtaaattgctgccctcaaaata

SEQ ID NO: 655637 - DNA, 33 bp, Homo sapien
tgagattctctgctaaggtgtgagcaacaccag

SEQ ID NO: 655638 - DNA, 33 bp, Homo sapien
tgagattctctgctaatgtgtgagcaacaccag

SEQ ID NO: 655639 - DNA, 33 bp, Homo sapien
gaaagcttaggaaaaaagagtcattagaccttg

SEQ ID NO: 655640 - DNA, 33 bp, Homo sapien
gaaagcttaggaaaaacgagtcattagaccttg

SEQ ID NO: 655641 - DNA, 33 bp, Homo sapien
gttaagtctccacaaaaattctatttcttgctg

SEQ ID NO: 655642 - DNA, 33 bp, Homo sapien
gttaagtctccacaaagattctatttcttgctg

SEQ ID NO: 655643 - DNA, 33 bp, Homo sapien
ccacttaaagacaggagagttggtttttctttt

SEQ ID NO: 655644 - DNA, 33 bp, Homo sapien
ccacttaaagacaggatagttggtttttctttt

SEQ ID NO: 655645 - DNA, 33 bp, Homo sapien
caaatgtattaattaaacggattgcgcatatga

SEQ ID NO: 655646 - DNA, 33 bp, Homo sapien
caaatgtattaattaagcggattgcgcatatga

SEQ ID NO: 655647 - DNA, 33 bp, Homo sapien
catcttaggcctataacggcttaagatggctta

SEQ ID NO: 655648 - DNA, 33 bp, Homo sapien
catcttaggcctataatggcttaagatggctta

SEQ ID NO: 655649 - DNA, 33 bp, Homo sapien
tcagcctgagattccaagggcctatgattctgc

SEQ ID NO: 655650 - DNA, 33 bp, Homo sapien
tcagcctgagattccacgggcctatgattctgc

SEQ ID NO: 655651 - DNA, 33 bp, Homo sapien
ggcgtggcacaggaataaaaccttcatctgtca

SEQ ID NO: 655652 - DNA, 33 bp, Homo sapien
ggcgtggcacaggaatgaaaccttcatctgtca

SEQ ID NO: 655653 - DNA, 33 bp, Homo sapien
agcagggtgcacttagccatggttgcctttaag

SEQ ID NO: 655654 - DNA, 33 bp, Homo sapien
agcagggtgcacttagtcatggttgcctttaag

SEQ ID NO: 655655 - DNA, 33 bp, Homo sapien
atctctggggaagacaatggctccctctaatgt

SEQ ID NO: 655656 - DNA, 33 bp, Homo sapien
atctctggggaagacactggctccctctaatgt

SEQ ID NO: 655657 - DNA, 33 bp, Homo sapien
ctgcagacgttacttaccaaaattatgtactcc

SEQ ID NO: 655658 - DNA, 33 bp, Homo sapien
ctgcagacgttacttatcaaaattatgtactcc

SEQ ID NO: 655659 - DNA, 33 bp, Homo sapien
ttctacatctgtaggcaaccaaactggagaaaa

SEQ ID NO: 655660 - DNA, 33 bp, Homo sapien
ttctacatctgtaggcgaccaaactggagaaaa

SEQ ID NO: 655661 - DNA, 33 bp, Homo sapien
agaacaggattttatgcagtgaagatccttaac

SEQ ID NO: 655662 - DNA, 33 bp, Homo sapien
agaacaggattttatggagtgaagatccttaac

SEQ ID NO: 655663 - DNA, 33 bp, Homo sapien
tgtgggaaatcccagcaaaaccaggagaaaggg

SEQ ID NO: 655664 - DNA, 33 bp, Homo sapien
tgtgggaaatcccagcgaaaccaggagaaaggg

SEQ ID NO: 655665 - DNA, 33 bp, Homo sapien
aacaatgcagtagcccactcctgtaggtcaggg

SEQ ID NO: 655666 - DNA, 33 bp, Homo sapien
aacaatgcagtagcccgctcctgtaggtcaggg

SEQ ID NO: 655667 - DNA, 33 bp, Homo sapien
catctttggaaaggcacatttgaggcctgttct

SEQ ID NO: 655668 - DNA, 33 bp, Homo sapien
catctttggaaaggcagatttgaggcctgttct

SEQ ID NO: 655669 - DNA, 33 bp, Homo sapien
tactactcaccaagagacaagagatacagttgt

SEQ ID NO: 655670 - DNA, 33 bp, Homo sapien
tactactcaccaagaggcaagagatacagttgt

SEQ ID NO: 655671 - DNA, 33 bp, Homo sapien
aaagcaaaggccccagcaggaataaataactaa

SEQ ID NO: 655672 - DNA, 33 bp, Homo sapien
aaagcaaaggccccagtaggaataaataactaa

SEQ ID NO: 655673 - DNA, 33 bp, Homo sapien
tcctttggtctcccaacctacagagctgtggat

SEQ ID NO: 655674 - DNA, 33 bp, Homo sapien
tcctttggtctcccaatctacagagctgtggat

SEQ ID NO: 655675 - DNA, 33 bp, Homo sapien
tggactttctgaaaatcaggtaggataagggct

SEQ ID NO: 655676 - DNA, 33 bp, Homo sapien
tggactttctgaaaattaggtaggataagggct

SEQ ID NO: 655677 - DNA, 33 bp, Homo sapien
atacactgaatatgaactgtggctctctcagtg

SEQ ID NO: 655678 - DNA, 33 bp, Homo sapien
atacactgaatatgaattgtggctctctcagtg

SEQ ID NO: 655679 - DNA, 33 bp, Homo sapien
taatcaatctgcctaacgtcaggaagtagagat

SEQ ID NO: 655680 - DNA, 33 bp, Homo sapien
taatcaatctgcctaatgtcaggaagtagagat

SEQ ID NO: 655681 - DNA, 33 bp, Homo sapien
ggtaaattcattcctccccttgttgcccactaa

SEQ ID NO: 655682 - DNA, 33 bp, Homo sapien
ggtaaattcattcctctccttgttgcccactaa

SEQ ID NO: 655683 - DNA, 33 bp, Homo sapien
ctgcattcatttgaatcagaaagtgaggctcat

SEQ ID NO: 655684 - DNA, 33 bp, Homo sapien
ctgcattcatttgaatgagaaagtgaggctcat

SEQ ID NO: 655685 - DNA, 33 bp, Homo sapien
cacccatcctaaaaaagcttcatgactttcccg

SEQ ID NO: 655686 - DNA, 33 bp, Homo sapien
cacccatcctaaaaaatcttcatgactttcccg

SEQ ID NO: 655687 - DNA, 33 bp, Homo sapien
ctaagaaaatcaagaaaaatatcctgtaacaca

SEQ ID NO: 655688 - DNA, 33 bp, Homo sapien
ctaagaaaatcaagaacaatatcctgtaacaca

SEQ ID NO: 655689 - DNA, 33 bp, Homo sapien
ggtatttggcaaccccagagattgaaattcacc

SEQ ID NO: 655690 - DNA, 33 bp, Homo sapien
ggtatttggcaaccccggagattgaaattcacc

SEQ ID NO: 655691 - DNA, 33 bp, Homo sapien
gaaaacaattttagagaactgtttgagttggta

SEQ ID NO: 655692 - DNA, 33 bp, Homo sapien
gaaaacaattttagaggactgtttgagttggta

SEQ ID NO: 655693 - DNA, 33 bp, Homo sapien
cttacttggaggtggacggttggttctcgtgcc

SEQ ID NO: 655694 - DNA, 33 bp, Homo sapien
cttacttggaggtggatggttggttctcgtgcc

SEQ ID NO: 655695 - DNA, 33 bp, Homo sapien
tggtgaggaaggagtacagagtttacagtcagg

SEQ ID NO: 655696 - DNA, 33 bp, Homo sapien
tggtgaggaaggagtatagagtttacagtcagg

SEQ ID NO: 655697 - DNA, 33 bp, Homo sapien
tgaagtgagagggcaaagaaccccaactgtagg

SEQ ID NO: 655698 - DNA, 33 bp, Homo sapien
tgaagtgagagggcaaggaaccccaactgtagg

SEQ ID NO: 655699 - DNA, 33 bp, Homo sapien
acacctacagctttgaatatgaccaagaaagta

SEQ ID NO: 655700 - DNA, 33 bp, Homo sapien
acacctacagctttgagtatgaccaagaaagta

SEQ ID NO: 655701 - DNA, 33 bp, Homo sapien
gatccataggacataaagagcatgcgtggatgc

SEQ ID NO: 655702 - DNA, 33 bp, Homo sapien
gatccataggacataaggagcatgcgtggatgc

SEQ ID NO: 655703 - DNA, 33 bp, Homo sapien
gagggaaaggagtgatcagagttgtcaatgcac

SEQ ID NO: 655704 - DNA, 33 bp, Homo sapien
gagggaaaggagtgatgagagttgtcaatgcac

SEQ ID NO: 655705 - DNA, 33 bp, Homo sapien
ttagtgctctctagtcacatttccagctctccc

SEQ ID NO: 655706 - DNA, 33 bp, Homo sapien
ttagtgctctctagtcgcatttccagctctccc

SEQ ID NO: 655707 - DNA, 33 bp, Homo sapien
cactggcaggggtgcgaaggacagatgtaagag

SEQ ID NO: 655708 - DNA, 33 bp, Homo sapien
cactggcaggggtgcggaggacagatgtaagag

SEQ ID NO: 655709 - DNA, 33 bp, Homo sapien
tgcagccagaaatccgaattatttgctttaatt

SEQ ID NO: 655710 - DNA, 33 bp, Homo sapien
tgcagccagaaatccggattatttgctttaatt

SEQ ID NO: 655711 - DNA, 33 bp, Homo sapien
ttaaaatctagcaccactaaggaagagaagaaa

SEQ ID NO: 655712 - DNA, 33 bp, Homo sapien
ttaaaatctagcaccattaaggaagagaagaaa

SEQ ID NO: 655713 - DNA, 33 bp, Homo sapien
accctggcaatgtactcaaatttccagcagcaa

SEQ ID NO: 655714 - DNA, 33 bp, Homo sapien
accctggcaatgtactgaaatttccagcagcaa

SEQ ID NO: 655715 - DNA, 33 bp, Homo sapien
ggtttctctctcttccgctggactttaacaagc

SEQ ID NO: 655716 - DNA, 33 bp, Homo sapien
ggtttctctctcttcctctggactttaacaagc

SEQ ID NO: 655717 - DNA, 33 bp, Homo sapien
ggttacaagaagaacaatctgaatccatatagg

SEQ ID NO: 655718 - DNA, 33 bp, Homo sapien
ggttacaagaagaacagtctgaatccatatagg

SEQ ID NO: 655719 - DNA, 33 bp, Homo sapien
ggagtgagacaaaacacgggtataatggaatgt

SEQ ID NO: 655720 - DNA, 33 bp, Homo sapien
ggagtgagacaaaacatgggtataatggaatgt

SEQ ID NO: 655721 - DNA, 33 bp, Homo sapien
ctaaccctacagggacaagtttttataggttga

SEQ ID NO: 655722 - DNA, 33 bp, Homo sapien
ctaaccctacagggacgagtttttataggttga

SEQ ID NO: 655723 - DNA, 33 bp, Homo sapien
gaaagccaggctaatcactggatgaaaaaggtc

SEQ ID NO: 655724 - DNA, 33 bp, Homo sapien
gaaagccaggctaatcgctggatgaaaaaggtc

SEQ ID NO: 655725 - DNA, 33 bp, Homo sapien
tgtttacaataatgacagatgccaggaggtgag

SEQ ID NO: 655726 - DNA, 33 bp, Homo sapien
tgtttacaataatgacggatgccaggaggtgag

SEQ ID NO: 655727 - DNA, 33 bp, Homo sapien
atgctgatagaattcaagagaaaagaaatttga

SEQ ID NO: 655728 - DNA, 33 bp, Homo sapien
atgctgatagaattcacgagaaaagaaatttga

SEQ ID NO: 655729 - DNA, 33 bp, Homo sapien
attttgcaagtttaaactgaatgtagaaatatc

SEQ ID NO: 655730 - DNA, 33 bp, Homo sapien
attttgcaagtttaaattgaatgtagaaatatc

SEQ ID NO: 655731 - DNA, 33 bp, Homo sapien
aagttagtagatgtcaaccaatgttcagatttt

SEQ ID NO: 655732 - DNA, 33 bp, Homo sapien
aagttagtagatgtcagccaatgttcagatttt

SEQ ID NO: 655733 - DNA, 33 bp, Homo sapien
gtccagtgcttccagacgattgctaatgcctgt

SEQ ID NO: 655734 - DNA, 33 bp, Homo sapien
gtccagtgcttccagatgattgctaatgcctgt

SEQ ID NO: 655735 - DNA, 33 bp, Homo sapien
cttttacccttccttacgaagccctatgtgatt

SEQ ID NO: 655736 - DNA, 33 bp, Homo sapien
cttttacccttccttatgaagccctatgtgatt

SEQ ID NO: 655737 - DNA, 33 bp, Homo sapien
gaatacatcaacaaaacgacaaaaatctttgac

SEQ ID NO: 655738 - DNA, 33 bp, Homo sapien
gaatacatcaacaaaatgacaaaaatctttgac

SEQ ID NO: 655739 - DNA, 33 bp, Homo sapien
actttcttctctcctacgaacaaaactcctttt

SEQ ID NO: 655740 - DNA, 33 bp, Homo sapien
actttcttctctcctatgaacaaaactcctttt

SEQ ID NO: 655741 - DNA, 33 bp, Homo sapien
tgctccaatatagagaatatcttggataatgga

SEQ ID NO: 655742 - DNA, 33 bp, Homo sapien
tgctccaatatagagagtatcttggataatgga

SEQ ID NO: 655743 - DNA, 33 bp, Homo sapien
atttgtatttccatcaacagtttatgagaaggc

SEQ ID NO: 655744 - DNA, 33 bp, Homo sapien
atttgtatttccatcagcagtttatgagaaggc

SEQ ID NO: 655745 - DNA, 33 bp, Homo sapien
gagattactttcccccccattgtaacagatagc

SEQ ID NO: 655746 - DNA, 33 bp, Homo sapien
gagattactttcccccgcattgtaacagatagc

SEQ ID NO: 655747 - DNA, 33 bp, Homo sapien
tcagcattatatacgcaattatatacacatcta

SEQ ID NO: 655748 - DNA, 33 bp, Homo sapien
tcagcattatatacgcgattatatacacatcta

SEQ ID NO: 655749 - DNA, 33 bp, Homo sapien
acaagaagtcaacatacatcagtcgctttccta

SEQ ID NO: 655750 - DNA, 33 bp, Homo sapien
acaagaagtcaacatagatcagtcgctttccta

SEQ ID NO: 655751 - DNA, 33 bp, Homo sapien
caactaaaatgtcttacggctcaattactagca

SEQ ID NO: 655752 - DNA, 33 bp, Homo sapien
caactaaaatgtcttatggctcaattactagca

SEQ ID NO: 655753 - DNA, 33 bp, Homo sapien
atattattgtctgatactactatctgcctgatg

SEQ ID NO: 655754 - DNA, 33 bp, Homo sapien
atattattgtctgatattactatctgcctgatg

SEQ ID NO: 655755 - DNA, 33 bp, Homo sapien
tgtaccaacctattcaacattgaagcacttcat

SEQ ID NO: 655756 - DNA, 33 bp, Homo sapien
tgtaccaacctattcagcattgaagcacttcat

SEQ ID NO: 655757 - DNA, 33 bp, Homo sapien
tcacaccacagacccaaaggaaaagagacccaa

SEQ ID NO: 655758 - DNA, 33 bp, Homo sapien
tcacaccacagacccagaggaaaagagacccaa

SEQ ID NO: 655759 - DNA, 33 bp, Homo sapien
tgaggatattggaaagaaaaagagtaagtgaaa

SEQ ID NO: 655760 - DNA, 33 bp, Homo sapien
tgaggatattggaaaggaaaagagtaagtgaaa

SEQ ID NO: 655761 - DNA, 33 bp, Homo sapien
tgctagggctaggaggcattggattacaaatcc

SEQ ID NO: 655762 - DNA, 33 bp, Homo sapien
tgctagggctaggaggtattggattacaaatcc

SEQ ID NO: 655763 - DNA, 33 bp, Homo sapien
tccacagtacccgaaccgactgtactcccacca

SEQ ID NO: 655764 - DNA, 33 bp, Homo sapien
tccacagtacccgaactgactgtactcccacca

SEQ ID NO: 655765 - DNA, 33 bp, Homo sapien
caatttcaatctcaacaagtcccaaagagaagt

SEQ ID NO: 655766 - DNA, 33 bp, Homo sapien
caatttcaatctcaacgagtcccaaagagaagt

SEQ ID NO: 655767 - DNA, 33 bp, Homo sapien
ggaggacatacagataaatttagtcttcaaatg

SEQ ID NO: 655768 - DNA, 33 bp, Homo sapien
ggaggacatacagatacatttagtcttcaaatg

SEQ ID NO: 655769 - DNA, 33 bp, Homo sapien
tacaaatacaaaattacgtaccgaagagaatat

SEQ ID NO: 655770 - DNA, 33 bp, Homo sapien
tacaaatacaaaattatgtaccgaagagaatat

SEQ ID NO: 655771 - DNA, 33 bp, Homo sapien
gaaatgagaaaaccacagagaatgaaaagactg

SEQ ID NO: 655772 - DNA, 33 bp, Homo sapien
gaaatgagaaaaccacggagaatgaaaagactg

SEQ ID NO: 655773 - DNA, 33 bp, Homo sapien
gtctgttcctggaaagcccagtgtcaacgcaga

SEQ ID NO: 655774 - DNA, 33 bp, Homo sapien
gtctgttcctggaaagtccagtgtcaacgcaga

SEQ ID NO: 655775 - DNA, 33 bp, Homo sapien
ggagacaaatatgcaccagaaacacctagcctt

SEQ ID NO: 655776 - DNA, 33 bp, Homo sapien
ggagacaaatatgcactagaaacacctagcctt

SEQ ID NO: 655777 - DNA, 33 bp, Homo sapien
ggtggggagagatcaaaaatgcctgccagcagc

SEQ ID NO: 655778 - DNA, 33 bp, Homo sapien
ggtggggagagatcaagaatgcctgccagcagc

SEQ ID NO: 655779 - DNA, 33 bp, Homo sapien
cctgcaacagaatcaccggggggtcctgcccct

SEQ ID NO: 655780 - DNA, 33 bp, Homo sapien
cctgcaacagaatcactggggggtcctgcccct

SEQ ID NO: 655781 - DNA, 33 bp, Homo sapien
ccagagtgaaagtgccacccttttggcctgagt

SEQ ID NO: 655782 - DNA, 33 bp, Homo sapien
ccagagtgaaagtgccgcccttttggcctgagt

SEQ ID NO: 655783 - DNA, 33 bp, Homo sapien
acacattattaagcaccgataataggtagcctg

SEQ ID NO: 655784 - DNA, 33 bp, Homo sapien
acacattattaagcactgataataggtagcctg

SEQ ID NO: 655785 - DNA, 33 bp, Homo sapien
aaacagaaacacaaacaatttggatcaaaagga

SEQ ID NO: 655786 - DNA, 33 bp, Homo sapien
aaacagaaacacaaacgatttggatcaaaagga

SEQ ID NO: 655787 - DNA, 33 bp, Homo sapien
agccctgggtttaatgccaaatcaaggcaaaag

SEQ ID NO: 655788 - DNA, 33 bp, Homo sapien
agccctgggtttaatgtcaaatcaaggcaaaag

SEQ ID NO: 655789 - DNA, 33 bp, Homo sapien
aaaataaaccagtagacgactgttacagttcac

SEQ ID NO: 655790 - DNA, 33 bp, Homo sapien
aaaataaaccagtagatgactgttacagttcac

SEQ ID NO: 655791 - DNA, 33 bp, Homo sapien
ctaataaagttcaaatcactttctcaaggtagc

SEQ ID NO: 655792 - DNA, 33 bp, Homo sapien
ctaataaagttcaaattactttctcaaggtagc

SEQ ID NO: 655793 - DNA, 33 bp, Homo sapien
aaattggatttgaaaaacttggtaatgcctcat

SEQ ID NO: 655794 - DNA, 33 bp, Homo sapien
aaattggatttgaaaagcttggtaatgcctcat

SEQ ID NO: 655795 - DNA, 33 bp, Homo sapien
tgggtgacttaaaaaaatactggaaataggccg

SEQ ID NO: 655796 - DNA, 33 bp, Homo sapien
tgggtgacttaaaaaattactggaaataggccg

SEQ ID NO: 655797 - DNA, 33 bp, Homo sapien
ttacactggacaagcaaaaactggcacataaga

SEQ ID NO: 655798 - DNA, 33 bp, Homo sapien
ttacactggacaagcataaactggcacataaga

SEQ ID NO: 655799 - DNA, 33 bp, Homo sapien
gccaagatttccttcacactgtcttaatatctt

SEQ ID NO: 655800 - DNA, 33 bp, Homo sapien
gccaagatttccttcatactgtcttaatatctt

SEQ ID NO: 655801 - DNA, 33 bp, Homo sapien
catttattgactggaaattaccacacattgcac

SEQ ID NO: 655802 - DNA, 33 bp, Homo sapien
catttattgactggaagttaccacacattgcac

SEQ ID NO: 655803 - DNA, 33 bp, Homo sapien
gactaaattaagtgtaagggcaatgggcatttt

SEQ ID NO: 655804 - DNA, 33 bp, Homo sapien
gactaaattaagtgtaggggcaatgggcatttt

SEQ ID NO: 655805 - DNA, 33 bp, Homo sapien
tggagttcatagaaaaatggttatcagtgatta

SEQ ID NO: 655806 - DNA, 33 bp, Homo sapien
tggagttcatagaaaagtggttatcagtgatta

SEQ ID NO: 655807 - DNA, 33 bp, Homo sapien
tggacaaagtcatgtaacgcatagcctattcta

SEQ ID NO: 655808 - DNA, 33 bp, Homo sapien
tggacaaagtcatgtatcgcatagcctattcta

SEQ ID NO: 655809 - DNA, 33 bp, Homo sapien
agcaaaggtttgccacagactttgtaagaatta

SEQ ID NO: 655810 - DNA, 33 bp, Homo sapien
agcaaaggtttgccacggactttgtaagaatta

SEQ ID NO: 655811 - DNA, 33 bp, Homo sapien
tgtttaatgcactgtccatgaggagataagaca

SEQ ID NO: 655812 - DNA, 33 bp, Homo sapien
tgtttaatgcactgtctatgaggagataagaca

SEQ ID NO: 655813 - DNA, 33 bp, Homo sapien
taggggcttatttttaaactaatgatcatactc

SEQ ID NO: 655814 - DNA, 33 bp, Homo sapien
taggggcttatttttagactaatgatcatactc

SEQ ID NO: 655815 - DNA, 33 bp, Homo sapien
ttgcctcacattttcaccagcttttggtgttgt

SEQ ID NO: 655816 - DNA, 33 bp, Homo sapien
ttgcctcacattttcatcagcttttggtgttgt

SEQ ID NO: 655817 - DNA, 33 bp, Homo sapien
cagctgatatatccaccggcatttattgtagtt

SEQ ID NO: 655818 - DNA, 33 bp, Homo sapien
cagctgatatatccactggcatttattgtagtt

SEQ ID NO: 655819 - DNA, 33 bp, Homo sapien
aattaaaagcagggaactgtaagatataatgaa

SEQ ID NO: 655820 - DNA, 33 bp, Homo sapien
aattaaaagcagggaattgtaagatataatgaa

SEQ ID NO: 655821 - DNA, 33 bp, Homo sapien
ccttcataccctctacagcttttgttgtattta

SEQ ID NO: 655822 - DNA, 33 bp, Homo sapien
ccttcataccctctaccgcttttgttgtattta

SEQ ID NO: 655823 - DNA, 33 bp, Homo sapien
tttttgttgtagcaagaaatacaagattggtgg

SEQ ID NO: 655824 - DNA, 33 bp, Homo sapien
tttttgttgtagcaagcaatacaagattggtgg

SEQ ID NO: 655825 - DNA, 33 bp, Homo sapien
cactgccaccacattaagaacccagatatactc

SEQ ID NO: 655826 - DNA, 33 bp, Homo sapien
cactgccaccacattacgaacccagatatactc

SEQ ID NO: 655827 - DNA, 33 bp, Homo sapien
tgtgagagatgggtaaaaagtgtagttgaaatc

SEQ ID NO: 655828 - DNA, 33 bp, Homo sapien
tgtgagagatgggtaagaagtgtagttgaaatc

SEQ ID NO: 655829 - DNA, 33 bp, Homo sapien
aactgacgcttacagaaccttacacagccagca

SEQ ID NO: 655830 - DNA, 33 bp, Homo sapien
aactgacgcttacagagccttacacagccagca

SEQ ID NO: 655831 - DNA, 33 bp, Homo sapien
agcaaagctttccaaccaaaatttttatgataa

SEQ ID NO: 655832 - DNA, 33 bp, Homo sapien
agcaaagctttccaacgaaaatttttatgataa

SEQ ID NO: 655833 - DNA, 33 bp, Homo sapien
tccactatgttcttggaataatattaaagaaaa

SEQ ID NO: 655834 - DNA, 33 bp, Homo sapien
tccactatgttcttgggataatattaaagaaaa

SEQ ID NO: 655835 - DNA, 33 bp, Homo sapien
gattgttctcttgatacatagctccagatttcc

SEQ ID NO: 655836 - DNA, 33 bp, Homo sapien
gattgttctcttgatatatagctccagatttcc

SEQ ID NO: 655837 - DNA, 33 bp, Homo sapien
tcctatagtctggttacagtcataatgcaaaaa

SEQ ID NO: 655838 - DNA, 33 bp, Homo sapien
tcctatagtctggttatagtcataatgcaaaaa

SEQ ID NO: 655839 - DNA, 33 bp, Homo sapien
cctaaggcttagaaacgccaaactccttgctaa

SEQ ID NO: 655840 - DNA, 33 bp, Homo sapien
cctaaggcttagaaactccaaactccttgctaa

SEQ ID NO: 655841 - DNA, 33 bp, Homo sapien
aatgaaaactgatctcaaagaaaataaggattt

SEQ ID NO: 655842 - DNA, 33 bp, Homo sapien
aatgaaaactgatctcgaagaaaataaggattt

SEQ ID NO: 655843 - DNA, 33 bp, Homo sapien
aactcaacatacataaaccacaagaaaaccacc

SEQ ID NO: 655844 - DNA, 33 bp, Homo sapien
aactcaacatacataagccacaagaaaaccacc

SEQ ID NO: 655845 - DNA, 33 bp, Homo sapien
tcttaatgttcattgacgttcttgtatttttaa

SEQ ID NO: 655846 - DNA, 33 bp, Homo sapien
tcttaatgttcattgatgttcttgtatttttaa

SEQ ID NO: 655847 - DNA, 33 bp, Homo sapien
agtgtcttttcacttgaattgtttctaccaaga

SEQ ID NO: 655848 - DNA, 33 bp, Homo sapien
agtgtcttttcacttgtattgtttctaccaaga

SEQ ID NO: 655849 - DNA, 33 bp, Homo sapien
tatggttgtcttgaaagctggtcttggaccacc

SEQ ID NO: 655850 - DNA, 33 bp, Homo sapien
tatggttgtcttgaaatctggtcttggaccacc

SEQ ID NO: 655851 - DNA, 33 bp, Homo sapien
agtgtccagtcagaaactgtatccaaatgaatg

SEQ ID NO: 655852 - DNA, 33 bp, Homo sapien
agtgtccagtcagaaagtgtatccaaatgaatg

SEQ ID NO: 655853 - DNA, 33 bp, Homo sapien
atccaaaggaggccacaatcaataaaacacagg

SEQ ID NO: 655854 - DNA, 33 bp, Homo sapien
atccaaaggaggccacgatcaataaaacacagg

SEQ ID NO: 655855 - DNA, 33 bp, Homo sapien
ggggctcttttcaccacctgagtgttaaaacct

SEQ ID NO: 655856 - DNA, 33 bp, Homo sapien
ggggctcttttcaccatctgagtgttaaaacct

SEQ ID NO: 655857 - DNA, 33 bp, Homo sapien
actcctgatatgcccccgacagcaattctactg

SEQ ID NO: 655858 - DNA, 33 bp, Homo sapien
actcctgatatgcccctgacagcaattctactg

SEQ ID NO: 655859 - DNA, 33 bp, Homo sapien
agaatgactttgtaacacttgccagacctgatt

SEQ ID NO: 655860 - DNA, 33 bp, Homo sapien
agaatgactttgtaacgcttgccagacctgatt

SEQ ID NO: 655861 - DNA, 33 bp, Homo sapien
acttatcttcctggtacgtctgtccaccaaaag

SEQ ID NO: 655862 - DNA, 33 bp, Homo sapien
acttatcttcctggtaggtctgtccaccaaaag

SEQ ID NO: 655863 - DNA, 33 bp, Homo sapien
gataaactccaagtgggaccattccaaacatta

SEQ ID NO: 655864 - DNA, 33 bp, Homo sapien
gataaactccaagtggtaccattccaaacatta

SEQ ID NO: 655865 - DNA, 33 bp, Homo sapien
aggaggtgttatttggaaaactgggcttttttt

SEQ ID NO: 655866 - DNA, 33 bp, Homo sapien
aggaggtgttatttgggaaactgggcttttttt

SEQ ID NO: 655867 - DNA, 33 bp, Homo sapien
ataatgtgtggtaaggacaagaaaacataactt

SEQ ID NO: 655868 - DNA, 33 bp, Homo sapien
ataatgtgtggtaagggcaagaaaacataactt

SEQ ID NO: 655869 - DNA, 33 bp, Homo sapien
ggacaggtagataaaagagaacagccttagccc

SEQ ID NO: 655870 - DNA, 33 bp, Homo sapien
ggacaggtagataaaatagaacagccttagccc

SEQ ID NO: 655871 - DNA, 33 bp, Homo sapien
accttcatgggtgacaataaagaacatattttg

SEQ ID NO: 655872 - DNA, 33 bp, Homo sapien
accttcatgggtgacactaaagaacatattttg

SEQ ID NO: 655873 - DNA, 33 bp, Homo sapien
gataatctgcaaaagaatcaaggtcaaaacttc

SEQ ID NO: 655874 - DNA, 33 bp, Homo sapien
gataatctgcaaaagagtcaaggtcaaaacttc

SEQ ID NO: 655875 - DNA, 33 bp, Homo sapien
tttattttataaaacaccttgagtcctttgtgg

SEQ ID NO: 655876 - DNA, 33 bp, Homo sapien
tttattttataaaacatcttgagtcctttgtgg

SEQ ID NO: 655877 - DNA, 33 bp, Homo sapien
aagataggaatggggacaaaaggaagcatacta

SEQ ID NO: 655878 - DNA, 33 bp, Homo sapien
aagataggaatggggataaaaggaagcatacta

SEQ ID NO: 655879 - DNA, 33 bp, Homo sapien
aatgtagcatgaccaaatgaagctaatcccagg

SEQ ID NO: 655880 - DNA, 33 bp, Homo sapien
aatgtagcatgaccaagtgaagctaatcccagg

SEQ ID NO: 655881 - DNA, 33 bp, Homo sapien
atggggaaaacagtcaaaactaagaatgatatt

SEQ ID NO: 655882 - DNA, 33 bp, Homo sapien
atggggaaaacagtcataactaagaatgatatt

SEQ ID NO: 655883 - DNA, 33 bp, Homo sapien
aaggtcatggctgtaagtgtctttcttcctgat

SEQ ID NO: 655884 - DNA, 33 bp, Homo sapien
aaggtcatggctgtaattgtctttcttcctgat

SEQ ID NO: 655885 - DNA, 33 bp, Homo sapien
agccatgactatctgacggtgacctcgtcacca

SEQ ID NO: 655886 - DNA, 33 bp, Homo sapien
agccatgactatctgatggtgacctcgtcacca

SEQ ID NO: 655887 - DNA, 33 bp, Homo sapien
gtacattgacagcctacagacctccagtcactt

SEQ ID NO: 655888 - DNA, 33 bp, Homo sapien
gtacattgacagcctatagacctccagtcactt

SEQ ID NO: 655889 - DNA, 33 bp, Homo sapien
tttgcatccgggcagccgagtggtgcaggagaa

SEQ ID NO: 655890 - DNA, 33 bp, Homo sapien
tttgcatccgggcagctgagtggtgcaggagaa

SEQ ID NO: 655891 - DNA, 33 bp, Homo sapien
tttaatgttagttccaacggacagtttctactc

SEQ ID NO: 655892 - DNA, 33 bp, Homo sapien
tttaatgttagttccaccggacagtttctactc

SEQ ID NO: 655893 - DNA, 33 bp, Homo sapien
tgcatgctgttttatcaccagatagggaccatg

SEQ ID NO: 655894 - DNA, 33 bp, Homo sapien
tgcatgctgttttatcgccagatagggaccatg

SEQ ID NO: 655895 - DNA, 33 bp, Homo sapien
atgaggagctattaagaccctcttttggacaca

SEQ ID NO: 655896 - DNA, 33 bp, Homo sapien
atgaggagctattaaggccctcttttggacaca

SEQ ID NO: 655897 - DNA, 33 bp, Homo sapien
caagggtcgactgcgaataccttctttacatac

SEQ ID NO: 655898 - DNA, 33 bp, Homo sapien
caagggtcgactgcgagtaccttctttacatac

SEQ ID NO: 655899 - DNA, 33 bp, Homo sapien
cagagtagattaggcaaagaacaggagtagata

SEQ ID NO: 655900 - DNA, 33 bp, Homo sapien
cagagtagattaggcagagaacaggagtagata

SEQ ID NO: 655901 - DNA, 33 bp, Homo sapien
cagcatggtggtgatacgtggcactccaactag

SEQ ID NO: 655902 - DNA, 33 bp, Homo sapien
cagcatggtggtgatatgtggcactccaactag

SEQ ID NO: 655903 - DNA, 33 bp, Homo sapien
ggggcaacaacatacactggggcttgtcggagg

SEQ ID NO: 655904 - DNA, 33 bp, Homo sapien
ggggcaacaacatacagtggggcttgtcggagg

SEQ ID NO: 655905 - DNA, 33 bp, Homo sapien; identical to SEQ ID NO: 655903

SEQ ID NO: 655906 - DNA, 33 bp, Homo sapien; identical to SEQ ID NO: 655904

SEQ ID NO: 655907 - DNA, 33 bp, Homo sapien
caattaatttgcttctcaaatactcagactgcc

SEQ ID NO: 655908 - DNA, 33 bp, Homo sapien
caattaatttgcttcttaaatactcagactgcc

SEQ ID NO: 655909 - DNA, 33 bp, Homo sapien
ggatccaaatataaggcagtagtagtgactcag

SEQ ID NO: 655910 - DNA, 33 bp, Homo sapien
ggatccaaatataaggtagtagtagtgactcag

SEQ ID NO: 655911 - DNA, 33 bp, Homo sapien
cctgaatctgggccaggatacctcagacatggg

SEQ ID NO: 655912 - DNA, 33 bp, Homo sapien
cctgaatctgggccagtatacctcagacatggg

SEQ ID NO: 655913 - DNA, 33 bp, Homo sapien
gacgaggttcatatgaaacaactgtgctgagtg

SEQ ID NO: 655914 - DNA, 33 bp, Homo sapien
gacgaggttcatatgagacaactgtgctgagtg

SEQ ID NO: 655915 - DNA, 33 bp, Homo sapien
ttttcactctcctctacggattcatacctttgt

SEQ ID NO: 655916 - DNA, 33 bp, Homo sapien
ttttcactctcctctatggattcatacctttgt

SEQ ID NO: 655917 - DNA, 33 bp, Homo sapien
tccatctagacttctcaaggcatttttctgaga

SEQ ID NO: 655918 - DNA, 33 bp, Homo sapien
tccatctagacttctcgaggcatttttctgaga

SEQ ID NO: 655919 - DNA, 33 bp, Homo sapien
tttatgataggctaggacatcatttacctctaa

SEQ ID NO: 655920 - DNA, 33 bp, Homo sapien
tttatgataggctagggcatcatttacctctaa

SEQ ID NO: 655921 - DNA, 33 bp, Homo sapien
agtgaacttggggcagaaaaaaaatacttgatg

SEQ ID NO: 655922 - DNA, 33 bp, Homo sapien
agtgaacttggggcaggaaaaaaatacttgatg

SEQ ID NO: 655923 - DNA, 33 bp, Homo sapien
aggcaagaaaatgaaacgtgcattactttacca

SEQ ID NO: 655924 - DNA, 33 bp, Homo sapien
aggcaagaaaatgaaatgtgcattactttacca

SEQ ID NO: 655925 - DNA, 33 bp, Homo sapien
tcacagacgaggcccccgcagagactggtgaca

SEQ ID NO: 655926 - DNA, 33 bp, Homo sapien
tcacagacgaggccccggcagagactggtgaca

SEQ ID NO: 655927 - DNA, 33 bp, Homo sapien
gtttttttgagacataagtctgctgatgctcct

SEQ ID NO: 655928 - DNA, 33 bp, Homo sapien
gtttttttgagacataggtctgctgatgctcct

SEQ ID NO: 655929 - DNA, 33 bp, Homo sapien
ctttgtaaacctgacaatgatttcacaagttct

SEQ ID NO: 655930 - DNA, 33 bp, Homo sapien
ctttgtaaacctgacagtgatttcacaagttct

SEQ ID NO: 655931 - DNA, 33 bp, Homo sapien
aaagtaaatacattcaataagttggtcagtcat

SEQ ID NO: 655932 - DNA, 33 bp, Homo sapien
aaagtaaatacattcattaagttggtcagtcat

SEQ ID NO: 655933 - DNA, 33 bp, Homo sapien
ttcaagggccactgtaagattgggggatgctgc

SEQ ID NO: 655934 - DNA, 33 bp, Homo sapien
ttcaagggccactgtaggattgggggatgctgc

SEQ ID NO: 655935 - DNA, 33 bp, Homo sapien
cttttgataaagagacaatttattggggagaaa

SEQ ID NO: 655936 - DNA, 33 bp, Homo sapien
cttttgataaagagactatttattggggagaaa

SEQ ID NO: 655937 - DNA, 33 bp, Homo sapien
tttagaagtaatagaacagctacacaaaaaagt

SEQ ID NO: 655938 - DNA, 33 bp, Homo sapien
tttagaagtaatagaatagctacacaaaaaagt

SEQ ID NO: 655939 - DNA, 33 bp, Homo sapien
atgataagagtggtgacgatttcacaattttgt

SEQ ID NO: 655940 - DNA, 33 bp, Homo sapien
atgataagagtggtgatgatttcacaattttgt

SEQ ID NO: 655941 - DNA, 33 bp, Homo sapien
ctctgtcatgcttgtacggcaaaacctcaatat

SEQ ID NO: 655942 - DNA, 33 bp, Homo sapien
ctctgtcatgcttgtatggcaaaacctcaatat

SEQ ID NO: 655943 - DNA, 33 bp, Homo sapien
tctatcctttcaactcactttctctgatactcc

SEQ ID NO: 655944 - DNA, 33 bp, Homo sapien
tctatcctttcaactcgctttctctgatactcc

SEQ ID NO: 655945 - DNA, 33 bp, Homo sapien
gaaccacgttctgatacaggtcaattaggaagg

SEQ ID NO: 655946 - DNA, 33 bp, Homo sapien
gaaccacgttctgatataggtcaattaggaagg

SEQ ID NO: 655947 - DNA, 33 bp, Homo sapien
tcctaggccttggtgcaacctcgagtggtggga

SEQ ID NO: 655948 - DNA, 33 bp, Homo sapien
tcctaggccttggtgcgacctcgagtggtggga

SEQ ID NO: 655949 - DNA, 33 bp, Homo sapien
attaaagttgtttaccaaagtccaaatatgttt

SEQ ID NO: 655950 - DNA, 33 bp, Homo sapien
attaaagttgtttaccgaagtccaaatatgttt

SEQ ID NO: 655951 - DNA, 33 bp, Homo sapien
agtgacctgctgtcacaaggacataactcatgc

SEQ ID NO: 655952 - DNA, 33 bp, Homo sapien
agtgacctgctgtcacgaggacataactcatgc

SEQ ID NO: 655953 - DNA, 33 bp, Homo sapien
aataccaaagattaaagccttgacataagatct

SEQ ID NO: 655954 - DNA, 33 bp, Homo sapien
aataccaaagattaaatccttgacataagatct

SEQ ID NO: 655955 - DNA, 33 bp, Homo sapien
gacctcagtttcctcaatgagctggtaagaatg

SEQ ID NO: 655956 - DNA, 33 bp, Homo sapien
gacctcagtttcctcagtgagctggtaagaatg

SEQ ID NO: 655957 - DNA, 33 bp, Homo sapien
tgtttcctaatggtcaacattctacttgataag

SEQ ID NO: 655958 - DNA, 33 bp, Homo sapien
tgtttcctaatggtcagcattctacttgataag

SEQ ID NO: 655959 - DNA, 33 bp, Homo sapien
tgatagcaatgtttggaagatatgtcctagaag

SEQ ID NO: 655960 - DNA, 33 bp, Homo sapien
tgatagcaatgtttgggagatatgtcctagaag

SEQ ID NO: 655961 - DNA, 33 bp, Homo sapien
aggatttgaaagaatacgaagttcaagcaagaa

SEQ ID NO: 655962 - DNA, 33 bp, Homo sapien
aggatttgaaagaatatgaagttcaagcaagaa

SEQ ID NO: 655963 - DNA, 33 bp, Homo sapien
ttcatactttcatagaatagaacaggacagaat

SEQ ID NO: 655964 - DNA, 33 bp, Homo sapien
ttcatactttcatagactagaacaggacagaat

SEQ ID NO: 655965 - DNA, 33 bp, Homo sapien
gataacccgagccatcactaaatattatagctt

SEQ ID NO: 655966 - DNA, 33 bp, Homo sapien
gataacccgagccatcgctaaatattatagctt

SEQ ID NO: 655967 - DNA, 33 bp, Homo sapien
agtttctccctttctcaccaactaggtccatcc

SEQ ID NO: 655968 - DNA, 33 bp, Homo sapien
agtttctccctttctcgccaactaggtccatcc

SEQ ID NO: 655969 - DNA, 33 bp, Homo sapien
acatgtggaacatgtaccaaattgttaacgctg

SEQ ID NO: 655970 - DNA, 33 bp, Homo sapien
acatgtggaacatgtatcaaattgttaacgctg

SEQ ID NO: 655971 - DNA, 33 bp, Homo sapien
aagttatttgcaaaaccaccagtagaggtgatc

SEQ ID NO: 655972 - DNA, 33 bp, Homo sapien
aagttatttgcaaaactaccagtagaggtgatc

SEQ ID NO: 655973 - DNA, 33 bp, Homo sapien
actacctctacatagtcaccattttgtgtgtgt

SEQ ID NO: 655974 - DNA, 33 bp, Homo sapien
actacctctacatagttaccattttgtgtgtgt

SEQ ID NO: 655975 - DNA, 33 bp, Homo sapien
agtcataaacgcacacaaactttgtaaaactct

SEQ ID NO: 655976 - DNA, 33 bp, Homo sapien
agtcataaacgcacacgaactttgtaaaactct

SEQ ID NO: 655977 - DNA, 33 bp, Homo sapien
caaatgcagatgaggcaattgagtgaagaattt

SEQ ID NO: 655978 - DNA, 33 bp, Homo sapien
caaatgcagatgaggcgattgagtgaagaattt

SEQ ID NO: 655979 - DNA, 33 bp, Homo sapien
tttccaggtaatgctacaattattttgcccagt

SEQ ID NO: 655980 - DNA, 33 bp, Homo sapien
tttccaggtaatgctataattattttgcccagt

SEQ ID NO: 655981 - DNA, 33 bp, Homo sapien
taagctgtaaaatgaccaacatagtggggtagt

SEQ ID NO: 655982 - DNA, 33 bp, Homo sapien
taagctgtaaaatgacgaacatagtggggtagt

SEQ ID NO: 655983 - DNA, 33 bp, Homo sapien
taaccgcttcctcttacagatacaattggagaa

SEQ ID NO: 655984 - DNA, 33 bp, Homo sapien
taaccgcttcctcttatagatacaattggagaa

SEQ ID NO: 655985 - DNA, 33 bp, Homo sapien
agaatgggactgggaaatgttttgagtagaggc

SEQ ID NO: 655986 - DNA, 33 bp, Homo sapien
agaatgggactgggaagtgttttgagtagaggc

SEQ ID NO: 655987 - DNA, 33 bp, Homo sapien
tttacagaagcgagaaaaagttttgtttgcttt

SEQ ID NO: 655988 - DNA, 33 bp, Homo sapien
tttacagaagcgagaataagttttgtttgcttt

SEQ ID NO: 655989 - DNA, 33 bp, Homo sapien
ctgccccactgacttcaaagactttcttttcgt

SEQ ID NO: 655990 - DNA, 33 bp, Homo sapien
ctgccccactgacttcgaagactttcttttcgt

SEQ ID NO: 655991 - DNA, 33 bp, Homo sapien
cctggtttctgtcacccaatccagagacttcta

SEQ ID NO: 655992 - DNA, 33 bp, Homo sapien
cctggtttctgtcacctaatccagagacttcta

SEQ ID NO: 655993 - DNA, 33 bp, Homo sapien
gcaatggtctttagaactgcaacaagtagctta

SEQ ID NO: 655994 - DNA, 33 bp, Homo sapien
gcaatggtctttagaattgcaacaagtagctta

SEQ ID NO: 655995 - DNA, 33 bp, Homo sapien
gtcttggtcactgtgcaaggattgaagggaact

SEQ ID NO: 655996 - DNA, 33 bp, Homo sapien
gtcttggtcactgtgcgaggattgaagggaact

SEQ ID NO: 655997 - DNA, 33 bp, Homo sapien
caacaaaaaaaccttcacatgaatggtttatag

SEQ ID NO: 655998 - DNA, 33 bp, Homo sapien
caacaaaaaaaccttcgcatgaatggtttatag

SEQ ID NO: 655999 - DNA, 33 bp, Homo sapien
ctgcctgccaaggagaaagatctcaaaagaaat

SEQ ID NO: 656000 - DNA, 33 bp, Homo sapien
ctgcctgccaaggagagagatctcaaaagaaat

SEQ ID NO: 656001 - DNA, 33 bp, Homo sapien
ccacacaccaacagtacgctgtgaggtcctctc

SEQ ID NO: 656002 - DNA, 33 bp, Homo sapien
ccacacaccaacagtatgctgtgaggtcctctc

SEQ ID NO: 656003 - DNA, 33 bp, Homo sapien
ttagtaccagggcagacgtgtagcttttccaag

SEQ ID NO: 656004 - DNA, 33 bp, Homo sapien
ttagtaccagggcagatgtgtagcttttccaag

SEQ ID NO: 656005 - DNA, 33 bp, Homo sapien
tagctgcatgatttaaacatgtgaagaactcct

SEQ ID NO: 656006 - DNA, 33 bp, Homo sapien
tagctgcatgatttaagcatgtgaagaactcct

SEQ ID NO: 656007 - DNA, 33 bp, Homo sapien
agtgctttagatcacactgagttgtttgctatt

SEQ ID NO: 656008 - DNA, 33 bp, Homo sapien
agtgctttagatcacattgagttgtttgctatt

SEQ ID NO: 656009 - DNA, 33 bp, Homo sapien
ttggaatgttctgggaacgctaactactttgga

SEQ ID NO: 656010 - DNA, 33 bp, Homo sapien
ttggaatgttctgggagcgctaactactttgga

SEQ ID NO: 656011 - DNA, 33 bp, Homo sapien
tgggtgtcttttcacccggctttctggaattcc

SEQ ID NO: 656012 - DNA, 33 bp, Homo sapien
tgggtgtcttttcacctggctttctggaattcc

SEQ ID NO: 656013 - DNA, 33 bp, Homo sapien
tcctgtccaggagggccattcatgcctcagatc

SEQ ID NO: 656014 - DNA, 33 bp, Homo sapien
tcctgtccaggagggctattcatgcctcagatc

SEQ ID NO: 656015 - DNA, 33 bp, Homo sapien
acatacttttcaagtgacaattccacccaggta

SEQ ID NO: 656016 - DNA, 33 bp, Homo sapien
acatacttttcaagtggcaattccacccaggta

SEQ ID NO: 656017 - DNA, 33 bp, Homo sapien
atttgtgagggatgagaccactttcctctgctg

SEQ ID NO: 656018 - DNA, 33 bp, Homo sapien
atttgtgagggatgaggccactttcctctgctg

SEQ ID NO: 656019 - DNA, 33 bp, Homo sapien
ttttcttggaattactaagaatttctgagcttt

SEQ ID NO: 656020 - DNA, 33 bp, Homo sapien
ttttcttggaattactgagaatttctgagcttt

SEQ ID NO: 656021 - DNA, 33 bp, Homo sapien
aggcccctcgatgataagtcaccttgtaagtca

SEQ ID NO: 656022 - DNA, 33 bp, Homo sapien
aggcccctcgatgataggtcaccttgtaagtca

SEQ ID NO: 656023 - DNA, 33 bp, Homo sapien
aaggaggtgctcagtagtaaaggggcaaaccat

SEQ ID NO: 656024 - DNA, 33 bp, Homo sapien
aaggaggtgctcagtattaaaggggcaaaccat

SEQ ID NO: 656025 - DNA, 33 bp, Homo sapien
aaccataaagacaagtcactctcaccagcacgt

SEQ ID NO: 656026 - DNA, 33 bp, Homo sapien
aaccataaagacaagtgactctcaccagcacgt

SEQ ID NO: 656027 - DNA, 33 bp, Homo sapien
gagtccccattggctgaatacaactggaaaccg

SEQ ID NO: 656028 - DNA, 33 bp, Homo sapien
gagtccccattggctgtatacaactggaaaccg

SEQ ID NO: 656029 - DNA, 33 bp, Homo sapien
gtggaaaaaacaaaaactcaaggcctgctgatt

SEQ ID NO: 656030 - DNA, 33 bp, Homo sapien
gtggaaaaaacaaaaattcaaggcctgctgatt

SEQ ID NO: 656031 - DNA, 33 bp, Homo sapien
ttgaatcctgagcagaaattagacggttgtctt

SEQ ID NO: 656032 - DNA, 33 bp, Homo sapien
ttgaatcctgagcagagattagacggttgtctt

SEQ ID NO: 656033 - DNA, 33 bp, Homo sapien
caatcaaggagatagccgacttgtcttccctcc

SEQ ID NO: 656034 - DNA, 33 bp, Homo sapien
caatcaaggagatagctgacttgtcttccctcc

SEQ ID NO: 656035 - DNA, 33 bp, Homo sapien
agtacagagagaaaagaaagaaccacgccagaa

SEQ ID NO: 656036 - DNA, 33 bp, Homo sapien
agtacagagagaaaaggaagaaccacgccagaa

SEQ ID NO: 656037 - DNA, 33 bp, Homo sapien
tcctgaatctcttgaccaaattgcttcctagaa

SEQ ID NO: 656038 - DNA, 33 bp, Homo sapien
tcctgaatctcttgactaaattgcttcctagaa

SEQ ID NO: 656039 - DNA, 33 bp, Homo sapien
attactttgtgttctacagctgaataaattgta

SEQ ID NO: 656040 - DNA, 33 bp, Homo sapien
attactttgtgttctatagctgaataaattgta

SEQ ID NO: 656041 - DNA, 33 bp, Homo sapien
gggtatgcataggcccaaagtgagtatttacac

SEQ ID NO: 656042 - DNA, 33 bp, Homo sapien
gggtatgcataggcccgaagtgagtatttacac

SEQ ID NO: 656043 - DNA, 33 bp, Homo sapien
taacgaaacatttccaataatcttcattcctat

SEQ ID NO: 656044 - DNA, 33 bp, Homo sapien
taacgaaacatttccagtaatcttcattcctat

SEQ ID NO: 656045 - DNA, 33 bp, Homo sapien
gttgtagttgagaacacgggggttgacatcaga

SEQ ID NO: 656046 - DNA, 33 bp, Homo sapien
gttgtagttgagaacatgggggttgacatcaga

SEQ ID NO: 656047 - DNA, 33 bp, Homo sapien
cttgccattccaagaactggtcattcacaaact

SEQ ID NO: 656048 - DNA, 33 bp, Homo sapien
cttgccattccaagaagtggtcattcacaaact

SEQ ID NO: 656049 - DNA, 33 bp, Homo sapien
gaccctctctctggaaaaacaaaactggcagct

SEQ ID NO: 656050 - DNA, 33 bp, Homo sapien
gaccctctctctggaagaacaaaactggcagct

SEQ ID NO: 656051 - DNA, 33 bp, Homo sapien
tttctagctgatctgaagcacaacaaaaggaaa

SEQ ID NO: 656052 - DNA, 33 bp, Homo sapien
tttctagctgatctgaggcacaacaaaaggaaa

SEQ ID NO: 656053 - DNA, 33 bp, Homo sapien
ctgactccaagtccaacgatctttctacaccac

SEQ ID NO: 656054 - DNA, 33 bp, Homo sapien
ctgactccaagtccaatgatctttctacaccac

SEQ ID NO: 656055 - DNA, 33 bp, Homo sapien
ttatagtctgtacttcacatgttactccttaat

SEQ ID NO: 656056 - DNA, 33 bp, Homo sapien
ttatagtctgtacttcgcatgttactccttaat

SEQ ID NO: 656057 - DNA, 33 bp, Homo sapien
tctagagagaaaagtgaaagtttgagtgagaca

SEQ ID NO: 656058 - DNA, 33 bp, Homo sapien
tctagagagaaaagtggaagtttgagtgagaca

SEQ ID NO: 656059 - DNA, 33 bp, Homo sapien
tgacttctggccaaaagcccttagaagatgggc

SEQ ID NO: 656060 - DNA, 33 bp, Homo sapien
tgacttctggccaaaatcccttagaagatgggc

SEQ ID NO: 656061 - DNA, 33 bp, Homo sapien
ggtcgttgcttcttccagattgtgggccctatt

SEQ ID NO: 656062 - DNA, 33 bp, Homo sapien
ggtcgttgcttcttccggattgtgggccctatt

SEQ ID NO: 656063 - DNA, 33 bp, Homo sapien
ttggataggtggtactcacttctaatgatatgt

SEQ ID NO: 656064 - DNA, 33 bp, Homo sapien
ttggataggtggtactgacttctaatgatatgt

SEQ ID NO: 656065 - DNA, 33 bp, Homo sapien
tctggagtctagagaacggtagccctcttctca

SEQ ID NO: 656066 - DNA, 33 bp, Homo sapien
tctggagtctagagaatggtagccctcttctca

SEQ ID NO: 656067 - DNA, 33 bp, Homo sapien
aggaagtttgaaactaaccctcatcttcctgtc

SEQ ID NO: 656068 - DNA, 33 bp, Homo sapien
aggaagtttgaaactatccctcatcttcctgtc

SEQ ID NO: 656069 - DNA, 33 bp, Homo sapien
ttcatgttaaataaaacgtagcaatgatagtca

SEQ ID NO: 656070 - DNA, 33 bp, Homo sapien
ttcatgttaaataaaatgtagcaatgatagtca

SEQ ID NO: 656071 - DNA, 33 bp, Homo sapien
tctattgagagaaaaggactgttgatactgaca

SEQ ID NO: 656072 - DNA, 33 bp, Homo sapien
tctattgagagaaaagtactgttgatactgaca

SEQ ID NO: 656073 - DNA, 33 bp, Homo sapien
tgggcatgatatgtggcaagtgctatgttacaa

SEQ ID NO: 656074 - DNA, 33 bp, Homo sapien
tgggcatgatatgtgggaagtgctatgttacaa

SEQ ID NO: 656075 - DNA, 33 bp, Homo sapien
aaatatcagatgtgaacgttatgacctaggaag

SEQ ID NO: 656076 - DNA, 33 bp, Homo sapien
aaatatcagatgtgaatgttatgacctaggaag

SEQ ID NO: 656077 - DNA, 33 bp, Homo sapien
gcttttaacaaatcaggatacaacttagtattt

SEQ ID NO: 656078 - DNA, 33 bp, Homo sapien
gcttttaacaaatcagtatacaacttagtattt

SEQ ID NO: 656079 - DNA, 33 bp, Homo sapien
ggtgctaagcattttaactatgaattaactcat

SEQ ID NO: 656080 - DNA, 33 bp, Homo sapien
ggtgctaagcattttagctatgaattaactcat

SEQ ID NO: 656081 - DNA, 33 bp, Homo sapien
ttaaatctggcccgaactgctgagccacagaat

SEQ ID NO: 656082 - DNA, 33 bp, Homo sapien
ttaaatctggcccgaagtgctgagccacagaat

SEQ ID NO: 656083 - DNA, 33 bp, Homo sapien
tacattaattaaaatgaaaagccattagacata

SEQ ID NO: 656084 - DNA, 33 bp, Homo sapien
tacattaattaaaatggaaagccattagacata

SEQ ID NO: 656085 - DNA, 33 bp, Homo sapien
agtatttccataaaagcctgcctcattccaaaa

SEQ ID NO: 656086 - DNA, 33 bp, Homo sapien
agtatttccataaaagtctgcctcattccaaaa

SEQ ID NO: 656087 - DNA, 33 bp, Homo sapien
tatatgtccaaatgtaataagtttaagagcacc

SEQ ID NO: 656088 - DNA, 33 bp, Homo sapien
tatatgtccaaatgtactaagtttaagagcacc

SEQ ID NO: 656089 - DNA, 33 bp, Homo sapien
agtacaatgtatagaccaaaccgaaaaggagag

SEQ ID NO: 656090 - DNA, 33 bp, Homo sapien
agtacaatgtatagacgaaaccgaaaaggagag

SEQ ID NO: 656091 - DNA, 33 bp, Homo sapien
tatctagttcaactcaacaaataatgtgtatgt

SEQ ID NO: 656092 - DNA, 33 bp, Homo sapien
tatctagttcaactcatcaaataatgtgtatgt

SEQ ID NO: 656093 - DNA, 33 bp, Homo sapien
gtgactaacataatcccctaaaaccagtgataa

SEQ ID NO: 656094 - DNA, 33 bp, Homo sapien
gtgactaacataatcctctaaaaccagtgataa

SEQ ID NO: 656095 - DNA, 33 bp, Homo sapien
gccaaggaaacagggaagatcaaatgtctgctg

SEQ ID NO: 656096 - DNA, 33 bp, Homo sapien
gccaaggaaacagggaggatcaaatgtctgctg

SEQ ID NO: 656097 - DNA, 33 bp, Homo sapien
gcatataaaacaattgcagccagtgagacatca

SEQ ID NO: 656098 - DNA, 33 bp, Homo sapien
gcatataaaacaattgtagccagtgagacatca

SEQ ID NO: 656099 - DNA, 33 bp, Homo sapien
tttggaaatttctgagccataaagggttaagaa

SEQ ID NO: 656100 - DNA, 33 bp, Homo sapien
tttggaaatttctgaggcataaagggttaagaa

SEQ ID NO: 656101 - DNA, 33 bp, Homo sapien
tacccacaattgcttaacatcaattccgtgaat

SEQ ID NO: 656102 - DNA, 33 bp, Homo sapien
tacccacaattgcttagcatcaattccgtgaat

SEQ ID NO: 656103 - DNA, 33 bp, Homo sapien
gtgtagaggacagatgcaaaaccagggaagcag

SEQ ID NO: 656104 - DNA, 33 bp, Homo sapien
gtgtagaggacagatggaaaaccagggaagcag

SEQ ID NO: 656105 - DNA, 33 bp, Homo sapien
ggaggtggtggaagcaatgaagtcagatttaga

SEQ ID NO: 656106 - DNA, 33 bp, Homo sapien
ggaggtggtggaagcagtgaagtcagatttaga

SEQ ID NO: 656107 - DNA, 33 bp, Homo sapien
ggagggtggaaaaaaggcaagacagggtgggcc

SEQ ID NO: 656108 - DNA, 33 bp, Homo sapien
ggagggtggaaaaaagtcaagacagggtgggcc

SEQ ID NO: 656109 - DNA, 33 bp, Homo sapien
aagcagatcaggaagaatagaaatgatgaatga

SEQ ID NO: 656110 - DNA, 33 bp, Homo sapien
aagcagatcaggaagagtagaaatgatgaatga

SEQ ID NO: 656111 - DNA, 33 bp, Homo sapien
taggcagcaaggccaaaagtgcatgcgttagtc

SEQ ID NO: 656112 - DNA, 33 bp, Homo sapien
taggcagcaaggccaatagtgcatgcgttagtc

SEQ ID NO: 656113 - DNA, 33 bp, Homo sapien
ctaaagacagagaaggaagccattaaatgttct

SEQ ID NO: 656114 - DNA, 33 bp, Homo sapien
ctaaagacagagaagggagccattaaatgttct

SEQ ID NO: 656115 - DNA, 33 bp, Homo sapien
ataaaagacatcaaaaaggtgatctagtctaga

SEQ ID NO: 656116 - DNA, 33 bp, Homo sapien
ataaaagacatcaaaagggtgatctagtctaga

SEQ ID NO: 656117 - DNA, 33 bp, Homo sapien
tttccgtaattgttgaaccaaaagagaaaatga

SEQ ID NO: 656118 - DNA, 33 bp, Homo sapien
tttccgtaattgttgacccaaaagagaaaatga

SEQ ID NO: 656119 - DNA, 33 bp, Homo sapien
gggattcctctattagacaatctttgtttccaa

SEQ ID NO: 656120 - DNA, 33 bp, Homo sapien
gggattcctctattaggcaatctttgtttccaa

SEQ ID NO: 656121 - DNA, 33 bp, Homo sapien
tctaactctgcagaacccaatgacacatagcat

SEQ ID NO: 656122 - DNA, 33 bp, Homo sapien
tctaactctgcagaactcaatgacacatagcat

SEQ ID NO: 656123 - DNA, 33 bp, Homo sapien
tgaagaatttttagatcaactatctcactaatt

SEQ ID NO: 656124 - DNA, 33 bp, Homo sapien
tgaagaatttttagatgaactatctcactaatt

SEQ ID NO: 656125 - DNA, 33 bp, Homo sapien
tttgtgaatatttgtaacttcctggtgtatttt

SEQ ID NO: 656126 - DNA, 33 bp, Homo sapien
tttgtgaatatttgtaccttcctggtgtatttt

SEQ ID NO: 656127 - DNA, 33 bp, Homo sapien
acttcaatattaggacaagtctctctttattta

SEQ ID NO: 656128 - DNA, 33 bp, Homo sapien
acttcaatattaggaccagtctctctttattta

SEQ ID NO: 656129 - DNA, 33 bp, Homo sapien
tgccagactgaaagggaagaaaaattgatttca

SEQ ID NO: 656130 - DNA, 33 bp, Homo sapien
tgccagactgaaaggggagaaaaattgatttca

SEQ ID NO: 656131 - DNA, 33 bp, Homo sapien
gggtgcaatcaggaaacagctttgtgctttctc

SEQ ID NO: 656132 - DNA, 33 bp, Homo sapien
gggtgcaatcaggaaagagctttgtgctttctc

SEQ ID NO: 656133 - DNA, 33 bp, Homo sapien
tctccaggtcaaatcacgagaaatctaaagggt

SEQ ID NO: 656134 - DNA, 33 bp, Homo sapien
tctccaggtcaaatcatgagaaatctaaagggt

SEQ ID NO: 656135 - DNA, 33 bp, Homo sapien
ggcatcctcatacagaaaactggctcccttaca

SEQ ID NO: 656136 - DNA, 33 bp, Homo sapien
ggcatcctcatacagagaactggctcccttaca

SEQ ID NO: 656137 - DNA, 33 bp, Homo sapien
aagtcctatctgcctaagaaattcacaatcaaa

SEQ ID NO: 656138 - DNA, 33 bp, Homo sapien
aagtcctatctgcctaggaaattcacaatcaaa

SEQ ID NO: 656139 - DNA, 33 bp, Homo sapien
gtgcaggtagcaggaccacacctcttggggaga

SEQ ID NO: 656140 - DNA, 33 bp, Homo sapien
gtgcaggtagcaggacgacacctcttggggaga

SEQ ID NO: 656141 - DNA, 33 bp, Homo sapien
acctgtagtcaaacaaattcttggcatagagca

SEQ ID NO: 656142 - DNA, 33 bp, Homo sapien
acctgtagtcaaacaagttcttggcatagagca

SEQ ID NO: 656143 - DNA, 33 bp, Homo sapien
cctgccaacttgattccccacactcactttcac

SEQ ID NO: 656144 - DNA, 33 bp, Homo sapien
cctgccaacttgattctccacactcactttcac

SEQ ID NO: 656145 - DNA, 33 bp, Homo sapien
catgcattctgggccagcagagattccctggca

SEQ ID NO: 656146 - DNA, 33 bp, Homo sapien
catgcattctgggccatcagagattccctggca

SEQ ID NO: 656147 - DNA, 33 bp, Homo sapien
taaaaaagaggtaactaaagctcagaaaggttt

SEQ ID NO: 656148 - DNA, 33 bp, Homo sapien
taaaaaagaggtaactgaagctcagaaaggttt

SEQ ID NO: 656149 - DNA, 33 bp, Homo sapien
aagaaggtactagctacgtctaagggagagagg

SEQ ID NO: 656150 - DNA, 33 bp, Homo sapien
aagaaggtactagctaggtctaagggagagagg

SEQ ID NO: 656151 - DNA, 33 bp, Homo sapien
cagacttgatgaccaaacctgttcttaatcctg

SEQ ID NO: 656152 - DNA, 33 bp, Homo sapien
cagacttgatgaccaatcctgttcttaatcctg

SEQ ID NO: 656153 - DNA, 33 bp, Homo sapien
ttgctctttcttcatacgctctggtttagctca

SEQ ID NO: 656154 - DNA, 33 bp, Homo sapien
ttgctctttcttcatatgctctggtttagctca

SEQ ID NO: 656155 - DNA, 33 bp, Homo sapien
ttattaagaggttgtgcaaatttataccctcat

SEQ ID NO: 656156 - DNA, 33 bp, Homo sapien
ttattaagaggttgtggaaatttataccctcat

SEQ ID NO: 656157 - DNA, 33 bp, Homo sapien
agtgcattagagcctcaaactcctatcctgaag

SEQ ID NO: 656158 - DNA, 33 bp, Homo sapien
agtgcattagagcctcgaactcctatcctgaag

SEQ ID NO: 656159 - DNA, 33 bp, Homo sapien
atgcttttatttacctgaaaggacataaagcac

SEQ ID NO: 656160 - DNA, 33 bp, Homo sapien
atgcttttatttaccttaaaggacataaagcac

SEQ ID NO: 656161 - DNA, 33 bp, Homo sapien
gaatactctaatactgaagctgtagtgtgcaat

SEQ ID NO: 656162 - DNA, 33 bp, Homo sapien
gaatactctaatactggagctgtagtgtgcaat

SEQ ID NO: 656163 - DNA, 33 bp, Homo sapien
tggaactacaggggcgaaacaccattcctggct

SEQ ID NO: 656164 - DNA, 33 bp, Homo sapien
tggaactacaggggcgcaacaccattcctggct

SEQ ID NO: 656165 - DNA, 33 bp, Homo sapien
caattgtagcatcttaaaaaactatagtgtaat

SEQ ID NO: 656166 - DNA, 33 bp, Homo sapien
caattgtagcatcttagaaaactatagtgtaat

SEQ ID NO: 656167 - DNA, 33 bp, Homo sapien
aactggggaacacttacagtgagcaccaaatgt

SEQ ID NO: 656168 - DNA, 33 bp, Homo sapien
aactggggaacacttatagtgagcaccaaatgt

SEQ ID NO: 656169 - DNA, 33 bp, Homo sapien
tttctgagtcatttcacatcttaggatagtggc

SEQ ID NO: 656170 - DNA, 33 bp, Homo sapien
tttctgagtcatttcagatcttaggatagtggc

SEQ ID NO: 656171 - DNA, 33 bp, Homo sapien
acaacacaatacaaaacctgataatggaagtcc

SEQ ID NO: 656172 - DNA, 33 bp, Homo sapien
acaacacaatacaaaatctgataatggaagtcc

SEQ ID NO: 656173 - DNA, 33 bp, Homo sapien
cctatggctctctgtcaaagtggctttggagta

SEQ ID NO: 656174 - DNA, 33 bp, Homo sapien
cctatggctctctgtcgaagtggctttggagta

SEQ ID NO: 656175 - DNA, 33 bp, Homo sapien
tgctggcttcagtggaaatgctcagatgggggc

SEQ ID NO: 656176 - DNA, 33 bp, Homo sapien
tgctggcttcagtggagatgctcagatgggggc

SEQ ID NO: 656177 - DNA, 33 bp, Homo sapien
ctgaacattgagtacacatggataaaaatgatg

SEQ ID NO: 656178 - DNA, 33 bp, Homo sapien
ctgaacattgagtacatatggataaaaatgatg

SEQ ID NO: 656179 - DNA, 33 bp, Homo sapien
taccaccttatggagaggacccatttatttaaa

SEQ ID NO: 656180 - DNA, 33 bp, Homo sapien
taccaccttatggagatgacccatttatttaaa

SEQ ID NO: 656181 - DNA, 33 bp, Homo sapien
aactgagatttcagtgaaaacctacagccagaa

SEQ ID NO: 656182 - DNA, 33 bp, Homo sapien
aactgagatttcagtggaaacctacagccagaa

SEQ ID NO: 656183 - DNA, 33 bp, Homo sapien
acttgttagttccagaagtgtttttgttgattc

SEQ ID NO: 656184 - DNA, 33 bp, Homo sapien
acttgttagttccagaggtgtttttgttgattc

SEQ ID NO: 656185 - DNA, 33 bp, Homo sapien
tcaattaataagagaaattagagaggccaagag

SEQ ID NO: 656186 - DNA, 33 bp, Homo sapien
tcaattaataagagaagttagagaggccaagag

SEQ ID NO: 656187 - DNA, 33 bp, Homo sapien
gccttcaacagaaggccaatccatattatgaag

SEQ ID NO: 656188 - DNA, 33 bp, Homo sapien
gccttcaacagaaggctaatccatattatgaag

SEQ ID NO: 656189 - DNA, 33 bp, Homo sapien
aattagattctttcccaataagcaaatgctaag

SEQ ID NO: 656190 - DNA, 33 bp, Homo sapien
aattagattctttcccgataagcaaatgctaag

SEQ ID NO: 656191 - DNA, 33 bp, Homo sapien
ggctccaaaagaagtaccagtcatccattgcaa

SEQ ID NO: 656192 - DNA, 33 bp, Homo sapien
ggctccaaaagaagtagcagtcatccattgcaa

SEQ ID NO: 656193 - DNA, 33 bp, Homo sapien
gctgcaactttatttacggcccgcaaatccttt

SEQ ID NO: 656194 - DNA, 33 bp, Homo sapien
gctgcaactttatttatggcccgcaaatccttt

SEQ ID NO: 656195 - DNA, 33 bp, Homo sapien
cttggggcctaatgaaatggaacccagtctgtc

SEQ ID NO: 656196 - DNA, 33 bp, Homo sapien
cttggggcctaatgaagtggaacccagtctgtc

SEQ ID NO: 656197 - DNA, 33 bp, Homo sapien
attgtttgatgactgccctttttcagtagaagg

SEQ ID NO: 656198 - DNA, 33 bp, Homo sapien
attgtttgatgactgctctttttcagtagaagg

SEQ ID NO: 656199 - DNA, 33 bp, Homo sapien
taaccagaagtgtgtacaaaaaaagcttgaggc

SEQ ID NO: 656200 - DNA, 33 bp, Homo sapien
taaccagaagtgtgtagaaaaaaagcttgaggc

SEQ ID NO: 656201 - DNA, 33 bp, Homo sapien
gtctcctgtctaaaataagcaaacctgttgaag

SEQ ID NO: 656202 - DNA, 33 bp, Homo sapien
gtctcctgtctaaaatcagcaaacctgttgaag

SEQ ID NO: 656203 - DNA, 33 bp, Homo sapien
tctcaccacaactgggaaacgttcttcactttt

SEQ ID NO: 656204 - DNA, 33 bp, Homo sapien
tctcaccacaactggggaacgttcttcactttt

SEQ ID NO: 656205 - DNA, 33 bp, Homo sapien
gtccctgccaaagcaccgaatccaaaatcataa

SEQ ID NO: 656206 - DNA, 33 bp, Homo sapien
gtccctgccaaagcactgaatccaaaatcataa

SEQ ID NO: 656207 - DNA, 33 bp, Homo sapien
cttctttaataccatacccaaagactctgacat

SEQ ID NO: 656208 - DNA, 33 bp, Homo sapien
cttctttaataccatatccaaagactctgacat

SEQ ID NO: 656209 - DNA, 33 bp, Homo sapien
aaagacctgagctagaatattagcacactctgc

SEQ ID NO: 656210 - DNA, 33 bp, Homo sapien
aaagacctgagctagactattagcacactctgc

SEQ ID NO: 656211 - DNA, 33 bp, Homo sapien
cccatcatcatctcacactacagtattctgaat

SEQ ID NO: 656212 - DNA, 33 bp, Homo sapien
cccatcatcatctcacgctacagtattctgaat

SEQ ID NO: 656213 - DNA, 33 bp, Homo sapien
attgtatctagagtcaacagtaatgtactatat

SEQ ID NO: 656214 - DNA, 33 bp, Homo sapien
attgtatctagagtcaccagtaatgtactatat

SEQ ID NO: 656215 - DNA, 33 bp, Homo sapien
ctcttccagtcactgagaaaacaaacaaacaaa

SEQ ID NO: 656216 - DNA, 33 bp, Homo sapien
ctcttccagtcactgataaaacaaacaaacaaa

SEQ ID NO: 656217 - DNA, 33 bp, Homo sapien
agattaggttttactgaacataaatttttgaca

SEQ ID NO: 656218 - DNA, 33 bp, Homo sapien
agattaggttttactggacataaatttttgaca

SEQ ID NO: 656219 - DNA, 33 bp, Homo sapien
gtataacaaaaggaaaatcctagcttagctccc

SEQ ID NO: 656220 - DNA, 33 bp, Homo sapien
gtataacaaaaggaaactcctagcttagctccc

SEQ ID NO: 656221 - DNA, 33 bp, Homo sapien
gagggaagggggctgagctaatcctttcatcag

SEQ ID NO: 656222 - DNA, 33 bp, Homo sapien
gagggaagggggctgatctaatcctttcatcag

SEQ ID NO: 656223 - DNA, 33 bp, Homo sapien
tggtccatgaagccaccaaatggttttccaata

SEQ ID NO: 656224 - DNA, 33 bp, Homo sapien
tggtccatgaagccacgaaatggttttccaata

SEQ ID NO: 656225 - DNA, 33 bp, Homo sapien
agaattggacacaaaccgtacccataggatact

SEQ ID NO: 656226 - DNA, 33 bp, Homo sapien
agaattggacacaaactgtacccataggatact

SEQ ID NO: 656227 - DNA, 33 bp, Homo sapien
agatgacacaggttctcactctataggcaatct

SEQ ID NO: 656228 - DNA, 33 bp, Homo sapien
agatgacacaggttcttactctataggcaatct

SEQ ID NO: 656229 - DNA, 33 bp, Homo sapien
tgatagatagacagaccgaaaggaatagaaaat

SEQ ID NO: 656230 - DNA, 33 bp, Homo sapien
tgatagatagacagactgaaaggaatagaaaat

SEQ ID NO: 656231 - DNA, 33 bp, Homo sapien
gttgaattaagatgaactaaaactatctgaaac

SEQ ID NO: 656232 - DNA, 33 bp, Homo sapien
gttgaattaagatgaattaaaactatctgaaac

SEQ ID NO: 656233 - DNA, 33 bp, Homo sapien
agaagagaaagtgaaacgctgaaaaagaaccaa

SEQ ID NO: 656234 - DNA, 33 bp, Homo sapien
agaagagaaagtgaaatgctgaaaaagaaccaa

SEQ ID NO: 656235 - DNA, 33 bp, Homo sapien
attcttcaggaatctaagctatgtataatctag

SEQ ID NO: 656236 - DNA, 33 bp, Homo sapien
attcttcaggaatctaggctatgtataatctag

SEQ ID NO: 656237 - DNA, 33 bp, Homo sapien
accctgtctcattaaacatgataataataataa

SEQ ID NO: 656238 - DNA, 33 bp, Homo sapien
accctgtctcattaaagatgataataataataa

SEQ ID NO: 656239 - DNA, 33 bp, Homo sapien
gttaaactatgtgaaacgcatccttctgggaaa

SEQ ID NO: 656240 - DNA, 33 bp, Homo sapien
gttaaactatgtgaaatgcatccttctgggaaa

SEQ ID NO: 656241 - DNA, 33 bp, Homo sapien
gttgttgaattagacacagatgtgcatacagat

SEQ ID NO: 656242 - DNA, 33 bp, Homo sapien
gttgttgaattagacatagatgtgcatacagat

SEQ ID NO: 656243 - DNA, 33 bp, Homo sapien
tctttacaccacatacaaaaatctactcaagat

SEQ ID NO: 656244 - DNA, 33 bp, Homo sapien
tctttacaccacatacgaaaatctactcaagat

SEQ ID NO: 656245 - DNA, 33 bp, Homo sapien
aatcagcaataatgtccccattttcacttctga

SEQ ID NO: 656246 - DNA, 33 bp, Homo sapien
aatcagcaataatgtctccattttcacttctga

SEQ ID NO: 656247 - DNA, 33 bp, Homo sapien
gtcttttccttcttcacgatttataaggcactg

SEQ ID NO: 656248 - DNA, 33 bp, Homo sapien
gtcttttccttcttcatgatttataaggcactg

SEQ ID NO: 656249 - DNA, 33 bp, Homo sapien
ttacatcttttttcagcctaaaccaaacggaaa

SEQ ID NO: 656250 - DNA, 33 bp, Homo sapien
ttacatcttttttcaggctaaaccaaacggaaa

SEQ ID NO: 656251 - DNA, 33 bp, Homo sapien
ggaatgcctctctcccaacaaactaagtcatcg

SEQ ID NO: 656252 - DNA, 33 bp, Homo sapien
ggaatgcctctctcccgacaaactaagtcatcg

SEQ ID NO: 656253 - DNA, 33 bp, Homo sapien
aaaatcacctataggcaataatctggcatacat

SEQ ID NO: 656254 - DNA, 33 bp, Homo sapien
aaaatcacctataggcgataatctggcatacat

SEQ ID NO: 656255 - DNA, 33 bp, Homo sapien
actttctgggctaacaaggtcctcacacagggc

SEQ ID NO: 656256 - DNA, 33 bp, Homo sapien
actttctgggctaacatggtcctcacacagggc

SEQ ID NO: 656257 - DNA, 33 bp, Homo sapien; identical to SEQ ID NO: 656255

SEQ ID NO: 656258 - DNA, 33 bp, Homo sapien; identical to SEQ ID NO: 656256

SEQ ID NO: 656259 - DNA, 33 bp, Homo sapien
tatgcttgctctaagactaagtcactagggaaa

SEQ ID NO: 656260 - DNA, 33 bp, Homo sapien
tatgcttgctctaagattaagtcactagggaaa

SEQ ID NO: 656261 - DNA, 33 bp, Homo sapien; identical to SEQ ID NO: 656259

SEQ ID NO: 656262 - DNA, 33 bp, Homo sapien; identical to SEQ ID NO: 656260

SEQ ID NO: 656263 - DNA, 33 bp, Homo sapien
ttaggtcagacaataaatatgcccttccaataa

SEQ ID NO: 656264 - DNA, 33 bp, Homo sapien
ttaggtcagacaataattatgcccttccaataa

SEQ ID NO: 656265 - DNA, 33 bp, Homo sapien
tgtattttggctcctcaatttctgtgactttgg

SEQ ID NO: 656266 - DNA, 33 bp, Homo sapien
tgtattttggctcctccatttctgtgactttgg

SEQ ID NO: 656267 - DNA, 33 bp, Homo sapien
aagatgagactatgcaaaggattacatggatca

SEQ ID NO: 656268 - DNA, 33 bp, Homo sapien
aagatgagactatgcacaggattacatggatca

SEQ ID NO: 656269 - DNA, 33 bp, Homo sapien
aaaagttgtctttaaaatcttccaacaaaaagt

SEQ ID NO: 656270 - DNA, 33 bp, Homo sapien
aaaagttgtctttaaagtcttccaacaaaaagt

SEQ ID NO: 656271 - DNA, 33 bp, Homo sapien
ttattctgcataacacaatgtgcatttcttatt

SEQ ID NO: 656272 - DNA, 33 bp, Homo sapien
ttattctgcataacactatgtgcatttcttatt

SEQ ID NO: 656273 - DNA, 33 bp, Homo sapien
tgctcagaagctagacaatccgataaattaaaa

SEQ ID NO: 656274 - DNA, 33 bp, Homo sapien
tgctcagaagctagacgatccgataaattaaaa

SEQ ID NO: 656275 - DNA, 33 bp, Homo sapien
cagggcagaacctaaactacttttaacattttg

SEQ ID NO: 656276 - DNA, 33 bp, Homo sapien
cagggcagaacctaaattacttttaacattttg

SEQ ID NO: 656277 - DNA, 33 bp, Homo sapien
cttcaatcttgcttgcaaaaggaatctgataaa

SEQ ID NO: 656278 - DNA, 33 bp, Homo sapien
cttcaatcttgcttgcgaaaggaatctgataaa

SEQ ID NO: 656279 - DNA, 33 bp, Homo sapien
tccaagtggccagttaaaagtctaaaccagggg

SEQ ID NO: 656280 - DNA, 33 bp, Homo sapien
tccaagtggccagttagaagtctaaaccagggg

SEQ ID NO: 656281 - DNA, 33 bp, Homo sapien
cacaacaatgaaattacctaaagatgcaattct

SEQ ID NO: 656282 - DNA, 33 bp, Homo sapien
cacaacaatgaaattagctaaagatgcaattct

SEQ ID NO: 656283 - DNA, 33 bp, Homo sapien
tatgatgaaaagtacacaagaaacatgataaat

SEQ ID NO: 656284 - DNA, 33 bp, Homo sapien
tatgatgaaaagtacataagaaacatgataaat

SEQ ID NO: 656285 - DNA, 33 bp, Homo sapien
actttcgccctgtaccacttttggagtcagtaa

SEQ ID NO: 656286 - DNA, 33 bp, Homo sapien
actttcgccctgtaccgcttttggagtcagtaa

SEQ ID NO: 656287 - DNA, 33 bp, Homo sapien
tccgtggcttaagtaacccgaaagccatagact

SEQ ID NO: 656288 - DNA, 33 bp, Homo sapien
tccgtggcttaagtaagccgaaagccatagact

SEQ ID NO: 656289 - DNA, 33 bp, Homo sapien
ccagaaatggacaaaaagagaaggaaggctttt

SEQ ID NO: 656290 - DNA, 33 bp, Homo sapien
ccagaaatggacaaaaggagaaggaaggctttt

SEQ ID NO: 656291 - DNA, 33 bp, Homo sapien
tatttcagattgagaaacattatgcaagatagc

SEQ ID NO: 656292 - DNA, 33 bp, Homo sapien
tatttcagattgagaagcattatgcaagatagc

SEQ ID NO: 656293 - DNA, 33 bp, Homo sapien
gcaacctggggataagaaagaatgagccaatca

SEQ ID NO: 656294 - DNA, 33 bp, Homo sapien
gcaacctggggataaggaagaatgagccaatca

SEQ ID NO: 656295 - DNA, 33 bp, Homo sapien
ttaacacctttttttcaccaacaatattctcta

SEQ ID NO: 656296 - DNA, 33 bp, Homo sapien
ttaacacctttttttcgccaacaatattctcta

SEQ ID NO: 656297 - DNA, 33 bp, Homo sapien
gaatagtactgatacaaaagcaccagatataag

SEQ ID NO: 656298 - DNA, 33 bp, Homo sapien
gaatagtactgatacataagcaccagatataag

SEQ ID NO: 656299 - DNA, 33 bp, Homo sapien
ggtgtatttaaatcaccgactcaagcaaaagag

SEQ ID NO: 656300 - DNA, 33 bp, Homo sapien
ggtgtatttaaatcactgactcaagcaaaagag

SEQ ID NO: 656301 - DNA, 33 bp, Homo sapien
tatcacaaggcaaccaatgatatatctaatttg

SEQ ID NO: 656302 - DNA, 33 bp, Homo sapien
tatcacaaggcaaccagtgatatatctaatttg

SEQ ID NO: 656303 - DNA, 33 bp, Homo sapien
acatctggacattctgcaggcttggtgagagat

SEQ ID NO: 656304 - DNA, 33 bp, Homo sapien
acatctggacattctgtaggcttggtgagagat

SEQ ID NO: 656305 - DNA, 33 bp, Homo sapien
tcttcctgctgagaaacgtcattgatgttaact

SEQ ID NO: 656306 - DNA, 33 bp, Homo sapien
tcttcctgctgagaaaggtcattgatgttaact

SEQ ID NO: 656307 - DNA, 33 bp, Homo sapien
ggaactttttccaccacgatggccctgacccaa

SEQ ID NO: 656308 - DNA, 33 bp, Homo sapien
ggaactttttccaccatgatggccctgacccaa

SEQ ID NO: 656309 - DNA, 33 bp, Homo sapien
gccctccagatatgcaccaacaaattaaagcca

SEQ ID NO: 656310 - DNA, 33 bp, Homo sapien
gccctccagatatgcatcaacaaattaaagcca

SEQ ID NO: 656311 - DNA, 33 bp, Homo sapien
cccaaataactcagacaatatttctttggccct

SEQ ID NO: 656312 - DNA, 33 bp, Homo sapien
cccaaataactcagacgatatttctttggccct

SEQ ID NO: 656313 - DNA, 33 bp, Homo sapien
tcagggaaattactcagggaaaggatgaaaacc

SEQ ID NO: 656314 - DNA, 33 bp, Homo sapien
tcagggaaattactcatggaaaggatgaaaacc

SEQ ID NO: 656315 - DNA, 33 bp, Homo sapien
aaacactattgttcatcagagtcagctgtgatg

SEQ ID NO: 656316 - DNA, 33 bp, Homo sapien
aaacactattgttcattagagtcagctgtgatg

SEQ ID NO: 656317 - DNA, 33 bp, Homo sapien
aaataacaattgtcaacagtgtagtccattata

SEQ ID NO: 656318 - DNA, 33 bp, Homo sapien
aaataacaattgtcaagagtgtagtccattata

SEQ ID NO: 656319 - DNA, 33 bp, Homo sapien
tgcattctggcatgacactgaggttggcattag

SEQ ID NO: 656320 - DNA, 33 bp, Homo sapien
tgcattctggcatgacgctgaggttggcattag

SEQ ID NO: 656321 - DNA, 33 bp, Homo sapien
agccatgtttagagagaacccaggaaataaaag

SEQ ID NO: 656322 - DNA, 33 bp, Homo sapien
agccatgtttagagagtacccaggaaataaaag

SEQ ID NO: 656323 - DNA, 33 bp, Homo sapien
ggaagagccagtgtacaaagcagagcctgagcc

SEQ ID NO: 656324 - DNA, 33 bp, Homo sapien
ggaagagccagtgtacgaagcagagcctgagcc

SEQ ID NO: 656325 - DNA, 33 bp, Homo sapien
atcttctgaccatcacccagcttgtctgtcctc

SEQ ID NO: 656326 - DNA, 33 bp, Homo sapien
atcttctgaccatcactcagcttgtctgtcctc

SEQ ID NO: 656327 - DNA, 33 bp, Homo sapien
gacaaaaagatcagtacggggtgtattgactgc

SEQ ID NO: 656328 - DNA, 33 bp, Homo sapien
gacaaaaagatcagtatggggtgtattgactgc

SEQ ID NO: 656329 - DNA, 33 bp, Homo sapien
ccgaaacacctgtgcacatatccattcactcac

SEQ ID NO: 656330 - DNA, 33 bp, Homo sapien
ccgaaacacctgtgcatatatccattcactcac

SEQ ID NO: 656331 - DNA, 33 bp, Homo sapien
tagttaaactgtagaccctttattggtagattt

SEQ ID NO: 656332 - DNA, 33 bp, Homo sapien
tagttaaactgtagactctttattggtagattt

SEQ ID NO: 656333 - DNA, 33 bp, Homo sapien
tgaacatgaaaagttcacatcttctcttcccat

SEQ ID NO: 656334 - DNA, 33 bp, Homo sapien
tgaacatgaaaagttcgcatcttctcttcccat

SEQ ID NO: 656335 - DNA, 33 bp, Homo sapien
ctgtgtatgtatgttacagctaccacttacaaa

SEQ ID NO: 656336 - DNA, 33 bp, Homo sapien
ctgtgtatgtatgttatagctaccacttacaaa

SEQ ID NO: 656337 - DNA, 33 bp, Homo sapien
gaaactgaaataaatcaagatgagttcagggac

SEQ ID NO: 656338 - DNA, 33 bp, Homo sapien
gaaactgaaataaatcgagatgagttcagggac

SEQ ID NO: 656339 - DNA, 33 bp, Homo sapien
tgagcaatgtgtcagacaaggccaagataggtg

SEQ ID NO: 656340 - DNA, 33 bp, Homo sapien
tgagcaatgtgtcagagaaggccaagataggtg

SEQ ID NO: 656341 - DNA, 33 bp, Homo sapien
cagacctaggactgaaaggaggacgccattttt

SEQ ID NO: 656342 - DNA, 33 bp, Homo sapien
cagacctaggactgaagggaggacgccattttt

SEQ ID NO: 656343 - DNA, 33 bp, Homo sapien
atctgtgtgtggctaacgatgaggatacagaga

SEQ ID NO: 656344 - DNA, 33 bp, Homo sapien
atctgtgtgtggctaaggatgaggatacagaga

SEQ ID NO: 656345 - DNA, 33 bp, Homo sapien; identical to SEQ ID NO: 656343

SEQ ID NO: 656346 - DNA, 33 bp, Homo sapien; identical to SEQ ID NO: 656344

SEQ ID NO: 656347 - DNA, 33 bp, Homo sapien
acgtttctgggtaccaacactccagtaaccaga

SEQ ID NO: 656348 - DNA, 33 bp, Homo sapien
acgtttctgggtaccagcactccagtaaccaga

SEQ ID NO: 656349 - DNA, 33 bp, Homo sapien
ttgttaacctgcctcaagaaccatgaatttgtg

SEQ ID NO: 656350 - DNA, 33 bp, Homo sapien
ttgttaacctgcctcaggaaccatgaatttgtg

SEQ ID NO: 656351 - DNA, 33 bp, Homo sapien
aaatttagcctccaagaagagatctgctccaag

SEQ ID NO: 656352 - DNA, 33 bp, Homo sapien
aaatttagcctccaagtagagatctgctccaag

SEQ ID NO: 656353 - DNA, 33 bp, Homo sapien
agcttgtcagactagacgaaaaagcaagacctg

SEQ ID NO: 656354 - DNA, 33 bp, Homo sapien
agcttgtcagactagatgaaaaagcaagacctg

SEQ ID NO: 656355 - DNA, 33 bp, Homo sapien
accagctactaagtgaccaactggcaggcagcc

SEQ ID NO: 656356 - DNA, 33 bp, Homo sapien
accagctactaagtgatcaactggcaggcagcc

SEQ ID NO: 656357 - DNA, 33 bp, Homo sapien
gagaacaaacattgaggatgcaatttacctata

SEQ ID NO: 656358 - DNA, 33 bp, Homo sapien
gagaacaaacattgagtatgcaatttacctata

SEQ ID NO: 656359 - DNA, 33 bp, Homo sapien
cctaatttataaccaaccctcaagccaatgtca

SEQ ID NO: 656360 - DNA, 33 bp, Homo sapien
cctaatttataaccaatcctcaagccaatgtca

SEQ ID NO: 656361 - DNA, 33 bp, Homo sapien
ttaaagaatttgctgaataatctcatattcata

SEQ ID NO: 656362 - DNA, 33 bp, Homo sapien
ttaaagaatttgctgattaatctcatattcata

SEQ ID NO: 656363 - DNA, 33 bp, Homo sapien
aggtccctgaagactaaatagatgcctatagta

SEQ ID NO: 656364 - DNA, 33 bp, Homo sapien
aggtccctgaagactacatagatgcctatagta

SEQ ID NO: 656365 - DNA, 33 bp, Homo sapien
gaacacagatatgaacaaaaacaacaataacag

SEQ ID NO: 656366 - DNA, 33 bp, Homo sapien
gaacacagatatgaaccaaaacaacaataacag

SEQ ID NO: 656367 - DNA, 33 bp, Homo sapien
aagcgttttaccacatcaccctgtgatatataa

SEQ ID NO: 656368 - DNA, 33 bp, Homo sapien
aagcgttttaccacattaccctgtgatatataa

SEQ ID NO: 656369 - DNA, 33 bp, Homo sapien
agattgtcatttaaaccacagcccacaacagta

SEQ ID NO: 656370 - DNA, 33 bp, Homo sapien
agattgtcatttaaactacagcccacaacagta

SEQ ID NO: 656371 - DNA, 33 bp, Homo sapien
tgtcttttcatttttaccaatcttactagaagt

SEQ ID NO: 656372 - DNA, 33 bp, Homo sapien
tgtcttttcatttttatcaatcttactagaagt

SEQ ID NO: 656373 - DNA, 33 bp, Homo sapien
aggtgatattggtaagaatcttggtactttcag

SEQ ID NO: 656374 - DNA, 33 bp, Homo sapien
aggtgatattggtaaggatcttggtactttcag

SEQ ID NO: 656375 - DNA, 33 bp, Homo sapien
tagaccaatagaatagaccaatctttaacaagg

SEQ ID NO: 656376 - DNA, 33 bp, Homo sapien
tagaccaatagaataggccaatctttaacaagg

SEQ ID NO: 656377 - DNA, 33 bp, Homo sapien
aggtcttacatacaaaaaaatcttggcccagat

SEQ ID NO: 656378 - DNA, 33 bp, Homo sapien
aggtcttacatacaaagaaatcttggcccagat

SEQ ID NO: 656379 - DNA, 33 bp, Homo sapien
cttctcaaattcttccagaaaactgaagaggtg

SEQ ID NO: 656380 - DNA, 33 bp, Homo sapien
cttctcaaattcttccggaaaactgaagaggtg

SEQ ID NO: 656381 - DNA, 33 bp, Homo sapien
agccaccgcgtgcccgacctcgcagatttcttt

SEQ ID NO: 656382 - DNA, 33 bp, Homo sapien
agccaccgcgtgcccggcctcgcagatttcttt

SEQ ID NO: 656383 - DNA, 33 bp, Homo sapien
caactgatgatcctgacgtgattctaaacatac

SEQ ID NO: 656384 - DNA, 33 bp, Homo sapien
caactgatgatcctgatgtgattctaaacatac

SEQ ID NO: 656385 - DNA, 33 bp, Homo sapien
caaggtcactgttctacaaaatggtactctgag

SEQ ID NO: 656386 - DNA, 33 bp, Homo sapien
caaggtcactgttctataaaatggtactctgag

SEQ ID NO: 656387 - DNA, 33 bp, Homo sapien
gtggtattatctctgaagaacttttggcattga

SEQ ID NO: 656388 - DNA, 33 bp, Homo sapien
gtggtattatctctgaggaacttttggcattga

SEQ ID NO: 656389 - DNA, 33 bp, Homo sapien
attttctatactcacaaaacctgctgggatttt

SEQ ID NO: 656390 - DNA, 33 bp, Homo sapien
attttctatactcacagaacctgctgggatttt

SEQ ID NO: 656391 - DNA, 33 bp, Homo sapien
cttagtgattacaacaccagaaaacatttatta

SEQ ID NO: 656392 - DNA, 33 bp, Homo sapien
cttagtgattacaacatcagaaaacatttatta

SEQ ID NO: 656393 - DNA, 33 bp, Homo sapien
gagttcaaggttatcaagcacctgtaattgtgc

SEQ ID NO: 656394 - DNA, 33 bp, Homo sapien
gagttcaaggttatcaggcacctgtaattgtgc

SEQ ID NO: 656395 - DNA, 33 bp, Homo sapien
aaaatttaacaacctccacttgtgctctcaaat

SEQ ID NO: 656396 - DNA, 33 bp, Homo sapien
aaaatttaacaacctctacttgtgctctcaaat

SEQ ID NO: 656397 - DNA, 33 bp, Homo sapien
cacattgaaatatggcacactacaacatatatt

SEQ ID NO: 656398 - DNA, 33 bp, Homo sapien
cacattgaaatatggcgcactacaacatatatt

SEQ ID NO: 656399 - DNA, 33 bp, Homo sapien
aatggctaacccaaacaacttcctcaaaactca

SEQ ID NO: 656400 - DNA, 33 bp, Homo sapien
aatggctaacccaaacgacttcctcaaaactca

SEQ ID NO: 656401 - DNA, 33 bp, Homo sapien
ctttcttgcagaggccaaaggatcataaatagg

SEQ ID NO: 656402 - DNA, 33 bp, Homo sapien
ctttcttgcagaggccgaaggatcataaatagg

SEQ ID NO: 656403 - DNA, 33 bp, Homo sapien
tggcttttcctcactagctcagttaataacccc

SEQ ID NO: 656404 - DNA, 33 bp, Homo sapien
tggcttttcctcactatctcagttaataacccc

SEQ ID NO: 656405 - DNA, 33 bp, Homo sapien
tgccttttaaccaatcaagtggtactttttcca

SEQ ID NO: 656406 - DNA, 33 bp, Homo sapien
tgccttttaaccaatctagtggtactttttcca

SEQ ID NO: 656407 - DNA, 33 bp, Homo sapien; identical to SEQ ID NO: 656405

SEQ ID NO: 656408 - DNA, 33 bp, Homo sapien; identical to SEQ ID NO: 656406

SEQ ID NO: 656409 - DNA, 33 bp, Homo sapien
ttatctttgcctacacagtaccttcaggctaaa

SEQ ID NO: 656410 - DNA, 33 bp, Homo sapien
ttatctttgcctacacggtaccttcaggctaaa

SEQ ID NO: 656411 - DNA, 33 bp, Homo sapien
tacttccttgtatacactgaaactttctcatcc

SEQ ID NO: 656412 - DNA, 33 bp, Homo sapien
tacttccttgtatacattgaaactttctcatcc

SEQ ID NO: 656413 - DNA, 33 bp, Homo sapien
cctgcagtattacgataaacaaccataatttga

SEQ ID NO: 656414 - DNA, 33 bp, Homo sapien
cctgcagtattacgattaacaaccataatttga

SEQ ID NO: 656415 - DNA, 33 bp, Homo sapien
gcttttctccttgtacactgataagggccaagc

SEQ ID NO: 656416 - DNA, 33 bp, Homo sapien
gcttttctccttgtacgctgataagggccaagc

SEQ ID NO: 656417 - DNA, 33 bp, Homo sapien
cgacatgaaaacattcccattaagccccaccct

SEQ ID NO: 656418 - DNA, 33 bp, Homo sapien
cgacatgaaaacattctcattaagccccaccct

SEQ ID NO: 656419 - DNA, 33 bp, Homo sapien
aacaagaagaaagaagaatgtatgaaggggagt

SEQ ID NO: 656420 - DNA, 33 bp, Homo sapien
aacaagaagaaagaagcatgtatgaaggggagt

SEQ ID NO: 656421 - DNA, 33 bp, Homo sapien
tgttcatgcagaaaccagctgcaggggtggagc

SEQ ID NO: 656422 - DNA, 33 bp, Homo sapien
tgttcatgcagaaaccggctgcaggggtggagc

SEQ ID NO: 656423 - DNA, 33 bp, Homo sapien
gggcctggaaaaccacaggcactcaacaacctg

SEQ ID NO: 656424 - DNA, 33 bp, Homo sapien
gggcctggaaaaccacgggcactcaacaacctg

SEQ ID NO: 656425 - DNA, 33 bp, Homo sapien
atgtgatgcctttctacatactcaagtaaaaac

SEQ ID NO: 656426 - DNA, 33 bp, Homo sapien
atgtgatgcctttctagatactcaagtaaaaac

SEQ ID NO: 656427 - DNA, 33 bp, Homo sapien
gctcaatttcctgaaaatggctgaagaatgaaa

SEQ ID NO: 656428 - DNA, 33 bp, Homo sapien
gctcaatttcctgaaagtggctgaagaatgaaa

SEQ ID NO: 656429 - DNA, 33 bp, Homo sapien
tctctcagccagttgcagaagatttacttattc

SEQ ID NO: 656430 - DNA, 33 bp, Homo sapien
tctctcagccagttgcggaagatttacttattc

SEQ ID NO: 656431 - DNA, 33 bp, Homo sapien
aagataggtcaatagacgttatccagtctaaag

SEQ ID NO: 656432 - DNA, 33 bp, Homo sapien
aagataggtcaatagatgttatccagtctaaag

SEQ ID NO: 656433 - DNA, 33 bp, Homo sapien
tatatagggcatacccaaagaaaccaatgatat

SEQ ID NO: 656434 - DNA, 33 bp, Homo sapien
tatatagggcatacccgaagaaaccaatgatat

SEQ ID NO: 656435 - DNA, 33 bp, Homo sapien
atttctgtatgccagaaatgaagttggaaaata

SEQ ID NO: 656436 - DNA, 33 bp, Homo sapien
atttctgtatgccagagatgaagttggaaaata

SEQ ID NO: 656437 - DNA, 33 bp, Homo sapien
ccatctgtgcttgacggagagatccacactgag

SEQ ID NO: 656438 - DNA, 33 bp, Homo sapien
ccatctgtgcttgacgtagagatccacactgag

SEQ ID NO: 656439 - DNA, 33 bp, Homo sapien
cctctgagtggcaagaactgcctggatgcttct

SEQ ID NO: 656440 - DNA, 33 bp, Homo sapien
cctctgagtggcaagacctgcctggatgcttct

SEQ ID NO: 656441 - DNA, 33 bp, Homo sapien
cgtgggaatccaatgaagaagctgggctcagag

SEQ ID NO: 656442 - DNA, 33 bp, Homo sapien
cgtgggaatccaatgaggaagctgggctcagag

SEQ ID NO: 656443 - DNA, 33 bp, Homo sapien
gctctatgcttatgctcactgcctgtactgctg

SEQ ID NO: 656444 - DNA, 33 bp, Homo sapien
gctctatgcttatgctgactgcctgtactgctg

SEQ ID NO: 656445 - DNA, 33 bp, Homo sapien
ttgactagagtgttgaataaactgctatttata

SEQ ID NO: 656446 - DNA, 33 bp, Homo sapien
ttgactagagtgttgattaaactgctatttata

SEQ ID NO: 656447 - DNA, 33 bp, Homo sapien
taccccttgctcatcccgcatcaggtgtccaac

SEQ ID NO: 656448 - DNA, 33 bp, Homo sapien
taccccttgctcatcctgcatcaggtgtccaac

SEQ ID NO: 656449 - DNA, 33 bp, Homo sapien
ttcacctctaagccacaggtatcatctcttcca

SEQ ID NO: 656450 - DNA, 33 bp, Homo sapien
ttcacctctaagccaccggtatcatctcttcca

SEQ ID NO: 656451 - DNA, 33 bp, Homo sapien
gtgccagagccagaaacccgtgggagtctagaa

SEQ ID NO: 656452 - DNA, 33 bp, Homo sapien
gtgccagagccagaaatccgtgggagtctagaa

SEQ ID NO: 656453 - DNA, 33 bp, Homo sapien
tctttttatttttaagcacaaatggtagcatac

SEQ ID NO: 656454 - DNA, 33 bp, Homo sapien
tctttttatttttaagtacaaatggtagcatac

SEQ ID NO: 656455 - DNA, 33 bp, Homo sapien
caagacctaaagcagaaagttattgtgaggctc

SEQ ID NO: 656456 - DNA, 33 bp, Homo sapien
caagacctaaagcagagagttattgtgaggctc

SEQ ID NO: 656457 - DNA, 33 bp, Homo sapien
gtagatatgactgcagaactgcctttgagctac

SEQ ID NO: 656458 - DNA, 33 bp, Homo sapien
gtagatatgactgcagcactgcctttgagctac

SEQ ID NO: 656459 - DNA, 33 bp, Homo sapien
ggcttctgatttctgcacaataaatttatattt

SEQ ID NO: 656460 - DNA, 33 bp, Homo sapien
ggcttctgatttctgcgcaataaatttatattt

SEQ ID NO: 656461 - DNA, 33 bp, Homo sapien
aagagagaatcagtaaaggatttataggcaaag

SEQ ID NO: 656462 - DNA, 33 bp, Homo sapien
aagagagaatcagtaagggatttataggcaaag

SEQ ID NO: 656463 - DNA, 33 bp, Homo sapien
ctctggtgcccaaagacaggcatgctcagactg

SEQ ID NO: 656464 - DNA, 33 bp, Homo sapien
ctctggtgcccaaagataggcatgctcagactg

SEQ ID NO: 656465 - DNA, 33 bp, Homo sapien
attcctagtggatacactctggtcctacgtaaa

SEQ ID NO: 656466 - DNA, 33 bp, Homo sapien
attcctagtggatacattctggtcctacgtaaa

SEQ ID NO: 656467 - DNA, 33 bp, Homo sapien
gtccacccactttgaactgaaagcctcccagaa

SEQ ID NO: 656468 - DNA, 33 bp, Homo sapien
gtccacccactttgaattgaaagcctcccagaa

SEQ ID NO: 656469 - DNA, 33 bp, Homo sapien
gtaatcgaattgaaaccgcaacaatttggcaat

SEQ ID NO: 656470 - DNA, 33 bp, Homo sapien
gtaatcgaattgaaactgcaacaatttggcaat

SEQ ID NO: 656471 - DNA, 33 bp, Homo sapien
tttgacactggcttagcaattgtacccaaatag

SEQ ID NO: 656472 - DNA, 33 bp, Homo sapien
tttgacactggcttagtaattgtacccaaatag

SEQ ID NO: 656473 - DNA, 33 bp, Homo sapien
tgaattactgaaatcaacatcgtttcagtgacc

SEQ ID NO: 656474 - DNA, 33 bp, Homo sapien
tgaattactgaaatcagcatcgtttcagtgacc

SEQ ID NO: 656475 - DNA, 33 bp, Homo sapien
taatgagaaaaatggacacgctccattaaagaa

SEQ ID NO: 656476 - DNA, 33 bp, Homo sapien
taatgagaaaaatggatacgctccattaaagaa

SEQ ID NO: 656477 - DNA, 33 bp, Homo sapien
cattcattttgtacataaactgtataggtacac

SEQ ID NO: 656478 - DNA, 33 bp, Homo sapien
cattcattttgtacatgaactgtataggtacac

SEQ ID NO: 656479 - DNA, 33 bp, Homo sapien
tagcagtctggaaaaccctgctttaagtccctt

SEQ ID NO: 656480 - DNA, 33 bp, Homo sapien
tagcagtctggaaaactctgctttaagtccctt

SEQ ID NO: 656481 - DNA, 33 bp, Homo sapien
aagcacagattattacagagatctcaaatcatg

SEQ ID NO: 656482 - DNA, 33 bp, Homo sapien
aagcacagattattacggagatctcaaatcatg

SEQ ID NO: 656483 - DNA, 33 bp, Homo sapien
tttgagcttgatatccagaagaagagaagacag

SEQ ID NO: 656484 - DNA, 33 bp, Homo sapien
tttgagcttgatatccggaagaagagaagacag

SEQ ID NO: 656485 - DNA, 33 bp, Homo sapien
aataaaggcatttccacgttccacaagtgaggc

SEQ ID NO: 656486 - DNA, 33 bp, Homo sapien
aataaaggcatttccatgttccacaagtgaggc

SEQ ID NO: 656487 - DNA, 33 bp, Homo sapien
ccacagggcttgaagtaaagcagccattcatta

SEQ ID NO: 656488 - DNA, 33 bp, Homo sapien
ccacagggcttgaagtgaagcagccattcatta

SEQ ID NO: 656489 - DNA, 33 bp, Homo sapien
aagacttaagtgtaaagtagagcacccaagact

SEQ ID NO: 656490 - DNA, 33 bp, Homo sapien
aagacttaagtgtaaattagagcacccaagact

SEQ ID NO: 656491 - DNA, 33 bp, Homo sapien
aaaataactgctaacaacttatgaaaccagtat

SEQ ID NO: 656492 - DNA, 33 bp, Homo sapien
aaaataactgctaacatcttatgaaaccagtat

SEQ ID NO: 656493 - DNA, 33 bp, Homo sapien
ctggtgattgctgggaaagagaattaagtcaag

SEQ ID NO: 656494 - DNA, 33 bp, Homo sapien
ctggtgattgctgggagagagaattaagtcaag

SEQ ID NO: 656495 - DNA, 33 bp, Homo sapien
tggtctctagctgtcagatccacctccgtgcag

SEQ ID NO: 656496 - DNA, 33 bp, Homo sapien
tggtctctagctgtcatatccacctccgtgcag

SEQ ID NO: 656497 - DNA, 33 bp, Homo sapien
aaatgatcagaatttaccttaacactcagaagt

SEQ ID NO: 656498 - DNA, 33 bp, Homo sapien
aaatgatcagaatttatcttaacactcagaagt

SEQ ID NO: 656499 - DNA, 33 bp, Homo sapien
tttcagatgtccttaactgcagggcatgtctgg

SEQ ID NO: 656500 - DNA, 33 bp, Homo sapien
tttcagatgtccttaattgcagggcatgtctgg

SEQ ID NO: 656501 - DNA, 33 bp, Homo sapien
ttgtccttcatatttaaacaatccctaagccct

SEQ ID NO: 656502 - DNA, 33 bp, Homo sapien
ttgtccttcatatttacacaatccctaagccct

SEQ ID NO: 656503 - DNA, 33 bp, Homo sapien
gaagtaaggattccgtaaatgatgacaaaacta

SEQ ID NO: 656504 - DNA, 33 bp, Homo sapien
gaagtaaggattccgtcaatgatgacaaaacta

SEQ ID NO: 656505 - DNA, 33 bp, Homo sapien
gacatagccacttctgcatctgagcaagggtgt

SEQ ID NO: 656506 - DNA, 33 bp, Homo sapien
gacatagccacttctgtatctgagcaagggtgt

SEQ ID NO: 656507 - DNA, 33 bp, Homo sapien
tccactccagagtgagaacttaagcacctttca

SEQ ID NO: 656508 - DNA, 33 bp, Homo sapien
tccactccagagtgagcacttaagcacctttca

SEQ ID NO: 656509 - DNA, 33 bp, Homo sapien
gtaggatttcagtacagctctaattaatccatg

SEQ ID NO: 656510 - DNA, 33 bp, Homo sapien
gtaggatttcagtacatctctaattaatccatg

SEQ ID NO: 656511 - DNA, 33 bp, Homo sapien
tgttactgtcctccaccgtcctctcaggagtta

SEQ ID NO: 656512 - DNA, 33 bp, Homo sapien
tgttactgtcctccactgtcctctcaggagtta

SEQ ID NO: 656513 - DNA, 33 bp, Homo sapien
taacacagtacctagaaacaggcacagataagg

SEQ ID NO: 656514 - DNA, 33 bp, Homo sapien
taacacagtacctagatacaggcacagataagg

SEQ ID NO: 656515 - DNA, 33 bp, Homo sapien
aatatgatctaaattcgaaactgaaataaacaa

SEQ ID NO: 656516 - DNA, 33 bp, Homo sapien
aatatgatctaaattctaaactgaaataaacaa

SEQ ID NO: 656517 - DNA, 33 bp, Homo sapien
actagagctttaccacaatatatgcatttcaat

SEQ ID NO: 656518 - DNA, 33 bp, Homo sapien
actagagctttaccacgatatatgcatttcaat

SEQ ID NO: 656519 - DNA, 33 bp, Homo sapien
ggtacttaaaatccaacgtctaatctcacactg

SEQ ID NO: 656520 - DNA, 33 bp, Homo sapien
ggtacttaaaatccaatgtctaatctcacactg

SEQ ID NO: 656521 - DNA, 33 bp, Homo sapien
acaaaaccaaaaaaaaattagctcagaatggga

SEQ ID NO: 656522 - DNA, 33 bp, Homo sapien
acaaaaccaaaaaaaagttagctcagaatggga

SEQ ID NO: 656523 - DNA, 33 bp, Homo sapien
tccctagacatttatacgagagagaaatacagt

SEQ ID NO: 656524 - DNA, 33 bp, Homo sapien
tccctagacatttatatgagagagaaatacagt

SEQ ID NO: 656525 - DNA, 33 bp, Homo sapien
ctagcatggtccatcaactcttcgcagaatgat

SEQ ID NO: 656526 - DNA, 33 bp, Homo sapien
ctagcatggtccatcagctcttcgcagaatgat

SEQ ID NO: 656527 - DNA, 33 bp, Homo sapien
cattccctgccatcagaagatagtgttaagtga

SEQ ID NO: 656528 - DNA, 33 bp, Homo sapien
cattccctgccatcagcagatagtgttaagtga

SEQ ID NO: 656529 - DNA, 33 bp, Homo sapien
ggagggaacatagctccgacatttgagggtgga

SEQ ID NO: 656530 - DNA, 33 bp, Homo sapien
ggagggaacatagctctgacatttgagggtgga

SEQ ID NO: 656531 - DNA, 33 bp, Homo sapien
agagctctgaggggaaagaatgattattatcct

SEQ ID NO: 656532 - DNA, 33 bp, Homo sapien
agagctctgaggggaaggaatgattattatcct

SEQ ID NO: 656533 - DNA, 33 bp, Homo sapien
aattctctaagcttcaatcacccatggttttaa

SEQ ID NO: 656534 - DNA, 33 bp, Homo sapien
aattctctaagcttcagtcacccatggttttaa

SEQ ID NO: 656535 - DNA, 33 bp, Homo sapien
ctgaacaagcccgtccacagtgtctaccacccc

SEQ ID NO: 656536 - DNA, 33 bp, Homo sapien
ctgaacaagcccgtccgcagtgtctaccacccc

SEQ ID NO: 656537 - DNA, 33 bp, Homo sapien
gaaactaggtatatcaaaagatgcttccaggtg

SEQ ID NO: 656538 - DNA, 33 bp, Homo sapien
gaaactaggtatatcagaagatgcttccaggtg

SEQ ID NO: 656539 - DNA, 33 bp, Homo sapien
tctttctataggacaactgttctggtctcatca

SEQ ID NO: 656540 - DNA, 33 bp, Homo sapien
tctttctataggacaagtgttctggtctcatca

SEQ ID NO: 656541 - DNA, 33 bp, Homo sapien
aaatcaacagcctttacaaatactaacagtaac

SEQ ID NO: 656542 - DNA, 33 bp, Homo sapien
aaatcaacagcctttagaaatactaacagtaac

SEQ ID NO: 656543 - DNA, 33 bp, Homo sapien
ccaccacagattcccacagttatcctcatgtgt

SEQ ID NO: 656544 - DNA, 33 bp, Homo sapien
ccaccacagattcccagagttatcctcatgtgt

SEQ ID NO: 656545 - DNA, 33 bp, Homo sapien
aggcatttttgcacagactgaccataagtatac

SEQ ID NO: 656546 - DNA, 33 bp, Homo sapien
aggcatttttgcacagtctgaccataagtatac

SEQ ID NO: 656547 - DNA, 33 bp, Homo sapien
atgaagaaagtaaaaccggatagaaggatgcat

SEQ ID NO: 656548 - DNA, 33 bp, Homo sapien
atgaagaaagtaaaactggatagaaggatgcat

SEQ ID NO: 656549 - DNA, 33 bp, Homo sapien
aggaacactaactacacatataccagacacgga

SEQ ID NO: 656550 - DNA, 33 bp, Homo sapien
aggaacactaactacatatataccagacacgga

SEQ ID NO: 656551 - DNA, 33 bp, Homo sapien
gcactgggaattcctgaatgagagagctgagca

SEQ ID NO: 656552 - DNA, 33 bp, Homo sapien
gcactgggaattcctggatgagagagctgagca

SEQ ID NO: 656553 - DNA, 33 bp, Homo sapien
cccagtggcctacccccaatcctagctgaggat

SEQ ID NO: 656554 - DNA, 33 bp, Homo sapien
cccagtggcctacccctaatcctagctgaggat

SEQ ID NO: 656555 - DNA, 33 bp, Homo sapien
acatgggggcctataacatgtcagtcctgcaaa

SEQ ID NO: 656556 - DNA, 33 bp, Homo sapien
acatgggggcctataatatgtcagtcctgcaaa

SEQ ID NO: 656557 - DNA, 33 bp, Homo sapien
tttgtgactaattgtacagcaggttattctagt

SEQ ID NO: 656558 - DNA, 33 bp, Homo sapien
tttgtgactaattgtatagcaggttattctagt

SEQ ID NO: 656559 - DNA, 33 bp, Homo sapien
tggaatgatacctgaaatgtactgcctgtttcc

SEQ ID NO: 656560 - DNA, 33 bp, Homo sapien
tggaatgatacctgaagtgtactgcctgtttcc

SEQ ID NO: 656561 - DNA, 33 bp, Homo sapien
cctgctgcgacgccaaacctgcaaaaaactaac

SEQ ID NO: 656562 - DNA, 33 bp, Homo sapien
cctgctgcgacgccaagcctgcaaaaaactaac

SEQ ID NO: 656563 - DNA, 33 bp, Homo sapien
tgtgtctcttggtctcactgttatacttcttcc

SEQ ID NO: 656564 - DNA, 33 bp, Homo sapien
tgtgtctcttggtctcgctgttatacttcttcc

SEQ ID NO: 656565 - DNA, 33 bp, Homo sapien
tcttttcatagttaaaaggtaattcaactaata

SEQ ID NO: 656566 - DNA, 33 bp, Homo sapien
tcttttcatagttaaagggtaattcaactaata

SEQ ID NO: 656567 - DNA, 33 bp, Homo sapien
gggtgggaggcaatgaacaactgaagagagatt

SEQ ID NO: 656568 - DNA, 33 bp, Homo sapien
gggtgggaggcaatgagcaactgaagagagatt

SEQ ID NO: 656569 - DNA, 33 bp, Homo sapien
tcaactcatagccttacattctccattcataaa

SEQ ID NO: 656570 - DNA, 33 bp, Homo sapien
tcaactcatagccttagattctccattcataaa

SEQ ID NO: 656571 - DNA, 33 bp, Homo sapien
ttcatgtatgaaagtaaggcgagaaacaagact

SEQ ID NO: 656572 - DNA, 33 bp, Homo sapien
ttcatgtatgaaagtatggcgagaaacaagact

SEQ ID NO: 656573 - DNA, 33 bp, Homo sapien
actatgttatgtaaaacggcaaaattaagggaa

SEQ ID NO: 656574 - DNA, 33 bp, Homo sapien
actatgttatgtaaaatggcaaaattaagggaa

SEQ ID NO: 656575 - DNA, 33 bp, Homo sapien
atcttgaagctgattccacctcaaagctgtatg

SEQ ID NO: 656576 - DNA, 33 bp, Homo sapien
atcttgaagctgattctacctcaaagctgtatg

SEQ ID NO: 656577 - DNA, 33 bp, Homo sapien
gagaggttagctgaaccaaaaccagaatgtacc

SEQ ID NO: 656578 - DNA, 33 bp, Homo sapien
gagaggttagctgaactaaaaccagaatgtacc

SEQ ID NO: 656579 - DNA, 33 bp, Homo sapien
aacattagtgaaggtacgtgaaaagatatactc

SEQ ID NO: 656580 - DNA, 33 bp, Homo sapien
aacattagtgaaggtatgtgaaaagatatactc

SEQ ID NO: 656581 - DNA, 33 bp, Homo sapien
gaggttaacaccaggacgatttcctcaggccaa

SEQ ID NO: 656582 - DNA, 33 bp, Homo sapien
gaggttaacaccaggatgatttcctcaggccaa

SEQ ID NO: 656583 - DNA, 33 bp, Homo sapien
gagtaggtttaggtggcactgagttataggttg

SEQ ID NO: 656584 - DNA, 33 bp, Homo sapien
gagtaggtttaggtggtactgagttataggttg

SEQ ID NO: 656585 - DNA, 33 bp, Homo sapien
tggaaggactcctccactctgttttaaaaatca

SEQ ID NO: 656586 - DNA, 33 bp, Homo sapien
tggaaggactcctccattctgttttaaaaatca

SEQ ID NO: 656587 - DNA, 33 bp, Homo sapien
tactatcagtgacatcaatgtatgttggagtaa

SEQ ID NO: 656588 - DNA, 33 bp, Homo sapien
tactatcagtgacatcgatgtatgttggagtaa

SEQ ID NO: 656589 - DNA, 33 bp, Homo sapien
attttaattaattaaaatcagaagcagagacaa

SEQ ID NO: 656590 - DNA, 33 bp, Homo sapien
attttaattaattaaattcagaagcagagacaa

SEQ ID NO: 656591 - DNA, 33 bp, Homo sapien
ttccacattttctgcacggtttatgccttaaga

SEQ ID NO: 656592 - DNA, 33 bp, Homo sapien
ttccacattttctgcatggtttatgccttaaga

SEQ ID NO: 656593 - DNA, 33 bp, Homo sapien
actgagaaggccataaattaatcctgggcccca

SEQ ID NO: 656594 - DNA, 33 bp, Homo sapien
actgagaaggccataagttaatcctgggcccca

SEQ ID NO: 656595 - DNA, 33 bp, Homo sapien
taattcctgatgcataataacagttgtgagctt

SEQ ID NO: 656596 - DNA, 33 bp, Homo sapien
taattcctgatgcatagtaacagttgtgagctt

SEQ ID NO: 656597 - DNA, 33 bp, Homo sapien
atggatccattcaaacacacaaatgtggaaagt

SEQ ID NO: 656598 - DNA, 33 bp, Homo sapien
atggatccattcaaacgcacaaatgtggaaagt

SEQ ID NO: 656599 - DNA, 33 bp, Homo sapien
ttgagataggtcagaactagatgtagagattca

SEQ ID NO: 656600 - DNA, 33 bp, Homo sapien
ttgagataggtcagaagtagatgtagagattca

SEQ ID NO: 656601 - DNA, 33 bp, Homo sapien
cttcccagattttgaaagatgtacttcagactc

SEQ ID NO: 656602 - DNA, 33 bp, Homo sapien
cttcccagattttgaatgatgtacttcagactc

SEQ ID NO: 656603 - DNA, 33 bp, Homo sapien
acctgcgtggttaatagaaatgttcaaccaggt

SEQ ID NO: 656604 - DNA, 33 bp, Homo sapien
acctgcgtggttaatataaatgttcaaccaggt

SEQ ID NO: 656605 - DNA, 33 bp, Homo sapien
tgcaaaatatctaatgaaagactggtagccaaa

SEQ ID NO: 656606 - DNA, 33 bp, Homo sapien
tgcaaaatatctaatggaagactggtagccaaa

SEQ ID NO: 656607 - DNA, 33 bp, Homo sapien
tcatattcattgccggcagaaaaggcaaaatgg

SEQ ID NO: 656608 - DNA, 33 bp, Homo sapien
tcatattcattgccggtagaaaaggcaaaatgg

SEQ ID NO: 656609 - DNA, 33 bp, Homo sapien
acagagagctccttagacccttctgctatgtga

SEQ ID NO: 656610 - DNA, 33 bp, Homo sapien
acagagagctccttagccccttctgctatgtga

SEQ ID NO: 656611 - DNA, 33 bp, Homo sapien
ccttcgcatttgatcaataatttgtctgggtat

SEQ ID NO: 656612 - DNA, 33 bp, Homo sapien
ccttcgcatttgatcagtaatttgtctgggtat

SEQ ID NO: 656613 - DNA, 33 bp, Homo sapien
ctcgttttactctcaactgctctcaaacgaaaa

SEQ ID NO: 656614 - DNA, 33 bp, Homo sapien
ctcgttttactctcaagtgctctcaaacgaaaa

SEQ ID NO: 656615 - DNA, 33 bp, Homo sapien
tctaataagagaagacagagtgcctcctaacct

SEQ ID NO: 656616 - DNA, 33 bp, Homo sapien
tctaataagagaagacggagtgcctcctaacct

SEQ ID NO: 656617 - DNA, 33 bp, Homo sapien
agatgtcccataggtaactcaaattgatccctt

SEQ ID NO: 656618 - DNA, 33 bp, Homo sapien
agatgtcccataggtacctcaaattgatccctt

SEQ ID NO: 656619 - DNA, 33 bp, Homo sapien
aatcatcagcaggtgaacttttcctttggctac

SEQ ID NO: 656620 - DNA, 33 bp, Homo sapien
aatcatcagcaggtgagcttttcctttggctac

SEQ ID NO: 656621 - DNA, 33 bp, Homo sapien
ttaatcttttgatgaaaccactgttgtcgtctc

SEQ ID NO: 656622 - DNA, 33 bp, Homo sapien
ttaatcttttgatgaagccactgttgtcgtctc

SEQ ID NO: 656623 - DNA, 33 bp, Homo sapien
atcacctcccaaataaactacttacattcacat

SEQ ID NO: 656624 - DNA, 33 bp, Homo sapien
atcacctcccaaataacctacttacattcacat

SEQ ID NO: 656625 - DNA, 33 bp, Homo sapien
ggggaccaggagataaaaggtctacttttgcag

SEQ ID NO: 656626 - DNA, 33 bp, Homo sapien
ggggaccaggagataagaggtctacttttgcag

SEQ ID NO: 656627 - DNA, 33 bp, Homo sapien
gtgtaatccacccccaccgctgctctctgcatg

SEQ ID NO: 656628 - DNA, 33 bp, Homo sapien
gtgtaatccacccccatcgctgctctctgcatg

SEQ ID NO: 656629 - DNA, 33 bp, Homo sapien
aggcactattcttagcccttttgtcatttgaga

SEQ ID NO: 656630 - DNA, 33 bp, Homo sapien
aggcactattcttagctcttttgtcatttgaga

SEQ ID NO: 656631 - DNA, 33 bp, Homo sapien
gtcatttgagactcaacggggatcctctgtaga

SEQ ID NO: 656632 - DNA, 33 bp, Homo sapien
gtcatttgagactcaagggggatcctctgtaga

SEQ ID NO: 656633 - DNA, 33 bp, Homo sapien
gagaggagagagttgcacaaagagctccagaag

SEQ ID NO: 656634 - DNA, 33 bp, Homo sapien
gagaggagagagttgcgcaaagagctccagaag

SEQ ID NO: 656635 - DNA, 33 bp, Homo sapien
ggaaaaagaaactcagaagaagcctggaagcct

SEQ ID NO: 656636 - DNA, 33 bp, Homo sapien
ggaaaaagaaactcaggagaagcctggaagcct

SEQ ID NO: 656637 - DNA, 33 bp, Homo sapien
ggaacttggcttgctacactttaaaatgcatct

SEQ ID NO: 656638 - DNA, 33 bp, Homo sapien
ggaacttggcttgctatactttaaaatgcatct

SEQ ID NO: 656639 - DNA, 33 bp, Homo sapien
tatgcattagcagtcaccccttatttcctcctc

SEQ ID NO: 656640 - DNA, 33 bp, Homo sapien
tatgcattagcagtcatcccttatttcctcctc

SEQ ID NO: 656641 - DNA, 33 bp, Homo sapien
ctgttgatcctgttccccaaacgatctcaaatt

SEQ ID NO: 656642 - DNA, 33 bp, Homo sapien
ctgttgatcctgttcctcaaacgatctcaaatt

SEQ ID NO: 656643 - DNA, 33 bp, Homo sapien
tatgtaattacattcaacatcaagtggcatatt

SEQ ID NO: 656644 - DNA, 33 bp, Homo sapien
tatgtaattacattcaccatcaagtggcatatt

SEQ ID NO: 656645 - DNA, 33 bp, Homo sapien
cactgaggtaggacaaaaccgaaaagtatggtg

SEQ ID NO: 656646 - DNA, 33 bp, Homo sapien
cactgaggtaggacaacaccgaaaagtatggtg

SEQ ID NO: 656647 - DNA, 33 bp, Homo sapien
tatccctgaaactataagtgggaagagaacact

SEQ ID NO: 656648 - DNA, 33 bp, Homo sapien
tatccctgaaactataggtgggaagagaacact

SEQ ID NO: 656649 - DNA, 33 bp, Homo sapien
gattcagcagttgcatgacttggtatttaccca

SEQ ID NO: 656650 - DNA, 33 bp, Homo sapien
gattcagcagttgcattacttggtatttaccca

SEQ ID NO: 656651 - DNA, 33 bp, Homo sapien
ccagactttttggtcaagtaggtgttcaccacc

SEQ ID NO: 656652 - DNA, 33 bp, Homo sapien
ccagactttttggtcatgtaggtgttcaccacc

SEQ ID NO: 656653 - DNA, 33 bp, Homo sapien
tgtgtctttggccacaaccttgtatcaagggga

SEQ ID NO: 656654 - DNA, 33 bp, Homo sapien
tgtgtctttggccacagccttgtatcaagggga

SEQ ID NO: 656655 - DNA, 33 bp, Homo sapien
gactaacagaaagagaactctgctgagaaattg

SEQ ID NO: 656656 - DNA, 33 bp, Homo sapien
gactaacagaaagagagctctgctgagaaattg

SEQ ID NO: 656657 - DNA, 33 bp, Homo sapien
gaattgatctgactcacactaatcaaactcaag

SEQ ID NO: 656658 - DNA, 33 bp, Homo sapien
gaattgatctgactcatactaatcaaactcaag

SEQ ID NO: 656659 - DNA, 33 bp, Homo sapien
caccacactatgcctacaactagagtgaaaaat

SEQ ID NO: 656660 - DNA, 33 bp, Homo sapien
caccacactatgcctataactagagtgaaaaat

SEQ ID NO: 656661 - DNA, 33 bp, Homo sapien
ggggtttacctattctcaccattggatggtgct

SEQ ID NO: 656662 - DNA, 33 bp, Homo sapien
ggggtttacctattcttaccattggatggtgct

SEQ ID NO: 656663 - DNA, 33 bp, Homo sapien
aactgtgtaggaatcaataaatggagagtgaaa

SEQ ID NO: 656664 - DNA, 33 bp, Homo sapien
aactgtgtaggaatcagtaaatggagagtgaaa

SEQ ID NO: 656665 - DNA, 33 bp, Homo sapien
tgacactggagaactcaacatccctggacaggc

SEQ ID NO: 656666 - DNA, 33 bp, Homo sapien
tgacactggagaactcgacatccctggacaggc

SEQ ID NO: 656667 - DNA, 33 bp, Homo sapien
agtctttcttttggtacattgttaaattcaaaa

SEQ ID NO: 656668 - DNA, 33 bp, Homo sapien
agtctttcttttggtatattgttaaattcaaaa

SEQ ID NO: 656669 - DNA, 33 bp, Homo sapien
tctaagttttggaagtaacctcatcatggtgtt

SEQ ID NO: 656670 - DNA, 33 bp, Homo sapien
tctaagttttggaagtgacctcatcatggtgtt

SEQ ID NO: 656671 - DNA, 33 bp, Homo sapien
tatttaggtgtgtcaaaagctattttagaaggt

SEQ ID NO: 656672 - DNA, 33 bp, Homo sapien
tatttaggtgtgtcaagagctattttagaaggt

SEQ ID NO: 656673 - DNA, 33 bp, Homo sapien
tcttcatctctcattcgcttctcagctatgttg

SEQ ID NO: 656674 - DNA, 33 bp, Homo sapien
tcttcatctctcattctcttctcagctatgttg

SEQ ID NO: 656675 - DNA, 33 bp, Homo sapien
ataagacaaattttccacggactgggttatgaa

SEQ ID NO: 656676 - DNA, 33 bp, Homo sapien
ataagacaaattttccgcggactgggttatgaa

SEQ ID NO: 656677 - DNA, 33 bp, Homo sapien
tttctagacctctgaagagcatttcaaaccacg

SEQ ID NO: 656678 - DNA, 33 bp, Homo sapien
tttctagacctctgaatagcatttcaaaccacg

SEQ ID NO: 656679 - DNA, 33 bp, Homo sapien
actaatcctgcacgtccctttgtgaagactcca

SEQ ID NO: 656680 - DNA, 33 bp, Homo sapien
actaatcctgcacgtctctttgtgaagactcca

SEQ ID NO: 656681 - DNA, 33 bp, Homo sapien
cctgtagagtgaaactcaaagttgataagcccc

SEQ ID NO: 656682 - DNA, 33 bp, Homo sapien
cctgtagagtgaaactgaaagttgataagcccc

SEQ ID NO: 656683 - DNA, 33 bp, Homo sapien
caacagggcgtgttgacattatataaataaatt

SEQ ID NO: 656684 - DNA, 33 bp, Homo sapien
caacagggcgtgttgagattatataaataaatt

SEQ ID NO: 656685 - DNA, 33 bp, Homo sapien
gcttttgggaggtaataagtcattttgtatcag

SEQ ID NO: 656686 - DNA, 33 bp, Homo sapien
gcttttgggaggtaatgagtcattttgtatcag

SEQ ID NO: 656687 - DNA, 33 bp, Homo sapien
tggctccgggaaataaccattcttgtgtttgct

SEQ ID NO: 656688 - DNA, 33 bp, Homo sapien
tggctccgggaaataatcattcttgtgtttgct

SEQ ID NO: 656689 - DNA, 33 bp, Homo sapien; identical to SEQ ID NO: 656687

SEQ ID NO: 656690 - DNA, 33 bp, Homo sapien; identical to SEQ ID NO: 656688

SEQ ID NO: 656691 - DNA, 33 bp, Homo sapien
actttctctggaaaaacgtaggcccctgaaaac

SEQ ID NO: 656692 - DNA, 33 bp, Homo sapien
actttctctggaaaaatgtaggcccctgaaaac

SEQ ID NO: 656693 - DNA, 33 bp, Homo sapien
aagatctaagatggccccactcatacctggccc

SEQ ID NO: 656694 - DNA, 33 bp, Homo sapien
aagatctaagatggcctcactcatacctggccc

SEQ ID NO: 656695 - DNA, 33 bp, Homo sapien
cttaactggcacctccaatagcagagaggaacc

SEQ ID NO: 656696 - DNA, 33 bp, Homo sapien
cttaactggcacctccgatagcagagaggaacc

SEQ ID NO: 656697 - DNA, 33 bp, Homo sapien
atgatatagtgtggtaataaaatattgtgtgtt

SEQ ID NO: 656698 - DNA, 33 bp, Homo sapien
atgatatagtgtggtagtaaaatattgtgtgtt

SEQ ID NO: 656699 - DNA, 33 bp, Homo sapien
aggatttatttaattagcgacaatgtgtcttac

SEQ ID NO: 656700 - DNA, 33 bp, Homo sapien
aggatttatttaattatcgacaatgtgtcttac

SEQ ID NO: 656701 - DNA, 33 bp, Homo sapien
cagcagtccagcagacacttctctgacctgagg

SEQ ID NO: 656702 - DNA, 33 bp, Homo sapien
cagcagtccagcagacgcttctctgacctgagg

SEQ ID NO: 656703 - DNA, 33 bp, Homo sapien
tgctgtctcctcaaaacgacatagaaaataaaa

SEQ ID NO: 656704 - DNA, 33 bp, Homo sapien
tgctgtctcctcaaaatgacatagaaaataaaa

SEQ ID NO: 656705 - DNA, 33 bp, Homo sapien
tagttgcttctttagtaaatgtcaagtggcatg

SEQ ID NO: 656706 - DNA, 33 bp, Homo sapien
tagttgcttctttagtgaatgtcaagtggcatg

SEQ ID NO: 656707 - DNA, 33 bp, Homo sapien
gttttaacaggacatccatattagacaaaaata

SEQ ID NO: 656708 - DNA, 33 bp, Homo sapien
gttttaacaggacatcgatattagacaaaaata

SEQ ID NO: 656709 - DNA, 33 bp, Homo sapien
ggtgtagacaacccaaattcctagctggctact

SEQ ID NO: 656710 - DNA, 33 bp, Homo sapien
ggtgtagacaacccaacttcctagctggctact

SEQ ID NO: 656711 - DNA, 33 bp, Homo sapien
cgtactctccggacaacgaaccacaaccaacgc

SEQ ID NO: 656712 - DNA, 33 bp, Homo sapien
cgtactctccggacaatgaaccacaaccaacgc

SEQ ID NO: 656713 - DNA, 33 bp, Homo sapien
gacaagcatacagtgaaactgaccttgtgtgta

SEQ ID NO: 656714 - DNA, 33 bp, Homo sapien
gacaagcatacagtgagactgaccttgtgtgta

SEQ ID NO: 656715 - DNA, 33 bp, Homo sapien
cttcatttttctgtgacgctagatactacctat

SEQ ID NO: 656716 - DNA, 33 bp, Homo sapien
cttcatttttctgtgatgctagatactacctat

SEQ ID NO: 656717 - DNA, 33 bp, Homo sapien
atgaacaggtgatcaacaggtgaaatatggaaa

SEQ ID NO: 656718 - DNA, 33 bp, Homo sapien
atgaacaggtgatcaataggtgaaatatggaaa

SEQ ID NO: 656719 - DNA, 33 bp, Homo sapien
tcacctgttcatccccacatatcacatcatctg

SEQ ID NO: 656720 - DNA, 33 bp, Homo sapien
tcacctgttcatccccgcatatcacatcatctg

SEQ ID NO: 656721 - DNA, 33 bp, Homo sapien
tcattctttgtcgctgaagtcagtctttcttca

SEQ ID NO: 656722 - DNA, 33 bp, Homo sapien
tcattctttgtcgctgcagtcagtctttcttca

SEQ ID NO: 656723 - DNA, 33 bp, Homo sapien
gtctttcttcagcttccctttcataatggaaat

SEQ ID NO: 656724 - DNA, 33 bp, Homo sapien
gtctttcttcagcttctctttcataatggaaat

SEQ ID NO: 656725 - DNA, 33 bp, Homo sapien
tcacaggaattgagacaatgtgtatgaaagcac

SEQ ID NO: 656726 - DNA, 33 bp, Homo sapien
tcacaggaattgagacgatgtgtatgaaagcac

SEQ ID NO: 656727 - DNA, 33 bp, Homo sapien
aacaacttctgtttaccaaaaaacaccacaaag

SEQ ID NO: 656728 - DNA, 33 bp, Homo sapien
aacaacttctgtttacgaaaaaacaccacaaag

SEQ ID NO: 656729 - DNA, 33 bp, Homo sapien
ccacctctgaaattctcaaacaccattgtcccc

SEQ ID NO: 656730 - DNA, 33 bp, Homo sapien
ccacctctgaaattctgaaacaccattgtcccc

SEQ ID NO: 656731 - DNA, 33 bp, Homo sapien
gaactagattctatcccagcaatgtaagaggct

SEQ ID NO: 656732 - DNA, 33 bp, Homo sapien
gaactagattctatcctagcaatgtaagaggct

SEQ ID NO: 656733 - DNA, 33 bp, Homo sapien
tgtctagctgacctggaagtggaatctcagagt

SEQ ID NO: 656734 - DNA, 33 bp, Homo sapien
tgtctagctgacctgggagtggaatctcagagt

SEQ ID NO: 656735 - DNA, 33 bp, Homo sapien
cttagctcatacctaccagatcagtcttcagat

SEQ ID NO: 656736 - DNA, 33 bp, Homo sapien
cttagctcatacctactagatcagtcttcagat

SEQ ID NO: 656737 - DNA, 33 bp, Homo sapien
tcagcaccactgtaaacgcacatggctcacatg

SEQ ID NO: 656738 - DNA, 33 bp, Homo sapien
tcagcaccactgtaaatgcacatggctcacatg

SEQ ID NO: 656739 - DNA, 33 bp, Homo sapien
atctgttgacttatgacggttaaaatagttcag

SEQ ID NO: 656740 - DNA, 33 bp, Homo sapien
atctgttgacttatgatggttaaaatagttcag

SEQ ID NO: 656741 - DNA, 33 bp, Homo sapien
tttttctaaggaaaaaaagactcagacaattgc

SEQ ID NO: 656742 - DNA, 33 bp, Homo sapien
tttttctaaggaaaaagagactcagacaattgc

SEQ ID NO: 656743 - DNA, 33 bp, Homo sapien
ctatttttctccaaatgagtgcctaacagacac

SEQ ID NO: 656744 - DNA, 33 bp, Homo sapien
ctatttttctccaaattagtgcctaacagacac

SEQ ID NO: 656745 - DNA, 33 bp, Homo sapien
tgtagactacttgtacaaaacgtcaaatttctc

SEQ ID NO: 656746 - DNA, 33 bp, Homo sapien
tgtagactacttgtacgaaacgtcaaatttctc

SEQ ID NO: 656747 - DNA, 33 bp, Homo sapien
caaagactgaaacccacgatttccctcttcgtc

SEQ ID NO: 656748 - DNA, 33 bp, Homo sapien
caaagactgaaacccatgatttccctcttcgtc

SEQ ID NO: 656749 - DNA, 33 bp, Homo sapien
tatttttcgtcttacacattgattacatttttc

SEQ ID NO: 656750 - DNA, 33 bp, Homo sapien
tatttttcgtcttacatattgattacatttttc

SEQ ID NO: 656751 - DNA, 33 bp, Homo sapien
acaaggcataactctagaattccatgtaatcaa

SEQ ID NO: 656752 - DNA, 33 bp, Homo sapien
acaaggcataactctataattccatgtaatcaa

SEQ ID NO: 656753 - DNA, 33 bp, Homo sapien
ttttacttccttttcacggtgcaatatgattcc

SEQ ID NO: 656754 - DNA, 33 bp, Homo sapien
ttttacttccttttcatggtgcaatatgattcc

SEQ ID NO: 656755 - DNA, 33 bp, Homo sapien
actttcattgtttttaagcttgggaaataaagc

SEQ ID NO: 656756 - DNA, 33 bp, Homo sapien
actttcattgtttttatgcttgggaaataaagc

SEQ ID NO: 656757 - DNA, 33 bp, Homo sapien
ttacagaaatgttccaacaataacgtcattaag

SEQ ID NO: 656758 - DNA, 33 bp, Homo sapien
ttacagaaatgttccagcaataacgtcattaag

SEQ ID NO: 656759 - DNA, 33 bp, Homo sapien
gaaaacgggcttaacacctaccaacagatagat

SEQ ID NO: 656760 - DNA, 33 bp, Homo sapien
gaaaacgggcttaacatctaccaacagatagat

SEQ ID NO: 656761 - DNA, 33 bp, Homo sapien
taaaagggaaaaaacaagatcatcttaaaagat

SEQ ID NO: 656762 - DNA, 33 bp, Homo sapien
taaaagggaaaaaacatgatcatcttaaaagat

SEQ ID NO: 656763 - DNA, 33 bp, Homo sapien
attcgtagattgctgtaaaaaaatgtggccaca

SEQ ID NO: 656764 - DNA, 33 bp, Homo sapien
attcgtagattgctgtgaaaaaatgtggccaca

SEQ ID NO: 656765 - DNA, 33 bp, Homo sapien
tatatgcacagtgttaagatgataattatattt

SEQ ID NO: 656766 - DNA, 33 bp, Homo sapien
tatatgcacagtgttaggatgataattatattt

SEQ ID NO: 656767 - DNA, 33 bp, Homo sapien
actgaataatgacatacgaacactggctttaat

SEQ ID NO: 656768 - DNA, 33 bp, Homo sapien
actgaataatgacatatgaacactggctttaat

SEQ ID NO: 656769 - DNA, 33 bp, Homo sapien
ctattttgatgcatgacagaaataaaaacaaaa

SEQ ID NO: 656770 - DNA, 33 bp, Homo sapien
ctattttgatgcatgatagaaataaaaacaaaa

SEQ ID NO: 656771 - DNA, 33 bp, Homo sapien
ttcccatactcaataacggaagcttactgttaa

SEQ ID NO: 656772 - DNA, 33 bp, Homo sapien
ttcccatactcaataatggaagcttactgttaa

SEQ ID NO: 656773 - DNA, 33 bp, Homo sapien
tccagtaaactgtgcaaatattttacagaataa

SEQ ID NO: 656774 - DNA, 33 bp, Homo sapien
tccagtaaactgtgcagatattttacagaataa

SEQ ID NO: 656775 - DNA, 33 bp, Homo sapien
cccttagaaaggagacccacaaagccttatgag

SEQ ID NO: 656776 - DNA, 33 bp, Homo sapien
cccttagaaaggagactcacaaagccttatgag

SEQ ID NO: 656777 - DNA, 33 bp, Homo sapien
agaaaaaaaatacgagcaaggaagcagaggcgg

SEQ ID NO: 656778 - DNA, 33 bp, Homo sapien
agaaaaaaaatacgagtaaggaagcagaggcgg

SEQ ID NO: 656779 - DNA, 33 bp, Homo sapien
aggctttggagaaggaggtactggactgcaaag

SEQ ID NO: 656780 - DNA, 33 bp, Homo sapien
aggctttggagaaggatgtactggactgcaaag

SEQ ID NO: 656781 - DNA, 33 bp, Homo sapien
tccaaaaagtatgaaacgcaaggtcacattatc

SEQ ID NO: 656782 - DNA, 33 bp, Homo sapien
tccaaaaagtatgaaatgcaaggtcacattatc

SEQ ID NO: 656783 - DNA, 33 bp, Homo sapien
gggtattagcctctacaactgtgagggagagtg

SEQ ID NO: 656784 - DNA, 33 bp, Homo sapien
gggtattagcctctacgactgtgagggagagtg

SEQ ID NO: 656785 - DNA, 33 bp, Homo sapien
gctcacagagaggaaaccaccataccaaacgcc

SEQ ID NO: 656786 - DNA, 33 bp, Homo sapien
gctcacagagaggaaatcaccataccaaacgcc

SEQ ID NO: 656787 - DNA, 33 bp, Homo sapien
ctctaaacagacaaacagcaaaaatgagcactg

SEQ ID NO: 656788 - DNA, 33 bp, Homo sapien
ctctaaacagacaaaccgcaaaaatgagcactg

SEQ ID NO: 656789 - DNA, 33 bp, Homo sapien
ggaggaactagggcaaattgaaagaaaatgcca

SEQ ID NO: 656790 - DNA, 33 bp, Homo sapien
ggaggaactagggcaagttgaaagaaaatgcca

SEQ ID NO: 656791 - DNA, 33 bp, Homo sapien
ctgttcagcatgaacacagcctttaaatgtgca

SEQ ID NO: 656792 - DNA, 33 bp, Homo sapien
ctgttcagcatgaacagagcctttaaatgtgca

SEQ ID NO: 656793 - DNA, 33 bp, Homo sapien
tccagggagcgattaaatgtttgcctgtcgtgc

SEQ ID NO: 656794 - DNA, 33 bp, Homo sapien
tccagggagcgattaagtgtttgcctgtcgtgc

SEQ ID NO: 656795 - DNA, 33 bp, Homo sapien
agcctttgccgcacacagagctcggaacgtgct

SEQ ID NO: 656796 - DNA, 33 bp, Homo sapien
agcctttgccgcacacggagctcggaacgtgct

SEQ ID NO: 656797 - DNA, 33 bp, Homo sapien
tcattaggtacgcagacgaaactcttgttcacc

SEQ ID NO: 656798 - DNA, 33 bp, Homo sapien
tcattaggtacgcagaggaaactcttgttcacc

SEQ ID NO: 656799 - DNA, 33 bp, Homo sapien
caaagtgacttacgaacgagattgttcattgtg

SEQ ID NO: 656800 - DNA, 33 bp, Homo sapien
caaagtgacttacgaatgagattgttcattgtg

SEQ ID NO: 656801 - DNA, 33 bp, Homo sapien
atatttgcttatattaacattgatatacactag

SEQ ID NO: 656802 - DNA, 33 bp, Homo sapien
atatttgcttatattagcattgatatacactag

SEQ ID NO: 656803 - DNA, 33 bp, Homo sapien
gggaaactggaacagaaaaatatgggccctgtg

SEQ ID NO: 656804 - DNA, 33 bp, Homo sapien
gggaaactggaacagataaatatgggccctgtg

SEQ ID NO: 656805 - DNA, 33 bp, Homo sapien
gctaggtggaacctggaatgttgaagatggagc

SEQ ID NO: 656806 - DNA, 33 bp, Homo sapien
gctaggtggaacctgggatgttgaagatggagc

SEQ ID NO: 656807 - DNA, 33 bp, Homo sapien
ttcagttttgcaagataaagtgttctggagatg

SEQ ID NO: 656808 - DNA, 33 bp, Homo sapien
ttcagttttgcaagatgaagtgttctggagatg

SEQ ID NO: 656809 - DNA, 33 bp, Homo sapien
ctgcatccctcctacacactcaacgagatgagc

SEQ ID NO: 656810 - DNA, 33 bp, Homo sapien
ctgcatccctcctacatactcaacgagatgagc

SEQ ID NO: 656811 - DNA, 33 bp, Homo sapien
ttccttacaagagataaactcagtgggcaccaa

SEQ ID NO: 656812 - DNA, 33 bp, Homo sapien
ttccttacaagagatagactcagtgggcaccaa

SEQ ID NO: 656813 - DNA, 33 bp, Homo sapien
tgatcccacgatctcacgatcccacgaggagcc

SEQ ID NO: 656814 - DNA, 33 bp, Homo sapien
tgatcccacgatctcatgatcccacgaggagcc

SEQ ID NO: 656815 - DNA, 33 bp, Homo sapien
gagctcactgtgcttcgcttaaagacccccctc

SEQ ID NO: 656816 - DNA, 33 bp, Homo sapien
gagctcactgtgcttctcttaaagacccccctc

SEQ ID NO: 656817 - DNA, 33 bp, Homo sapien
ctctcaaccgtaaaaccacacagggcagttgtg

SEQ ID NO: 656818 - DNA, 33 bp, Homo sapien
ctctcaaccgtaaaactacacagggcagttgtg

SEQ ID NO: 656819 - DNA, 33 bp, Homo sapien
tgtattttttcaaagccacccaagtggtctgat

SEQ ID NO: 656820 - DNA, 33 bp, Homo sapien
tgtattttttcaaagctacccaagtggtctgat

SEQ ID NO: 656821 - DNA, 33 bp, Homo sapien
ttttttgatgcatttcaaagtaagttgcagaca

SEQ ID NO: 656822 - DNA, 33 bp, Homo sapien
ttttttgatgcatttcgaagtaagttgcagaca

SEQ ID NO: 656823 - DNA, 33 bp, Homo sapien
tatgactttattttcccctaaatgtgtgtcctt

SEQ ID NO: 656824 - DNA, 33 bp, Homo sapien
tatgactttattttcctctaaatgtgtgtcctt

SEQ ID NO: 656825 - DNA, 33 bp, Homo sapien
aaagctaaacagcatacgtacccttaaacctgt

SEQ ID NO: 656826 - DNA, 33 bp, Homo sapien
aaagctaaacagcatatgtacccttaaacctgt

SEQ ID NO: 656827 - DNA, 33 bp, Homo sapien
gctcctggattgtctacgctttttcttgtctgc

SEQ ID NO: 656828 - DNA, 33 bp, Homo sapien
gctcctggattgtctatgctttttcttgtctgc

SEQ ID NO: 656829 - DNA, 33 bp, Homo sapien
ggttctcccgagctgaagagtatgtttttccat

SEQ ID NO: 656830 - DNA, 33 bp, Homo sapien
ggttctcccgagctgatgagtatgtttttccat

SEQ ID NO: 656831 - DNA, 33 bp, Homo sapien
ccaagagttaacaccaagaggattgagaaaagc

SEQ ID NO: 656832 - DNA, 33 bp, Homo sapien
ccaagagttaacaccacgaggattgagaaaagc

SEQ ID NO: 656833 - DNA, 33 bp, Homo sapien
gagctggaccaagccacggttacctgtatacag

SEQ ID NO: 656834 - DNA, 33 bp, Homo sapien
gagctggaccaagccatggttacctgtatacag

SEQ ID NO: 656835 - DNA, 33 bp, Homo sapien
tggcatatctgccccaatcaggatcctactcag

SEQ ID NO: 656836 - DNA, 33 bp, Homo sapien
tggcatatctgccccagtcaggatcctactcag

SEQ ID NO: 656837 - DNA, 33 bp, Homo sapien
tgctccaggcaataaacactggagaagttcagt

SEQ ID NO: 656838 - DNA, 33 bp, Homo sapien
tgctccaggcaataaatactggagaagttcagt

SEQ ID NO: 656839 - DNA, 33 bp, Homo sapien
gccttcctggacactaagcctcagcgactccct

SEQ ID NO: 656840 - DNA, 33 bp, Homo sapien
gccttcctggacactatgcctcagcgactccct

SEQ ID NO: 656841 - DNA, 33 bp, Homo sapien
aaagaattccactaaacgcatgtttcatcacct

SEQ ID NO: 656842 - DNA, 33 bp, Homo sapien
aaagaattccactaaatgcatgtttcatcacct

SEQ ID NO: 656843 - DNA, 33 bp, Homo sapien
gatactggagaaggaacggaagagaataactca

SEQ ID NO: 656844 - DNA, 33 bp, Homo sapien
gatactggagaaggaatggaagagaataactca

SEQ ID NO: 656845 - DNA, 33 bp, Homo sapien
gtttggcatatgctaaatgttcactatttgtgt

SEQ ID NO: 656846 - DNA, 33 bp, Homo sapien
gtttggcatatgctaagtgttcactatttgtgt

SEQ ID NO: 656847 - DNA, 33 bp, Homo sapien
ttgaatctgagggcagaattggcatgcaggagt

SEQ ID NO: 656848 - DNA, 33 bp, Homo sapien
ttgaatctgagggcaggattggcatgcaggagt

SEQ ID NO: 656849 - DNA, 33 bp, Homo sapien
gctgttgtactgagaagtgactaggacccggat

SEQ ID NO: 656850 - DNA, 33 bp, Homo sapien
gctgttgtactgagaattgactaggacccggat

SEQ ID NO: 656851 - DNA, 33 bp, Homo sapien
aactggagatgtattcaagggctttatggggtc

SEQ ID NO: 656852 - DNA, 33 bp, Homo sapien
aactggagatgtattcgagggctttatggggtc

SEQ ID NO: 656853 - DNA, 33 bp, Homo sapien
aagccatgttctaatacgtagagtgcagagagt

SEQ ID NO: 656854 - DNA, 33 bp, Homo sapien
aagccatgttctaatatgtagagtgcagagagt

SEQ ID NO: 656855 - DNA, 33 bp, Homo sapien
acccacccttctaagaccgccactccttttcat

SEQ ID NO: 656856 - DNA, 33 bp, Homo sapien
acccacccttctaagatcgccactccttttcat

SEQ ID NO: 656857 - DNA, 33 bp, Homo sapien
agctcattaaatgtctcaaatgaactgtagcaa

SEQ ID NO: 656858 - DNA, 33 bp, Homo sapien
agctcattaaatgtctgaaatgaactgtagcaa

SEQ ID NO: 656859 - DNA, 33 bp, Homo sapien
aagttatccattactcacttcctattcacaaca

SEQ ID NO: 656860 - DNA, 33 bp, Homo sapien
aagttatccattactcgcttcctattcacaaca

SEQ ID NO: 656861 - DNA, 33 bp, Homo sapien
tttacaaagacccaacccgctgtccagcaatca

SEQ ID NO: 656862 - DNA, 33 bp, Homo sapien
tttacaaagacccaacgcgctgtccagcaatca

SEQ ID NO: 656863 - DNA, 33 bp, Homo sapien
acctgctcacgacttcaagaaatctgcctgcgc

SEQ ID NO: 656864 - DNA, 33 bp, Homo sapien
acctgctcacgacttccagaaatctgcctgcgc

SEQ ID NO: 656865 - DNA, 33 bp, Homo sapien
ctggaagatctcaaacaagtccgctactcccag

SEQ ID NO: 656866 - DNA, 33 bp, Homo sapien
ctggaagatctcaaacgagtccgctactcccag

SEQ ID NO: 656867 - DNA, 33 bp, Homo sapien
gagggcgagccactgaagtggggaaagccattg

SEQ ID NO: 656868 - DNA, 33 bp, Homo sapien
gagggcgagccactgatgtggggaaagccattg

SEQ ID NO: 656869 - DNA, 33 bp, Homo sapien
ctgcttggcttggggacgtatcatatggttttt

SEQ ID NO: 656870 - DNA, 33 bp, Homo sapien
ctgcttggcttggggatgtatcatatggttttt

SEQ ID NO: 656871 - DNA, 33 bp, Homo sapien
gaactttcatttacccaatccttatcacagacc

SEQ ID NO: 656872 - DNA, 33 bp, Homo sapien
gaactttcatttacccgatccttatcacagacc

SEQ ID NO: 656873 - DNA, 33 bp, Homo sapien
tgacgtgtttgaactcacttcctaaccctcctg

SEQ ID NO: 656874 - DNA, 33 bp, Homo sapien
tgacgtgtttgaactcgcttcctaaccctcctg

SEQ ID NO: 656875 - DNA, 33 bp, Homo sapien
catgtgttctctccaacaacttcggttgacgtc

SEQ ID NO: 656876 - DNA, 33 bp, Homo sapien
catgtgttctctccaagaacttcggttgacgtc

SEQ ID NO: 656877 - DNA, 33 bp, Homo sapien
ctctggccccgtacgacgctcagccacttcttc

SEQ ID NO: 656878 - DNA, 33 bp, Homo sapien
ctctggccccgtacgatgctcagccacttcttc

SEQ ID NO: 656879 - DNA, 33 bp, Homo sapien
ttattctcacttaactaaagctgaataacccca

SEQ ID NO: 656880 - DNA, 33 bp, Homo sapien
ttattctcacttaactgaagctgaataacccca

SEQ ID NO: 656881 - DNA, 33 bp, Homo sapien
gtgtgaccacgaatacaatcacttttgggatgt

SEQ ID NO: 656882 - DNA, 33 bp, Homo sapien
gtgtgaccacgaatacgatcacttttgggatgt

SEQ ID NO: 656883 - DNA, 33 bp, Homo sapien
acagagattcagaaaaccagaacaggtgtcaag

SEQ ID NO: 656884 - DNA, 33 bp, Homo sapien
acagagattcagaaaatcagaacaggtgtcaag

SEQ ID NO: 656885 - DNA, 33 bp, Homo sapien
aacaaacatgacatgacgggagaagagcagagc

SEQ ID NO: 656886 - DNA, 33 bp, Homo sapien
aacaaacatgacatgatgggagaagagcagagc

SEQ ID NO: 656887 - DNA, 33 bp, Homo sapien
tttgcaccactgatacagtaagctctttggggg

SEQ ID NO: 656888 - DNA, 33 bp, Homo sapien
tttgcaccactgatactgtaagctctttggggg

SEQ ID NO: 656889 - DNA, 33 bp, Homo sapien
agactaggcaaagctcaaaggctcagtgcagat

SEQ ID NO: 656890 - DNA, 33 bp, Homo sapien
agactaggcaaagctccaaggctcagtgcagat

SEQ ID NO: 656891 - DNA, 33 bp, Homo sapien
tagagcctggtctgtacaaatctgtcgtcatga

SEQ ID NO: 656892 - DNA, 33 bp, Homo sapien
tagagcctggtctgtataaatctgtcgtcatga

SEQ ID NO: 656893 - DNA, 33 bp, Homo sapien
tgtattcaggaagtgacggagagctcccgaggg

SEQ ID NO: 656894 - DNA, 33 bp, Homo sapien
tgtattcaggaagtgatggagagctcccgaggg

SEQ ID NO: 656895 - DNA, 33 bp, Homo sapien
aagtgatgtaatgagcaaggaggacgtgtaaga

SEQ ID NO: 656896 - DNA, 33 bp, Homo sapien
aagtgatgtaatgagcgaggaggacgtgtaaga

SEQ ID NO: 656897 - DNA, 33 bp, Homo sapien
cacagctagaatggccagacacacaaaggttgt

SEQ ID NO: 656898 - DNA, 33 bp, Homo sapien
cacagctagaatggcccgacacacaaaggttgt

SEQ ID NO: 656899 - DNA, 33 bp, Homo sapien
gcaaaggtagttgtgacagtaaagcagcaggga

SEQ ID NO: 656900 - DNA, 33 bp, Homo sapien
gcaaaggtagttgtgatagtaaagcagcaggga

SEQ ID NO: 656901 - DNA, 33 bp, Homo sapien
taggccatgtgcactacgagggtggggacctcg

SEQ ID NO: 656902 - DNA, 33 bp, Homo sapien
taggccatgtgcactatgagggtggggacctcg

SEQ ID NO: 656903 - DNA, 33 bp, Homo sapien
cacgctgggtaaaacaaaagatgacccttcagg

SEQ ID NO: 656904 - DNA, 33 bp, Homo sapien
cacgctgggtaaaacagaagatgacccttcagg

SEQ ID NO: 656905 - DNA, 33 bp, Homo sapien
gcttcccgtttgtagcaaggcttcgtgcctgac

SEQ ID NO: 656906 - DNA, 33 bp, Homo sapien
gcttcccgtttgtagcgaggcttcgtgcctgac

SEQ ID NO: 656907 - DNA, 33 bp, Homo sapien
atggaacgccgcagaaaaacacaaacaaaaagg

SEQ ID NO: 656908 - DNA, 33 bp, Homo sapien
atggaacgccgcagaagaacacaaacaaaaagg

SEQ ID NO: 656909 - DNA, 33 bp, Homo sapien
tttaatgaaatccagacgaatccgagggctttg

SEQ ID NO: 656910 - DNA, 33 bp, Homo sapien
tttaatgaaatccagatgaatccgagggctttg

SEQ ID NO: 656911 - DNA, 33 bp, Homo sapien
ccacgctgctccacacactttctgaatgaatta

SEQ ID NO: 656912 - DNA, 33 bp, Homo sapien
ccacgctgctccacacgctttctgaatgaatta

SEQ ID NO: 656913 - DNA, 33 bp, Homo sapien
cgatagactcaccgccacaggagagtctctgag

SEQ ID NO: 656914 - DNA, 33 bp, Homo sapien
cgatagactcaccgccgcaggagagtctctgag

SEQ ID NO: 656915 - DNA, 33 bp, Homo sapien
actgcctgggagctcaaggatcagtttggtttt

SEQ ID NO: 656916 - DNA, 33 bp, Homo sapien
actgcctgggagctcagggatcagtttggtttt

SEQ ID NO: 656917 - DNA, 33 bp, Homo sapien
acctcccactgagctacggaatcggctttcctg

SEQ ID NO: 656918 - DNA, 33 bp, Homo sapien
acctcccactgagctatggaatcggctttcctg

SEQ ID NO: 656919 - DNA, 33 bp, Homo sapien
gtgtaggaattagctgcaggcagatcaagagat

SEQ ID NO: 656920 - DNA, 33 bp, Homo sapien
gtgtaggaattagctggaggcagatcaagagat

SEQ ID NO: 656921 - DNA, 33 bp, Homo sapien
ttatattgttccttcacctagtcaacatttaca

SEQ ID NO: 656922 - DNA, 33 bp, Homo sapien
ttatattgttccttcatctagtcaacatttaca

SEQ ID NO: 656923 - DNA, 33 bp, Homo sapien
attttaaagtggttcaaacattttgtaaagtaa

SEQ ID NO: 656924 - DNA, 33 bp, Homo sapien
attttaaagtggttcagacattttgtaaagtaa

SEQ ID NO: 656925 - DNA, 33 bp, Homo sapien
ggagaacaccactctaaggagaacaatttactt

SEQ ID NO: 656926 - DNA, 33 bp, Homo sapien
ggagaacaccactctagggagaacaatttactt

SEQ ID NO: 656927 - DNA, 33 bp, Homo sapien
gactaatacaggcagcaatgaataactactact

SEQ ID NO: 656928 - DNA, 33 bp, Homo sapien
gactaatacaggcagcgatgaataactactact

SEQ ID NO: 656929 - DNA, 33 bp, Homo sapien
atgtaatgagtaatccaaatgtcactttgtgag

SEQ ID NO: 656930 - DNA, 33 bp, Homo sapien
atgtaatgagtaatccgaatgtcactttgtgag

SEQ ID NO: 656931 - DNA, 33 bp, Homo sapien
gtgcaagacgctgtcaaaaaaaaagaaagaaaa

SEQ ID NO: 656932 - DNA, 33 bp, Homo sapien
gtgcaagacgctgtcagaaaaaaagaaagaaaa

SEQ ID NO: 656933 - DNA, 33 bp, Homo sapien
gttttacctacccaaccgtgaactatgtggcac

SEQ ID NO: 656934 - DNA, 33 bp, Homo sapien
gttttacctacccaactgtgaactatgtggcac

SEQ ID NO: 656935 - DNA, 33 bp, Homo sapien
ccataataggaatgtcaaacactgctagtgagg

SEQ ID NO: 656936 - DNA, 33 bp, Homo sapien
ccataataggaatgtcgaacactgctagtgagg

SEQ ID NO: 656937 - DNA, 33 bp, Homo sapien
aactttcaacttcttacgcaagctaaagtttga

SEQ ID NO: 656938 - DNA, 33 bp, Homo sapien
aactttcaacttcttatgcaagctaaagtttga

SEQ ID NO: 656939 - DNA, 33 bp, Homo sapien
gtgaagaataaaggagaaagtggaagcagagag

SEQ ID NO: 656940 - DNA, 33 bp, Homo sapien
gtgaagaataaaggaggaagtggaagcagagag

SEQ ID NO: 656941 - DNA, 33 bp, Homo sapien
ggaagcagagaggtcaaatggaagactcagaga

SEQ ID NO: 656942 - DNA, 33 bp, Homo sapien
ggaagcagagaggtcagatggaagactcagaga

SEQ ID NO: 656943 - DNA, 33 bp, Homo sapien
tcttactttttaccaaggagacgcacttatcct

SEQ ID NO: 656944 - DNA, 33 bp, Homo sapien
tcttactttttaccaatgagacgcacttatcct

SEQ ID NO: 656945 - DNA, 33 bp, Homo sapien
caatggtgaagcgccaaatcatgaataaatcat

SEQ ID NO: 656946 - DNA, 33 bp, Homo sapien
caatggtgaagcgccacatcatgaataaatcat

SEQ ID NO: 656947 - DNA, 33 bp, Homo sapien
tgatttacaaactgtcaaagaaattttacatat

SEQ ID NO: 656948 - DNA, 33 bp, Homo sapien
tgatttacaaactgtcgaagaaattttacatat

SEQ ID NO: 656949 - DNA, 33 bp, Homo sapien
cacttcattttgtacaactttactcctccctct

SEQ ID NO: 656950 - DNA, 33 bp, Homo sapien
cacttcattttgtacatctttactcctccctct

SEQ ID NO: 656951 - DNA, 33 bp, Homo sapien
cattttactttgtgaacgctgtatatacacata

SEQ ID NO: 656952 - DNA, 33 bp, Homo sapien
cattttactttgtgaatgctgtatatacacata

SEQ ID NO: 656953 - DNA, 33 bp, Homo sapien
tattagagaaggaagggccaatggaagtttttg

SEQ ID NO: 656954 - DNA, 33 bp, Homo sapien
tattagagaaggaaggtccaatggaagtttttg

SEQ ID NO: 656955 - DNA, 33 bp, Homo sapien
tctgttagaaactccacgtatcacctgacttcc

SEQ ID NO: 656956 - DNA, 33 bp, Homo sapien
tctgttagaaactccatgtatcacctgacttcc

SEQ ID NO: 656957 - DNA, 33 bp, Homo sapien
taacaacactaaatgtcggtgaagatgttgagt

SEQ ID NO: 656958 - DNA, 33 bp, Homo sapien
taacaacactaaatgttggtgaagatgttgagt

SEQ ID NO: 656959 - DNA, 33 bp, Homo sapien
attcattgcataatcccactttttctgaaaatg

SEQ ID NO: 656960 - DNA, 33 bp, Homo sapien
attcattgcataatcctactttttctgaaaatg

SEQ ID NO: 656961 - DNA, 33 bp, Homo sapien
taaccagtagaatgaacaggcacagtcacctga

SEQ ID NO: 656962 - DNA, 33 bp, Homo sapien
taaccagtagaatgaagaggcacagtcacctga

SEQ ID NO: 656963 - DNA, 33 bp, Homo sapien
attagaagagagcatacgtaaagaggctttttt

SEQ ID NO: 656964 - DNA, 33 bp, Homo sapien
attagaagagagcatatgtaaagaggctttttt

SEQ ID NO: 656965 - DNA, 33 bp, Homo sapien
taaaacaagcataagaagactctgaactgtgga

SEQ ID NO: 656966 - DNA, 33 bp, Homo sapien
taaaacaagcataagacgactctgaactgtgga

SEQ ID NO: 656967 - DNA, 33 bp, Homo sapien
aatgtcttaagagtaacgtggctagctggtgaa

SEQ ID NO: 656968 - DNA, 33 bp, Homo sapien
aatgtcttaagagtaaggtggctagctggtgaa

SEQ ID NO: 656969 - DNA, 33 bp, Homo sapien
ccctcattctctcctacgctgtattcttccacc

SEQ ID NO: 656970 - DNA, 33 bp, Homo sapien
ccctcattctctcctatgctgtattcttccacc

SEQ ID NO: 656971 - DNA, 33 bp, Homo sapien
cccaggtgttcatacaatcaggtccaggggatg

SEQ ID NO: 656972 - DNA, 33 bp, Homo sapien
cccaggtgttcatacagtcaggtccaggggatg

SEQ ID NO: 656973 - DNA, 33 bp, Homo sapien
ataggaagatgcctgccgagtgggagaagagat

SEQ ID NO: 656974 - DNA, 33 bp, Homo sapien
ataggaagatgcctgctgagtgggagaagagat

SEQ ID NO: 656975 - DNA, 33 bp, Homo sapien
tctcccacttaaccaacgagaggacaagttact

SEQ ID NO: 656976 - DNA, 33 bp, Homo sapien
tctcccacttaaccaatgagaggacaagttact

SEQ ID NO: 656977 - DNA, 33 bp, Homo sapien
gggtcctgcccagacaacatcgcctttctcctc

SEQ ID NO: 656978 - DNA, 33 bp, Homo sapien
gggtcctgcccagacatcatcgcctttctcctc

SEQ ID NO: 656979 - DNA, 33 bp, Homo sapien
atacatcacccaggctcaaatactccttgcaga

SEQ ID NO: 656980 - DNA, 33 bp, Homo sapien
atacatcacccaggcttaaatactccttgcaga

SEQ ID NO: 656981 - DNA, 33 bp, Homo sapien
ggcagactcttagctgaagacattctttcccaa

SEQ ID NO: 656982 - DNA, 33 bp, Homo sapien
ggcagactcttagctggagacattctttcccaa

SEQ ID NO: 656983 - DNA, 33 bp, Homo sapien
ttggcttttgtgagaaagaggtatagtgatttc

SEQ ID NO: 656984 - DNA, 33 bp, Homo sapien
ttggcttttgtgagaacgaggtatagtgatttc

SEQ ID NO: 656985 - DNA, 33 bp, Homo sapien
tgtcaatgtcgtgcaaatgtagagttggcacct

SEQ ID NO: 656986 - DNA, 33 bp, Homo sapien
tgtcaatgtcgtgcaagtgtagagttggcacct

SEQ ID NO: 656987 - DNA, 33 bp, Homo sapien
caaacagaaactctacccattaaacaccaactc

SEQ ID NO: 656988 - DNA, 33 bp, Homo sapien
caaacagaaactctacgcattaaacaccaactc

SEQ ID NO: 656989 - DNA, 33 bp, Homo sapien
ttcccttccacgctgacgggcttaagaccttgg

SEQ ID NO: 656990 - DNA, 33 bp, Homo sapien
ttcccttccacgctgatgggcttaagaccttgg

SEQ ID NO: 656991 - DNA, 33 bp, Homo sapien
ccataagaaagtgctggaccttcaaggagagga

SEQ ID NO: 656992 - DNA, 33 bp, Homo sapien
ccataagaaagtgctgtaccttcaaggagagga

SEQ ID NO: 656993 - DNA, 33 bp, Homo sapien
tcgatgctttttaatacatttacctccttggtg

SEQ ID NO: 656994 - DNA, 33 bp, Homo sapien
tcgatgctttttaatagatttacctccttggtg

SEQ ID NO: 656995 - DNA, 33 bp, Homo sapien
attaatacctactcccaagtcaatggatttggc

SEQ ID NO: 656996 - DNA, 33 bp, Homo sapien
attaatacctactccctagtcaatggatttggc

SEQ ID NO: 656997 - DNA, 33 bp, Homo sapien
ctacattatctcactcaattctcataacgacac

SEQ ID NO: 656998 - DNA, 33 bp, Homo sapien
ctacattatctcactcgattctcataacgacac

SEQ ID NO: 656999 - DNA, 33 bp, Homo sapien
gaaccactgtgctagacaatcagttgaggattt

SEQ ID NO: 657000 - DNA, 33 bp, Homo sapien
gaaccactgtgctagataatcagttgaggattt

SEQ ID NO: 657001 - DNA, 33 bp, Homo sapien
caaccagcagttgtcacgattttgccgcattga

SEQ ID NO: 657002 - DNA, 33 bp, Homo sapien
caaccagcagttgtcatgattttgccgcattga

SEQ ID NO: 657003 - DNA, 33 bp, Homo sapien
agatgctcaagacataactgtttcctcaaatga

SEQ ID NO: 657004 - DNA, 33 bp, Homo sapien
agatgctcaagacatatctgtttcctcaaatga

SEQ ID NO: 657005 - DNA, 33 bp, Homo sapien
ttggtttcggaatgcacggctttttatttgtga

SEQ ID NO: 657006 - DNA, 33 bp, Homo sapien
ttggtttcggaatgcatggctttttatttgtga

SEQ ID NO: 657007 - DNA, 33 bp, Homo sapien
gtgtgccttaaagaaaggaagaggagattggaa

SEQ ID NO: 657008 - DNA, 33 bp, Homo sapien
gtgtgccttaaagaaatgaagaggagattggaa

SEQ ID NO: 657009 - DNA, 33 bp, Homo sapien
atgatcccaaacctaacagctggtcatcaaaat

SEQ ID NO: 657010 - DNA, 33 bp, Homo sapien
atgatcccaaacctaagagctggtcatcaaaat

SEQ ID NO: 657011 - DNA, 33 bp, Homo sapien
cctgctttgggctgataaaaaaagtcgagaagt

SEQ ID NO: 657012 - DNA, 33 bp, Homo sapien
cctgctttgggctgatgaaaaaagtcgagaagt

SEQ ID NO: 657013 - DNA, 33 bp, Homo sapien
agcaacagactcttaacgaaatgagcatctgag

SEQ ID NO: 657014 - DNA, 33 bp, Homo sapien
agcaacagactcttaatgaaatgagcatctgag

SEQ ID NO: 657015 - DNA, 33 bp, Homo sapien
tctggttagtctaagcacttgtaccccagatgg

SEQ ID NO: 657016 - DNA, 33 bp, Homo sapien
tctggttagtctaagcccttgtaccccagatgg

SEQ ID NO: 657017 - DNA, 33 bp, Homo sapien
cagttgctatcatcacaaatgctataagctact

SEQ ID NO: 657018 - DNA, 33 bp, Homo sapien
cagttgctatcatcaccaatgctataagctact

SEQ ID NO: 657019 - DNA, 33 bp, Homo sapien
ccagatttccagagagaaggaaacagagtaaga

SEQ ID NO: 657020 - DNA, 33 bp, Homo sapien
ccagatttccagagaggaggaaacagagtaaga

SEQ ID NO: 657021 - DNA, 33 bp, Homo sapien
tggtttaggcaggagaaaaccaaaagaacagga

SEQ ID NO: 657022 - DNA, 33 bp, Homo sapien
tggtttaggcaggagagaaccaaaagaacagga

SEQ ID NO: 657023 - DNA, 33 bp, Homo sapien
tggataatggttggtacgtgttaaatgaataag

SEQ ID NO: 657024 - DNA, 33 bp, Homo sapien
tggataatggttggtatgtgttaaatgaataag

SEQ ID NO: 657025 - DNA, 33 bp, Homo sapien
gtgacatggattagacaatgtcggtagtaccaa

SEQ ID NO: 657026 - DNA, 33 bp, Homo sapien
gtgacatggattagacgatgtcggtagtaccaa

SEQ ID NO: 657027 - DNA, 33 bp, Homo sapien
agaggtgttctgagaacggtgctgtgaaaagga

SEQ ID NO: 657028 - DNA, 33 bp, Homo sapien
agaggtgttctgagaatggtgctgtgaaaagga

SEQ ID NO: 657029 - DNA, 33 bp, Homo sapien
atagtgtccctgctaggaaataccactttgagc

SEQ ID NO: 657030 - DNA, 33 bp, Homo sapien
atagtgtccctgctagtaaataccactttgagc

SEQ ID NO: 657031 - DNA, 33 bp, Homo sapien
cttaagcatataattcaacaggcagagaactat

SEQ ID NO: 657032 - DNA, 33 bp, Homo sapien
cttaagcatataattcgacaggcagagaactat

SEQ ID NO: 657033 - DNA, 33 bp, Homo sapien
aaaaaacccctcaacccgacaacaggctattga

SEQ ID NO: 657034 - DNA, 33 bp, Homo sapien
aaaaaacccctcaacctgacaacaggctattga

SEQ ID NO: 657035 - DNA, 33 bp, Homo sapien
catgtttgtctctttacgctctggtagccaacc

SEQ ID NO: 657036 - DNA, 33 bp, Homo sapien
catgtttgtctctttatgctctggtagccaacc

SEQ ID NO: 657037 - DNA, 33 bp, Homo sapien
tttttacatttgaagacagatggcctctggtcg

SEQ ID NO: 657038 - DNA, 33 bp, Homo sapien
tttttacatttgaagagagatggcctctggtcg

SEQ ID NO: 657039 - DNA, 33 bp, Homo sapien
aaggcaaaagagattcacaattttcacattctg

SEQ ID NO: 657040 - DNA, 33 bp, Homo sapien
aaggcaaaagagattcgcaattttcacattctg

SEQ ID NO: 657041 - DNA, 33 bp, Homo sapien
taaaatcttcatacacagtacaaggaaaatgtt

SEQ ID NO: 657042 - DNA, 33 bp, Homo sapien
taaaatcttcatacactgtacaaggaaaatgtt

SEQ ID NO: 657043 - DNA, 33 bp, Homo sapien
acacaatctttaagtgaaaatgccactaagtgc

SEQ ID NO: 657044 - DNA, 33 bp, Homo sapien
acacaatctttaagtggaaatgccactaagtgc

SEQ ID NO: 657045 - DNA, 33 bp, Homo sapien
ctgctctaaacaaaacaatgaatgaggagttct

SEQ ID NO: 657046 - DNA, 33 bp, Homo sapien
ctgctctaaacaaaacgatgaatgaggagttct

SEQ ID NO: 657047 - DNA, 33 bp, Homo sapien
aaacttagtctgtgtaacaatatagacaccttt

SEQ ID NO: 657048 - DNA, 33 bp, Homo sapien
aaacttagtctgtgtagcaatatagacaccttt

SEQ ID NO: 657049 - DNA, 33 bp, Homo sapien
ctgatttctcttgttaccatgttagcctactac

SEQ ID NO: 657050 - DNA, 33 bp, Homo sapien
ctgatttctcttgttatcatgttagcctactac

SEQ ID NO: 657051 - DNA, 33 bp, Homo sapien
aatttcttttgtcggaacccaataacctaagtg

SEQ ID NO: 657052 - DNA, 33 bp, Homo sapien
aatttcttttgtcggagcccaataacctaagtg

SEQ ID NO: 657053 - DNA, 33 bp, Homo sapien
gactaaatttcaaagcacccaaaggagaacaga

SEQ ID NO: 657054 - DNA, 33 bp, Homo sapien
gactaaatttcaaagcgcccaaaggagaacaga

SEQ ID NO: 657055 - DNA, 33 bp, Homo sapien
gagggctcagtccaacaaaggctgaaggagcag

SEQ ID NO: 657056 - DNA, 33 bp, Homo sapien
gagggctcagtccaacgaaggctgaaggagcag

SEQ ID NO: 657057 - DNA, 33 bp, Homo sapien
attgatggggccataacggtatagatttgcagt

SEQ ID NO: 657058 - DNA, 33 bp, Homo sapien
attgatggggccataatggtatagatttgcagt

SEQ ID NO: 657059 - DNA, 33 bp, Homo sapien
aaagtatcccctgttaaacaatggctttattgc

SEQ ID NO: 657060 - DNA, 33 bp, Homo sapien
aaagtatcccctgttacacaatggctttattgc

SEQ ID NO: 657061 - DNA, 33 bp, Homo sapien
taacctcaatgtaaaaatgccatttgcacaata

SEQ ID NO: 657062 - DNA, 33 bp, Homo sapien
taacctcaatgtaaaattgccatttgcacaata

SEQ ID NO: 657063 - DNA, 33 bp, Homo sapien
agccccaaaagtttaacaagtctcaaagggaac

SEQ ID NO: 657064 - DNA, 33 bp, Homo sapien
agccccaaaagtttaagaagtctcaaagggaac

SEQ ID NO: 657065 - DNA, 33 bp, Homo sapien
cttcagcttctgctccaaaatcaactttatctt

SEQ ID NO: 657066 - DNA, 33 bp, Homo sapien
cttcagcttctgctccgaaatcaactttatctt

SEQ ID NO: 657067 - DNA, 33 bp, Homo sapien
aacatattaaaaaccactagattgtacagttta

SEQ ID NO: 657068 - DNA, 33 bp, Homo sapien
aacatattaaaaaccagtagattgtacagttta

SEQ ID NO: 657069 - DNA, 33 bp, Homo sapien
aggagcatgtagtagcaaggtacaaaaggaagc

SEQ ID NO: 657070 - DNA, 33 bp, Homo sapien
aggagcatgtagtagcgaggtacaaaaggaagc

SEQ ID NO: 657071 - DNA, 33 bp, Homo sapien
atctaattattacacactgtagatggggtaggc

SEQ ID NO: 657072 - DNA, 33 bp, Homo sapien
atctaattattacacagtgtagatggggtaggc

SEQ ID NO: 657073 - DNA, 33 bp, Homo sapien
gtttgcctgggggcaactgtttagacattttgt

SEQ ID NO: 657074 - DNA, 33 bp, Homo sapien
gtttgcctgggggcaattgtttagacattttgt

SEQ ID NO: 657075 - DNA, 33 bp, Homo sapien
gttgggtcaaaggacaagcataattttaaagtt

SEQ ID NO: 657076 - DNA, 33 bp, Homo sapien
gttgggtcaaaggacacgcataattttaaagtt

SEQ ID NO: 657077 - DNA, 33 bp, Homo sapien
caggtggtatgtttcaaagatagtctcaggcca

SEQ ID NO: 657078 - DNA, 33 bp, Homo sapien
caggtggtatgtttcagagatagtctcaggcca

SEQ ID NO: 657079 - DNA, 33 bp, Homo sapien
gatgatagctaagtcacggagtggctctgggga

SEQ ID NO: 657080 - DNA, 33 bp, Homo sapien
gatgatagctaagtcatggagtggctctgggga

SEQ ID NO: 657081 - DNA, 33 bp, Homo sapien
tcctgccctgctcagacaccctcagctgaatcc

SEQ ID NO: 657082 - DNA, 33 bp, Homo sapien
tcctgccctgctcagataccctcagctgaatcc

SEQ ID NO: 657083 - DNA, 33 bp, Homo sapien
gcattgttcatgatgccgaatcgtgtcatttga

SEQ ID NO: 657084 - DNA, 33 bp, Homo sapien
gcattgttcatgatgctgaatcgtgtcatttga

SEQ ID NO: 657085 - DNA, 33 bp, Homo sapien
tgtggaacctcagtcaaaatacagagaagagga

SEQ ID NO: 657086 - DNA, 33 bp, Homo sapien
tgtggaacctcagtcagaatacagagaagagga

SEQ ID NO: 657087 - DNA, 33 bp, Homo sapien
aatgtcattggcttaacctgaataagggtttac

SEQ ID NO: 657088 - DNA, 33 bp, Homo sapien
aatgtcattggcttaatctgaataagggtttac

SEQ ID NO: 657089 - DNA, 33 bp, Homo sapien
tagcaaaatgtagtgaactttagataaagggat

SEQ ID NO: 657090 - DNA, 33 bp, Homo sapien
tagcaaaatgtagtgatctttagataaagggat

SEQ ID NO: 657091 - DNA, 33 bp, Homo sapien
tggccagatgttagaacgtacctggctgtattc

SEQ ID NO: 657092 - DNA, 33 bp, Homo sapien
tggccagatgttagaaggtacctggctgtattc

SEQ ID NO: 657093 - DNA, 33 bp, Homo sapien
gacacggctagagtacaagaatgttcccttagg

SEQ ID NO: 657094 - DNA, 33 bp, Homo sapien
gacacggctagagtacgagaatgttcccttagg

SEQ ID NO: 657095 - DNA, 33 bp, Homo sapien
taaagtccatagttaaaacccaagacagaaaca

SEQ ID NO: 657096 - DNA, 33 bp, Homo sapien
taaagtccatagttaatacccaagacagaaaca

SEQ ID NO: 657097 - DNA, 33 bp, Homo sapien
ccctgaactgacaatgcactcccaaacccaagt

SEQ ID NO: 657098 - DNA, 33 bp, Homo sapien
ccctgaactgacaatgtactcccaaacccaagt

SEQ ID NO: 657099 - DNA, 33 bp, Homo sapien
acactccatgaagcccagctaatgttggctctg

SEQ ID NO: 657100 - DNA, 33 bp, Homo sapien
acactccatgaagcccggctaatgttggctctg

SEQ ID NO: 657101 - DNA, 33 bp, Homo sapien
atctgttcttttctgacagttttcatcccttta

SEQ ID NO: 657102 - DNA, 33 bp, Homo sapien
atctgttcttttctgagagttttcatcccttta

SEQ ID NO: 657103 - DNA, 33 bp, Homo sapien
ctgtggtgccttataaatcaggcacaggagtgg

SEQ ID NO: 657104 - DNA, 33 bp, Homo sapien
ctgtggtgccttataagtcaggcacaggagtgg

SEQ ID NO: 657105 - DNA, 33 bp, Homo sapien
tttccagctcttgcggaacagatccaattagga

SEQ ID NO: 657106 - DNA, 33 bp, Homo sapien
tttccagctcttgcgggacagatccaattagga

SEQ ID NO: 657107 - DNA, 33 bp, Homo sapien
agactgctaggaggaactcccagagtctggtat

SEQ ID NO: 657108 - DNA, 33 bp, Homo sapien
agactgctaggaggaattcccagagtctggtat

SEQ ID NO: 657109 - DNA, 33 bp, Homo sapien
agaatcgtgaggcacaagagtggggaatgagga

SEQ ID NO: 657110 - DNA, 33 bp, Homo sapien
agaatcgtgaggcacaggagtggggaatgagga

SEQ ID NO: 657111 - DNA, 33 bp, Homo sapien
gttcattcttgacctccagaagaaaagctgttt

SEQ ID NO: 657112 - DNA, 33 bp, Homo sapien
gttcattcttgacctctagaagaaaagctgttt

SEQ ID NO: 657113 - DNA, 33 bp, Homo sapien
tgtgcataatccactcaaagaactctgaatttt

SEQ ID NO: 657114 - DNA, 33 bp, Homo sapien
tgtgcataatccactcgaagaactctgaatttt

SEQ ID NO: 657115 - DNA, 33 bp, Homo sapien
agggaatgaccagttcaagaagcaaggatagaa

SEQ ID NO: 657116 - DNA, 33 bp, Homo sapien
agggaatgaccagttcgagaagcaaggatagaa

SEQ ID NO: 657117 - DNA, 33 bp, Homo sapien
tcatctggacgctgaacggaaagaccatcaaga

SEQ ID NO: 657118 - DNA, 33 bp, Homo sapien
tcatctggacgctgaatggaaagaccatcaaga

SEQ ID NO: 657119 - DNA, 33 bp, Homo sapien
atcacatttgccaagactcagccttccttttcc

SEQ ID NO: 657120 - DNA, 33 bp, Homo sapien
atcacatttgccaagattcagccttccttttcc

SEQ ID NO: 657121 - DNA, 33 bp, Homo sapien
tttgaagggacgcctacgtaacatcccggcctt

SEQ ID NO: 657122 - DNA, 33 bp, Homo sapien
tttgaagggacgcctatgtaacatcccggcctt

SEQ ID NO: 657123 - DNA, 33 bp, Homo sapien
aggccagagatgagccagaataatttgtttggc

SEQ ID NO: 657124 - DNA, 33 bp, Homo sapien
aggccagagatgagccggaataatttgtttggc

SEQ ID NO: 657125 - DNA, 33 bp, Homo sapien
aaaagaggcaatgtgaagaagagagagggggaa

SEQ ID NO: 657126 - DNA, 33 bp, Homo sapien
aaaagaggcaatgtgaggaagagagagggggaa

SEQ ID NO: 657127 - DNA, 33 bp, Homo sapien
cccaagaagcacttccacgggaactgtcaccag

SEQ ID NO: 657128 - DNA, 33 bp, Homo sapien
cccaagaagcacttccgcgggaactgtcaccag

SEQ ID NO: 657129 - DNA, 33 bp, Homo sapien
ggcttctctctcttcacgcttaagaaacaggca

SEQ ID NO: 657130 - DNA, 33 bp, Homo sapien
ggcttctctctcttcatgcttaagaaacaggca

SEQ ID NO: 657131 - DNA, 33 bp, Homo sapien
tctcaagtagctataacgttaaacaattgctac

SEQ ID NO: 657132 - DNA, 33 bp, Homo sapien
tctcaagtagctataatgttaaacaattgctac

SEQ ID NO: 657133 - DNA, 33 bp, Homo sapien
tgaaagacagagtaaactatcagtaaattctgg

SEQ ID NO: 657134 - DNA, 33 bp, Homo sapien
tgaaagacagagtaaattatcagtaaattctgg

SEQ ID NO: 657135 - DNA, 33 bp, Homo sapien
gtcatacaaatctgctcaccttctggctgtgtc

SEQ ID NO: 657136 - DNA, 33 bp, Homo sapien
gtcatacaaatctgcttaccttctggctgtgtc

SEQ ID NO: 657137 - DNA, 33 bp, Homo sapien
atgtattcacttcaagaaaagagagaatggata

SEQ ID NO: 657138 - DNA, 33 bp, Homo sapien
atgtattcacttcaaggaaagagagaatggata

SEQ ID NO: 657139 - DNA, 33 bp, Homo sapien
agaagtttataattaaatgagatagcacatgta

SEQ ID NO: 657140 - DNA, 33 bp, Homo sapien
agaagtttataattaactgagatagcacatgta

SEQ ID NO: 657141 - DNA, 33 bp, Homo sapien
ttataatgaggtacccgaaactccatttcactc

SEQ ID NO: 657142 - DNA, 33 bp, Homo sapien
ttataatgaggtaccctaaactccatttcactc

SEQ ID NO: 657143 - DNA, 33 bp, Homo sapien
taaacagaaattgtcaaagaataagacagaaca

SEQ ID NO: 657144 - DNA, 33 bp, Homo sapien
taaacagaaattgtcagagaataagacagaaca

SEQ ID NO: 657145 - DNA, 33 bp, Homo sapien
cagagaaggaatcaaaagttgtttctcaagcaa

SEQ ID NO: 657146 - DNA, 33 bp, Homo sapien
cagagaaggaatcaaaggttgtttctcaagcaa

SEQ ID NO: 657147 - DNA, 33 bp, Homo sapien
gtaggcaatgatgaagaaattggaagatgacat

SEQ ID NO: 657148 - DNA, 33 bp, Homo sapien
gtaggcaatgatgaagcaattggaagatgacat

SEQ ID NO: 657149 - DNA, 33 bp, Homo sapien
cccaacgtccccttgcacacggatgaggcaggc

SEQ ID NO: 657150 - DNA, 33 bp, Homo sapien
cccaacgtccccttgcgcacggatgaggcaggc

SEQ ID NO: 657151 - DNA, 33 bp, Homo sapien
aggactggttccgtgacgattgagcacctagaa

SEQ ID NO: 657152 - DNA, 33 bp, Homo sapien
aggactggttccgtgatgattgagcacctagaa

SEQ ID NO: 657153 - DNA, 33 bp, Homo sapien
cagtgctcagcagatgcaagttccaaatcgagt

SEQ ID NO: 657154 - DNA, 33 bp, Homo sapien
cagtgctcagcagatggaagttccaaatcgagt

SEQ ID NO: 657155 - DNA, 33 bp, Homo sapien
cttcttcttctacaaacaggcatgatcattcct

SEQ ID NO: 657156 - DNA, 33 bp, Homo sapien
cttcttcttctacaaataggcatgatcattcct

SEQ ID NO: 657157 - DNA, 33 bp, Homo sapien
tgagtcttaccattcaacaaggaattttgtttg

SEQ ID NO: 657158 - DNA, 33 bp, Homo sapien
tgagtcttaccattcagcaaggaattttgtttg

SEQ ID NO: 657159 - DNA, 33 bp, Homo sapien
tttaagtgaaatgtgaaacctgagtcttcatca

SEQ ID NO: 657160 - DNA, 33 bp, Homo sapien
tttaagtgaaatgtgatacctgagtcttcatca

SEQ ID NO: 657161 - DNA, 33 bp, Homo sapien
gagtaatagtagccaaagttctcaaagctaata

SEQ ID NO: 657162 - DNA, 33 bp, Homo sapien
gagtaatagtagccaacgttctcaaagctaata

SEQ ID NO: 657163 - DNA, 33 bp, Homo sapien
tatttgcaaccttttaacattagcaagttcttg

SEQ ID NO: 657164 - DNA, 33 bp, Homo sapien
tatttgcaaccttttagcattagcaagttcttg

SEQ ID NO: 657165 - DNA, 33 bp, Homo sapien
attgaatgaagttagaagctctccgtaagtttt

SEQ ID NO: 657166 - DNA, 33 bp, Homo sapien
attgaatgaagttagaggctctccgtaagtttt

SEQ ID NO: 657167 - DNA, 33 bp, Homo sapien
gatttccaccaccttcaccagttcaagaattct

SEQ ID NO: 657168 - DNA, 33 bp, Homo sapien
gatttccaccaccttcgccagttcaagaattct

SEQ ID NO: 657169 - DNA, 33 bp, Homo sapien
tgaccagctaagccaaaatcaacagacaatgct

SEQ ID NO: 657170 - DNA, 33 bp, Homo sapien
tgaccagctaagccaagatcaacagacaatgct

SEQ ID NO: 657171 - DNA, 33 bp, Homo sapien
cttcaaggtcaagagaagtcctgctgggattgc

SEQ ID NO: 657172 - DNA, 33 bp, Homo sapien
cttcaaggtcaagagatgtcctgctgggattgc

SEQ ID NO: 657173 - DNA, 33 bp, Homo sapien
aattggtattttagagcaggcactagaagagtc

SEQ ID NO: 657174 - DNA, 33 bp, Homo sapien
aattggtattttagaggaggcactagaagagtc

SEQ ID NO: 657175 - DNA, 33 bp, Homo sapien
aggagtttgaccactacgtagaactcaaagcat

SEQ ID NO: 657176 - DNA, 33 bp, Homo sapien
aggagtttgaccactaggtagaactcaaagcat

SEQ ID NO: 657177 - DNA, 33 bp, Homo sapien
gcaattgaccactccagcgggttgtgataaaga

SEQ ID NO: 657178 - DNA, 33 bp, Homo sapien
gcaattgaccactccatcgggttgtgataaaga

SEQ ID NO: 657179 - DNA, 33 bp, Homo sapien
ttataatggttcttacaggaggaacagacatgg

SEQ ID NO: 657180 - DNA, 33 bp, Homo sapien
ttataatggttcttacgggaggaacagacatgg

SEQ ID NO: 657181 - DNA, 33 bp, Homo sapien
ggatttttaagtggaaaatacagtcatccctca

SEQ ID NO: 657182 - DNA, 33 bp, Homo sapien
ggatttttaagtggaagatacagtcatccctca

SEQ ID NO: 657183 - DNA, 33 bp, Homo sapien
tttatgactttattgaaagcgagcctgatgtta

SEQ ID NO: 657184 - DNA, 33 bp, Homo sapien
tttatgactttattgagagcgagcctgatgtta

SEQ ID NO: 657185 - DNA, 33 bp, Homo sapien
gctcttttaacatccaatcatctaaacataatt

SEQ ID NO: 657186 - DNA, 33 bp, Homo sapien
gctcttttaacatccagtcatctaaacataatt

SEQ ID NO: 657187 - DNA, 33 bp, Homo sapien
tcttctccatttctccagcaaactgttttctta

SEQ ID NO: 657188 - DNA, 33 bp, Homo sapien
tcttctccatttctccggcaaactgttttctta

SEQ ID NO: 657189 - DNA, 33 bp, Homo sapien
ttgaaatccaggtatgcaaccagggcctgaacc

SEQ ID NO: 657190 - DNA, 33 bp, Homo sapien
ttgaaatccaggtatgtaaccagggcctgaacc

SEQ ID NO: 657191 - DNA, 33 bp, Homo sapien
acagctttcagcagtgaagaatatgaatggaaa

SEQ ID NO: 657192 - DNA, 33 bp, Homo sapien
acagctttcagcagtgcagaatatgaatggaaa

SEQ ID NO: 657193 - DNA, 33 bp, Homo sapien
gacttatggtgaattacacctgttctctacctc

SEQ ID NO: 657194 - DNA, 33 bp, Homo sapien
gacttatggtgaattatacctgttctctacctc

SEQ ID NO: 657195 - DNA, 33 bp, Homo sapien
gtgggaacaagaacaacatcataagattgacaa

SEQ ID NO: 657196 - DNA, 33 bp, Homo sapien
gtgggaacaagaacaatatcataagattgacaa

SEQ ID NO: 657197 - DNA, 33 bp, Homo sapien
aaactataaagtgatacgaatcttagtggctat

SEQ ID NO: 657198 - DNA, 33 bp, Homo sapien
aaactataaagtgatatgaatcttagtggctat

SEQ ID NO: 657199 - DNA, 33 bp, Homo sapien
aatcaggttgacatcacaaacatctggaaagct

SEQ ID NO: 657200 - DNA, 33 bp, Homo sapien
aatcaggttgacatcagaaacatctggaaagct

SEQ ID NO: 657201 - DNA, 33 bp, Homo sapien
agcagtacttaggccaatgacactgagtatttg

SEQ ID NO: 657202 - DNA, 33 bp, Homo sapien
agcagtacttaggccagtgacactgagtatttg

SEQ ID NO: 657203 - DNA, 33 bp, Homo sapien
tgggcagcaaacccagaaacactgaagcccagc

SEQ ID NO: 657204 - DNA, 33 bp, Homo sapien
tgggcagcaaacccagcaacactgaagcccagc

SEQ ID NO: 657205 - DNA, 33 bp, Homo sapien
catggcgataaaagtacatggcaccatttgttg

SEQ ID NO: 657206 - DNA, 33 bp, Homo sapien
catggcgataaaagtatatggcaccatttgttg

SEQ ID NO: 657207 - DNA, 33 bp, Homo sapien
ttcttctcttcccaaacgtaaccaatctaaact

SEQ ID NO: 657208 - DNA, 33 bp, Homo sapien
ttcttctcttcccaaatgtaaccaatctaaact

SEQ ID NO: 657209 - DNA, 33 bp, Homo sapien
tgagtgaagccaggctaaaagagtatatattcc

SEQ ID NO: 657210 - DNA, 33 bp, Homo sapien
tgagtgaagccaggctgaaagagtatatattcc

SEQ ID NO: 657211 - DNA, 33 bp, Homo sapien
cagtgtaaaagtctacaagttaagatcactgta

SEQ ID NO: 657212 - DNA, 33 bp, Homo sapien
cagtgtaaaagtctactagttaagatcactgta

SEQ ID NO: 657213 - DNA, 33 bp, Homo sapien
atctcatggaaaagaaacgcatctggacagtca

SEQ ID NO: 657214 - DNA, 33 bp, Homo sapien
atctcatggaaaagaaccgcatctggacagtca

SEQ ID NO: 657215 - DNA, 33 bp, Homo sapien
cagagtattctaaagacgtggagacagcatgat

SEQ ID NO: 657216 - DNA, 33 bp, Homo sapien
cagagtattctaaagatgtggagacagcatgat

SEQ ID NO: 657217 - DNA, 33 bp, Homo sapien
aactgttctcaggctacatccaagaatggcaga

SEQ ID NO: 657218 - DNA, 33 bp, Homo sapien
aactgttctcaggctatatccaagaatggcaga

SEQ ID NO: 657219 - DNA, 33 bp, Homo sapien
tctgtgaagcggatcccaaaaaaatattgtgca

SEQ ID NO: 657220 - DNA, 33 bp, Homo sapien
tctgtgaagcggatcctaaaaaaatattgtgca

SEQ ID NO: 657221 - DNA, 33 bp, Homo sapien
atgttgcttgatcccacgtattttagagctctg

SEQ ID NO: 657222 - DNA, 33 bp, Homo sapien
atgttgcttgatcccaggtattttagagctctg

SEQ ID NO: 657223 - DNA, 33 bp, Homo sapien
cttccctccttttatccaccaagtaccttgtgc

SEQ ID NO: 657224 - DNA, 33 bp, Homo sapien
cttccctccttttatctaccaagtaccttgtgc

SEQ ID NO: 657225 - DNA, 33 bp, Homo sapien
acattaggccatttccacataaaaatagtcatt

SEQ ID NO: 657226 - DNA, 33 bp, Homo sapien
acattaggccatttccccataaaaatagtcatt

SEQ ID NO: 657227 - DNA, 33 bp, Homo sapien
tatggttacttggccaaatagaactttagtccc

SEQ ID NO: 657228 - DNA, 33 bp, Homo sapien
tatggttacttggccagatagaactttagtccc

SEQ ID NO: 657229 - DNA, 33 bp, Homo sapien
aataactctaggaaatgatctggcattggcccc

SEQ ID NO: 657230 - DNA, 33 bp, Homo sapien
aataactctaggaaattatctggcattggcccc

SEQ ID NO: 657231 - DNA, 33 bp, Homo sapien
atacattcttttcccactgctcgcaaacagggc

SEQ ID NO: 657232 - DNA, 33 bp, Homo sapien
atacattcttttcccattgctcgcaaacagggc

SEQ ID NO: 657233 - DNA, 33 bp, Homo sapien
tgcttatggggacatcagagatattgagtatca

SEQ ID NO: 657234 - DNA, 33 bp, Homo sapien
tgcttatggggacatcggagatattgagtatca

SEQ ID NO: 657235 - DNA, 33 bp, Homo sapien
gaaaacccacaaagcaagaaacagctcatttgt

SEQ ID NO: 657236 - DNA, 33 bp, Homo sapien
gaaaacccacaaagcaggaaacagctcatttgt

SEQ ID NO: 657237 - DNA, 33 bp, Homo sapien
ccgagagaaaacaacgacataacaggaaaaatc

SEQ ID NO: 657238 - DNA, 33 bp, Homo sapien
ccgagagaaaacaacggcataacaggaaaaatc

SEQ ID NO: 657239 - DNA, 33 bp, Homo sapien
aggagttcggagtccaaagaatagtgtagaagt

SEQ ID NO: 657240 - DNA, 33 bp, Homo sapien
aggagttcggagtccatagaatagtgtagaagt

SEQ ID NO: 657241 - DNA, 33 bp, Homo sapien
attaacaacctcacccagatgggcgtggggaag

SEQ ID NO: 657242 - DNA, 33 bp, Homo sapien
attaacaacctcacccggatgggcgtggggaag

SEQ ID NO: 657243 - DNA, 33 bp, Homo sapien
tgctggctaactgtagaccatttgaaaaatgtg

SEQ ID NO: 657244 - DNA, 33 bp, Homo sapien
tgctggctaactgtaggccatttgaaaaatgtg

SEQ ID NO: 657245 - DNA, 33 bp, Homo sapien
tctatgggaatgacagaaaattaaattgtataa

SEQ ID NO: 657246 - DNA, 33 bp, Homo sapien
tctatgggaatgacagcaaattaaattgtataa

SEQ ID NO: 657247 - DNA, 33 bp, Homo sapien
acagaagtcaagaaaactgcccatgatgtcaca

SEQ ID NO: 657248 - DNA, 33 bp, Homo sapien
acagaagtcaagaaaattgcccatgatgtcaca

SEQ ID NO: 657249 - DNA, 33 bp, Homo sapien
ttggcctctgccttccaaattcccaactttgcc

SEQ ID NO: 657250 - DNA, 33 bp, Homo sapien
ttggcctctgccttccgaattcccaactttgcc

SEQ ID NO: 657251 - DNA, 33 bp, Homo sapien
aagcattcaggaagaaactcaactcctctcaga

SEQ ID NO: 657252 - DNA, 33 bp, Homo sapien
aagcattcaggaagaacctcaactcctctcaga

SEQ ID NO: 657253 - DNA, 33 bp, Homo sapien
aattatttggcatcccaaaaagtccaccaatcc

SEQ ID NO: 657254 - DNA, 33 bp, Homo sapien
aattatttggcatcccgaaaagtccaccaatcc

SEQ ID NO: 657255 - DNA, 33 bp, Homo sapien
catgttgtgatatcaaataactgctgaacatcc

SEQ ID NO: 657256 - DNA, 33 bp, Homo sapien
catgttgtgatatcaagtaactgctgaacatcc

SEQ ID NO: 657257 - DNA, 33 bp, Homo sapien
ctgaaacgggaggctcacatcatggcaggagac

SEQ ID NO: 657258 - DNA, 33 bp, Homo sapien
ctgaaacgggaggctcgcatcatggcaggagac

SEQ ID NO: 657259 - DNA, 33 bp, Homo sapien
gatttatcgatgctgacgccttctaatgcctgc

SEQ ID NO: 657260 - DNA, 33 bp, Homo sapien
gatttatcgatgctgatgccttctaatgcctgc

SEQ ID NO: 657261 - DNA, 33 bp, Homo sapien
tggatccttctctcctgaagtggttgataagaa

SEQ ID NO: 657262 - DNA, 33 bp, Homo sapien
tggatccttctctccttaagtggttgataagaa

SEQ ID NO: 657263 - DNA, 33 bp, Homo sapien
gtccgtcagattagcaactagctctatgcctcc

SEQ ID NO: 657264 - DNA, 33 bp, Homo sapien
gtccgtcagattagcagctagctctatgcctcc

SEQ ID NO: 657265 - DNA, 33 bp, Homo sapien
atggctttaatggaaaactctttcagtttcttg

SEQ ID NO: 657266 - DNA, 33 bp, Homo sapien
atggctttaatggaaatctctttcagtttcttg

SEQ ID NO: 657267 - DNA, 33 bp, Homo sapien
cgggtatatgaacaccagattaagaaggaaatg

SEQ ID NO: 657268 - DNA, 33 bp, Homo sapien
cgggtatatgaacaccggattaagaaggaaatg

SEQ ID NO: 657269 - DNA, 33 bp, Homo sapien
ctcaatccaaaaggtagctatctttcaacccct

SEQ ID NO: 657270 - DNA, 33 bp, Homo sapien
ctcaatccaaaaggtatctatctttcaacccct

SEQ ID NO: 657271 - DNA, 33 bp, Homo sapien
aaagcaaatatccaggaattaaacatcagtcag

SEQ ID NO: 657272 - DNA, 33 bp, Homo sapien
aaagcaaatatccaggcattaaacatcagtcag

SEQ ID NO: 657273 - DNA, 33 bp, Homo sapien
gtactcaagaggaaaacgtcttctctcatatat

SEQ ID NO: 657274 - DNA, 33 bp, Homo sapien
gtactcaagaggaaaatgtcttctctcatatat

SEQ ID NO: 657275 - DNA, 33 bp, Homo sapien
atgtagagagtcaacaaatcattgtattgaagt

SEQ ID NO: 657276 - DNA, 33 bp, Homo sapien
atgtagagagtcaacacatcattgtattgaagt

SEQ ID NO: 657277 - DNA, 33 bp, Homo sapien
attctgaagatggtgactagcttacggaaaccg

SEQ ID NO: 657278 - DNA, 33 bp, Homo sapien
attctgaagatggtgattagcttacggaaaccg

SEQ ID NO: 657279 - DNA, 33 bp, Homo sapien
gctgtatggtatagcccatcattccttggctac

SEQ ID NO: 657280 - DNA, 33 bp, Homo sapien
gctgtatggtatagcctatcattccttggctac

SEQ ID NO: 657281 - DNA, 33 bp, Homo sapien
ctccactccataccaaaactaactggcatgttc

SEQ ID NO: 657282 - DNA, 33 bp, Homo sapien
ctccactccataccaacactaactggcatgttc

SEQ ID NO: 657283 - DNA, 33 bp, Homo sapien
aggaacatttctagataaactgcattgcaagaa

SEQ ID NO: 657284 - DNA, 33 bp, Homo sapien
aggaacatttctagatgaactgcattgcaagaa

SEQ ID NO: 657285 - DNA, 33 bp, Homo sapien
aaataccatcacgtcgcacttagaatttcaaca

SEQ ID NO: 657286 - DNA, 33 bp, Homo sapien
aaataccatcacgtcgtacttagaatttcaaca

SEQ ID NO: 657287 - DNA, 33 bp, Homo sapien
ggcggttgggaaatgtaacagtcgtgtgcttca

SEQ ID NO: 657288 - DNA, 33 bp, Homo sapien
ggcggttgggaaatgtgacagtcgtgtgcttca

SEQ ID NO: 657289 - DNA, 33 bp, Homo sapien
tgaggtaagtgatcaccagtggggcaggggtaa

SEQ ID NO: 657290 - DNA, 33 bp, Homo sapien
tgaggtaagtgatcacgagtggggcaggggtaa

SEQ ID NO: 657291 - DNA, 33 bp, Homo sapien
caatgtgtaataataacgctgcaggctgccagg

SEQ ID NO: 657292 - DNA, 33 bp, Homo sapien
caatgtgtaataataatgctgcaggctgccagg

SEQ ID NO: 657293 - DNA, 33 bp, Homo sapien
ttagaaagaagcataacaatgttaagtgctaaa

SEQ ID NO: 657294 - DNA, 33 bp, Homo sapien
ttagaaagaagcataataatgttaagtgctaaa

SEQ ID NO: 657295 - DNA, 33 bp, Homo sapien
tgccctaactgctcaaacaccatctgggctgga

SEQ ID NO: 657296 - DNA, 33 bp, Homo sapien
tgccctaactgctcaatcaccatctgggctgga

SEQ ID NO: 657297 - DNA, 33 bp, Homo sapien
tttggttgctgacataaagctgcccagcctctc

SEQ ID NO: 657298 - DNA, 33 bp, Homo sapien
tttggttgctgacatagagctgcccagcctctc

SEQ ID NO: 657299 - DNA, 33 bp, Homo sapien
gggcaaacaaactgtacgtcatggatgaagggg

SEQ ID NO: 657300 - DNA, 33 bp, Homo sapien
gggcaaacaaactgtatgtcatggatgaagggg

SEQ ID NO: 657301 - DNA, 33 bp, Homo sapien
aataaggcttaccccaagctgttcggcttacgc

SEQ ID NO: 657302 - DNA, 33 bp, Homo sapien
aataaggcttaccccaggctgttcggcttacgc

SEQ ID NO: 657303 - DNA, 33 bp, Homo sapien
ttttctttgtagaggaacatcctgtggaactga

SEQ ID NO: 657304 - DNA, 33 bp, Homo sapien
ttttctttgtagaggatcatcctgtggaactga

SEQ ID NO: 657305 - DNA, 33 bp, Homo sapien
ataaaatgcacagagacaagacgaaggttttga

SEQ ID NO: 657306 - DNA, 33 bp, Homo sapien
ataaaatgcacagagataagacgaaggttttga

SEQ ID NO: 657307 - DNA, 33 bp, Homo sapien
gcagaagactgaacaaatagatgctgaatagtg

SEQ ID NO: 657308 - DNA, 33 bp, Homo sapien
gcagaagactgaacaagtagatgctgaatagtg

SEQ ID NO: 657309 - DNA, 33 bp, Homo sapien
taactcgtgattgatacaggtaatttagcaatt

SEQ ID NO: 657310 - DNA, 33 bp, Homo sapien
taactcgtgattgatataggtaatttagcaatt

SEQ ID NO: 657311 - DNA, 33 bp, Homo sapien
gtagccaagagaattaagaagtgactggtgggc

SEQ ID NO: 657312 - DNA, 33 bp, Homo sapien
gtagccaagagaattaggaagtgactggtgggc

SEQ ID NO: 657313 - DNA, 33 bp, Homo sapien
gaagatacagaatggactcaaggtgcaaatgga

SEQ ID NO: 657314 - DNA, 33 bp, Homo sapien
gaagatacagaatggattcaaggtgcaaatgga

SEQ ID NO: 657315 - DNA, 33 bp, Homo sapien
ttgggaagattgcacactggttcagatttaatt

SEQ ID NO: 657316 - DNA, 33 bp, Homo sapien
ttgggaagattgcacattggttcagatttaatt

SEQ ID NO: 657317 - DNA, 33 bp, Homo sapien
gagcttgctgcaatcacacatacactgccccct

SEQ ID NO: 657318 - DNA, 33 bp, Homo sapien
gagcttgctgcaatcatacatacactgccccct

SEQ ID NO: 657319 - DNA, 33 bp, Homo sapien
accctaactgcagaccaaatgaggaaggttgat

SEQ ID NO: 657320 - DNA, 33 bp, Homo sapien
accctaactgcagaccgaatgaggaaggttgat

SEQ ID NO: 657321 - DNA, 33 bp, Homo sapien
agatatttattagcccaaatcaaactttcaagg

SEQ ID NO: 657322 - DNA, 33 bp, Homo sapien
agatatttattagcccgaatcaaactttcaagg

SEQ ID NO: 657323 - DNA, 33 bp, Homo sapien
gttctagttttcatacccttagctgctgcctcc

SEQ ID NO: 657324 - DNA, 33 bp, Homo sapien
gttctagttttcatacgcttagctgctgcctcc

SEQ ID NO: 657325 - DNA, 33 bp, Homo sapien
tcattttagcaaagacacttcttctactcttac

SEQ ID NO: 657326 - DNA, 33 bp, Homo sapien
tcattttagcaaagacccttcttctactcttac

SEQ ID NO: 657327 - DNA, 33 bp, Homo sapien
ggtgattcagacagatgaccctccaactgtgca

SEQ ID NO: 657328 - DNA, 33 bp, Homo sapien
ggtgattcagacagattaccctccaactgtgca

SEQ ID NO: 657329 - DNA, 33 bp, Homo sapien
tgtcctaaaggcactgaagggtaagattcagag

SEQ ID NO: 657330 - DNA, 33 bp, Homo sapien
tgtcctaaaggcactgtagggtaagattcagag

SEQ ID NO: 657331 - DNA, 33 bp, Homo sapien
gagaaagttcaagtgactaactctggttcaggc

SEQ ID NO: 657332 - DNA, 33 bp, Homo sapien
gagaaagttcaagtgattaactctggttcaggc

SEQ ID NO: 657333 - DNA, 33 bp, Homo sapien
atccacacatttctcacgtcctcttctctatct

SEQ ID NO: 657334 - DNA, 33 bp, Homo sapien
atccacacatttctcatgtcctcttctctatct

SEQ ID NO: 657335 - DNA, 33 bp, Homo sapien
caagcaacccaaatacgatgaagccaggaaaag

SEQ ID NO: 657336 - DNA, 33 bp, Homo sapien
caagcaacccaaatactatgaagccaggaaaag

SEQ ID NO: 657337 - DNA, 33 bp, Homo sapien
gaaaaaccaagtaaacagcataccatagctcca

SEQ ID NO: 657338 - DNA, 33 bp, Homo sapien
gaaaaaccaagtaaacggcataccatagctcca

SEQ ID NO: 657339 - DNA, 33 bp, Homo sapien
aacaattacttaaacacggttatttgcaggaac

SEQ ID NO: 657340 - DNA, 33 bp, Homo sapien
aacaattacttaaacatggttatttgcaggaac

SEQ ID NO: 657341 - DNA, 33 bp, Homo sapien
acagagatgactatgaaccttgcagacagccag

SEQ ID NO: 657342 - DNA, 33 bp, Homo sapien
acagagatgactatgacccttgcagacagccag

SEQ ID NO: 657343 - DNA, 33 bp, Homo sapien
aaggtgtgaaagagtacacttggagaagagaac

SEQ ID NO: 657344 - DNA, 33 bp, Homo sapien
aaggtgtgaaagagtatacttggagaagagaac

SEQ ID NO: 657345 - DNA, 33 bp, Homo sapien
aacaggtgattaagaacgtgaactcaaatctag

SEQ ID NO: 657346 - DNA, 33 bp, Homo sapien
aacaggtgattaagaatgtgaactcaaatctag

SEQ ID NO: 657347 - DNA, 33 bp, Homo sapien
attaagtcaatgcagacggttgattgaaaaatg

SEQ ID NO: 657348 - DNA, 33 bp, Homo sapien
attaagtcaatgcagatggttgattgaaaaatg

SEQ ID NO: 657349 - DNA, 33 bp, Homo sapien
gtgcctcagacaaccacctttcctgagctctct

SEQ ID NO: 657350 - DNA, 33 bp, Homo sapien
gtgcctcagacaaccagctttcctgagctctct

SEQ ID NO: 657351 - DNA, 33 bp, Homo sapien
gtgctgtcatttgtaaccttccctcaaaacaaa

SEQ ID NO: 657352 - DNA, 33 bp, Homo sapien
gtgctgtcatttgtaatcttccctcaaaacaaa

SEQ ID NO: 657353 - DNA, 33 bp, Homo sapien
tgtgtgtttacaacaaaatctagaaattctgac

SEQ ID NO: 657354 - DNA, 33 bp, Homo sapien
tgtgtgtttacaacaagatctagaaattctgac

SEQ ID NO: 657355 - DNA, 33 bp, Homo sapien
cctctgtagactcttaacaccttgtcactcatt

SEQ ID NO: 657356 - DNA, 33 bp, Homo sapien
cctctgtagactcttagcaccttgtcactcatt

SEQ ID NO: 657357 - DNA, 33 bp, Homo sapien
actgtgagtgcatcaaacctcttttttttcttt

SEQ ID NO: 657358 - DNA, 33 bp, Homo sapien
actgtgagtgcatcaagcctcttttttttcttt

SEQ ID NO: 657359 - DNA, 33 bp, Homo sapien
agcccaagaagtggggacatgctcgaaggccca

SEQ ID NO: 657360 - DNA, 33 bp, Homo sapien
agcccaagaagtgggggcatgctcgaaggccca

SEQ ID NO: 657361 - DNA, 33 bp, Homo sapien
gcctctgataactcaactgatgctccagtcaga

SEQ ID NO: 657362 - DNA, 33 bp, Homo sapien
gcctctgataactcaattgatgctccagtcaga

SEQ ID NO: 657363 - DNA, 33 bp, Homo sapien
aaccattattgagtaccatttcccattccagtt

SEQ ID NO: 657364 - DNA, 33 bp, Homo sapien
aaccattattgagtactatttcccattccagtt

SEQ ID NO: 657365 - DNA, 33 bp, Homo sapien
aatggcacattcagaagaaattggggttttatt

SEQ ID NO: 657366 - DNA, 33 bp, Homo sapien
aatggcacattcagaataaattggggttttatt

SEQ ID NO: 657367 - DNA, 33 bp, Homo sapien
cataggtgacatagaaaaagagtgttataaata

SEQ ID NO: 657368 - DNA, 33 bp, Homo sapien
cataggtgacatagaagaagagtgttataaata

SEQ ID NO: 657369 - DNA, 33 bp, Homo sapien
agccagatagtgaggagagcaaaaaactgatta

SEQ ID NO: 657370 - DNA, 33 bp, Homo sapien
agccagatagtgaggatagcaaaaaactgatta

SEQ ID NO: 657371 - DNA, 33 bp, Homo sapien
tcctgtcacaacttgaaagtgggcttttctcct

SEQ ID NO: 657372 - DNA, 33 bp, Homo sapien
tcctgtcacaacttgagagtgggcttttctcct

SEQ ID NO: 657373 - DNA, 33 bp, Homo sapien
cccatcccatcattcaactaattttctgaaact

SEQ ID NO: 657374 - DNA, 33 bp, Homo sapien
cccatcccatcattcagctaattttctgaaact

SEQ ID NO: 657375 - DNA, 33 bp, Homo sapien
agtgagtagaaatagaaaaacttagcttctgca

SEQ ID NO: 657376 - DNA, 33 bp, Homo sapien
agtgagtagaaatagacaaacttagcttctgca

SEQ ID NO: 657377 - DNA, 33 bp, Homo sapien
agacattacacctttcacagtttggactttatg

SEQ ID NO: 657378 - DNA, 33 bp, Homo sapien
agacattacacctttctcagtttggactttatg

SEQ ID NO: 657379 - DNA, 33 bp, Homo sapien
tcttcaggctctacataactagaaaatgcattc

SEQ ID NO: 657380 - DNA, 33 bp, Homo sapien
tcttcaggctctacatgactagaaaatgcattc

SEQ ID NO: 657381 - DNA, 33 bp, Homo sapien
aattccatgcaagaataaatttctgccgagatg

SEQ ID NO: 657382 - DNA, 33 bp, Homo sapien
aattccatgcaagaatgaatttctgccgagatg

SEQ ID NO: 657383 - DNA, 33 bp, Homo sapien
cccaggaaactgagacgctagggttgaaacttt

SEQ ID NO: 657384 - DNA, 33 bp, Homo sapien
cccaggaaactgagactctagggttgaaacttt

SEQ ID NO: 657385 - DNA, 33 bp, Homo sapien
ttgtaacaaagcaccacgagactgtgacttaga

SEQ ID NO: 657386 - DNA, 33 bp, Homo sapien
ttgtaacaaagcaccatgagactgtgacttaga

SEQ ID NO: 657387 - DNA, 33 bp, Homo sapien
gactgccagaaaactaataaaagttgagaaaaa

SEQ ID NO: 657388 - DNA, 33 bp, Homo sapien
gactgccagaaaactactaaaagttgagaaaaa

SEQ ID NO: 657389 - DNA, 33 bp, Homo sapien
tcaagttccctgtaaccactggtgtttatcttt

SEQ ID NO: 657390 - DNA, 33 bp, Homo sapien
tcaagttccctgtaactactggtgtttatcttt

SEQ ID NO: 657391 - DNA, 33 bp, Homo sapien
atatctagtgaggaaaaggggtcatggagacag

SEQ ID NO: 657392 - DNA, 33 bp, Homo sapien
atatctagtgaggaaagggggtcatggagacag

SEQ ID NO: 657393 - DNA, 33 bp, Homo sapien
gatttgagagatatccaggaaaacaatagtcaa

SEQ ID NO: 657394 - DNA, 33 bp, Homo sapien
gatttgagagatatccgggaaaacaatagtcaa

SEQ ID NO: 657395 - DNA, 33 bp, Homo sapien
tctaccttatggtgctaaatctcagaggtgctt

SEQ ID NO: 657396 - DNA, 33 bp, Homo sapien
tctaccttatggtgctcaatctcagaggtgctt

SEQ ID NO: 657397 - DNA, 33 bp, Homo sapien
gtgttatctattcaaaaacttttcacaggcttg

SEQ ID NO: 657398 - DNA, 33 bp, Homo sapien
gtgttatctattcaaatacttttcacaggcttg

SEQ ID NO: 657399 - DNA, 33 bp, Homo sapien
gttgtgggagtagaaactgtgcctgtatcacaa

SEQ ID NO: 657400 - DNA, 33 bp, Homo sapien
gttgtgggagtagaaattgtgcctgtatcacaa

SEQ ID NO: 657401 - DNA, 33 bp, Homo sapien
cgtacagacaaacataataaaggcatattttaa

SEQ ID NO: 657402 - DNA, 33 bp, Homo sapien
cgtacagacaaacatactaaaggcatattttaa

SEQ ID NO: 657403 - DNA, 33 bp, Homo sapien
caggctaagttgattaaagtagcccaaggcatt

SEQ ID NO: 657404 - DNA, 33 bp, Homo sapien
caggctaagttgattatagtagcccaaggcatt

SEQ ID NO: 657405 - DNA, 33 bp, Homo sapien
tctggcttaaaggttacgagagaggaacttgac

SEQ ID NO: 657406 - DNA, 33 bp, Homo sapien
tctggcttaaaggttatgagagaggaacttgac

SEQ ID NO: 657407 - DNA, 33 bp, Homo sapien
tgaagcagaacttttccataggtttggcaggat

SEQ ID NO: 657408 - DNA, 33 bp, Homo sapien
tgaagcagaacttttctataggtttggcaggat

SEQ ID NO: 657409 - DNA, 33 bp, Homo sapien
ttatacatattactaaaacagggaaatgctatg

SEQ ID NO: 657410 - DNA, 33 bp, Homo sapien
ttatacatattactaagacagggaaatgctatg

SEQ ID NO: 657411 - DNA, 33 bp, Homo sapien
tccccagatgttttgaactgtatctgcctgaat

SEQ ID NO: 657412 - DNA, 33 bp, Homo sapien
tccccagatgttttgatctgtatctgcctgaat

SEQ ID NO: 657413 - DNA, 33 bp, Homo sapien
tgacccttagactattgaagcaacattgccacg

SEQ ID NO: 657414 - DNA, 33 bp, Homo sapien
tgacccttagactatttaagcaacattgccacg

SEQ ID NO: 657415 - DNA, 33 bp, Homo sapien
atcaaggcgtgccacactagacagaagaagaaa

SEQ ID NO: 657416 - DNA, 33 bp, Homo sapien
atcaaggcgtgccacagtagacagaagaagaaa

SEQ ID NO: 657417 - DNA, 33 bp, Homo sapien
tttgtgatttacacaaagcgttaagttctctct

SEQ ID NO: 657418 - DNA, 33 bp, Homo sapien
tttgtgatttacacaacgcgttaagttctctct

SEQ ID NO: 657419 - DNA, 33 bp, Homo sapien
ttgctgaattaatcgaaaatgaacatcagtgtg

SEQ ID NO: 657420 - DNA, 33 bp, Homo sapien
ttgctgaattaatcgagaatgaacatcagtgtg

SEQ ID NO: 657421 - DNA, 33 bp, Homo sapien
ttcttagttctgtccaagtcctttccctggctc

SEQ ID NO: 657422 - DNA, 33 bp, Homo sapien
ttcttagttctgtccaggtcctttccctggctc

SEQ ID NO: 657423 - DNA, 33 bp, Homo sapien
tgttgcaagttgtgacacatgttgtttcttgat

SEQ ID NO: 657424 - DNA, 33 bp, Homo sapien
tgttgcaagttgtgacccatgttgtttcttgat

SEQ ID NO: 657425 - DNA, 33 bp, Homo sapien
cttttggaattaagccgactgatttagtatgag

SEQ ID NO: 657426 - DNA, 33 bp, Homo sapien
cttttggaattaagcctactgatttagtatgag

SEQ ID NO: 657427 - DNA, 33 bp, Homo sapien
gttaatggactcagaacaaatgaaattgattga

SEQ ID NO: 657428 - DNA, 33 bp, Homo sapien
gttaatggactcagaataaatgaaattgattga

SEQ ID NO: 657429 - DNA, 33 bp, Homo sapien
gcagtttattctttaaatactgttctaccagca

SEQ ID NO: 657430 - DNA, 33 bp, Homo sapien
gcagtttattctttaactactgttctaccagca

SEQ ID NO: 657431 - DNA, 33 bp, Homo sapien
cagctctctgtcattacggaactagaaacacac

SEQ ID NO: 657432 - DNA, 33 bp, Homo sapien
cagctctctgtcattagggaactagaaacacac

SEQ ID NO: 657433 - DNA, 33 bp, Homo sapien
attcagagaaggaaaccactatacactgagtaa

SEQ ID NO: 657434 - DNA, 33 bp, Homo sapien
attcagagaaggaaactactatacactgagtaa

SEQ ID NO: 657435 - DNA, 33 bp, Homo sapien
gtttattcttataccaaatacgattctgtcttg

SEQ ID NO: 657436 - DNA, 33 bp, Homo sapien
gtttattcttataccagatacgattctgtcttg

SEQ ID NO: 657437 - DNA, 33 bp, Homo sapien
attacttgtttggatacggcagtagggaagaac

SEQ ID NO: 657438 - DNA, 33 bp, Homo sapien
attacttgtttggatatggcagtagggaagaac

SEQ ID NO: 657439 - DNA, 33 bp, Homo sapien
tatgttttgtgtggaaatgatgccaaaaaagcc

SEQ ID NO: 657440 - DNA, 33 bp, Homo sapien
tatgttttgtgtggaagtgatgccaaaaaagcc

SEQ ID NO: 657441 - DNA, 33 bp, Homo sapien
gattttgatcctatgaagttctgggtatctgct

SEQ ID NO: 657442 - DNA, 33 bp, Homo sapien
gattttgatcctatgacgttctgggtatctgct

SEQ ID NO: 657443 - DNA, 33 bp, Homo sapien
ccctgaggatttaaacggtacagacagggatct

SEQ ID NO: 657444 - DNA, 33 bp, Homo sapien
ccctgaggatttaaactgtacagacagggatct

SEQ ID NO: 657445 - DNA, 33 bp, Homo sapien
ggtaggtggagccgcagggggaagggcgtgtct

SEQ ID NO: 657446 - DNA, 33 bp, Homo sapien
ggtaggtggagccgcatggggaagggcgtgtct

SEQ ID NO: 657447 - DNA, 33 bp, Homo sapien
agaaaagccacacaaggcaagcgctctaggagt

SEQ ID NO: 657448 - DNA, 33 bp, Homo sapien
agaaaagccacacaagtcaagcgctctaggagt

SEQ ID NO: 657449 - DNA, 33 bp, Homo sapien
aataggcaagaagagaatagaggatgctgagat

SEQ ID NO: 657450 - DNA, 33 bp, Homo sapien
aataggcaagaagagagtagaggatgctgagat

SEQ ID NO: 657451 - DNA, 33 bp, Homo sapien
aagttggttccagctcactaaatgaattctggc

SEQ ID NO: 657452 - DNA, 33 bp, Homo sapien
aagttggttccagctcgctaaatgaattctggc

SEQ ID NO: 657453 - DNA, 33 bp, Homo sapien
atagaatataccacaacgaggccatgtatcgta

SEQ ID NO: 657454 - DNA, 33 bp, Homo sapien
atagaatataccacaatgaggccatgtatcgta

SEQ ID NO: 657455 - DNA, 33 bp, Homo sapien
cctctcagctatttcaatactatttccaatggg

SEQ ID NO: 657456 - DNA, 33 bp, Homo sapien
cctctcagctatttcagtactatttccaatggg

SEQ ID NO: 657457 - DNA, 33 bp, Homo sapien
gtgtttccaaaatacaaatagaatctcaagaca

SEQ ID NO: 657458 - DNA, 33 bp, Homo sapien
gtgtttccaaaatacacatagaatctcaagaca

SEQ ID NO: 657459 - DNA, 33 bp, Homo sapien
tagaatctcaagacacaaagaagaacatgggca

SEQ ID NO: 657460 - DNA, 33 bp, Homo sapien
tagaatctcaagacacgaagaagaacatgggca

SEQ ID NO: 657461 - DNA, 33 bp, Homo sapien
tctggacctattacagcccaggatcattttaca

SEQ ID NO: 657462 - DNA, 33 bp, Homo sapien
tctggacctattacaggccaggatcattttaca

SEQ ID NO: 657463 - DNA, 33 bp, Homo sapien
ccacttagcttctcccagagttcttccatatga

SEQ ID NO: 657464 - DNA, 33 bp, Homo sapien
ccacttagcttctcccggagttcttccatatga

SEQ ID NO: 657465 - DNA, 33 bp, Homo sapien
gctacgatctttacaaggaacaatttgacagta

SEQ ID NO: 657466 - DNA, 33 bp, Homo sapien
gctacgatctttacaatgaacaatttgacagta

SEQ ID NO: 657467 - DNA, 33 bp, Homo sapien
aagctgaattgaattacaactgttatccaccag

SEQ ID NO: 657468 - DNA, 33 bp, Homo sapien
aagctgaattgaattataactgttatccaccag

SEQ ID NO: 657469 - DNA, 33 bp, Homo sapien
cccaatctgacccacaagatgagtgactgttca

SEQ ID NO: 657470 - DNA, 33 bp, Homo sapien
cccaatctgacccacacgatgagtgactgttca

SEQ ID NO: 657471 - DNA, 33 bp, Homo sapien
tttgttctttttaggcagacaaatttcagatgt

SEQ ID NO: 657472 - DNA, 33 bp, Homo sapien
tttgttctttttaggctgacaaatttcagatgt

SEQ ID NO: 657473 - DNA, 33 bp, Homo sapien
tcttcaggcaactgaaccttgtgagtttatctg

SEQ ID NO: 657474 - DNA, 33 bp, Homo sapien
tcttcaggcaactgaagcttgtgagtttatctg

SEQ ID NO: 657475 - DNA, 33 bp, Homo sapien
gctccagtcagtataacgtcacccttgttcaga

SEQ ID NO: 657476 - DNA, 33 bp, Homo sapien
gctccagtcagtataatgtcacccttgttcaga

SEQ ID NO: 657477 - DNA, 33 bp, Homo sapien
tccttgcaacagaaagaaaaccctactattacc

SEQ ID NO: 657478 - DNA, 33 bp, Homo sapien
tccttgcaacagaaaggaaaccctactattacc

SEQ ID NO: 657479 - DNA, 33 bp, Homo sapien
caagagaaacaagttcaaagatcctctatggtg

SEQ ID NO: 657480 - DNA, 33 bp, Homo sapien
caagagaaacaagttcgaagatcctctatggtg

SEQ ID NO: 657481 - DNA, 33 bp, Homo sapien
atctactactactgaccactcctggaagaagcc

SEQ ID NO: 657482 - DNA, 33 bp, Homo sapien
atctactactactgactactcctggaagaagcc

SEQ ID NO: 657483 - DNA, 33 bp, Homo sapien
ctgtcctggtctgatccatacagttctgcatct

SEQ ID NO: 657484 - DNA, 33 bp, Homo sapien
ctgtcctggtctgatctatacagttctgcatct

SEQ ID NO: 657485 - DNA, 33 bp, Homo sapien
gagaagagggaactgacagaatttatattattt

SEQ ID NO: 657486 - DNA, 33 bp, Homo sapien
gagaagagggaactgatagaatttatattattt

SEQ ID NO: 657487 - DNA, 33 bp, Homo sapien
atcactgtcactaggacctcacatttaatgcat

SEQ ID NO: 657488 - DNA, 33 bp, Homo sapien
atcactgtcactaggatctcacatttaatgcat

SEQ ID NO: 657489 - DNA, 33 bp, Homo sapien
gtggacattcattataacattctccccacttct

SEQ ID NO: 657490 - DNA, 33 bp, Homo sapien
gtggacattcattataccattctccccacttct

SEQ ID NO: 657491 - DNA, 33 bp, Homo sapien
cttggccttgagaaaaacaagtggttgataaaa

SEQ ID NO: 657492 - DNA, 33 bp, Homo sapien
cttggccttgagaaaagcaagtggttgataaaa

SEQ ID NO: 657493 - DNA, 33 bp, Homo sapien
tttcctgaaatccccaactgactgcttcccttg

SEQ ID NO: 657494 - DNA, 33 bp, Homo sapien
tttcctgaaatccccatctgactgcttcccttg

SEQ ID NO: 657495 - DNA, 33 bp, Homo sapien
cttgactaccgcctcacaagaaaccctgggcca

SEQ ID NO: 657496 - DNA, 33 bp, Homo sapien
cttgactaccgcctcagaagaaaccctgggcca

SEQ ID NO: 657497 - DNA, 33 bp, Homo sapien
ccctggagagccagtccgaattgaaaattaaga

SEQ ID NO: 657498 - DNA, 33 bp, Homo sapien
ccctggagagccagtctgaattgaaaattaaga

SEQ ID NO: 657499 - DNA, 33 bp, Homo sapien
tgaatctgtctcaatcactactatctgtatcat

SEQ ID NO: 657500 - DNA, 33 bp, Homo sapien
tgaatctgtctcaatcgctactatctgtatcat

SEQ ID NO: 657501 - DNA, 33 bp, Homo sapien
ggttggtgagaggggacgaaggatgtgtgagag

SEQ ID NO: 657502 - DNA, 33 bp, Homo sapien
ggttggtgagaggggatgaaggatgtgtgagag

SEQ ID NO: 657503 - DNA, 33 bp, Homo sapien
taactgtgaactcagaacatatttaaaacactc

SEQ ID NO: 657504 - DNA, 33 bp, Homo sapien
taactgtgaactcagagcatatttaaaacactc

SEQ ID NO: 657505 - DNA, 33 bp, Homo sapien
gaaaaatgtcagctaaaaccgacgtcctaattc

SEQ ID NO: 657506 - DNA, 33 bp, Homo sapien
gaaaaatgtcagctaagaccgacgtcctaattc

SEQ ID NO: 657507 - DNA, 33 bp, Homo sapien
ttatcatgacaactaaagtgcattgaatgccag

SEQ ID NO: 657508 - DNA, 33 bp, Homo sapien
ttatcatgacaactaaggtgcattgaatgccag

SEQ ID NO: 657509 - DNA, 33 bp, Homo sapien
ggtggtcagttaatgtaaagttccctgcctgct

SEQ ID NO: 657510 - DNA, 33 bp, Homo sapien
ggtggtcagttaatgtgaagttccctgcctgct

SEQ ID NO: 657511 - DNA, 33 bp, Homo sapien
tccccattcccatcctcaagtcctcctgctaaa

SEQ ID NO: 657512 - DNA, 33 bp, Homo sapien
tccccattcccatcctgaagtcctcctgctaaa

SEQ ID NO: 657513 - DNA, 33 bp, Homo sapien
gtgcttgccagaatcacgcatagtaatctcttc

SEQ ID NO: 657514 - DNA, 33 bp, Homo sapien
gtgcttgccagaatcatgcatagtaatctcttc

SEQ ID NO: 657515 - DNA, 33 bp, Homo sapien
aatgtgttgaccttgccaacttaagataggaag

SEQ ID NO: 657516 - DNA, 33 bp, Homo sapien
aatgtgttgaccttgctaacttaagataggaag

SEQ ID NO: 657517 - DNA, 33 bp, Homo sapien
agtttcagcaggatgagatgtcattagtctctt

SEQ ID NO: 657518 - DNA, 33 bp, Homo sapien
agtttcagcaggatgatatgtcattagtctctt

SEQ ID NO: 657519 - DNA, 33 bp, Homo sapien
gaattgtgacaaaaaactgatccagtgttatct

SEQ ID NO: 657520 - DNA, 33 bp, Homo sapien
gaattgtgacaaaaaagtgatccagtgttatct

SEQ ID NO: 657521 - DNA, 33 bp, Homo sapien
cagtttgttttttactcaaatcttccctcttgg

SEQ ID NO: 657522 - DNA, 33 bp, Homo sapien
cagtttgttttttactgaaatcttccctcttgg

SEQ ID NO: 657523 - DNA, 33 bp, Homo sapien
caggataactatgtgaagattaaggatcctgca

SEQ ID NO: 657524 - DNA, 33 bp, Homo sapien
caggataactatgtgaggattaaggatcctgca

SEQ ID NO: 657525 - DNA, 33 bp, Homo sapien
agtctcattttgccagactgaattactgcagga

SEQ ID NO: 657526 - DNA, 33 bp, Homo sapien
agtctcattttgccaggctgaattactgcagga

SEQ ID NO: 657527 - DNA, 33 bp, Homo sapien
tgaaaacagattgaaaagataaggtctgtattg

SEQ ID NO: 657528 - DNA, 33 bp, Homo sapien
tgaaaacagattgaaacgataaggtctgtattg

SEQ ID NO: 657529 - DNA, 33 bp, Homo sapien
caattacaaccactcacaattcaccagagaaat

SEQ ID NO: 657530 - DNA, 33 bp, Homo sapien
caattacaaccactcagaattcaccagagaaat

SEQ ID NO: 657531 - DNA, 33 bp, Homo sapien
cttctttcttccttctcacccgatatctatttc

SEQ ID NO: 657532 - DNA, 33 bp, Homo sapien
cttctttcttccttcttacccgatatctatttc

SEQ ID NO: 657533 - DNA, 33 bp, Homo sapien
gacttgaacatccttaaagtttggtacccgcag

SEQ ID NO: 657534 - DNA, 33 bp, Homo sapien
gacttgaacatccttagagtttggtacccgcag

SEQ ID NO: 657535 - DNA, 33 bp, Homo sapien
catgggtttcgcatcccacaaatacagtatttt

SEQ ID NO: 657536 - DNA, 33 bp, Homo sapien
catgggtttcgcatccgacaaatacagtatttt

SEQ ID NO: 657537 - DNA, 33 bp, Homo sapien
ctcaagagtaaagtccccaacattcaacttgct

SEQ ID NO: 657538 - DNA, 33 bp, Homo sapien
ctcaagagtaaagtcctcaacattcaacttgct

SEQ ID NO: 657539 - DNA, 33 bp, Homo sapien
aaggctgatcattcaccggtcctgcagaaaggc

SEQ ID NO: 657540 - DNA, 33 bp, Homo sapien
aaggctgatcattcactggtcctgcagaaaggc

SEQ ID NO: 657541 - DNA, 33 bp, Homo sapien
agaagaaaccaggactcaacacacaaactaagt

SEQ ID NO: 657542 - DNA, 33 bp, Homo sapien
agaagaaaccaggactgaacacacaaactaagt

SEQ ID NO: 657543 - DNA, 33 bp, Homo sapien
tctgggagggctttgaagactagaaacagcctc

SEQ ID NO: 657544 - DNA, 33 bp, Homo sapien
tctgggagggctttgatgactagaaacagcctc

SEQ ID NO: 657545 - DNA, 33 bp, Homo sapien
aggagtgttgccatacagagcaagaaaattaag

SEQ ID NO: 657546 - DNA, 33 bp, Homo sapien
aggagtgttgccatacggagcaagaaaattaag

SEQ ID NO: 657547 - DNA, 33 bp, Homo sapien
cccaaactattttccaccattaagcaccttaac

SEQ ID NO: 657548 - DNA, 33 bp, Homo sapien
cccaaactattttccagcattaagcaccttaac

SEQ ID NO: 657549 - DNA, 33 bp, Homo sapien
aaaatagtttgggaaacgaaggttggagatgag

SEQ ID NO: 657550 - DNA, 33 bp, Homo sapien
aaaatagtttgggaaatgaaggttggagatgag

SEQ ID NO: 657551 - DNA, 33 bp, Homo sapien
caaaataaacaagaacagagtagcacttggatc

SEQ ID NO: 657552 - DNA, 33 bp, Homo sapien
caaaataaacaagaacggagtagcacttggatc

SEQ ID NO: 657553 - DNA, 33 bp, Homo sapien
aaaaagctgcggcaagaattacattttgatgtg

SEQ ID NO: 657554 - DNA, 33 bp, Homo sapien
aaaaagctgcggcaagcattacattttgatgtg

SEQ ID NO: 657555 - DNA, 33 bp, Homo sapien
agtatgcttaagttcaataaaatttgctgaaca

SEQ ID NO: 657556 - DNA, 33 bp, Homo sapien
agtatgcttaagttcagtaaaatttgctgaaca

SEQ ID NO: 657557 - DNA, 33 bp, Homo sapien
ctgctttttttccactgaatgttatctaagcat

SEQ ID NO: 657558 - DNA, 33 bp, Homo sapien
ctgctttttttccacttaatgttatctaagcat

SEQ ID NO: 657559 - DNA, 33 bp, Homo sapien
tttattgtcatataataagctgtcactattggg

SEQ ID NO: 657560 - DNA, 33 bp, Homo sapien
tttattgtcatataattagctgtcactattggg

SEQ ID NO: 657561 - DNA, 33 bp, Homo sapien
actacatatggatgaacaggaaccatcaggata

SEQ ID NO: 657562 - DNA, 33 bp, Homo sapien
actacatatggatgaataggaaccatcaggata

SEQ ID NO: 657563 - DNA, 33 bp, Homo sapien
tatatagccagataaaactccctccaactagaa

SEQ ID NO: 657564 - DNA, 33 bp, Homo sapien
tatatagccagataaatctccctccaactagaa

SEQ ID NO: 657565 - DNA, 33 bp, Homo sapien
accagccacatgaagacggaaataaggctttct

SEQ ID NO: 657566 - DNA, 33 bp, Homo sapien
accagccacatgaagatggaaataaggctttct

SEQ ID NO: 657567 - DNA, 33 bp, Homo sapien
taaagaattaaactgacggctgggctcgacggc

SEQ ID NO: 657568 - DNA, 33 bp, Homo sapien
taaagaattaaactgatggctgggctcgacggc

SEQ ID NO: 657569 - DNA, 33 bp, Homo sapien
gactccctctctaccccaactagaatgacaagt

SEQ ID NO: 657570 - DNA, 33 bp, Homo sapien
gactccctctctaccctaactagaatgacaagt

SEQ ID NO: 657571 - DNA, 33 bp, Homo sapien
ggagacagacaaagtcactgaaattagaaactt

SEQ ID NO: 657572 - DNA, 33 bp, Homo sapien
ggagacagacaaagtcgctgaaattagaaactt

SEQ ID NO: 657573 - DNA, 33 bp, Homo sapien
gcagagaaaatactcaatcagactatttccata

SEQ ID NO: 657574 - DNA, 33 bp, Homo sapien
gcagagaaaatactcagtcagactatttccata

SEQ ID NO: 657575 - DNA, 33 bp, Homo sapien
ccattttcagtgacaaattgagatctatagaag

SEQ ID NO: 657576 - DNA, 33 bp, Homo sapien
ccattttcagtgacaatttgagatctatagaag

SEQ ID NO: 657577 - DNA, 33 bp, Homo sapien
ctaagaccaatgcctgaaatctcttcctagaat

SEQ ID NO: 657578 - DNA, 33 bp, Homo sapien
ctaagaccaatgcctgcaatctcttcctagaat

SEQ ID NO: 657579 - DNA, 33 bp, Homo sapien
tgcccagttgcaatcccactctctaattgccct

SEQ ID NO: 657580 - DNA, 33 bp, Homo sapien
tgcccagttgcaatcctactctctaattgccct

SEQ ID NO: 657581 - DNA, 33 bp, Homo sapien
ccaaatctgtcacttaactgttttatctagaaa

SEQ ID NO: 657582 - DNA, 33 bp, Homo sapien
ccaaatctgtcacttagctgttttatctagaaa

SEQ ID NO: 657583 - DNA, 33 bp, Homo sapien
gccattagctgctagagaacttattttactatc

SEQ ID NO: 657584 - DNA, 33 bp, Homo sapien
gccattagctgctagataacttattttactatc

SEQ ID NO: 657585 - DNA, 33 bp, Homo sapien
gggcctgcaggttggccacggactcggacttgc

SEQ ID NO: 657586 - DNA, 33 bp, Homo sapien
gggcctgcaggttggctacggactcggacttgc

SEQ ID NO: 657587 - DNA, 33 bp, Homo sapien
gtcctgtgcgtcggctcaacagcgggaaggcag

SEQ ID NO: 657588 - DNA, 33 bp, Homo sapien
gtcctgtgcgtcggcttaacagcgggaaggcag

SEQ ID NO: 657589 - DNA, 33 bp, Homo sapien
actcttaactgttcagccgcaatttcctctttt

SEQ ID NO: 657590 - DNA, 33 bp, Homo sapien
actcttaactgttcagtcgcaatttcctctttt

SEQ ID NO: 657591 - DNA, 33 bp, Homo sapien
ggggtgaagatgagccagatgaagagtcacaca

SEQ ID NO: 657592 - DNA, 33 bp, Homo sapien
ggggtgaagatgagccggatgaagagtcacaca

SEQ ID NO: 657593 - DNA, 33 bp, Homo sapien
ggtagtaaataaaacactggacacaacatatgc

SEQ ID NO: 657594 - DNA, 33 bp, Homo sapien
ggtagtaaataaaacattggacacaacatatgc

SEQ ID NO: 657595 - DNA, 33 bp, Homo sapien
taatagctggagaaaactttgcttatttgctgt

SEQ ID NO: 657596 - DNA, 33 bp, Homo sapien
taatagctggagaaaattttgcttatttgctgt

SEQ ID NO: 657597 - DNA, 33 bp, Homo sapien
tcttcgttccatatgaagaagaactaataaagt

SEQ ID NO: 657598 - DNA, 33 bp, Homo sapien
tcttcgttccatatgaggaagaactaataaagt

SEQ ID NO: 657599 - DNA, 33 bp, Homo sapien
ttctgctttagaattcatttggctccctggctc

SEQ ID NO: 657600 - DNA, 33 bp, Homo sapien
ttctgctttagaattcgtttggctccctggctc

SEQ ID NO: 657601 - DNA, 33 bp, Homo sapien
attgagtaggcatgaacgggctttgtaaactga

SEQ ID NO: 657602 - DNA, 33 bp, Homo sapien
attgagtaggcatgaatgggctttgtaaactga

SEQ ID NO: 657603 - DNA, 33 bp, Homo sapien
tgagaatggataaataagagactttcactggat

SEQ ID NO: 657604 - DNA, 33 bp, Homo sapien
tgagaatggataaataggagactttcactggat

SEQ ID NO: 657605 - DNA, 33 bp, Homo sapien
tggcaacagtgagagacaaggacaagaggaaga

SEQ ID NO: 657606 - DNA, 33 bp, Homo sapien
tggcaacagtgagagagaaggacaagaggaaga

SEQ ID NO: 657607 - DNA, 33 bp, Homo sapien
tctgaaaaacataacactaagcagatatcaaac

SEQ ID NO: 657608 - DNA, 33 bp, Homo sapien
tctgaaaaacataacattaagcagatatcaaac

SEQ ID NO: 657609 - DNA, 33 bp, Homo sapien
atttatgtgagatagccaaaattgttccatgct

SEQ ID NO: 657610 - DNA, 33 bp, Homo sapien
atttatgtgagatagctaaaattgttccatgct

SEQ ID NO: 657611 - DNA, 33 bp, Homo sapien
agaattgcgatcgttaccattacctctggagct

SEQ ID NO: 657612 - DNA, 33 bp, Homo sapien
agaattgcgatcgttagcattacctctggagct

SEQ ID NO: 657613 - DNA, 33 bp, Homo sapien
ttcatcttttctccacagagctctcatttaacc

SEQ ID NO: 657614 - DNA, 33 bp, Homo sapien
ttcatcttttctccacggagctctcatttaacc

SEQ ID NO: 657615 - DNA, 33 bp, Homo sapien
ctgagaaagaaggtcactcaaggaagagcagaa

SEQ ID NO: 657616 - DNA, 33 bp, Homo sapien
ctgagaaagaaggtcagtcaaggaagagcagaa

SEQ ID NO: 657617 - DNA, 33 bp, Homo sapien
gccgtgctggcctccacgtggacaaaggacaaa

SEQ ID NO: 657618 - DNA, 33 bp, Homo sapien
gccgtgctggcctccatgtggacaaaggacaaa

SEQ ID NO: 657619 - DNA, 33 bp, Homo sapien
ccttattctctccaccacttcagggcaaaggca

SEQ ID NO: 657620 - DNA, 33 bp, Homo sapien
ccttattctctccaccgcttcagggcaaaggca

SEQ ID NO: 657621 - DNA, 33 bp, Homo sapien
tcataccactgtatgaataatttacgggatagt

SEQ ID NO: 657622 - DNA, 33 bp, Homo sapien
tcataccactgtatgagtaatttacgggatagt

SEQ ID NO: 657623 - DNA, 33 bp, Homo sapien
ggtggcttgacaaaaaaaagagacagcagtgct

SEQ ID NO: 657624 - DNA, 33 bp, Homo sapien
ggtggcttgacaaaaacaagagacagcagtgct

SEQ ID NO: 657625 - DNA, 33 bp, Homo sapien
tggcggcttgcagaacaaccctctcagaagtct

SEQ ID NO: 657626 - DNA, 33 bp, Homo sapien
tggcggcttgcagaacgaccctctcagaagtct

SEQ ID NO: 657627 - DNA, 33 bp, Homo sapien
taaagagggagagccaagcaaatgtcatacagg

SEQ ID NO: 657628 - DNA, 33 bp, Homo sapien
taaagagggagagccaggcaaatgtcatacagg

SEQ ID NO: 657629 - DNA, 33 bp, Homo sapien
tctggcatttgtgccaaggtaattttttggtgt

SEQ ID NO: 657630 - DNA, 33 bp, Homo sapien
tctggcatttgtgccacggtaattttttggtgt

SEQ ID NO: 657631 - DNA, 33 bp, Homo sapien
tatgcagcaggggaaagcagcggagaatgccag

SEQ ID NO: 657632 - DNA, 33 bp, Homo sapien
tatgcagcaggggaaatcagcggagaatgccag

SEQ ID NO: 657633 - DNA, 33 bp, Homo sapien
cacaagcaggggaaggaaaaggatgtaaacatt

SEQ ID NO: 657634 - DNA, 33 bp, Homo sapien
cacaagcaggggaagggaaaggatgtaaacatt

SEQ ID NO: 657635 - DNA, 33 bp, Homo sapien
ccctgacttgggccttcaaggataaggattctc

SEQ ID NO: 657636 - DNA, 33 bp, Homo sapien
ccctgacttgggcctttaaggataaggattctc

SEQ ID NO: 657637 - DNA, 33 bp, Homo sapien
acccttgttaagaaagcacttgagccatacgag

SEQ ID NO: 657638 - DNA, 33 bp, Homo sapien
acccttgttaagaaagtacttgagccatacgag

SEQ ID NO: 657639 - DNA, 33 bp, Homo sapien
ataattacttggcctcacccacgccctttctca

SEQ ID NO: 657640 - DNA, 33 bp, Homo sapien
ataattacttggcctcgcccacgccctttctca

SEQ ID NO: 657641 - DNA, 33 bp, Homo sapien
tctcattagtgtacaacgtaaacgaaacgggtt

SEQ ID NO: 657642 - DNA, 33 bp, Homo sapien
tctcattagtgtacaatgtaaacgaaacgggtt

SEQ ID NO: 657643 - DNA, 33 bp, Homo sapien
catgaccttgactttggataatgcctttatgta

SEQ ID NO: 657644 - DNA, 33 bp, Homo sapien
catgaccttgactttgtataatgcctttatgta

SEQ ID NO: 657645 - DNA, 33 bp, Homo sapien
actattaaatcaaccacgagcagcactgcatca

SEQ ID NO: 657646 - DNA, 33 bp, Homo sapien
actattaaatcaaccatgagcagcactgcatca

SEQ ID NO: 657647 - DNA, 33 bp, Homo sapien
cccattcaccccaatacaaggtccaggaatatc

SEQ ID NO: 657648 - DNA, 33 bp, Homo sapien
cccattcaccccaatataaggtccaggaatatc

SEQ ID NO: 657649 - DNA, 33 bp, Homo sapien
tcccatctttctgaaactgcatctgtacctgtt

SEQ ID NO: 657650 - DNA, 33 bp, Homo sapien
tcccatctttctgaaattgcatctgtacctgtt

SEQ ID NO: 657651 - DNA, 33 bp, Homo sapien
ttgacacatcacacaacgtaatactgccaaaga

SEQ ID NO: 657652 - DNA, 33 bp, Homo sapien
ttgacacatcacacaaggtaatactgccaaaga

SEQ ID NO: 657653 - DNA, 33 bp, Homo sapien
atagtctatgggaaagaaacaaaaggcattcat

SEQ ID NO: 657654 - DNA, 33 bp, Homo sapien
atagtctatgggaaagcaacaaaaggcattcat

SEQ ID NO: 657655 - DNA, 33 bp, Homo sapien
aacaacattatcacctcaaataccagtatgaaa

SEQ ID NO: 657656 - DNA, 33 bp, Homo sapien
aacaacattatcacctgaaataccagtatgaaa

SEQ ID NO: 657657 - DNA, 33 bp, Homo sapien
ttaaatgtgccacccaagtgcaaatgaggctga

SEQ ID NO: 657658 - DNA, 33 bp, Homo sapien
ttaaatgtgccacccacgtgcaaatgaggctga

SEQ ID NO: 657659 - DNA, 33 bp, Homo sapien
gcacaaactggcgctaagttcgctaccatccac

SEQ ID NO: 657660 - DNA, 33 bp, Homo sapien
gcacaaactggcgctaggttcgctaccatccac

SEQ ID NO: 657661 - DNA, 33 bp, Homo sapien
actcagaatctgttctaaaggcaacctgagatg

SEQ ID NO: 657662 - DNA, 33 bp, Homo sapien
actcagaatctgttctgaaggcaacctgagatg

SEQ ID NO: 657663 - DNA, 33 bp, Homo sapien
atgactggtaaaacatcagtgcacagaagcgga

SEQ ID NO: 657664 - DNA, 33 bp, Homo sapien
atgactggtaaaacattagtgcacagaagcgga

SEQ ID NO: 657665 - DNA, 33 bp, Homo sapien
ggttggttggacaagacgttagaggttttgttt

SEQ ID NO: 657666 - DNA, 33 bp, Homo sapien
ggttggttggacaagaggttagaggttttgttt

SEQ ID NO: 657667 - DNA, 33 bp, Homo sapien
gagaagtcatgtgacacgttttctgatttttgt

SEQ ID NO: 657668 - DNA, 33 bp, Homo sapien
gagaagtcatgtgacaggttttctgatttttgt

SEQ ID NO: 657669 - DNA, 33 bp, Homo sapien
cacaagaagttattggcaaacgaggttccgata

SEQ ID NO: 657670 - DNA, 33 bp, Homo sapien
cacaagaagttattggtaaacgaggttccgata

SEQ ID NO: 657671 - DNA, 33 bp, Homo sapien
tgttgcccaaataatacctaattgttagccatt

SEQ ID NO: 657672 - DNA, 33 bp, Homo sapien
tgttgcccaaataatatctaattgttagccatt

SEQ ID NO: 657673 - DNA, 33 bp, Homo sapien
acataattgtcccaacggtcattagtagagggg

SEQ ID NO: 657674 - DNA, 33 bp, Homo sapien
acataattgtcccaactgtcattagtagagggg

SEQ ID NO: 657675 - DNA, 33 bp, Homo sapien
caagcgatccgctcaaatagctggaactactct

SEQ ID NO: 657676 - DNA, 33 bp, Homo sapien
caagcgatccgctcaagtagctggaactactct

SEQ ID NO: 657677 - DNA, 33 bp, Homo sapien
agggtggtttattacacggcaatatctagctaa

SEQ ID NO: 657678 - DNA, 33 bp, Homo sapien
agggtggtttattacatggcaatatctagctaa

SEQ ID NO: 657679 - DNA, 33 bp, Homo sapien
tgcacaagggcacccccgaagacatggttgtcc

SEQ ID NO: 657680 - DNA, 33 bp, Homo sapien
tgcacaagggcaccccggaagacatggttgtcc

SEQ ID NO: 657681 - DNA, 33 bp, Homo sapien
tcagaaaagtctcaacaccacaatttatctgtt

SEQ ID NO: 657682 - DNA, 33 bp, Homo sapien
tcagaaaagtctcaacgccacaatttatctgtt

SEQ ID NO: 657683 - DNA, 33 bp, Homo sapien
agaaagcttatgttccaatccatcatttaccct

SEQ ID NO: 657684 - DNA, 33 bp, Homo sapien
agaaagcttatgttccgatccatcatttaccct

SEQ ID NO: 657685 - DNA, 33 bp, Homo sapien
gtctacaaaagatgtaagttaggaccaagacag

SEQ ID NO: 657686 - DNA, 33 bp, Homo sapien
gtctacaaaagatgtacgttaggaccaagacag

SEQ ID NO: 657687 - DNA, 33 bp, Homo sapien
attatgcaccttgaaaaggaatctgtgtctcag

SEQ ID NO: 657688 - DNA, 33 bp, Homo sapien
attatgcaccttgaaagggaatctgtgtctcag

SEQ ID NO: 657689 - DNA, 33 bp, Homo sapien
catctatacagtggacactattgagccactaag

SEQ ID NO: 657690 - DNA, 33 bp, Homo sapien
catctatacagtggacgctattgagccactaag

SEQ ID NO: 657691 - DNA, 33 bp, Homo sapien
gggcatcattctgtaactccctctcatttgcac

SEQ ID NO: 657692 - DNA, 33 bp, Homo sapien
gggcatcattctgtaattccctctcatttgcac

SEQ ID NO: 657693 - DNA, 33 bp, Homo sapien
tggagtctccattttcgacacaatcagaggcag

SEQ ID NO: 657694 - DNA, 33 bp, Homo sapien
tggagtctccattttctacacaatcagaggcag

SEQ ID NO: 657695 - DNA, 33 bp, Homo sapien
gcctgggggagttatgcattggagaacttgcca

SEQ ID NO: 657696 - DNA, 33 bp, Homo sapien
gcctgggggagttatggattggagaacttgcca

SEQ ID NO: 657697 - DNA, 33 bp, Homo sapien
catgacaatgtgtcacaaaagtaataacagagt

SEQ ID NO: 657698 - DNA, 33 bp, Homo sapien
catgacaatgtgtcacgaaagtaataacagagt

SEQ ID NO: 657699 - DNA, 33 bp, Homo sapien
agcatgcaacagggatcaacgctttcctcagca

SEQ ID NO: 657700 - DNA, 33 bp, Homo sapien
agcatgcaacagggatgaacgctttcctcagca

SEQ ID NO: 657701 - DNA, 33 bp, Homo sapien
tccagttaaatgacaaattggcagttcccactc

SEQ ID NO: 657702 - DNA, 33 bp, Homo sapien
tccagttaaatgacaagttggcagttcccactc

SEQ ID NO: 657703 - DNA, 33 bp, Homo sapien
gtcattagaaattgtcaagagccttcctgaaac

SEQ ID NO: 657704 - DNA, 33 bp, Homo sapien
gtcattagaaattgtcgagagccttcctgaaac

SEQ ID NO: 657705 - DNA, 33 bp, Homo sapien
gtgacctaacctgaccaagtatttaatagcctt

SEQ ID NO: 657706 - DNA, 33 bp, Homo sapien
gtgacctaacctgaccgagtatttaatagcctt

SEQ ID NO: 657707 - DNA, 33 bp, Homo sapien
tgagggattttgaggactaatgatgggtacagg

SEQ ID NO: 657708 - DNA, 33 bp, Homo sapien
tgagggattttgaggattaatgatgggtacagg

SEQ ID NO: 657709 - DNA, 33 bp, Homo sapien
tagtttttgatgtgtacattttgataaagagtt

SEQ ID NO: 657710 - DNA, 33 bp, Homo sapien
tagtttttgatgtgtatattttgataaagagtt

SEQ ID NO: 657711 - DNA, 33 bp, Homo sapien
ttctgattttccttaaagttcttaatacaattt

SEQ ID NO: 657712 - DNA, 33 bp, Homo sapien
ttctgattttccttaaggttcttaatacaattt

SEQ ID NO: 657713 - DNA, 33 bp, Homo sapien
tgtagctttgtaataactcttgacctaagatac

SEQ ID NO: 657714 - DNA, 33 bp, Homo sapien
tgtagctttgtaataagtcttgacctaagatac

SEQ ID NO: 657715 - DNA, 33 bp, Homo sapien
tgctctatctatcccagtccactgatctatgca

SEQ ID NO: 657716 - DNA, 33 bp, Homo sapien
tgctctatctatcccattccactgatctatgca

SEQ ID NO: 657717 - DNA, 33 bp, Homo sapien
cagaggagacagtgacaatggaataaattctcc

SEQ ID NO: 657718 - DNA, 33 bp, Homo sapien
cagaggagacagtgacgatggaataaattctcc

SEQ ID NO: 657719 - DNA, 33 bp, Homo sapien
tcaaaacctccattcacagaaacagggtcctta

SEQ ID NO: 657720 - DNA, 33 bp, Homo sapien
tcaaaacctccattcatagaaacagggtcctta

SEQ ID NO: 657721 - DNA, 33 bp, Homo sapien
agtggattgacatgacaagattatgtgatcctg

SEQ ID NO: 657722 - DNA, 33 bp, Homo sapien
agtggattgacatgacgagattatgtgatcctg

SEQ ID NO: 657723 - DNA, 33 bp, Homo sapien
aaggactgccaagcttcaagcaggattttgtgt

SEQ ID NO: 657724 - DNA, 33 bp, Homo sapien
aaggactgccaagctttaagcaggattttgtgt

SEQ ID NO: 657725 - DNA, 33 bp, Homo sapien
gatgctgagagatggaataacttgcccagggcc

SEQ ID NO: 657726 - DNA, 33 bp, Homo sapien
gatgctgagagatggagtaacttgcccagggcc

SEQ ID NO: 657727 - DNA, 33 bp, Homo sapien
tgacttgtttcactaaatgtaatgttttcaagt

SEQ ID NO: 657728 - DNA, 33 bp, Homo sapien
tgacttgtttcactaagtgtaatgttttcaagt

SEQ ID NO: 657729 - DNA, 33 bp, Homo sapien
ccacttatggtaggtacctggactagtcaagtt

SEQ ID NO: 657730 - DNA, 33 bp, Homo sapien
ccacttatggtaggtatctggactagtcaagtt

SEQ ID NO: 657731 - DNA, 33 bp, Homo sapien
tttctgtttaggacgacgaaaatgttccggaaa

SEQ ID NO: 657732 - DNA, 33 bp, Homo sapien
tttctgtttaggacgatgaaaatgttccggaaa

SEQ ID NO: 657733 - DNA, 33 bp, Homo sapien
actgtacacttgaaaacgcttaaatggtaaatg

SEQ ID NO: 657734 - DNA, 33 bp, Homo sapien
actgtacacttgaaaatgcttaaatggtaaatg

SEQ ID NO: 657735 - DNA, 33 bp, Homo sapien
atcactgttacatggaagataagatgaggtctg

SEQ ID NO: 657736 - DNA, 33 bp, Homo sapien
atcactgttacatggaggataagatgaggtctg

SEQ ID NO: 657737 - DNA, 33 bp, Homo sapien
gttggggaaagcaagaaaggaggcaaaggcaga

SEQ ID NO: 657738 - DNA, 33 bp, Homo sapien
gttggggaaagcaagagaggaggcaaaggcaga

SEQ ID NO: 657739 - DNA, 33 bp, Homo sapien
tggtataagaactccaaaagacctgagcttgtg

SEQ ID NO: 657740 - DNA, 33 bp, Homo sapien
tggtataagaactccagaagacctgagcttgtg

SEQ ID NO: 657741 - DNA, 33 bp, Homo sapien
cagggcagagtgatgacaaatccaagtttatga

SEQ ID NO: 657742 - DNA, 33 bp, Homo sapien
cagggcagagtgatgagaaatccaagtttatga

SEQ ID NO: 657743 - DNA, 33 bp, Homo sapien
tacacttagtctatccaaaatgacaaaaatagt

SEQ ID NO: 657744 - DNA, 33 bp, Homo sapien
tacacttagtctatccgaaatgacaaaaatagt

SEQ ID NO: 657745 - DNA, 33 bp, Homo sapien
acaccaattcatataacggagtgctagacagct

SEQ ID NO: 657746 - DNA, 33 bp, Homo sapien
acaccaattcatataatggagtgctagacagct

SEQ ID NO: 657747 - DNA, 33 bp, Homo sapien
acagctataaagaaagaatgagcatgctctctg

SEQ ID NO: 657748 - DNA, 33 bp, Homo sapien
acagctataaagaaaggatgagcatgctctctg

SEQ ID NO: 657749 - DNA, 33 bp, Homo sapien
agagcaacagagagagccactcaaccactggtc

SEQ ID NO: 657750 - DNA, 33 bp, Homo sapien
agagcaacagagagaggcactcaaccactggtc

SEQ ID NO: 657751 - DNA, 33 bp, Homo sapien
taaaagaaaggagaaaatccgcatcccaaacaa

SEQ ID NO: 657752 - DNA, 33 bp, Homo sapien
taaaagaaaggagaaagtccgcatcccaaacaa

SEQ ID NO: 657753 - DNA, 33 bp, Homo sapien
ttgagcatggataaccaagagaaattttatgtt

SEQ ID NO: 657754 - DNA, 33 bp, Homo sapien
ttgagcatggataaccgagagaaattttatgtt

SEQ ID NO: 657755 - DNA, 33 bp, Homo sapien
catcgtcctggagctcacaggttaatggccttt

SEQ ID NO: 657756 - DNA, 33 bp, Homo sapien
catcgtcctggagctctcaggttaatggccttt

SEQ ID NO: 657757 - DNA, 33 bp, Homo sapien
gacttctgactttagacatatggaccatggctg

SEQ ID NO: 657758 - DNA, 33 bp, Homo sapien
gacttctgactttagatatatggaccatggctg

SEQ ID NO: 657759 - DNA, 33 bp, Homo sapien
tgcagaaagacaaaaggagtccatttctgggta

SEQ ID NO: 657760 - DNA, 33 bp, Homo sapien
tgcagaaagacaaaagtagtccatttctgggta

SEQ ID NO: 657761 - DNA, 33 bp, Homo sapien
aaggccatccatttaacgaaaaagccaagaccc

SEQ ID NO: 657762 - DNA, 33 bp, Homo sapien
aaggccatccatttaatgaaaaagccaagaccc

SEQ ID NO: 657763 - DNA, 33 bp, Homo sapien
aatgtatttgagcatacgtctggctatttcctt

SEQ ID NO: 657764 - DNA, 33 bp, Homo sapien
aatgtatttgagcatatgtctggctatttcctt

SEQ ID NO: 657765 - DNA, 33 bp, Homo sapien
ctagttaccaataggacgtaatctctgggattc

SEQ ID NO: 657766 - DNA, 33 bp, Homo sapien
ctagttaccaataggatgtaatctctgggattc

SEQ ID NO: 657767 - DNA, 33 bp, Homo sapien
gtagcaaacaaaagcaacaactaagatctgaga

SEQ ID NO: 657768 - DNA, 33 bp, Homo sapien
gtagcaaacaaaagcagcaactaagatctgaga

SEQ ID NO: 657769 - DNA, 33 bp, Homo sapien
ctgaattggtcacttacggtctccaattcacat

SEQ ID NO: 657770 - DNA, 33 bp, Homo sapien
ctgaattggtcacttatggtctccaattcacat

SEQ ID NO: 657771 - DNA, 33 bp, Homo sapien
gacaatggcaataagaacctctggagcttaaac

SEQ ID NO: 657772 - DNA, 33 bp, Homo sapien
gacaatggcaataagaccctctggagcttaaac

SEQ ID NO: 657773 - DNA, 33 bp, Homo sapien
gaagtcttctggctccaatagaggagatgattt

SEQ ID NO: 657774 - DNA, 33 bp, Homo sapien
gaagtcttctggctccgatagaggagatgattt

SEQ ID NO: 657775 - DNA, 33 bp, Homo sapien
ggagtaagtgagcccagctagcctaagcgacaa

SEQ ID NO: 657776 - DNA, 33 bp, Homo sapien
ggagtaagtgagcccatctagcctaagcgacaa

SEQ ID NO: 657777 - DNA, 33 bp, Homo sapien
aaaatagaaataagtagatggtggcatcttttt

SEQ ID NO: 657778 - DNA, 33 bp, Homo sapien
aaaatagaaataagtatatggtggcatcttttt

SEQ ID NO: 657779 - DNA, 33 bp, Homo sapien
gctcgttcactatgcaaagtccaaataaacagt

SEQ ID NO: 657780 - DNA, 33 bp, Homo sapien
gctcgttcactatgcagagtccaaataaacagt

SEQ ID NO: 657781 - DNA, 33 bp, Homo sapien
accctgcacaataggaactatcgagactccttt

SEQ ID NO: 657782 - DNA, 33 bp, Homo sapien
accctgcacaataggagctatcgagactccttt

SEQ ID NO: 657783 - DNA, 33 bp, Homo sapien
ccctcggcctcctcaacagtgacctggggtggg

SEQ ID NO: 657784 - DNA, 33 bp, Homo sapien
ccctcggcctcctcaatagtgacctggggtggg

SEQ ID NO: 657785 - DNA, 33 bp, Homo sapien
gcaagtataggcctagccaatggaatcagattt

SEQ ID NO: 657786 - DNA, 33 bp, Homo sapien
gcaagtataggcctaggcaatggaatcagattt

SEQ ID NO: 657787 - DNA, 33 bp, Homo sapien
gtctgttttcagcctcagaaagtcttcacctgc

SEQ ID NO: 657788 - DNA, 33 bp, Homo sapien
gtctgttttcagcctcggaaagtcttcacctgc

SEQ ID NO: 657789 - DNA, 33 bp, Homo sapien
ctggatgcctaactacactcagtaacagtcatg

SEQ ID NO: 657790 - DNA, 33 bp, Homo sapien
ctggatgcctaactactctcagtaacagtcatg

SEQ ID NO: 657791 - DNA, 33 bp, Homo sapien
caagtcagaccatgtacgttagacttctggctc

SEQ ID NO: 657792 - DNA, 33 bp, Homo sapien
caagtcagaccatgtaggttagacttctggctc

SEQ ID NO: 657793 - DNA, 33 bp, Homo sapien
ctttctcctaatcaacagtcccaaatctttaac

SEQ ID NO: 657794 - DNA, 33 bp, Homo sapien
ctttctcctaatcaacggtcccaaatctttaac

SEQ ID NO: 657795 - DNA, 33 bp, Homo sapien
aaggataggacaaaataaaaggtaggagccagt

SEQ ID NO: 657796 - DNA, 33 bp, Homo sapien
aaggataggacaaaattaaaggtaggagccagt

SEQ ID NO: 657797 - DNA, 33 bp, Homo sapien
ctcatttcacaaggcaacaaggtctcaatgctg

SEQ ID NO: 657798 - DNA, 33 bp, Homo sapien
ctcatttcacaaggcagcaaggtctcaatgctg

SEQ ID NO: 657799 - DNA, 33 bp, Homo sapien
gagcctcctggggagacggggaaatgaatgaga

SEQ ID NO: 657800 - DNA, 33 bp, Homo sapien
gagcctcctggggagatggggaaatgaatgaga

SEQ ID NO: 657801 - DNA, 33 bp, Homo sapien
ataaaccacactgcaacgaggcctgtccctgtg

SEQ ID NO: 657802 - DNA, 33 bp, Homo sapien
ataaaccacactgcaatgaggcctgtccctgtg

SEQ ID NO: 657803 - DNA, 33 bp, Homo sapien
tcataacacaacacataactcgtgcttgtggtg

SEQ ID NO: 657804 - DNA, 33 bp, Homo sapien
tcataacacaacacattactcgtgcttgtggtg

SEQ ID NO: 657805 - DNA, 33 bp, Homo sapien
cttaaaaacaacagaaatgtattctttcacagt

SEQ ID NO: 657806 - DNA, 33 bp, Homo sapien
cttaaaaacaacagaagtgtattctttcacagt

SEQ ID NO: 657807 - DNA, 33 bp, Homo sapien
aggactggtgacctcccatggcatttttaggct

SEQ ID NO: 657808 - DNA, 33 bp, Homo sapien
aggactggtgacctcctatggcatttttaggct

SEQ ID NO: 657809 - DNA, 33 bp, Homo sapien
caataactaggggtgacctgtagacatttgttt

SEQ ID NO: 657810 - DNA, 33 bp, Homo sapien
caataactaggggtgagctgtagacatttgttt

SEQ ID NO: 657811 - DNA, 33 bp, Homo sapien
catctgtaccttcaggaataaggaccctctttt

SEQ ID NO: 657812 - DNA, 33 bp, Homo sapien
catctgtaccttcagggataaggaccctctttt

SEQ ID NO: 657813 - DNA, 33 bp, Homo sapien
gagcgcttcctatacacaaacttctaaatgcct

SEQ ID NO: 657814 - DNA, 33 bp, Homo sapien
gagcgcttcctatacagaaacttctaaatgcct

SEQ ID NO: 657815 - DNA, 33 bp, Homo sapien
tattttactaagcctacgtttgccattaattaa

SEQ ID NO: 657816 - DNA, 33 bp, Homo sapien
tattttactaagcctatgtttgccattaattaa

SEQ ID NO: 657817 - DNA, 33 bp, Homo sapien
tctgctaaatacaacacatgaacctactcagtt

SEQ ID NO: 657818 - DNA, 33 bp, Homo sapien
tctgctaaatacaacatatgaacctactcagtt

SEQ ID NO: 657819 - DNA, 33 bp, Homo sapien
tcataggcagagaaaaggatcttggtatacaac

SEQ ID NO: 657820 - DNA, 33 bp, Homo sapien
tcataggcagagaaaatgatcttggtatacaac

SEQ ID NO: 657821 - DNA, 33 bp, Homo sapien
catttggtagagaagacggaaataaaggttatc

SEQ ID NO: 657822 - DNA, 33 bp, Homo sapien
catttggtagagaagatggaaataaaggttatc

SEQ ID NO: 657823 - DNA, 33 bp, Homo sapien
tcagttctgagccggcacatctctgagctttcc

SEQ ID NO: 657824 - DNA, 33 bp, Homo sapien
tcagttctgagccggcgcatctctgagctttcc

SEQ ID NO: 657825 - DNA, 33 bp, Homo sapien
cctcatcttatggaaaagtgttcaaagaggtta

SEQ ID NO: 657826 - DNA, 33 bp, Homo sapien
cctcatcttatggaaaggtgttcaaagaggtta

SEQ ID NO: 657827 - DNA, 33 bp, Homo sapien
taatgggatcataccacgtgttctgttttctaa

SEQ ID NO: 657828 - DNA, 33 bp, Homo sapien
taatgggatcataccatgtgttctgttttctaa

SEQ ID NO: 657829 - DNA, 33 bp, Homo sapien
ggctgaggaggcatcacaaatcatggcagaagg

SEQ ID NO: 657830 - DNA, 33 bp, Homo sapien
ggctgaggaggcatcataaatcatggcagaagg

SEQ ID NO: 657831 - DNA, 33 bp, Homo sapien
actgtggacatttcagcaaaggctgtaggtttc

SEQ ID NO: 657832 - DNA, 33 bp, Homo sapien
actgtggacatttcagtaaaggctgtaggtttc

SEQ ID NO: 657833 - DNA, 33 bp, Homo sapien
ccatgttctgaaataaagcaatggagagcaacg

SEQ ID NO: 657834 - DNA, 33 bp, Homo sapien
ccatgttctgaaataatgcaatggagagcaacg

SEQ ID NO: 657835 - DNA, 33 bp, Homo sapien
ctatgtaaccctcggacaagctttttcacgttc

SEQ ID NO: 657836 - DNA, 33 bp, Homo sapien
ctatgtaaccctcggagaagctttttcacgttc

SEQ ID NO: 657837 - DNA, 33 bp, Homo sapien
agtgtggtagatggagacctgaattcactcaga

SEQ ID NO: 657838 - DNA, 33 bp, Homo sapien
agtgtggtagatggaggcctgaattcactcaga

SEQ ID NO: 657839 - DNA, 33 bp, Homo sapien
ttaaatgcttaatgaaacttttctcataatggc

SEQ ID NO: 657840 - DNA, 33 bp, Homo sapien
ttaaatgcttaatgaaccttttctcataatggc

SEQ ID NO: 657841 - DNA, 33 bp, Homo sapien
gcccagcttcgacccccgagtctgctcccactc

SEQ ID NO: 657842 - DNA, 33 bp, Homo sapien
gcccagcttcgacccctgagtctgctcccactc

SEQ ID NO: 657843 - DNA, 33 bp, Homo sapien
gttctaaccctgaaaaatacctctgttctaatc

SEQ ID NO: 657844 - DNA, 33 bp, Homo sapien
gttctaaccctgaaaagtacctctgttctaatc

SEQ ID NO: 657845 - DNA, 33 bp, Homo sapien
taagtgtatttttctaagacagggttcagaact

SEQ ID NO: 657846 - DNA, 33 bp, Homo sapien
taagtgtatttttctaggacagggttcagaact

SEQ ID NO: 657847 - DNA, 33 bp, Homo sapien
atttccagtatgcttacctaaaatgtagattac

SEQ ID NO: 657848 - DNA, 33 bp, Homo sapien
atttccagtatgcttatctaaaatgtagattac

SEQ ID NO: 657849 - DNA, 33 bp, Homo sapien
tataccagaccattatcataaagacgcttcgaa

SEQ ID NO: 657850 - DNA, 33 bp, Homo sapien
tataccagaccattattataaagacgcttcgaa

SEQ ID NO: 657851 - DNA, 33 bp, Homo sapien
catgaaacagggaatccatgtcagcaatatatg

SEQ ID NO: 657852 - DNA, 33 bp, Homo sapien
catgaaacagggaatctatgtcagcaatatatg

SEQ ID NO: 657853 - DNA, 33 bp, Homo sapien
tgcaaccgagagccaaccatgtgcccggtactt

SEQ ID NO: 657854 - DNA, 33 bp, Homo sapien
tgcaaccgagagccaatcatgtgcccggtactt

SEQ ID NO: 657855 - DNA, 33 bp, Homo sapien
gttattgtccccatgacaaagatgagataactg

SEQ ID NO: 657856 - DNA, 33 bp, Homo sapien
gttattgtccccatgataaagatgagataactg

SEQ ID NO: 657857 - DNA, 33 bp, Homo sapien
ctgagatactggagacaaagcagccggcaccat

SEQ ID NO: 657858 - DNA, 33 bp, Homo sapien
ctgagatactggagacgaagcagccggcaccat

SEQ ID NO: 657859 - DNA, 33 bp, Homo sapien
tcccactatgtgcagaaccaaagctagaaattg

SEQ ID NO: 657860 - DNA, 33 bp, Homo sapien
tcccactatgtgcagacccaaagctagaaattg

SEQ ID NO: 657861 - DNA, 33 bp, Homo sapien
gcatatgttttaaaaaatgataacattgttatg

SEQ ID NO: 657862 - DNA, 33 bp, Homo sapien
gcatatgttttaaaaagtgataacattgttatg

SEQ ID NO: 657863 - DNA, 33 bp, Homo sapien
tgctgatgtgaaacacgcatgaacagtcacaaa

SEQ ID NO: 657864 - DNA, 33 bp, Homo sapien
tgctgatgtgaaacactcatgaacagtcacaaa

SEQ ID NO: 657865 - DNA, 33 bp, Homo sapien
gggcaccagggaatcaagctttggagtcaggtg

SEQ ID NO: 657866 - DNA, 33 bp, Homo sapien
gggcaccagggaatcacgctttggagtcaggtg

SEQ ID NO: 657867 - DNA, 33 bp, Homo sapien
gcataggtggtcaacaatgcaaaaagtttcaag

SEQ ID NO: 657868 - DNA, 33 bp, Homo sapien
gcataggtggtcaacagtgcaaaaagtttcaag

SEQ ID NO: 657869 - DNA, 33 bp, Homo sapien
tgagtgtcatgccaaaatgattttattgccata

SEQ ID NO: 657870 - DNA, 33 bp, Homo sapien
tgagtgtcatgccaaagtgattttattgccata

SEQ ID NO: 657871 - DNA, 33 bp, Homo sapien
aaacaagaccctctcaagaatttgtttggctta

SEQ ID NO: 657872 - DNA, 33 bp, Homo sapien
aaacaagaccctctcaggaatttgtttggctta

SEQ ID NO: 657873 - DNA, 33 bp, Homo sapien
aagctaaatagcacgaaaacttaatttaaacaa

SEQ ID NO: 657874 - DNA, 33 bp, Homo sapien
aagctaaatagcacgataacttaatttaaacaa

SEQ ID NO: 657875 - DNA, 33 bp, Homo sapien
aaatgaggacgatgagaaggacccactgttatt

SEQ ID NO: 657876 - DNA, 33 bp, Homo sapien
aaatgaggacgatgaggaggacccactgttatt

SEQ ID NO: 657877 - DNA, 33 bp, Homo sapien
ctcataggaagcctaaactggagcagggatttt

SEQ ID NO: 657878 - DNA, 33 bp, Homo sapien
ctcataggaagcctaacctggagcagggatttt

SEQ ID NO: 657879 - DNA, 33 bp, Homo sapien
agaaatgaattagggaccagaaaaacaatagag

SEQ ID NO: 657880 - DNA, 33 bp, Homo sapien
agaaatgaattagggatcagaaaaacaatagag

SEQ ID NO: 657881 - DNA, 33 bp, Homo sapien
gtcgctggcgcgggccaggagtccctgatcagg

SEQ ID NO: 657882 - DNA, 33 bp, Homo sapien
gtcgctggcgcgggccgggagtccctgatcagg

SEQ ID NO: 657883 - DNA, 33 bp, Homo sapien
gaggcactccgaaaacaagcgagtagggggaaa

SEQ ID NO: 657884 - DNA, 33 bp, Homo sapien
gaggcactccgaaaacgagcgagtagggggaaa

SEQ ID NO: 657885 - DNA, 33 bp, Homo sapien
cctggaactggcctaaccttcagcaaccatcac

SEQ ID NO: 657886 - DNA, 33 bp, Homo sapien
cctggaactggcctaagcttcagcaaccatcac

SEQ ID NO: 657887 - DNA, 33 bp, Homo sapien
agtgtatgtgtgccaacgtcctatttttcatat

SEQ ID NO: 657888 - DNA, 33 bp, Homo sapien
agtgtatgtgtgccaatgtcctatttttcatat

SEQ ID NO: 657889 - DNA, 33 bp, Homo sapien
tgcctgtaataattcacattttcaccaacagtg

SEQ ID NO: 657890 - DNA, 33 bp, Homo sapien
tgcctgtaataattcatattttcaccaacagtg

SEQ ID NO: 657891 - DNA, 33 bp, Homo sapien
gggtgaatgaatggacgcttggtttggctttaa

SEQ ID NO: 657892 - DNA, 33 bp, Homo sapien
gggtgaatgaatggactcttggtttggctttaa

SEQ ID NO: 657893 - DNA, 33 bp, Homo sapien
tgctcttctcttggtcacggtgattagaaagtg

SEQ ID NO: 657894 - DNA, 33 bp, Homo sapien
tgctcttctcttggtcgcggtgattagaaagtg

SEQ ID NO: 657895 - DNA, 33 bp, Homo sapien
caacactgatggggcaacttctatacacaacac

SEQ ID NO: 657896 - DNA, 33 bp, Homo sapien
caacactgatggggcatcttctatacacaacac

SEQ ID NO: 657897 - DNA, 33 bp, Homo sapien
gccaaaaggatttctgaatgccctggtgtttgc

SEQ ID NO: 657898 - DNA, 33 bp, Homo sapien
gccaaaaggatttctggatgccctggtgtttgc

SEQ ID NO: 657899 - DNA, 33 bp, Homo sapien
cagcgcaccctttagacgtaattaactccaaag

SEQ ID NO: 657900 - DNA, 33 bp, Homo sapien
cagcgcaccctttagatgtaattaactccaaag

SEQ ID NO: 657901 - DNA, 33 bp, Homo sapien
tactaaaggagaacaaaagacaggaataaaaaa

SEQ ID NO: 657902 - DNA, 33 bp, Homo sapien
tactaaaggagaacaagagacaggaataaaaaa

SEQ ID NO: 657903 - DNA, 33 bp, Homo sapien
cagacagttcgcagaaaatgaaatataagatgg

SEQ ID NO: 657904 - DNA, 33 bp, Homo sapien
cagacagttcgcagaagatgaaatataagatgg

SEQ ID NO: 657905 - DNA, 33 bp, Homo sapien
ctgtgagttttttgccactttgatttaactgac

SEQ ID NO: 657906 - DNA, 33 bp, Homo sapien
ctgtgagttttttgccgctttgatttaactgac

SEQ ID NO: 657907 - DNA, 33 bp, Homo sapien
catcacttcacataacgatcttttgtgtgtgtg

SEQ ID NO: 657908 - DNA, 33 bp, Homo sapien
catcacttcacataactatcttttgtgtgtgtg

SEQ ID NO: 657909 - DNA, 33 bp, Homo sapien
catttttttgaaaacaccttgacatttaagttg

SEQ ID NO: 657910 - DNA, 33 bp, Homo sapien
catttttttgaaaacatcttgacatttaagttg

SEQ ID NO: 657911 - DNA, 33 bp, Homo sapien
agttgttgcacagagacgaattctttagtcact

SEQ ID NO: 657912 - DNA, 33 bp, Homo sapien
agttgttgcacagagatgaattctttagtcact

SEQ ID NO: 657913 - DNA, 33 bp, Homo sapien
cttataatgctttacaagataaatctgacattc

SEQ ID NO: 657914 - DNA, 33 bp, Homo sapien
cttataatgctttacacgataaatctgacattc

SEQ ID NO: 657915 - DNA, 33 bp, Homo sapien
ccaccaagcactgtaaaccaatacataaattat

SEQ ID NO: 657916 - DNA, 33 bp, Homo sapien
ccaccaagcactgtaacccaatacataaattat

SEQ ID NO: 657917 - DNA, 33 bp, Homo sapien
ggtagtaaagcaaaggcatgatggaagccagga

SEQ ID NO: 657918 - DNA, 33 bp, Homo sapien
ggtagtaaagcaaaggtatgatggaagccagga

SEQ ID NO: 657919 - DNA, 33 bp, Homo sapien
ccttaaagatttccccaaaaaaatggtgaaaat

SEQ ID NO: 657920 - DNA, 33 bp, Homo sapien
ccttaaagatttcccccaaaaaatggtgaaaat

SEQ ID NO: 657921 - DNA, 33 bp, Homo sapien
tactgaggatctattacgtctcctattccaggc

SEQ ID NO: 657922 - DNA, 33 bp, Homo sapien
tactgaggatctattatgtctcctattccaggc

SEQ ID NO: 657923 - DNA, 33 bp, Homo sapien
gccaggaatttcataccgacaaaataaaaagtg

SEQ ID NO: 657924 - DNA, 33 bp, Homo sapien
gccaggaatttcatactgacaaaataaaaagtg

SEQ ID NO: 657925 - DNA, 33 bp, Homo sapien
ccaattaaccataccaacctcactgacttagag

SEQ ID NO: 657926 - DNA, 33 bp, Homo sapien
ccaattaaccataccaccctcactgacttagag

SEQ ID NO: 657927 - DNA, 33 bp, Homo sapien
tcaataaaaagacatacacctagagcaatgtta

SEQ ID NO: 657928 - DNA, 33 bp, Homo sapien
tcaataaaaagacatatacctagagcaatgtta

SEQ ID NO: 657929 - DNA, 33 bp, Homo sapien
gtagaccagtgcaatggatctaagtaagagtgc

SEQ ID NO: 657930 - DNA, 33 bp, Homo sapien
gtagaccagtgcaatgtatctaagtaagagtgc

SEQ ID NO: 657931 - DNA, 33 bp, Homo sapien
tagaacactcaccaaacagatcatatgccaagc

SEQ ID NO: 657932 - DNA, 33 bp, Homo sapien
tagaacactcaccaaatagatcatatgccaagc

SEQ ID NO: 657933 - DNA, 33 bp, Homo sapien
agatgttggtttgtcaatcaagtcaatatacag

SEQ ID NO: 657934 - DNA, 33 bp, Homo sapien
agatgttggtttgtcagtcaagtcaatatacag

SEQ ID NO: 657935 - DNA, 33 bp, Homo sapien
aaagtaacagaaaaaaaccatagtggacctagg

SEQ ID NO: 657936 - DNA, 33 bp, Homo sapien
aaagtaacagaaaaaacccatagtggacctagg

SEQ ID NO: 657937 - DNA, 33 bp, Homo sapien
cagtccaataaaaatgccagtctattgcaatct

SEQ ID NO: 657938 - DNA, 33 bp, Homo sapien
cagtccaataaaaatgtcagtctattgcaatct

SEQ ID NO: 657939 - DNA, 33 bp, Homo sapien
ccattattgtttagaaatgtgttgtttaatatc

SEQ ID NO: 657940 - DNA, 33 bp, Homo sapien
ccattattgtttagaagtgtgttgtttaatatc

SEQ ID NO: 657941 - DNA, 33 bp, Homo sapien
aaattttttctgctgacagttgtatgtaaatct

SEQ ID NO: 657942 - DNA, 33 bp, Homo sapien
aaattttttctgctgatagttgtatgtaaatct

SEQ ID NO: 657943 - DNA, 33 bp, Homo sapien
ttcaaaagtgtcacaacaaaagtctagtgtggt

SEQ ID NO: 657944 - DNA, 33 bp, Homo sapien
ttcaaaagtgtcacaagaaaagtctagtgtggt

SEQ ID NO: 657945 - DNA, 33 bp, Homo sapien
agtatgaagtgttatcaaggatatggagaaact

SEQ ID NO: 657946 - DNA, 33 bp, Homo sapien
agtatgaagtgttatcgaggatatggagaaact

SEQ ID NO: 657947 - DNA, 33 bp, Homo sapien
gtttcctttgtgatgaggcaatagttctggatc

SEQ ID NO: 657948 - DNA, 33 bp, Homo sapien
gtttcctttgtgatgatgcaatagttctggatc

SEQ ID NO: 657949 - DNA, 33 bp, Homo sapien
aatcacttccatgatagctcccactttagctat

SEQ ID NO: 657950 - DNA, 33 bp, Homo sapien
aatcacttccatgatatctcccactttagctat

SEQ ID NO: 657951 - DNA, 33 bp, Homo sapien
agagcttcgaagaagaactcagataccagcgga

SEQ ID NO: 657952 - DNA, 33 bp, Homo sapien
agagcttcgaagaagagctcagataccagcgga

SEQ ID NO: 657953 - DNA, 33 bp, Homo sapien
gactggactgcatggacaattcaacatatgaag

SEQ ID NO: 657954 - DNA, 33 bp, Homo sapien
gactggactgcatggataattcaacatatgaag

SEQ ID NO: 657955 - DNA, 33 bp, Homo sapien
ctctactaaggcagtcaaaagttgggacaatga

SEQ ID NO: 657956 - DNA, 33 bp, Homo sapien
ctctactaaggcagtcgaaagttgggacaatga

SEQ ID NO: 657957 - DNA, 33 bp, Homo sapien
tgcttgtagtgtgggccctagactgcctgtcac

SEQ ID NO: 657958 - DNA, 33 bp, Homo sapien
tgcttgtagtgtgggctctagactgcctgtcac

SEQ ID NO: 657959 - DNA, 33 bp, Homo sapien
aggtctaggctaactacaaccgtgcagaggagt

SEQ ID NO: 657960 - DNA, 33 bp, Homo sapien
aggtctaggctaactataaccgtgcagaggagt

SEQ ID NO: 657961 - DNA, 33 bp, Homo sapien
atatcagcaacacaaacgatttactttatgagg

SEQ ID NO: 657962 - DNA, 33 bp, Homo sapien
atatcagcaacacaaatgatttactttatgagg

SEQ ID NO: 657963 - DNA, 33 bp, Homo sapien
attaatatagctagaccctgtctttaccaaaaa

SEQ ID NO: 657964 - DNA, 33 bp, Homo sapien
attaatatagctagactctgtctttaccaaaaa

SEQ ID NO: 657965 - DNA, 33 bp, Homo sapien
ccattcacaatgtctcactagggcagaatgtgt

SEQ ID NO: 657966 - DNA, 33 bp, Homo sapien
ccattcacaatgtctcgctagggcagaatgtgt

SEQ ID NO: 657967 - DNA, 33 bp, Homo sapien
gccacctgtacccggccaaaaacgtcatatatt

SEQ ID NO: 657968 - DNA, 33 bp, Homo sapien
gccacctgtacccggcgaaaaacgtcatatatt

SEQ ID NO: 657969 - DNA, 33 bp, Homo sapien
aaataaaaacatcttacgacaactgagccagaa

SEQ ID NO: 657970 - DNA, 33 bp, Homo sapien
aaataaaaacatcttatgacaactgagccagaa

SEQ ID NO: 657971 - DNA, 33 bp, Homo sapien
ttaaagcattctgaaaatcatgctctgttttta

SEQ ID NO: 657972 - DNA, 33 bp, Homo sapien
ttaaagcattctgaaagtcatgctctgttttta

SEQ ID NO: 657973 - DNA, 33 bp, Homo sapien
caacatttaatggaatcatacttttcaggcaat

SEQ ID NO: 657974 - DNA, 33 bp, Homo sapien
caacatttaatggaatgatacttttcaggcaat

SEQ ID NO: 657975 - DNA, 33 bp, Homo sapien
tgatcatgggtaagaacgtactatgtttaagaa

SEQ ID NO: 657976 - DNA, 33 bp, Homo sapien
tgatcatgggtaagaatgtactatgtttaagaa

SEQ ID NO: 657977 - DNA, 33 bp, Homo sapien
tgagttcagtttttgacatgttgagcttgaggt

SEQ ID NO: 657978 - DNA, 33 bp, Homo sapien
tgagttcagtttttgagatgttgagcttgaggt

SEQ ID NO: 657979 - DNA, 33 bp, Homo sapien
gccttcattgtgaagccctacctttaatcgaca

SEQ ID NO: 657980 - DNA, 33 bp, Homo sapien
gccttcattgtgaagctctacctttaatcgaca

SEQ ID NO: 657981 - DNA, 33 bp, Homo sapien
ttttcaagtgggacaacgtatgtttgtttagga

SEQ ID NO: 657982 - DNA, 33 bp, Homo sapien
ttttcaagtgggacaatgtatgtttgtttagga

SEQ ID NO: 657983 - DNA, 33 bp, Homo sapien
ccagctggttgccttcaatagtggctatttctt

SEQ ID NO: 657984 - DNA, 33 bp, Homo sapien
ccagctggttgccttcgatagtggctatttctt

SEQ ID NO: 657985 - DNA, 33 bp, Homo sapien
ttttgagtctctactacgtctgaagcactcttt

SEQ ID NO: 657986 - DNA, 33 bp, Homo sapien
ttttgagtctctactatgtctgaagcactcttt

SEQ ID NO: 657987 - DNA, 33 bp, Homo sapien
aagaggtctgacttaaaagttttctgtgtgtca

SEQ ID NO: 657988 - DNA, 33 bp, Homo sapien
aagaggtctgacttaatagttttctgtgtgtca

SEQ ID NO: 657989 - DNA, 33 bp, Homo sapien
cttccttattcaaacaatatgtcctcctctctc

SEQ ID NO: 657990 - DNA, 33 bp, Homo sapien
cttccttattcaaacagtatgtcctcctctctc

SEQ ID NO: 657991 - DNA, 33 bp, Homo sapien
gtagtaaaacctattaccaatgtgaacactttg

SEQ ID NO: 657992 - DNA, 33 bp, Homo sapien
gtagtaaaacctattatcaatgtgaacactttg

SEQ ID NO: 657993 - DNA, 33 bp, Homo sapien
tactgtgccttggtaaaaaccaaacgtttgatt

SEQ ID NO: 657994 - DNA, 33 bp, Homo sapien
tactgtgccttggtaagaaccaaacgtttgatt

SEQ ID NO: 657995 - DNA, 33 bp, Homo sapien
atcagaaattaatccacgttcattccctataac

SEQ ID NO: 657996 - DNA, 33 bp, Homo sapien
atcagaaattaatccatgttcattccctataac

SEQ ID NO: 657997 - DNA, 33 bp, Homo sapien
actgagtttgtgaatacaaaggctgacatcata

SEQ ID NO: 657998 - DNA, 33 bp, Homo sapien
actgagtttgtgaatataaaggctgacatcata

SEQ ID NO: 657999 - DNA, 33 bp, Homo sapien
tggctcttcatctatcaaatgagaaaaatacca

SEQ ID NO: 658000 - DNA, 33 bp, Homo sapien
tggctcttcatctatcgaatgagaaaaatacca

SEQ ID NO: 658001 - DNA, 33 bp, Homo sapien
tgtgtttttttaattagcagggtctctctctgt

SEQ ID NO: 658002 - DNA, 33 bp, Homo sapien
tgtgtttttttaattatcagggtctctctctgt

SEQ ID NO: 658003 - DNA, 33 bp, Homo sapien
ggcaatgtccataaggaaaccctttctgaatat

SEQ ID NO: 658004 - DNA, 33 bp, Homo sapien
ggcaatgtccataagggaaccctttctgaatat

SEQ ID NO: 658005 - DNA, 33 bp, Homo sapien
ttttctgtttcatatcacagtaggaaaactgta

SEQ ID NO: 658006 - DNA, 33 bp, Homo sapien
ttttctgtttcatatcccagtaggaaaactgta

SEQ ID NO: 658007 - DNA, 33 bp, Homo sapien
aactaaaatcaagtgacctgtgtaaaacctttg

SEQ ID NO: 658008 - DNA, 33 bp, Homo sapien
aactaaaatcaagtgatctgtgtaaaacctttg

SEQ ID NO: 658009 - DNA, 33 bp, Homo sapien
atcaggaagctctttcacagataacttcttttt

SEQ ID NO: 658010 - DNA, 33 bp, Homo sapien
atcaggaagctctttcgcagataacttcttttt

SEQ ID NO: 658011 - DNA, 33 bp, Homo sapien
ctgtcatgtctctaaccgtagaagctcaagcaa

SEQ ID NO: 658012 - DNA, 33 bp, Homo sapien
ctgtcatgtctctaactgtagaagctcaagcaa

SEQ ID NO: 658013 - DNA, 33 bp, Homo sapien
catgagcagaaaatgacatatgtttgttcaaat

SEQ ID NO: 658014 - DNA, 33 bp, Homo sapien
catgagcagaaaatgatatatgtttgttcaaat

SEQ ID NO: 658015 - DNA, 33 bp, Homo sapien
ttgctctatttggtagaaaggctagaaagagag

SEQ ID NO: 658016 - DNA, 33 bp, Homo sapien
ttgctctatttggtaggaaggctagaaagagag

SEQ ID NO: 658017 - DNA, 33 bp, Homo sapien
gcctttcaatgagaacaggcccttttatataaa

SEQ ID NO: 658018 - DNA, 33 bp, Homo sapien
gcctttcaatgagaactggcccttttatataaa

SEQ ID NO: 658019 - DNA, 33 bp, Homo sapien
gctgcccctcaaccacccctgagagaagacaac

SEQ ID NO: 658020 - DNA, 33 bp, Homo sapien
gctgcccctcaaccactcctgagagaagacaac

SEQ ID NO: 658021 - DNA, 33 bp, Homo sapien
caggagcaaggttgacccatttgaggagcagca

SEQ ID NO: 658022 - DNA, 33 bp, Homo sapien
caggagcaaggttgactcatttgaggagcagca

SEQ ID NO: 658023 - DNA, 33 bp, Homo sapien
tgacattgtgagtaacaccttcctacgatatta

SEQ ID NO: 658024 - DNA, 33 bp, Homo sapien
tgacattgtgagtaactccttcctacgatatta

SEQ ID NO: 658025 - DNA, 33 bp, Homo sapien
atccgaatatcaccgaataatctccagggggtg

SEQ ID NO: 658026 - DNA, 33 bp, Homo sapien
atccgaatatcaccgagtaatctccagggggtg

SEQ ID NO: 658027 - DNA, 33 bp, Homo sapien
cgttttgggtcgtaaacgagctgccgagggagg

SEQ ID NO: 658028 - DNA, 33 bp, Homo sapien
cgttttgggtcgtaaatgagctgccgagggagg

SEQ ID NO: 658029 - DNA, 33 bp, Homo sapien
atacactgtggaaagacgcagggagccctgccc

SEQ ID NO: 658030 - DNA, 33 bp, Homo sapien
atacactgtggaaagatgcagggagccctgccc

SEQ ID NO: 658031 - DNA, 33 bp, Homo sapien
tcacttccatcgcatcaactggaaatcaagtca

SEQ ID NO: 658032 - DNA, 33 bp, Homo sapien
tcacttccatcgcatccactggaaatcaagtca

SEQ ID NO: 658033 - DNA, 33 bp, Homo sapien; identical to SEQ ID NO: 658031

SEQ ID NO: 658034 - DNA, 33 bp, Homo sapien; identical to SEQ ID NO: 658032

SEQ ID NO: 658035 - DNA, 33 bp, Homo sapien
gacagcaaaagtcaaaatgtatgttaatgattg

SEQ ID NO: 658036 - DNA, 33 bp, Homo sapien
gacagcaaaagtcaaagtgtatgttaatgattg

SEQ ID NO: 658037 - DNA, 33 bp, Homo sapien
acagcaatggatgttgaaagcattataaggcaa

SEQ ID NO: 658038 - DNA, 33 bp, Homo sapien
acagcaatggatgttgcaagcattataaggcaa

SEQ ID NO: 658039 - DNA, 33 bp, Homo sapien
gaactccagccggcagacaagtagcgcgcatag

SEQ ID NO: 658040 - DNA, 33 bp, Homo sapien
gaactccagccggcaggcaagtagcgcgcatag

SEQ ID NO: 658041 - DNA, 33 bp, Homo sapien
ggacctttcacataaacggaatcatgtaatata

SEQ ID NO: 658042 - DNA, 33 bp, Homo sapien
ggacctttcacataaatggaatcatgtaatata

SEQ ID NO: 658043 - DNA, 33 bp, Homo sapien
gttactgcatcagaacccaaatcatcctgacca

SEQ ID NO: 658044 - DNA, 33 bp, Homo sapien
gttactgcatcagaactcaaatcatcctgacca

SEQ ID NO: 658045 - DNA, 33 bp, Homo sapien; identical to SEQ ID NO: 658043

SEQ ID NO: 658046 - DNA, 33 bp, Homo sapien; identical to SEQ ID NO: 658044

SEQ ID NO: 658047 - DNA, 33 bp, Homo sapien
gcacaacctgcgcccaagtaaatgccaaacaaa

SEQ ID NO: 658048 - DNA, 33 bp, Homo sapien
gcacaacctgcgcccacgtaaatgccaaacaaa

SEQ ID NO: 658049 - DNA, 33 bp, Homo sapien
aggaaggcacggaggacgtaactggcaaaaaca

SEQ ID NO: 658050 - DNA, 33 bp, Homo sapien
aggaaggcacggaggatgtaactggcaaaaaca

SEQ ID NO: 658051 - DNA, 33 bp, Homo sapien; identical to SEQ ID NO: 658049

SEQ ID NO: 658052 - DNA, 33 bp, Homo sapien; identical to SEQ ID NO: 658050

SEQ ID NO: 658053 - DNA, 33 bp, Homo sapien
tttttacttttgaaggccccactccacaccata

SEQ ID NO: 658054 - DNA, 33 bp, Homo sapien
tttttacttttgaaggtcccactccacaccata

SEQ ID NO: 658055 - DNA, 33 bp, Homo sapien
ttcattaaaatcaacccccattacaggcatatc

SEQ ID NO: 658056 - DNA, 33 bp, Homo sapien
ttcattaaaatcaacctccattacaggcatatc

SEQ ID NO: 658057 - DNA, 33 bp, Homo sapien
aataatgacatcctcacgggaagagaagaagag

SEQ ID NO: 658058 - DNA, 33 bp, Homo sapien
aataatgacatcctcatgggaagagaagaagag

SEQ ID NO: 658059 - DNA, 33 bp, Homo sapien
gactgatgtctccttcgctctacaggcatctga

SEQ ID NO: 658060 - DNA, 33 bp, Homo sapien
gactgatgtctccttctctctacaggcatctga

SEQ ID NO: 658061 - DNA, 33 bp, Homo sapien
gtgggtttgaatcagtaaaacgattgtcatgct

SEQ ID NO: 658062 - DNA, 33 bp, Homo sapien
gtgggtttgaatcagttaaacgattgtcatgct

SEQ ID NO: 658063 - DNA, 33 bp, Homo sapien; identical to SEQ ID NO: 658061

SEQ ID NO: 658064 - DNA, 33 bp, Homo sapien; identical to SEQ ID NO: 658062

SEQ ID NO: 658065 - DNA, 33 bp, Homo sapien
gtaatcaaatggtttgcaaattgtacttattta

SEQ ID NO: 658066 - DNA, 33 bp, Homo sapien
gtaatcaaatggtttgtaaattgtacttattta

SEQ ID NO: 658067 - DNA, 33 bp, Homo sapien
agggcaagggaggaaaggatgttattggagcca

SEQ ID NO: 658068 - DNA, 33 bp, Homo sapien
agggcaagggaggaaatgatgttattggagcca

SEQ ID NO: 658069 - DNA, 33 bp, Homo sapien
tttcccaactcccaaactgagcttcttgccttg

SEQ ID NO: 658070 - DNA, 33 bp, Homo sapien
tttcccaactcccaaagtgagcttcttgccttg

SEQ ID NO: 658071 - DNA, 33 bp, Homo sapien
cctgttgatcactttcacatgattgaaacactt

SEQ ID NO: 658072 - DNA, 33 bp, Homo sapien
cctgttgatcactttcgcatgattgaaacactt

SEQ ID NO: 658073 - DNA, 33 bp, Homo sapien
accccagcctgtaggcagatattttcagccaca

SEQ ID NO: 658074 - DNA, 33 bp, Homo sapien
accccagcctgtaggcggatattttcagccaca

SEQ ID NO: 658075 - DNA, 33 bp, Homo sapien
acaaccagtcatcttccctccttttgtccacca

SEQ ID NO: 658076 - DNA, 33 bp, Homo sapien
acaaccagtcatcttctctccttttgtccacca

SEQ ID NO: 658077 - DNA, 33 bp, Homo sapien
gagttgtcaatcaggaagggaaaatcacaaacg

SEQ ID NO: 658078 - DNA, 33 bp, Homo sapien
gagttgtcaatcaggacgggaaaatcacaaacg

SEQ ID NO: 658079 - DNA, 33 bp, Homo sapien
cattcacactgtaccactgaccaaccccacatt

SEQ ID NO: 658080 - DNA, 33 bp, Homo sapien
cattcacactgtaccattgaccaaccccacatt

SEQ ID NO: 658081 - DNA, 33 bp, Homo sapien
tttctctttcctttgcaaattcaacggcaagac

SEQ ID NO: 658082 - DNA, 33 bp, Homo sapien
tttctctttcctttgcgaattcaacggcaagac

SEQ ID NO: 658083 - DNA, 33 bp, Homo sapien
atatacagatgtcatgaaacccactagagaaaa

SEQ ID NO: 658084 - DNA, 33 bp, Homo sapien
atatacagatgtcatggaacccactagagaaaa

SEQ ID NO: 658085 - DNA, 33 bp, Homo sapien
gtgctattgaacctccactcatgtacacttact

SEQ ID NO: 658086 - DNA, 33 bp, Homo sapien
gtgctattgaacctccgctcatgtacacttact

SEQ ID NO: 658087 - DNA, 33 bp, Homo sapien
acctcacattaagtgacgcagtacataccactc

SEQ ID NO: 658088 - DNA, 33 bp, Homo sapien
acctcacattaagtgatgcagtacataccactc

SEQ ID NO: 658089 - DNA, 33 bp, Homo sapien
gaaccatcacttctgccaggtacagcaggattg

SEQ ID NO: 658090 - DNA, 33 bp, Homo sapien
gaaccatcacttctgcgaggtacagcaggattg

SEQ ID NO: 658091 - DNA, 33 bp, Homo sapien
tatgtatgggccaagcagaatagatcgcagcag

SEQ ID NO: 658092 - DNA, 33 bp, Homo sapien
tatgtatgggccaagccgaatagatcgcagcag

SEQ ID NO: 658093 - DNA, 33 bp, Homo sapien
caggattgggttggaccggaacagcagacctca

SEQ ID NO: 658094 - DNA, 33 bp, Homo sapien
caggattgggttggactggaacagcagacctca

SEQ ID NO: 658095 - DNA, 33 bp, Homo sapien
tcaacctcctagtacacctctgccctaaaggta

SEQ ID NO: 658096 - DNA, 33 bp, Homo sapien
tcaacctcctagtacatctctgccctaaaggta

SEQ ID NO: 658097 - DNA, 33 bp, Homo sapien
taaacaaagaagcaaaaaacacacctgattttg

SEQ ID NO: 658098 - DNA, 33 bp, Homo sapien
taaacaaagaagcaaacaacacacctgattttg

SEQ ID NO: 658099 - DNA, 33 bp, Homo sapien
tatcttcatgtacctgaaatttgtgatacaatg

SEQ ID NO: 658100 - DNA, 33 bp, Homo sapien
tatcttcatgtacctggaatttgtgatacaatg

SEQ ID NO: 658101 - DNA, 33 bp, Homo sapien
ccctgatctggacatcaacactggcacctctaa

SEQ ID NO: 658102 - DNA, 33 bp, Homo sapien
ccctgatctggacatcgacactggcacctctaa

SEQ ID NO: 658103 - DNA, 33 bp, Homo sapien
attctaatgtgatggacgggggagtcagccctg

SEQ ID NO: 658104 - DNA, 33 bp, Homo sapien
attctaatgtgatggatgggggagtcagccctg

SEQ ID NO: 658105 - DNA, 33 bp, Homo sapien
ttgccacagagtgtcactaagttaggaggccca

SEQ ID NO: 658106 - DNA, 33 bp, Homo sapien
ttgccacagagtgtcagtaagttaggaggccca

SEQ ID NO: 658107 - DNA, 33 bp, Homo sapien
ataaggcaaaaaggtaacctacagaactggaga

SEQ ID NO: 658108 - DNA, 33 bp, Homo sapien
ataaggcaaaaaggtatcctacagaactggaga

SEQ ID NO: 658109 - DNA, 33 bp, Homo sapien
caaaagtcaatgttgtaaagttatcaattctct

SEQ ID NO: 658110 - DNA, 33 bp, Homo sapien
caaaagtcaatgttgtgaagttatcaattctct

SEQ ID NO: 658111 - DNA, 33 bp, Homo sapien
agagggatttgtgtgcaaagatacaggtgaatg

SEQ ID NO: 658112 - DNA, 33 bp, Homo sapien
agagggatttgtgtgcgaagatacaggtgaatg

SEQ ID NO: 658113 - DNA, 33 bp, Homo sapien
ggaaatcaaggcagaacagtgtgactaaaaatc

SEQ ID NO: 658114 - DNA, 33 bp, Homo sapien
ggaaatcaaggcagaagagtgtgactaaaaatc

SEQ ID NO: 658115 - DNA, 33 bp, Homo sapien
tttcttcagctacaaaggtcagactggccctgc

SEQ ID NO: 658116 - DNA, 33 bp, Homo sapien
tttcttcagctacaaatgtcagactggccctgc

SEQ ID NO: 658117 - DNA, 33 bp, Homo sapien
taagctggcatcgaggaatcaaggggtcaatgg

SEQ ID NO: 658118 - DNA, 33 bp, Homo sapien
taagctggcatcgaggcatcaaggggtcaatgg

SEQ ID NO: 658119 - DNA, 33 bp, Homo sapien
ccactctcttgttatgacaaatcttgcccccca

SEQ ID NO: 658120 - DNA, 33 bp, Homo sapien
ccactctcttgttatggcaaatcttgcccccca

SEQ ID NO: 658121 - DNA, 33 bp, Homo sapien
attcctgcctgctccacgcattccagtgaggag

SEQ ID NO: 658122 - DNA, 33 bp, Homo sapien
attcctgcctgctccatgcattccagtgaggag

SEQ ID NO: 658123 - DNA, 33 bp, Homo sapien
cagcttaaaacagcacgcattgattagctcata

SEQ ID NO: 658124 - DNA, 33 bp, Homo sapien
cagcttaaaacagcactcattgattagctcata

SEQ ID NO: 658125 - DNA, 33 bp, Homo sapien
agggtacagtccaagacggaaaaatagtctgct

SEQ ID NO: 658126 - DNA, 33 bp, Homo sapien
agggtacagtccaagatggaaaaatagtctgct

SEQ ID NO: 658127 - DNA, 33 bp, Homo sapien
ttcaagaggactgcccaacaacctttaagctca

SEQ ID NO: 658128 - DNA, 33 bp, Homo sapien
ttcaagaggactgcccgacaacctttaagctca

SEQ ID NO: 658129 - DNA, 33 bp, Homo sapien
agcgccatgggaatcaagaacttggccctacaa

SEQ ID NO: 658130 - DNA, 33 bp, Homo sapien
agcgccatgggaatcaggaacttggccctacaa

SEQ ID NO: 658131 - DNA, 33 bp, Homo sapien
ggagagatctattatccaaggccatttcaaaag

SEQ ID NO: 658132 - DNA, 33 bp, Homo sapien
ggagagatctattatctaaggccatttcaaaag

SEQ ID NO: 658133 - DNA, 33 bp, Homo sapien
catttgaacttggcctcacagatctctatgaag

SEQ ID NO: 658134 - DNA, 33 bp, Homo sapien
catttgaacttggccttacagatctctatgaag

SEQ ID NO: 658135 - DNA, 33 bp, Homo sapien
gagacaccgtgtcagacggaagacagctctgcc

SEQ ID NO: 658136 - DNA, 33 bp, Homo sapien
gagacaccgtgtcagatggaagacagctctgcc

SEQ ID NO: 658137 - DNA, 33 bp, Homo sapien
tgaacctagaccgtgactaaaataaatctctga

SEQ ID NO: 658138 - DNA, 33 bp, Homo sapien
tgaacctagaccgtgagtaaaataaatctctga

SEQ ID NO: 658139 - DNA, 33 bp, Homo sapien
gcattaaaccaccccccacactgagtggcttgg

SEQ ID NO: 658140 - DNA, 33 bp, Homo sapien
gcattaaaccacccccgacactgagtggcttgg

SEQ ID NO: 658141 - DNA, 33 bp, Homo sapien
ccaactgttttcacagacgtggaagaccacatg

SEQ ID NO: 658142 - DNA, 33 bp, Homo sapien
ccaactgttttcacaggcgtggaagaccacatg

SEQ ID NO: 658143 - DNA, 33 bp, Homo sapien
gtgggagagccatctgcagcgtggtgacaccca

SEQ ID NO: 658144 - DNA, 33 bp, Homo sapien
gtgggagagccatctgtagcgtggtgacaccca

SEQ ID NO: 658145 - DNA, 33 bp, Homo sapien
tttgatgtgggtctcaccgtgcttttaacggag

SEQ ID NO: 658146 - DNA, 33 bp, Homo sapien
tttgatgtgggtctcagcgtgcttttaacggag

SEQ ID NO: 658147 - DNA, 33 bp, Homo sapien
tctgtcacctgccaaccggcggccccatttccc

SEQ ID NO: 658148 - DNA, 33 bp, Homo sapien
tctgtcacctgccaactggcggccccatttccc

SEQ ID NO: 658149 - DNA, 33 bp, Homo sapien
tttccataaactagacaactaaacacaacaaaa

SEQ ID NO: 658150 - DNA, 33 bp, Homo sapien
tttccataaactagaccactaaacacaacaaaa

SEQ ID NO: 658151 - DNA, 33 bp, Homo sapien
cccttatgtggcttccaagaccagaagtcctgg

SEQ ID NO: 658152 - DNA, 33 bp, Homo sapien
cccttatgtggcttccgagaccagaagtcctgg

SEQ ID NO: 658153 - DNA, 33 bp, Homo sapien
gtgaggccaggtgtcaatcctcaagaagagaag

SEQ ID NO: 658154 - DNA, 33 bp, Homo sapien
gtgaggccaggtgtcagtcctcaagaagagaag

SEQ ID NO: 658155 - DNA, 33 bp, Homo sapien
agggctgcaggacccaagcccaggtgaatcctc

SEQ ID NO: 658156 - DNA, 33 bp, Homo sapien
agggctgcaggacccaggcccaggtgaatcctc

SEQ ID NO: 658157 - DNA, 33 bp, Homo sapien
aaagcccactaggaatcagaggcagcaaggcta

SEQ ID NO: 658158 - DNA, 33 bp, Homo sapien
aaagcccactaggaattagaggcagcaaggcta

SEQ ID NO: 658159 - DNA, 33 bp, Homo sapien
actgcatggaaagcaccgcgaggctgcacctcg

SEQ ID NO: 658160 - DNA, 33 bp, Homo sapien
actgcatggaaagcactgcgaggctgcacctcg

SEQ ID NO: 658161 - DNA, 33 bp, Homo sapien
aggaggaagtcaaagcaaccagcttaggtgtga

SEQ ID NO: 658162 - DNA, 33 bp, Homo sapien
aggaggaagtcaaagcgaccagcttaggtgtga

SEQ ID NO: 658163 - DNA, 33 bp, Homo sapien
ctgcatccacacggaactgaactctgtcaacac

SEQ ID NO: 658164 - DNA, 33 bp, Homo sapien
ctgcatccacacggaattgaactctgtcaacac

SEQ ID NO: 658165 - DNA, 33 bp, Homo sapien
gaagcgagggaagatccaggaaaggagagaggg

SEQ ID NO: 658166 - DNA, 33 bp, Homo sapien
gaagcgagggaagatcgaggaaaggagagaggg

SEQ ID NO: 658167 - DNA, 33 bp, Homo sapien
ctgagcacctggaagaagccgatgtgaggagga

SEQ ID NO: 658168 - DNA, 33 bp, Homo sapien
ctgagcacctggaagaggccgatgtgaggagga

SEQ ID NO: 658169 - DNA, 33 bp, Homo sapien
aacaagtacagaaggcaaagaggagaaacagga

SEQ ID NO: 658170 - DNA, 33 bp, Homo sapien
aacaagtacagaaggctaagaggagaaacagga

SEQ ID NO: 658171 - DNA, 33 bp, Homo sapien
taggggtgcgaagccaagttatggcgtggtccc

SEQ ID NO: 658172 - DNA, 33 bp, Homo sapien
taggggtgcgaagccaggttatggcgtggtccc

SEQ ID NO: 658173 - DNA, 33 bp, Homo sapien
ctcggctcatctggccacaccctctcttctccc

SEQ ID NO: 658174 - DNA, 33 bp, Homo sapien
ctcggctcatctggccgcaccctctcttctccc

SEQ ID NO: 658175 - DNA, 33 bp, Homo sapien
gtctttcattaactcccctcaaatgactcattt

SEQ ID NO: 658176 - DNA, 33 bp, Homo sapien
gtctttcattaactcctctcaaatgactcattt

SEQ ID NO: 658177 - DNA, 33 bp, Homo sapien; identical to SEQ ID NO: 658175

SEQ ID NO: 658178 - DNA, 33 bp, Homo sapien; identical to SEQ ID NO: 658176

SEQ ID NO: 658179 - DNA, 33 bp, Homo sapien
tcacgtgtgtatctaccataggcgtgctttggc

SEQ ID NO: 658180 - DNA, 33 bp, Homo sapien
tcacgtgtgtatctactataggcgtgctttggc

SEQ ID NO: 658181 - DNA, 33 bp, Homo sapien
ggggctgcacggtgaacagctagaggaggactt

SEQ ID NO: 658182 - DNA, 33 bp, Homo sapien
ggggctgcacggtgaagagctagaggaggactt

SEQ ID NO: 658183 - DNA, 33 bp, Homo sapien
gtacacatcggcaatacgtctaagcatctcatg

SEQ ID NO: 658184 - DNA, 33 bp, Homo sapien
gtacacatcggcaatatgtctaagcatctcatg

SEQ ID NO: 658185 - DNA, 33 bp, Homo sapien
accagaacaatgtatacgcgttaaatttaatct

SEQ ID NO: 658186 - DNA, 33 bp, Homo sapien
accagaacaatgtatatgcgttaaatttaatct

SEQ ID NO: 658187 - DNA, 33 bp, Homo sapien
agcaaacactgatggaacaccttttataccaga

SEQ ID NO: 658188 - DNA, 33 bp, Homo sapien
agcaaacactgatggagcaccttttataccaga

SEQ ID NO: 658189 - DNA, 33 bp, Homo sapien
ttccagctttaacagacgctgccagttttccag

SEQ ID NO: 658190 - DNA, 33 bp, Homo sapien
ttccagctttaacagatgctgccagttttccag

SEQ ID NO: 658191 - DNA, 33 bp, Homo sapien
agtgggtatgagtgaacgatttacttagtacat

SEQ ID NO: 658192 - DNA, 33 bp, Homo sapien
agtgggtatgagtgaatgatttacttagtacat

SEQ ID NO: 658193 - DNA, 33 bp, Homo sapien
ccgttacagaaatcaactcctggatacatcata

SEQ ID NO: 658194 - DNA, 33 bp, Homo sapien
ccgttacagaaatcaattcctggatacatcata

SEQ ID NO: 658195 - DNA, 33 bp, Homo sapien
ttgttgggtgttttgaaagtgtcaggtttgtat

SEQ ID NO: 658196 - DNA, 33 bp, Homo sapien
ttgttgggtgttttgacagtgtcaggtttgtat

SEQ ID NO: 658197 - DNA, 33 bp, Homo sapien
gggacagagcttccaacaaggcccagttgctcc

SEQ ID NO: 658198 - DNA, 33 bp, Homo sapien
gggacagagcttccaagaaggcccagttgctcc

SEQ ID NO: 658199 - DNA, 33 bp, Homo sapien
gctgataagccatctcacatcccatgactgggc

SEQ ID NO: 658200 - DNA, 33 bp, Homo sapien
gctgataagccatctcgcatcccatgactgggc

SEQ ID NO: 658201 - DNA, 33 bp, Homo sapien
aactcacagctcaaacagcctctcaagtttcct

SEQ ID NO: 658202 - DNA, 33 bp, Homo sapien
aactcacagctcaaacggcctctcaagtttcct

SEQ ID NO: 658203 - DNA, 33 bp, Homo sapien
tacttataaaactgcaactgagtatcaagggaa

SEQ ID NO: 658204 - DNA, 33 bp, Homo sapien
tacttataaaactgcacctgagtatcaagggaa

SEQ ID NO: 658205 - DNA, 33 bp, Homo sapien
caaaaatgaactccaaataaatgaactcctttc

SEQ ID NO: 658206 - DNA, 33 bp, Homo sapien
caaaaatgaactccaagtaaatgaactcctttc

SEQ ID NO: 658207 - DNA, 33 bp, Homo sapien
ctttgtttccataacacgctgaaattatgaagt

SEQ ID NO: 658208 - DNA, 33 bp, Homo sapien
ctttgtttccataacatgctgaaattatgaagt

SEQ ID NO: 658209 - DNA, 33 bp, Homo sapien
tgatttatcttaactacgtgacaatctcaggta

SEQ ID NO: 658210 - DNA, 33 bp, Homo sapien
tgatttatcttaactatgtgacaatctcaggta

SEQ ID NO: 658211 - DNA, 33 bp, Homo sapien
gtagcagagtgcaacagcttagatggagattgg

SEQ ID NO: 658212 - DNA, 33 bp, Homo sapien
gtagcagagtgcaacatcttagatggagattgg

SEQ ID NO: 658213 - DNA, 33 bp, Homo sapien
aagctacataaaatgtaacaagcctaaatttga

SEQ ID NO: 658214 - DNA, 33 bp, Homo sapien
aagctacataaaatgttacaagcctaaatttga

SEQ ID NO: 658215 - DNA, 33 bp, Homo sapien
ctctcgacctcattaaaaagcatttcattagaa

SEQ ID NO: 658216 - DNA, 33 bp, Homo sapien
ctctcgacctcattaataagcatttcattagaa

SEQ ID NO: 658217 - DNA, 33 bp, Homo sapien
taaagatgggaattatcagctatatgaaatgga

SEQ ID NO: 658218 - DNA, 33 bp, Homo sapien
taaagatgggaattatgagctatatgaaatgga

SEQ ID NO: 658219 - DNA, 33 bp, Homo sapien
catgcagtcctggtgtaacaatcaattgaggca

SEQ ID NO: 658220 - DNA, 33 bp, Homo sapien
catgcagtcctggtgtgacaatcaattgaggca

SEQ ID NO: 658221 - DNA, 33 bp, Homo sapien
aggggactgtctgcacactggctcttatgggtt

SEQ ID NO: 658222 - DNA, 33 bp, Homo sapien
aggggactgtctgcacgctggctcttatgggtt

SEQ ID NO: 658223 - DNA, 33 bp, Homo sapien
tctcatggtgttcacaactgcacatgggaaaca

SEQ ID NO: 658224 - DNA, 33 bp, Homo sapien
tctcatggtgttcacagctgcacatgggaaaca

SEQ ID NO: 658225 - DNA, 33 bp, Homo sapien
ggctactccatggtgccactgggatacacagcc

SEQ ID NO: 658226 - DNA, 33 bp, Homo sapien
ggctactccatggtgctactgggatacacagcc

SEQ ID NO: 658227 - DNA, 33 bp, Homo sapien
gtgcatatcactggtaatacacaagttgatttt

SEQ ID NO: 658228 - DNA, 33 bp, Homo sapien
gtgcatatcactggtagtacacaagttgatttt

SEQ ID NO: 658229 - DNA, 33 bp, Homo sapien
ggagacggagcttcccagccctcgtgactcagt

SEQ ID NO: 658230 - DNA, 33 bp, Homo sapien
ggagacggagcttcccggccctcgtgactcagt

SEQ ID NO: 658231 - DNA, 33 bp, Homo sapien
gacaccttattcctatcagtatccaatcagtat

SEQ ID NO: 658232 - DNA, 33 bp, Homo sapien
gacaccttattcctatgagtatccaatcagtat

SEQ ID NO: 658233 - DNA, 33 bp, Homo sapien
gcactccacgccaaaaagttaaaagaggtctgc

SEQ ID NO: 658234 - DNA, 33 bp, Homo sapien
gcactccacgccaaaacgttaaaagaggtctgc

SEQ ID NO: 658235 - DNA, 33 bp, Homo sapien
ttgtgtacttacattacctttcaggaaaaagaa

SEQ ID NO: 658236 - DNA, 33 bp, Homo sapien
ttgtgtacttacattatctttcaggaaaaagaa

SEQ ID NO: 658237 - DNA, 33 bp, Homo sapien
tcctcattggttcaggccagattttattaccca

SEQ ID NO: 658238 - DNA, 33 bp, Homo sapien
tcctcattggttcaggtcagattttattaccca

SEQ ID NO: 658239 - DNA, 33 bp, Homo sapien
gcatttaggaattgcaagtgaagtgctgtaaac

SEQ ID NO: 658240 - DNA, 33 bp, Homo sapien
gcatttaggaattgcaggtgaagtgctgtaaac

SEQ ID NO: 658241 - DNA, 33 bp, Homo sapien
agatggagattgaggaaagagagtaactgttct

SEQ ID NO: 658242 - DNA, 33 bp, Homo sapien
agatggagattgaggagagagagtaactgttct

SEQ ID NO: 658243 - DNA, 33 bp, Homo sapien
aattgtttcttttggacgtctgagaatgaaaac

SEQ ID NO: 658244 - DNA, 33 bp, Homo sapien
aattgtttcttttggatgtctgagaatgaaaac

SEQ ID NO: 658245 - DNA, 33 bp, Homo sapien
gaggagcacaattcaacgattacaccctctgtg

SEQ ID NO: 658246 - DNA, 33 bp, Homo sapien
gaggagcacaattcaatgattacaccctctgtg

SEQ ID NO: 658247 - DNA, 33 bp, Homo sapien
acatgtaccttttctgcaccaatcagctgctga

SEQ ID NO: 658248 - DNA, 33 bp, Homo sapien
acatgtaccttttctggaccaatcagctgctga

SEQ ID NO: 658249 - DNA, 33 bp, Homo sapien
gtccccctatctggtagccatataaaccctaaa

SEQ ID NO: 658250 - DNA, 33 bp, Homo sapien
gtccccctatctggtatccatataaaccctaaa

SEQ ID NO: 658251 - DNA, 33 bp, Homo sapien
ctcgatagatggatgacgaaggcccaacatagg

SEQ ID NO: 658252 - DNA, 33 bp, Homo sapien
ctcgatagatggatgatgaaggcccaacatagg

SEQ ID NO: 658253 - DNA, 33 bp, Homo sapien
tgcagggttcggtggacgagagagccaagcggt

SEQ ID NO: 658254 - DNA, 33 bp, Homo sapien
tgcagggttcggtggatgagagagccaagcggt

SEQ ID NO: 658255 - DNA, 33 bp, Homo sapien
acacaggatctcttcaagggggcgttatgaaca

SEQ ID NO: 658256 - DNA, 33 bp, Homo sapien
acacaggatctcttcacgggggcgttatgaaca

SEQ ID NO: 658257 - DNA, 33 bp, Homo sapien
taaactaaacaaggaaacacatacaggacctaa

SEQ ID NO: 658258 - DNA, 33 bp, Homo sapien
taaactaaacaaggaatcacatacaggacctaa

SEQ ID NO: 658259 - DNA, 33 bp, Homo sapien
tgggagcttgcaaactgaaggtttagagggagc

SEQ ID NO: 658260 - DNA, 33 bp, Homo sapien
tgggagcttgcaaacttaaggtttagagggagc

SEQ ID NO: 658261 - DNA, 33 bp, Homo sapien
gcagagtcagaggaaactgcccgtcctgctccg

SEQ ID NO: 658262 - DNA, 33 bp, Homo sapien
gcagagtcagaggaaattgcccgtcctgctccg

SEQ ID NO: 658263 - DNA, 33 bp, Homo sapien
ttattgttattgtttccctacattggtttgcgc

SEQ ID NO: 658264 - DNA, 33 bp, Homo sapien
ttattgttattgtttctctacattggtttgcgc

SEQ ID NO: 658265 - DNA, 33 bp, Homo sapien
taccatatagtttagacgtgtagtaggctaaat

SEQ ID NO: 658266 - DNA, 33 bp, Homo sapien
taccatatagtttagatgtgtagtaggctaaat

SEQ ID NO: 658267 - DNA, 33 bp, Homo sapien
gtctaaaattatctcaaaatgggacactttcga

SEQ ID NO: 658268 - DNA, 33 bp, Homo sapien
gtctaaaattatctcagaatgggacactttcga

SEQ ID NO: 658269 - DNA, 33 bp, Homo sapien
agaaaggagacagagaaaggtgacagccaaatg

SEQ ID NO: 658270 - DNA, 33 bp, Homo sapien
agaaaggagacagagagaggtgacagccaaatg

SEQ ID NO: 658271 - DNA, 33 bp, Homo sapien
ataattaagccatacaacagttgatagcctgtg

SEQ ID NO: 658272 - DNA, 33 bp, Homo sapien
ataattaagccatacaccagttgatagcctgtg

SEQ ID NO: 658273 - DNA, 33 bp, Homo sapien
atgcatgcacttatacgcacatgcatatagata

SEQ ID NO: 658274 - DNA, 33 bp, Homo sapien
atgcatgcacttatactcacatgcatatagata

SEQ ID NO: 658275 - DNA, 33 bp, Homo sapien
gaagaaaggagatgaacatcccctcaaaataat

SEQ ID NO: 658276 - DNA, 33 bp, Homo sapien
gaagaaaggagatgaatatcccctcaaaataat

SEQ ID NO: 658277 - DNA, 33 bp, Homo sapien
atgtgtatgttaaagaaaacagccatttcatgc

SEQ ID NO: 658278 - DNA, 33 bp, Homo sapien
atgtgtatgttaaagacaacagccatttcatgc

SEQ ID NO: 658279 - DNA, 33 bp, Homo sapien
gcacagctcagcaaacaaatactgggctccacc

SEQ ID NO: 658280 - DNA, 33 bp, Homo sapien
gcacagctcagcaaacgaatactgggctccacc

SEQ ID NO: 658281 - DNA, 33 bp, Homo sapien
cagggaaaacagcaacgagctacctccacatgc

SEQ ID NO: 658282 - DNA, 33 bp, Homo sapien
cagggaaaacagcaactagctacctccacatgc

SEQ ID NO: 658283 - DNA, 33 bp, Homo sapien
caccgaagagcaaatgaaggcaagtgacagccc

SEQ ID NO: 658284 - DNA, 33 bp, Homo sapien
caccgaagagcaaatgcaggcaagtgacagccc

SEQ ID NO: 658285 - DNA, 33 bp, Homo sapien
gtaactctttcccccacgcttggatataatctt

SEQ ID NO: 658286 - DNA, 33 bp, Homo sapien
gtaactctttcccccatgcttggatataatctt

SEQ ID NO: 658287 - DNA, 33 bp, Homo sapien
gagccaaaaggccctacgtaggagccaagatgc

SEQ ID NO: 658288 - DNA, 33 bp, Homo sapien
gagccaaaaggccctatgtaggagccaagatgc

SEQ ID NO: 658289 - DNA, 33 bp, Homo sapien
aggagctacttgccaacggtcgactatggccag

SEQ ID NO: 658290 - DNA, 33 bp, Homo sapien
aggagctacttgccaatggtcgactatggccag

SEQ ID NO: 658291 - DNA, 33 bp, Homo sapien
gatacaaactcatacaaggcagtttctgaggag

SEQ ID NO: 658292 - DNA, 33 bp, Homo sapien
gatacaaactcatacacggcagtttctgaggag

SEQ ID NO: 658293 - DNA, 33 bp, Homo sapien
tgtgggccaaatacaccgcttttctttatcatt

SEQ ID NO: 658294 - DNA, 33 bp, Homo sapien
tgtgggccaaatacactgcttttctttatcatt

SEQ ID NO: 658295 - DNA, 33 bp, Homo sapien
catcatctgtgagcccaagggtgagccctcact

SEQ ID NO: 658296 - DNA, 33 bp, Homo sapien
catcatctgtgagcccgagggtgagccctcact

SEQ ID NO: 658297 - DNA, 33 bp, Homo sapien
actaagctggatgtacacagggtccggcaatcc

SEQ ID NO: 658298 - DNA, 33 bp, Homo sapien
actaagctggatgtacccagggtccggcaatcc

SEQ ID NO: 658299 - DNA, 33 bp, Homo sapien
tacaacctaaatgatacctgaaactagtgtaaa

SEQ ID NO: 658300 - DNA, 33 bp, Homo sapien
tacaacctaaatgatatctgaaactagtgtaaa

SEQ ID NO: 658301 - DNA, 33 bp, Homo sapien
tgctgcaggaaagaaacacaagctgctctctca

SEQ ID NO: 658302 - DNA, 33 bp, Homo sapien
tgctgcaggaaagaaatacaagctgctctctca

SEQ ID NO: 658303 - DNA, 33 bp, Homo sapien
gagcccaaagccatcgcaggcgcgttctggcag

SEQ ID NO: 658304 - DNA, 33 bp, Homo sapien
gagcccaaagccatcgtaggcgcgttctggcag

SEQ ID NO: 658305 - DNA, 33 bp, Homo sapien
tgaatatttttaagccaatcaatgtaatacctt

SEQ ID NO: 658306 - DNA, 33 bp, Homo sapien
tgaatatttttaagccgatcaatgtaatacctt

SEQ ID NO: 658307 - DNA, 33 bp, Homo sapien
ctggcagttcctccaccagctgcttgtgtccca

SEQ ID NO: 658308 - DNA, 33 bp, Homo sapien
ctggcagttcctccactagctgcttgtgtccca

SEQ ID NO: 658309 - DNA, 33 bp, Homo sapien
ccctggagaaggacgccgccttgttcgacgagt

SEQ ID NO: 658310 - DNA, 33 bp, Homo sapien
ccctggagaaggacgctgccttgttcgacgagt

SEQ ID NO: 658311 - DNA, 33 bp, Homo sapien
ggagagttcgacctgcaaagagatggcagggtc

SEQ ID NO: 658312 - DNA, 33 bp, Homo sapien
ggagagttcgacctgcgaagagatggcagggtc

SEQ ID NO: 658313 - DNA, 33 bp, Homo sapien
gcactgaacacaatccaacatccactcataata

SEQ ID NO: 658314 - DNA, 33 bp, Homo sapien
gcactgaacacaatccgacatccactcataata

SEQ ID NO: 658315 - DNA, 33 bp, Homo sapien
tgtgagagtgcagcaaaggtcctcgtctcacct

SEQ ID NO: 658316 - DNA, 33 bp, Homo sapien
tgtgagagtgcagcaacggtcctcgtctcacct

SEQ ID NO: 658317 - DNA, 33 bp, Homo sapien
gggaagctggtgccaccggcagaacaggagcaa

SEQ ID NO: 658318 - DNA, 33 bp, Homo sapien
gggaagctggtgccactggcagaacaggagcaa

SEQ ID NO: 658319 - DNA, 33 bp, Homo sapien
gctccagggatctggaaaaggaactcaagctct

SEQ ID NO: 658320 - DNA, 33 bp, Homo sapien
gctccagggatctggacaaggaactcaagctct

SEQ ID NO: 658321 - DNA, 33 bp, Homo sapien
atctagggatgcttaaagacatgccaaagcaaa

SEQ ID NO: 658322 - DNA, 33 bp, Homo sapien
atctagggatgcttaaggacatgccaaagcaaa

SEQ ID NO: 658323 - DNA, 33 bp, Homo sapien
gtattctgaacagaaaagtaaaaccaagagcac

SEQ ID NO: 658324 - DNA, 33 bp, Homo sapien
gtattctgaacagaaacgtaaaaccaagagcac

SEQ ID NO: 658325 - DNA, 33 bp, Homo sapien
agcaactactatggccacctaagcaaatgccgg

SEQ ID NO: 658326 - DNA, 33 bp, Homo sapien
agcaactactatggccgcctaagcaaatgccgg

SEQ ID NO: 658327 - DNA, 33 bp, Homo sapien
actggtcatgagctgacaagcatagaggcaaag

SEQ ID NO: 658328 - DNA, 33 bp, Homo sapien
actggtcatgagctgagaagcatagaggcaaag

SEQ ID NO: 658329 - DNA, 33 bp, Homo sapien
cattacaaaacccccaatcttcaaggaaaggag

SEQ ID NO: 658330 - DNA, 33 bp, Homo sapien
cattacaaaacccccagtcttcaaggaaaggag

SEQ ID NO: 658331 - DNA, 33 bp, Homo sapien
gtaagagatctgaaaaaaaaaggaatacactct

SEQ ID NO: 658332 - DNA, 33 bp, Homo sapien
gtaagagatctgaaaacaaaaggaatacactct

SEQ ID NO: 658333 - DNA, 33 bp, Homo sapien
cccagatggtttttgacgagcctgacctggaaa

SEQ ID NO: 658334 - DNA, 33 bp, Homo sapien
cccagatggtttttgatgagcctgacctggaaa

SEQ ID NO: 658335 - DNA, 33 bp, Homo sapien
tcaagtgtttgtccgacgccccagacctactta

SEQ ID NO: 658336 - DNA, 33 bp, Homo sapien
tcaagtgtttgtccgaggccccagacctactta

SEQ ID NO: 658337 - DNA, 33 bp, Homo sapien
attcaaacgtgatctcaaaagtacctaccattt

SEQ ID NO: 658338 - DNA, 33 bp, Homo sapien
attcaaacgtgatctcgaaagtacctaccattt

SEQ ID NO: 658339 - DNA, 33 bp, Homo sapien
tgacttgagaatcagacgcagtttgactcatgg

SEQ ID NO: 658340 - DNA, 33 bp, Homo sapien
tgacttgagaatcagatgcagtttgactcatgg

SEQ ID NO: 658341 - DNA, 33 bp, Homo sapien
agctcaaatctgatacgaggttgtttcagatac

SEQ ID NO: 658342 - DNA, 33 bp, Homo sapien
agctcaaatctgatactaggttgtttcagatac

SEQ ID NO: 658343 - DNA, 33 bp, Homo sapien
gagaccggggtaagaactgcaacaacagaggaa

SEQ ID NO: 658344 - DNA, 33 bp, Homo sapien
gagaccggggtaagaagtgcaacaacagaggaa

SEQ ID NO: 658345 - DNA, 33 bp, Homo sapien
gacccactcaacgagaacaaaggttggttaaaa

SEQ ID NO: 658346 - DNA, 33 bp, Homo sapien
gacccactcaacgagagcaaaggttggttaaaa

SEQ ID NO: 658347 - DNA, 33 bp, Homo sapien
tgagtgttggttctgccagagggttgtgttttt

SEQ ID NO: 658348 - DNA, 33 bp, Homo sapien
tgagtgttggttctgctagagggttgtgttttt

SEQ ID NO: 658349 - DNA, 33 bp, Homo sapien
gaaagcccctcaaagcagctgaagcaggacggt

SEQ ID NO: 658350 - DNA, 33 bp, Homo sapien
gaaagcccctcaaagcggctgaagcaggacggt

SEQ ID NO: 658351 - DNA, 33 bp, Homo sapien
ctgaccaggagctgccaggacacaaagctttga

SEQ ID NO: 658352 - DNA, 33 bp, Homo sapien
ctgaccaggagctgccgggacacaaagctttga

SEQ ID NO: 658353 - DNA, 33 bp, Homo sapien
caaagcatattttgggaaacagaagatttgaac

SEQ ID NO: 658354 - DNA, 33 bp, Homo sapien
caaagcatattttggggaacagaagatttgaac

SEQ ID NO: 658355 - DNA, 33 bp, Homo sapien
aacaaaatttgagaaacgatgcagtgaactatt

SEQ ID NO: 658356 - DNA, 33 bp, Homo sapien
aacaaaatttgagaaatgatgcagtgaactatt

SEQ ID NO: 658357 - DNA, 33 bp, Homo sapien
tcaattaatttactgcccagagcagagtcctgt

SEQ ID NO: 658358 - DNA, 33 bp, Homo sapien
tcaattaatttactgcgcagagcagagtcctgt

SEQ ID NO: 658359 - DNA, 33 bp, Homo sapien
cgtctccggtggaggggcatctcagcagcttca

SEQ ID NO: 658360 - DNA, 33 bp, Homo sapien
cgtctccggtggagggtcatctcagcagcttca

SEQ ID NO: 658361 - DNA, 33 bp, Homo sapien
aagtgagtggcggaaacaccacatggcagagag

SEQ ID NO: 658362 - DNA, 33 bp, Homo sapien
aagtgagtggcggaaataccacatggcagagag

SEQ ID NO: 658363 - DNA, 33 bp, Homo sapien
gtcattataaagcaaaatggtgatattaaatac

SEQ ID NO: 658364 - DNA, 33 bp, Homo sapien
gtcattataaagcaaagtggtgatattaaatac

SEQ ID NO: 658365 - DNA, 33 bp, Homo sapien
tcctgatgaccacggaacaatgggcactgcggc

SEQ ID NO: 658366 - DNA, 33 bp, Homo sapien
tcctgatgaccacggagcaatgggcactgcggc

SEQ ID NO: 658367 - DNA, 33 bp, Homo sapien
ggtgatcaggttgagacgaggtcatgaggatgc

SEQ ID NO: 658368 - DNA, 33 bp, Homo sapien
ggtgatcaggttgagatgaggtcatgaggatgc

SEQ ID NO: 658369 - DNA, 33 bp, Homo sapien
gtggcagtgccgacatcaatgttgttgcatacc

SEQ ID NO: 658370 - DNA, 33 bp, Homo sapien
gtggcagtgccgacatgaatgttgttgcatacc

SEQ ID NO: 658371 - DNA, 33 bp, Homo sapien
ccagcaggggtcctgaaggccaggcgtggctct

SEQ ID NO: 658372 - DNA, 33 bp, Homo sapien
ccagcaggggtcctgacggccaggcgtggctct

SEQ ID NO: 658373 - DNA, 33 bp, Homo sapien
gtcagaccttaccctccagtagtctcaatgctc

SEQ ID NO: 658374 - DNA, 33 bp, Homo sapien
gtcagaccttaccctctagtagtctcaatgctc

SEQ ID NO: 658375 - DNA, 33 bp, Homo sapien
ttgtcagctcaggggacgaaatgtggcacctgg

SEQ ID NO: 658376 - DNA, 33 bp, Homo sapien
ttgtcagctcaggggatgaaatgtggcacctgg

SEQ ID NO: 658377 - DNA, 33 bp, Homo sapien
gggagaggcgaaccacaaggaaggaccagggct

SEQ ID NO: 658378 - DNA, 33 bp, Homo sapien
gggagaggcgaaccacgaggaaggaccagggct

SEQ ID NO: 658379 - DNA, 33 bp, Homo sapien
tccagtccttgtctgacggtgtccaacagccca

SEQ ID NO: 658380 - DNA, 33 bp, Homo sapien
tccagtccttgtctgatggtgtccaacagccca

SEQ ID NO: 658381 - DNA, 33 bp, Homo sapien
gagaagagtctgactaaaactgcaaaaaaagcc

SEQ ID NO: 658382 - DNA, 33 bp, Homo sapien
gagaagagtctgactacaactgcaaaaaaagcc

SEQ ID NO: 658383 - DNA, 33 bp, Homo sapien
caaaggctgtaacataagtgtaattgaactacc

SEQ ID NO: 658384 - DNA, 33 bp, Homo sapien
caaaggctgtaacatatgtgtaattgaactacc

SEQ ID NO: 658385 - DNA, 33 bp, Homo sapien
tactttcagcaaagtaccaaactagctaaggct

SEQ ID NO: 658386 - DNA, 33 bp, Homo sapien
tactttcagcaaagtatcaaactagctaaggct

SEQ ID NO: 658387 - DNA, 33 bp, Homo sapien
gcatgaaaatggttaacagccttcctcagtagc

SEQ ID NO: 658388 - DNA, 33 bp, Homo sapien
gcatgaaaatggttaatagccttcctcagtagc

SEQ ID NO: 658389 - DNA, 33 bp, Homo sapien
agaacaacacttgttacgcaaagataatctgca

SEQ ID NO: 658390 - DNA, 33 bp, Homo sapien
agaacaacacttgttatgcaaagataatctgca

SEQ ID NO: 658391 - DNA, 33 bp, Homo sapien
gctcttgcatagagccaaatcaataaataaagc

SEQ ID NO: 658392 - DNA, 33 bp, Homo sapien
gctcttgcatagagccgaatcaataaataaagc

SEQ ID NO: 658393 - DNA, 33 bp, Homo sapien
cttttgtggaataagacaggaagtaaactggaa

SEQ ID NO: 658394 - DNA, 33 bp, Homo sapien
cttttgtggaataagataggaagtaaactggaa

SEQ ID NO: 658395 - DNA, 33 bp, Homo sapien
gggatgttaccatgcaagaaagggagtcgactg

SEQ ID NO: 658396 - DNA, 33 bp, Homo sapien
gggatgttaccatgcaggaaagggagtcgactg

SEQ ID NO: 658397 - DNA, 33 bp, Homo sapien
ccatgacaaaatttgcggataatgcataagaat

SEQ ID NO: 658398 - DNA, 33 bp, Homo sapien
ccatgacaaaatttgctgataatgcataagaat

SEQ ID NO: 658399 - DNA, 33 bp, Homo sapien
aactcttagaagaaaacatacggcaaaagtgtc

SEQ ID NO: 658400 - DNA, 33 bp, Homo sapien
aactcttagaagaaaatatacggcaaaagtgtc

SEQ ID NO: 658401 - DNA, 33 bp, Homo sapien
tttgacaatgattttacggatatgatctcaaag

SEQ ID NO: 658402 - DNA, 33 bp, Homo sapien
tttgacaatgattttatggatatgatctcaaag

SEQ ID NO: 658403 - DNA, 33 bp, Homo sapien
tgttccaaactaggagcagagtaaattggtatc

SEQ ID NO: 658404 - DNA, 33 bp, Homo sapien
tgttccaaactaggaggagagtaaattggtatc

SEQ ID NO: 658405 - DNA, 33 bp, Homo sapien
taccaaacagttaaaccagaggcgggactgttt

SEQ ID NO: 658406 - DNA, 33 bp, Homo sapien
taccaaacagttaaacgagaggcgggactgttt

SEQ ID NO: 658407 - DNA, 33 bp, Homo sapien
tggtggacacatcagaagtcttgcagagaaggg

SEQ ID NO: 658408 - DNA, 33 bp, Homo sapien
tggtggacacatcagaggtcttgcagagaaggg

SEQ ID NO: 658409 - DNA, 33 bp, Homo sapien
aatgtggttggcttccccagaatttgttccacc

SEQ ID NO: 658410 - DNA, 33 bp, Homo sapien
aatgtggttggcttcctcagaatttgttccacc

SEQ ID NO: 658411 - DNA, 33 bp, Homo sapien
tctatttgcctttaaacattggcttgtcctaga

SEQ ID NO: 658412 - DNA, 33 bp, Homo sapien
tctatttgcctttaaatattggcttgtcctaga

SEQ ID NO: 658413 - DNA, 33 bp, Homo sapien
gcacacattttgagaaattatttggggtttctc

SEQ ID NO: 658414 - DNA, 33 bp, Homo sapien
gcacacattttgagaagttatttggggtttctc

SEQ ID NO: 658415 - DNA, 33 bp, Homo sapien
agtgagtccatcccagaaggataaggagtagca

SEQ ID NO: 658416 - DNA, 33 bp, Homo sapien
agtgagtccatcccaggaggataaggagtagca

SEQ ID NO: 658417 - DNA, 33 bp, Homo sapien
gaggtgagcaggggtaccagttagctgttgctg

SEQ ID NO: 658418 - DNA, 33 bp, Homo sapien
gaggtgagcaggggtatcagttagctgttgctg

SEQ ID NO: 658419 - DNA, 33 bp, Homo sapien
aggttcaaataacaaccgtgtagtactgctcat

SEQ ID NO: 658420 - DNA, 33 bp, Homo sapien
aggttcaaataacaactgtgtagtactgctcat

SEQ ID NO: 658421 - DNA, 33 bp, Homo sapien
ccacattctgtgcaccaaagtgagtcacaggcc

SEQ ID NO: 658422 - DNA, 33 bp, Homo sapien
ccacattctgtgcaccgaagtgagtcacaggcc

SEQ ID NO: 658423 - DNA, 33 bp, Homo sapien
tgccagatcaacaaaacagttgccaaagggaac

SEQ ID NO: 658424 - DNA, 33 bp, Homo sapien
tgccagatcaacaaaatagttgccaaagggaac

SEQ ID NO: 658425 - DNA, 33 bp, Homo sapien
tcatgacaagtcttgaactttaccttacagcag

SEQ ID NO: 658426 - DNA, 33 bp, Homo sapien
tcatgacaagtcttgagctttaccttacagcag

SEQ ID NO: 658427 - DNA, 33 bp, Homo sapien
tggagtatgctctaggaacggcaagtcagggtc

SEQ ID NO: 658428 - DNA, 33 bp, Homo sapien
tggagtatgctctagggacggcaagtcagggtc

SEQ ID NO: 658429 - DNA, 33 bp, Homo sapien
gagcaaggaaacatcaccacggcctgcgtggga

SEQ ID NO: 658430 - DNA, 33 bp, Homo sapien
gagcaaggaaacatcatcacggcctgcgtggga

SEQ ID NO: 658431 - DNA, 33 bp, Homo sapien
ttctcactgcatcaaccgattcctcaccaggat

SEQ ID NO: 658432 - DNA, 33 bp, Homo sapien
ttctcactgcatcaactgattcctcaccaggat

SEQ ID NO: 658433 - DNA, 33 bp, Homo sapien
acagacgtcgggccaaagtggatgtgggtgttt

SEQ ID NO: 658434 - DNA, 33 bp, Homo sapien
acagacgtcgggccaaggtggatgtgggtgttt

SEQ ID NO: 658435 - DNA, 33 bp, Homo sapien
tggagcacttctctccaattctgtctgatctgg

SEQ ID NO: 658436 - DNA, 33 bp, Homo sapien
tggagcacttctctccgattctgtctgatctgg

SEQ ID NO: 658437 - DNA, 33 bp, Homo sapien
tgcaaatctccctgtgaacatctgtgccagaac

SEQ ID NO: 658438 - DNA, 33 bp, Homo sapien
tgcaaatctccctgtggacatctgtgccagaac

SEQ ID NO: 658439 - DNA, 33 bp, Homo sapien
tcacttttgttgtttgaagaacagtgaggtttt

SEQ ID NO: 658440 - DNA, 33 bp, Homo sapien
tcacttttgttgtttgcagaacagtgaggtttt

SEQ ID NO: 658441 - DNA, 33 bp, Homo sapien
gtaggcgggaccaccaagttagagacagaataa

SEQ ID NO: 658442 - DNA, 33 bp, Homo sapien
gtaggcgggaccaccaggttagagacagaataa

SEQ ID NO: 658443 - DNA, 33 bp, Homo sapien
acttgttagttaaggaaccatattagggagaca

SEQ ID NO: 658444 - DNA, 33 bp, Homo sapien
acttgttagttaaggagccatattagggagaca

SEQ ID NO: 658445 - DNA, 33 bp, Homo sapien
ccccaagactccaacacgggatttaatagggtg

SEQ ID NO: 658446 - DNA, 33 bp, Homo sapien
ccccaagactccaacatgggatttaatagggtg

SEQ ID NO: 658447 - DNA, 33 bp, Homo sapien
gtgagatcgtcaaaaccctgcaagatccatgat

SEQ ID NO: 658448 - DNA, 33 bp, Homo sapien
gtgagatcgtcaaaactctgcaagatccatgat

SEQ ID NO: 658449 - DNA, 33 bp, Homo sapien
ccgcagacccagtgcccattcgcccagatgcca

SEQ ID NO: 658450 - DNA, 33 bp, Homo sapien
ccgcagacccagtgcctattcgcccagatgcca

SEQ ID NO: 658451 - DNA, 33 bp, Homo sapien
tgctttctatggggaaatggaaacaatattcct

SEQ ID NO: 658452 - DNA, 33 bp, Homo sapien
tgctttctatggggaagtggaaacaatattcct

SEQ ID NO: 658453 - DNA, 33 bp, Homo sapien
gaccatcatctgatcccgagagccctgctgttt

SEQ ID NO: 658454 - DNA, 33 bp, Homo sapien
gaccatcatctgatcctgagagccctgctgttt

SEQ ID NO: 658455 - DNA, 33 bp, Homo sapien
ctgcagaacttgaggcactgcggagcccacaca

SEQ ID NO: 658456 - DNA, 33 bp, Homo sapien
ctgcagaacttgaggcgctgcggagcccacaca

SEQ ID NO: 658457 - DNA, 33 bp, Homo sapien
gcaaggattcctgtatcataaaggcaatggcag

SEQ ID NO: 658458 - DNA, 33 bp, Homo sapien
gcaaggattcctgtatgataaaggcaatggcag

SEQ ID NO: 658459 - DNA, 33 bp, Homo sapien
gaaaaaacatgcaacacgaaggctgtgagacgt

SEQ ID NO: 658460 - DNA, 33 bp, Homo sapien
gaaaaaacatgcaacatgaaggctgtgagacgt

SEQ ID NO: 658461 - DNA, 33 bp, Homo sapien
taaggcgctgtgacttaaagagactgcaaagcc

SEQ ID NO: 658462 - DNA, 33 bp, Homo sapien
taaggcgctgtgacttgaagagactgcaaagcc

SEQ ID NO: 658463 - DNA, 33 bp, Homo sapien
ggtcaaagacatttgcaatattaggctgcctgg

SEQ ID NO: 658464 - DNA, 33 bp, Homo sapien
ggtcaaagacatttgcgatattaggctgcctgg

SEQ ID NO: 658465 - DNA, 33 bp, Homo sapien
gcatgacatccaagacaccccctgtgagatcgg

SEQ ID NO: 658466 - DNA, 33 bp, Homo sapien
gcatgacatccaagacgccccctgtgagatcgg

SEQ ID NO: 658467 - DNA, 33 bp, Homo sapien
gctaattaatgtgtgacaattcggtagagcgca

SEQ ID NO: 658468 - DNA, 33 bp, Homo sapien
gctaattaatgtgtgagaattcggtagagcgca

SEQ ID NO: 658469 - DNA, 33 bp, Homo sapien
atgctaatttcttgaccggcatcaaagccgact

SEQ ID NO: 658470 - DNA, 33 bp, Homo sapien
atgctaatttcttgacgggcatcaaagccgact

SEQ ID NO: 658471 - DNA, 33 bp, Homo sapien
tcactcagattaaaaacacattcacatccatcc

SEQ ID NO: 658472 - DNA, 33 bp, Homo sapien
tcactcagattaaaaatacattcacatccatcc

SEQ ID NO: 658473 - DNA, 33 bp, Homo sapien
tttgtaggtgaggaaacggaggcctgtagaagt

SEQ ID NO: 658474 - DNA, 33 bp, Homo sapien
tttgtaggtgaggaaatggaggcctgtagaagt

SEQ ID NO: 658475 - DNA, 33 bp, Homo sapien
gacataaatgctgagaaacacttcccttacttc

SEQ ID NO: 658476 - DNA, 33 bp, Homo sapien
gacataaatgctgagacacacttcccttacttc

SEQ ID NO: 658477 - DNA, 33 bp, Homo sapien
caccagacaagagagacgatgcctgcactgcat

SEQ ID NO: 658478 - DNA, 33 bp, Homo sapien
caccagacaagagagatgatgcctgcactgcat

SEQ ID NO: 658479 - DNA, 33 bp, Homo sapien
aatagtgtttactccaaaataccagcttacagg

SEQ ID NO: 658480 - DNA, 33 bp, Homo sapien
aatagtgtttactccagaataccagcttacagg

SEQ ID NO: 658481 - DNA, 33 bp, Homo sapien
gcagattcctaaaggaggtttgtgctgtaaaag

SEQ ID NO: 658482 - DNA, 33 bp, Homo sapien
gcagattcctaaaggatgtttgtgctgtaaaag

SEQ ID NO: 658483 - DNA, 33 bp, Homo sapien
tcaaaatagaccaacaatgacggcaatttgata

SEQ ID NO: 658484 - DNA, 33 bp, Homo sapien
tcaaaatagaccaacagtgacggcaatttgata

SEQ ID NO: 658485 - DNA, 33 bp, Homo sapien
ctcatctaacttccacccatcagccttagcttc

SEQ ID NO: 658486 - DNA, 33 bp, Homo sapien
ctcatctaacttccactcatcagccttagcttc

SEQ ID NO: 658487 - DNA, 33 bp, Homo sapien
actgtgtgtccaagtacgcaagtgtgtgtgtat

SEQ ID NO: 658488 - DNA, 33 bp, Homo sapien
actgtgtgtccaagtatgcaagtgtgtgtgtat

SEQ ID NO: 658489 - DNA, 33 bp, Homo sapien
gcctcctaactaatgaccacaaacagtcacttg

SEQ ID NO: 658490 - DNA, 33 bp, Homo sapien
gcctcctaactaatgatcacaaacagtcacttg

SEQ ID NO: 658491 - DNA, 33 bp, Homo sapien
caagtgacagaaacccaactggacgtaggctcc

SEQ ID NO: 658492 - DNA, 33 bp, Homo sapien
caagtgacagaaacccgactggacgtaggctcc

SEQ ID NO: 658493 - DNA, 33 bp, Homo sapien
tgcaggccacagttaacaacttgcagagaaagt

SEQ ID NO: 658494 - DNA, 33 bp, Homo sapien
tgcaggccacagttaataacttgcagagaaagt

SEQ ID NO: 658495 - DNA, 33 bp, Homo sapien
ggtttttgaacctcaacgtcatgcaaatgctgc

SEQ ID NO: 658496 - DNA, 33 bp, Homo sapien
ggtttttgaacctcaatgtcatgcaaatgctgc

SEQ ID NO: 658497 - DNA, 33 bp, Homo sapien
taaaggaaccttcaaaatagattacgaagtgaa

SEQ ID NO: 658498 - DNA, 33 bp, Homo sapien
taaaggaaccttcaaagtagattacgaagtgaa

SEQ ID NO: 658499 - DNA, 33 bp, Homo sapien
catcagcctggaagctaagccatctctgagccg

SEQ ID NO: 658500 - DNA, 33 bp, Homo sapien
catcagcctggaagctgagccatctctgagccg

SEQ ID NO: 658501 - DNA, 33 bp, Homo sapien
ctctgcagttggataaaacagggtcaggaaata

SEQ ID NO: 658502 - DNA, 33 bp, Homo sapien
ctctgcagttggataagacagggtcaggaaata

SEQ ID NO: 658503 - DNA, 33 bp, Homo sapien
cctgcaggagatgcaacgactatgtattggggg

SEQ ID NO: 658504 - DNA, 33 bp, Homo sapien
cctgcaggagatgcaaggactatgtattggggg

SEQ ID NO: 658505 - DNA, 33 bp, Homo sapien
tgcacggcaaagtcaccacacgggccatgagaa

SEQ ID NO: 658506 - DNA, 33 bp, Homo sapien
tgcacggcaaagtcactacacgggccatgagaa

SEQ ID NO: 658507 - DNA, 33 bp, Homo sapien
ggaagctagaagatgacgacaccatagctctaa

SEQ ID NO: 658508 - DNA, 33 bp, Homo sapien
ggaagctagaagatgatgacaccatagctctaa

SEQ ID NO: 658509 - DNA, 33 bp, Homo sapien
agtatgttcctgcaacaatctgtacataaatac

SEQ ID NO: 658510 - DNA, 33 bp, Homo sapien
agtatgttcctgcaaccatctgtacataaatac

SEQ ID NO: 658511 - DNA, 33 bp, Homo sapien
tagggatggaactgtcactagaagccaatacat

SEQ ID NO: 658512 - DNA, 33 bp, Homo sapien
tagggatggaactgtcgctagaagccaatacat

SEQ ID NO: 658513 - DNA, 33 bp, Homo sapien
tcctcctccaccaggacgcgtgaatggctgcag

SEQ ID NO: 658514 - DNA, 33 bp, Homo sapien
tcctcctccaccaggatgcgtgaatggctgcag

SEQ ID NO: 658515 - DNA, 33 bp, Homo sapien
gacagccccaaacagcaatgggaaccagaatat

SEQ ID NO: 658516 - DNA, 33 bp, Homo sapien
gacagccccaaacagccatgggaaccagaatat

SEQ ID NO: 658517 - DNA, 33 bp, Homo sapien
cctggactactgagtccaatctaatactgcctg

SEQ ID NO: 658518 - DNA, 33 bp, Homo sapien
cctggactactgagtctaatctaatactgcctg

SEQ ID NO: 658519 - DNA, 33 bp, Homo sapien
aattgcaagggcatcaaagcagatctcctgacg

SEQ ID NO: 658520 - DNA, 33 bp, Homo sapien
aattgcaagggcatcacagcagatctcctgacg

SEQ ID NO: 658521 - DNA, 33 bp, Homo sapien
tgctcagagtctcttgaaatgtgggtaggtaca

SEQ ID NO: 658522 - DNA, 33 bp, Homo sapien
tgctcagagtctcttggaatgtgggtaggtaca

SEQ ID NO: 658523 - DNA, 33 bp, Homo sapien
ctcagcctacacttcacgctccctcagagccct

SEQ ID NO: 658524 - DNA, 33 bp, Homo sapien
ctcagcctacacttcatgctccctcagagccct

SEQ ID NO: 658525 - DNA, 33 bp, Homo sapien
cacttgcagaagagcacatgaaatgagagacgc

SEQ ID NO: 658526 - DNA, 33 bp, Homo sapien
cacttgcagaagagcatatgaaatgagagacgc

SEQ ID NO: 658527 - DNA, 33 bp, Homo sapien
aaataaggcaaaatcccggactttggcagcagt

SEQ ID NO: 658528 - DNA, 33 bp, Homo sapien
aaataaggcaaaatcctggactttggcagcagt

SEQ ID NO: 658529 - DNA, 33 bp, Homo sapien
cagcactgctgggttcacagtaagtctagtcta

SEQ ID NO: 658530 - DNA, 33 bp, Homo sapien
cagcactgctgggttcgcagtaagtctagtcta

SEQ ID NO: 658531 - DNA, 33 bp, Homo sapien
tgcacaggggttcctacgtctccatattctcat

SEQ ID NO: 658532 - DNA, 33 bp, Homo sapien
tgcacaggggttcctatgtctccatattctcat

SEQ ID NO: 658533 - DNA, 33 bp, Homo sapien
ctaagcagacttcgcaagagctccatgggttct

SEQ ID NO: 658534 - DNA, 33 bp, Homo sapien
ctaagcagacttcgcaggagctccatgggttct

SEQ ID NO: 658535 - DNA, 33 bp, Homo sapien
ccgcatctctgctatcaaagaagaggaaaacct

SEQ ID NO: 658536 - DNA, 33 bp, Homo sapien
ccgcatctctgctatcgaagaagaggaaaacct

SEQ ID NO: 658537 - DNA, 33 bp, Homo sapien
gccctgcagggaaaccccttcctctcctgtcac

SEQ ID NO: 658538 - DNA, 33 bp, Homo sapien
gccctgcagggaaacctcttcctctcctgtcac

SEQ ID NO: 658539 - DNA, 33 bp, Homo sapien
gtcctgcaccttatcaaaggccctaagagctaa

SEQ ID NO: 658540 - DNA, 33 bp, Homo sapien
gtcctgcaccttatcacaggccctaagagctaa

SEQ ID NO: 658541 - DNA, 33 bp, Homo sapien
cacaccaggaagagccacttgaaatagttcatt

SEQ ID NO: 658542 - DNA, 33 bp, Homo sapien
cacaccaggaagagccgcttgaaatagttcatt

SEQ ID NO: 658543 - DNA, 33 bp, Homo sapien
agaaaaaggctgactcccatgaagaacagtgag

SEQ ID NO: 658544 - DNA, 33 bp, Homo sapien
agaaaaaggctgactctcatgaagaacagtgag

SEQ ID NO: 658545 - DNA, 33 bp, Homo sapien
ctattcacccatctacaactttgtttacctact

SEQ ID NO: 658546 - DNA, 33 bp, Homo sapien
ctattcacccatctactactttgtttacctact

SEQ ID NO: 658547 - DNA, 33 bp, Homo sapien
tgacttagggccattgaagatccattgtctaaa

SEQ ID NO: 658548 - DNA, 33 bp, Homo sapien
tgacttagggccattggagatccattgtctaaa

SEQ ID NO: 658549 - DNA, 33 bp, Homo sapien
ggacatgcttgtccacagactaggaagtcacac

SEQ ID NO: 658550 - DNA, 33 bp, Homo sapien
ggacatgcttgtccaccgactaggaagtcacac

SEQ ID NO: 658551 - DNA, 33 bp, Homo sapien
tttccaaacctcttaacgtagaatccagttcct

SEQ ID NO: 658552 - DNA, 33 bp, Homo sapien
tttccaaacctcttaatgtagaatccagttcct

SEQ ID NO: 658553 - DNA, 33 bp, Homo sapien
acacatggagcgagacgatgtcgcttcactctc

SEQ ID NO: 658554 - DNA, 33 bp, Homo sapien
acacatggagcgagactatgtcgcttcactctc

SEQ ID NO: 658555 - DNA, 33 bp, Homo sapien
cactgctgaagcaaaacaaatgtgtcctttcat

SEQ ID NO: 658556 - DNA, 33 bp, Homo sapien
cactgctgaagcaaaataaatgtgtcctttcat

SEQ ID NO: 658557 - DNA, 33 bp, Homo sapien
ctcatctgctcaacggcagggtgttctcatcca

SEQ ID NO: 658558 - DNA, 33 bp, Homo sapien
ctcatctgctcaacggtagggtgttctcatcca

SEQ ID NO: 658559 - DNA, 33 bp, Homo sapien
caaagtcatctaggtgcatattgtcatgattca

SEQ ID NO: 658560 - DNA, 33 bp, Homo sapien
caaagtcatctaggtgtatattgtcatgattca

SEQ ID NO: 658561 - DNA, 33 bp, Homo sapien
ctatactaccctgtcaatctacagagacctgtg

SEQ ID NO: 658562 - DNA, 33 bp, Homo sapien
ctatactaccctgtcagtctacagagacctgtg

SEQ ID NO: 658563 - DNA, 33 bp, Homo sapien
cctgtgtctatacgaccatgtgtgtctaaagag

SEQ ID NO: 658564 - DNA, 33 bp, Homo sapien
cctgtgtctatacgactatgtgtgtctaaagag

SEQ ID NO: 658565 - DNA, 33 bp, Homo sapien
ggtgtggaggccacaacgaccacactcctcagt

SEQ ID NO: 658566 - DNA, 33 bp, Homo sapien
ggtgtggaggccacaatgaccacactcctcagt

SEQ ID NO: 658567 - DNA, 33 bp, Homo sapien
cacagtgattaaaagagaggctggcccagaaac

SEQ ID NO: 658568 - DNA, 33 bp, Homo sapien
cacagtgattaaaagataggctggcccagaaac

SEQ ID NO: 658569 - DNA, 33 bp, Homo sapien
gagcctggagatcctaagggctggctctctaca

SEQ ID NO: 658570 - DNA, 33 bp, Homo sapien
gagcctggagatcctacgggctggctctctaca

SEQ ID NO: 658571 - DNA, 33 bp, Homo sapien
tgattatcatctcggaagattttttaataagct

SEQ ID NO: 658572 - DNA, 33 bp, Homo sapien
tgattatcatctcggaggattttttaataagct

SEQ ID NO: 658573 - DNA, 33 bp, Homo sapien
ttctgaagacatcgtacgcttcccttccttgct

SEQ ID NO: 658574 - DNA, 33 bp, Homo sapien
ttctgaagacatcgtaggcttcccttccttgct

SEQ ID NO: 658575 - DNA, 33 bp, Homo sapien
caagacaggcaggtgtcaatacttccatatatc

SEQ ID NO: 658576 - DNA, 33 bp, Homo sapien
caagacaggcaggtgttaatacttccatatatc

SEQ ID NO: 658577 - DNA, 33 bp, Homo sapien
acatgaggctggagaaaagaattcagagccttg

SEQ ID NO: 658578 - DNA, 33 bp, Homo sapien
acatgaggctggagaagagaattcagagccttg

SEQ ID NO: 658579 - DNA, 33 bp, Homo sapien
aggaaccaacaagagacgatgaggtccccaggg

SEQ ID NO: 658580 - DNA, 33 bp, Homo sapien
aggaaccaacaagagatgatgaggtccccaggg

SEQ ID NO: 658581 - DNA, 33 bp, Homo sapien
aataatttaaaggtaacgaccagaggccgggca

SEQ ID NO: 658582 - DNA, 33 bp, Homo sapien
aataatttaaaggtaatgaccagaggccgggca

SEQ ID NO: 658583 - DNA, 33 bp, Homo sapien
aattgaaatataattcacataccacaaaattta

SEQ ID NO: 658584 - DNA, 33 bp, Homo sapien
aattgaaatataattcgcataccacaaaattta

SEQ ID NO: 658585 - DNA, 33 bp, Homo sapien
ccaggatatgtaagtcaaaggatactaaatata

SEQ ID NO: 658586 - DNA, 33 bp, Homo sapien
ccaggatatgtaagtcgaaggatactaaatata

SEQ ID NO: 658587 - DNA, 33 bp, Homo sapien
ttttgggtagtgcacaaattattggtatgaata

SEQ ID NO: 658588 - DNA, 33 bp, Homo sapien
ttttgggtagtgcacatattattggtatgaata

SEQ ID NO: 658589 - DNA, 33 bp, Homo sapien
gggcgcccggttatgacgggatatcctcgtagg

SEQ ID NO: 658590 - DNA, 33 bp, Homo sapien
gggcgcccggttatgatgggatatcctcgtagg

SEQ ID NO: 658591 - DNA, 33 bp, Homo sapien
tctgtgcaatggttaacgtctaatagagtggac

SEQ ID NO: 658592 - DNA, 33 bp, Homo sapien
tctgtgcaatggttaatgtctaatagagtggac

SEQ ID NO: 658593 - DNA, 33 bp, Homo sapien
ccctgccactgtggaaacttctggaggaggtaa

SEQ ID NO: 658594 - DNA, 33 bp, Homo sapien
ccctgccactgtggaagcttctggaggaggtaa

SEQ ID NO: 658595 - DNA, 33 bp, Homo sapien
attaacaagccaccaactccacctttgaaaact

SEQ ID NO: 658596 - DNA, 33 bp, Homo sapien
attaacaagccaccaattccacctttgaaaact

SEQ ID NO: 658597 - DNA, 33 bp, Homo sapien
ctgctgacagttgtacagagcctgggggacacg

SEQ ID NO: 658598 - DNA, 33 bp, Homo sapien
ctgctgacagttgtacggagcctgggggacacg

SEQ ID NO: 658599 - DNA, 33 bp, Homo sapien
ggcatcttagccctcacgccgtctggtgggtgg

SEQ ID NO: 658600 - DNA, 33 bp, Homo sapien
ggcatcttagccctcatgccgtctggtgggtgg

SEQ ID NO: 658601 - DNA, 33 bp, Homo sapien
gattgagaaataccaaaaagaatagaataggaa

SEQ ID NO: 658602 - DNA, 33 bp, Homo sapien
gattgagaaataccaagaagaatagaataggaa

SEQ ID NO: 658603 - DNA, 33 bp, Homo sapien
gtgagaccctgtgtcaaaaagtaaagagcagac

SEQ ID NO: 658604 - DNA, 33 bp, Homo sapien
gtgagaccctgtgtcagaaagtaaagagcagac

SEQ ID NO: 658605 - DNA, 33 bp, Homo sapien
gtgtttatatgtaaaaggaggtacccgtcagtc

SEQ ID NO: 658606 - DNA, 33 bp, Homo sapien
gtgtttatatgtaaaatgaggtacccgtcagtc

SEQ ID NO: 658607 - DNA, 33 bp, Homo sapien
acagtctgggtgaaaccggccacatctgagtct

SEQ ID NO: 658608 - DNA, 33 bp, Homo sapien
acagtctgggtgaaactggccacatctgagtct

SEQ ID NO: 658609 - DNA, 33 bp, Homo sapien
cagattattctcattaaaacccaagctatacat

SEQ ID NO: 658610 - DNA, 33 bp, Homo sapien
cagattattctcattacaacccaagctatacat

SEQ ID NO: 658611 - DNA, 33 bp, Homo sapien
acatcccccaaagcaaagtattaaaatgattgt

SEQ ID NO: 658612 - DNA, 33 bp, Homo sapien
acatcccccaaagcaaggtattaaaatgattgt

SEQ ID NO: 658613 - DNA, 33 bp, Homo sapien
tgctcccctctggaagaattcagtgtctccatt

SEQ ID NO: 658614 - DNA, 33 bp, Homo sapien
tgctcccctctggaaggattcagtgtctccatt

SEQ ID NO: 658615 - DNA, 33 bp, Homo sapien
ctctggatcagtcaggaaatttgttggcctgca

SEQ ID NO: 658616 - DNA, 33 bp, Homo sapien
ctctggatcagtcagggaatttgttggcctgca

SEQ ID NO: 658617 - DNA, 33 bp, Homo sapien
agtcaggcagatctaacgtgtggcatatctgga

SEQ ID NO: 658618 - DNA, 33 bp, Homo sapien
agtcaggcagatctaatgtgtggcatatctgga

SEQ ID NO: 658619 - DNA, 33 bp, Homo sapien
aacaatatgaataccaggacaacaaagacaaga

SEQ ID NO: 658620 - DNA, 33 bp, Homo sapien
aacaatatgaataccatgacaacaaagacaaga

SEQ ID NO: 658621 - DNA, 33 bp, Homo sapien
gcaatgtgcccaataccaataaaactgagaagg

SEQ ID NO: 658622 - DNA, 33 bp, Homo sapien
gcaatgtgcccaatactaataaaactgagaagg

SEQ ID NO: 658623 - DNA, 33 bp, Homo sapien
gaggtctgcacgatgcacaaagtagatgagcca

SEQ ID NO: 658624 - DNA, 33 bp, Homo sapien
gaggtctgcacgatgcgcaaagtagatgagcca

SEQ ID NO: 658625 - DNA, 33 bp, Homo sapien
ctcatcaactaattcacctgttcctttgccaat

SEQ ID NO: 658626 - DNA, 33 bp, Homo sapien
ctcatcaactaattcatctgttcctttgccaat

SEQ ID NO: 658627 - DNA, 33 bp, Homo sapien
ttcctcctttgggtcaaatgcaagggcacccca

SEQ ID NO: 658628 - DNA, 33 bp, Homo sapien
ttcctcctttgggtcagatgcaagggcacccca

SEQ ID NO: 658629 - DNA, 33 bp, Homo sapien
tataggtattgaaaggacaatcaatggcatagc

SEQ ID NO: 658630 - DNA, 33 bp, Homo sapien
tataggtattgaaagggcaatcaatggcatagc

SEQ ID NO: 658631 - DNA, 33 bp, Homo sapien
caactcacctcttctcaaagctagaggcagtgg

SEQ ID NO: 658632 - DNA, 33 bp, Homo sapien
caactcacctcttctcgaagctagaggcagtgg

SEQ ID NO: 658633 - DNA, 33 bp, Homo sapien
ttgctgtccagttatcaaatttgaaagaccaga

SEQ ID NO: 658634 - DNA, 33 bp, Homo sapien
ttgctgtccagttatccaatttgaaagaccaga

SEQ ID NO: 658635 - DNA, 33 bp, Homo sapien
taaaatatggaagagacaacctgacaatgccta

SEQ ID NO: 658636 - DNA, 33 bp, Homo sapien
taaaatatggaagagataacctgacaatgccta

SEQ ID NO: 658637 - DNA, 33 bp, Homo sapien
cctagaaaggctgaataataatttgctctaggt

SEQ ID NO: 658638 - DNA, 33 bp, Homo sapien
cctagaaaggctgaatgataatttgctctaggt

SEQ ID NO: 658639 - DNA, 33 bp, Homo sapien
gtcaattctgcaagacaacattaataatcctga

SEQ ID NO: 658640 - DNA, 33 bp, Homo sapien
gtcaattctgcaagacgacattaataatcctga

SEQ ID NO: 658641 - DNA, 33 bp, Homo sapien
ttccttctttttcagaccgttccatcttttcat

SEQ ID NO: 658642 - DNA, 33 bp, Homo sapien
ttccttctttttcagatcgttccatcttttcat

SEQ ID NO: 658643 - DNA, 33 bp, Homo sapien
aaggagcatatgggaactgaacagctggctaag

SEQ ID NO: 658644 - DNA, 33 bp, Homo sapien
aaggagcatatgggaagtgaacagctggctaag

SEQ ID NO: 658645 - DNA, 33 bp, Homo sapien
gttctagattaaaggacactaaaaaaatcggtc

SEQ ID NO: 658646 - DNA, 33 bp, Homo sapien
gttctagattaaaggagactaaaaaaatcggtc

SEQ ID NO: 658647 - DNA, 33 bp, Homo sapien
acacctggtcccgcaccatgtagcatcactctg

SEQ ID NO: 658648 - DNA, 33 bp, Homo sapien
acacctggtcccgcactatgtagcatcactctg

SEQ ID NO: 658649 - DNA, 33 bp, Homo sapien
aaccaggaagtgctgacaggttgctttcccttc

SEQ ID NO: 658650 - DNA, 33 bp, Homo sapien
aaccaggaagtgctgataggttgctttcccttc

SEQ ID NO: 658651 - DNA, 33 bp, Homo sapien
aggctttcacccctgaacaccagacaccctttc

SEQ ID NO: 658652 - DNA, 33 bp, Homo sapien
aggctttcacccctgagcaccagacaccctttc

SEQ ID NO: 658653 - DNA, 33 bp, Homo sapien
gtgaccccatgcactgaatgcagcagtggggta

SEQ ID NO: 658654 - DNA, 33 bp, Homo sapien
gtgaccccatgcactggatgcagcagtggggta

SEQ ID NO: 658655 - DNA, 33 bp, Homo sapien
tgcttcagactggagaacaagagagcagccagg

SEQ ID NO: 658656 - DNA, 33 bp, Homo sapien
tgcttcagactggagaccaagagagcagccagg

SEQ ID NO: 658657 - DNA, 33 bp, Homo sapien
agctggttcaaacacaagaaagagccttataga

SEQ ID NO: 658658 - DNA, 33 bp, Homo sapien
agctggttcaaacacaggaaagagccttataga

SEQ ID NO: 658659 - DNA, 33 bp, Homo sapien
cactcgacttcattcaactgagccgggtcttgc

SEQ ID NO: 658660 - DNA, 33 bp, Homo sapien
cactcgacttcattcagctgagccgggtcttgc

SEQ ID NO: 658661 - DNA, 33 bp, Homo sapien
ctcgaaggagaatcagaccattagcattcctct

SEQ ID NO: 658662 - DNA, 33 bp, Homo sapien
ctcgaaggagaatcagcccattagcattcctct

SEQ ID NO: 658663 - DNA, 33 bp, Homo sapien
tccagaatagtgcatccctgcagacagaaagta

SEQ ID NO: 658664 - DNA, 33 bp, Homo sapien
tccagaatagtgcatctctgcagacagaaagta

SEQ ID NO: 658665 - DNA, 33 bp, Homo sapien
tattgacctaagctggaccaataaaaatccact

SEQ ID NO: 658666 - DNA, 33 bp, Homo sapien
tattgacctaagctgggccaataaaaatccact

SEQ ID NO: 658667 - DNA, 33 bp, Homo sapien
gttattttaactcctacaatttcactgcgagga

SEQ ID NO: 658668 - DNA, 33 bp, Homo sapien
gttattttaactcctataatttcactgcgagga

SEQ ID NO: 658669 - DNA, 33 bp, Homo sapien
gccacagtaaaaaacacgattgacaaagaaatt

SEQ ID NO: 658670 - DNA, 33 bp, Homo sapien
gccacagtaaaaaacatgattgacaaagaaatt

SEQ ID NO: 658671 - DNA, 33 bp, Homo sapien
gattcagggttcaatcactagcttaagggatga

SEQ ID NO: 658672 - DNA, 33 bp, Homo sapien
gattcagggttcaatcgctagcttaagggatga

SEQ ID NO: 658673 - DNA, 33 bp, Homo sapien
ctgtgctatttgcttgcatttctcccaacattc

SEQ ID NO: 658674 - DNA, 33 bp, Homo sapien
ctgtgctatttgcttggatttctcccaacattc

SEQ ID NO: 658675 - DNA, 33 bp, Homo sapien
tgcattgctctgcagcactcggccccatccctg

SEQ ID NO: 658676 - DNA, 33 bp, Homo sapien
tgcattgctctgcagcgctcggccccatccctg

SEQ ID NO: 658677 - DNA, 33 bp, Homo sapien
cactgcaaacaagataccaagcacagattgttg

SEQ ID NO: 658678 - DNA, 33 bp, Homo sapien
cactgcaaacaagatatcaagcacagattgttg

SEQ ID NO: 658679 - DNA, 33 bp, Homo sapien
ctgctctaacaactagaaagacagcaattcttt

SEQ ID NO: 658680 - DNA, 33 bp, Homo sapien
ctgctctaacaactaggaagacagcaattcttt

SEQ ID NO: 658681 - DNA, 33 bp, Homo sapien
aatccacctagagttcccatatttagcaataag

SEQ ID NO: 658682 - DNA, 33 bp, Homo sapien
aatccacctagagttctcatatttagcaataag

SEQ ID NO: 658683 - DNA, 33 bp, Homo sapien
gtgttatctttttaaactggatgcccagagaag

SEQ ID NO: 658684 - DNA, 33 bp, Homo sapien
gtgttatctttttaaattggatgcccagagaag

SEQ ID NO: 658685 - DNA, 33 bp, Homo sapien
ccaaaatgacttgcaacagagctctggcaagag

SEQ ID NO: 658686 - DNA, 33 bp, Homo sapien
ccaaaatgacttgcaatagagctctggcaagag

SEQ ID NO: 658687 - DNA, 33 bp, Homo sapien
ggatcctgcgaaagcccgatcctatcaaccgtt

SEQ ID NO: 658688 - DNA, 33 bp, Homo sapien
ggatcctgcgaaagcctgatcctatcaaccgtt

SEQ ID NO: 658689 - DNA, 33 bp, Homo sapien
cagtagccaatagatcacttcccttttatttat

SEQ ID NO: 658690 - DNA, 33 bp, Homo sapien
cagtagccaatagatctcttcccttttatttat

SEQ ID NO: 658691 - DNA, 33 bp, Homo sapien
aacatttccctgtggcgctccaccaagttgcct

SEQ ID NO: 658692 - DNA, 33 bp, Homo sapien
aacatttccctgtggctctccaccaagttgcct

SEQ ID NO: 658693 - DNA, 33 bp, Homo sapien
gattctgcatctggcccacatgatcaatactat

SEQ ID NO: 658694 - DNA, 33 bp, Homo sapien
gattctgcatctggccgacatgatcaatactat

SEQ ID NO: 658695 - DNA, 33 bp, Homo sapien
ctgtgtccaaccgtgacggctatagagagaatt

SEQ ID NO: 658696 - DNA, 33 bp, Homo sapien
ctgtgtccaaccgtgatggctatagagagaatt

SEQ ID NO: 658697 - DNA, 33 bp, Homo sapien
ccgcctaacaaactaccgcaaaacacagaggat

SEQ ID NO: 658698 - DNA, 33 bp, Homo sapien
ccgcctaacaaactactgcaaaacacagaggat

SEQ ID NO: 658699 - DNA, 33 bp, Homo sapien
gcatttctgtgtgagaaaataatttcatatttg

SEQ ID NO: 658700 - DNA, 33 bp, Homo sapien
gcatttctgtgtgagagaataatttcatatttg

SEQ ID NO: 658701 - DNA, 33 bp, Homo sapien
aaactgaagaaacagaagcaagatgtccatact

SEQ ID NO: 658702 - DNA, 33 bp, Homo sapien
aaactgaagaaacagaggcaagatgtccatact

SEQ ID NO: 658703 - DNA, 33 bp, Homo sapien
caattagagtcaaagcacctcaggcccaagcat

SEQ ID NO: 658704 - DNA, 33 bp, Homo sapien
caattagagtcaaagcgcctcaggcccaagcat

SEQ ID NO: 658705 - DNA, 33 bp, Homo sapien
ctgagctcccaagctagccctatgtcctcaaat

SEQ ID NO: 658706 - DNA, 33 bp, Homo sapien
ctgagctcccaagctatccctatgtcctcaaat

SEQ ID NO: 658707 - DNA, 33 bp, Homo sapien
ttgccgacctctgcaaaatagacctcagagctc

SEQ ID NO: 658708 - DNA, 33 bp, Homo sapien
ttgccgacctctgcaacatagacctcagagctc

SEQ ID NO: 658709 - DNA, 33 bp, Homo sapien
tgcaaattcaagccacaatgagatatctttaca

SEQ ID NO: 658710 - DNA, 33 bp, Homo sapien
tgcaaattcaagccacgatgagatatctttaca

SEQ ID NO: 658711 - DNA, 33 bp, Homo sapien
gtgctgcacctgttaactggtcatttacattag

SEQ ID NO: 658712 - DNA, 33 bp, Homo sapien
gtgctgcacctgttaagtggtcatttacattag

SEQ ID NO: 658713 - DNA, 33 bp, Homo sapien
ggccccgctcaggaaaacaggtacactcagagc

SEQ ID NO: 658714 - DNA, 33 bp, Homo sapien
ggccccgctcaggaaagcaggtacactcagagc

SEQ ID NO: 658715 - DNA, 33 bp, Homo sapien
ctgttttccagggaaacaaactgtgagatgaag

SEQ ID NO: 658716 - DNA, 33 bp, Homo sapien
ctgttttccagggaaagaaactgtgagatgaag

SEQ ID NO: 658717 - DNA, 33 bp, Homo sapien
atgatgtgattgccaacgtatgtagaggaaata

SEQ ID NO: 658718 - DNA, 33 bp, Homo sapien
atgatgtgattgccaatgtatgtagaggaaata

SEQ ID NO: 658719 - DNA, 33 bp, Homo sapien
ggacatgcggaacagaagggaagcaccctgacg

SEQ ID NO: 658720 - DNA, 33 bp, Homo sapien
ggacatgcggaacagaggggaagcaccctgacg

SEQ ID NO: 658721 - DNA, 33 bp, Homo sapien
tggaagcaagagcttaaaacaagaaatggtaac

SEQ ID NO: 658722 - DNA, 33 bp, Homo sapien
tggaagcaagagcttagaacaagaaatggtaac

SEQ ID NO: 658723 - DNA, 33 bp, Homo sapien
gttgcaacttcctataaatctgtggttatttca

SEQ ID NO: 658724 - DNA, 33 bp, Homo sapien
gttgcaacttcctatacatctgtggttatttca

SEQ ID NO: 658725 - DNA, 33 bp, Homo sapien
gtcatagctcaagtccaaaggccgtctgctgaa

SEQ ID NO: 658726 - DNA, 33 bp, Homo sapien
gtcatagctcaagtccgaaggccgtctgctgaa

SEQ ID NO: 658727 - DNA, 33 bp, Homo sapien
ctgaggttccgaacaacaagcagagctggattt

SEQ ID NO: 658728 - DNA, 33 bp, Homo sapien
ctgaggttccgaacaagaagcagagctggattt

SEQ ID NO: 658729 - DNA, 33 bp, Homo sapien
gtggaaattttgatcacctaaaggaacaataat

SEQ ID NO: 658730 - DNA, 33 bp, Homo sapien
gtggaaattttgatcatctaaaggaacaataat

SEQ ID NO: 658731 - DNA, 33 bp, Homo sapien
atagccatcacactccacgctgtctcacagcca

SEQ ID NO: 658732 - DNA, 33 bp, Homo sapien
atagccatcacactccgcgctgtctcacagcca

SEQ ID NO: 658733 - DNA, 33 bp, Homo sapien
agatcggctaatacccaacaggaagagatatta

SEQ ID NO: 658734 - DNA, 33 bp, Homo sapien
agatcggctaatacccgacaggaagagatatta

SEQ ID NO: 658735 - DNA, 33 bp, Homo sapien
cctggagcttttgaaacaaggacgtgacataga

SEQ ID NO: 658736 - DNA, 33 bp, Homo sapien
cctggagcttttgaaataaggacgtgacataga

SEQ ID NO: 658737 - DNA, 33 bp, Homo sapien
ttcttccaagtggtcacagcaatccctggagct

SEQ ID NO: 658738 - DNA, 33 bp, Homo sapien
ttcttccaagtggtcatagcaatccctggagct

SEQ ID NO: 658739 - DNA, 33 bp, Homo sapien
tagacagctgtgtatccagcgaaaaatcaggga

SEQ ID NO: 658740 - DNA, 33 bp, Homo sapien
tagacagctgtgtatctagcgaaaaatcaggga

SEQ ID NO: 658741 - DNA, 33 bp, Homo sapien
acaagttcagccacgacctgaaaaggaaaatga

SEQ ID NO: 658742 - DNA, 33 bp, Homo sapien
acaagttcagccacgatctgaaaaggaaaatga

SEQ ID NO: 658743 - DNA, 33 bp, Homo sapien
cagctctgaccaatgaacaggaccagtgcacgt

SEQ ID NO: 658744 - DNA, 33 bp, Homo sapien
cagctctgaccaatgagcaggaccagtgcacgt

SEQ ID NO: 658745 - DNA, 33 bp, Homo sapien
agcacgctctgtcttacactcctttgaacctca

SEQ ID NO: 658746 - DNA, 33 bp, Homo sapien
agcacgctctgtcttatactcctttgaacctca

SEQ ID NO: 658747 - DNA, 33 bp, Homo sapien
ctggccataaagtaataatctgatccaccttgt

SEQ ID NO: 658748 - DNA, 33 bp, Homo sapien
ctggccataaagtaatcatctgatccaccttgt

SEQ ID NO: 658749 - DNA, 33 bp, Homo sapien
gtcgcagccctgcacaagctggtagatggcgct

SEQ ID NO: 658750 - DNA, 33 bp, Homo sapien
gtcgcagccctgcacaggctggtagatggcgct

SEQ ID NO: 658751 - DNA, 33 bp, Homo sapien
gaagaaggtggttgtaagacatcgctagcaaca

SEQ ID NO: 658752 - DNA, 33 bp, Homo sapien
gaagaaggtggttgtaggacatcgctagcaaca

SEQ ID NO: 658753 - DNA, 33 bp, Homo sapien
acagcttaagatctcaatccaccaaaagtccta

SEQ ID NO: 658754 - DNA, 33 bp, Homo sapien
acagcttaagatctcagtccaccaaaagtccta

SEQ ID NO: 658755 - DNA, 33 bp, Homo sapien
ctgtattggaaatggaaggattaagagagatct

SEQ ID NO: 658756 - DNA, 33 bp, Homo sapien
ctgtattggaaatggatggattaagagagatct

SEQ ID NO: 658757 - DNA, 33 bp, Homo sapien
tagacaatgttaattaagctaagagcaaggggc

SEQ ID NO: 658758 - DNA, 33 bp, Homo sapien
tagacaatgttaattaggctaagagcaaggggc

SEQ ID NO: 658759 - DNA, 33 bp, Homo sapien
tataaaagcctcaaaccaaaaagaaatgtttgc

SEQ ID NO: 658760 - DNA, 33 bp, Homo sapien
tataaaagcctcaaactaaaaagaaatgtttgc

SEQ ID NO: 658761 - DNA, 33 bp, Homo sapien
aaatggggttaatgtcaatctcattcatgtcag

SEQ ID NO: 658762 - DNA, 33 bp, Homo sapien
aaatggggttaatgtcgatctcattcatgtcag

SEQ ID NO: 658763 - DNA, 33 bp, Homo sapien
gtaaactgtcactgcgcaagagccgggtgtgga

SEQ ID NO: 658764 - DNA, 33 bp, Homo sapien
gtaaactgtcactgcggaagagccgggtgtgga

SEQ ID NO: 658765 - DNA, 33 bp, Homo sapien
gcgggcaaaattcagacgtgacttcccaccttg

SEQ ID NO: 658766 - DNA, 33 bp, Homo sapien
gcgggcaaaattcagatgtgacttcccaccttg

SEQ ID NO: 658767 - DNA, 33 bp, Homo sapien
ttctacttccacccgacagaaatggacgcacac

SEQ ID NO: 658768 - DNA, 33 bp, Homo sapien
ttctacttccacccgagagaaatggacgcacac

SEQ ID NO: 658769 - DNA, 33 bp, Homo sapien
ctgcctctgaggataccgaagcttactgccctc

SEQ ID NO: 658770 - DNA, 33 bp, Homo sapien
ctgcctctgaggatactgaagcttactgccctc

SEQ ID NO: 658771 - DNA, 33 bp, Homo sapien
acccagggcttcagcaaccatctatgcactgag

SEQ ID NO: 658772 - DNA, 33 bp, Homo sapien
acccagggcttcagcagccatctatgcactgag

SEQ ID NO: 658773 - DNA, 33 bp, Homo sapien
tccatcttcctgggaaaacagggagttacagat

SEQ ID NO: 658774 - DNA, 33 bp, Homo sapien
tccatcttcctgggaagacagggagttacagat

SEQ ID NO: 658775 - DNA, 33 bp, Homo sapien
gcccacctcctccctccagcgttctgtttggga

SEQ ID NO: 658776 - DNA, 33 bp, Homo sapien
gcccacctcctccctctagcgttctgtttggga

SEQ ID NO: 658777 - DNA, 33 bp, Homo sapien
ctaccttggaagaggcaccatcaaatgttggct

SEQ ID NO: 658778 - DNA, 33 bp, Homo sapien
ctaccttggaagaggcgccatcaaatgttggct

SEQ ID NO: 658779 - DNA, 33 bp, Homo sapien
tgctagaggagaaaacaagggaggactgtgatc

SEQ ID NO: 658780 - DNA, 33 bp, Homo sapien
tgctagaggagaaaacgagggaggactgtgatc

SEQ ID NO: 658781 - DNA, 33 bp, Homo sapien
ctcaggactgttttgcaccccatccagccacac

SEQ ID NO: 658782 - DNA, 33 bp, Homo sapien
ctcaggactgttttgcgccccatccagccacac

SEQ ID NO: 658783 - DNA, 33 bp, Homo sapien
tggtaagtggccattacggaaacactgcctaca

SEQ ID NO: 658784 - DNA, 33 bp, Homo sapien
tggtaagtggccattatggaaacactgcctaca

SEQ ID NO: 658785 - DNA, 33 bp, Homo sapien
gagtagaacgcccccaaagcagtgcaagctttc

SEQ ID NO: 658786 - DNA, 33 bp, Homo sapien
gagtagaacgcccccatagcagtgcaagctttc

SEQ ID NO: 658787 - DNA, 33 bp, Homo sapien
cagacacagaatgacccacttgtgacctcaggt

SEQ ID NO: 658788 - DNA, 33 bp, Homo sapien
cagacacagaatgacctacttgtgacctcaggt

SEQ ID NO: 658789 - DNA, 33 bp, Homo sapien
gcttgacctctgaaagacccactgtgaattgga

SEQ ID NO: 658790 - DNA, 33 bp, Homo sapien
gcttgacctctgaaaggcccactgtgaattgga

SEQ ID NO: 658791 - DNA, 33 bp, Homo sapien
aagttcctttgaggagccctttcttctggtcca

SEQ ID NO: 658792 - DNA, 33 bp, Homo sapien
aagttcctttgaggagtcctttcttctggtcca

SEQ ID NO: 658793 - DNA, 33 bp, Homo sapien
gcgaagccaggttggacgcagaaaacactgggc

SEQ ID NO: 658794 - DNA, 33 bp, Homo sapien
gcgaagccaggttggatgcagaaaacactgggc

SEQ ID NO: 658795 - DNA, 33 bp, Homo sapien
tttcctctcagatgcaagaacccacctctgaca

SEQ ID NO: 658796 - DNA, 33 bp, Homo sapien
tttcctctcagatgcaggaacccacctctgaca

SEQ ID NO: 658797 - DNA, 33 bp, Homo sapien
tggctggtggaaggaaagtcacgtgaaccgtcc

SEQ ID NO: 658798 - DNA, 33 bp, Homo sapien
tggctggtggaaggaaggtcacgtgaaccgtcc

SEQ ID NO: 658799 - DNA, 33 bp, Homo sapien
taacaagtccccgtcacgctgtcccagtccaga

SEQ ID NO: 658800 - DNA, 33 bp, Homo sapien
taacaagtccccgtcatgctgtcccagtccaga

SEQ ID NO: 658801 - DNA, 33 bp, Homo sapien
gcagtttattttagaaaacttccagcaagcgac

SEQ ID NO: 658802 - DNA, 33 bp, Homo sapien
gcagtttattttagaatacttccagcaagcgac

SEQ ID NO: 658803 - DNA, 33 bp, Homo sapien
actgttgtcctaatgaaaacatgacccgtcttc

SEQ ID NO: 658804 - DNA, 33 bp, Homo sapien
actgttgtcctaatgagaacatgacccgtcttc

SEQ ID NO: 658805 - DNA, 33 bp, Homo sapien
tagaaacttagagcaaccttagggccaccaatc

SEQ ID NO: 658806 - DNA, 33 bp, Homo sapien
tagaaacttagagcaatcttagggccaccaatc

SEQ ID NO: 658807 - DNA, 33 bp, Homo sapien
ccataataaaacaaagccacagcacaggtaagc

SEQ ID NO: 658808 - DNA, 33 bp, Homo sapien
ccataataaaacaaagtcacagcacaggtaagc

SEQ ID NO: 658809 - DNA, 33 bp, Homo sapien
ccacattcgggtctcactctgtaacttgcatga

SEQ ID NO: 658810 - DNA, 33 bp, Homo sapien
ccacattcgggtctcattctgtaacttgcatga

SEQ ID NO: 658811 - DNA, 33 bp, Homo sapien
tggaaacttagatggccattattactcctccaa

SEQ ID NO: 658812 - DNA, 33 bp, Homo sapien
tggaaacttagatggctattattactcctccaa

SEQ ID NO: 658813 - DNA, 33 bp, Homo sapien
tgcagcaataaagagactcaggcttgtgccagg

SEQ ID NO: 658814 - DNA, 33 bp, Homo sapien
tgcagcaataaagagattcaggcttgtgccagg

SEQ ID NO: 658815 - DNA, 33 bp, Homo sapien
gtaacggtgggcaatcaacaagcctggcacagg

SEQ ID NO: 658816 - DNA, 33 bp, Homo sapien
gtaacggtgggcaatcgacaagcctggcacagg

SEQ ID NO: 658817 - DNA, 33 bp, Homo sapien
agccttcagggacctacggaactataagaaaag

SEQ ID NO: 658818 - DNA, 33 bp, Homo sapien
agccttcagggacctatggaactataagaaaag

SEQ ID NO: 658819 - DNA, 33 bp, Homo sapien
gtagttaaacattagcagagctggtaattgaac

SEQ ID NO: 658820 - DNA, 33 bp, Homo sapien
gtagttaaacattagccgagctggtaattgaac

SEQ ID NO: 658821 - DNA, 33 bp, Homo sapien
ggacagtgctgatgtaagatggatgttcctaga

SEQ ID NO: 658822 - DNA, 33 bp, Homo sapien
ggacagtgctgatgtaggatggatgttcctaga

SEQ ID NO: 658823 - DNA, 33 bp, Homo sapien
ttttattttaggttcacaggtacatgtgcaaat

SEQ ID NO: 658824 - DNA, 33 bp, Homo sapien
ttttattttaggttcataggtacatgtgcaaat

SEQ ID NO: 658825 - DNA, 33 bp, Homo sapien
actgtgtttgtggtgacgtgttatgcagtgcag

SEQ ID NO: 658826 - DNA, 33 bp, Homo sapien
actgtgtttgtggtgatgtgttatgcagtgcag

SEQ ID NO: 658827 - DNA, 33 bp, Homo sapien
ttggcttgttcctgaaccactgaaacaatgtcc

SEQ ID NO: 658828 - DNA, 33 bp, Homo sapien
ttggcttgttcctgaatcactgaaacaatgtcc

SEQ ID NO: 658829 - DNA, 33 bp, Homo sapien
gatactgaagagcagacgcagaggttcgcaggt

SEQ ID NO: 658830 - DNA, 33 bp, Homo sapien
gatactgaagagcagatgcagaggttcgcaggt

SEQ ID NO: 658831 - DNA, 33 bp, Homo sapien
agagaggcagataaataagaatcactgtcttgg

SEQ ID NO: 658832 - DNA, 33 bp, Homo sapien
agagaggcagataaattagaatcactgtcttgg

SEQ ID NO: 658833 - DNA, 33 bp, Homo sapien
gcactttatgaacttagaacaattccaggtaga

SEQ ID NO: 658834 - DNA, 33 bp, Homo sapien
gcactttatgaacttataacaattccaggtaga

SEQ ID NO: 658835 - DNA, 33 bp, Homo sapien
tttgtaggcattataaataaagatcatatagtt

SEQ ID NO: 658836 - DNA, 33 bp, Homo sapien
tttgtaggcattataagtaaagatcatatagtt

SEQ ID NO: 658837 - DNA, 33 bp, Homo sapien
tatttcttttgctgcaacgaaactttatttata

SEQ ID NO: 658838 - DNA, 33 bp, Homo sapien
tatttcttttgctgcaccgaaactttatttata

SEQ ID NO: 658839 - DNA, 33 bp, Homo sapien
ttcactcttcacttcaaatttcttcctgcactt

SEQ ID NO: 658840 - DNA, 33 bp, Homo sapien
ttcactcttcacttcagatttcttcctgcactt

SEQ ID NO: 658841 - DNA, 33 bp, Homo sapien
aggagatggcatgagaagtctgagaaggtgtct

SEQ ID NO: 658842 - DNA, 33 bp, Homo sapien
aggagatggcatgagaggtctgagaaggtgtct

SEQ ID NO: 658843 - DNA, 33 bp, Homo sapien
tgttaagatagaagtgaaaaatcttgtgtaagg

SEQ ID NO: 658844 - DNA, 33 bp, Homo sapien
tgttaagatagaagtgcaaaatcttgtgtaagg

SEQ ID NO: 658845 - DNA, 33 bp, Homo sapien
acagtgtacacaacacaggcaagaaagcaaagg

SEQ ID NO: 658846 - DNA, 33 bp, Homo sapien
acagtgtacacaacacgggcaagaaagcaaagg

SEQ ID NO: 658847 - DNA, 33 bp, Homo sapien
gatgatcgatttcaacaaagtaagtatgagcat

SEQ ID NO: 658848 - DNA, 33 bp, Homo sapien
gatgatcgatttcaacgaagtaagtatgagcat

SEQ ID NO: 658849 - DNA, 33 bp, Homo sapien
acagaggggaaactgcagcaaacagtagaagag

SEQ ID NO: 658850 - DNA, 33 bp, Homo sapien
acagaggggaaactgccgcaaacagtagaagag

SEQ ID NO: 658851 - DNA, 33 bp, Homo sapien
aattagagttactatgcacataaagctggtact

SEQ ID NO: 658852 - DNA, 33 bp, Homo sapien
aattagagttactatggacataaagctggtact

SEQ ID NO: 658853 - DNA, 33 bp, Homo sapien
ctaggcttaccactaaaagaatacagagtatac

SEQ ID NO: 658854 - DNA, 33 bp, Homo sapien
ctaggcttaccactaagagaatacagagtatac

SEQ ID NO: 658855 - DNA, 33 bp, Homo sapien
atggatatatggaaaaatcatatgttgaaaggc

SEQ ID NO: 658856 - DNA, 33 bp, Homo sapien
atggatatatggaaaagtcatatgttgaaaggc

SEQ ID NO: 658857 - DNA, 33 bp, Homo sapien
ctctgctaactgcttacgatggcactgaagtgg

SEQ ID NO: 658858 - DNA, 33 bp, Homo sapien
ctctgctaactgcttaggatggcactgaagtgg

SEQ ID NO: 658859 - DNA, 33 bp, Homo sapien
ttaatacctattctcacgcacggtgtgtaaaca

SEQ ID NO: 658860 - DNA, 33 bp, Homo sapien
ttaatacctattctcatgcacggtgtgtaaaca

SEQ ID NO: 658861 - DNA, 33 bp, Homo sapien
ttgtgattgccagaaaatggagaaagggtgaat

SEQ ID NO: 658862 - DNA, 33 bp, Homo sapien
ttgtgattgccagaaactggagaaagggtgaat

SEQ ID NO: 658863 - DNA, 33 bp, Homo sapien
gacactgatttgttagcatgagatagaattttc

SEQ ID NO: 658864 - DNA, 33 bp, Homo sapien
gacactgatttgttagtatgagatagaattttc

SEQ ID NO: 658865 - DNA, 33 bp, Homo sapien
tgtcctggagtgggctgacccaggctgcctttg

SEQ ID NO: 658866 - DNA, 33 bp, Homo sapien
tgtcctggagtgggcttacccaggctgcctttg

SEQ ID NO: 658867 - DNA, 33 bp, Homo sapien
tgggttgggtgcagcccaggatagagaatgtct

SEQ ID NO: 658868 - DNA, 33 bp, Homo sapien
tgggttgggtgcagccgaggatagagaatgtct

SEQ ID NO: 658869 - DNA, 33 bp, Homo sapien
gcttaaaacagattcacgtacttgcatttccgt

SEQ ID NO: 658870 - DNA, 33 bp, Homo sapien
gcttaaaacagattcatgtacttgcatttccgt

SEQ ID NO: 658871 - DNA, 33 bp, Homo sapien
gctttgctttttcatcacaccttcttctctgac

SEQ ID NO: 658872 - DNA, 33 bp, Homo sapien
gctttgctttttcatcccaccttcttctctgac

SEQ ID NO: 658873 - DNA, 33 bp, Homo sapien
atgtgttggcttgaaacctgggagtgccagagg

SEQ ID NO: 658874 - DNA, 33 bp, Homo sapien
atgtgttggcttgaaatctgggagtgccagagg

SEQ ID NO: 658875 - DNA, 33 bp, Homo sapien
acgacagcacagttgcagagcctgaacgccagc

SEQ ID NO: 658876 - DNA, 33 bp, Homo sapien
acgacagcacagttgcggagcctgaacgccagc

SEQ ID NO: 658877 - DNA, 33 bp, Homo sapien
atgacagaagaggcaacaaatgtgcagccatgt

SEQ ID NO: 658878 - DNA, 33 bp, Homo sapien
atgacagaagaggcaataaatgtgcagccatgt

SEQ ID NO: 658879 - DNA, 33 bp, Homo sapien
gcaacaaatattgtcaaatgaactggcagtgat

SEQ ID NO: 658880 - DNA, 33 bp, Homo sapien
gcaacaaatattgtcagatgaactggcagtgat

SEQ ID NO: 658881 - DNA, 33 bp, Homo sapien
tagggcaggaactggcagaacattctaggaccc

SEQ ID NO: 658882 - DNA, 33 bp, Homo sapien
tagggcaggaactggcggaacattctaggaccc

SEQ ID NO: 658883 - DNA, 33 bp, Homo sapien
aggtttgcttactgtacggaaacgcaaacaaat

SEQ ID NO: 658884 - DNA, 33 bp, Homo sapien
aggtttgcttactgtatggaaacgcaaacaaat

SEQ ID NO: 658885 - DNA, 33 bp, Homo sapien
acagtaagcaaacctacaaaggaatgggccatc

SEQ ID NO: 658886 - DNA, 33 bp, Homo sapien
acagtaagcaaacctagaaaggaatgggccatc

SEQ ID NO: 658887 - DNA, 33 bp, Homo sapien
cctttctttctaaatacagttttattgaaacac

SEQ ID NO: 658888 - DNA, 33 bp, Homo sapien
cctttctttctaaatagagttttattgaaacac

SEQ ID NO: 658889 - DNA, 33 bp, Homo sapien
agaatgtaaattagtacgaccattatgagaaac

SEQ ID NO: 658890 - DNA, 33 bp, Homo sapien
agaatgtaaattagtatgaccattatgagaaac

SEQ ID NO: 658891 - DNA, 33 bp, Homo sapien
acaggttgcctacttaaccccatggtgagtgtg

SEQ ID NO: 658892 - DNA, 33 bp, Homo sapien
acaggttgcctacttacccccatggtgagtgtg

SEQ ID NO: 658893 - DNA, 33 bp, Homo sapien
gctgcttttaatggacgaatttgtaaagcttta

SEQ ID NO: 658894 - DNA, 33 bp, Homo sapien
gctgcttttaatggactaatttgtaaagcttta

SEQ ID NO: 658895 - DNA, 33 bp, Homo sapien
aagacactcagtttcacaggcagaaaacctgga

SEQ ID NO: 658896 - DNA, 33 bp, Homo sapien
aagacactcagtttcagaggcagaaaacctgga

SEQ ID NO: 658897 - DNA, 33 bp, Homo sapien
ggcagaggaggagacaaatatgaaggaacgaac

SEQ ID NO: 658898 - DNA, 33 bp, Homo sapien
ggcagaggaggagacatatatgaaggaacgaac

SEQ ID NO: 658899 - DNA, 33 bp, Homo sapien
ttctgcatctcggaaacggcctatcttcttaag

SEQ ID NO: 658900 - DNA, 33 bp, Homo sapien
ttctgcatctcggaaatggcctatcttcttaag

SEQ ID NO: 658901 - DNA, 33 bp, Homo sapien
gcctctgcattctcacaggacagccagtgcact

SEQ ID NO: 658902 - DNA, 33 bp, Homo sapien
gcctctgcattctcacgggacagccagtgcact

SEQ ID NO: 658903 - DNA, 33 bp, Homo sapien
tgtgtcctagcagtctcaaaacacagtgctgag

SEQ ID NO: 658904 - DNA, 33 bp, Homo sapien
tgtgtcctagcagtctgaaaacacagtgctgag

SEQ ID NO: 658905 - DNA, 33 bp, Homo sapien
aaatgtgaacgcagtagaataatgcatcagtat

SEQ ID NO: 658906 - DNA, 33 bp, Homo sapien
aaatgtgaacgcagtataataatgcatcagtat

SEQ ID NO: 658907 - DNA, 33 bp, Homo sapien
taaaaaatgagatggcaagtttttagtgttgtc

SEQ ID NO: 658908 - DNA, 33 bp, Homo sapien
taaaaaatgagatggcgagtttttagtgttgtc

SEQ ID NO: 658909 - DNA, 33 bp, Homo sapien
aagcaatgctgttggacgggttgccttgaacct

SEQ ID NO: 658910 - DNA, 33 bp, Homo sapien
aagcaatgctgttggatgggttgccttgaacct

SEQ ID NO: 658911 - DNA, 33 bp, Homo sapien
cagaacttactaaatacctatcctatgccaggc

SEQ ID NO: 658912 - DNA, 33 bp, Homo sapien
cagaacttactaaatatctatcctatgccaggc

SEQ ID NO: 658913 - DNA, 33 bp, Homo sapien
gacagaaccttgcccacaggttagaggaaataa

SEQ ID NO: 658914 - DNA, 33 bp, Homo sapien
gacagaaccttgcccataggttagaggaaataa

SEQ ID NO: 658915 - DNA, 33 bp, Homo sapien
cagttagagttaagacaaagaaggccacgaagg

SEQ ID NO: 658916 - DNA, 33 bp, Homo sapien
cagttagagttaagacgaagaaggccacgaagg

SEQ ID NO: 658917 - DNA, 33 bp, Homo sapien
cagagggaaacacttacgcaataactacacttg

SEQ ID NO: 658918 - DNA, 33 bp, Homo sapien
cagagggaaacacttatgcaataactacacttg

SEQ ID NO: 658919 - DNA, 33 bp, Homo sapien
tctagattagtgattacagagctctttgagaaa

SEQ ID NO: 658920 - DNA, 33 bp, Homo sapien
tctagattagtgattagagagctctttgagaaa

SEQ ID NO: 658921 - DNA, 33 bp, Homo sapien
gagagttgactatgcaacaggctttgtgttaag

SEQ ID NO: 658922 - DNA, 33 bp, Homo sapien
gagagttgactatgcagcaggctttgtgttaag

SEQ ID NO: 658923 - DNA, 33 bp, Homo sapien
aattttgggaggttaacgattggtcaaatgcct

SEQ ID NO: 658924 - DNA, 33 bp, Homo sapien
aattttgggaggttaatgattggtcaaatgcct

SEQ ID NO: 658925 - DNA, 33 bp, Homo sapien
tctctccctctatttcccttcttccttctctct

SEQ ID NO: 658926 - DNA, 33 bp, Homo sapien
tctctccctctatttctcttcttccttctctct

SEQ ID NO: 658927 - DNA, 33 bp, Homo sapien
tctcatctgatccatcaacgctgtccaaggtgc

SEQ ID NO: 658928 - DNA, 33 bp, Homo sapien
tctcatctgatccatcgacgctgtccaaggtgc

SEQ ID NO: 658929 - DNA, 33 bp, Homo sapien
accctgatggatgtttcaaaaggtcactctgtg

SEQ ID NO: 658930 - DNA, 33 bp, Homo sapien
accctgatggatgttttaaaaggtcactctgtg

SEQ ID NO: 658931 - DNA, 33 bp, Homo sapien
ttcactaatgacttcaaacagtagggtagcact

SEQ ID NO: 658932 - DNA, 33 bp, Homo sapien
ttcactaatgacttcagacagtagggtagcact

SEQ ID NO: 658933 - DNA, 33 bp, Homo sapien
aattaagaaaaaagacaagaagttgcctgtaac

SEQ ID NO: 658934 - DNA, 33 bp, Homo sapien
aattaagaaaaaagaccagaagttgcctgtaac

SEQ ID NO: 658935 - DNA, 33 bp, Homo sapien
attagcaccagtgatgaagatatgaggcctgca

SEQ ID NO: 658936 - DNA, 33 bp, Homo sapien
attagcaccagtgatgcagatatgaggcctgca

SEQ ID NO: 658937 - DNA, 33 bp, Homo sapien
tttttcctgtatgccacgtaattttgtctgtaa

SEQ ID NO: 658938 - DNA, 33 bp, Homo sapien
tttttcctgtatgccatgtaattttgtctgtaa

SEQ ID NO: 658939 - DNA, 33 bp, Homo sapien
gtataccataattcaacagtgacacaaaccacc

SEQ ID NO: 658940 - DNA, 33 bp, Homo sapien
gtataccataattcaatagtgacacaaaccacc

SEQ ID NO: 658941 - DNA, 33 bp, Homo sapien
attagatctgccttcaaggaggttttatgtgaa

SEQ ID NO: 658942 - DNA, 33 bp, Homo sapien
attagatctgccttcagggaggttttatgtgaa

SEQ ID NO: 658943 - DNA, 33 bp, Homo sapien
ctccctggcagataaacacaacattatatttgc

SEQ ID NO: 658944 - DNA, 33 bp, Homo sapien
ctccctggcagataaagacaacattatatttgc

SEQ ID NO: 658945 - DNA, 33 bp, Homo sapien
ttctcttggcacagccacttcagttgttcaact

SEQ ID NO: 658946 - DNA, 33 bp, Homo sapien
ttctcttggcacagccgcttcagttgttcaact

SEQ ID NO: 658947 - DNA, 33 bp, Homo sapien
accgaggccccacacccagtatcatagccacag

SEQ ID NO: 658948 - DNA, 33 bp, Homo sapien
accgaggccccacacctagtatcatagccacag

SEQ ID NO: 658949 - DNA, 33 bp, Homo sapien
ctgtcctaaagtaaagaaagtggagagcagttg

SEQ ID NO: 658950 - DNA, 33 bp, Homo sapien
ctgtcctaaagtaaaggaagtggagagcagttg

SEQ ID NO: 658951 - DNA, 33 bp, Homo sapien
gaggtagggacctatccaatgtaggatgttccc

SEQ ID NO: 658952 - DNA, 33 bp, Homo sapien
gaggtagggacctatctaatgtaggatgttccc

SEQ ID NO: 658953 - DNA, 33 bp, Homo sapien
taccatacacatgacaccagaataaattccaaa

SEQ ID NO: 658954 - DNA, 33 bp, Homo sapien
taccatacacatgacatcagaataaattccaaa

SEQ ID NO: 658955 - DNA, 33 bp, Homo sapien
taatcttctgcaggagacatctttgtttaggtc

SEQ ID NO: 658956 - DNA, 33 bp, Homo sapien
taatcttctgcaggaggcatctttgtttaggtc

SEQ ID NO: 658957 - DNA, 33 bp, Homo sapien
ttactgtgatccaggcaaattgcttcaccaggg

SEQ ID NO: 658958 - DNA, 33 bp, Homo sapien
ttactgtgatccaggcgaattgcttcaccaggg

SEQ ID NO: 658959 - DNA, 33 bp, Homo sapien
cctgtctcccagtgacagctatttagtattgat

SEQ ID NO: 658960 - DNA, 33 bp, Homo sapien
cctgtctcccagtgaccgctatttagtattgat

SEQ ID NO: 658961 - DNA, 33 bp, Homo sapien
agtcgcccaagcacacacagttagtcagccaca

SEQ ID NO: 658962 - DNA, 33 bp, Homo sapien
agtcgcccaagcacacgcagttagtcagccaca

SEQ ID NO: 658963 - DNA, 33 bp, Homo sapien
gattccacgaactatgcatgcgaaacccctagt

SEQ ID NO: 658964 - DNA, 33 bp, Homo sapien
gattccacgaactatgtatgcgaaacccctagt

SEQ ID NO: 658965 - DNA, 33 bp, Homo sapien
tttgtgtgctaacgaacgtcagcttgcatacac

SEQ ID NO: 658966 - DNA, 33 bp, Homo sapien
tttgtgtgctaacgaatgtcagcttgcatacac

SEQ ID NO: 658967 - DNA, 33 bp, Homo sapien
aggatcagggaacataaatttaagtcctgtagc

SEQ ID NO: 658968 - DNA, 33 bp, Homo sapien
aggatcagggaacatatatttaagtcctgtagc

SEQ ID NO: 658969 - DNA, 33 bp, Homo sapien
gtcctaaaagtttggccagctttggtagcttgt

SEQ ID NO: 658970 - DNA, 33 bp, Homo sapien
gtcctaaaagtttggctagctttggtagcttgt

SEQ ID NO: 658971 - DNA, 33 bp, Homo sapien
aatcgtatacatactacaaccaaaatctgaaaa

SEQ ID NO: 658972 - DNA, 33 bp, Homo sapien
aatcgtatacatactataaccaaaatctgaaaa

SEQ ID NO: 658973 - DNA, 33 bp, Homo sapien
cacgggagaagacagacgaggcttctccaggtg

SEQ ID NO: 658974 - DNA, 33 bp, Homo sapien
cacgggagaagacagatgaggcttctccaggtg

SEQ ID NO: 658975 - DNA, 33 bp, Homo sapien
gggactgagaacctcccaaatcatcaagcgctg

SEQ ID NO: 658976 - DNA, 33 bp, Homo sapien
gggactgagaacctccgaaatcatcaagcgctg

SEQ ID NO: 658977 - DNA, 33 bp, Homo sapien
ccaaaatatgtctaccagaacctcagaatatga

SEQ ID NO: 658978 - DNA, 33 bp, Homo sapien
ccaaaatatgtctaccggaacctcagaatatga

SEQ ID NO: 658979 - DNA, 33 bp, Homo sapien
gtgctggccatcagtaggcaatggttctgacat

SEQ ID NO: 658980 - DNA, 33 bp, Homo sapien
gtgctggccatcagtatgcaatggttctgacat

SEQ ID NO: 658981 - DNA, 33 bp, Homo sapien
gaggggtgttccactgccaggacggatccttcg

SEQ ID NO: 658982 - DNA, 33 bp, Homo sapien
gaggggtgttccactgtcaggacggatccttcg

SEQ ID NO: 658983 - DNA, 33 bp, Homo sapien
catatcattggccagagtcaggtaacaagccgc

SEQ ID NO: 658984 - DNA, 33 bp, Homo sapien
catatcattggccagattcaggtaacaagccgc

SEQ ID NO: 658985 - DNA, 33 bp, Homo sapien
ttcctagctgttaggaacacaattaaggaacag

SEQ ID NO: 658986 - DNA, 33 bp, Homo sapien
ttcctagctgttaggagcacaattaaggaacag

SEQ ID NO: 658987 - DNA, 33 bp, Homo sapien
accaagccagtggatacctctcagttttgcctg

SEQ ID NO: 658988 - DNA, 33 bp, Homo sapien
accaagccagtggatatctctcagttttgcctg

SEQ ID NO: 658989 - DNA, 33 bp, Homo sapien
agatgcagagttgtacagggtggtgataaagac

SEQ ID NO: 658990 - DNA, 33 bp, Homo sapien
agatgcagagttgtacggggtggtgataaagac

SEQ ID NO: 658991 - DNA, 33 bp, Homo sapien
cacagctggccgtttacgcctgggacccaagac

SEQ ID NO: 658992 - DNA, 33 bp, Homo sapien
cacagctggccgtttatgcctgggacccaagac

SEQ ID NO: 658993 - DNA, 33 bp, Homo sapien
ggacttggtatgtgaacattttcatcatctagg

SEQ ID NO: 658994 - DNA, 33 bp, Homo sapien
ggacttggtatgtgaagattttcatcatctagg

SEQ ID NO: 658995 - DNA, 33 bp, Homo sapien
ataggctaattccttacagaaacacaacaaaac

SEQ ID NO: 658996 - DNA, 33 bp, Homo sapien
ataggctaattccttatagaaacacaacaaaac

SEQ ID NO: 658997 - DNA, 33 bp, Homo sapien
aactttatgccaataaatagacaaaaataggct

SEQ ID NO: 658998 - DNA, 33 bp, Homo sapien
aactttatgccaataagtagacaaaaataggct

SEQ ID NO: 658999 - DNA, 33 bp, Homo sapien
aagaggagacaagaaaagcttatgggtggccag

SEQ ID NO: 659000 - DNA, 33 bp, Homo sapien
aagaggagacaagaaaggcttatgggtggccag

SEQ ID NO: 659001 - DNA, 33 bp, Homo sapien
atgtgtcaggtggtcacggacatcaaaatattt

SEQ ID NO: 659002 - DNA, 33 bp, Homo sapien
atgtgtcaggtggtcatggacatcaaaatattt

SEQ ID NO: 659003 - DNA, 33 bp, Homo sapien
catgagcacagcagagaactgttcccgggctct

SEQ ID NO: 659004 - DNA, 33 bp, Homo sapien
catgagcacagcagaggactgttcccgggctct

SEQ ID NO: 659005 - DNA, 33 bp, Homo sapien
caaggacattgagccactgaaacctcaaagcag

SEQ ID NO: 659006 - DNA, 33 bp, Homo sapien
caaggacattgagccattgaaacctcaaagcag

SEQ ID NO: 659007 - DNA, 33 bp, Homo sapien
ttacaggttctaccctaaacagactttgcacaa

SEQ ID NO: 659008 - DNA, 33 bp, Homo sapien
ttacaggttctaccctcaacagactttgcacaa

SEQ ID NO: 659009 - DNA, 33 bp, Homo sapien
gttaccacagggccgacatggaagatggagaaa

SEQ ID NO: 659010 - DNA, 33 bp, Homo sapien
gttaccacagggccgatatggaagatggagaaa

SEQ ID NO: 659011 - DNA, 33 bp, Homo sapien
cccagaggatggcaaagcttctttgttaatcag

SEQ ID NO: 659012 - DNA, 33 bp, Homo sapien
cccagaggatggcaaatcttctttgttaatcag

SEQ ID NO: 659013 - DNA, 33 bp, Homo sapien
tgtgctaaatacacaaagtgcagcagatggcat

SEQ ID NO: 659014 - DNA, 33 bp, Homo sapien
tgtgctaaatacacaaggtgcagcagatggcat

SEQ ID NO: 659015 - DNA, 33 bp, Homo sapien
cagtggtgtttgtcccaggctttagagggcaaa

SEQ ID NO: 659016 - DNA, 33 bp, Homo sapien
cagtggtgtttgtcccgggctttagagggcaaa

SEQ ID NO: 659017 - DNA, 33 bp, Homo sapien
tagtaaaagtacatacaatgcaaaaaaaccccc

SEQ ID NO: 659018 - DNA, 33 bp, Homo sapien
tagtaaaagtacataccatgcaaaaaaaccccc

SEQ ID NO: 659019 - DNA, 33 bp, Homo sapien
ttaacttatttgtaaacaggtgatgcattcatg

SEQ ID NO: 659020 - DNA, 33 bp, Homo sapien
ttaacttatttgtaaagaggtgatgcattcatg

SEQ ID NO: 659021 - DNA, 33 bp, Homo sapien
gtgtggagttccgtgcaatgtggagccaggcag

SEQ ID NO: 659022 - DNA, 33 bp, Homo sapien
gtgtggagttccgtgcgatgtggagccaggcag

SEQ ID NO: 659023 - DNA, 33 bp, Homo sapien
attgtggctcaataaacgcacactgaataaaag

SEQ ID NO: 659024 - DNA, 33 bp, Homo sapien
attgtggctcaataaaggcacactgaataaaag

SEQ ID NO: 659025 - DNA, 33 bp, Homo sapien
ttaaaaaaaggaagacgctaagagcgggagcaa

SEQ ID NO: 659026 - DNA, 33 bp, Homo sapien
ttaaaaaaaggaagactctaagagcgggagcaa

SEQ ID NO: 659027 - DNA, 33 bp, Homo sapien
catcgcctgtctcccaccagaacgcccacactg

SEQ ID NO: 659028 - DNA, 33 bp, Homo sapien
catcgcctgtctcccatcagaacgcccacactg

SEQ ID NO: 659029 - DNA, 33 bp, Homo sapien
actccctccaatggcccccacagggcatccatg

SEQ ID NO: 659030 - DNA, 33 bp, Homo sapien
actccctccaatggcctccacagggcatccatg

SEQ ID NO: 659031 - DNA, 33 bp, Homo sapien
cctgtaaaggtgcagcaaacattagctgtgatt

SEQ ID NO: 659032 - DNA, 33 bp, Homo sapien
cctgtaaaggtgcagcgaacattagctgtgatt

SEQ ID NO: 659033 - DNA, 33 bp, Homo sapien
ctcaggacatcctacaagtcactttacaggcag

SEQ ID NO: 659034 - DNA, 33 bp, Homo sapien
ctcaggacatcctacaggtcactttacaggcag

SEQ ID NO: 659035 - DNA, 33 bp, Homo sapien
gctctagtcactccagcactacccactgctgta

SEQ ID NO: 659036 - DNA, 33 bp, Homo sapien
gctctagtcactccagtactacccactgctgta

SEQ ID NO: 659037 - DNA, 33 bp, Homo sapien
cccccaacatgaaagcaacgccagcaattggag

SEQ ID NO: 659038 - DNA, 33 bp, Homo sapien
cccccaacatgaaagcgacgccagcaattggag

SEQ ID NO: 659039 - DNA, 33 bp, Homo sapien
gccatgccgagaaaggccaatggagaaatgaag

SEQ ID NO: 659040 - DNA, 33 bp, Homo sapien
gccatgccgagaaagggcaatggagaaatgaag

SEQ ID NO: 659041 - DNA, 33 bp, Homo sapien
ctcttctcctcaatggacagaaagtaacctgct

SEQ ID NO: 659042 - DNA, 33 bp, Homo sapien
ctcttctcctcaatgggcagaaagtaacctgct

SEQ ID NO: 659043 - DNA, 33 bp, Homo sapien
ttctcctgcaaagaacagaggattgggattcac

SEQ ID NO: 659044 - DNA, 33 bp, Homo sapien
ttctcctgcaaagaacggaggattgggattcac

SEQ ID NO: 659045 - DNA, 33 bp, Homo sapien
ctataagatgctccagactcgtgttgaatatgc

SEQ ID NO: 659046 - DNA, 33 bp, Homo sapien
ctataagatgctccaggctcgtgttgaatatgc

SEQ ID NO: 659047 - DNA, 33 bp, Homo sapien
aatgaactaggcatgacaaccattgaccaccaa

SEQ ID NO: 659048 - DNA, 33 bp, Homo sapien
aatgaactaggcatgataaccattgaccaccaa

SEQ ID NO: 659049 - DNA, 33 bp, Homo sapien
agtctagtgaaggaaacagatttgactcaaata

SEQ ID NO: 659050 - DNA, 33 bp, Homo sapien
agtctagtgaaggaaatagatttgactcaaata

SEQ ID NO: 659051 - DNA, 33 bp, Homo sapien
aaaactacctgtggacccacatctccacatggt

SEQ ID NO: 659052 - DNA, 33 bp, Homo sapien
aaaactacctgtggactcacatctccacatggt

SEQ ID NO: 659053 - DNA, 33 bp, Homo sapien
caaatacaaaaatagcccattgatggtaaaaga

SEQ ID NO: 659054 - DNA, 33 bp, Homo sapien
caaatacaaaaatagctcattgatggtaaaaga

SEQ ID NO: 659055 - DNA, 33 bp, Homo sapien
ctgccccatctggctccgaaagtggctcccagg

SEQ ID NO: 659056 - DNA, 33 bp, Homo sapien
ctgccccatctggctctgaaagtggctcccagg

SEQ ID NO: 659057 - DNA, 33 bp, Homo sapien
ctctccaaccagacccaacatggcatcccctgc

SEQ ID NO: 659058 - DNA, 33 bp, Homo sapien
ctctccaaccagacccgacatggcatcccctgc

SEQ ID NO: 659059 - DNA, 33 bp, Homo sapien
ccggtataattccagactagagcctgccaatac

SEQ ID NO: 659060 - DNA, 33 bp, Homo sapien
ccggtataattccagattagagcctgccaatac

SEQ ID NO: 659061 - DNA, 33 bp, Homo sapien
ctagcagacctagtaaaacccagatgtgccctg

SEQ ID NO: 659062 - DNA, 33 bp, Homo sapien
ctagcagacctagtaagacccagatgtgccctg

SEQ ID NO: 659063 - DNA, 33 bp, Homo sapien
tgcagctgtaacacaaggtatttgctcattctc

SEQ ID NO: 659064 - DNA, 33 bp, Homo sapien
tgcagctgtaacacaatgtatttgctcattctc

SEQ ID NO: 659065 - DNA, 33 bp, Homo sapien
ccagtggatcactgcaacagcatctgtgtgtcc

SEQ ID NO: 659066 - DNA, 33 bp, Homo sapien
ccagtggatcactgcagcagcatctgtgtgtcc

SEQ ID NO: 659067 - DNA, 33 bp, Homo sapien
atgctaccaaccactgacaaaggaataggaagc

SEQ ID NO: 659068 - DNA, 33 bp, Homo sapien
atgctaccaaccactggcaaaggaataggaagc

SEQ ID NO: 659069 - DNA, 33 bp, Homo sapien
gcttcctgagaatggaatcatgcagagcaagca

SEQ ID NO: 659070 - DNA, 33 bp, Homo sapien
gcttcctgagaatggagtcatgcagagcaagca

SEQ ID NO: 659071 - DNA, 33 bp, Homo sapien
tagaagacagaaattcactacactttggggaaa

SEQ ID NO: 659072 - DNA, 33 bp, Homo sapien
tagaagacagaaattcgctacactttggggaaa

SEQ ID NO: 659073 - DNA, 33 bp, Homo sapien
ctcgactatactagcacgatgcagggtttcact

SEQ ID NO: 659074 - DNA, 33 bp, Homo sapien
ctcgactatactagcatgatgcagggtttcact

SEQ ID NO: 659075 - DNA, 33 bp, Homo sapien
tgactagaactcaagacgtggtgttaacaggcc

SEQ ID NO: 659076 - DNA, 33 bp, Homo sapien
tgactagaactcaagatgtggtgttaacaggcc

SEQ ID NO: 659077 - DNA, 33 bp, Homo sapien
ctgagaggccttctccaaccattcattgctttc

SEQ ID NO: 659078 - DNA, 33 bp, Homo sapien
ctgagaggccttctccgaccattcattgctttc

SEQ ID NO: 659079 - DNA, 33 bp, Homo sapien
accactgtgggcaactaagaacacagtccaggc

SEQ ID NO: 659080 - DNA, 33 bp, Homo sapien
accactgtgggcaactgagaacacagtccaggc

SEQ ID NO: 659081 - DNA, 33 bp, Homo sapien
tacttcccagacttcactatagctaggggtggc

SEQ ID NO: 659082 - DNA, 33 bp, Homo sapien
tacttcccagacttcattatagctaggggtggc

SEQ ID NO: 659083 - DNA, 33 bp, Homo sapien
gaatagaatcatgcagaacttgactttgtgtgc

SEQ ID NO: 659084 - DNA, 33 bp, Homo sapien
gaatagaatcatgcaggacttgactttgtgtgc

SEQ ID NO: 659085 - DNA, 33 bp, Homo sapien
gaactactgacctcacaatctgctcacctcagt

SEQ ID NO: 659086 - DNA, 33 bp, Homo sapien
gaactactgacctcacgatctgctcacctcagt

SEQ ID NO: 659087 - DNA, 33 bp, Homo sapien
aggatttgtgattcaacgaaaagtgagtgaata

SEQ ID NO: 659088 - DNA, 33 bp, Homo sapien
aggatttgtgattcaatgaaaagtgagtgaata

SEQ ID NO: 659089 - DNA, 33 bp, Homo sapien
gcagaggcgcagataacacagtggctgtcccag

SEQ ID NO: 659090 - DNA, 33 bp, Homo sapien
gcagaggcgcagataatacagtggctgtcccag

SEQ ID NO: 659091 - DNA, 33 bp, Homo sapien
agggtgacaagtataacgctttgatttgaacta

SEQ ID NO: 659092 - DNA, 33 bp, Homo sapien
agggtgacaagtataatgctttgatttgaacta

SEQ ID NO: 659093 - DNA, 33 bp, Homo sapien
ctgtcccagcaaccaaaggatgtaagcccgtag

SEQ ID NO: 659094 - DNA, 33 bp, Homo sapien
ctgtcccagcaaccaacggatgtaagcccgtag

SEQ ID NO: 659095 - DNA, 33 bp, Homo sapien
tctgttggagccgcgccgcctttaaattagccc

SEQ ID NO: 659096 - DNA, 33 bp, Homo sapien
tctgttggagccgcgctgcctttaaattagccc

SEQ ID NO: 659097 - DNA, 33 bp, Homo sapien
agaagttgaacataggaattaggagattgtgca

SEQ ID NO: 659098 - DNA, 33 bp, Homo sapien
agaagttgaacatagggattaggagattgtgca

SEQ ID NO: 659099 - DNA, 33 bp, Homo sapien
actacacctatctggacacatttggccgccctg

SEQ ID NO: 659100 - DNA, 33 bp, Homo sapien
actacacctatctggatacatttggccgccctg

SEQ ID NO: 659101 - DNA, 33 bp, Homo sapien
ggtccttggtggtaaaaagagaagcaaccactg

SEQ ID NO: 659102 - DNA, 33 bp, Homo sapien
ggtccttggtggtaaacagagaagcaaccactg

SEQ ID NO: 659103 - DNA, 33 bp, Homo sapien
agccttcactaaaagaatccagtaagtcagacc

SEQ ID NO: 659104 - DNA, 33 bp, Homo sapien
agccttcactaaaagattccagtaagtcagacc

SEQ ID NO: 659105 - DNA, 33 bp, Homo sapien
ttggcagtttcatactaaactaaacataccctt

SEQ ID NO: 659106 - DNA, 33 bp, Homo sapien
ttggcagtttcatactgaactaaacataccctt

SEQ ID NO: 659107 - DNA, 33 bp, Homo sapien
tgcattcccctgatgacagatgataggaaggat

SEQ ID NO: 659108 - DNA, 33 bp, Homo sapien
tgcattcccctgatgatagatgataggaaggat

SEQ ID NO: 659109 - DNA, 33 bp, Homo sapien
agagctagccacaaaacctagaaaagttactct

SEQ ID NO: 659110 - DNA, 33 bp, Homo sapien
agagctagccacaaaatctagaaaagttactct

SEQ ID NO: 659111 - DNA, 33 bp, Homo sapien
tgtttatagggaaataagttcaaaatctcagtg

SEQ ID NO: 659112 - DNA, 33 bp, Homo sapien
tgtttatagggaaataggttcaaaatctcagtg

SEQ ID NO: 659113 - DNA, 33 bp, Homo sapien
tatgataagcattaaacttctaaatgtaggatg

SEQ ID NO: 659114 - DNA, 33 bp, Homo sapien
tatgataagcattaaatttctaaatgtaggatg

SEQ ID NO: 659115 - DNA, 33 bp, Homo sapien
acctagaaatttaatacagtgctctggagtctg

SEQ ID NO: 659116 - DNA, 33 bp, Homo sapien
acctagaaatttaatatagtgctctggagtctg

SEQ ID NO: 659117 - DNA, 33 bp, Homo sapien
gccggtattcaagagcgcctaattcggtgacac

SEQ ID NO: 659118 - DNA, 33 bp, Homo sapien
gccggtattcaagagctcctaattcggtgacac

SEQ ID NO: 659119 - DNA, 33 bp, Homo sapien
gtcgaaatgaacacaactggcttttccacaggg

SEQ ID NO: 659120 - DNA, 33 bp, Homo sapien
gtcgaaatgaacacaagtggcttttccacaggg

SEQ ID NO: 659121 - DNA, 33 bp, Homo sapien
gtgcattcaccagacacggaaagcaaaagagaa

SEQ ID NO: 659122 - DNA, 33 bp, Homo sapien
gtgcattcaccagacatggaaagcaaaagagaa

SEQ ID NO: 659123 - DNA, 33 bp, Homo sapien
aaagagccatggataactgatgggccacccagg

SEQ ID NO: 659124 - DNA, 33 bp, Homo sapien
aaagagccatggataagtgatgggccacccagg

SEQ ID NO: 659125 - DNA, 33 bp, Homo sapien
aaaacattcaactatcacatggccacctgcctc

SEQ ID NO: 659126 - DNA, 33 bp, Homo sapien
aaaacattcaactatcgcatggccacctgcctc

SEQ ID NO: 659127 - DNA, 33 bp, Homo sapien
ggtttactggagccaccgtatttctccatgcac

SEQ ID NO: 659128 - DNA, 33 bp, Homo sapien
ggtttactggagccactgtatttctccatgcac

SEQ ID NO: 659129 - DNA, 33 bp, Homo sapien
ccacagggccacactcagagatgtgctggtatt

SEQ ID NO: 659130 - DNA, 33 bp, Homo sapien
ccacagggccacactcggagatgtgctggtatt

SEQ ID NO: 659131 - DNA, 33 bp, Homo sapien
taatgccaatttgcaacctgagagggggatctt

SEQ ID NO: 659132 - DNA, 33 bp, Homo sapien
taatgccaatttgcaagctgagagggggatctt

SEQ ID NO: 659133 - DNA, 33 bp, Homo sapien
ggtgactccagaagccaaccagtctatgcacag

SEQ ID NO: 659134 - DNA, 33 bp, Homo sapien
ggtgactccagaagccgaccagtctatgcacag

SEQ ID NO: 659135 - DNA, 33 bp, Homo sapien
gaatatttttcaaaagaaacgcctgcttactca

SEQ ID NO: 659136 - DNA, 33 bp, Homo sapien
gaatatttttcaaaagtaacgcctgcttactca

SEQ ID NO: 659137 - DNA, 33 bp, Homo sapien
ttgtctgtgcacttccactagagtgtcagctcc

SEQ ID NO: 659138 - DNA, 33 bp, Homo sapien
ttgtctgtgcacttccgctagagtgtcagctcc

SEQ ID NO: 659139 - DNA, 33 bp, Homo sapien
cagtggtgggagaggaaacctaggacgtcaggg

SEQ ID NO: 659140 - DNA, 33 bp, Homo sapien
cagtggtgggagaggagacctaggacgtcaggg

SEQ ID NO: 659141 - DNA, 33 bp, Homo sapien
ttttgtctacagcctacatcatggctgagcaca

SEQ ID NO: 659142 - DNA, 33 bp, Homo sapien
ttttgtctacagcctagatcatggctgagcaca

SEQ ID NO: 659143 - DNA, 33 bp, Homo sapien
gagtcgccattaactaaataaagaacacttgtg

SEQ ID NO: 659144 - DNA, 33 bp, Homo sapien
gagtcgccattaactagataaagaacacttgtg

SEQ ID NO: 659145 - DNA, 33 bp, Homo sapien
atctcactgggctctacaacatcttcaagtgag

SEQ ID NO: 659146 - DNA, 33 bp, Homo sapien
atctcactgggctctataacatcttcaagtgag

SEQ ID NO: 659147 - DNA, 33 bp, Homo sapien
gtgaaggccacataatgagtaagcctgaaatca

SEQ ID NO: 659148 - DNA, 33 bp, Homo sapien
gtgaaggccacataattagtaagcctgaaatca

SEQ ID NO: 659149 - DNA, 33 bp, Homo sapien
caacaccatgtactcaagactaggggagatcat

SEQ ID NO: 659150 - DNA, 33 bp, Homo sapien
caacaccatgtactcacgactaggggagatcat

SEQ ID NO: 659151 - DNA, 33 bp, Homo sapien
agcaaacttttaaaatcaagggtcagataacat

SEQ ID NO: 659152 - DNA, 33 bp, Homo sapien
agcaaacttttaaaatgaagggtcagataacat

SEQ ID NO: 659153 - DNA, 33 bp, Homo sapien
cattggttccctgtggccagtagtgtagaggtc

SEQ ID NO: 659154 - DNA, 33 bp, Homo sapien
cattggttccctgtggtcagtagtgtagaggtc

SEQ ID NO: 659155 - DNA, 33 bp, Homo sapien
ggtgccgaatgggccacgttgctggacagtgag

SEQ ID NO: 659156 - DNA, 33 bp, Homo sapien
ggtgccgaatgggccatgttgctggacagtgag

SEQ ID NO: 659157 - DNA, 33 bp, Homo sapien
aatttcatatccaagcaaactaattgtgagggc

SEQ ID NO: 659158 - DNA, 33 bp, Homo sapien
aatttcatatccaagccaactaattgtgagggc

SEQ ID NO: 659159 - DNA, 33 bp, Homo sapien
cggataagtgtttgtaggaatgcagagaaacta

SEQ ID NO: 659160 - DNA, 33 bp, Homo sapien
cggataagtgtttgtatgaatgcagagaaacta

SEQ ID NO: 659161 - DNA, 33 bp, Homo sapien
catcttatgacacttaggccctgagcagcgtaa

SEQ ID NO: 659162 - DNA, 33 bp, Homo sapien
catcttatgacacttatgccctgagcagcgtaa

SEQ ID NO: 659163 - DNA, 33 bp, Homo sapien
taatcacttgaggaacggccagaatgttttcca

SEQ ID NO: 659164 - DNA, 33 bp, Homo sapien
taatcacttgaggaactgccagaatgttttcca

SEQ ID NO: 659165 - DNA, 33 bp, Homo sapien
ccttacttctgacgccaactgcaagttcagaag

SEQ ID NO: 659166 - DNA, 33 bp, Homo sapien
ccttacttctgacgccgactgcaagttcagaag

SEQ ID NO: 659167 - DNA, 33 bp, Homo sapien
tctggtttgataatgcactagaagggctcacag

SEQ ID NO: 659168 - DNA, 33 bp, Homo sapien
tctggtttgataatgcgctagaagggctcacag

SEQ ID NO: 659169 - DNA, 33 bp, Homo sapien
catatgttttcacttcgcctgggcttataatag

SEQ ID NO: 659170 - DNA, 33 bp, Homo sapien
catatgttttcacttctcctgggcttataatag

SEQ ID NO: 659171 - DNA, 33 bp, Homo sapien
taatttgctatctctacacttttgtcaatttga

SEQ ID NO: 659172 - DNA, 33 bp, Homo sapien
taatttgctatctctatacttttgtcaatttga

SEQ ID NO: 659173 - DNA, 33 bp, Homo sapien
gatgagggctaaaggaagtcaagtgccaatttt

SEQ ID NO: 659174 - DNA, 33 bp, Homo sapien
gatgagggctaaaggaggtcaagtgccaatttt

SEQ ID NO: 659175 - DNA, 33 bp, Homo sapien
atagcaatagacccaagagtaaaggcatcattt

SEQ ID NO: 659176 - DNA, 33 bp, Homo sapien
atagcaatagacccaatagtaaaggcatcattt

SEQ ID NO: 659177 - DNA, 33 bp, Homo sapien
tgtcaaagagcaaaaccgtggcgcagctggggc

SEQ ID NO: 659178 - DNA, 33 bp, Homo sapien
tgtcaaagagcaaaactgtggcgcagctggggc

SEQ ID NO: 659179 - DNA, 33 bp, Homo sapien
agcacttcctggcatacagacagcagtctccag

SEQ ID NO: 659180 - DNA, 33 bp, Homo sapien
agcacttcctggcatatagacagcagtctccag

SEQ ID NO: 659181 - DNA, 33 bp, Homo sapien
taaaatgtccggccgacgtttctggggtaggag

SEQ ID NO: 659182 - DNA, 33 bp, Homo sapien
taaaatgtccggccgatgtttctggggtaggag

SEQ ID NO: 659183 - DNA, 33 bp, Homo sapien
agacagaacctacaacacaaggactgataagga

SEQ ID NO: 659184 - DNA, 33 bp, Homo sapien
agacagaacctacaacgcaaggactgataagga

SEQ ID NO: 659185 - DNA, 33 bp, Homo sapien
gacagaaaaggatgcaagttagacagaaaacaa

SEQ ID NO: 659186 - DNA, 33 bp, Homo sapien
gacagaaaaggatgcaggttagacagaaaacaa

SEQ ID NO: 659187 - DNA, 33 bp, Homo sapien
cagcaactctgccacactctgtttattggtgag

SEQ ID NO: 659188 - DNA, 33 bp, Homo sapien
cagcaactctgccacattctgtttattggtgag

SEQ ID NO: 659189 - DNA, 33 bp, Homo sapien
gtaagactgacatgaccgactctttgtggcaaa

SEQ ID NO: 659190 - DNA, 33 bp, Homo sapien
gtaagactgacatgacggactctttgtggcaaa

SEQ ID NO: 659191 - DNA, 33 bp, Homo sapien
gggtggcacataacacagctccaggaatgtcat

SEQ ID NO: 659192 - DNA, 33 bp, Homo sapien
gggtggcacataacacggctccaggaatgtcat

SEQ ID NO: 659193 - DNA, 33 bp, Homo sapien
tcttgcaggccaaagtgaagagtgtggatttca

SEQ ID NO: 659194 - DNA, 33 bp, Homo sapien
tcttgcaggccaaagttaagagtgtggatttca

SEQ ID NO: 659195 - DNA, 33 bp, Homo sapien
gggctaaacaacgaacaagaggaaagcaaggaa

SEQ ID NO: 659196 - DNA, 33 bp, Homo sapien
gggctaaacaacgaacgagaggaaagcaaggaa

SEQ ID NO: 659197 - DNA, 33 bp, Homo sapien
cgatggccttgacactcaacatgatgcccttgc

SEQ ID NO: 659198 - DNA, 33 bp, Homo sapien
cgatggccttgacacttaacatgatgcccttgc

SEQ ID NO: 659199 - DNA, 33 bp, Homo sapien
ctgctcccgcagtaccaatagtgaacacaagac

SEQ ID NO: 659200 - DNA, 33 bp, Homo sapien
ctgctcccgcagtaccgatagtgaacacaagac

SEQ ID NO: 659201 - DNA, 33 bp, Homo sapien
gaagatcgttagacaaagaccaggaagacagga

SEQ ID NO: 659202 - DNA, 33 bp, Homo sapien
gaagatcgttagacaaggaccaggaagacagga

SEQ ID NO: 659203 - DNA, 33 bp, Homo sapien
aaggaaccttcagtaaatggtgccttatattag

SEQ ID NO: 659204 - DNA, 33 bp, Homo sapien
aaggaaccttcagtaagtggtgccttatattag

SEQ ID NO: 659205 - DNA, 33 bp, Homo sapien
gggtaaactttgagaaatgtatgctaagtgaaa

SEQ ID NO: 659206 - DNA, 33 bp, Homo sapien
gggtaaactttgagaattgtatgctaagtgaaa

SEQ ID NO: 659207 - DNA, 33 bp, Homo sapien
ctaaatgttttataaaaggagtcatatagcgtg

SEQ ID NO: 659208 - DNA, 33 bp, Homo sapien
ctaaatgttttataaagggagtcatatagcgtg

SEQ ID NO: 659209 - DNA, 33 bp, Homo sapien
tgtgcccacgttatgacggtttgaacaaggaag

SEQ ID NO: 659210 - DNA, 33 bp, Homo sapien
tgtgcccacgttatgatggtttgaacaaggaag

SEQ ID NO: 659211 - DNA, 33 bp, Homo sapien
acgttaccaataaccacagcttctcccctatgc

SEQ ID NO: 659212 - DNA, 33 bp, Homo sapien
acgttaccaataaccagagcttctcccctatgc

SEQ ID NO: 659213 - DNA, 33 bp, Homo sapien
tacctcttcatagtcacgcccattcctacctct

SEQ ID NO: 659214 - DNA, 33 bp, Homo sapien
tacctcttcatagtcaggcccattcctacctct

SEQ ID NO: 659215 - DNA, 33 bp, Homo sapien
gttctatttctgttcccgacgtgaattactgat

SEQ ID NO: 659216 - DNA, 33 bp, Homo sapien
gttctatttctgttcctgacgtgaattactgat

SEQ ID NO: 659217 - DNA, 33 bp, Homo sapien
gggcccattagctgacaactcactaaacattag

SEQ ID NO: 659218 - DNA, 33 bp, Homo sapien
gggcccattagctgacgactcactaaacattag

SEQ ID NO: 659219 - DNA, 33 bp, Homo sapien
tagccagcttctgtgacctcatcatggttaatt

SEQ ID NO: 659220 - DNA, 33 bp, Homo sapien
tagccagcttctgtgatctcatcatggttaatt

SEQ ID NO: 659221 - DNA, 33 bp, Homo sapien
cagttcttactcttgaaccccctgaggaaacta

SEQ ID NO: 659222 - DNA, 33 bp, Homo sapien
cagttcttactcttgatccccctgaggaaacta

SEQ ID NO: 659223 - DNA, 33 bp, Homo sapien
tccctgacttcgctcacgtggcacaacccccca

SEQ ID NO: 659224 - DNA, 33 bp, Homo sapien
tccctgacttcgctcatgtggcacaacccccca

SEQ ID NO: 659225 - DNA, 33 bp, Homo sapien
tccaatgccactgatacagtagagagcaattgg

SEQ ID NO: 659226 - DNA, 33 bp, Homo sapien
tccaatgccactgatatagtagagagcaattgg

SEQ ID NO: 659227 - DNA, 33 bp, Homo sapien
tcagcaacaaggtctacgtatctgacgtcagtg

SEQ ID NO: 659228 - DNA, 33 bp, Homo sapien
tcagcaacaaggtctatgtatctgacgtcagtg

SEQ ID NO: 659229 - DNA, 33 bp, Homo sapien
ttggagaatcttagtacgagaaacatgttcctt

SEQ ID NO: 659230 - DNA, 33 bp, Homo sapien
ttggagaatcttagtatgagaaacatgttcctt

SEQ ID NO: 659231 - DNA, 33 bp, Homo sapien
tttgttgaagtaagcacaaaatatcacatgagg

SEQ ID NO: 659232 - DNA, 33 bp, Homo sapien
tttgttgaagtaagcataaaatatcacatgagg

SEQ ID NO: 659233 - DNA, 33 bp, Homo sapien
ccttgacaaaccaaaaaaacatcacagctttca

SEQ ID NO: 659234 - DNA, 33 bp, Homo sapien
ccttgacaaaccaaaacaacatcacagctttca

SEQ ID NO: 659235 - DNA, 33 bp, Homo sapien
gcagtgggttattcacactcaggttctcaggag

SEQ ID NO: 659236 - DNA, 33 bp, Homo sapien
gcagtgggttattcacgctcaggttctcaggag

SEQ ID NO: 659237 - DNA, 33 bp, Homo sapien
attttgttcttttctacgactgcgtggtattcc

SEQ ID NO: 659238 - DNA, 33 bp, Homo sapien
attttgttcttttctatgactgcgtggtattcc

SEQ ID NO: 659239 - DNA, 33 bp, Homo sapien
tctcacatagtttggtaaatacaggactgttcc

SEQ ID NO: 659240 - DNA, 33 bp, Homo sapien
tctcacatagtttggtcaatacaggactgttcc

SEQ ID NO: 659241 - DNA, 33 bp, Homo sapien
ctcctgaccgctaggaagcgcacttcggagtag

SEQ ID NO: 659242 - DNA, 33 bp, Homo sapien
ctcctgaccgctaggaggcgcacttcggagtag

SEQ ID NO: 659243 - DNA, 33 bp, Homo sapien
acaagtgtatacaggggaatgtggtcagaggct

SEQ ID NO: 659244 - DNA, 33 bp, Homo sapien
acaagtgtatacagggtaatgtggtcagaggct

SEQ ID NO: 659245 - DNA, 33 bp, Homo sapien
aagaaatattatacaaggcacctttgtgttgta

SEQ ID NO: 659246 - DNA, 33 bp, Homo sapien
aagaaatattatacaatgcacctttgtgttgta

SEQ ID NO: 659247 - DNA, 33 bp, Homo sapien
gcaaaggcaaaggtaacaaagtgcagagttcat

SEQ ID NO: 659248 - DNA, 33 bp, Homo sapien
gcaaaggcaaaggtaagaaagtgcagagttcat

SEQ ID NO: 659249 - DNA, 33 bp, Homo sapien
tccttctccaattccaagtgaaagggcatattt

SEQ ID NO: 659250 - DNA, 33 bp, Homo sapien
tccttctccaattccaggtgaaagggcatattt

SEQ ID NO: 659251 - DNA, 33 bp, Homo sapien
atgagataacagtttgaaagtgttctaaaaaat

SEQ ID NO: 659252 - DNA, 33 bp, Homo sapien
atgagataacagtttggaagtgttctaaaaaat

SEQ ID NO: 659253 - DNA, 33 bp, Homo sapien
ttctctggtcaaaatccatccttctaaaaactg

SEQ ID NO: 659254 - DNA, 33 bp, Homo sapien
ttctctggtcaaaatctatccttctaaaaactg

SEQ ID NO: 659255 - DNA, 33 bp, Homo sapien
aggtgggctgatttcacgttcaagtagtttctc

SEQ ID NO: 659256 - DNA, 33 bp, Homo sapien
aggtgggctgatttcatgttcaagtagtttctc

SEQ ID NO: 659257 - DNA, 33 bp, Homo sapien
cctaaaccagtaatgacgacaaattgcacaaga

SEQ ID NO: 659258 - DNA, 33 bp, Homo sapien
cctaaaccagtaatgatgacaaattgcacaaga

SEQ ID NO: 659259 - DNA, 33 bp, Homo sapien
gaataaggatgctacgaaattaaaggcttcact

SEQ ID NO: 659260 - DNA, 33 bp, Homo sapien
gaataaggatgctacgcaattaaaggcttcact

SEQ ID NO: 659261 - DNA, 33 bp, Homo sapien
atgcgaggccgggaaccctgatcttctgaccta

SEQ ID NO: 659262 - DNA, 33 bp, Homo sapien
atgcgaggccgggaactctgatcttctgaccta

SEQ ID NO: 659263 - DNA, 33 bp, Homo sapien
gggcttcagggctgtcccccacaaatcctctca

SEQ ID NO: 659264 - DNA, 33 bp, Homo sapien
gggcttcagggctgtctcccacaaatcctctca

SEQ ID NO: 659265 - DNA, 33 bp, Homo sapien
tgccccaaatagtctacaaagtgttgtttagcc

SEQ ID NO: 659266 - DNA, 33 bp, Homo sapien
tgccccaaatagtctagaaagtgttgtttagcc

SEQ ID NO: 659267 - DNA, 33 bp, Homo sapien
atcttctttggacccacgtattttctcttgtca

SEQ ID NO: 659268 - DNA, 33 bp, Homo sapien
atcttctttggacccaggtattttctcttgtca

SEQ ID NO: 659269 - DNA, 33 bp, Homo sapien
tgccaaaaacgtccccaatacatgtgagttctc

SEQ ID NO: 659270 - DNA, 33 bp, Homo sapien
tgccaaaaacgtcccccatacatgtgagttctc

SEQ ID NO: 659271 - DNA, 33 bp, Homo sapien
tgtcaaagtcagaaggacccaagtcgggaatgg

SEQ ID NO: 659272 - DNA, 33 bp, Homo sapien
tgtcaaagtcagaaggtcccaagtcgggaatgg

SEQ ID NO: 659273 - DNA, 33 bp, Homo sapien
aggcaagatgcaggggacccagcaatgacaagt

SEQ ID NO: 659274 - DNA, 33 bp, Homo sapien
aggcaagatgcagggggcccagcaatgacaagt

SEQ ID NO: 659275 - DNA, 33 bp, Homo sapien
gctagcacattcctgacgggcttgttagagatg

SEQ ID NO: 659276 - DNA, 33 bp, Homo sapien
gctagcacattcctgatgggcttgttagagatg

SEQ ID NO: 659277 - DNA, 33 bp, Homo sapien
tggaggcacagaggaagcctgtctgagaattac

SEQ ID NO: 659278 - DNA, 33 bp, Homo sapien
tggaggcacagaggaatcctgtctgagaattac

SEQ ID NO: 659279 - DNA, 33 bp, Homo sapien
gcttccagcactggagaagagcccagtggagtc

SEQ ID NO: 659280 - DNA, 33 bp, Homo sapien
gcttccagcactggaggagagcccagtggagtc

SEQ ID NO: 659281 - DNA, 33 bp, Homo sapien
atgattccctgaagaccgcttcttagaaatgac

SEQ ID NO: 659282 - DNA, 33 bp, Homo sapien
atgattccctgaagactgcttcttagaaatgac

SEQ ID NO: 659283 - DNA, 33 bp, Homo sapien
agcttgtacaacttacacattgtagagctcctc

SEQ ID NO: 659284 - DNA, 33 bp, Homo sapien
agcttgtacaacttacgcattgtagagctcctc

SEQ ID NO: 659285 - DNA, 33 bp, Homo sapien
ctccaggaagtgaccccgagacaataactgtgc

SEQ ID NO: 659286 - DNA, 33 bp, Homo sapien
ctccaggaagtgaccctgagacaataactgtgc

SEQ ID NO: 659287 - DNA, 33 bp, Homo sapien
ttttaccaaaatgggcccatgacatcctgtgac

SEQ ID NO: 659288 - DNA, 33 bp, Homo sapien
ttttaccaaaatgggctcatgacatcctgtgac

SEQ ID NO: 659289 - DNA, 33 bp, Homo sapien
atccagcggttccgtcacaggtacagactgcat

SEQ ID NO: 659290 - DNA, 33 bp, Homo sapien
atccagcggttccgtcgcaggtacagactgcat

SEQ ID NO: 659291 - DNA, 33 bp, Homo sapien
cttttccaggagcccacgttgcattaagcgctt

SEQ ID NO: 659292 - DNA, 33 bp, Homo sapien
cttttccaggagcccatgttgcattaagcgctt

SEQ ID NO: 659293 - DNA, 33 bp, Homo sapien
atgtctgagccagggccgaaccaaacagaccgc

SEQ ID NO: 659294 - DNA, 33 bp, Homo sapien
atgtctgagccagggctgaaccaaacagaccgc

SEQ ID NO: 659295 - DNA, 33 bp, Homo sapien
acatcgcatgcccgtccaagctctgggtgggga

SEQ ID NO: 659296 - DNA, 33 bp, Homo sapien
acatcgcatgcccgtcgaagctctgggtgggga

SEQ ID NO: 659297 - DNA, 33 bp, Homo sapien
cccagaacctgaatgaaatgactgttatcccca

SEQ ID NO: 659298 - DNA, 33 bp, Homo sapien
cccagaacctgaatgacatgactgttatcccca

SEQ ID NO: 659299 - DNA, 33 bp, Homo sapien
agtaataacaagaagaactgccatctgcttggt

SEQ ID NO: 659300 - DNA, 33 bp, Homo sapien
agtaataacaagaagagctgccatctgcttggt

SEQ ID NO: 659301 - DNA, 33 bp, Homo sapien
aacctgggctaagggacctggctttaccctgag

SEQ ID NO: 659302 - DNA, 33 bp, Homo sapien
aacctgggctaagggagctggctttaccctgag

SEQ ID NO: 659303 - DNA, 33 bp, Homo sapien
tcatagctcattgaaccgtggaccttctgggct

SEQ ID NO: 659304 - DNA, 33 bp, Homo sapien
tcatagctcattgaactgtggaccttctgggct

SEQ ID NO: 659305 - DNA, 33 bp, Homo sapien
tgtgaccccgggaaacgctggccactatctgat

SEQ ID NO: 659306 - DNA, 33 bp, Homo sapien
tgtgaccccgggaaactctggccactatctgat

SEQ ID NO: 659307 - DNA, 33 bp, Homo sapien
catgtgctgacactaacaccaatgtccatcaga

SEQ ID NO: 659308 - DNA, 33 bp, Homo sapien
catgtgctgacactaagaccaatgtccatcaga

SEQ ID NO: 659309 - DNA, 33 bp, Homo sapien
cttataccctctcacacgtttaaaaattcatat

SEQ ID NO: 659310 - DNA, 33 bp, Homo sapien
cttataccctctcacatgtttaaaaattcatat

SEQ ID NO: 659311 - DNA, 33 bp, Homo sapien
agggatggacacgtgacctaagtcaggccaact

SEQ ID NO: 659312 - DNA, 33 bp, Homo sapien
agggatggacacgtgatctaagtcaggccaact

SEQ ID NO: 659313 - DNA, 33 bp, Homo sapien
gattattccagagttaagcagatggtcttgggc

SEQ ID NO: 659314 - DNA, 33 bp, Homo sapien
gattattccagagttaggcagatggtcttgggc

SEQ ID NO: 659315 - DNA, 33 bp, Homo sapien
agagagctaggctttcaaccatatagatttcgg

SEQ ID NO: 659316 - DNA, 33 bp, Homo sapien
agagagctaggctttccaccatatagatttcgg

SEQ ID NO: 659317 - DNA, 33 bp, Homo sapien
gtcaatctctgatgcaataagatcctgttataa

SEQ ID NO: 659318 - DNA, 33 bp, Homo sapien
gtcaatctctgatgcagtaagatcctgttataa

SEQ ID NO: 659319 - DNA, 33 bp, Homo sapien
cacagaaggatattcacgtagaaatagccatta

SEQ ID NO: 659320 - DNA, 33 bp, Homo sapien
cacagaaggatattcatgtagaaatagccatta

SEQ ID NO: 659321 - DNA, 33 bp, Homo sapien
aggaaaaggagaagacaaccaaatacagttaac

SEQ ID NO: 659322 - DNA, 33 bp, Homo sapien
aggaaaaggagaagacgaccaaatacagttaac

SEQ ID NO: 659323 - DNA, 33 bp, Homo sapien
tgttctttctactaaaacatggtgtaccctcct

SEQ ID NO: 659324 - DNA, 33 bp, Homo sapien
tgttctttctactaaaccatggtgtaccctcct

SEQ ID NO: 659325 - DNA, 33 bp, Homo sapien
tcatcaccaaggtttccaatcatacatatttaa

SEQ ID NO: 659326 - DNA, 33 bp, Homo sapien
tcatcaccaaggtttctaatcatacatatttaa

SEQ ID NO: 659327 - DNA, 33 bp, Homo sapien
gccgaggtgtgtagtacgttatgctatctaggt

SEQ ID NO: 659328 - DNA, 33 bp, Homo sapien
gccgaggtgtgtagtaggttatgctatctaggt

SEQ ID NO: 659329 - DNA, 33 bp, Homo sapien
cctcatcagtggtgagcccatcaaccttggatt

SEQ ID NO: 659330 - DNA, 33 bp, Homo sapien
cctcatcagtggtgagtccatcaaccttggatt

SEQ ID NO: 659331 - DNA, 33 bp, Homo sapien
gaatgctgctgatgtactacaaagtatatgaaa

SEQ ID NO: 659332 - DNA, 33 bp, Homo sapien
gaatgctgctgatgtattacaaagtatatgaaa

SEQ ID NO: 659333 - DNA, 33 bp, Homo sapien
aactgatgcacctaccagctctgctatgatgga

SEQ ID NO: 659334 - DNA, 33 bp, Homo sapien
aactgatgcacctaccggctctgctatgatgga

SEQ ID NO: 659335 - DNA, 33 bp, Homo sapien
tgttgttctttgattacactgagtttcagcctg

SEQ ID NO: 659336 - DNA, 33 bp, Homo sapien
tgttgttctttgattatactgagtttcagcctg

SEQ ID NO: 659337 - DNA, 33 bp, Homo sapien
caaactcctatcaccacgatcttcactatacta

SEQ ID NO: 659338 - DNA, 33 bp, Homo sapien
caaactcctatcaccatgatcttcactatacta

SEQ ID NO: 659339 - DNA, 33 bp, Homo sapien
atatcgcagcacactactaaacagcttcaagac

SEQ ID NO: 659340 - DNA, 33 bp, Homo sapien
atatcgcagcacactagtaaacagcttcaagac

SEQ ID NO: 659341 - DNA, 33 bp, Homo sapien
tggatcaaaagatctgaaaattatacctcaatt

SEQ ID NO: 659342 - DNA, 33 bp, Homo sapien
tggatcaaaagatctggaaattatacctcaatt

SEQ ID NO: 659343 - DNA, 33 bp, Homo sapien
cacgagacgacttcagaaagtaagtagggaaag

SEQ ID NO: 659344 - DNA, 33 bp, Homo sapien
cacgagacgacttcaggaagtaagtagggaaag

SEQ ID NO: 659345 - DNA, 33 bp, Homo sapien
tactacaagatggagacgtattaatgataggta

SEQ ID NO: 659346 - DNA, 33 bp, Homo sapien
tactacaagatggagatgtattaatgataggta

SEQ ID NO: 659347 - DNA, 33 bp, Homo sapien
caaaacagtaatctacaaaatcaagaagctcaa

SEQ ID NO: 659348 - DNA, 33 bp, Homo sapien
caaaacagtaatctacgaaatcaagaagctcaa

SEQ ID NO: 659349 - DNA, 33 bp, Homo sapien
cccacgtacagttgcacatacactcaaatgttc

SEQ ID NO: 659350 - DNA, 33 bp, Homo sapien
cccacgtacagttgcagatacactcaaatgttc

SEQ ID NO: 659351 - DNA, 33 bp, Homo sapien
ttgcagacaaactgagacccagagaggacaatg

SEQ ID NO: 659352 - DNA, 33 bp, Homo sapien
ttgcagacaaactgaggcccagagaggacaatg

SEQ ID NO: 659353 - DNA, 33 bp, Homo sapien
tcaagataaaaaaaacggattgttgtcttcctg

SEQ ID NO: 659354 - DNA, 33 bp, Homo sapien
tcaagataaaaaaaactgattgttgtcttcctg

SEQ ID NO: 659355 - DNA, 33 bp, Homo sapien
gcaagtaaaaatacagaactctcagtgtggcag

SEQ ID NO: 659356 - DNA, 33 bp, Homo sapien
gcaagtaaaaatacaggactctcagtgtggcag

SEQ ID NO: 659357 - DNA, 33 bp, Homo sapien
catttaaaagctaaacaaactggccggacatgg

SEQ ID NO: 659358 - DNA, 33 bp, Homo sapien
catttaaaagctaaaccaactggccggacatgg

SEQ ID NO: 659359 - DNA, 33 bp, Homo sapien
gtgacaagtgcagtgacgaaaaataaagctagg

SEQ ID NO: 659360 - DNA, 33 bp, Homo sapien
gtgacaagtgcagtgatgaaaaataaagctagg

SEQ ID NO: 659361 - DNA, 33 bp, Homo sapien
cagaaagttaccttatgagggtcattgcagttg

SEQ ID NO: 659362 - DNA, 33 bp, Homo sapien
cagaaagttaccttattagggtcattgcagttg

SEQ ID NO: 659363 - DNA, 33 bp, Homo sapien
atctgtgaaatagtcacggaggactgcgttcga

SEQ ID NO: 659364 - DNA, 33 bp, Homo sapien
atctgtgaaatagtcatggaggactgcgttcga

SEQ ID NO: 659365 - DNA, 33 bp, Homo sapien
tgcttcacaataacatcggtatgacacaggagc

SEQ ID NO: 659366 - DNA, 33 bp, Homo sapien
tgcttcacaataacattggtatgacacaggagc

SEQ ID NO: 659367 - DNA, 33 bp, Homo sapien
actttttaattaagagcagagtcgggcagaatc

SEQ ID NO: 659368 - DNA, 33 bp, Homo sapien
actttttaattaagaggagagtcgggcagaatc

SEQ ID NO: 659369 - DNA, 33 bp, Homo sapien
tcaaaggacaggggacaaaaagtgccaaggtgt

SEQ ID NO: 659370 - DNA, 33 bp, Homo sapien
tcaaaggacaggggaccaaaagtgccaaggtgt

SEQ ID NO: 659371 - DNA, 33 bp, Homo sapien
ctcatttccccgcctaataaactccagcccatg

SEQ ID NO: 659372 - DNA, 33 bp, Homo sapien
ctcatttccccgcctagtaaactccagcccatg

SEQ ID NO: 659373 - DNA, 33 bp, Homo sapien
gccacattcaagggaagagaacataagtcccac

SEQ ID NO: 659374 - DNA, 33 bp, Homo sapien
gccacattcaagggaatagaacataagtcccac

SEQ ID NO: 659375 - DNA, 33 bp, Homo sapien
ttgtctcaccttttacaacctagcctcagaagt

SEQ ID NO: 659376 - DNA, 33 bp, Homo sapien
ttgtctcaccttttacgacctagcctcagaagt

SEQ ID NO: 659377 - DNA, 33 bp, Homo sapien
agctctgatctccataaggtaagcattcctcct

SEQ ID NO: 659378 - DNA, 33 bp, Homo sapien
agctctgatctccatagggtaagcattcctcct

SEQ ID NO: 659379 - DNA, 33 bp, Homo sapien
tttcatctgttagtcactaggttgcaagtgaca

SEQ ID NO: 659380 - DNA, 33 bp, Homo sapien
tttcatctgttagtcattaggttgcaagtgaca

SEQ ID NO: 659381 - DNA, 33 bp, Homo sapien
gacgctgtgatgggaaaggagtgctatttggat

SEQ ID NO: 659382 - DNA, 33 bp, Homo sapien
gacgctgtgatgggaagggagtgctatttggat

SEQ ID NO: 659383 - DNA, 33 bp, Homo sapien
acctggaagtgaccgaactccagttgccaggct

SEQ ID NO: 659384 - DNA, 33 bp, Homo sapien
acctggaagtgaccgagctccagttgccaggct

SEQ ID NO: 659385 - DNA, 33 bp, Homo sapien
ttagacaagacccatgaagaaggaaacctagaa

SEQ ID NO: 659386 - DNA, 33 bp, Homo sapien
ttagacaagacccatgcagaaggaaacctagaa

SEQ ID NO: 659387 - DNA, 33 bp, Homo sapien
gggaggaatctgaccccgaggaatggtcaactc

SEQ ID NO: 659388 - DNA, 33 bp, Homo sapien
gggaggaatctgaccctgaggaatggtcaactc

SEQ ID NO: 659389 - DNA, 33 bp, Homo sapien
cgtttgatctgaaccacaccagaatctgaagga

SEQ ID NO: 659390 - DNA, 33 bp, Homo sapien
cgtttgatctgaaccataccagaatctgaagga

SEQ ID NO: 659391 - DNA, 33 bp, Homo sapien
acccacaatgactttcacaggtaaatattgcta

SEQ ID NO: 659392 - DNA, 33 bp, Homo sapien
acccacaatgactttctcaggtaaatattgcta

SEQ ID NO: 659393 - DNA, 33 bp, Homo sapien
ccaggagacttcatgaaccacacaaagagaaac

SEQ ID NO: 659394 - DNA, 33 bp, Homo sapien
ccaggagacttcatgagccacacaaagagaaac

SEQ ID NO: 659395 - DNA, 33 bp, Homo sapien
acacttggcactaggaagtctgtatggagcaag

SEQ ID NO: 659396 - DNA, 33 bp, Homo sapien
acacttggcactaggaggtctgtatggagcaag

SEQ ID NO: 659397 - DNA, 33 bp, Homo sapien
tatcttctttagggacacatctactcgagtctt

SEQ ID NO: 659398 - DNA, 33 bp, Homo sapien
tatcttctttagggacgcatctactcgagtctt

SEQ ID NO: 659399 - DNA, 33 bp, Homo sapien
cctggatattgggcgcaaaaacacaaaagggtg

SEQ ID NO: 659400 - DNA, 33 bp, Homo sapien
cctggatattgggcgctaaaacacaaaagggtg

SEQ ID NO: 659401 - DNA, 33 bp, Homo sapien
ctgctgatggcaggtacgttactttggattgac

SEQ ID NO: 659402 - DNA, 33 bp, Homo sapien
ctgctgatggcaggtatgttactttggattgac

SEQ ID NO: 659403 - DNA, 33 bp, Homo sapien
tcacaggaagtgtataaccccgtgtgagatggt

SEQ ID NO: 659404 - DNA, 33 bp, Homo sapien
tcacaggaagtgtatacccccgtgtgagatggt

SEQ ID NO: 659405 - DNA, 33 bp, Homo sapien; identical to SEQ ID NO: 659403

SEQ ID NO: 659406 - DNA, 33 bp, Homo sapien; identical to SEQ ID NO: 659404

SEQ ID NO: 659407 - DNA, 33 bp, Homo sapien
tcacaattctctacacactctgatattattcgc

SEQ ID NO: 659408 - DNA, 33 bp, Homo sapien
tcacaattctctacacgctctgatattattcgc

SEQ ID NO: 659409 - DNA, 33 bp, Homo sapien
aatttgttgtatatgacgatctggttcttggaa

SEQ ID NO: 659410 - DNA, 33 bp, Homo sapien
aatttgttgtatatgatgatctggttcttggaa

SEQ ID NO: 659411 - DNA, 33 bp, Homo sapien
gtctctctgaacatagacaggctttgctgaaac

SEQ ID NO: 659412 - DNA, 33 bp, Homo sapien
gtctctctgaacataggcaggctttgctgaaac

SEQ ID NO: 659413 - DNA, 33 bp, Homo sapien
tcctcctcagcaaagacgctttacggggtgtcg

SEQ ID NO: 659414 - DNA, 33 bp, Homo sapien
tcctcctcagcaaagatgctttacggggtgtcg

SEQ ID NO: 659415 - DNA, 33 bp, Homo sapien
acttagagaagcaaaacctaacatgagtcgcaa

SEQ ID NO: 659416 - DNA, 33 bp, Homo sapien
acttagagaagcaaaatctaacatgagtcgcaa

SEQ ID NO: 659417 - DNA, 33 bp, Homo sapien
ttggtttaatattgacagctcatccaaaagacc

SEQ ID NO: 659418 - DNA, 33 bp, Homo sapien
ttggtttaatattgacggctcatccaaaagacc

SEQ ID NO: 659419 - DNA, 33 bp, Homo sapien
ttatcagcttcacatcactcagggatcttggta

SEQ ID NO: 659420 - DNA, 33 bp, Homo sapien
ttatcagcttcacatcgctcagggatcttggta

SEQ ID NO: 659421 - DNA, 33 bp, Homo sapien
ccacggccacggccagaaaatcccacttctgac

SEQ ID NO: 659422 - DNA, 33 bp, Homo sapien
ccacggccacggccagcaaatcccacttctgac

SEQ ID NO: 659423 - DNA, 33 bp, Homo sapien
aataagtcttctccaaacatagcttgattttgc

SEQ ID NO: 659424 - DNA, 33 bp, Homo sapien
aataagtcttctccaaccatagcttgattttgc

SEQ ID NO: 659425 - DNA, 33 bp, Homo sapien
tcttaagcaccactaaaggttttcagcctcctg

SEQ ID NO: 659426 - DNA, 33 bp, Homo sapien
tcttaagcaccactaagggttttcagcctcctg

SEQ ID NO: 659427 - DNA, 33 bp, Homo sapien
catgttcaaatgcaccaactttcataattctac

SEQ ID NO: 659428 - DNA, 33 bp, Homo sapien
catgttcaaatgcaccgactttcataattctac

SEQ ID NO: 659429 - DNA, 33 bp, Homo sapien
gcggattgattgtagaggcaccaatgaactgga

SEQ ID NO: 659430 - DNA, 33 bp, Homo sapien
gcggattgattgtagatgcaccaatgaactgga

SEQ ID NO: 659431 - DNA, 33 bp, Homo sapien
ctgggattatagtcacacacccgtaagcctggc

SEQ ID NO: 659432 - DNA, 33 bp, Homo sapien
ctgggattatagtcacgcacccgtaagcctggc

SEQ ID NO: 659433 - DNA, 33 bp, Homo sapien
ttgccactgtaagaggacaatgtaacccaggct

SEQ ID NO: 659434 - DNA, 33 bp, Homo sapien
ttgccactgtaagagggcaatgtaacccaggct

SEQ ID NO: 659435 - DNA, 33 bp, Homo sapien
actcttaactcttaaacaatctttgctctcaag

SEQ ID NO: 659436 - DNA, 33 bp, Homo sapien
actcttaactcttaaataatctttgctctcaag

SEQ ID NO: 659437 - DNA, 33 bp, Homo sapien; identical to SEQ ID NO: 659435

SEQ ID NO: 659438 - DNA, 33 bp, Homo sapien; identical to SEQ ID NO: 659436

SEQ ID NO: 659439 - DNA, 33 bp, Homo sapien
atctctcaaataaatgaataaaattgtggtata

SEQ ID NO: 659440 - DNA, 33 bp, Homo sapien
atctctcaaataaatggataaaattgtggtata

SEQ ID NO: 659441 - DNA, 33 bp, Homo sapien
ctactcaggaatccgaagcaagagaatcgtttg

SEQ ID NO: 659442 - DNA, 33 bp, Homo sapien
ctactcaggaatccgaggcaagagaatcgtttg

SEQ ID NO: 659443 - DNA, 33 bp, Homo sapien
cttgaaagtactcgacagaagaaaagtagtgtc

SEQ ID NO: 659444 - DNA, 33 bp, Homo sapien
cttgaaagtactcgacggaagaaaagtagtgtc

SEQ ID NO: 659445 - DNA, 33 bp, Homo sapien; identical to SEQ ID NO: 659443

SEQ ID NO: 659446 - DNA, 33 bp, Homo sapien; identical to SEQ ID NO: 659444

SEQ ID NO: 659447 - DNA, 33 bp, Homo sapien
gaacacaatgaacagaacactccacaatgccct

SEQ ID NO: 659448 - DNA, 33 bp, Homo sapien
gaacacaatgaacagaccactccacaatgccct

SEQ ID NO: 659449 - DNA, 33 bp, Homo sapien
attccatttatgtgaaaggtccagaataggcaa

SEQ ID NO: 659450 - DNA, 33 bp, Homo sapien
attccatttatgtgaacggtccagaataggcaa

SEQ ID NO: 659451 - DNA, 33 bp, Homo sapien
catggtgatagcaggaacgagtgagcacaaatg

SEQ ID NO: 659452 - DNA, 33 bp, Homo sapien
catggtgatagcaggagcgagtgagcacaaatg

SEQ ID NO: 659453 - DNA, 33 bp, Homo sapien; identical to SEQ ID NO: 659451

SEQ ID NO: 659454 - DNA, 33 bp, Homo sapien; identical to SEQ ID NO: 659452

SEQ ID NO: 659455 - DNA, 33 bp, Homo sapien
aaagaaaatgggaatagacgcacaatagaatag

SEQ ID NO: 659456 - DNA, 33 bp, Homo sapien
aaagaaaatgggaatatacgcacaatagaatag

SEQ ID NO: 659457 - DNA, 33 bp, Homo sapien
aaacttccatgctaataagtgactatttttaag

SEQ ID NO: 659458 - DNA, 33 bp, Homo sapien
aaacttccatgctaatgagtgactatttttaag

SEQ ID NO: 659459 - DNA, 33 bp, Homo sapien
tggcccaattcttatacagagtcagcgaggatt

SEQ ID NO: 659460 - DNA, 33 bp, Homo sapien
tggcccaattcttatatagagtcagcgaggatt

SEQ ID NO: 659461 - DNA, 33 bp, Homo sapien
ccgcagaaggttaatcaatggtaccagaaaaca

SEQ ID NO: 659462 - DNA, 33 bp, Homo sapien
ccgcagaaggttaatcgatggtaccagaaaaca

SEQ ID NO: 659463 - DNA, 33 bp, Homo sapien
ttcttttgaaggtatcaatgactacaaggaagg

SEQ ID NO: 659464 - DNA, 33 bp, Homo sapien
ttcttttgaaggtatcgatgactacaaggaagg

SEQ ID NO: 659465 - DNA, 33 bp, Homo sapien
aatagcaggattggaacctacagttatctagct

SEQ ID NO: 659466 - DNA, 33 bp, Homo sapien
aatagcaggattggaatctacagttatctagct

SEQ ID NO: 659467 - DNA, 33 bp, Homo sapien
ggctctgtgggcgctacgacacaggaatggcac

SEQ ID NO: 659468 - DNA, 33 bp, Homo sapien
ggctctgtgggcgctatgacacaggaatggcac

SEQ ID NO: 659469 - DNA, 33 bp, Homo sapien
tgtttccagagctcccaactactgcagatagga

SEQ ID NO: 659470 - DNA, 33 bp, Homo sapien
tgtttccagagctcccgactactgcagatagga

SEQ ID NO: 659471 - DNA, 33 bp, Homo sapien
gttcatcctgaagcctcaaaatatttgtaacta

SEQ ID NO: 659472 - DNA, 33 bp, Homo sapien
gttcatcctgaagcctgaaaatatttgtaacta

SEQ ID NO: 659473 - DNA, 33 bp, Homo sapien
aaaagcctagactttcacctgctccaaactgaa

SEQ ID NO: 659474 - DNA, 33 bp, Homo sapien
aaaagcctagactttcgcctgctccaaactgaa

SEQ ID NO: 659475 - DNA, 33 bp, Homo sapien
aataagaaattactggaatgtttagtgatgctt

SEQ ID NO: 659476 - DNA, 33 bp, Homo sapien
aataagaaattactgggatgtttagtgatgctt

SEQ ID NO: 659477 - DNA, 33 bp, Homo sapien
ataataacatatcaaaatggatctgatggttgt

SEQ ID NO: 659478 - DNA, 33 bp, Homo sapien
ataataacatatcaaagtggatctgatggttgt

SEQ ID NO: 659479 - DNA, 33 bp, Homo sapien
gacaaacagtgggatcaacatagagaatggggt

SEQ ID NO: 659480 - DNA, 33 bp, Homo sapien
gacaaacagtgggatcgacatagagaatggggt

SEQ ID NO: 659481 - DNA, 33 bp, Homo sapien
agaaagttcaagcagcaagatagcgtgggagga

SEQ ID NO: 659482 - DNA, 33 bp, Homo sapien
agaaagttcaagcagcgagatagcgtgggagga

SEQ ID NO: 659483 - DNA, 33 bp, Homo sapien
gctgtattctctgctacggtaagccaggacagc

SEQ ID NO: 659484 - DNA, 33 bp, Homo sapien
gctgtattctctgctatggtaagccaggacagc

SEQ ID NO: 659485 - DNA, 33 bp, Homo sapien
tttttatatgtgatcaacaaattaagcagaaca

SEQ ID NO: 659486 - DNA, 33 bp, Homo sapien
tttttatatgtgatcagcaaattaagcagaaca

SEQ ID NO: 659487 - DNA, 33 bp, Homo sapien
tgtgaagttctggaaactgattcaagatagctg

SEQ ID NO: 659488 - DNA, 33 bp, Homo sapien
tgtgaagttctggaaagtgattcaagatagctg

SEQ ID NO: 659489 - DNA, 33 bp, Homo sapien
tttggtctttcttgacaattcagaataagagaa

SEQ ID NO: 659490 - DNA, 33 bp, Homo sapien
tttggtctttcttgacgattcagaataagagaa

SEQ ID NO: 659491 - DNA, 33 bp, Homo sapien
agtttttttctatgcccccaggtagttttaaat

SEQ ID NO: 659492 - DNA, 33 bp, Homo sapien
agtttttttctatgcctccaggtagttttaaat

SEQ ID NO: 659493 - DNA, 33 bp, Homo sapien
gtgaaagagtccttcaggctttatgctaattat

SEQ ID NO: 659494 - DNA, 33 bp, Homo sapien
gtgaaagagtccttcatgctttatgctaattat

SEQ ID NO: 659495 - DNA, 33 bp, Homo sapien
acaatcaaacagggacggctcttcctaaattag

SEQ ID NO: 659496 - DNA, 33 bp, Homo sapien
acaatcaaacagggactgctcttcctaaattag

SEQ ID NO: 659497 - DNA, 33 bp, Homo sapien
atttctcaggcaagagccagggtactataaata

SEQ ID NO: 659498 - DNA, 33 bp, Homo sapien
atttctcaggcaagagtcagggtactataaata

SEQ ID NO: 659499 - DNA, 33 bp, Homo sapien
acacatgagggaataaatgaatgaatattaata

SEQ ID NO: 659500 - DNA, 33 bp, Homo sapien
acacatgagggaataagtgaatgaatattaata

SEQ ID NO: 659501 - DNA, 33 bp, Homo sapien
gtggggcatttctaacagtctgaaaactggcag

SEQ ID NO: 659502 - DNA, 33 bp, Homo sapien
gtggggcatttctaaccgtctgaaaactggcag

SEQ ID NO: 659503 - DNA, 33 bp, Homo sapien
ctgatctcttggtcttcaacaactcgtcaaacc

SEQ ID NO: 659504 - DNA, 33 bp, Homo sapien
ctgatctcttggtctttaacaactcgtcaaacc

SEQ ID NO: 659505 - DNA, 33 bp, Homo sapien
agcagaaaggcttcagcagagatggaagagaga

SEQ ID NO: 659506 - DNA, 33 bp, Homo sapien
agcagaaaggcttcaggagagatggaagagaga

SEQ ID NO: 659507 - DNA, 33 bp, Homo sapien
cctgcagtctcgaccacaagagacgcgcacacc

SEQ ID NO: 659508 - DNA, 33 bp, Homo sapien
cctgcagtctcgaccataagagacgcgcacacc

SEQ ID NO: 659509 - DNA, 33 bp, Homo sapien
ttgatggttctggactaagaatgtttatctcta

SEQ ID NO: 659510 - DNA, 33 bp, Homo sapien
ttgatggttctggactgagaatgtttatctcta

SEQ ID NO: 659511 - DNA, 33 bp, Homo sapien
aggttttccagaccgaaaaaggcagcctgaagc

SEQ ID NO: 659512 - DNA, 33 bp, Homo sapien
aggttttccagaccgagaaaggcagcctgaagc

SEQ ID NO: 659513 - DNA, 33 bp, Homo sapien
ctgcaataaacatggcagaacagatacctattt

SEQ ID NO: 659514 - DNA, 33 bp, Homo sapien
ctgcaataaacatggcggaacagatacctattt

SEQ ID NO: 659515 - DNA, 33 bp, Homo sapien
aatccagtgtgcaggaggggtgatgatggatgt

SEQ ID NO: 659516 - DNA, 33 bp, Homo sapien
aatccagtgtgcaggatgggtgatgatggatgt

SEQ ID NO: 659517 - DNA, 33 bp, Homo sapien
atgtaacaaatactcaagtgtacctcataagta

SEQ ID NO: 659518 - DNA, 33 bp, Homo sapien
atgtaacaaatactcacgtgtacctcataagta

SEQ ID NO: 659519 - DNA, 33 bp, Homo sapien
aaataaaagagcaccacaataggaaaagtaaac

SEQ ID NO: 659520 - DNA, 33 bp, Homo sapien
aaataaaagagcaccataataggaaaagtaaac

SEQ ID NO: 659521 - DNA, 33 bp, Homo sapien
gaagaattttcaaccccggagcatatactcaga

SEQ ID NO: 659522 - DNA, 33 bp, Homo sapien
gaagaattttcaaccctggagcatatactcaga

SEQ ID NO: 659523 - DNA, 33 bp, Homo sapien
ttaatcaatgtcagtaacaatcttcaccttcgt

SEQ ID NO: 659524 - DNA, 33 bp, Homo sapien
ttaatcaatgtcagtagcaatcttcaccttcgt

SEQ ID NO: 659525 - DNA, 33 bp, Homo sapien
attgcaaattaaaagaataagatgctactacac

SEQ ID NO: 659526 - DNA, 33 bp, Homo sapien
attgcaaattaaaagagtaagatgctactacac

SEQ ID NO: 659527 - DNA, 33 bp, Homo sapien
aggcaagtataatacaatggtaaggagttatat

SEQ ID NO: 659528 - DNA, 33 bp, Homo sapien
aggcaagtataatacagtggtaaggagttatat

SEQ ID NO: 659529 - DNA, 33 bp, Homo sapien
tcaaccttgccaagaactacccatctgtgagtt

SEQ ID NO: 659530 - DNA, 33 bp, Homo sapien
tcaaccttgccaagaattacccatctgtgagtt

SEQ ID NO: 659531 - DNA, 33 bp, Homo sapien
tattttctgacatttaaatcctgtctatttttt

SEQ ID NO: 659532 - DNA, 33 bp, Homo sapien
tattttctgacatttagatcctgtctatttttt

SEQ ID NO: 659533 - DNA, 33 bp, Homo sapien
tccctaatgaattcaggctagcaacatttaaga

SEQ ID NO: 659534 - DNA, 33 bp, Homo sapien
tccctaatgaattcagtctagcaacatttaaga

SEQ ID NO: 659535 - DNA, 33 bp, Homo sapien
ttctttttctatacatcagtcgcttgagtttgg

SEQ ID NO: 659536 - DNA, 33 bp, Homo sapien
ttctttttctatacattagtcgcttgagtttgg

SEQ ID NO: 659537 - DNA, 33 bp, Homo sapien
aaaatttcaattaaacactgccaaagaatgtgt

SEQ ID NO: 659538 - DNA, 33 bp, Homo sapien
aaaatttcaattaaacgctgccaaagaatgtgt

SEQ ID NO: 659539 - DNA, 33 bp, Homo sapien
taatggttggcatttacggtgctcaacttataa

SEQ ID NO: 659540 - DNA, 33 bp, Homo sapien
taatggttggcatttatggtgctcaacttataa

SEQ ID NO: 659541 - DNA, 33 bp, Homo sapien
tagaaattggagaaaaagtttttactagagata

SEQ ID NO: 659542 - DNA, 33 bp, Homo sapien
tagaaattggagaaaacgtttttactagagata

SEQ ID NO: 659543 - DNA, 33 bp, Homo sapien
tgagagctttctctcaatccacacatagactaa

SEQ ID NO: 659544 - DNA, 33 bp, Homo sapien
tgagagctttctctcagtccacacatagactaa

SEQ ID NO: 659545 - DNA, 33 bp, Homo sapien
agaagctagttccatgacaatgtaatggcgaga

SEQ ID NO: 659546 - DNA, 33 bp, Homo sapien
agaagctagttccatgccaatgtaatggcgaga

SEQ ID NO: 659547 - DNA, 33 bp, Homo sapien
aacaagtgtgaaaacacctttcagtttgtcaaa

SEQ ID NO: 659548 - DNA, 33 bp, Homo sapien
aacaagtgtgaaaacatctttcagtttgtcaaa

SEQ ID NO: 659549 - DNA, 33 bp, Homo sapien
gtcctcatactctgctcacttgactcatctcca

SEQ ID NO: 659550 - DNA, 33 bp, Homo sapien
gtcctcatactctgctgacttgactcatctcca

SEQ ID NO: 659551 - DNA, 33 bp, Homo sapien
gcattcctgtgagatgaatcattgtttttcagt

SEQ ID NO: 659552 - DNA, 33 bp, Homo sapien
gcattcctgtgagatgcatcattgtttttcagt

SEQ ID NO: 659553 - DNA, 33 bp, Homo sapien
cctgggcaggatcagaataaccaaatggcagct

SEQ ID NO: 659554 - DNA, 33 bp, Homo sapien
cctgggcaggatcagagtaaccaaatggcagct

SEQ ID NO: 659555 - DNA, 33 bp, Homo sapien
tatcggtttgtctgctaaaagggttgtggctgg

SEQ ID NO: 659556 - DNA, 33 bp, Homo sapien
tatcggtttgtctgctgaaagggttgtggctgg

SEQ ID NO: 659557 - DNA, 33 bp, Homo sapien
acggtcaaatgctacaaagaggtttgcgaatct

SEQ ID NO: 659558 - DNA, 33 bp, Homo sapien
acggtcaaatgctacacagaggtttgcgaatct

SEQ ID NO: 659559 - DNA, 33 bp, Homo sapien
aatcctcactcatttacgtctgtttttcccctc

SEQ ID NO: 659560 - DNA, 33 bp, Homo sapien
aatcctcactcatttatgtctgtttttcccctc

SEQ ID NO: 659561 - DNA, 33 bp, Homo sapien
agggaggtcatggagacgatgggattgatggac

SEQ ID NO: 659562 - DNA, 33 bp, Homo sapien
agggaggtcatggagatgatgggattgatggac

SEQ ID NO: 659563 - DNA, 33 bp, Homo sapien
tccaggaaatccatgacagccctaaaagaagac

SEQ ID NO: 659564 - DNA, 33 bp, Homo sapien
tccaggaaatccatgagagccctaaaagaagac

SEQ ID NO: 659565 - DNA, 33 bp, Homo sapien
agactaacatttggggaactgattgcaaactaa

SEQ ID NO: 659566 - DNA, 33 bp, Homo sapien
agactaacatttgggggactgattgcaaactaa

SEQ ID NO: 659567 - DNA, 33 bp, Homo sapien
gctgggaatcatatcaatgagcattttacaagg

SEQ ID NO: 659568 - DNA, 33 bp, Homo sapien
gctgggaatcatatcagtgagcattttacaagg

SEQ ID NO: 659569 - DNA, 33 bp, Homo sapien
ggttctgcctgtctgccaggtatctatcaggga

SEQ ID NO: 659570 - DNA, 33 bp, Homo sapien
ggttctgcctgtctgcgaggtatctatcaggga

SEQ ID NO: 659571 - DNA, 33 bp, Homo sapien
aggagtgctttagctaagtatgaggaatctgag

SEQ ID NO: 659572 - DNA, 33 bp, Homo sapien
aggagtgctttagctacgtatgaggaatctgag

SEQ ID NO: 659573 - DNA, 33 bp, Homo sapien
aacattttctccaaaaactgatacattattctg

SEQ ID NO: 659574 - DNA, 33 bp, Homo sapien
aacattttctccaaaagctgatacattattctg

SEQ ID NO: 659575 - DNA, 33 bp, Homo sapien
aaattagagactaaaaagttggcaccgtagtaa

SEQ ID NO: 659576 - DNA, 33 bp, Homo sapien
aaattagagactaaaatgttggcaccgtagtaa

SEQ ID NO: 659577 - DNA, 33 bp, Homo sapien
ccatttcactggggtcgatcgtttcatgtaggg

SEQ ID NO: 659578 - DNA, 33 bp, Homo sapien
ccatttcactggggtctatcgtttcatgtaggg

SEQ ID NO: 659579 - DNA, 33 bp, Homo sapien
attctatgttggaaaacttctcccttcaaatcc

SEQ ID NO: 659580 - DNA, 33 bp, Homo sapien
attctatgttggaaaagttctcccttcaaatcc

SEQ ID NO: 659581 - DNA, 33 bp, Homo sapien
atgtgtctccctccaaaatgctaatcacttggg

SEQ ID NO: 659582 - DNA, 33 bp, Homo sapien
atgtgtctccctccaacatgctaatcacttggg

SEQ ID NO: 659583 - DNA, 33 bp, Homo sapien
tcttaaagatgtatcaatactttcccggattcc

SEQ ID NO: 659584 - DNA, 33 bp, Homo sapien
tcttaaagatgtatcagtactttcccggattcc

SEQ ID NO: 659585 - DNA, 33 bp, Homo sapien
ggatgtggagatcactcaaacagaggagctgtt

SEQ ID NO: 659586 - DNA, 33 bp, Homo sapien
ggatgtggagatcactgaaacagaggagctgtt

SEQ ID NO: 659587 - DNA, 33 bp, Homo sapien
tgaaagatgccctcaactccgtgggaaacagga

SEQ ID NO: 659588 - DNA, 33 bp, Homo sapien
tgaaagatgccctcaattccgtgggaaacagga

SEQ ID NO: 659589 - DNA, 33 bp, Homo sapien
tgctgacgcccttgacactggcttcttgggtgt

SEQ ID NO: 659590 - DNA, 33 bp, Homo sapien
tgctgacgcccttgacgctggcttcttgggtgt

SEQ ID NO: 659591 - DNA, 33 bp, Homo sapien
gaaatgcttatcttagaatttgaaaatgtgatt

SEQ ID NO: 659592 - DNA, 33 bp, Homo sapien
gaaatgcttatcttagtatttgaaaatgtgatt

SEQ ID NO: 659593 - DNA, 33 bp, Homo sapien
ggaggagagaatattcaaaatgatggtttccag

SEQ ID NO: 659594 - DNA, 33 bp, Homo sapien
ggaggagagaatattcgaaatgatggtttccag

SEQ ID NO: 659595 - DNA, 33 bp, Homo sapien
cattaattgtcatttaaacacttgtattaactc

SEQ ID NO: 659596 - DNA, 33 bp, Homo sapien
cattaattgtcatttatacacttgtattaactc

SEQ ID NO: 659597 - DNA, 33 bp, Homo sapien
caatatctggtgcccacgtggtctttctttttt

SEQ ID NO: 659598 - DNA, 33 bp, Homo sapien
caatatctggtgcccatgtggtctttctttttt

SEQ ID NO: 659599 - DNA, 33 bp, Homo sapien
tcattaagaaatgagaagcaacacttgagcctt

SEQ ID NO: 659600 - DNA, 33 bp, Homo sapien
tcattaagaaatgagacgcaacacttgagcctt

SEQ ID NO: 659601 - DNA, 33 bp, Homo sapien
aaagtctaggccaaaaagacatgaattctaagt

SEQ ID NO: 659602 - DNA, 33 bp, Homo sapien
aaagtctaggccaaaacgacatgaattctaagt

SEQ ID NO: 659603 - DNA, 33 bp, Homo sapien
aaagtaagcaactatacacgaactaaatgcaat

SEQ ID NO: 659604 - DNA, 33 bp, Homo sapien
aaagtaagcaactatatacgaactaaatgcaat

SEQ ID NO: 659605 - DNA, 33 bp, Homo sapien
aggaaggaagcaagacaaggaaggagtggaagg

SEQ ID NO: 659606 - DNA, 33 bp, Homo sapien
aggaaggaagcaagacgaggaaggagtggaagg

SEQ ID NO: 659607 - DNA, 33 bp, Homo sapien
aaaaagaaagcctaaccctcttgcctcagctca

SEQ ID NO: 659608 - DNA, 33 bp, Homo sapien
aaaaagaaagcctaactctcttgcctcagctca

SEQ ID NO: 659609 - DNA, 33 bp, Homo sapien
ttttgcccagaatccccctaatctttctttttt

SEQ ID NO: 659610 - DNA, 33 bp, Homo sapien
ttttgcccagaatccctctaatctttctttttt

SEQ ID NO: 659611 - DNA, 33 bp, Homo sapien
aagaagaaccaacactgaattccctttctcaag

SEQ ID NO: 659612 - DNA, 33 bp, Homo sapien
aagaagaaccaacacttaattccctttctcaag

SEQ ID NO: 659613 - DNA, 33 bp, Homo sapien
gactgaagctttttcaatagtatttacgctcag

SEQ ID NO: 659614 - DNA, 33 bp, Homo sapien
gactgaagctttttcagtagtatttacgctcag

SEQ ID NO: 659615 - DNA, 33 bp, Homo sapien
aatctttcttacagtaaaataaccagttggagc

SEQ ID NO: 659616 - DNA, 33 bp, Homo sapien
aatctttcttacagtataataaccagttggagc

SEQ ID NO: 659617 - DNA, 33 bp, Homo sapien
aagtggatgaatcataaccttttgaaaatctgg

SEQ ID NO: 659618 - DNA, 33 bp, Homo sapien
aagtggatgaatcatacccttttgaaaatctgg

SEQ ID NO: 659619 - DNA, 33 bp, Homo sapien
aaagtagtggagtaaaaccccaagtaggtgaat

SEQ ID NO: 659620 - DNA, 33 bp, Homo sapien
aaagtagtggagtaaagccccaagtaggtgaat

SEQ ID NO: 659621 - DNA, 33 bp, Homo sapien
gtaagggcagagacaacggctgaatgcatcctg

SEQ ID NO: 659622 - DNA, 33 bp, Homo sapien
gtaagggcagagacaatggctgaatgcatcctg

SEQ ID NO: 659623 - DNA, 33 bp, Homo sapien
ggtttggacatcagaacgtccagggcatcagat

SEQ ID NO: 659624 - DNA, 33 bp, Homo sapien
ggtttggacatcagaaggtccagggcatcagat

SEQ ID NO: 659625 - DNA, 33 bp, Homo sapien
gactagatttcctatacggctatcaaagaataa

SEQ ID NO: 659626 - DNA, 33 bp, Homo sapien
gactagatttcctatagggctatcaaagaataa

SEQ ID NO: 659627 - DNA, 33 bp, Homo sapien
ttttctcttctcgctagctgtccattcactcat

SEQ ID NO: 659628 - DNA, 33 bp, Homo sapien
ttttctcttctcgctatctgtccattcactcat

SEQ ID NO: 659629 - DNA, 33 bp, Homo sapien
atagtgactaaaggccaacctttctaaatgaaa

SEQ ID NO: 659630 - DNA, 33 bp, Homo sapien
atagtgactaaaggccgacctttctaaatgaaa

SEQ ID NO: 659631 - DNA, 33 bp, Homo sapien
aggtgtccacaagtcacaggagtggagacatcc

SEQ ID NO: 659632 - DNA, 33 bp, Homo sapien
aggtgtccacaagtcataggagtggagacatcc

SEQ ID NO: 659633 - DNA, 33 bp, Homo sapien
ataatatgtaattggcaagagtggaagcaagga

SEQ ID NO: 659634 - DNA, 33 bp, Homo sapien
ataatatgtaattggccagagtggaagcaagga

SEQ ID NO: 659635 - DNA, 33 bp, Homo sapien
agtgtgaacgtgtacaaaaacaccagcacctcc

SEQ ID NO: 659636 - DNA, 33 bp, Homo sapien
agtgtgaacgtgtacagaaacaccagcacctcc

SEQ ID NO: 659637 - DNA, 33 bp, Homo sapien
cctcctgcccttctcaatcttcagggactatta

SEQ ID NO: 659638 - DNA, 33 bp, Homo sapien
cctcctgcccttctcagtcttcagggactatta

SEQ ID NO: 659639 - DNA, 33 bp, Homo sapien
ctttgtatgttaatcacatttgaacagggtcat

SEQ ID NO: 659640 - DNA, 33 bp, Homo sapien
ctttgtatgttaatcatatttgaacagggtcat

SEQ ID NO: 659641 - DNA, 33 bp, Homo sapien
taagactcagaaatggcactgacatctccaaag

SEQ ID NO: 659642 - DNA, 33 bp, Homo sapien
taagactcagaaatggtactgacatctccaaag

SEQ ID NO: 659643 - DNA, 33 bp, Homo sapien
cagcagagggaataaaagagaggatttacctgc

SEQ ID NO: 659644 - DNA, 33 bp, Homo sapien
cagcagagggaataaaggagaggatttacctgc

SEQ ID NO: 659645 - DNA, 33 bp, Homo sapien
ggatttaaaacgctatcacaggtgatctcaacc

SEQ ID NO: 659646 - DNA, 33 bp, Homo sapien
ggatttaaaacgctatgacaggtgatctcaacc

SEQ ID NO: 659647 - DNA, 33 bp, Homo sapien
ggatacaatcctcatgaagttttatagttttat

SEQ ID NO: 659648 - DNA, 33 bp, Homo sapien
ggatacaatcctcatgtagttttatagttttat

SEQ ID NO: 659649 - DNA, 33 bp, Homo sapien
cctgcacaacctctcactactggctaaatcaaa

SEQ ID NO: 659650 - DNA, 33 bp, Homo sapien
cctgcacaacctctcattactggctaaatcaaa

SEQ ID NO: 659651 - DNA, 33 bp, Homo sapien
ggtaccctggcagctaaaacaggtgaacttgct

SEQ ID NO: 659652 - DNA, 33 bp, Homo sapien
ggtaccctggcagctagaacaggtgaacttgct

SEQ ID NO: 659653 - DNA, 33 bp, Homo sapien
ttgtctttaaaaatgaataatgtgactttgtgg

SEQ ID NO: 659654 - DNA, 33 bp, Homo sapien
ttgtctttaaaaatgattaatgtgactttgtgg

SEQ ID NO: 659655 - DNA, 33 bp, Homo sapien
gtgaatgcaacattgaccacagtcactatttat

SEQ ID NO: 659656 - DNA, 33 bp, Homo sapien
gtgaatgcaacattgatcacagtcactatttat

SEQ ID NO: 659657 - DNA, 33 bp, Homo sapien
aaacccaccgcactaactgagccccaaaacaac

SEQ ID NO: 659658 - DNA, 33 bp, Homo sapien
aaacccaccgcactaattgagccccaaaacaac

SEQ ID NO: 659659 - DNA, 33 bp, Homo sapien
aatttctaggtgagaccgaacactcaaaagttt

SEQ ID NO: 659660 - DNA, 33 bp, Homo sapien
aatttctaggtgagactgaacactcaaaagttt

SEQ ID NO: 659661 - DNA, 33 bp, Homo sapien
cccacatgtgtccttgcagcattcatggctggc

SEQ ID NO: 659662 - DNA, 33 bp, Homo sapien
cccacatgtgtccttgtagcattcatggctggc

SEQ ID NO: 659663 - DNA, 33 bp, Homo sapien
tttgacatttctgaacaactggcattttctgac

SEQ ID NO: 659664 - DNA, 33 bp, Homo sapien
tttgacatttctgaacgactggcattttctgac

SEQ ID NO: 659665 - DNA, 33 bp, Homo sapien
atactctagcacacaactaatgcttgataaata

SEQ ID NO: 659666 - DNA, 33 bp, Homo sapien
atactctagcacacaattaatgcttgataaata

SEQ ID NO: 659667 - DNA, 33 bp, Homo sapien
acttaaggaagatttaaattctgctgttcctga

SEQ ID NO: 659668 - DNA, 33 bp, Homo sapien
acttaaggaagatttatattctgctgttcctga

SEQ ID NO: 659669 - DNA, 33 bp, Homo sapien
tgtagagttgtgcacaaacccaggaagaaactg

SEQ ID NO: 659670 - DNA, 33 bp, Homo sapien
tgtagagttgtgcacatacccaggaagaaactg

SEQ ID NO: 659671 - DNA, 33 bp, Homo sapien
tctgatttgcagtacaagattagtgcccctttt

SEQ ID NO: 659672 - DNA, 33 bp, Homo sapien
tctgatttgcagtacaggattagtgcccctttt

SEQ ID NO: 659673 - DNA, 33 bp, Homo sapien
cacagcaatcaacaccacattgaaatgtccttt

SEQ ID NO: 659674 - DNA, 33 bp, Homo sapien
cacagcaatcaacaccgcattgaaatgtccttt

SEQ ID NO: 659675 - DNA, 33 bp, Homo sapien
ggggtatactctagaaacaggaaacaagggctc

SEQ ID NO: 659676 - DNA, 33 bp, Homo sapien
ggggtatactctagaagcaggaaacaagggctc

SEQ ID NO: 659677 - DNA, 33 bp, Homo sapien
gagtagaagaatcctgcagttcaggcaattatt

SEQ ID NO: 659678 - DNA, 33 bp, Homo sapien
gagtagaagaatcctgtagttcaggcaattatt

SEQ ID NO: 659679 - DNA, 33 bp, Homo sapien
atggcagcaattactacccatctgtgttcttct

SEQ ID NO: 659680 - DNA, 33 bp, Homo sapien
atggcagcaattactatccatctgtgttcttct

SEQ ID NO: 659681 - DNA, 33 bp, Homo sapien
gagaggcaaagatttcactaaattattattaca

SEQ ID NO: 659682 - DNA, 33 bp, Homo sapien
gagaggcaaagatttcgctaaattattattaca

SEQ ID NO: 659683 - DNA, 33 bp, Homo sapien
gccaaataaaccaacaatctgaagcgggggaag

SEQ ID NO: 659684 - DNA, 33 bp, Homo sapien
gccaaataaaccaacagtctgaagcgggggaag

SEQ ID NO: 659685 - DNA, 33 bp, Homo sapien
agcagcctgctaaacaaccacagcatgactggt

SEQ ID NO: 659686 - DNA, 33 bp, Homo sapien
agcagcctgctaaacacccacagcatgactggt

SEQ ID NO: 659687 - DNA, 33 bp, Homo sapien
ttgtttgtagctcgacaacttccctcctacaaa

SEQ ID NO: 659688 - DNA, 33 bp, Homo sapien
ttgtttgtagctcgaccacttccctcctacaaa

SEQ ID NO: 659689 - DNA, 33 bp, Homo sapien
catcttcgatagctgactaaagtgatgtagcaa

SEQ ID NO: 659690 - DNA, 33 bp, Homo sapien
catcttcgatagctgattaaagtgatgtagcaa

SEQ ID NO: 659691 - DNA, 33 bp, Homo sapien
acaggttccgctgtcaacctcctaaatgatgtt

SEQ ID NO: 659692 - DNA, 33 bp, Homo sapien
acaggttccgctgtcagcctcctaaatgatgtt

SEQ ID NO: 659693 - DNA, 33 bp, Homo sapien
ttgcatacaagtactcgctacagcatcctctgg

SEQ ID NO: 659694 - DNA, 33 bp, Homo sapien
ttgcatacaagtactctctacagcatcctctgg

SEQ ID NO: 659695 - DNA, 33 bp, Homo sapien
tgttaccaaacatatacactgctagctctatct

SEQ ID NO: 659696 - DNA, 33 bp, Homo sapien
tgttaccaaacatatatactgctagctctatct

SEQ ID NO: 659697 - DNA, 33 bp, Homo sapien
cctgtttcatcatagcacagtatccctctccca

SEQ ID NO: 659698 - DNA, 33 bp, Homo sapien
cctgtttcatcatagcgcagtatccctctccca

SEQ ID NO: 659699 - DNA, 33 bp, Homo sapien
gtatactggtagttatcaccatacagcagtgct

SEQ ID NO: 659700 - DNA, 33 bp, Homo sapien
gtatactggtagttattaccatacagcagtgct

SEQ ID NO: 659701 - DNA, 33 bp, Homo sapien
tagatgatttttacaacttgaatatacagcaac

SEQ ID NO: 659702 - DNA, 33 bp, Homo sapien
tagatgatttttacaatttgaatatacagcaac

SEQ ID NO: 659703 - DNA, 33 bp, Homo sapien
acaactggctactcttccaacgcaccatgacaa

SEQ ID NO: 659704 - DNA, 33 bp, Homo sapien
acaactggctactctttcaacgcaccatgacaa

SEQ ID NO: 659705 - DNA, 33 bp, Homo sapien
actcttcaattatcaccgccaaagccatgtggt

SEQ ID NO: 659706 - DNA, 33 bp, Homo sapien
actcttcaattatcactgccaaagccatgtggt

SEQ ID NO: 659707 - DNA, 33 bp, Homo sapien
atgttccatttactcaatgaaaaaatactctgg

SEQ ID NO: 659708 - DNA, 33 bp, Homo sapien
atgttccatttactcagtgaaaaaatactctgg

SEQ ID NO: 659709 - DNA, 33 bp, Homo sapien
atggagatcttgcatcaagaagtaacattgcct

SEQ ID NO: 659710 - DNA, 33 bp, Homo sapien
atggagatcttgcatcgagaagtaacattgcct

SEQ ID NO: 659711 - DNA, 33 bp, Homo sapien
gcaacctcatttagaaacctcttgctttataca

SEQ ID NO: 659712 - DNA, 33 bp, Homo sapien
gcaacctcatttagaagcctcttgctttataca

SEQ ID NO: 659713 - DNA, 33 bp, Homo sapien
agactacatcagaaaaactgaatacccttttag

SEQ ID NO: 659714 - DNA, 33 bp, Homo sapien
agactacatcagaaaagctgaatacccttttag

SEQ ID NO: 659715 - DNA, 33 bp, Homo sapien
aggggatgaagtgttaagatggtcacaatacag

SEQ ID NO: 659716 - DNA, 33 bp, Homo sapien
aggggatgaagtgttaggatggtcacaatacag

SEQ ID NO: 659717 - DNA, 33 bp, Homo sapien
tagtctcagtgaatgaacttgcaaatgatgcca

SEQ ID NO: 659718 - DNA, 33 bp, Homo sapien
tagtctcagtgaatgaccttgcaaatgatgcca

SEQ ID NO: 659719 - DNA, 33 bp, Homo sapien
atgaggatatatggacacatacaaaatatggtg

SEQ ID NO: 659720 - DNA, 33 bp, Homo sapien
atgaggatatatggacgcatacaaaatatggtg

SEQ ID NO: 659721 - DNA, 33 bp, Homo sapien
tgccacagagtaattacaatgtttgtctgtgga

SEQ ID NO: 659722 - DNA, 33 bp, Homo sapien
tgccacagagtaattataatgtttgtctgtgga

SEQ ID NO: 659723 - DNA, 33 bp, Homo sapien
ctttctggctaagacactacctagttcactcaa

SEQ ID NO: 659724 - DNA, 33 bp, Homo sapien
ctttctggctaagacattacctagttcactcaa

SEQ ID NO: 659725 - DNA, 33 bp, Homo sapien
gacagctttctgactacggaatttgaaaatcct

SEQ ID NO: 659726 - DNA, 33 bp, Homo sapien
gacagctttctgactatggaatttgaaaatcct

SEQ ID NO: 659727 - DNA, 33 bp, Homo sapien
ggctaactggagaatacggaatttgtctaaggg

SEQ ID NO: 659728 - DNA, 33 bp, Homo sapien
ggctaactggagaatatggaatttgtctaaggg

SEQ ID NO: 659729 - DNA, 33 bp, Homo sapien
ccagatgaccagtaaacggtgaccagtatttgt

SEQ ID NO: 659730 - DNA, 33 bp, Homo sapien
ccagatgaccagtaaatggtgaccagtatttgt

SEQ ID NO: 659731 - DNA, 33 bp, Homo sapien
actgcatcaacaaatgcacaaaataaccagcta

SEQ ID NO: 659732 - DNA, 33 bp, Homo sapien
actgcatcaacaaatggacaaaataaccagcta

SEQ ID NO: 659733 - DNA, 33 bp, Homo sapien
tgtattctatttcaccaaagttttttcttttca

SEQ ID NO: 659734 - DNA, 33 bp, Homo sapien
tgtattctatttcaccgaagttttttcttttca

SEQ ID NO: 659735 - DNA, 33 bp, Homo sapien
gccatctgtttaatcagcagttcttcaatattg

SEQ ID NO: 659736 - DNA, 33 bp, Homo sapien
gccatctgtttaatcatcagttcttcaatattg

SEQ ID NO: 659737 - DNA, 33 bp, Homo sapien
ctgtctcaaaaaaaaaaattgcacatctggttc

SEQ ID NO: 659738 - DNA, 33 bp, Homo sapien
ctgtctcaaaaaaaaacattgcacatctggttc

SEQ ID NO: 659739 - DNA, 33 bp, Homo sapien
cttcttgttcaattaaacctttatcattatgta

SEQ ID NO: 659740 - DNA, 33 bp, Homo sapien
cttcttgttcaattaagcctttatcattatgta

SEQ ID NO: 659741 - DNA, 33 bp, Homo sapien
tgcaaagcaatcttaactctacataacaaccgg

SEQ ID NO: 659742 - DNA, 33 bp, Homo sapien
tgcaaagcaatcttaattctacataacaaccgg

SEQ ID NO: 659743 - DNA, 33 bp, Homo sapien
cagaggaaagaagagcaatgaccagctggaatg

SEQ ID NO: 659744 - DNA, 33 bp, Homo sapien
cagaggaaagaagagcgatgaccagctggaatg

SEQ ID NO: 659745 - DNA, 33 bp, Homo sapien
aagttatgaggatgtgaattgttctgttaaaac

SEQ ID NO: 659746 - DNA, 33 bp, Homo sapien
aagttatgaggatgtgtattgttctgttaaaac

SEQ ID NO: 659747 - DNA, 33 bp, Homo sapien
atttgctactgggggaacatgatatatttttaa

SEQ ID NO: 659748 - DNA, 33 bp, Homo sapien
atttgctactgggggagcatgatatatttttaa

SEQ ID NO: 659749 - DNA, 33 bp, Homo sapien
aattgaccttcattatcagatacttcatatcaa

SEQ ID NO: 659750 - DNA, 33 bp, Homo sapien
aattgaccttcattatgagatacttcatatcaa

SEQ ID NO: 659751 - DNA, 33 bp, Homo sapien
tgttagtaagctagccaacataaaacatgtacc

SEQ ID NO: 659752 - DNA, 33 bp, Homo sapien
tgttagtaagctagccgacataaaacatgtacc

SEQ ID NO: 659753 - DNA, 33 bp, Homo sapien
gagtgtttatcattcacgtaacttaaggatttg

SEQ ID NO: 659754 - DNA, 33 bp, Homo sapien
gagtgtttatcattcatgtaacttaaggatttg

SEQ ID NO: 659755 - DNA, 33 bp, Homo sapien
acaaaacacctgtcaagtattcataagtgtttc

SEQ ID NO: 659756 - DNA, 33 bp, Homo sapien
acaaaacacctgtcaattattcataagtgtttc

SEQ ID NO: 659757 - DNA, 33 bp, Homo sapien
acagatgaaaacataactagtattaggccaatt

SEQ ID NO: 659758 - DNA, 33 bp, Homo sapien
acagatgaaaacataattagtattaggccaatt

SEQ ID NO: 659759 - DNA, 33 bp, Homo sapien
ctgccagattgtcatacggaggcctagattaga

SEQ ID NO: 659760 - DNA, 33 bp, Homo sapien
ctgccagattgtcatatggaggcctagattaga

SEQ ID NO: 659761 - DNA, 33 bp, Homo sapien
ctccatcaaaccagaaaggtgatcaattcactg

SEQ ID NO: 659762 - DNA, 33 bp, Homo sapien
ctccatcaaaccagaatggtgatcaattcactg

SEQ ID NO: 659763 - DNA, 33 bp, Homo sapien
tttgaggcaatgaatacctcaataacctagatt

SEQ ID NO: 659764 - DNA, 33 bp, Homo sapien
tttgaggcaatgaatatctcaataacctagatt

SEQ ID NO: 659765 - DNA, 33 bp, Homo sapien
ccttgaaacatagtcacagatctcgaaaatagc

SEQ ID NO: 659766 - DNA, 33 bp, Homo sapien
ccttgaaacatagtcatagatctcgaaaatagc

SEQ ID NO: 659767 - DNA, 33 bp, Homo sapien
caatctcaagtattagcatcagaatggacctag

SEQ ID NO: 659768 - DNA, 33 bp, Homo sapien
caatctcaagtattagtatcagaatggacctag

SEQ ID NO: 659769 - DNA, 33 bp, Homo sapien
agcacaaccacctacaagtctgagctatctctg

SEQ ID NO: 659770 - DNA, 33 bp, Homo sapien
agcacaaccacctacaggtctgagctatctctg

SEQ ID NO: 659771 - DNA, 33 bp, Homo sapien
agggatttatagctcactccttttttaattata

SEQ ID NO: 659772 - DNA, 33 bp, Homo sapien
agggatttatagctcattccttttttaattata

SEQ ID NO: 659773 - DNA, 33 bp, Homo sapien
attatatatcattaataaaactactgtccatga

SEQ ID NO: 659774 - DNA, 33 bp, Homo sapien
attatatatcattaatgaaactactgtccatga

SEQ ID NO: 659775 - DNA, 33 bp, Homo sapien
ttcatatcctttagaaaaagcattccctgagca

SEQ ID NO: 659776 - DNA, 33 bp, Homo sapien
ttcatatcctttagaagaagcattccctgagca

SEQ ID NO: 659777 - DNA, 33 bp, Homo sapien
gagttatagttcaataaacaccatggctgagca

SEQ ID NO: 659778 - DNA, 33 bp, Homo sapien
gagttatagttcaatagacaccatggctgagca

SEQ ID NO: 659779 - DNA, 33 bp, Homo sapien
ggtgttctgtctgccaacaattatacaagttgc

SEQ ID NO: 659780 - DNA, 33 bp, Homo sapien
ggtgttctgtctgccagcaattatacaagttgc

SEQ ID NO: 659781 - DNA, 33 bp, Homo sapien
aggataaaagtgcagactctagagcttgaggga

SEQ ID NO: 659782 - DNA, 33 bp, Homo sapien
aggataaaagtgcagattctagagcttgaggga

SEQ ID NO: 659783 - DNA, 33 bp, Homo sapien
gtagtttttcctgtaacacccaacaccaggaag

SEQ ID NO: 659784 - DNA, 33 bp, Homo sapien
gtagtttttcctgtaatacccaacaccaggaag

SEQ ID NO: 659785 - DNA, 33 bp, Homo sapien
catggaagctttgtcaacgcaagcaaaatatac

SEQ ID NO: 659786 - DNA, 33 bp, Homo sapien
catggaagctttgtcagcgcaagcaaaatatac

SEQ ID NO: 659787 - DNA, 33 bp, Homo sapien
tttgattcctattgtgaagagagtgatgaggag

SEQ ID NO: 659788 - DNA, 33 bp, Homo sapien
tttgattcctattgtgtagagagtgatgaggag

SEQ ID NO: 659789 - DNA, 33 bp, Homo sapien
gctaaaagtagctagaaagattatcccctaagc

SEQ ID NO: 659790 - DNA, 33 bp, Homo sapien
gctaaaagtagctagacagattatcccctaagc

SEQ ID NO: 659791 - DNA, 33 bp, Homo sapien
cagcctgtagccctaaaccatgtccattagagc

SEQ ID NO: 659792 - DNA, 33 bp, Homo sapien
cagcctgtagccctaagccatgtccattagagc

SEQ ID NO: 659793 - DNA, 33 bp, Homo sapien
tcatttaattcttgcaacaactctgatgcatat

SEQ ID NO: 659794 - DNA, 33 bp, Homo sapien
tcatttaattcttgcagcaactctgatgcatat

SEQ ID NO: 659795 - DNA, 33 bp, Homo sapien
agcactagagggtccactgcaactactcttatc

SEQ ID NO: 659796 - DNA, 33 bp, Homo sapien
agcactagagggtccattgcaactactcttatc

SEQ ID NO: 659797 - DNA, 33 bp, Homo sapien
gaccagtaagaagctacgacaaggtgatgatgg

SEQ ID NO: 659798 - DNA, 33 bp, Homo sapien
gaccagtaagaagctatgacaaggtgatgatgg

SEQ ID NO: 659799 - DNA, 33 bp, Homo sapien
cacagatgagtggactgaatgaatgagttagca

SEQ ID NO: 659800 - DNA, 33 bp, Homo sapien
cacagatgagtggacttaatgaatgagttagca

SEQ ID NO: 659801 - DNA, 33 bp, Homo sapien
taaaactccaaagaacacaacagattcaggatt

SEQ ID NO: 659802 - DNA, 33 bp, Homo sapien
taaaactccaaagaacgcaacagattcaggatt

SEQ ID NO: 659803 - DNA, 33 bp, Homo sapien
ttaaagccatgaatgccgaagactaacttacca

SEQ ID NO: 659804 - DNA, 33 bp, Homo sapien
ttaaagccatgaatgctgaagactaacttacca

SEQ ID NO: 659805 - DNA, 33 bp, Homo sapien
tcagttgcctcattgacacaaaaaaaagaatcc

SEQ ID NO: 659806 - DNA, 33 bp, Homo sapien
tcagttgcctcattgatacaaaaaaaagaatcc

SEQ ID NO: 659807 - DNA, 33 bp, Homo sapien
tttaatatgcacaaggcattccaggagaaagcc

SEQ ID NO: 659808 - DNA, 33 bp, Homo sapien
tttaatatgcacaaggtattccaggagaaagcc

SEQ ID NO: 659809 - DNA, 33 bp, Homo sapien
gttttgcagttgataagagctaatgggtctgct

SEQ ID NO: 659810 - DNA, 33 bp, Homo sapien
gttttgcagttgataatagctaatgggtctgct

SEQ ID NO: 659811 - DNA, 33 bp, Homo sapien
cttcttagagctgtaaataaactatgttacatg

SEQ ID NO: 659812 - DNA, 33 bp, Homo sapien
cttcttagagctgtaagtaaactatgttacatg

SEQ ID NO: 659813 - DNA, 33 bp, Homo sapien
aagggctgagatgccacgaggaagcacaaatca

SEQ ID NO: 659814 - DNA, 33 bp, Homo sapien
aagggctgagatgccaggaggaagcacaaatca

SEQ ID NO: 659815 - DNA, 33 bp, Homo sapien
tcagcccttggagaacactattataccagtaat

SEQ ID NO: 659816 - DNA, 33 bp, Homo sapien
tcagcccttggagaacgctattataccagtaat

SEQ ID NO: 659817 - DNA, 33 bp, Homo sapien
cttgatttttccagtaagcagttatctgatctt

SEQ ID NO: 659818 - DNA, 33 bp, Homo sapien
cttgatttttccagtaggcagttatctgatctt

SEQ ID NO: 659819 - DNA, 33 bp, Homo sapien
gatggcacttgcattcaagaaataggttcaatg

SEQ ID NO: 659820 - DNA, 33 bp, Homo sapien
gatggcacttgcattcgagaaataggttcaatg

SEQ ID NO: 659821 - DNA, 33 bp, Homo sapien
acatcactaaatatcagagaaatggaaatcaaa

SEQ ID NO: 659822 - DNA, 33 bp, Homo sapien
acatcactaaatatcatagaaatggaaatcaaa

SEQ ID NO: 659823 - DNA, 33 bp, Homo sapien
tatctgggtgatcgggccattcatatcccaaac

SEQ ID NO: 659824 - DNA, 33 bp, Homo sapien
tatctgggtgatcgggtcattcatatcccaaac

SEQ ID NO: 659825 - DNA, 33 bp, Homo sapien
atgtatgcatgcccccaaatctaaaataaagtt

SEQ ID NO: 659826 - DNA, 33 bp, Homo sapien
atgtatgcatgcccccgaatctaaaataaagtt

SEQ ID NO: 659827 - DNA, 33 bp, Homo sapien
gaggcccttattctgcaaagctttcttaggtct

SEQ ID NO: 659828 - DNA, 33 bp, Homo sapien
gaggcccttattctgccaagctttcttaggtct

SEQ ID NO: 659829 - DNA, 33 bp, Homo sapien
tgagcattaggtcaatcaccaaaaaactgaaaa

SEQ ID NO: 659830 - DNA, 33 bp, Homo sapien
tgagcattaggtcaattaccaaaaaactgaaaa

SEQ ID NO: 659831 - DNA, 33 bp, Homo sapien
aaagatgctatgttaagtgaaaggcaccagttc

SEQ ID NO: 659832 - DNA, 33 bp, Homo sapien
aaagatgctatgttaattgaaaggcaccagttc

SEQ ID NO: 659833 - DNA, 33 bp, Homo sapien
ggaatcattcagaatgcagcttttaaagaactg

SEQ ID NO: 659834 - DNA, 33 bp, Homo sapien
ggaatcattcagaatgtagcttttaaagaactg

SEQ ID NO: 659835 - DNA, 33 bp, Homo sapien
gttacgtattgtggccgataaagagatgaatag

SEQ ID NO: 659836 - DNA, 33 bp, Homo sapien
gttacgtattgtggcctataaagagatgaatag

SEQ ID NO: 659837 - DNA, 33 bp, Homo sapien
ccacaactcccttacactatagagaggttttgg

SEQ ID NO: 659838 - DNA, 33 bp, Homo sapien
ccacaactcccttacattatagagaggttttgg

SEQ ID NO: 659839 - DNA, 33 bp, Homo sapien
ttgcctgggagttttacgtcccctggagcggct

SEQ ID NO: 659840 - DNA, 33 bp, Homo sapien
ttgcctgggagttttatgtcccctggagcggct

SEQ ID NO: 659841 - DNA, 33 bp, Homo sapien
ctgagcagtgtacctaaaaagctgcttcaagtt

SEQ ID NO: 659842 - DNA, 33 bp, Homo sapien
ctgagcagtgtacctacaaagctgcttcaagtt

SEQ ID NO: 659843 - DNA, 33 bp, Homo sapien
cttcctgtgcgtcagacccccgcgataagctgc

SEQ ID NO: 659844 - DNA, 33 bp, Homo sapien
cttcctgtgcgtcagatccccgcgataagctgc

SEQ ID NO: 659845 - DNA, 33 bp, Homo sapien
tatcttcttcctaagaaaaacagaggcccaaca

SEQ ID NO: 659846 - DNA, 33 bp, Homo sapien
tatcttcttcctaagagaaacagaggcccaaca

SEQ ID NO: 659847 - DNA, 33 bp, Homo sapien
ttctagagcagatgccacaactcttaatactcc

SEQ ID NO: 659848 - DNA, 33 bp, Homo sapien
ttctagagcagatgccgcaactcttaatactcc

SEQ ID NO: 659849 - DNA, 33 bp, Homo sapien
ccaattcctggttaaactggacttgacaggtga

SEQ ID NO: 659850 - DNA, 33 bp, Homo sapien
ccaattcctggttaaattggacttgacaggtga

SEQ ID NO: 659851 - DNA, 33 bp, Homo sapien
ttttgctctcaaaccactggggtcattcacctg

SEQ ID NO: 659852 - DNA, 33 bp, Homo sapien
ttttgctctcaaaccattggggtcattcacctg

SEQ ID NO: 659853 - DNA, 33 bp, Homo sapien
tgggtaggctgtcaagaagaaccaacaatttca

SEQ ID NO: 659854 - DNA, 33 bp, Homo sapien
tgggtaggctgtcaaggagaaccaacaatttca

SEQ ID NO: 659855 - DNA, 33 bp, Homo sapien
gtattaagacttactcccggatcctccatgttc

SEQ ID NO: 659856 - DNA, 33 bp, Homo sapien
gtattaagacttactctcggatcctccatgttc

SEQ ID NO: 659857 - DNA, 33 bp, Homo sapien
gaaattaagaagtcacagaatgatacttaagat

SEQ ID NO: 659858 - DNA, 33 bp, Homo sapien
gaaattaagaagtcacggaatgatacttaagat

SEQ ID NO: 659859 - DNA, 33 bp, Homo sapien
tgtgcaaaggtcctgcagaagaagagagcttgc

SEQ ID NO: 659860 - DNA, 33 bp, Homo sapien
tgtgcaaaggtcctgcggaagaagagagcttgc

SEQ ID NO: 659861 - DNA, 33 bp, Homo sapien
tctagttgtagggaaacgatggtaggtctagtg

SEQ ID NO: 659862 - DNA, 33 bp, Homo sapien
tctagttgtagggaaatgatggtaggtctagtg

SEQ ID NO: 659863 - DNA, 33 bp, Homo sapien
agatgaggaaggaacaagcgagaggagctatgg

SEQ ID NO: 659864 - DNA, 33 bp, Homo sapien
agatgaggaaggaacaggcgagaggagctatgg

SEQ ID NO: 659865 - DNA, 33 bp, Homo sapien
taactacaagtctgaaagtgcctctaagaacac

SEQ ID NO: 659866 - DNA, 33 bp, Homo sapien
taactacaagtctgaatgtgcctctaagaacac

SEQ ID NO: 659867 - DNA, 33 bp, Homo sapien
caatgtgtataccagcacaatcatgatataaca

SEQ ID NO: 659868 - DNA, 33 bp, Homo sapien
caatgtgtataccagcgcaatcatgatataaca

SEQ ID NO: 659869 - DNA, 33 bp, Homo sapien
ttggttactggctaaagaaaattaccatgtgag

SEQ ID NO: 659870 - DNA, 33 bp, Homo sapien
ttggttactggctaaataaaattaccatgtgag

SEQ ID NO: 659871 - DNA, 33 bp, Homo sapien
acttcatatcaaggacagactgaggactacatg

SEQ ID NO: 659872 - DNA, 33 bp, Homo sapien
acttcatatcaaggacggactgaggactacatg

SEQ ID NO: 659873 - DNA, 33 bp, Homo sapien
tttgttttcaatacataaaaaatccactctaaa

SEQ ID NO: 659874 - DNA, 33 bp, Homo sapien
tttgttttcaatacatcaaaaatccactctaaa

SEQ ID NO: 659875 - DNA, 33 bp, Homo sapien
gaatttaaagtagtgacagtcaactctggagaa

SEQ ID NO: 659876 - DNA, 33 bp, Homo sapien
gaatttaaagtagtgatagtcaactctggagaa

SEQ ID NO: 659877 - DNA, 33 bp, Homo sapien
aaagcatacatagagtaacatagccattggggg

SEQ ID NO: 659878 - DNA, 33 bp, Homo sapien
aaagcatacatagagtgacatagccattggggg

SEQ ID NO: 659879 - DNA, 33 bp, Homo sapien
tccagttatcccaataccagtatcagaaggcca

SEQ ID NO: 659880 - DNA, 33 bp, Homo sapien
tccagttatcccaatatcagtatcagaaggcca

SEQ ID NO: 659881 - DNA, 33 bp, Homo sapien
aagttggatgggagaaggaattgttctgcagtt

SEQ ID NO: 659882 - DNA, 33 bp, Homo sapien
aagttggatgggagaatgaattgttctgcagtt

SEQ ID NO: 659883 - DNA, 33 bp, Homo sapien
cctgattttaatgctgcattcttttcagacaga

SEQ ID NO: 659884 - DNA, 33 bp, Homo sapien
cctgattttaatgctgtattcttttcagacaga

SEQ ID NO: 659885 - DNA, 33 bp, Homo sapien
tctccagtccttttcacagtcaaaccaccggtt

SEQ ID NO: 659886 - DNA, 33 bp, Homo sapien
tctccagtccttttcatagtcaaaccaccggtt

SEQ ID NO: 659887 - DNA, 33 bp, Homo sapien
tacctgaaagtacctccgacgtgtccaaagcca

SEQ ID NO: 659888 - DNA, 33 bp, Homo sapien
tacctgaaagtacctctgacgtgtccaaagcca

SEQ ID NO: 659889 - DNA, 33 bp, Homo sapien
ttggttaaagaagtcaataccttcaggagagag

SEQ ID NO: 659890 - DNA, 33 bp, Homo sapien
ttggttaaagaagtcactaccttcaggagagag

SEQ ID NO: 659891 - DNA, 33 bp, Homo sapien
aattctgaatgaccccaagaatgctgctgtttc

SEQ ID NO: 659892 - DNA, 33 bp, Homo sapien
aattctgaatgaccccgagaatgctgctgtttc

SEQ ID NO: 659893 - DNA, 33 bp, Homo sapien
taataaatccttgcaacgacctggcaaatagaa

SEQ ID NO: 659894 - DNA, 33 bp, Homo sapien
taataaatccttgcaatgacctggcaaatagaa

SEQ ID NO: 659895 - DNA, 33 bp, Homo sapien
cctcagggatccaacgcaaggttgcctccaggc

SEQ ID NO: 659896 - DNA, 33 bp, Homo sapien
cctcagggatccaacggaaggttgcctccaggc

SEQ ID NO: 659897 - DNA, 33 bp, Homo sapien
aagctcaactatagaacctggaattgctaaaac

SEQ ID NO: 659898 - DNA, 33 bp, Homo sapien
aagctcaactatagaatctggaattgctaaaac

SEQ ID NO: 659899 - DNA, 33 bp, Homo sapien
cacttaacctaagatacgattcctaagaccaaa

SEQ ID NO: 659900 - DNA, 33 bp, Homo sapien
cacttaacctaagatatgattcctaagaccaaa

SEQ ID NO: 659901 - DNA, 33 bp, Homo sapien
atccacgtgaccaatacaagaatcagggttaag

SEQ ID NO: 659902 - DNA, 33 bp, Homo sapien
atccacgtgaccaatagaagaatcagggttaag

SEQ ID NO: 659903 - DNA, 33 bp, Homo sapien
tcaagtgtctaagccaagaacttgaacgcatgt

SEQ ID NO: 659904 - DNA, 33 bp, Homo sapien
tcaagtgtctaagccaggaacttgaacgcatgt

SEQ ID NO: 659905 - DNA, 33 bp, Homo sapien
cacaaaattctgctgacgtgtaagttgcataaa

SEQ ID NO: 659906 - DNA, 33 bp, Homo sapien
cacaaaattctgctgatgtgtaagttgcataaa

SEQ ID NO: 659907 - DNA, 33 bp, Homo sapien
tcataagctctcttacaatgcaatcacccctgc

SEQ ID NO: 659908 - DNA, 33 bp, Homo sapien
tcataagctctcttaccatgcaatcacccctgc

SEQ ID NO: 659909 - DNA, 33 bp, Homo sapien
gagttcacatttctagaagatcctgatatatgc

SEQ ID NO: 659910 - DNA, 33 bp, Homo sapien
gagttcacatttctaggagatcctgatatatgc

SEQ ID NO: 659911 - DNA, 33 bp, Homo sapien
gttctggatcaattcgcccccatgccttatgta

SEQ ID NO: 659912 - DNA, 33 bp, Homo sapien
gttctggatcaattcgtccccatgccttatgta

SEQ ID NO: 659913 - DNA, 33 bp, Homo sapien
aaggataaattcttgaagtaacagcccaaaaaa

SEQ ID NO: 659914 - DNA, 33 bp, Homo sapien
aaggataaattcttgaggtaacagcccaaaaaa

SEQ ID NO: 659915 - DNA, 33 bp, Homo sapien
caccaacgttcactcaaggcccaaatattcact

SEQ ID NO: 659916 - DNA, 33 bp, Homo sapien
caccaacgttcactcagggcccaaatattcact

SEQ ID NO: 659917 - DNA, 33 bp, Homo sapien
gcataactcatcctgcacccatggaggaagaat

SEQ ID NO: 659918 - DNA, 33 bp, Homo sapien
gcataactcatcctgcgcccatggaggaagaat

SEQ ID NO: 659919 - DNA, 33 bp, Homo sapien
agtaattcagcacaagaatatcacttccttctt

SEQ ID NO: 659920 - DNA, 33 bp, Homo sapien
agtaattcagcacaagtatatcacttccttctt

SEQ ID NO: 659921 - DNA, 33 bp, Homo sapien
tatccacactattttacgaatcagccttgagga

SEQ ID NO: 659922 - DNA, 33 bp, Homo sapien
tatccacactattttaggaatcagccttgagga

SEQ ID NO: 659923 - DNA, 33 bp, Homo sapien
gagtgatgtaaaataaataagtgcttcattgtt

SEQ ID NO: 659924 - DNA, 33 bp, Homo sapien
gagtgatgtaaaataactaagtgcttcattgtt

SEQ ID NO: 659925 - DNA, 33 bp, Homo sapien
attagaggacctggtgaatgggaagtgttgagt

SEQ ID NO: 659926 - DNA, 33 bp, Homo sapien
attagaggacctggtgcatgggaagtgttgagt

SEQ ID NO: 659927 - DNA, 33 bp, Homo sapien
tccattgcctggtacacggtgaagactgaaaaa

SEQ ID NO: 659928 - DNA, 33 bp, Homo sapien
tccattgcctggtacatggtgaagactgaaaaa

SEQ ID NO: 659929 - DNA, 33 bp, Homo sapien
cttctgacctatgaaccgctaacattcaggtgt

SEQ ID NO: 659930 - DNA, 33 bp, Homo sapien
cttctgacctatgaactgctaacattcaggtgt

SEQ ID NO: 659931 - DNA, 33 bp, Homo sapien
ttggaatcaatagaaacgaatgcctggattaag

SEQ ID NO: 659932 - DNA, 33 bp, Homo sapien
ttggaatcaatagaaatgaatgcctggattaag

SEQ ID NO: 659933 - DNA, 33 bp, Homo sapien
gactaacatctgcaaactgatctttcaaaaacc

SEQ ID NO: 659934 - DNA, 33 bp, Homo sapien
gactaacatctgcaaattgatctttcaaaaacc

SEQ ID NO: 659935 - DNA, 33 bp, Homo sapien
ctcacactcaggtggaagagtaagacacgtaaa

SEQ ID NO: 659936 - DNA, 33 bp, Homo sapien
ctcacactcaggtggaggagtaagacacgtaaa

SEQ ID NO: 659937 - DNA, 33 bp, Homo sapien
atctggtgaacagaaaaaagttgctttataaag

SEQ ID NO: 659938 - DNA, 33 bp, Homo sapien
atctggtgaacagaaagaagttgctttataaag

SEQ ID NO: 659939 - DNA, 33 bp, Homo sapien
taattatctggagaaactgaagaggacatagaa

SEQ ID NO: 659940 - DNA, 33 bp, Homo sapien
taattatctggagaaattgaagaggacatagaa

SEQ ID NO: 659941 - DNA, 33 bp, Homo sapien
ttccttgaactgaaaacatcatgatggagatag

SEQ ID NO: 659942 - DNA, 33 bp, Homo sapien
ttccttgaactgaaaatatcatgatggagatag

SEQ ID NO: 659943 - DNA, 33 bp, Homo sapien
ttgttgcagctacagaacaagccactaactctg

SEQ ID NO: 659944 - DNA, 33 bp, Homo sapien
ttgttgcagctacagagcaagccactaactctg

SEQ ID NO: 659945 - DNA, 33 bp, Homo sapien
agtgaaatcctgtataatacacacacatttaat

SEQ ID NO: 659946 - DNA, 33 bp, Homo sapien
agtgaaatcctgtatagtacacacacatttaat

SEQ ID NO: 659947 - DNA, 33 bp, Homo sapien
agtattattggttctacaacttaactgtgcatt

SEQ ID NO: 659948 - DNA, 33 bp, Homo sapien
agtattattggttctataacttaactgtgcatt

SEQ ID NO: 659949 - DNA, 33 bp, Homo sapien
catatgcactcattcaatcttccttgagtaaat

SEQ ID NO: 659950 - DNA, 33 bp, Homo sapien
catatgcactcattcagtcttccttgagtaaat

SEQ ID NO: 659951 - DNA, 33 bp, Homo sapien
tcctggcaatgctgaaaacaaagccagtttttc

SEQ ID NO: 659952 - DNA, 33 bp, Homo sapien
tcctggcaatgctgaacacaaagccagtttttc

SEQ ID NO: 659953 - DNA, 33 bp, Homo sapien
tatgggatataaggcactaaggctcaaactgtc

SEQ ID NO: 659954 - DNA, 33 bp, Homo sapien
tatgggatataaggcagtaaggctcaaactgtc

SEQ ID NO: 659955 - DNA, 33 bp, Homo sapien
gaactcctcatctatgcataaggaaatgtctgt

SEQ ID NO: 659956 - DNA, 33 bp, Homo sapien
gaactcctcatctatgtataaggaaatgtctgt

SEQ ID NO: 659957 - DNA, 33 bp, Homo sapien
actttaaagattacaaagaaaagtttgagtgaa

SEQ ID NO: 659958 - DNA, 33 bp, Homo sapien
actttaaagattacaatgaaaagtttgagtgaa

SEQ ID NO: 659959 - DNA, 33 bp, Homo sapien
tcaaacatttaatatacaacttggcaaatagta

SEQ ID NO: 659960 - DNA, 33 bp, Homo sapien
tcaaacatttaatatagaacttggcaaatagta

SEQ ID NO: 659961 - DNA, 33 bp, Homo sapien
aaacgtagattcatggaatttatatctgactga

SEQ ID NO: 659962 - DNA, 33 bp, Homo sapien
aaacgtagattcatggtatttatatctgactga

SEQ ID NO: 659963 - DNA, 33 bp, Homo sapien
aagttattataagtacacaatagcagtagacag

SEQ ID NO: 659964 - DNA, 33 bp, Homo sapien
aagttattataagtacccaatagcagtagacag

SEQ ID NO: 659965 - DNA, 33 bp, Homo sapien
gcattgaggactatcagtaacttgagctaaatt

SEQ ID NO: 659966 - DNA, 33 bp, Homo sapien
gcattgaggactatcattaacttgagctaaatt

SEQ ID NO: 659967 - DNA, 33 bp, Homo sapien
tcatttggcaggctacaagattccaaattgaga

SEQ ID NO: 659968 - DNA, 33 bp, Homo sapien
tcatttggcaggctacgagattccaaattgaga

SEQ ID NO: 659969 - DNA, 33 bp, Homo sapien
gctgccatcagcaaggacatacctgttttattt

SEQ ID NO: 659970 - DNA, 33 bp, Homo sapien
gctgccatcagcaagggcatacctgttttattt

SEQ ID NO: 659971 - DNA, 33 bp, Homo sapien
aataacagagaggaaacttaaacccaggcctga

SEQ ID NO: 659972 - DNA, 33 bp, Homo sapien
aataacagagaggaaatttaaacccaggcctga

SEQ ID NO: 659973 - DNA, 33 bp, Homo sapien
attgtcttttttcaagccaactgttaaacagca

SEQ ID NO: 659974 - DNA, 33 bp, Homo sapien
attgtcttttttcaagtcaactgttaaacagca

SEQ ID NO: 659975 - DNA, 33 bp, Homo sapien
tgtaggacatctaaaaataacactgatattgac

SEQ ID NO: 659976 - DNA, 33 bp, Homo sapien
tgtaggacatctaaaagtaacactgatattgac

SEQ ID NO: 659977 - DNA, 33 bp, Homo sapien
tgtacctcatcagcctaaatactgctttaccct

SEQ ID NO: 659978 - DNA, 33 bp, Homo sapien
tgtacctcatcagcctgaatactgctttaccct

SEQ ID NO: 659979 - DNA, 33 bp, Homo sapien
gactcctcttatagctcactaaatatgtaaatg

SEQ ID NO: 659980 - DNA, 33 bp, Homo sapien
gactcctcttatagcttactaaatatgtaaatg

SEQ ID NO: 659981 - DNA, 33 bp, Homo sapien
aagaacaagtgtaataaagcagtctttagtttc

SEQ ID NO: 659982 - DNA, 33 bp, Homo sapien
aagaacaagtgtaatagagcagtctttagtttc

SEQ ID NO: 659983 - DNA, 33 bp, Homo sapien
tccacatgtagtgaaccaaagtatttgcacctc

SEQ ID NO: 659984 - DNA, 33 bp, Homo sapien
tccacatgtagtgaactaaagtatttgcacctc

SEQ ID NO: 659985 - DNA, 33 bp, Homo sapien
catgacctgccataaaataagtaagtggtaaaa

SEQ ID NO: 659986 - DNA, 33 bp, Homo sapien
catgacctgccataaattaagtaagtggtaaaa

SEQ ID NO: 659987 - DNA, 33 bp, Homo sapien
atactcacactttcaaagtaaacgctcttcttt

SEQ ID NO: 659988 - DNA, 33 bp, Homo sapien
atactcacactttcaatgtaaacgctcttcttt

SEQ ID NO: 659989 - DNA, 33 bp, Homo sapien
tgtgacagaaaactaagcacggtgaattgagga

SEQ ID NO: 659990 - DNA, 33 bp, Homo sapien
tgtgacagaaaactaatcacggtgaattgagga

SEQ ID NO: 659991 - DNA, 33 bp, Homo sapien
agaagaagataccagcaattccagaggatctgt

SEQ ID NO: 659992 - DNA, 33 bp, Homo sapien
agaagaagataccagcgattccagaggatctgt

SEQ ID NO: 659993 - DNA, 33 bp, Homo sapien
gcaataacgttcattacacaaatcaccaaaatc

SEQ ID NO: 659994 - DNA, 33 bp, Homo sapien
gcaataacgttcattatacaaatcaccaaaatc

SEQ ID NO: 659995 - DNA, 33 bp, Homo sapien
ctgctgagaatactgccgaagactaaggcaaca

SEQ ID NO: 659996 - DNA, 33 bp, Homo sapien
ctgctgagaatactgctgaagactaaggcaaca

SEQ ID NO: 659997 - DNA, 33 bp, Homo sapien
atcctctcttttgaccacatttcctcatctgta

SEQ ID NO: 659998 - DNA, 33 bp, Homo sapien
atcctctcttttgaccgcatttcctcatctgta

SEQ ID NO: 659999 - DNA, 33 bp, Homo sapien
aaggactcatattctccccaaagtatctaagta

SEQ ID NO: 660000 - DNA, 33 bp, Homo sapien
aaggactcatattctctccaaagtatctaagta

SEQ ID NO: 660001 - DNA, 33 bp, Homo sapien
cataactgagtggataaacaaattattaataag

SEQ ID NO: 660002 - DNA, 33 bp, Homo sapien
cataactgagtggatacacaaattattaataag

SEQ ID NO: 660003 - DNA, 33 bp, Homo sapien
tttagatgttctgagaaaggatgctaattaatg

SEQ ID NO: 660004 - DNA, 33 bp, Homo sapien
tttagatgttctgagacaggatgctaattaatg

SEQ ID NO: 660005 - DNA, 33 bp, Homo sapien
tctatctatgattcaacctccacagtaaagtgt

SEQ ID NO: 660006 - DNA, 33 bp, Homo sapien
tctatctatgattcaatctccacagtaaagtgt

SEQ ID NO: 660007 - DNA, 33 bp, Homo sapien
tagagaaaagaaactacaaacagcaagcagaat

SEQ ID NO: 660008 - DNA, 33 bp, Homo sapien
tagagaaaagaaactataaacagcaagcagaat

SEQ ID NO: 660009 - DNA, 33 bp, Homo sapien
gccttctgcccgttacaatttttcctgcctaaa

SEQ ID NO: 660010 - DNA, 33 bp, Homo sapien
gccttctgcccgttacgatttttcctgcctaaa

SEQ ID NO: 660011 - DNA, 33 bp, Homo sapien
agtatcagaaaactagcctagaggatcttaaac

SEQ ID NO: 660012 - DNA, 33 bp, Homo sapien
agtatcagaaaactaggctagaggatcttaaac

SEQ ID NO: 660013 - DNA, 33 bp, Homo sapien
attgcatccctgtacccgctaagaatattttca

SEQ ID NO: 660014 - DNA, 33 bp, Homo sapien
attgcatccctgtacctgctaagaatattttca

SEQ ID NO: 660015 - DNA, 33 bp, Homo sapien
taattctcagctattacagtcatatttttttca

SEQ ID NO: 660016 - DNA, 33 bp, Homo sapien
taattctcagctattatagtcatatttttttca

SEQ ID NO: 660017 - DNA, 33 bp, Homo sapien
tctcagttcttaaaaacgattcattctgccatt

SEQ ID NO: 660018 - DNA, 33 bp, Homo sapien
tctcagttcttaaaaaggattcattctgccatt

SEQ ID NO: 660019 - DNA, 33 bp, Homo sapien
accatagctgcctctacgagatcattttctctc

SEQ ID NO: 660020 - DNA, 33 bp, Homo sapien
accatagctgcctctatgagatcattttctctc

SEQ ID NO: 660021 - DNA, 33 bp, Homo sapien
acctgctctctgaaacactctgacttcagattt

SEQ ID NO: 660022 - DNA, 33 bp, Homo sapien
acctgctctctgaaacgctctgacttcagattt

SEQ ID NO: 660023 - DNA, 33 bp, Homo sapien
cctgccaagattagctcagagttcacgggactc

SEQ ID NO: 660024 - DNA, 33 bp, Homo sapien
cctgccaagattagctgagagttcacgggactc

SEQ ID NO: 660025 - DNA, 33 bp, Homo sapien
ggtctattgtgcagtagaagtctgatatttatc

SEQ ID NO: 660026 - DNA, 33 bp, Homo sapien
ggtctattgtgcagtataagtctgatatttatc

SEQ ID NO: 660027 - DNA, 33 bp, Homo sapien
ctgatgtcattgctccactatcttctcccttga

SEQ ID NO: 660028 - DNA, 33 bp, Homo sapien
ctgatgtcattgctccgctatcttctcccttga

SEQ ID NO: 660029 - DNA, 33 bp, Homo sapien
ccttgagaaagaggacactacatgaaatcttga

SEQ ID NO: 660030 - DNA, 33 bp, Homo sapien
ccttgagaaagaggacgctacatgaaatcttga

SEQ ID NO: 660031 - DNA, 33 bp, Homo sapien
tacctagaaagtctcactctataaccattaata

SEQ ID NO: 660032 - DNA, 33 bp, Homo sapien
tacctagaaagtctcagtctataaccattaata

SEQ ID NO: 660033 - DNA, 33 bp, Homo sapien
agtgtaaattgattcacggcttcctttacctag

SEQ ID NO: 660034 - DNA, 33 bp, Homo sapien
agtgtaaattgattcatggcttcctttacctag

SEQ ID NO: 660035 - DNA, 33 bp, Homo sapien
ccactgcagagcaccaatgccatgtgaggttga

SEQ ID NO: 660036 - DNA, 33 bp, Homo sapien
ccactgcagagcaccagtgccatgtgaggttga

SEQ ID NO: 660037 - DNA, 33 bp, Homo sapien
acaaagcaaagggagaaaaagaatcagctggtg

SEQ ID NO: 660038 - DNA, 33 bp, Homo sapien
acaaagcaaagggagagaaagaatcagctggtg

SEQ ID NO: 660039 - DNA, 33 bp, Homo sapien
tttatcaactgataagaacagcttattcttcaa

SEQ ID NO: 660040 - DNA, 33 bp, Homo sapien
tttatcaactgataaggacagcttattcttcaa

SEQ ID NO: 660041 - DNA, 33 bp, Homo sapien
aggcaaccaaacaccacgaaatagcagaggtga

SEQ ID NO: 660042 - DNA, 33 bp, Homo sapien
aggcaaccaaacaccatgaaatagcagaggtga

SEQ ID NO: 660043 - DNA, 33 bp, Homo sapien
acagcatatttcttcccaactcctaccctgatc

SEQ ID NO: 660044 - DNA, 33 bp, Homo sapien
acagcatatttcttccgaactcctaccctgatc

SEQ ID NO: 660045 - DNA, 33 bp, Homo sapien
tcacattcagtgagaactagaaatccacagaat

SEQ ID NO: 660046 - DNA, 33 bp, Homo sapien
tcacattcagtgagaagtagaaatccacagaat

SEQ ID NO: 660047 - DNA, 33 bp, Homo sapien
ttaaaggtaagtaataagatggccaactagcat

SEQ ID NO: 660048 - DNA, 33 bp, Homo sapien
ttaaaggtaagtaataggatggccaactagcat

SEQ ID NO: 660049 - DNA, 33 bp, Homo sapien
aattaatgcataggtcaatacttcatacaggaa

SEQ ID NO: 660050 - DNA, 33 bp, Homo sapien
aattaatgcataggtcgatacttcatacaggaa

SEQ ID NO: 660051 - DNA, 33 bp, Homo sapien
agtttccgttatggtacgaagtatagccaacaa

SEQ ID NO: 660052 - DNA, 33 bp, Homo sapien
agtttccgttatggtaggaagtatagccaacaa

SEQ ID NO: 660053 - DNA, 33 bp, Homo sapien
tgtcatatttcagataaccaggtttcctttcag

SEQ ID NO: 660054 - DNA, 33 bp, Homo sapien
tgtcatatttcagatagccaggtttcctttcag

SEQ ID NO: 660055 - DNA, 33 bp, Homo sapien
ttgatagaacacttcaagcagaatgaagagcac

SEQ ID NO: 660056 - DNA, 33 bp, Homo sapien
ttgatagaacacttcaggcagaatgaagagcac

SEQ ID NO: 660057 - DNA, 33 bp, Homo sapien
aatggattgggaaagaagaaggatggaatagaa

SEQ ID NO: 660058 - DNA, 33 bp, Homo sapien
aatggattgggaaagaggaaggatggaatagaa

SEQ ID NO: 660059 - DNA, 33 bp, Homo sapien
ctttgccactgcttcaatccaagattttgtcgt

SEQ ID NO: 660060 - DNA, 33 bp, Homo sapien
ctttgccactgcttcagtccaagattttgtcgt

SEQ ID NO: 660061 - DNA, 33 bp, Homo sapien
tgaagtgaatcaaaaaatgaatgagagataaga

SEQ ID NO: 660062 - DNA, 33 bp, Homo sapien
tgaagtgaatcaaaaagtgaatgagagataaga

SEQ ID NO: 660063 - DNA, 33 bp, Homo sapien
cctccaatatcgctaactaaaacatcccacttt

SEQ ID NO: 660064 - DNA, 33 bp, Homo sapien
cctccaatatcgctaattaaaacatcccacttt

SEQ ID NO: 660065 - DNA, 33 bp, Homo sapien
attagggtgctgggacagaaacaacactctaat

SEQ ID NO: 660066 - DNA, 33 bp, Homo sapien
attagggtgctgggacggaaacaacactctaat

SEQ ID NO: 660067 - DNA, 33 bp, Homo sapien
gcattccactcactaactgttatgaagattaaa

SEQ ID NO: 660068 - DNA, 33 bp, Homo sapien
gcattccactcactaagtgttatgaagattaaa

SEQ ID NO: 660069 - DNA, 33 bp, Homo sapien
aaggtcttcctgcccacaggttgctcctggcta

SEQ ID NO: 660070 - DNA, 33 bp, Homo sapien
aaggtcttcctgcccataggttgctcctggcta

SEQ ID NO: 660071 - DNA, 33 bp, Homo sapien
tttttttctttttgcagtcatctgtagggagag

SEQ ID NO: 660072 - DNA, 33 bp, Homo sapien
tttttttctttttgcattcatctgtagggagag

SEQ ID NO: 660073 - DNA, 33 bp, Homo sapien
ataatgttgacacttcaaggggtataaatccaa

SEQ ID NO: 660074 - DNA, 33 bp, Homo sapien
ataatgttgacacttcgaggggtataaatccaa

SEQ ID NO: 660075 - DNA, 33 bp, Homo sapien
tcctaagtaggacacgacattgaattgggagag

SEQ ID NO: 660076 - DNA, 33 bp, Homo sapien
tcctaagtaggacacggcattgaattgggagag

SEQ ID NO: 660077 - DNA, 33 bp, Homo sapien
tgtgctatgataacagaatagacgtcagcagtt

SEQ ID NO: 660078 - DNA, 33 bp, Homo sapien
tgtgctatgataacagtatagacgtcagcagtt

SEQ ID NO: 660079 - DNA, 33 bp, Homo sapien
ttttaggcactcaaaaatgttggctaggtgaat

SEQ ID NO: 660080 - DNA, 33 bp, Homo sapien
ttttaggcactcaaaagtgttggctaggtgaat

SEQ ID NO: 660081 - DNA, 33 bp, Homo sapien
acaactttaaccttccatttctatgataagtga

SEQ ID NO: 660082 - DNA, 33 bp, Homo sapien
acaactttaaccttccgtttctatgataagtga

SEQ ID NO: 660083 - DNA, 33 bp, Homo sapien
ggaaatgacatgcaaacaaggatgaccatcaca

SEQ ID NO: 660084 - DNA, 33 bp, Homo sapien
ggaaatgacatgcaaataaggatgaccatcaca

SEQ ID NO: 660085 - DNA, 33 bp, Homo sapien
ctgatacggtgcggtaaaatagataacatatcc

SEQ ID NO: 660086 - DNA, 33 bp, Homo sapien
ctgatacggtgcggtagaatagataacatatcc

SEQ ID NO: 660087 - DNA, 33 bp, Homo sapien
tagaaatctagaccatcagaacctacatgggtt

SEQ ID NO: 660088 - DNA, 33 bp, Homo sapien
tagaaatctagaccatgagaacctacatgggtt

SEQ ID NO: 660089 - DNA, 33 bp, Homo sapien
gaaacaatctatgctaactgaaagcctttaggg

SEQ ID NO: 660090 - DNA, 33 bp, Homo sapien
gaaacaatctatgctacctgaaagcctttaggg

SEQ ID NO: 660091 - DNA, 33 bp, Homo sapien
ttcttcaaaacacagacagcattttatcgtgtc

SEQ ID NO: 660092 - DNA, 33 bp, Homo sapien
ttcttcaaaacacagagagcattttatcgtgtc

SEQ ID NO: 660093 - DNA, 33 bp, Homo sapien
ttgaaccactcataccagaggacaattgccctg

SEQ ID NO: 660094 - DNA, 33 bp, Homo sapien
ttgaaccactcataccggaggacaattgccctg

SEQ ID NO: 660095 - DNA, 33 bp, Homo sapien
acagcataacaagcaaaatgtttccaaatcagg

SEQ ID NO: 660096 - DNA, 33 bp, Homo sapien
acagcataacaagcaagatgtttccaaatcagg

SEQ ID NO: 660097 - DNA, 33 bp, Homo sapien
agtttcaggcaacagaagatttcgagttgtatg

SEQ ID NO: 660098 - DNA, 33 bp, Homo sapien
agtttcaggcaacagaggatttcgagttgtatg

SEQ ID NO: 660099 - DNA, 33 bp, Homo sapien
tcaatcaactttttaacacaacagctcagccca

SEQ ID NO: 660100 - DNA, 33 bp, Homo sapien
tcaatcaactttttaatacaacagctcagccca

SEQ ID NO: 660101 - DNA, 33 bp, Homo sapien
ttgtggagatagtcaacgtgcaacttacacgtg

SEQ ID NO: 660102 - DNA, 33 bp, Homo sapien
ttgtggagatagtcaatgtgcaacttacacgtg

SEQ ID NO: 660103 - DNA, 33 bp, Homo sapien
gattgcttagggaagacgggtgcagtgatgaac

SEQ ID NO: 660104 - DNA, 33 bp, Homo sapien
gattgcttagggaagatgggtgcagtgatgaac

SEQ ID NO: 660105 - DNA, 33 bp, Homo sapien
cccagctaagaaaaacagaggagatggtttcca

SEQ ID NO: 660106 - DNA, 33 bp, Homo sapien
cccagctaagaaaaacggaggagatggtttcca

SEQ ID NO: 660107 - DNA, 33 bp, Homo sapien
cacaaggaaaacttagcaacggagtgtgaaatc

SEQ ID NO: 660108 - DNA, 33 bp, Homo sapien
cacaaggaaaacttagtaacggagtgtgaaatc

SEQ ID NO: 660109 - DNA, 33 bp, Homo sapien
caaggttctacagaaaaggaaattcagaatatg

SEQ ID NO: 660110 - DNA, 33 bp, Homo sapien
caaggttctacagaaagggaaattcagaatatg

SEQ ID NO: 660111 - DNA, 33 bp, Homo sapien
agttccccagattagaccataattcctccaaag

SEQ ID NO: 660112 - DNA, 33 bp, Homo sapien
agttccccagattagatcataattcctccaaag

SEQ ID NO: 660113 - DNA, 33 bp, Homo sapien
ttggaatttcaaccaccgatctaggacttatat

SEQ ID NO: 660114 - DNA, 33 bp, Homo sapien
ttggaatttcaaccactgatctaggacttatat

SEQ ID NO: 660115 - DNA, 33 bp, Homo sapien
aacctgtttttctctcgcagggttcctctgact

SEQ ID NO: 660116 - DNA, 33 bp, Homo sapien
aacctgtttttctctctcagggttcctctgact

SEQ ID NO: 660117 - DNA, 33 bp, Homo sapien
ataaaatgaagcttagaaaaattagggcgatgc

SEQ ID NO: 660118 - DNA, 33 bp, Homo sapien
ataaaatgaagcttaggaaaattagggcgatgc

SEQ ID NO: 660119 - DNA, 33 bp, Homo sapien
aatgcatagcaacaaaattctactacttagcta

SEQ ID NO: 660120 - DNA, 33 bp, Homo sapien
aatgcatagcaacaaagttctactacttagcta

SEQ ID NO: 660121 - DNA, 33 bp, Homo sapien
gaaatcacagaacaagaagcttaggaagtaaac

SEQ ID NO: 660122 - DNA, 33 bp, Homo sapien
gaaatcacagaacaaggagcttaggaagtaaac

SEQ ID NO: 660123 - DNA, 33 bp, Homo sapien
tgacaccaaacatctaaatcactggtttgctga

SEQ ID NO: 660124 - DNA, 33 bp, Homo sapien
tgacaccaaacatctagatcactggtttgctga

SEQ ID NO: 660125 - DNA, 33 bp, Homo sapien
tgctgctggtcttgtacggtggaatgattgatt

SEQ ID NO: 660126 - DNA, 33 bp, Homo sapien
tgctgctggtcttgtagggtggaatgattgatt

SEQ ID NO: 660127 - DNA, 33 bp, Homo sapien
aaattgctagagtcagcagatgatccccaagct

SEQ ID NO: 660128 - DNA, 33 bp, Homo sapien
aaattgctagagtcagtagatgatccccaagct

SEQ ID NO: 660129 - DNA, 33 bp, Homo sapien
agtgtgttacatctaacgtggaggggagatgga

SEQ ID NO: 660130 - DNA, 33 bp, Homo sapien
agtgtgttacatctaatgtggaggggagatgga

SEQ ID NO: 660131 - DNA, 33 bp, Homo sapien
ttggatatggaattacactaatgggccaggact

SEQ ID NO: 660132 - DNA, 33 bp, Homo sapien
ttggatatggaattacgctaatgggccaggact

SEQ ID NO: 660133 - DNA, 33 bp, Homo sapien
caaaaccagtgtatgactactaaatatgaaaat

SEQ ID NO: 660134 - DNA, 33 bp, Homo sapien
caaaaccagtgtatgattactaaatatgaaaat

SEQ ID NO: 660135 - DNA, 33 bp, Homo sapien
tatattacaggtgagaaaaaaggaattaagatg

SEQ ID NO: 660136 - DNA, 33 bp, Homo sapien
tatattacaggtgagagaaaaggaattaagatg

SEQ ID NO: 660137 - DNA, 33 bp, Homo sapien
ctgggtagattcactcaccgggtttctgtttga

SEQ ID NO: 660138 - DNA, 33 bp, Homo sapien
ctgggtagattcactcgccgggtttctgtttga

SEQ ID NO: 660139 - DNA, 33 bp, Homo sapien
tatttccaagcttatgaagaaaaaaatatcatt

SEQ ID NO: 660140 - DNA, 33 bp, Homo sapien
tatttccaagcttatggagaaaaaaatatcatt

SEQ ID NO: 660141 - DNA, 33 bp, Homo sapien
tttcctttgttgaaacccacagaggaaaacaag

SEQ ID NO: 660142 - DNA, 33 bp, Homo sapien
tttcctttgttgaaactcacagaggaaaacaag

SEQ ID NO: 660143 - DNA, 33 bp, Homo sapien
atgaccatgcagaaaacacagagcagtcacaga

SEQ ID NO: 660144 - DNA, 33 bp, Homo sapien
atgaccatgcagaaaatacagagcagtcacaga

SEQ ID NO: 660145 - DNA, 33 bp, Homo sapien
tggggatttacttccacctataggctagagata

SEQ ID NO: 660146 - DNA, 33 bp, Homo sapien
tggggatttacttccatctataggctagagata

SEQ ID NO: 660147 - DNA, 33 bp, Homo sapien
ttctctccattgaatagattgttctctgcaaac

SEQ ID NO: 660148 - DNA, 33 bp, Homo sapien
ttctctccattgaatatattgttctctgcaaac

SEQ ID NO: 660149 - DNA, 33 bp, Homo sapien
gtgctgagtggttgtcccaagtgccttgctttt

SEQ ID NO: 660150 - DNA, 33 bp, Homo sapien
gtgctgagtggttgtctcaagtgccttgctttt

SEQ ID NO: 660151 - DNA, 33 bp, Homo sapien
taacatttaacattccactctttcaggatagaa

SEQ ID NO: 660152 - DNA, 33 bp, Homo sapien
taacatttaacattccgctctttcaggatagaa

SEQ ID NO: 660153 - DNA, 33 bp, Homo sapien
atcacgtaggtatgaaacccagtacccaatagt

SEQ ID NO: 660154 - DNA, 33 bp, Homo sapien
atcacgtaggtatgaagcccagtacccaatagt

SEQ ID NO: 660155 - DNA, 33 bp, Homo sapien
atatcattaaactgtcactgttgctacaaacac

SEQ ID NO: 660156 - DNA, 33 bp, Homo sapien
atatcattaaactgtctctgttgctacaaacac

SEQ ID NO: 660157 - DNA, 33 bp, Homo sapien
gaagcagctcagaaaaggtagacaaagaagtca

SEQ ID NO: 660158 - DNA, 33 bp, Homo sapien
gaagcagctcagaaaatgtagacaaagaagtca

SEQ ID NO: 660159 - DNA, 33 bp, Homo sapien
agatcaagttgcaatacatataattctaaagta

SEQ ID NO: 660160 - DNA, 33 bp, Homo sapien
agatcaagttgcaatatatataattctaaagta

SEQ ID NO: 660161 - DNA, 33 bp, Homo sapien
ctatgaaacactagacaatgtatccaattggca

SEQ ID NO: 660162 - DNA, 33 bp, Homo sapien
ctatgaaacactagacgatgtatccaattggca

SEQ ID NO: 660163 - DNA, 33 bp, Homo sapien
cattacttggggttcaaagcaacaggatgggga

SEQ ID NO: 660164 - DNA, 33 bp, Homo sapien
cattacttggggttcagagcaacaggatgggga

SEQ ID NO: 660165 - DNA, 33 bp, Homo sapien
acaatacaggtgaaaacagacagggttctagtt

SEQ ID NO: 660166 - DNA, 33 bp, Homo sapien
acaatacaggtgaaaatagacagggttctagtt

SEQ ID NO: 660167 - DNA, 33 bp, Homo sapien
cctttattctacaagagcccaaatggttattat

SEQ ID NO: 660168 - DNA, 33 bp, Homo sapien
cctttattctacaagatcccaaatggttattat

SEQ ID NO: 660169 - DNA, 33 bp, Homo sapien
taggtggagaaactgccgaggtcttaaccatgt

SEQ ID NO: 660170 - DNA, 33 bp, Homo sapien
taggtggagaaactgctgaggtcttaaccatgt

SEQ ID NO: 660171 - DNA, 33 bp, Homo sapien
tgctattatcttatgacgatggttgagaagagt

SEQ ID NO: 660172 - DNA, 33 bp, Homo sapien
tgctattatcttatgaggatggttgagaagagt

SEQ ID NO: 660173 - DNA, 33 bp, Homo sapien
tgcatgtgagtggtgaagattagataacaaact

SEQ ID NO: 660174 - DNA, 33 bp, Homo sapien
tgcatgtgagtggtgaggattagataacaaact

SEQ ID NO: 660175 - DNA, 33 bp, Homo sapien
gaaggagtcaagtgtacagaaagggctgagaaa

SEQ ID NO: 660176 - DNA, 33 bp, Homo sapien
gaaggagtcaagtgtagagaaagggctgagaaa

SEQ ID NO: 660177 - DNA, 33 bp, Homo sapien
gctaagtgtgctatgacggaagactgctctggc

SEQ ID NO: 660178 - DNA, 33 bp, Homo sapien
gctaagtgtgctatgatggaagactgctctggc

SEQ ID NO: 660179 - DNA, 33 bp, Homo sapien
gggcccttttggttccccagttgccagcttgtc

SEQ ID NO: 660180 - DNA, 33 bp, Homo sapien
gggcccttttggttcctcagttgccagcttgtc

SEQ ID NO: 660181 - DNA, 33 bp, Homo sapien
gttgactgacagcaagacactgtgcttatagac

SEQ ID NO: 660182 - DNA, 33 bp, Homo sapien
gttgactgacagcaaggcactgtgcttatagac

SEQ ID NO: 660183 - DNA, 33 bp, Homo sapien
catctgaatgtaccaacaggtgatttggacagc

SEQ ID NO: 660184 - DNA, 33 bp, Homo sapien
catctgaatgtaccaagaggtgatttggacagc

SEQ ID NO: 660185 - DNA, 33 bp, Homo sapien
ctttctctaagtgaagccaaaaagttccaccag

SEQ ID NO: 660186 - DNA, 33 bp, Homo sapien
ctttctctaagtgaaggcaaaaagttccaccag

SEQ ID NO: 660187 - DNA, 33 bp, Homo sapien
ctcagtttcactactgcattttggatttctatc

SEQ ID NO: 660188 - DNA, 33 bp, Homo sapien
ctcagtttcactactggattttggatttctatc

SEQ ID NO: 660189 - DNA, 33 bp, Homo sapien
acaaatgctatttcccaagagaaggataaatgc

SEQ ID NO: 660190 - DNA, 33 bp, Homo sapien
acaaatgctatttcccgagagaaggataaatgc

SEQ ID NO: 660191 - DNA, 33 bp, Homo sapien
gccctatcctgacacaatatacacttgatatat

SEQ ID NO: 660192 - DNA, 33 bp, Homo sapien
gccctatcctgacacagtatacacttgatatat

SEQ ID NO: 660193 - DNA, 33 bp, Homo sapien
aagagattaaagttggaagacatatgaaatatt

SEQ ID NO: 660194 - DNA, 33 bp, Homo sapien
aagagattaaagttgggagacatatgaaatatt

SEQ ID NO: 660195 - DNA, 33 bp, Homo sapien
gttgctgcaaaggctacgatttcattactttaa

SEQ ID NO: 660196 - DNA, 33 bp, Homo sapien
gttgctgcaaaggctatgatttcattactttaa

SEQ ID NO: 660197 - DNA, 33 bp, Homo sapien
agaaaaagcaagagaacgaatctgacttcctga

SEQ ID NO: 660198 - DNA, 33 bp, Homo sapien
agaaaaagcaagagaatgaatctgacttcctga

SEQ ID NO: 660199 - DNA, 33 bp, Homo sapien
gttaagctcaggcaaaaaacacagtgaaacttt

SEQ ID NO: 660200 - DNA, 33 bp, Homo sapien
gttaagctcaggcaaacaacacagtgaaacttt

SEQ ID NO: 660201 - DNA, 33 bp, Homo sapien
ctttatgcacatacagacagaaatgaggcacac

SEQ ID NO: 660202 - DNA, 33 bp, Homo sapien
ctttatgcacatacaggcagaaatgaggcacac

SEQ ID NO: 660203 - DNA, 33 bp, Homo sapien
tacgtcttaagtgaaaaatgcccactcagcaac

SEQ ID NO: 660204 - DNA, 33 bp, Homo sapien
tacgtcttaagtgaaatatgcccactcagcaac

SEQ ID NO: 660205 - DNA, 33 bp, Homo sapien
ggttctctacttttgcccagttttcaaagtctg

SEQ ID NO: 660206 - DNA, 33 bp, Homo sapien
ggttctctacttttgctcagttttcaaagtctg

SEQ ID NO: 660207 - DNA, 33 bp, Homo sapien
catattctgtaaaccaatcttggtgctggtaat

SEQ ID NO: 660208 - DNA, 33 bp, Homo sapien
catattctgtaaaccagtcttggtgctggtaat

SEQ ID NO: 660209 - DNA, 33 bp, Homo sapien
atgaagccaagccaagaagtgaaattgaagtgt

SEQ ID NO: 660210 - DNA, 33 bp, Homo sapien
atgaagccaagccaagtagtgaaattgaagtgt

SEQ ID NO: 660211 - DNA, 33 bp, Homo sapien
caatcctgtaagagagccatgattattgtctga

SEQ ID NO: 660212 - DNA, 33 bp, Homo sapien
caatcctgtaagagaggcatgattattgtctga

SEQ ID NO: 660213 - DNA, 33 bp, Homo sapien
tgtttttctattcacaactagttcattgcttct

SEQ ID NO: 660214 - DNA, 33 bp, Homo sapien
tgtttttctattcacatctagttcattgcttct

SEQ ID NO: 660215 - DNA, 33 bp, Homo sapien
aaaatctgttcgaggaataagtcctgaagttga

SEQ ID NO: 660216 - DNA, 33 bp, Homo sapien
aaaatctgttcgaggagtaagtcctgaagttga

SEQ ID NO: 660217 - DNA, 33 bp, Homo sapien
tgggagttagaatctacagcgagatgttaactg

SEQ ID NO: 660218 - DNA, 33 bp, Homo sapien
tgggagttagaatctatagcgagatgttaactg

SEQ ID NO: 660219 - DNA, 33 bp, Homo sapien
agaccaggtttgttcaaatggcagtgacagttt

SEQ ID NO: 660220 - DNA, 33 bp, Homo sapien
agaccaggtttgttcatatggcagtgacagttt

SEQ ID NO: 660221 - DNA, 33 bp, Homo sapien
ggcaaatcaaaaccacagattaggaaagctgtc

SEQ ID NO: 660222 - DNA, 33 bp, Homo sapien
ggcaaatcaaaaccacggattaggaaagctgtc

SEQ ID NO: 660223 - DNA, 33 bp, Homo sapien
tttgtggcaaaaatacacatggcaataccatat

SEQ ID NO: 660224 - DNA, 33 bp, Homo sapien
tttgtggcaaaaatacgcatggcaataccatat

SEQ ID NO: 660225 - DNA, 33 bp, Homo sapien
gacctcttcacttggacgtctaacaggcatctc

SEQ ID NO: 660226 - DNA, 33 bp, Homo sapien
gacctcttcacttggatgtctaacaggcatctc

SEQ ID NO: 660227 - DNA, 33 bp, Homo sapien
cccacttcctaacactcagaatggtctttgaaa

SEQ ID NO: 660228 - DNA, 33 bp, Homo sapien
cccacttcctaacacttagaatggtctttgaaa

SEQ ID NO: 660229 - DNA, 33 bp, Homo sapien
attcagctcctgactacctggttgacatcactg

SEQ ID NO: 660230 - DNA, 33 bp, Homo sapien
attcagctcctgactatctggttgacatcactg

SEQ ID NO: 660231 - DNA, 33 bp, Homo sapien
ttccaatactaggcaaaccacaaagcaggatct

SEQ ID NO: 660232 - DNA, 33 bp, Homo sapien
ttccaatactaggcaagccacaaagcaggatct

SEQ ID NO: 660233 - DNA, 33 bp, Homo sapien
agtggtgagtgaatggaaagactttagatgggc

SEQ ID NO: 660234 - DNA, 33 bp, Homo sapien
agtggtgagtgaatgggaagactttagatgggc

SEQ ID NO: 660235 - DNA, 33 bp, Homo sapien
tctacaaggtctttggcaaattgttcaacttct

SEQ ID NO: 660236 - DNA, 33 bp, Homo sapien
tctacaaggtctttggtaaattgttcaacttct

SEQ ID NO: 660237 - DNA, 33 bp, Homo sapien
attaccagtgttcacaccccctagcattttcct

SEQ ID NO: 660238 - DNA, 33 bp, Homo sapien
attaccagtgttcacatcccctagcattttcct

SEQ ID NO: 660239 - DNA, 33 bp, Homo sapien
gtgtcaaattgtagcacagttgcagaaaaagag

SEQ ID NO: 660240 - DNA, 33 bp, Homo sapien
gtgtcaaattgtagcatagttgcagaaaaagag

SEQ ID NO: 660241 - DNA, 33 bp, Homo sapien
ccctgcttggatactgcagaaagttgcagctct

SEQ ID NO: 660242 - DNA, 33 bp, Homo sapien
ccctgcttggatactgtagaaagttgcagctct

SEQ ID NO: 660243 - DNA, 33 bp, Homo sapien
gtaacacttacagccaactagatttcattagtc

SEQ ID NO: 660244 - DNA, 33 bp, Homo sapien
gtaacacttacagccatctagatttcattagtc

SEQ ID NO: 660245 - DNA, 33 bp, Homo sapien
attctcaagaaccaccactgttcaccatacagc

SEQ ID NO: 660246 - DNA, 33 bp, Homo sapien
attctcaagaaccacccctgttcaccatacagc

SEQ ID NO: 660247 - DNA, 33 bp, Homo sapien
acatatgtcaaggaataaatatctgaatgtgaa

SEQ ID NO: 660248 - DNA, 33 bp, Homo sapien
acatatgtcaaggaatgaatatctgaatgtgaa

SEQ ID NO: 660249 - DNA, 33 bp, Homo sapien
cagctctgtgaaacagaacagactgagtgaatg

SEQ ID NO: 660250 - DNA, 33 bp, Homo sapien
cagctctgtgaaacaggacagactgagtgaatg

SEQ ID NO: 660251 - DNA, 33 bp, Homo sapien
aggaacattctgtacacgatttgttttttaaga

SEQ ID NO: 660252 - DNA, 33 bp, Homo sapien
aggaacattctgtacaggatttgttttttaaga

SEQ ID NO: 660253 - DNA, 33 bp, Homo sapien
tatgtgctcctacagccctctgtgctaacttct

SEQ ID NO: 660254 - DNA, 33 bp, Homo sapien
tatgtgctcctacagctctctgtgctaacttct

SEQ ID NO: 660255 - DNA, 33 bp, Homo sapien
acaggtgcacttaaccccatcttggagtacctg

SEQ ID NO: 660256 - DNA, 33 bp, Homo sapien
acaggtgcacttaacctcatcttggagtacctg

SEQ ID NO: 660257 - DNA, 33 bp, Homo sapien
aatggttagagtgaaacgtaatcctaccaaaca

SEQ ID NO: 660258 - DNA, 33 bp, Homo sapien
aatggttagagtgaaatgtaatcctaccaaaca

SEQ ID NO: 660259 - DNA, 33 bp, Homo sapien
ccttgctaataggaccacagtataattcctggc

SEQ ID NO: 660260 - DNA, 33 bp, Homo sapien
ccttgctaataggaccgcagtataattcctggc

SEQ ID NO: 660261 - DNA, 33 bp, Homo sapien
tttttccaagtaacaagggttgtaaatggaatg

SEQ ID NO: 660262 - DNA, 33 bp, Homo sapien
tttttccaagtaacaatggttgtaaatggaatg

SEQ ID NO: 660263 - DNA, 33 bp, Homo sapien
tcttaaaatcactgaggacagcattccatttac

SEQ ID NO: 660264 - DNA, 33 bp, Homo sapien
tcttaaaatcactgagtacagcattccatttac

SEQ ID NO: 660265 - DNA, 33 bp, Homo sapien
ttcaaatgtgccttcaggatatacttcatagta

SEQ ID NO: 660266 - DNA, 33 bp, Homo sapien
ttcaaatgtgccttcatgatatacttcatagta

SEQ ID NO: 660267 - DNA, 33 bp, Homo sapien
gaaggggctgggacacaattttaggtcttttca

SEQ ID NO: 660268 - DNA, 33 bp, Homo sapien
gaaggggctgggacacgattttaggtcttttca

SEQ ID NO: 660269 - DNA, 33 bp, Homo sapien
tacaaagcttggtctacgtgtcaaacagtaccc

SEQ ID NO: 660270 - DNA, 33 bp, Homo sapien
tacaaagcttggtctaggtgtcaaacagtaccc

SEQ ID NO: 660271 - DNA, 33 bp, Homo sapien
tctaaaactgttctcaaaaataaagtctactgt

SEQ ID NO: 660272 - DNA, 33 bp, Homo sapien
tctaaaactgttctcacaaataaagtctactgt

SEQ ID NO: 660273 - DNA, 33 bp, Homo sapien
ggtgaacgcaatttggaactattcttagacccc

SEQ ID NO: 660274 - DNA, 33 bp, Homo sapien
ggtgaacgcaatttgggactattcttagacccc

SEQ ID NO: 660275 - DNA, 33 bp, Homo sapien
agacaagataataaaacggaagaactgtgggga

SEQ ID NO: 660276 - DNA, 33 bp, Homo sapien
agacaagataataaaatggaagaactgtgggga

SEQ ID NO: 660277 - DNA, 33 bp, Homo sapien
aagtagagttatggcaacacgaaatagacaggc

SEQ ID NO: 660278 - DNA, 33 bp, Homo sapien
aagtagagttatggcagcacgaaatagacaggc

SEQ ID NO: 660279 - DNA, 33 bp, Homo sapien
atcatattgacttggccaaagaccccattcatc

SEQ ID NO: 660280 - DNA, 33 bp, Homo sapien
atcatattgacttggctaaagaccccattcatc

SEQ ID NO: 660281 - DNA, 33 bp, Homo sapien
cttgcatagtcagaagaattttcaaatgacaga

SEQ ID NO: 660282 - DNA, 33 bp, Homo sapien
cttgcatagtcagaagcattttcaaatgacaga

SEQ ID NO: 660283 - DNA, 33 bp, Homo sapien
ctgtcatttatcagcagtccatctttgtaagcc

SEQ ID NO: 660284 - DNA, 33 bp, Homo sapien
ctgtcatttatcagcattccatctttgtaagcc

SEQ ID NO: 660285 - DNA, 33 bp, Homo sapien
aaacaagtttttctgggaattctgagacacaaa

SEQ ID NO: 660286 - DNA, 33 bp, Homo sapien
aaacaagtttttctggtaattctgagacacaaa

SEQ ID NO: 660287 - DNA, 33 bp, Homo sapien
aaagtgatttacaaagcagaacagtgtctttga

SEQ ID NO: 660288 - DNA, 33 bp, Homo sapien
aaagtgatttacaaaggagaacagtgtctttga

SEQ ID NO: 660289 - DNA, 33 bp, Homo sapien
ctatgtgagctggtaaactcttcccaagtttaa

SEQ ID NO: 660290 - DNA, 33 bp, Homo sapien
ctatgtgagctggtaacctcttcccaagtttaa

SEQ ID NO: 660291 - DNA, 33 bp, Homo sapien
atgatgagtgatctagaaaagctggcaattaag

SEQ ID NO: 660292 - DNA, 33 bp, Homo sapien
atgatgagtgatctagcaaagctggcaattaag

SEQ ID NO: 660293 - DNA, 33 bp, Homo sapien
acactacctcaaaatacggcctagatttcttcc

SEQ ID NO: 660294 - DNA, 33 bp, Homo sapien
acactacctcaaaatatggcctagatttcttcc

SEQ ID NO: 660295 - DNA, 33 bp, Homo sapien
ttcctgcacaagcgtaggtcaagcctctgttca

SEQ ID NO: 660296 - DNA, 33 bp, Homo sapien
ttcctgcacaagcgtatgtcaagcctctgttca

SEQ ID NO: 660297 - DNA, 33 bp, Homo sapien
atgctatgggtaaccacgaagtctggctgggac

SEQ ID NO: 660298 - DNA, 33 bp, Homo sapien
atgctatgggtaaccatgaagtctggctgggac

SEQ ID NO: 660299 - DNA, 33 bp, Homo sapien
atatagaggtgttgtccaagaaccatcctggca

SEQ ID NO: 660300 - DNA, 33 bp, Homo sapien
atatagaggtgttgtctaagaaccatcctggca

SEQ ID NO: 660301 - DNA, 33 bp, Homo sapien
tttctcccttgcctcactgaatatcctccatgc

SEQ ID NO: 660302 - DNA, 33 bp, Homo sapien
tttctcccttgcctcattgaatatcctccatgc

SEQ ID NO: 660303 - DNA, 33 bp, Homo sapien
cctctcatgtgataataagcaaccatttgtcac

SEQ ID NO: 660304 - DNA, 33 bp, Homo sapien
cctctcatgtgataatgagcaaccatttgtcac

SEQ ID NO: 660305 - DNA, 33 bp, Homo sapien
aaccgcaggaacactccgagaggaaaaaggcaa

SEQ ID NO: 660306 - DNA, 33 bp, Homo sapien
aaccgcaggaacactctgagaggaaaaaggcaa

SEQ ID NO: 660307 - DNA, 33 bp, Homo sapien
aaaaatactcagaaataagccagcgtaagaagg

SEQ ID NO: 660308 - DNA, 33 bp, Homo sapien
aaaaatactcagaaatgagccagcgtaagaagg

SEQ ID NO: 660309 - DNA, 33 bp, Homo sapien
attagctttcctcttacctctcatacaaatact

SEQ ID NO: 660310 - DNA, 33 bp, Homo sapien
attagctttcctcttatctctcatacaaatact

SEQ ID NO: 660311 - DNA, 33 bp, Homo sapien
ttcagtacttaatctaggttgaattgatattga

SEQ ID NO: 660312 - DNA, 33 bp, Homo sapien
ttcagtacttaatctatgttgaattgatattga

SEQ ID NO: 660313 - DNA, 33 bp, Homo sapien
tggtgttttgaaaatacgcctgtaaattatttg

SEQ ID NO: 660314 - DNA, 33 bp, Homo sapien
tggtgttttgaaaatatgcctgtaaattatttg

SEQ ID NO: 660315 - DNA, 33 bp, Homo sapien
atttaatgttttttgaagattgcggtgtagaat

SEQ ID NO: 660316 - DNA, 33 bp, Homo sapien
atttaatgttttttgaggattgcggtgtagaat

SEQ ID NO: 660317 - DNA, 33 bp, Homo sapien
accttgaaatgaagaccaccttgtctatgccta

SEQ ID NO: 660318 - DNA, 33 bp, Homo sapien
accttgaaatgaagactaccttgtctatgccta

SEQ ID NO: 660319 - DNA, 33 bp, Homo sapien
agtcatagccgtcataccattgtagggcaatgt

SEQ ID NO: 660320 - DNA, 33 bp, Homo sapien
agtcatagccgtcatatcattgtagggcaatgt

SEQ ID NO: 660321 - DNA, 33 bp, Homo sapien
acacacctaggttctacgggatagcctattgct

SEQ ID NO: 660322 - DNA, 33 bp, Homo sapien
acacacctaggttctatgggatagcctattgct

SEQ ID NO: 660323 - DNA, 33 bp, Homo sapien
ggtgccccctatgacacacttttgctcctcttg

SEQ ID NO: 660324 - DNA, 33 bp, Homo sapien
ggtgccccctatgacatacttttgctcctcttg

SEQ ID NO: 660325 - DNA, 33 bp, Homo sapien
gccaatttcctaggccacatacattattcaggc

SEQ ID NO: 660326 - DNA, 33 bp, Homo sapien
gccaatttcctaggccgcatacattattcaggc

SEQ ID NO: 660327 - DNA, 33 bp, Homo sapien
tgtctactccctactagaagaaccaggtccgta

SEQ ID NO: 660328 - DNA, 33 bp, Homo sapien
tgtctactccctactataagaaccaggtccgta

SEQ ID NO: 660329 - DNA, 33 bp, Homo sapien
tggtcacaggctccaacggtttagccagtaagc

SEQ ID NO: 660330 - DNA, 33 bp, Homo sapien
tggtcacaggctccaagggtttagccagtaagc

SEQ ID NO: 660331 - DNA, 33 bp, Homo sapien
ataatacagtttccaacgtaagtgggtcaaaca

SEQ ID NO: 660332 - DNA, 33 bp, Homo sapien
ataatacagtttccaatgtaagtgggtcaaaca

SEQ ID NO: 660333 - DNA, 33 bp, Homo sapien
tcaatgcccttcaagggataatctagtctagag

SEQ ID NO: 660334 - DNA, 33 bp, Homo sapien
tcaatgcccttcaaggtataatctagtctagag

SEQ ID NO: 660335 - DNA, 33 bp, Homo sapien
gcaccagttgagacagcactaaaagggtaaaat

SEQ ID NO: 660336 - DNA, 33 bp, Homo sapien
gcaccagttgagacaggactaaaagggtaaaat

SEQ ID NO: 660337 - DNA, 33 bp, Homo sapien
atttctcctgtaaaaaaagatagcaactaccaa

SEQ ID NO: 660338 - DNA, 33 bp, Homo sapien
atttctcctgtaaaaacagatagcaactaccaa

SEQ ID NO: 660339 - DNA, 33 bp, Homo sapien
cgtacactgacacatacattctgcttgtcagtc

SEQ ID NO: 660340 - DNA, 33 bp, Homo sapien
cgtacactgacacatatattctgcttgtcagtc

SEQ ID NO: 660341 - DNA, 33 bp, Homo sapien
agcagttactagttgaagttttaaggagtaaaa

SEQ ID NO: 660342 - DNA, 33 bp, Homo sapien
agcagttactagttgaggttttaaggagtaaaa

SEQ ID NO: 660343 - DNA, 33 bp, Homo sapien
ttcagtcaccttctccactatgtctgggacaat

SEQ ID NO: 660344 - DNA, 33 bp, Homo sapien
ttcagtcaccttctccgctatgtctgggacaat

SEQ ID NO: 660345 - DNA, 33 bp, Homo sapien
tccctcagagggaacaatcaatgcaaagtgcat

SEQ ID NO: 660346 - DNA, 33 bp, Homo sapien
tccctcagagggaacagtcaatgcaaagtgcat

SEQ ID NO: 660347 - DNA, 33 bp, Homo sapien
ttgtaagttcattctgcaagcctgtattaaagg

SEQ ID NO: 660348 - DNA, 33 bp, Homo sapien
ttgtaagttcattctgtaagcctgtattaaagg

SEQ ID NO: 660349 - DNA, 33 bp, Homo sapien
ctcctcggactgtcatcacttgcatagagctag

SEQ ID NO: 660350 - DNA, 33 bp, Homo sapien
ctcctcggactgtcattacttgcatagagctag

SEQ ID NO: 660351 - DNA, 33 bp, Homo sapien
tttagaaggaatatcaacctaatattttaaagg

SEQ ID NO: 660352 - DNA, 33 bp, Homo sapien
tttagaaggaatatcagcctaatattttaaagg

SEQ ID NO: 660353 - DNA, 33 bp, Homo sapien
catcagccaccccccaccttttttcataactgg

SEQ ID NO: 660354 - DNA, 33 bp, Homo sapien
catcagccaccccccatcttttttcataactgg

SEQ ID NO: 660355 - DNA, 33 bp, Homo sapien
gcttttgtgttttacacgaaaggaaattgagga

SEQ ID NO: 660356 - DNA, 33 bp, Homo sapien
gcttttgtgttttacatgaaaggaaattgagga

SEQ ID NO: 660357 - DNA, 33 bp, Homo sapien
ttgtcctgattgcttcacggggagtacagaaca

SEQ ID NO: 660358 - DNA, 33 bp, Homo sapien
ttgtcctgattgcttcccggggagtacagaaca

SEQ ID NO: 660359 - DNA, 33 bp, Homo sapien
cacggtaagcagttaagagacaaactttttttt

SEQ ID NO: 660360 - DNA, 33 bp, Homo sapien
cacggtaagcagttaatagacaaactttttttt

SEQ ID NO: 660361 - DNA, 33 bp, Homo sapien
atgtaggttctgtatcaatgtattcttatatgg

SEQ ID NO: 660362 - DNA, 33 bp, Homo sapien
atgtaggttctgtatcgatgtattcttatatgg

SEQ ID NO: 660363 - DNA, 33 bp, Homo sapien
ggggcaaatttaggatcatatggctggtcatat

SEQ ID NO: 660364 - DNA, 33 bp, Homo sapien
ggggcaaatttaggatgatatggctggtcatat

SEQ ID NO: 660365 - DNA, 33 bp, Homo sapien
actggaaattccttgaagatgaataggataatc

SEQ ID NO: 660366 - DNA, 33 bp, Homo sapien
actggaaattccttgaggatgaataggataatc

SEQ ID NO: 660367 - DNA, 33 bp, Homo sapien
agtgaaataagagcaacgaaagggctgagttaa

SEQ ID NO: 660368 - DNA, 33 bp, Homo sapien
agtgaaataagagcaaggaaagggctgagttaa

SEQ ID NO: 660369 - DNA, 33 bp, Homo sapien
ggatcaaggaggcttcaagttaacgaattctgt

SEQ ID NO: 660370 - DNA, 33 bp, Homo sapien
ggatcaaggaggcttcgagttaacgaattctgt

SEQ ID NO: 660371 - DNA, 33 bp, Homo sapien
tctaaactctttgtacgcatctttggcttgtgt

SEQ ID NO: 660372 - DNA, 33 bp, Homo sapien
tctaaactctttgtactcatctttggcttgtgt

SEQ ID NO: 660373 - DNA, 33 bp, Homo sapien
ccctttaaaaggctgacgtggttgataagcggg

SEQ ID NO: 660374 - DNA, 33 bp, Homo sapien
ccctttaaaaggctgatgtggttgataagcggg

SEQ ID NO: 660375 - DNA, 33 bp, Homo sapien
ctaaaatctccccataagtttttccattagtcc

SEQ ID NO: 660376 - DNA, 33 bp, Homo sapien
ctaaaatctccccatacgtttttccattagtcc

SEQ ID NO: 660377 - DNA, 33 bp, Homo sapien
tagagctgaagcaagcaaaagtccaagcctatt

SEQ ID NO: 660378 - DNA, 33 bp, Homo sapien
tagagctgaagcaagccaaagtccaagcctatt

SEQ ID NO: 660379 - DNA, 33 bp, Homo sapien
gattaataaacccaaaaaactgagcccagagaa

SEQ ID NO: 660380 - DNA, 33 bp, Homo sapien
gattaataaacccaaacaactgagcccagagaa

SEQ ID NO: 660381 - DNA, 33 bp, Homo sapien
tcatttaacccaaaacaacaggccttgatcccc

SEQ ID NO: 660382 - DNA, 33 bp, Homo sapien
tcatttaacccaaaacgacaggccttgatcccc

SEQ ID NO: 660383 - DNA, 33 bp, Homo sapien
aataaacaagtaattagagagggcctaaattga

SEQ ID NO: 660384 - DNA, 33 bp, Homo sapien
aataaacaagtaattatagagggcctaaattga

SEQ ID NO: 660385 - DNA, 33 bp, Homo sapien
tacagaaactctcccaaaagtataactaaaaca

SEQ ID NO: 660386 - DNA, 33 bp, Homo sapien
tacagaaactctcccagaagtataactaaaaca

SEQ ID NO: 660387 - DNA, 33 bp, Homo sapien
tgggtgcctctgcaaacgcccaagccatggctg

SEQ ID NO: 660388 - DNA, 33 bp, Homo sapien
tgggtgcctctgcaaatgcccaagccatggctg

SEQ ID NO: 660389 - DNA, 33 bp, Homo sapien
gaatcttgattaagtgaacaaacctgcatgttc

SEQ ID NO: 660390 - DNA, 33 bp, Homo sapien
gaatcttgattaagtggacaaacctgcatgttc

SEQ ID NO: 660391 - DNA, 33 bp, Homo sapien
gtaactgtattaactaggcactaacaatgtgaa

SEQ ID NO: 660392 - DNA, 33 bp, Homo sapien
gtaactgtattaactatgcactaacaatgtgaa

SEQ ID NO: 660393 - DNA, 33 bp, Homo sapien
ttttgcattagttgaaacataaaaactagttta

SEQ ID NO: 660394 - DNA, 33 bp, Homo sapien
ttttgcattagttgaaccataaaaactagttta

SEQ ID NO: 660395 - DNA, 33 bp, Homo sapien
agattaaatggagtaacagccagaaggacgaaa

SEQ ID NO: 660396 - DNA, 33 bp, Homo sapien
agattaaatggagtaagagccagaaggacgaaa

SEQ ID NO: 660397 - DNA, 33 bp, Homo sapien
gtgtacattctctaaactttaacacgtgtagat

SEQ ID NO: 660398 - DNA, 33 bp, Homo sapien
gtgtacattctctaaattttaacacgtgtagat

SEQ ID NO: 660399 - DNA, 33 bp, Homo sapien
tgaaggttacaaagcactgaatcttttcctttc

SEQ ID NO: 660400 - DNA, 33 bp, Homo sapien
tgaaggttacaaagcagtgaatcttttcctttc

SEQ ID NO: 660401 - DNA, 33 bp, Homo sapien
gtttcagagctaaggcaccgtgaaaccattgtc

SEQ ID NO: 660402 - DNA, 33 bp, Homo sapien
gtttcagagctaaggcgccgtgaaaccattgtc

SEQ ID NO: 660403 - DNA, 33 bp, Homo sapien
ctaattttgttaaagaacattgcaaccacatag

SEQ ID NO: 660404 - DNA, 33 bp, Homo sapien
ctaattttgttaaagatcattgcaaccacatag

SEQ ID NO: 660405 - DNA, 33 bp, Homo sapien
aatctgatcacatatcaagggaattttggctaa

SEQ ID NO: 660406 - DNA, 33 bp, Homo sapien
aatctgatcacatatcgagggaattttggctaa

SEQ ID NO: 660407 - DNA, 33 bp, Homo sapien
tgcacagtgaaatcaaatgtgtgataagagatg

SEQ ID NO: 660408 - DNA, 33 bp, Homo sapien
tgcacagtgaaatcaagtgtgtgataagagatg

SEQ ID NO: 660409 - DNA, 33 bp, Homo sapien
agattttgaaaagtatcaaatggctgaagttaa

SEQ ID NO: 660410 - DNA, 33 bp, Homo sapien
agattttgaaaagtattaaatggctgaagttaa

SEQ ID NO: 660411 - DNA, 33 bp, Homo sapien
caataaggtactcacaaataattcaattaaatc

SEQ ID NO: 660412 - DNA, 33 bp, Homo sapien
caataaggtactcacagataattcaattaaatc

SEQ ID NO: 660413 - DNA, 33 bp, Homo sapien
cttctctaggataaaacaaagagacgagggaaa

SEQ ID NO: 660414 - DNA, 33 bp, Homo sapien
cttctctaggataaaataaagagacgagggaaa

SEQ ID NO: 660415 - DNA, 33 bp, Homo sapien
gcataattcctggcacacgtaagaggcaatgag

SEQ ID NO: 660416 - DNA, 33 bp, Homo sapien
gcataattcctggcacgcgtaagaggcaatgag

SEQ ID NO: 660417 - DNA, 33 bp, Homo sapien
acaaagcctatatgacaacacgtctgtttatgg

SEQ ID NO: 660418 - DNA, 33 bp, Homo sapien
acaaagcctatatgacgacacgtctgtttatgg

SEQ ID NO: 660419 - DNA, 33 bp, Homo sapien
acccacagtatgtagccaacagatatggcctca

SEQ ID NO: 660420 - DNA, 33 bp, Homo sapien
acccacagtatgtagctaacagatatggcctca

SEQ ID NO: 660421 - DNA, 33 bp, Homo sapien
aaaggatgttatggaactcataatttttaaaag

SEQ ID NO: 660422 - DNA, 33 bp, Homo sapien
aaaggatgttatggaagtcataatttttaaaag

SEQ ID NO: 660423 - DNA, 33 bp, Homo sapien
cagctaataagtggtacagttgagttttgtatg

SEQ ID NO: 660424 - DNA, 33 bp, Homo sapien
cagctaataagtggtatagttgagttttgtatg

SEQ ID NO: 660425 - DNA, 33 bp, Homo sapien
gaaagtttaagtgtaaaaacagtcagcttgata

SEQ ID NO: 660426 - DNA, 33 bp, Homo sapien
gaaagtttaagtgtaagaacagtcagcttgata

SEQ ID NO: 660427 - DNA, 33 bp, Homo sapien
gaatgagctactaggggcagatataccacagtg

SEQ ID NO: 660428 - DNA, 33 bp, Homo sapien
gaatgagctactagggtcagatataccacagtg

SEQ ID NO: 660429 - DNA, 33 bp, Homo sapien
agcccagaatttgacacggagaagagataaacg

SEQ ID NO: 660430 - DNA, 33 bp, Homo sapien
agcccagaatttgacatggagaagagataaacg

SEQ ID NO: 660431 - DNA, 33 bp, Homo sapien
gattcactaatcctaaaagaacaacgaacttcc

SEQ ID NO: 660432 - DNA, 33 bp, Homo sapien
gattcactaatcctaagagaacaacgaacttcc

SEQ ID NO: 660433 - DNA, 33 bp, Homo sapien
tgtgtctttttgcatacgaaccacatggtattt

SEQ ID NO: 660434 - DNA, 33 bp, Homo sapien
tgtgtctttttgcatatgaaccacatggtattt

SEQ ID NO: 660435 - DNA, 33 bp, Homo sapien
ttctaaaattatgcaactagtgtgtcaaatgtt

SEQ ID NO: 660436 - DNA, 33 bp, Homo sapien
ttctaaaattatgcaattagtgtgtcaaatgtt

SEQ ID NO: 660437 - DNA, 33 bp, Homo sapien
atgatacacaatacatcaatgaaaagctcaaac

SEQ ID NO: 660438 - DNA, 33 bp, Homo sapien
atgatacacaatacattaatgaaaagctcaaac

SEQ ID NO: 660439 - DNA, 33 bp, Homo sapien
tctggctgctgagtaaatgtcattcagtcacat

SEQ ID NO: 660440 - DNA, 33 bp, Homo sapien
tctggctgctgagtaattgtcattcagtcacat

SEQ ID NO: 660441 - DNA, 33 bp, Homo sapien
acctcagccttgatggcacttggtataaattca

SEQ ID NO: 660442 - DNA, 33 bp, Homo sapien
acctcagccttgatgggacttggtataaattca

SEQ ID NO: 660443 - DNA, 33 bp, Homo sapien
agagatgggagttacaatggtctaaactgaatg

SEQ ID NO: 660444 - DNA, 33 bp, Homo sapien
agagatgggagttacagtggtctaaactgaatg

SEQ ID NO: 660445 - DNA, 33 bp, Homo sapien
tggtgagtggagtaaacgttcacccttgtcaca

SEQ ID NO: 660446 - DNA, 33 bp, Homo sapien
tggtgagtggagtaaatgttcacccttgtcaca

SEQ ID NO: 660447 - DNA, 33 bp, Homo sapien
gttctctgtctcctctaaaattaatctggtgtt

SEQ ID NO: 660448 - DNA, 33 bp, Homo sapien
gttctctgtctcctctgaaattaatctggtgtt

SEQ ID NO: 660449 - DNA, 33 bp, Homo sapien
aaaaactggcaacaaccgaaatgtccttcaaca

SEQ ID NO: 660450 - DNA, 33 bp, Homo sapien
aaaaactggcaacaactgaaatgtccttcaaca

SEQ ID NO: 660451 - DNA, 33 bp, Homo sapien
agggacttcaggtccaaaagaataacctagtgg

SEQ ID NO: 660452 - DNA, 33 bp, Homo sapien
agggacttcaggtccagaagaataacctagtgg

SEQ ID NO: 660453 - DNA, 33 bp, Homo sapien
ttcttttgtaacactccatatcatccaagaaaa

SEQ ID NO: 660454 - DNA, 33 bp, Homo sapien
ttcttttgtaacactctatatcatccaagaaaa

SEQ ID NO: 660455 - DNA, 33 bp, Homo sapien
ggttttcattaaatacagcaatactctagacta

SEQ ID NO: 660456 - DNA, 33 bp, Homo sapien
ggttttcattaaatactgcaatactctagacta

SEQ ID NO: 660457 - DNA, 33 bp, Homo sapien
gaagacgtaaaacagactatcgacgatattaat

SEQ ID NO: 660458 - DNA, 33 bp, Homo sapien
gaagacgtaaaacagattatcgacgatattaat

SEQ ID NO: 660459 - DNA, 33 bp, Homo sapien
ttgataccaggttttcgaatctcaaagcctctc

SEQ ID NO: 660460 - DNA, 33 bp, Homo sapien
ttgataccaggttttctaatctcaaagcctctc

SEQ ID NO: 660461 - DNA, 33 bp, Homo sapien
aggccagatgtgttgccacaactaacagtggaa

SEQ ID NO: 660462 - DNA, 33 bp, Homo sapien
aggccagatgtgttgctacaactaacagtggaa

SEQ ID NO: 660463 - DNA, 33 bp, Homo sapien
ttggaatttcacaatgcactcatttacttcttt

SEQ ID NO: 660464 - DNA, 33 bp, Homo sapien
ttggaatttcacaatggactcatttacttcttt

SEQ ID NO: 660465 - DNA, 33 bp, Homo sapien
attgctagctttgccaaaccatttgtggtcttc

SEQ ID NO: 660466 - DNA, 33 bp, Homo sapien
attgctagctttgccagaccatttgtggtcttc

SEQ ID NO: 660467 - DNA, 33 bp, Homo sapien
agcagaaacggtgaaaggacatcaatatgaaca

SEQ ID NO: 660468 - DNA, 33 bp, Homo sapien
agcagaaacggtgaaatgacatcaatatgaaca

SEQ ID NO: 660469 - DNA, 33 bp, Homo sapien
gtgtcagaacttaacaatggtcttccaacttca

SEQ ID NO: 660470 - DNA, 33 bp, Homo sapien
gtgtcagaacttaacactggtcttccaacttca

SEQ ID NO: 660471 - DNA, 33 bp, Homo sapien
tatttcaatagcgaaaatgattaaaaaaattca

SEQ ID NO: 660472 - DNA, 33 bp, Homo sapien
tatttcaatagcgaaagtgattaaaaaaattca

SEQ ID NO: 660473 - DNA, 33 bp, Homo sapien
tagaaattctgatcaccaaaaaacattaaagaa

SEQ ID NO: 660474 - DNA, 33 bp, Homo sapien
tagaaattctgatcactaaaaaacattaaagaa

SEQ ID NO: 660475 - DNA, 33 bp, Homo sapien
attataagatttaaacaaaattgtccaggaagc

SEQ ID NO: 660476 - DNA, 33 bp, Homo sapien
attataagatttaaacgaaattgtccaggaagc

SEQ ID NO: 660477 - DNA, 33 bp, Homo sapien
agtgcttttactaacaatgcctaaacatgtagt

SEQ ID NO: 660478 - DNA, 33 bp, Homo sapien
agtgcttttactaacagtgcctaaacatgtagt

SEQ ID NO: 660479 - DNA, 33 bp, Homo sapien
tgggagttctaaaccaatatctgtccttagcta

SEQ ID NO: 660480 - DNA, 33 bp, Homo sapien
tgggagttctaaaccagtatctgtccttagcta

SEQ ID NO: 660481 - DNA, 33 bp, Homo sapien
atccattttcttggcagtcagagaaaacctact

SEQ ID NO: 660482 - DNA, 33 bp, Homo sapien
atccattttcttggcattcagagaaaacctact

SEQ ID NO: 660483 - DNA, 33 bp, Homo sapien
taaggcactcactttacagtaagcgatcctccc

SEQ ID NO: 660484 - DNA, 33 bp, Homo sapien
taaggcactcactttatagtaagcgatcctccc

SEQ ID NO: 660485 - DNA, 33 bp, Homo sapien
ctggccaagatgacaactggttggaacagaagc

SEQ ID NO: 660486 - DNA, 33 bp, Homo sapien
ctggccaagatgacaattggttggaacagaagc

SEQ ID NO: 660487 - DNA, 33 bp, Homo sapien
caggcatcacctgatcaaaaagcaaaatctgag

SEQ ID NO: 660488 - DNA, 33 bp, Homo sapien
caggcatcacctgatcgaaaagcaaaatctgag

SEQ ID NO: 660489 - DNA, 33 bp, Homo sapien
tcacagttctttaaaaccttgctattcaagcta

SEQ ID NO: 660490 - DNA, 33 bp, Homo sapien
tcacagttctttaaaatcttgctattcaagcta

SEQ ID NO: 660491 - DNA, 33 bp, Homo sapien
accgattacagaaggagaattgcaactgctttg

SEQ ID NO: 660492 - DNA, 33 bp, Homo sapien
accgattacagaaggataattgcaactgctttg

SEQ ID NO: 660493 - DNA, 33 bp, Homo sapien
ttgctggctgcctatcactacaaaacagtctcc

SEQ ID NO: 660494 - DNA, 33 bp, Homo sapien
ttgctggctgcctatcgctacaaaacagtctcc

SEQ ID NO: 660495 - DNA, 33 bp, Homo sapien
tgagtaaaacggaatcgaaatacatttgccact

SEQ ID NO: 660496 - DNA, 33 bp, Homo sapien
tgagtaaaacggaatctaaatacatttgccact

SEQ ID NO: 660497 - DNA, 33 bp, Homo sapien
acactcttactccttcccttgacccatgagatt

SEQ ID NO: 660498 - DNA, 33 bp, Homo sapien
acactcttactccttctcttgacccatgagatt

SEQ ID NO: 660499 - DNA, 33 bp, Homo sapien
tacctgctgtttccgaagggggatcttacagcc

SEQ ID NO: 660500 - DNA, 33 bp, Homo sapien
tacctgctgtttccgaggggggatcttacagcc

SEQ ID NO: 660501 - DNA, 33 bp, Homo sapien
tctgtatctcaggttcactgtttcattaggaca

SEQ ID NO: 660502 - DNA, 33 bp, Homo sapien
tctgtatctcaggttcgctgtttcattaggaca

SEQ ID NO: 660503 - DNA, 33 bp, Homo sapien
aatgatagaaagccaaataacagtggttggagc

SEQ ID NO: 660504 - DNA, 33 bp, Homo sapien
aatgatagaaagccaagtaacagtggttggagc

SEQ ID NO: 660505 - DNA, 33 bp, Homo sapien
ccttccttgttttcaacggccaaatccctggtg

SEQ ID NO: 660506 - DNA, 33 bp, Homo sapien
ccttccttgttttcaatggccaaatccctggtg

SEQ ID NO: 660507 - DNA, 33 bp, Homo sapien
ctttgtgcaagatgatcagtctagagtttacca

SEQ ID NO: 660508 - DNA, 33 bp, Homo sapien
ctttgtgcaagatgattagtctagagtttacca

SEQ ID NO: 660509 - DNA, 33 bp, Homo sapien
catcacattgcagcaaaaggagtgcagagagtt

SEQ ID NO: 660510 - DNA, 33 bp, Homo sapien
catcacattgcagcaacaggagtgcagagagtt

SEQ ID NO: 660511 - DNA, 33 bp, Homo sapien
tgttaatagcaactcaaatagctgtgggatcca

SEQ ID NO: 660512 - DNA, 33 bp, Homo sapien
tgttaatagcaactcagatagctgtgggatcca

SEQ ID NO: 660513 - DNA, 33 bp, Homo sapien
cgaatctagggcatcacatttattttttctggg

SEQ ID NO: 660514 - DNA, 33 bp, Homo sapien
cgaatctagggcatcatatttattttttctggg

SEQ ID NO: 660515 - DNA, 33 bp, Homo sapien
ttacttgccaaagttaaggatgttcacctatgc

SEQ ID NO: 660516 - DNA, 33 bp, Homo sapien
ttacttgccaaagttatggatgttcacctatgc

SEQ ID NO: 660517 - DNA, 33 bp, Homo sapien
atcgtttcacactaagaccctgtcagaatacat

SEQ ID NO: 660518 - DNA, 33 bp, Homo sapien
atcgtttcacactaaggccctgtcagaatacat

SEQ ID NO: 660519 - DNA, 33 bp, Homo sapien
gtagacagaggattaaagtggcagataagaggc

SEQ ID NO: 660520 - DNA, 33 bp, Homo sapien
gtagacagaggattaaggtggcagataagaggc

SEQ ID NO: 660521 - DNA, 33 bp, Homo sapien
catttcatcgatttcaaggcctagacattggga

SEQ ID NO: 660522 - DNA, 33 bp, Homo sapien
catttcatcgatttcagggcctagacattggga

SEQ ID NO: 660523 - DNA, 33 bp, Homo sapien
tctaaacaaatgtacaacactggacactacaca

SEQ ID NO: 660524 - DNA, 33 bp, Homo sapien
tctaaacaaatgtacatcactggacactacaca

SEQ ID NO: 660525 - DNA, 33 bp, Homo sapien
tatctgccatttgtagaaatcccctaagctacc

SEQ ID NO: 660526 - DNA, 33 bp, Homo sapien
tatctgccatttgtaggaatcccctaagctacc

SEQ ID NO: 660527 - DNA, 33 bp, Homo sapien
gttagcatcaacttgacccaactcggtatcttc

SEQ ID NO: 660528 - DNA, 33 bp, Homo sapien
gttagcatcaacttgatccaactcggtatcttc

SEQ ID NO: 660529 - DNA, 33 bp, Homo sapien
gtcaatattggcaagagggaattagtctgtctt

SEQ ID NO: 660530 - DNA, 33 bp, Homo sapien
gtcaatattggcaagatggaattagtctgtctt

SEQ ID NO: 660531 - DNA, 33 bp, Homo sapien
ttttccataagttcaaaaaatattttgggctgt

SEQ ID NO: 660532 - DNA, 33 bp, Homo sapien
ttttccataagttcaagaaatattttgggctgt

SEQ ID NO: 660533 - DNA, 33 bp, Homo sapien
ttgagtttcagaatagcagcaaaaaaacaattt

SEQ ID NO: 660534 - DNA, 33 bp, Homo sapien
ttgagtttcagaatagtagcaaaaaaacaattt

SEQ ID NO: 660535 - DNA, 33 bp, Homo sapien
cacagatctaagaaagccttgtctgggctaatg

SEQ ID NO: 660536 - DNA, 33 bp, Homo sapien
cacagatctaagaaagtcttgtctgggctaatg

SEQ ID NO: 660537 - DNA, 33 bp, Homo sapien
tgtttctggtgtgttaaagatttgcttgtctta

SEQ ID NO: 660538 - DNA, 33 bp, Homo sapien
tgtttctggtgtgttatagatttgcttgtctta

SEQ ID NO: 660539 - DNA, 33 bp, Homo sapien
tgggccgaaaactatccaccatgtcaattctga

SEQ ID NO: 660540 - DNA, 33 bp, Homo sapien
tgggccgaaaactatctaccatgtcaattctga

SEQ ID NO: 660541 - DNA, 33 bp, Homo sapien
tgagtattggttttctcacctggagattgctgt

SEQ ID NO: 660542 - DNA, 33 bp, Homo sapien
tgagtattggttttcttacctggagattgctgt

SEQ ID NO: 660543 - DNA, 33 bp, Homo sapien
aaattaggctctatgaatataaaacatgactga

SEQ ID NO: 660544 - DNA, 33 bp, Homo sapien
aaattaggctctatgactataaaacatgactga

SEQ ID NO: 660545 - DNA, 33 bp, Homo sapien
gcaagaaggagaatcaccataaaactctctact

SEQ ID NO: 660546 - DNA, 33 bp, Homo sapien
gcaagaaggagaatcagcataaaactctctact

SEQ ID NO: 660547 - DNA, 33 bp, Homo sapien
gtactcctagaacctcacagctctaatttgtat

SEQ ID NO: 660548 - DNA, 33 bp, Homo sapien
gtactcctagaacctcgcagctctaatttgtat

SEQ ID NO: 660549 - DNA, 33 bp, Homo sapien
cttgtttctagcttaggcaaccagatttattca

SEQ ID NO: 660550 - DNA, 33 bp, Homo sapien
cttgtttctagcttagtcaaccagatttattca

SEQ ID NO: 660551 - DNA, 33 bp, Homo sapien
caagtcaaccatggtggacctatactgcaacac

SEQ ID NO: 660552 - DNA, 33 bp, Homo sapien
caagtcaaccatggtgtacctatactgcaacac

SEQ ID NO: 660553 - DNA, 33 bp, Homo sapien
acttttggcagggagaaaaatcatatcatcagc

SEQ ID NO: 660554 - DNA, 33 bp, Homo sapien
acttttggcagggagacaaatcatatcatcagc

SEQ ID NO: 660555 - DNA, 33 bp, Homo sapien
ctatattggtcctctccccatgctgttttacac

SEQ ID NO: 660556 - DNA, 33 bp, Homo sapien
ctatattggtcctctctccatgctgttttacac

SEQ ID NO: 660557 - DNA, 33 bp, Homo sapien
acaggaagagaacttacactgaatgcagtaata

SEQ ID NO: 660558 - DNA, 33 bp, Homo sapien
acaggaagagaacttatactgaatgcagtaata

SEQ ID NO: 660559 - DNA, 33 bp, Homo sapien
gtttcagaagcctgacaaaagttgagctaagca

SEQ ID NO: 660560 - DNA, 33 bp, Homo sapien
gtttcagaagcctgacgaaagttgagctaagca

SEQ ID NO: 660561 - DNA, 33 bp, Homo sapien
ttagtcaagttcacccagctagtaaatagtgga

SEQ ID NO: 660562 - DNA, 33 bp, Homo sapien
ttagtcaagttcacccggctagtaaatagtgga

SEQ ID NO: 660563 - DNA, 33 bp, Homo sapien
tgcccatcttaatggccgaacttttgccactgc

SEQ ID NO: 660564 - DNA, 33 bp, Homo sapien
tgcccatcttaatggctgaacttttgccactgc

SEQ ID NO: 660565 - DNA, 33 bp, Homo sapien
aattatttatagtggcaacaatggcagtggcaa

SEQ ID NO: 660566 - DNA, 33 bp, Homo sapien
aattatttatagtggcgacaatggcagtggcaa

SEQ ID NO: 660567 - DNA, 33 bp, Homo sapien
gactttcagagcttgaacataacttagacatct

SEQ ID NO: 660568 - DNA, 33 bp, Homo sapien
gactttcagagcttgagcataacttagacatct

SEQ ID NO: 660569 - DNA, 33 bp, Homo sapien
tctttgttcattgctactaccttctcattgact

SEQ ID NO: 660570 - DNA, 33 bp, Homo sapien
tctttgttcattgctattaccttctcattgact

SEQ ID NO: 660571 - DNA, 33 bp, Homo sapien
agtcacactttctgaaaacactgattccaaaca

SEQ ID NO: 660572 - DNA, 33 bp, Homo sapien
agtcacactttctgaagacactgattccaaaca

SEQ ID NO: 660573 - DNA, 33 bp, Homo sapien
cctttgaactgggactaaattacacaatcagct

SEQ ID NO: 660574 - DNA, 33 bp, Homo sapien
cctttgaactgggactgaattacacaatcagct

SEQ ID NO: 660575 - DNA, 33 bp, Homo sapien
agagctcgcatttgaaaagactatacatactag

SEQ ID NO: 660576 - DNA, 33 bp, Homo sapien
agagctcgcatttgaagagactatacatactag

SEQ ID NO: 660577 - DNA, 33 bp, Homo sapien
aaaaattcagaaagcaactaacagtaggaatat

SEQ ID NO: 660578 - DNA, 33 bp, Homo sapien
aaaaattcagaaagcagctaacagtaggaatat

SEQ ID NO: 660579 - DNA, 33 bp, Homo sapien
tgaatgtccactggagaatccaagtcactcagg

SEQ ID NO: 660580 - DNA, 33 bp, Homo sapien
tgaatgtccactggaggatccaagtcactcagg

SEQ ID NO: 660581 - DNA, 33 bp, Homo sapien
ttctaaaatacagtcaactcactgagatacaaa

SEQ ID NO: 660582 - DNA, 33 bp, Homo sapien
ttctaaaatacagtcagctcactgagatacaaa

SEQ ID NO: 660583 - DNA, 33 bp, Homo sapien
agggaacagattgtgaaggagtgagtagaggga

SEQ ID NO: 660584 - DNA, 33 bp, Homo sapien
agggaacagattgtgagggagtgagtagaggga

SEQ ID NO: 660585 - DNA, 33 bp, Homo sapien
agctttttccagaaccagaggcttttgtcccct

SEQ ID NO: 660586 - DNA, 33 bp, Homo sapien
agctttttccagaaccggaggcttttgtcccct

SEQ ID NO: 660587 - DNA, 33 bp, Homo sapien
tctggtctacaaataacaccagtttattgcaga

SEQ ID NO: 660588 - DNA, 33 bp, Homo sapien
tctggtctacaaataataccagtttattgcaga

SEQ ID NO: 660589 - DNA, 33 bp, Homo sapien
tcatctataaatctccaatgaaatggccttttt

SEQ ID NO: 660590 - DNA, 33 bp, Homo sapien
tcatctataaatctcccatgaaatggccttttt

SEQ ID NO: 660591 - DNA, 33 bp, Homo sapien
ggctcatgtagcattaggaaaatttatggagta

SEQ ID NO: 660592 - DNA, 33 bp, Homo sapien
ggctcatgtagcattatgaaaatttatggagta

SEQ ID NO: 660593 - DNA, 33 bp, Homo sapien
aggaacaatctcactaacacaaaaaaagcacaa

SEQ ID NO: 660594 - DNA, 33 bp, Homo sapien
aggaacaatctcactagcacaaaaaaagcacaa

SEQ ID NO: 660595 - DNA, 33 bp, Homo sapien
aaccatagacatcctgacacttatagcatgcat

SEQ ID NO: 660596 - DNA, 33 bp, Homo sapien
aaccatagacatcctggcacttatagcatgcat

SEQ ID NO: 660597 - DNA, 33 bp, Homo sapien
tttatttactagagagaagacataaagttgtga

SEQ ID NO: 660598 - DNA, 33 bp, Homo sapien
tttatttactagagaggagacataaagttgtga

SEQ ID NO: 660599 - DNA, 33 bp, Homo sapien
ccctcaaaagtttttgaaaagagatgtgcaaaa

SEQ ID NO: 660600 - DNA, 33 bp, Homo sapien
ccctcaaaagtttttggaaagagatgtgcaaaa

SEQ ID NO: 660601 - DNA, 33 bp, Homo sapien
tttgtttccagggttgaatttctttggcacttt

SEQ ID NO: 660602 - DNA, 33 bp, Homo sapien
tttgtttccagggttggatttctttggcacttt

SEQ ID NO: 660603 - DNA, 33 bp, Homo sapien
ctgtgacccagggagacgaattgggttaccttt

SEQ ID NO: 660604 - DNA, 33 bp, Homo sapien
ctgtgacccagggagatgaattgggttaccttt

SEQ ID NO: 660605 - DNA, 33 bp, Homo sapien
ctttaatccaaacttacgagtaataaggcagct

SEQ ID NO: 660606 - DNA, 33 bp, Homo sapien
ctttaatccaaacttatgagtaataaggcagct

SEQ ID NO: 660607 - DNA, 33 bp, Homo sapien
agcagagtggatcaacagagtagttggggagat

SEQ ID NO: 660608 - DNA, 33 bp, Homo sapien
agcagagtggatcaacggagtagttggggagat

SEQ ID NO: 660609 - DNA, 33 bp, Homo sapien
ttcttgaaagattaacacatcacaattaatatc

SEQ ID NO: 660610 - DNA, 33 bp, Homo sapien
ttcttgaaagattaacccatcacaattaatatc

SEQ ID NO: 660611 - DNA, 33 bp, Homo sapien
ctaattctctcaatgaagccagaatagtccccc

SEQ ID NO: 660612 - DNA, 33 bp, Homo sapien
ctaattctctcaatgaggccagaatagtccccc

SEQ ID NO: 660613 - DNA, 33 bp, Homo sapien
gtctgtgaaatatatccaggttgtggtatctat

SEQ ID NO: 660614 - DNA, 33 bp, Homo sapien
gtctgtgaaatatatcgaggttgtggtatctat

SEQ ID NO: 660615 - DNA, 33 bp, Homo sapien
ccctgcctctgccacaaacttttgcctgggcat

SEQ ID NO: 660616 - DNA, 33 bp, Homo sapien
ccctgcctctgccacagacttttgcctgggcat

SEQ ID NO: 660617 - DNA, 33 bp, Homo sapien; identical to SEQ ID NO: 660615

SEQ ID NO: 660618 - DNA, 33 bp, Homo sapien; identical to SEQ ID NO: 660616

SEQ ID NO: 660619 - DNA, 33 bp, Homo sapien
tagacttttctatacaacctctgacattcaggt

SEQ ID NO: 660620 - DNA, 33 bp, Homo sapien
tagacttttctatacatcctctgacattcaggt

SEQ ID NO: 660621 - DNA, 33 bp, Homo sapien
agcaaagcaagaggtaaaatgtgaagcatgaac

SEQ ID NO: 660622 - DNA, 33 bp, Homo sapien
agcaaagcaagaggtacaatgtgaagcatgaac

SEQ ID NO: 660623 - DNA, 33 bp, Homo sapien
caaaaaaggaagtcacacatcctaaggagggaa

SEQ ID NO: 660624 - DNA, 33 bp, Homo sapien
caaaaaaggaagtcacgcatcctaaggagggaa

SEQ ID NO: 660625 - DNA, 33 bp, Homo sapien
tttgtttttttgtggacagagtaccttgttggt

SEQ ID NO: 660626 - DNA, 33 bp, Homo sapien
tttgtttttttgtggagagagtaccttgttggt

SEQ ID NO: 660627 - DNA, 33 bp, Homo sapien
gcattcttacgttgtaacaacaagctgaaactc

SEQ ID NO: 660628 - DNA, 33 bp, Homo sapien
gcattcttacgttgtagcaacaagctgaaactc

SEQ ID NO: 660629 - DNA, 33 bp, Homo sapien
agctagatccctctccccagtgttatgattgcc

SEQ ID NO: 660630 - DNA, 33 bp, Homo sapien
agctagatccctctcctcagtgttatgattgcc

SEQ ID NO: 660631 - DNA, 33 bp, Homo sapien
ccagctatatcaataacggcccactgatgaaag

SEQ ID NO: 660632 - DNA, 33 bp, Homo sapien
ccagctatatcaataatggcccactgatgaaag

SEQ ID NO: 660633 - DNA, 33 bp, Homo sapien
tgaataagaattgtcacacatgaggggcattac

SEQ ID NO: 660634 - DNA, 33 bp, Homo sapien
tgaataagaattgtcatacatgaggggcattac

SEQ ID NO: 660635 - DNA, 33 bp, Homo sapien
taggtcaaatttgagaaatgacagggccagtgg

SEQ ID NO: 660636 - DNA, 33 bp, Homo sapien
taggtcaaatttgagagatgacagggccagtgg

SEQ ID NO: 660637 - DNA, 33 bp, Homo sapien
cataaggtaggaataacgtgtgtcatggggatt

SEQ ID NO: 660638 - DNA, 33 bp, Homo sapien
cataaggtaggaataatgtgtgtcatggggatt

SEQ ID NO: 660639 - DNA, 33 bp, Homo sapien
gaaacaaagtagtcacgactctcctactctctc

SEQ ID NO: 660640 - DNA, 33 bp, Homo sapien
gaaacaaagtagtcactactctcctactctctc

SEQ ID NO: 660641 - DNA, 33 bp, Homo sapien
agaaatagcctccaaaagaaaactatcgtccca

SEQ ID NO: 660642 - DNA, 33 bp, Homo sapien
agaaatagcctccaaaggaaaactatcgtccca

SEQ ID NO: 660643 - DNA, 33 bp, Homo sapien
cttcatacatttttagccctaggtgttaagcaa

SEQ ID NO: 660644 - DNA, 33 bp, Homo sapien
cttcatacatttttagtcctaggtgttaagcaa

SEQ ID NO: 660645 - DNA, 33 bp, Homo sapien
aatccaacgtgctcaaaggctgcatttcttgct

SEQ ID NO: 660646 - DNA, 33 bp, Homo sapien
aatccaacgtgctcaagggctgcatttcttgct

SEQ ID NO: 660647 - DNA, 33 bp, Homo sapien
aaggttgagaagctatcaattaaatgcagcata

SEQ ID NO: 660648 - DNA, 33 bp, Homo sapien
aaggttgagaagctattaattaaatgcagcata

SEQ ID NO: 660649 - DNA, 33 bp, Homo sapien
gaccaatgggaatctaataaggaatgtcacgtt

SEQ ID NO: 660650 - DNA, 33 bp, Homo sapien
gaccaatgggaatctagtaaggaatgtcacgtt

SEQ ID NO: 660651 - DNA, 33 bp, Homo sapien
catggacacatatatgaagcgttgggcatccta

SEQ ID NO: 660652 - DNA, 33 bp, Homo sapien
catggacacatatatggagcgttgggcatccta

SEQ ID NO: 660653 - DNA, 33 bp, Homo sapien
aagaatgaagttggacccttgtcttacatcata

SEQ ID NO: 660654 - DNA, 33 bp, Homo sapien
aagaatgaagttggacgcttgtcttacatcata

SEQ ID NO: 660655 - DNA, 33 bp, Homo sapien
taatgtggggaccctcaagatttgggtaaggag

SEQ ID NO: 660656 - DNA, 33 bp, Homo sapien
taatgtggggaccctcgagatttgggtaaggag

SEQ ID NO: 660657 - DNA, 33 bp, Homo sapien
gcaggaggaggatttaagggtctagatttttaa

SEQ ID NO: 660658 - DNA, 33 bp, Homo sapien
gcaggaggaggatttaggggtctagatttttaa

SEQ ID NO: 660659 - DNA, 33 bp, Homo sapien
gtgaaatcctgagcaaaaacaaaggctgacttt

SEQ ID NO: 660660 - DNA, 33 bp, Homo sapien
gtgaaatcctgagcaagaacaaaggctgacttt

SEQ ID NO: 660661 - DNA, 33 bp, Homo sapien
acaagggtatcagacaccgcctagttgtttggg

SEQ ID NO: 660662 - DNA, 33 bp, Homo sapien
acaagggtatcagacatcgcctagttgtttggg

SEQ ID NO: 660663 - DNA, 33 bp, Homo sapien
ctccagaagcagaaaaagccacaaaggacagct

SEQ ID NO: 660664 - DNA, 33 bp, Homo sapien
ctccagaagcagaaaaggccacaaaggacagct

SEQ ID NO: 660665 - DNA, 33 bp, Homo sapien
gagtccaccttagttcccttcttacttaatctc

SEQ ID NO: 660666 - DNA, 33 bp, Homo sapien
gagtccaccttagttctcttcttacttaatctc

SEQ ID NO: 660667 - DNA, 33 bp, Homo sapien
aatttagccaaattaaatgtcttctctcattcc

SEQ ID NO: 660668 - DNA, 33 bp, Homo sapien
aatttagccaaattaagtgtcttctctcattcc

SEQ ID NO: 660669 - DNA, 33 bp, Homo sapien
ctgagtgaaagtgatacaacattagccttgaaa

SEQ ID NO: 660670 - DNA, 33 bp, Homo sapien
ctgagtgaaagtgatataacattagccttgaaa

SEQ ID NO: 660671 - DNA, 33 bp, Homo sapien
gatctataaaaatgaaccagaattagtttagga

SEQ ID NO: 660672 - DNA, 33 bp, Homo sapien
gatctataaaaatgaatcagaattagtttagga

SEQ ID NO: 660673 - DNA, 33 bp, Homo sapien
ttctttatagtaatgcaaaatgacttactgatg

SEQ ID NO: 660674 - DNA, 33 bp, Homo sapien
ttctttatagtaatgcgaaatgacttactgatg

SEQ ID NO: 660675 - DNA, 33 bp, Homo sapien
atctctaccatttcaacaggtatcagagaagag

SEQ ID NO: 660676 - DNA, 33 bp, Homo sapien
atctctaccatttcaataggtatcagagaagag

SEQ ID NO: 660677 - DNA, 33 bp, Homo sapien
gaactgatgctgtttgcagttagaactcttggg

SEQ ID NO: 660678 - DNA, 33 bp, Homo sapien
gaactgatgctgtttggagttagaactcttggg

SEQ ID NO: 660679 - DNA, 33 bp, Homo sapien
atctgaagagacaagaaagcctgtgctgatcaa

SEQ ID NO: 660680 - DNA, 33 bp, Homo sapien
atctgaagagacaagagagcctgtgctgatcaa

SEQ ID NO: 660681 - DNA, 33 bp, Homo sapien
ctgtcatatttgtaaaactccattctctcaaag

SEQ ID NO: 660682 - DNA, 33 bp, Homo sapien
ctgtcatatttgtaaacctccattctctcaaag

SEQ ID NO: 660683 - DNA, 33 bp, Homo sapien
gacatctaagccatgaaaaatctacttcttttt

SEQ ID NO: 660684 - DNA, 33 bp, Homo sapien
gacatctaagccatgagaaatctacttcttttt

SEQ ID NO: 660685 - DNA, 33 bp, Homo sapien
tttatccaatattttccaagagccaagactgtg

SEQ ID NO: 660686 - DNA, 33 bp, Homo sapien
tttatccaatattttctaagagccaagactgtg

SEQ ID NO: 660687 - DNA, 33 bp, Homo sapien
ctccctttatttctatgagcagtgtaagcttgg

SEQ ID NO: 660688 - DNA, 33 bp, Homo sapien
ctccctttatttctattagcagtgtaagcttgg

SEQ ID NO: 660689 - DNA, 33 bp, Homo sapien
aattttgtggattggacagttgcaaatcttacc

SEQ ID NO: 660690 - DNA, 33 bp, Homo sapien
aattttgtggattggagagttgcaaatcttacc

SEQ ID NO: 660691 - DNA, 33 bp, Homo sapien
aagaataattccataaatattgcattaacatga

SEQ ID NO: 660692 - DNA, 33 bp, Homo sapien
aagaataattccataagtattgcattaacatga

SEQ ID NO: 660693 - DNA, 33 bp, Homo sapien
ttaaggactgtacagcacttgaacccaggactt

SEQ ID NO: 660694 - DNA, 33 bp, Homo sapien
ttaaggactgtacagcgcttgaacccaggactt

SEQ ID NO: 660695 - DNA, 33 bp, Homo sapien
ctggccaatgttgaccaatttttaaaacaagga

SEQ ID NO: 660696 - DNA, 33 bp, Homo sapien
ctggccaatgttgaccgatttttaaaacaagga

SEQ ID NO: 660697 - DNA, 33 bp, Homo sapien
attcaaaggttgcaaaactagaaaagtgggtct

SEQ ID NO: 660698 - DNA, 33 bp, Homo sapien
attcaaaggttgcaaagctagaaaagtgggtct

SEQ ID NO: 660699 - DNA, 33 bp, Homo sapien
ccccagggtgaaaaaacgtccacaggcttgagg

SEQ ID NO: 660700 - DNA, 33 bp, Homo sapien
ccccagggtgaaaaaatgtccacaggcttgagg

SEQ ID NO: 660701 - DNA, 33 bp, Homo sapien
tgtattcaaatgagaaaagcatccatgctgaga

SEQ ID NO: 660702 - DNA, 33 bp, Homo sapien
tgtattcaaatgagaacagcatccatgctgaga

SEQ ID NO: 660703 - DNA, 33 bp, Homo sapien
ggaaacagccctgaaacaaaacagtgactataa

SEQ ID NO: 660704 - DNA, 33 bp, Homo sapien
ggaaacagccctgaaataaaacagtgactataa

SEQ ID NO: 660705 - DNA, 33 bp, Homo sapien
cagttttcttttgccaatcctgccacacttgcc

SEQ ID NO: 660706 - DNA, 33 bp, Homo sapien
cagttttcttttgccagtcctgccacacttgcc

SEQ ID NO: 660707 - DNA, 33 bp, Homo sapien
atgataaccatgaagacaaaagtggatatattt

SEQ ID NO: 660708 - DNA, 33 bp, Homo sapien
atgataaccatgaagataaaagtggatatattt

SEQ ID NO: 660709 - DNA, 33 bp, Homo sapien
ccctaatgagggggcacagattgtgagttaaag

SEQ ID NO: 660710 - DNA, 33 bp, Homo sapien
ccctaatgagggggcatagattgtgagttaaag

SEQ ID NO: 660711 - DNA, 33 bp, Homo sapien
aggatgatctatcagaaaccaaggatgtcatga

SEQ ID NO: 660712 - DNA, 33 bp, Homo sapien
aggatgatctatcagataccaaggatgtcatga

SEQ ID NO: 660713 - DNA, 33 bp, Homo sapien
actatgatgatgataacccatacgtacctctaa

SEQ ID NO: 660714 - DNA, 33 bp, Homo sapien
actatgatgatgataatccatacgtacctctaa

SEQ ID NO: 660715 - DNA, 33 bp, Homo sapien
gaggtttgaaggcacacataggttagcagtgac

SEQ ID NO: 660716 - DNA, 33 bp, Homo sapien
gaggtttgaaggcacagataggttagcagtgac

SEQ ID NO: 660717 - DNA, 33 bp, Homo sapien
ttggggggtggtttaaagatttgatgcaaagca

SEQ ID NO: 660718 - DNA, 33 bp, Homo sapien
ttggggggtggtttaaggatttgatgcaaagca

SEQ ID NO: 660719 - DNA, 33 bp, Homo sapien
cagacttaaatgcaccacacattggatgattcg

SEQ ID NO: 660720 - DNA, 33 bp, Homo sapien
cagacttaaatgcaccgcacattggatgattcg

SEQ ID NO: 660721 - DNA, 33 bp, Homo sapien
ctcttaaatgagccaaacatacatcactaagta

SEQ ID NO: 660722 - DNA, 33 bp, Homo sapien
ctcttaaatgagccaagcatacatcactaagta

SEQ ID NO: 660723 - DNA, 33 bp, Homo sapien
gctgaaactcttgccccctacatcttactagga

SEQ ID NO: 660724 - DNA, 33 bp, Homo sapien
gctgaaactcttgccctctacatcttactagga

SEQ ID NO: 660725 - DNA, 33 bp, Homo sapien
tgcatcaggaaagtggaatgcctaggaagctag

SEQ ID NO: 660726 - DNA, 33 bp, Homo sapien
tgcatcaggaaagtgggatgcctaggaagctag

SEQ ID NO: 660727 - DNA, 33 bp, Homo sapien
tgtgcatactcacaaaaaagcctggagccgctc

SEQ ID NO: 660728 - DNA, 33 bp, Homo sapien
tgtgcatactcacaaagaagcctggagccgctc

SEQ ID NO: 660729 - DNA, 33 bp, Homo sapien
aggaggccatagacataagaagattaaaaacaa

SEQ ID NO: 660730 - DNA, 33 bp, Homo sapien
aggaggccatagacatgagaagattaaaaacaa

SEQ ID NO: 660731 - DNA, 33 bp, Homo sapien
gatggtttctctgacactgctgaatgcaatccc

SEQ ID NO: 660732 - DNA, 33 bp, Homo sapien
gatggtttctctgacagtgctgaatgcaatccc

SEQ ID NO: 660733 - DNA, 33 bp, Homo sapien
ctggctaacgagaaacaagaagtctacccggga

SEQ ID NO: 660734 - DNA, 33 bp, Homo sapien
ctggctaacgagaaacgagaagtctacccggga

SEQ ID NO: 660735 - DNA, 33 bp, Homo sapien
gaagccaagaaaatataagccagggtacagagg

SEQ ID NO: 660736 - DNA, 33 bp, Homo sapien
gaagccaagaaaatatgagccagggtacagagg

SEQ ID NO: 660737 - DNA, 33 bp, Homo sapien
agtggtagacaaaagacggaaggttttgtcaga

SEQ ID NO: 660738 - DNA, 33 bp, Homo sapien
agtggtagacaaaagatggaaggttttgtcaga

SEQ ID NO: 660739 - DNA, 33 bp, Homo sapien
ggtggccaacgtgcctgagagaaccctcaggga

SEQ ID NO: 660740 - DNA, 33 bp, Homo sapien
ggtggccaacgtgccttagagaaccctcaggga

SEQ ID NO: 660741 - DNA, 33 bp, Homo sapien
ttatataacgtaactaacatgaataacaagaat

SEQ ID NO: 660742 - DNA, 33 bp, Homo sapien
ttatataacgtaactaccatgaataacaagaat

SEQ ID NO: 660743 - DNA, 33 bp, Homo sapien
aataaattgaaccaagaagatggaagacctgta

SEQ ID NO: 660744 - DNA, 33 bp, Homo sapien
aataaattgaaccaaggagatggaagacctgta

SEQ ID NO: 660745 - DNA, 33 bp, Homo sapien
caaccagattttgcaaccccaaatacatgaagc

SEQ ID NO: 660746 - DNA, 33 bp, Homo sapien
caaccagattttgcaatcccaaatacatgaagc

SEQ ID NO: 660747 - DNA, 33 bp, Homo sapien
cgagagtttatctgtacaggaaggtttgttgtc

SEQ ID NO: 660748 - DNA, 33 bp, Homo sapien
cgagagtttatctgtataggaaggtttgttgtc

SEQ ID NO: 660749 - DNA, 33 bp, Homo sapien
ttgtacagttagcagcaatagcctcagtaattt

SEQ ID NO: 660750 - DNA, 33 bp, Homo sapien
ttgtacagttagcagcgatagcctcagtaattt

SEQ ID NO: 660751 - DNA, 33 bp, Homo sapien
taacaactcaaagatcactatgacttaacataa

SEQ ID NO: 660752 - DNA, 33 bp, Homo sapien
taacaactcaaagatcgctatgacttaacataa

SEQ ID NO: 660753 - DNA, 33 bp, Homo sapien
ttgcatacagtgttcaaagaaacataaaacacc

SEQ ID NO: 660754 - DNA, 33 bp, Homo sapien
ttgcatacagtgttcagagaaacataaaacacc

SEQ ID NO: 660755 - DNA, 33 bp, Homo sapien
tttactgaagcaaagaagcttaacacctggctc

SEQ ID NO: 660756 - DNA, 33 bp, Homo sapien
tttactgaagcaaagacgcttaacacctggctc

SEQ ID NO: 660757 - DNA, 33 bp, Homo sapien
atatgttatagttagcacagtgtaaagctggtg

SEQ ID NO: 660758 - DNA, 33 bp, Homo sapien
atatgttatagttagctcagtgtaaagctggtg

SEQ ID NO: 660759 - DNA, 33 bp, Homo sapien
tcaaagacatacaaaacgttagagacaggaaca

SEQ ID NO: 660760 - DNA, 33 bp, Homo sapien
tcaaagacatacaaaatgttagagacaggaaca

SEQ ID NO: 660761 - DNA, 33 bp, Homo sapien
tgagtcctgcccagaaataggcaggtatcatga

SEQ ID NO: 660762 - DNA, 33 bp, Homo sapien
tgagtcctgcccagaagtaggcaggtatcatga

SEQ ID NO: 660763 - DNA, 33 bp, Homo sapien
gttggaaacaaccacaacacatttgtccttaga

SEQ ID NO: 660764 - DNA, 33 bp, Homo sapien
gttggaaacaaccacatcacatttgtccttaga

SEQ ID NO: 660765 - DNA, 33 bp, Homo sapien
cactgcaataataacaaccatttccctgggtga

SEQ ID NO: 660766 - DNA, 33 bp, Homo sapien
cactgcaataataacagccatttccctgggtga

SEQ ID NO: 660767 - DNA, 33 bp, Homo sapien
tcaaagtgattatgccactaggaaatgaatcat

SEQ ID NO: 660768 - DNA, 33 bp, Homo sapien
tcaaagtgattatgccgctaggaaatgaatcat

SEQ ID NO: 660769 - DNA, 33 bp, Homo sapien
tgttctacctccccatcatcactgtggtgtacg

SEQ ID NO: 660770 - DNA, 33 bp, Homo sapien
tgttctacctccccatgatcactgtggtgtacg

SEQ ID NO: 660771 - DNA, 33 bp, Homo sapien
ctaaagggcactacacgacttttcaaacctcac

SEQ ID NO: 660772 - DNA, 33 bp, Homo sapien
ctaaagggcactacactacttttcaaacctcac

SEQ ID NO: 660773 - DNA, 33 bp, Homo sapien
atttgttgccaaaaaacggtaacaggactgtct

SEQ ID NO: 660774 - DNA, 33 bp, Homo sapien
atttgttgccaaaaaatggtaacaggactgtct

SEQ ID NO: 660775 - DNA, 33 bp, Homo sapien
gtctctgaaggaggtccgaacaatatcaggcta

SEQ ID NO: 660776 - DNA, 33 bp, Homo sapien
gtctctgaaggaggtctgaacaatatcaggcta

SEQ ID NO: 660777 - DNA, 33 bp, Homo sapien
cttatgtctcaaaacaaagtagaacttgtgtgt

SEQ ID NO: 660778 - DNA, 33 bp, Homo sapien
cttatgtctcaaaacagagtagaacttgtgtgt

SEQ ID NO: 660779 - DNA, 33 bp, Homo sapien
gagctttagacaatgacagtggcaagatcacag

SEQ ID NO: 660780 - DNA, 33 bp, Homo sapien
gagctttagacaatgatagtggcaagatcacag

SEQ ID NO: 660781 - DNA, 33 bp, Homo sapien
cattgtctaaagctcaaactggctcttaaatct

SEQ ID NO: 660782 - DNA, 33 bp, Homo sapien
cattgtctaaagctcatactggctcttaaatct

SEQ ID NO: 660783 - DNA, 33 bp, Homo sapien
ctgctcaaaaacatcaaaagtgcttcatagata

SEQ ID NO: 660784 - DNA, 33 bp, Homo sapien
ctgctcaaaaacatcacaagtgcttcatagata

SEQ ID NO: 660785 - DNA, 33 bp, Homo sapien
ccacagccgtattatacacatgagggaaaagaa

SEQ ID NO: 660786 - DNA, 33 bp, Homo sapien
ccacagccgtattatatacatgagggaaaagaa

SEQ ID NO: 660787 - DNA, 33 bp, Homo sapien
aatattacagtttctccccatcaacaccaatac

SEQ ID NO: 660788 - DNA, 33 bp, Homo sapien
aatattacagtttctctccatcaacaccaatac

SEQ ID NO: 660789 - DNA, 33 bp, Homo sapien
attaatatctctagtcaaaaaaacttctctgat

SEQ ID NO: 660790 - DNA, 33 bp, Homo sapien
attaatatctctagtccaaaaaacttctctgat

SEQ ID NO: 660791 - DNA, 33 bp, Homo sapien
tcagtttccattgcaaaatatgttcatataata

SEQ ID NO: 660792 - DNA, 33 bp, Homo sapien
tcagtttccattgcaagatatgttcatataata

SEQ ID NO: 660793 - DNA, 33 bp, Homo sapien
tttttaaaggccatcacagtaatacagtaacag

SEQ ID NO: 660794 - DNA, 33 bp, Homo sapien
tttttaaaggccatcatagtaatacagtaacag

SEQ ID NO: 660795 - DNA, 33 bp, Homo sapien
aattagactactggctcaatttttctcctttcc

SEQ ID NO: 660796 - DNA, 33 bp, Homo sapien
aattagactactggctgaatttttctcctttcc

SEQ ID NO: 660797 - DNA, 33 bp, Homo sapien
tagtcattttcaatcaactcgattcagtcttct

SEQ ID NO: 660798 - DNA, 33 bp, Homo sapien
tagtcattttcaatcagctcgattcagtcttct

SEQ ID NO: 660799 - DNA, 33 bp, Homo sapien
gagagaaaagagagctaacctttgacgtggcat

SEQ ID NO: 660800 - DNA, 33 bp, Homo sapien
gagagaaaagagagcttacctttgacgtggcat

SEQ ID NO: 660801 - DNA, 33 bp, Homo sapien
agaaactttgctgcagacccaaaagttccgcaa

SEQ ID NO: 660802 - DNA, 33 bp, Homo sapien
agaaactttgctgcaggcccaaaagttccgcaa

SEQ ID NO: 660803 - DNA, 33 bp, Homo sapien
tgtttaccctgactccacagttggaatttgaac

SEQ ID NO: 660804 - DNA, 33 bp, Homo sapien
tgtttaccctgactccgcagttggaatttgaac

SEQ ID NO: 660805 - DNA, 33 bp, Homo sapien
agcatagttgcccccaagtgttgctgcatttgg

SEQ ID NO: 660806 - DNA, 33 bp, Homo sapien
agcatagttgcccccacgtgttgctgcatttgg

SEQ ID NO: 660807 - DNA, 33 bp, Homo sapien
aggtttctctgatcctaactgcccaagaaatcc

SEQ ID NO: 660808 - DNA, 33 bp, Homo sapien
aggtttctctgatcctgactgcccaagaaatcc

SEQ ID NO: 660809 - DNA, 33 bp, Homo sapien
cctcaaatgtgaggaaatacatttctgtctgtg

SEQ ID NO: 660810 - DNA, 33 bp, Homo sapien
cctcaaatgtgaggaagtacatttctgtctgtg

SEQ ID NO: 660811 - DNA, 33 bp, Homo sapien
catcgacattgacctacggtgtcttggtgccag

SEQ ID NO: 660812 - DNA, 33 bp, Homo sapien
catcgacattgacctatggtgtcttggtgccag

SEQ ID NO: 660813 - DNA, 33 bp, Homo sapien
tttgcaattctaaaagaactcctacttctcccc

SEQ ID NO: 660814 - DNA, 33 bp, Homo sapien
tttgcaattctaaaaggactcctacttctcccc

SEQ ID NO: 660815 - DNA, 33 bp, Homo sapien
acttgtgtaagtcctacagccaacaaatgttaa

SEQ ID NO: 660816 - DNA, 33 bp, Homo sapien
acttgtgtaagtcctatagccaacaaatgttaa

SEQ ID NO: 660817 - DNA, 33 bp, Homo sapien
gttgaaaagcttcaaccgctctgtttctcctga

SEQ ID NO: 660818 - DNA, 33 bp, Homo sapien
gttgaaaagcttcaactgctctgtttctcctga

SEQ ID NO: 660819 - DNA, 33 bp, Homo sapien
ggtgttcaggacaatacaggatagtggatatca

SEQ ID NO: 660820 - DNA, 33 bp, Homo sapien
ggtgttcaggacaatataggatagtggatatca

SEQ ID NO: 660821 - DNA, 33 bp, Homo sapien
aggtaactgaaggtcacagaagctaatagtatt

SEQ ID NO: 660822 - DNA, 33 bp, Homo sapien
aggtaactgaaggtcatagaagctaatagtatt

SEQ ID NO: 660823 - DNA, 33 bp, Homo sapien
ccctgggagtgctcggcacaaaacaggtcctca

SEQ ID NO: 660824 - DNA, 33 bp, Homo sapien
ccctgggagtgctcggtacaaaacaggtcctca

SEQ ID NO: 660825 - DNA, 33 bp, Homo sapien
aaacacagacgagttacagacaaagagctgtgg

SEQ ID NO: 660826 - DNA, 33 bp, Homo sapien
aaacacagacgagttatagacaaagagctgtgg

SEQ ID NO: 660827 - DNA, 33 bp, Homo sapien
aaattgtgatgcccaaaaagtgcttggaaactt

SEQ ID NO: 660828 - DNA, 33 bp, Homo sapien
aaattgtgatgcccaacaagtgcttggaaactt

SEQ ID NO: 660829 - DNA, 33 bp, Homo sapien
ccagcacggccaacaacgtcagaccctcagaga

SEQ ID NO: 660830 - DNA, 33 bp, Homo sapien
ccagcacggccaacaaggtcagaccctcagaga

SEQ ID NO: 660831 - DNA, 33 bp, Homo sapien
tcgttggttagaggcaatagtcaatatgattag

SEQ ID NO: 660832 - DNA, 33 bp, Homo sapien
tcgttggttagaggcagtagtcaatatgattag

SEQ ID NO: 660833 - DNA, 33 bp, Homo sapien
aaaactatacgacaaaaaataagatgatttagt

SEQ ID NO: 660834 - DNA, 33 bp, Homo sapien
aaaactatacgacaaacaataagatgatttagt

SEQ ID NO: 660835 - DNA, 33 bp, Homo sapien
caacacaagggtcataacagaggcctgcagttc

SEQ ID NO: 660836 - DNA, 33 bp, Homo sapien
caacacaagggtcatatcagaggcctgcagttc

SEQ ID NO: 660837 - DNA, 33 bp, Homo sapien
gtaactggtttgattaggcattctttgttggtt

SEQ ID NO: 660838 - DNA, 33 bp, Homo sapien
gtaactggtttgattatgcattctttgttggtt

SEQ ID NO: 660839 - DNA, 33 bp, Homo sapien
atattctttccagctacggtgttacgaatgtca

SEQ ID NO: 660840 - DNA, 33 bp, Homo sapien
atattctttccagctatggtgttacgaatgtca

SEQ ID NO: 660841 - DNA, 33 bp, Homo sapien
ttaataagtaggagtacgctaatgataaaaagt

SEQ ID NO: 660842 - DNA, 33 bp, Homo sapien
ttaataagtaggagtatgctaatgataaaaagt

SEQ ID NO: 660843 - DNA, 33 bp, Homo sapien
aattggacaagaaagacgggacccgtgctcccc

SEQ ID NO: 660844 - DNA, 33 bp, Homo sapien
aattggacaagaaagatgggacccgtgctcccc

SEQ ID NO: 660845 - DNA, 33 bp, Homo sapien
tgctggagtgcaaacacgggcggctcaggtcct

SEQ ID NO: 660846 - DNA, 33 bp, Homo sapien
tgctggagtgcaaacatgggcggctcaggtcct

SEQ ID NO: 660847 - DNA, 33 bp, Homo sapien
ttttctgtttcatccacagtggtcataagggtg

SEQ ID NO: 660848 - DNA, 33 bp, Homo sapien
ttttctgtttcatccatagtggtcataagggtg

SEQ ID NO: 660849 - DNA, 33 bp, Homo sapien
gttatattaaaaagccagatgctaaagtatagg

SEQ ID NO: 660850 - DNA, 33 bp, Homo sapien
gttatattaaaaagccggatgctaaagtatagg

SEQ ID NO: 660851 - DNA, 33 bp, Homo sapien
caagagatacaagaagaaggactcataatatac

SEQ ID NO: 660852 - DNA, 33 bp, Homo sapien
caagagatacaagaagcaggactcataatatac

SEQ ID NO: 660853 - DNA, 33 bp, Homo sapien
ttctaacataccatgacaacattggctttttgt

SEQ ID NO: 660854 - DNA, 33 bp, Homo sapien
ttctaacataccatgataacattggctttttgt

SEQ ID NO: 660855 - DNA, 33 bp, Homo sapien
ttaaaagggaacttcaatctaagcccaatctaa

SEQ ID NO: 660856 - DNA, 33 bp, Homo sapien
ttaaaagggaacttcagtctaagcccaatctaa

SEQ ID NO: 660857 - DNA, 33 bp, Homo sapien
agagcaggaagcaaggaatgtaatattcaaaag

SEQ ID NO: 660858 - DNA, 33 bp, Homo sapien
agagcaggaagcaagggatgtaatattcaaaag

SEQ ID NO: 660859 - DNA, 33 bp, Homo sapien
caagtgccttcttccacgctctttcccttccta

SEQ ID NO: 660860 - DNA, 33 bp, Homo sapien
caagtgccttcttccatgctctttcccttccta

SEQ ID NO: 660861 - DNA, 33 bp, Homo sapien
cctaaatatctaaggacaggataacgactgagc

SEQ ID NO: 660862 - DNA, 33 bp, Homo sapien
cctaaatatctaaggataggataacgactgagc

SEQ ID NO: 660863 - DNA, 33 bp, Homo sapien
gagaatggggggaaacaaataacttgcttcagg

SEQ ID NO: 660864 - DNA, 33 bp, Homo sapien
gagaatggggggaaacgaataacttgcttcagg

SEQ ID NO: 660865 - DNA, 33 bp, Homo sapien
ctggtcaccttggaaactgccctattctagatg

SEQ ID NO: 660866 - DNA, 33 bp, Homo sapien
ctggtcaccttggaaattgccctattctagatg

SEQ ID NO: 660867 - DNA, 33 bp, Homo sapien
atatgaggataccccactggatggacatttttt

SEQ ID NO: 660868 - DNA, 33 bp, Homo sapien
atatgaggataccccattggatggacatttttt

SEQ ID NO: 660869 - DNA, 33 bp, Homo sapien
gagattggagtgacgcaccaacaagccaaggaa

SEQ ID NO: 660870 - DNA, 33 bp, Homo sapien
gagattggagtgacgcgccaacaagccaaggaa

SEQ ID NO: 660871 - DNA, 33 bp, Homo sapien
acattcacaggcactacgggttagaacttcaac

SEQ ID NO: 660872 - DNA, 33 bp, Homo sapien
acattcacaggcactaggggttagaacttcaac

SEQ ID NO: 660873 - DNA, 33 bp, Homo sapien
caatcatgaaatgcaaacaaaattattatcccc

SEQ ID NO: 660874 - DNA, 33 bp, Homo sapien
caatcatgaaatgcaagcaaaattattatcccc

SEQ ID NO: 660875 - DNA, 33 bp, Homo sapien
cattaaggcagtcagcacagagaagaagcagaa

SEQ ID NO: 660876 - DNA, 33 bp, Homo sapien
cattaaggcagtcagcgcagagaagaagcagaa

SEQ ID NO: 660877 - DNA, 33 bp, Homo sapien
aggtgttctttctataccaaaaaatctgatcag

SEQ ID NO: 660878 - DNA, 33 bp, Homo sapien
aggtgttctttctatatcaaaaaatctgatcag

SEQ ID NO: 660879 - DNA, 33 bp, Homo sapien
cacgtggccctaaatacacgtttctattgcttt

SEQ ID NO: 660880 - DNA, 33 bp, Homo sapien
cacgtggccctaaatatacgtttctattgcttt

SEQ ID NO: 660881 - DNA, 33 bp, Homo sapien
catgcgcttgaccaccaagtaaaaagcaaggtc

SEQ ID NO: 660882 - DNA, 33 bp, Homo sapien
catgcgcttgaccaccgagtaaaaagcaaggtc

SEQ ID NO: 660883 - DNA, 33 bp, Homo sapien
tatgctcataagccaacaaggaaacacttttag

SEQ ID NO: 660884 - DNA, 33 bp, Homo sapien
tatgctcataagccaataaggaaacacttttag

SEQ ID NO: 660885 - DNA, 33 bp, Homo sapien
cgaaggaagaagtcaacaggaatttcacaacta

SEQ ID NO: 660886 - DNA, 33 bp, Homo sapien
cgaaggaagaagtcaataggaatttcacaacta

SEQ ID NO: 660887 - DNA, 33 bp, Homo sapien
tgtctcaaatgaaaaggcctaaccagaactgga

SEQ ID NO: 660888 - DNA, 33 bp, Homo sapien
tgtctcaaatgaaaagtcctaaccagaactgga

SEQ ID NO: 660889 - DNA, 33 bp, Homo sapien
tctcaaatcttagagaatatttttgcatcatac

SEQ ID NO: 660890 - DNA, 33 bp, Homo sapien
tctcaaatcttagagagtatttttgcatcatac

SEQ ID NO: 660891 - DNA, 33 bp, Homo sapien
agagagtcagggtgataagtagaaggcaaggga

SEQ ID NO: 660892 - DNA, 33 bp, Homo sapien
agagagtcagggtgatgagtagaaggcaaggga

SEQ ID NO: 660893 - DNA, 33 bp, Homo sapien
atctgtttatgcattccagtcttttcgtgggcc

SEQ ID NO: 660894 - DNA, 33 bp, Homo sapien
atctgtttatgcattctagtcttttcgtgggcc

SEQ ID NO: 660895 - DNA, 33 bp, Homo sapien
tgtctagactgacaaaagaacaaatgaggtcac

SEQ ID NO: 660896 - DNA, 33 bp, Homo sapien
tgtctagactgacaaaggaacaaatgaggtcac

SEQ ID NO: 660897 - DNA, 33 bp, Homo sapien
aagactaaacatcaatcacactgctttgtttta

SEQ ID NO: 660898 - DNA, 33 bp, Homo sapien
aagactaaacatcaattacactgctttgtttta

SEQ ID NO: 660899 - DNA, 33 bp, Homo sapien
aatatgcagtaaaagcggaaatttaaatatcaa

SEQ ID NO: 660900 - DNA, 33 bp, Homo sapien
aatatgcagtaaaagctgaaatttaaatatcaa

SEQ ID NO: 660901 - DNA, 33 bp, Homo sapien
agttgcagtagttaaaacagtgtggtgtcacgt

SEQ ID NO: 660902 - DNA, 33 bp, Homo sapien
agttgcagtagttaaagcagtgtggtgtcacgt

SEQ ID NO: 660903 - DNA, 33 bp, Homo sapien
aacagattaggatgccaaggtagatggatctct

SEQ ID NO: 660904 - DNA, 33 bp, Homo sapien
aacagattaggatgccgaggtagatggatctct

SEQ ID NO: 660905 - DNA, 33 bp, Homo sapien
ttgtgtttaggaagggccattgatttttgcttt

SEQ ID NO: 660906 - DNA, 33 bp, Homo sapien
ttgtgtttaggaagggtcattgatttttgcttt

SEQ ID NO: 660907 - DNA, 33 bp, Homo sapien
acaacatatagacgtcaaaaaaagttatttttt

SEQ ID NO: 660908 - DNA, 33 bp, Homo sapien
acaacatatagacgtcgaaaaaagttatttttt

SEQ ID NO: 660909 - DNA, 33 bp, Homo sapien
ctacaatgcattcactcacgtacccaagaaatg

SEQ ID NO: 660910 - DNA, 33 bp, Homo sapien
ctacaatgcattcacttacgtacccaagaaatg

SEQ ID NO: 660911 - DNA, 33 bp, Homo sapien
agctcaaacacgaagtaaaggtgtgagaggagt

SEQ ID NO: 660912 - DNA, 33 bp, Homo sapien
agctcaaacacgaagtgaaggtgtgagaggagt

SEQ ID NO: 660913 - DNA, 33 bp, Homo sapien
cactagttcaggaaaacgggtctgatggcttat

SEQ ID NO: 660914 - DNA, 33 bp, Homo sapien
cactagttcaggaaaatgggtctgatggcttat

SEQ ID NO: 660915 - DNA, 33 bp, Homo sapien
agcagtcttagcttcaaacctctcattctctcc

SEQ ID NO: 660916 - DNA, 33 bp, Homo sapien
agcagtcttagcttcagacctctcattctctcc

SEQ ID NO: 660917 - DNA, 33 bp, Homo sapien
tcctttctctactctaaactaatggttctcaaa

SEQ ID NO: 660918 - DNA, 33 bp, Homo sapien
tcctttctctactctagactaatggttctcaaa

SEQ ID NO: 660919 - DNA, 33 bp, Homo sapien
agggtggtggagcttaagaaatgtgaatgggag

SEQ ID NO: 660920 - DNA, 33 bp, Homo sapien
agggtggtggagcttaggaaatgtgaatgggag

SEQ ID NO: 660921 - DNA, 33 bp, Homo sapien
ctgagtagacatatagaagtgtgataaaattcc

SEQ ID NO: 660922 - DNA, 33 bp, Homo sapien
ctgagtagacatataggagtgtgataaaattcc

SEQ ID NO: 660923 - DNA, 33 bp, Homo sapien
acataccaaatacacactcagtgaactaatgaa

SEQ ID NO: 660924 - DNA, 33 bp, Homo sapien
acataccaaatacacattcagtgaactaatgaa

SEQ ID NO: 660925 - DNA, 33 bp, Homo sapien
aggaagtgcagttacgaaaggttgagcccatgc

SEQ ID NO: 660926 - DNA, 33 bp, Homo sapien
aggaagtgcagttacggaaggttgagcccatgc

SEQ ID NO: 660927 - DNA, 33 bp, Homo sapien
cagagttcccataggcaagaatgtgtcctcagt

SEQ ID NO: 660928 - DNA, 33 bp, Homo sapien
cagagttcccataggcgagaatgtgtcctcagt

SEQ ID NO: 660929 - DNA, 33 bp, Homo sapien
tacaaaacaaaattaacagacatcatgggcctt

SEQ ID NO: 660930 - DNA, 33 bp, Homo sapien
tacaaaacaaaattaagagacatcatgggcctt

SEQ ID NO: 660931 - DNA, 33 bp, Homo sapien
tagcttgcttcacttacgttttcaaggttcatc

SEQ ID NO: 660932 - DNA, 33 bp, Homo sapien
tagcttgcttcacttatgttttcaaggttcatc

SEQ ID NO: 660933 - DNA, 33 bp, Homo sapien
atggctcatcaccaccagactcttgaggaggga

SEQ ID NO: 660934 - DNA, 33 bp, Homo sapien
atggctcatcaccaccggactcttgaggaggga

SEQ ID NO: 660935 - DNA, 33 bp, Homo sapien
gggtctttctcagagcaccttctccctgctttg

SEQ ID NO: 660936 - DNA, 33 bp, Homo sapien
gggtctttctcagagccccttctccctgctttg

SEQ ID NO: 660937 - DNA, 33 bp, Homo sapien
gctctgcccgatccaccgagaggagacactgac

SEQ ID NO: 660938 - DNA, 33 bp, Homo sapien
gctctgcccgatccactgagaggagacactgac

SEQ ID NO: 660939 - DNA, 33 bp, Homo sapien
aggcacattttcacccccaggagacactatacc

SEQ ID NO: 660940 - DNA, 33 bp, Homo sapien
aggcacattttcaccctcaggagacactatacc

SEQ ID NO: 660941 - DNA, 33 bp, Homo sapien
agaggtctggagtgagaactgaaggccagagaa

SEQ ID NO: 660942 - DNA, 33 bp, Homo sapien
agaggtctggagtgagcactgaaggccagagaa

SEQ ID NO: 660943 - DNA, 33 bp, Homo sapien
atcaattgaatttcaacgatgggcaccacagcc

SEQ ID NO: 660944 - DNA, 33 bp, Homo sapien
atcaattgaatttcaaggatgggcaccacagcc

SEQ ID NO: 660945 - DNA, 33 bp, Homo sapien
ttccgggtgttgtccaagcaaagcagctcatac

SEQ ID NO: 660946 - DNA, 33 bp, Homo sapien
ttccgggtgttgtccaggcaaagcagctcatac

SEQ ID NO: 660947 - DNA, 33 bp, Homo sapien
cccaggtcccttctcacaccgtcgtggcccgaa

SEQ ID NO: 660948 - DNA, 33 bp, Homo sapien
cccaggtcccttctcataccgtcgtggcccgaa

SEQ ID NO: 660949 - DNA, 33 bp, Homo sapien
gtggcatggctcccaccgtatcctgaacacaca

SEQ ID NO: 660950 - DNA, 33 bp, Homo sapien
gtggcatggctcccactgtatcctgaacacaca

SEQ ID NO: 660951 - DNA, 33 bp, Homo sapien
gctggtgacacctgaaaaggctctgtattgctc

SEQ ID NO: 660952 - DNA, 33 bp, Homo sapien
gctggtgacacctgaagaggctctgtattgctc

SEQ ID NO: 660953 - DNA, 33 bp, Homo sapien
caataaacaatgaacagataaataagaacacct

SEQ ID NO: 660954 - DNA, 33 bp, Homo sapien
caataaacaatgaacatataaataagaacacct

SEQ ID NO: 660955 - DNA, 33 bp, Homo sapien
cagtgagtagtgctgacaaacaccaggcaacag

SEQ ID NO: 660956 - DNA, 33 bp, Homo sapien
cagtgagtagtgctgataaacaccaggcaacag

SEQ ID NO: 660957 - DNA, 33 bp, Homo sapien
caaagaccaacattgccatgttctgtgagacca

SEQ ID NO: 660958 - DNA, 33 bp, Homo sapien
caaagaccaacattgctatgttctgtgagacca

SEQ ID NO: 660959 - DNA, 33 bp, Homo sapien
agtctggggtgaagaggagccaagcaggcatcc

SEQ ID NO: 660960 - DNA, 33 bp, Homo sapien
agtctggggtgaagagtagccaagcaggcatcc

SEQ ID NO: 660961 - DNA, 33 bp, Homo sapien
taaagactgatccactaaagtctggggtgaaga

SEQ ID NO: 660962 - DNA, 33 bp, Homo sapien
taaagactgatccactgaagtctggggtgaaga

SEQ ID NO: 660963 - DNA, 33 bp, Homo sapien
agatcagccaggcacactcagcagagaaaatca

SEQ ID NO: 660964 - DNA, 33 bp, Homo sapien
agatcagccaggcacattcagcagagaaaatca

SEQ ID NO: 660965 - DNA, 33 bp, Homo sapien
ctgatactgaacccccaaaagatcagccaggca

SEQ ID NO: 660966 - DNA, 33 bp, Homo sapien
ctgatactgaaccccccaaagatcagccaggca

SEQ ID NO: 660967 - DNA, 33 bp, Homo sapien
gataggactcattggacggtgaattgctggctt

SEQ ID NO: 660968 - DNA, 33 bp, Homo sapien
gataggactcattggatggtgaattgctggctt

SEQ ID NO: 660969 - DNA, 33 bp, Homo sapien
acatttccagatgaacaattacatttctttttt

SEQ ID NO: 660970 - DNA, 33 bp, Homo sapien
acatttccagatgaacgattacatttctttttt

SEQ ID NO: 660971 - DNA, 33 bp, Homo sapien
atgtccctaccccagacaaaaccagatttttgt

SEQ ID NO: 660972 - DNA, 33 bp, Homo sapien
atgtccctaccccagataaaaccagatttttgt

SEQ ID NO: 660973 - DNA, 33 bp, Homo sapien
tagagatacctgtgtaccttgctattttttttt

SEQ ID NO: 660974 - DNA, 33 bp, Homo sapien
tagagatacctgtgtagcttgctattttttttt

SEQ ID NO: 660975 - DNA, 33 bp, Homo sapien
tgatggtaccaggaaacctgtggaggagtatgc

SEQ ID NO: 660976 - DNA, 33 bp, Homo sapien
tgatggtaccaggaaatctgtggaggagtatgc

SEQ ID NO: 660977 - DNA, 33 bp, Homo sapien
tgtgtaattatggaaccagacctctcaggccca

SEQ ID NO: 660978 - DNA, 33 bp, Homo sapien
tgtgtaattatggaactagacctctcaggccca

SEQ ID NO: 660979 - DNA, 33 bp, Homo sapien
tgaaatgatgactgcaaaatgttgaactttcca

SEQ ID NO: 660980 - DNA, 33 bp, Homo sapien
tgaaatgatgactgcacaatgttgaactttcca

SEQ ID NO: 660981 - DNA, 33 bp, Homo sapien
aaagttcatgtttgaccgcattttgaatccttt

SEQ ID NO: 660982 - DNA, 33 bp, Homo sapien
aaagttcatgtttgactgcattttgaatccttt

SEQ ID NO: 660983 - DNA, 33 bp, Homo sapien
tatgtgattgggtagacgaccaggtcttcagct

SEQ ID NO: 660984 - DNA, 33 bp, Homo sapien
tatgtgattgggtagatgaccaggtcttcagct

SEQ ID NO: 660985 - DNA, 33 bp, Homo sapien
ggtgaaatttcagttcaccattttccctcacac

SEQ ID NO: 660986 - DNA, 33 bp, Homo sapien
ggtgaaatttcagttcgccattttccctcacac

SEQ ID NO: 660987 - DNA, 33 bp, Homo sapien
ctctgagcctatcaacaatctgccttatttaat

SEQ ID NO: 660988 - DNA, 33 bp, Homo sapien
ctctgagcctatcaacgatctgccttatttaat

SEQ ID NO: 660989 - DNA, 33 bp, Homo sapien
tgctcttttacttataagccaaaacacaacata

SEQ ID NO: 660990 - DNA, 33 bp, Homo sapien
tgctcttttacttatatgccaaaacacaacata

SEQ ID NO: 660991 - DNA, 33 bp, Homo sapien
gatttggcgaaacatccctctagagaaagattt

SEQ ID NO: 660992 - DNA, 33 bp, Homo sapien
gatttggcgaaacatcgctctagagaaagattt

SEQ ID NO: 660993 - DNA, 33 bp, Homo sapien
ccttttcaaggccttaaacaaaagcaataagaa

SEQ ID NO: 660994 - DNA, 33 bp, Homo sapien
ccttttcaaggccttacacaaaagcaataagaa

SEQ ID NO: 660995 - DNA, 33 bp, Homo sapien
ttcacaaataacattacgacagttttggcttcc

SEQ ID NO: 660996 - DNA, 33 bp, Homo sapien
ttcacaaataacattatgacagttttggcttcc

SEQ ID NO: 660997 - DNA, 33 bp, Homo sapien
gttaagtgtgggtagacagggtatgtattttta

SEQ ID NO: 660998 - DNA, 33 bp, Homo sapien
gttaagtgtgggtagatagggtatgtattttta

SEQ ID NO: 660999 - DNA, 33 bp, Homo sapien
ttaccatgaaatatacgaatcattcaaaaaagc

SEQ ID NO: 661000 - DNA, 33 bp, Homo sapien
ttaccatgaaatatactaatcattcaaaaaagc

SEQ ID NO: 661001 - DNA, 33 bp, Homo sapien
agtcaacagagcatggccagcgcttcatacaag

SEQ ID NO: 661002 - DNA, 33 bp, Homo sapien
agtcaacagagcatggtcagcgcttcatacaag

SEQ ID NO: 661003 - DNA, 33 bp, Homo sapien
tcacaagagccttgtacgcatttatccattggg

SEQ ID NO: 661004 - DNA, 33 bp, Homo sapien
tcacaagagccttgtatgcatttatccattggg

SEQ ID NO: 661005 - DNA, 33 bp, Homo sapien
cctacgaccactaaaaaaatctcatgcgcaatt

SEQ ID NO: 661006 - DNA, 33 bp, Homo sapien
cctacgaccactaaaacaatctcatgcgcaatt

SEQ ID NO: 661007 - DNA, 33 bp, Homo sapien
ccccaacctgaagagaaacctagatgctgaaac

SEQ ID NO: 661008 - DNA, 33 bp, Homo sapien
ccccaacctgaagagacacctagatgctgaaac

SEQ ID NO: 661009 - DNA, 33 bp, Homo sapien
cacaaggtggaaggggcagacaggctccctcgg

SEQ ID NO: 661010 - DNA, 33 bp, Homo sapien
cacaaggtggaaggggtagacaggctccctcgg

SEQ ID NO: 661011 - DNA, 33 bp, Homo sapien
cagttcctgcaattcacatttgtgaggacagcg

SEQ ID NO: 661012 - DNA, 33 bp, Homo sapien
cagttcctgcaattcatatttgtgaggacagcg

SEQ ID NO: 661013 - DNA, 33 bp, Homo sapien
atgatgaatgtaggcaatgacactcagtcacat

SEQ ID NO: 661014 - DNA, 33 bp, Homo sapien
atgatgaatgtaggcagtgacactcagtcacat

SEQ ID NO: 661015 - DNA, 33 bp, Homo sapien
gcccctttgcatgagaccttttgattttgaccg

SEQ ID NO: 661016 - DNA, 33 bp, Homo sapien
gcccctttgcatgagatcttttgattttgaccg

SEQ ID NO: 661017 - DNA, 33 bp, Homo sapien
aatgacacacctcacgcaaggaaataacaggga

SEQ ID NO: 661018 - DNA, 33 bp, Homo sapien
aatgacacacctcacgtaaggaaataacaggga

SEQ ID NO: 661019 - DNA, 33 bp, Homo sapien
gaacattgacccggcaaaagatactccaggcgt

SEQ ID NO: 661020 - DNA, 33 bp, Homo sapien
gaacattgacccggcagaagatactccaggcgt

SEQ ID NO: 661021 - DNA, 33 bp, Homo sapien
ctgccaaatgatgctcaaccccatagacttcgg

SEQ ID NO: 661022 - DNA, 33 bp, Homo sapien
ctgccaaatgatgctcgaccccatagacttcgg

SEQ ID NO: 661023 - DNA, 33 bp, Homo sapien
ttgcagggtttctgtacagtaatgcacatttct

SEQ ID NO: 661024 - DNA, 33 bp, Homo sapien
ttgcagggtttctgtatagtaatgcacatttct

SEQ ID NO: 661025 - DNA, 33 bp, Homo sapien
cactctgcctccgttccacattccattagagaa

SEQ ID NO: 661026 - DNA, 33 bp, Homo sapien
cactctgcctccgttctacattccattagagaa

SEQ ID NO: 661027 - DNA, 33 bp, Homo sapien
ccttttgcgagattcacgggctcgggtattagc

SEQ ID NO: 661028 - DNA, 33 bp, Homo sapien
ccttttgcgagattcatgggctcgggtattagc

SEQ ID NO: 661029 - DNA, 33 bp, Homo sapien
tggagtgacactgttacgcctccacactttgac

SEQ ID NO: 661030 - DNA, 33 bp, Homo sapien
tggagtgacactgttatgcctccacactttgac

SEQ ID NO: 661031 - DNA, 33 bp, Homo sapien
accttaccctaagaaacgctggtgccaagagtc

SEQ ID NO: 661032 - DNA, 33 bp, Homo sapien
accttaccctaagaaatgctggtgccaagagtc

SEQ ID NO: 661033 - DNA, 33 bp, Homo sapien
tatcaataacaatgaaaagcctcccaatccctc

SEQ ID NO: 661034 - DNA, 33 bp, Homo sapien
tatcaataacaatgaatagcctcccaatccctc

SEQ ID NO: 661035 - DNA, 33 bp, Homo sapien
atgtagacttgccctccaagtggcaacaaaatt

SEQ ID NO: 661036 - DNA, 33 bp, Homo sapien
atgtagacttgccctctaagtggcaacaaaatt

SEQ ID NO: 661037 - DNA, 33 bp, Homo sapien
gctgcgtcaatgtccacatatcccccactggac

SEQ ID NO: 661038 - DNA, 33 bp, Homo sapien
gctgcgtcaatgtccatatatcccccactggac

SEQ ID NO: 661039 - DNA, 33 bp, Homo sapien
attttataaagaaagcaaaggtctgccaggtga

SEQ ID NO: 661040 - DNA, 33 bp, Homo sapien
attttataaagaaagcgaaggtctgccaggtga

SEQ ID NO: 661041 - DNA, 33 bp, Homo sapien
caataaggattcaagacagtcaaggtactggat

SEQ ID NO: 661042 - DNA, 33 bp, Homo sapien
caataaggattcaagatagtcaaggtactggat

SEQ ID NO: 661043 - DNA, 33 bp, Homo sapien
gaacagttttaaaaaagatatgcttgaagatac

SEQ ID NO: 661044 - DNA, 33 bp, Homo sapien
gaacagttttaaaaaatatatgcttgaagatac

SEQ ID NO: 661045 - DNA, 33 bp, Homo sapien
gggaaacacaatttcacaagccaaaatcagtag

SEQ ID NO: 661046 - DNA, 33 bp, Homo sapien
gggaaacacaatttcataagccaaaatcagtag

SEQ ID NO: 661047 - DNA, 33 bp, Homo sapien
ttatcaattttttttacggttagtgctacttgt

SEQ ID NO: 661048 - DNA, 33 bp, Homo sapien
ttatcaattttttttatggttagtgctacttgt

SEQ ID NO: 661049 - DNA, 33 bp, Homo sapien
acacctcagtaatgtccccttatagaaagacat

SEQ ID NO: 661050 - DNA, 33 bp, Homo sapien
acacctcagtaatgtctccttatagaaagacat

SEQ ID NO: 661051 - DNA, 33 bp, Homo sapien
ataattgatagagatacggtatttagttatcac

SEQ ID NO: 661052 - DNA, 33 bp, Homo sapien
ataattgatagagatatggtatttagttatcac

SEQ ID NO: 661053 - DNA, 33 bp, Homo sapien
aggaaggcctatgaaaaggtcctgatgcccaac

SEQ ID NO: 661054 - DNA, 33 bp, Homo sapien
aggaaggcctatgaaatggtcctgatgcccaac

SEQ ID NO: 661055 - DNA, 33 bp, Homo sapien
agaatctcctggaggtaaaatacagattgctgg

SEQ ID NO: 661056 - DNA, 33 bp, Homo sapien
agaatctcctggaggtgaaatacagattgctgg

SEQ ID NO: 661057 - DNA, 33 bp, Homo sapien
gtccattatcaatgtcactagatcagaggctgc

SEQ ID NO: 661058 - DNA, 33 bp, Homo sapien
gtccattatcaatgtcgctagatcagaggctgc

SEQ ID NO: 661059 - DNA, 33 bp, Homo sapien
ttgaagccagacagatcaggttccaatcttggc

SEQ ID NO: 661060 - DNA, 33 bp, Homo sapien
ttgaagccagacagatgaggttccaatcttggc

SEQ ID NO: 661061 - DNA, 33 bp, Homo sapien
gtggagtataggaagacagaattcagggaaatc

SEQ ID NO: 661062 - DNA, 33 bp, Homo sapien
gtggagtataggaagagagaattcagggaaatc

SEQ ID NO: 661063 - DNA, 33 bp, Homo sapien
tgtatgagacagacaaaagcaggtgtcaccagc

SEQ ID NO: 661064 - DNA, 33 bp, Homo sapien
tgtatgagacagacaagagcaggtgtcaccagc

SEQ ID NO: 661065 - DNA, 33 bp, Homo sapien
aaacgaacatgggaaaggaagagtagcaatgtg

SEQ ID NO: 661066 - DNA, 33 bp, Homo sapien
aaacgaacatgggaaatgaagagtagcaatgtg

SEQ ID NO: 661067 - DNA, 33 bp, Homo sapien
tagctgaacccaaactcactgattattcctaac

SEQ ID NO: 661068 - DNA, 33 bp, Homo sapien
tagctgaacccaaactgactgattattcctaac

SEQ ID NO: 661069 - DNA, 33 bp, Homo sapien
gatgatttgagttttggagtcaaacaggcctag

SEQ ID NO: 661070 - DNA, 33 bp, Homo sapien
gatgatttgagttttgtagtcaaacaggcctag

SEQ ID NO: 661071 - DNA, 33 bp, Homo sapien
taaagaagcatgggaaagttgacttaaacaact

SEQ ID NO: 661072 - DNA, 33 bp, Homo sapien
taaagaagcatgggaaggttgacttaaacaact

SEQ ID NO: 661073 - DNA, 33 bp, Homo sapien
gtctggcgtccaagaggaataaggttgcacgaa

SEQ ID NO: 661074 - DNA, 33 bp, Homo sapien
gtctggcgtccaagagtaataaggttgcacgaa

SEQ ID NO: 661075 - DNA, 33 bp, Homo sapien
ccaccctcaggtaatcagagaagagccacttcc

SEQ ID NO: 661076 - DNA, 33 bp, Homo sapien
ccaccctcaggtaatcggagaagagccacttcc

SEQ ID NO: 661077 - DNA, 33 bp, Homo sapien
tgaatctggttgctggcatagagcactttgctc

SEQ ID NO: 661078 - DNA, 33 bp, Homo sapien
tgaatctggttgctgggatagagcactttgctc

SEQ ID NO: 661079 - DNA, 33 bp, Homo sapien
tgagcgggtcatgatcaattgagcaagcagggg

SEQ ID NO: 661080 - DNA, 33 bp, Homo sapien
tgagcgggtcatgatccattgagcaagcagggg

SEQ ID NO: 661081 - DNA, 33 bp, Homo sapien
aaacaaaaagagaaaacgtggctgtgatgtagg

SEQ ID NO: 661082 - DNA, 33 bp, Homo sapien
aaacaaaaagagaaaatgtggctgtgatgtagg

SEQ ID NO: 661083 - DNA, 33 bp, Homo sapien
aggaaccttttcaagacaaccagctgaaagagt

SEQ ID NO: 661084 - DNA, 33 bp, Homo sapien
aggaaccttttcaagataaccagctgaaagagt

SEQ ID NO: 661085 - DNA, 33 bp, Homo sapien
ctaactttgatcttaccatgcaatcaggccatc

SEQ ID NO: 661086 - DNA, 33 bp, Homo sapien
ctaactttgatcttactatgcaatcaggccatc

SEQ ID NO: 661087 - DNA, 33 bp, Homo sapien
tgaagtagaaatcacgcacaaccttggtagaag

SEQ ID NO: 661088 - DNA, 33 bp, Homo sapien
tgaagtagaaatcacggacaaccttggtagaag

SEQ ID NO: 661089 - DNA, 33 bp, Homo sapien
agaggggcagtcgtccacctggtacacaatgtc

SEQ ID NO: 661090 - DNA, 33 bp, Homo sapien
agaggggcagtcgtccgcctggtacacaatgtc

SEQ ID NO: 661091 - DNA, 33 bp, Homo sapien
acggtcaccctagaagcctccaaaaataacagg

SEQ ID NO: 661092 - DNA, 33 bp, Homo sapien
acggtcaccctagaaggctccaaaaataacagg

SEQ ID NO: 661093 - DNA, 33 bp, Homo sapien
gttgcatttttctccccgcagtttcaagtgcat

SEQ ID NO: 661094 - DNA, 33 bp, Homo sapien
gttgcatttttctccctgcagtttcaagtgcat

SEQ ID NO: 661095 - DNA, 33 bp, Homo sapien
gctccttttgatccaaccaaacaccgttgcatt

SEQ ID NO: 661096 - DNA, 33 bp, Homo sapien
gctccttttgatccaatcaaacaccgttgcatt

SEQ ID NO: 661097 - DNA, 33 bp, Homo sapien
accaggcagaactgagaactcctccttaaatct

SEQ ID NO: 661098 - DNA, 33 bp, Homo sapien
accaggcagaactgaggactcctccttaaatct

SEQ ID NO: 661099 - DNA, 33 bp, Homo sapien
ccacccctaaagaaatcaatgaagtctgacgca

SEQ ID NO: 661100 - DNA, 33 bp, Homo sapien
ccacccctaaagaaatgaatgaagtctgacgca

SEQ ID NO: 661101 - DNA, 33 bp, Homo sapien
atgaagtctgacgcaacgtttattcttcagaaa

SEQ ID NO: 661102 - DNA, 33 bp, Homo sapien
atgaagtctgacgcaatgtttattcttcagaaa

SEQ ID NO: 661103 - DNA, 33 bp, Homo sapien
tccatcaagaaatcagccaatttggttgctggg

SEQ ID NO: 661104 - DNA, 33 bp, Homo sapien
tccatcaagaaatcagtcaatttggttgctggg

SEQ ID NO: 661105 - DNA, 33 bp, Homo sapien
cctgtagcctactccccgcataggaaagtgtcc

SEQ ID NO: 661106 - DNA, 33 bp, Homo sapien
cctgtagcctactccctgcataggaaagtgtcc

SEQ ID NO: 661107 - DNA, 33 bp, Homo sapien
agatcctgttaaaactaagacagaacatatcac

SEQ ID NO: 661108 - DNA, 33 bp, Homo sapien
agatcctgttaaaactgagacagaacatatcac

SEQ ID NO: 661109 - DNA, 33 bp, Homo sapien
ccaaactgaaagcaacacagatatacctcagta

SEQ ID NO: 661110 - DNA, 33 bp, Homo sapien
ccaaactgaaagcaacccagatatacctcagta

SEQ ID NO: 661111 - DNA, 33 bp, Homo sapien
cttccatagatttctacagttttctctctgtgc

SEQ ID NO: 661112 - DNA, 33 bp, Homo sapien
cttccatagatttctagagttttctctctgtgc

SEQ ID NO: 661113 - DNA, 33 bp, Homo sapien
ttttggataaaagtaaacctggccaattaatcc

SEQ ID NO: 661114 - DNA, 33 bp, Homo sapien
ttttggataaaagtaagcctggccaattaatcc

SEQ ID NO: 661115 - DNA, 33 bp, Homo sapien
gcaaagagattagcaacgcagtaagtgtttgaa

SEQ ID NO: 661116 - DNA, 33 bp, Homo sapien
gcaaagagattagcaatgcagtaagtgtttgaa

SEQ ID NO: 661117 - DNA, 33 bp, Homo sapien
tagattatgatgccaaacaacttttccccttct

SEQ ID NO: 661118 - DNA, 33 bp, Homo sapien
tagattatgatgccaagcaacttttccccttct

SEQ ID NO: 661119 - DNA, 33 bp, Homo sapien
agtttcattctggtgcaagtatcagttgctcca

SEQ ID NO: 661120 - DNA, 33 bp, Homo sapien
agtttcattctggtgcgagtatcagttgctcca

SEQ ID NO: 661121 - DNA, 33 bp, Homo sapien
aatgatctcactcaccaatatcagcacagaagg

SEQ ID NO: 661122 - DNA, 33 bp, Homo sapien
aatgatctcactcacccatatcagcacagaagg

SEQ ID NO: 661123 - DNA, 33 bp, Homo sapien
tcactgagaattacacactttaaatgggtgata

SEQ ID NO: 661124 - DNA, 33 bp, Homo sapien
tcactgagaattacacgctttaaatgggtgata

SEQ ID NO: 661125 - DNA, 33 bp, Homo sapien
aaaacttgctctctaaagtcttccgataactga

SEQ ID NO: 661126 - DNA, 33 bp, Homo sapien
aaaacttgctctctaaggtcttccgataactga

SEQ ID NO: 661127 - DNA, 33 bp, Homo sapien
ctttccagagttttacaaaagattgtggctatc

SEQ ID NO: 661128 - DNA, 33 bp, Homo sapien
ctttccagagttttacgaaagattgtggctatc

SEQ ID NO: 661129 - DNA, 33 bp, Homo sapien
gagcatgacatttggaagtcagtcttgatatag

SEQ ID NO: 661130 - DNA, 33 bp, Homo sapien
gagcatgacatttggaggtcagtcttgatatag

SEQ ID NO: 661131 - DNA, 33 bp, Homo sapien
ctctacctgtatcctccctcaaagtcctatcaa

SEQ ID NO: 661132 - DNA, 33 bp, Homo sapien
ctctacctgtatcctctctcaaagtcctatcaa

SEQ ID NO: 661133 - DNA, 33 bp, Homo sapien
gcttaacagaaccaataagcatcaataattaag

SEQ ID NO: 661134 - DNA, 33 bp, Homo sapien
gcttaacagaaccaatcagcatcaataattaag

SEQ ID NO: 661135 - DNA, 33 bp, Homo sapien
actgggtactaacagactaaaggatagagcgta

SEQ ID NO: 661136 - DNA, 33 bp, Homo sapien
actgggtactaacagattaaaggatagagcgta

SEQ ID NO: 661137 - DNA, 33 bp, Homo sapien
ctgccttatgaagcaaaaaagacacggggtttt

SEQ ID NO: 661138 - DNA, 33 bp, Homo sapien
ctgccttatgaagcaagaaagacacggggtttt

SEQ ID NO: 661139 - DNA, 33 bp, Homo sapien
gggaaagcagagaatcaatccaaaagactcagg

SEQ ID NO: 661140 - DNA, 33 bp, Homo sapien
gggaaagcagagaatccatccaaaagactcagg

SEQ ID NO: 661141 - DNA, 33 bp, Homo sapien
gaagtgagtggcaagggccaaggatgaatccca

SEQ ID NO: 661142 - DNA, 33 bp, Homo sapien
gaagtgagtggcaaggtccaaggatgaatccca

SEQ ID NO: 661143 - DNA, 33 bp, Homo sapien
gtatgcttctcaaagagataattatgtcttcta

SEQ ID NO: 661144 - DNA, 33 bp, Homo sapien
gtatgcttctcaaagatataattatgtcttcta

SEQ ID NO: 661145 - DNA, 33 bp, Homo sapien
ttgatcttttcatctacattgctgattaatggg

SEQ ID NO: 661146 - DNA, 33 bp, Homo sapien
ttgatcttttcatctatattgctgattaatggg

SEQ ID NO: 661147 - DNA, 33 bp, Homo sapien
gcaaagtatgcataaacttggagaactggtttt

SEQ ID NO: 661148 - DNA, 33 bp, Homo sapien
gcaaagtatgcataaatttggagaactggtttt

SEQ ID NO: 661149 - DNA, 33 bp, Homo sapien
aagctctagctccttcacctataaaatggagac

SEQ ID NO: 661150 - DNA, 33 bp, Homo sapien
aagctctagctccttcgcctataaaatggagac

SEQ ID NO: 661151 - DNA, 33 bp, Homo sapien
tgggatcctatttgtccatatttcgctttggtt

SEQ ID NO: 661152 - DNA, 33 bp, Homo sapien
tgggatcctatttgtctatatttcgctttggtt

SEQ ID NO: 661153 - DNA, 33 bp, Homo sapien
aattccagcaacctataagatgttgattctgcc

SEQ ID NO: 661154 - DNA, 33 bp, Homo sapien
aattccagcaacctatgagatgttgattctgcc

SEQ ID NO: 661155 - DNA, 33 bp, Homo sapien
cagagaaaaggatccactgaaggtgagaatatg

SEQ ID NO: 661156 - DNA, 33 bp, Homo sapien
cagagaaaaggatccattgaaggtgagaatatg

SEQ ID NO: 661157 - DNA, 33 bp, Homo sapien
cagagccaagaaagaccgattagagtgttaggc

SEQ ID NO: 661158 - DNA, 33 bp, Homo sapien
cagagccaagaaagactgattagagtgttaggc

SEQ ID NO: 661159 - DNA, 33 bp, Homo sapien
aggaaacttaaatgtgacaaaccaaacacatgc

SEQ ID NO: 661160 - DNA, 33 bp, Homo sapien
aggaaacttaaatgtggcaaaccaaacacatgc

SEQ ID NO: 661161 - DNA, 33 bp, Homo sapien
tcatatacatctctatcaccacaatcactgatc

SEQ ID NO: 661162 - DNA, 33 bp, Homo sapien
tcatatacatctctatgaccacaatcactgatc

SEQ ID NO: 661163 - DNA, 33 bp, Homo sapien
gctctgccagacagtaccccatttacccgccat

SEQ ID NO: 661164 - DNA, 33 bp, Homo sapien
gctctgccagacagtatcccatttacccgccat

SEQ ID NO: 661165 - DNA, 33 bp, Homo sapien
gaagaatgctgactgaaccaacttgagccaatt

SEQ ID NO: 661166 - DNA, 33 bp, Homo sapien
gaagaatgctgactgacccaacttgagccaatt

SEQ ID NO: 661167 - DNA, 33 bp, Homo sapien
ttacttaataatatgcaaaggacatttttctgt

SEQ ID NO: 661168 - DNA, 33 bp, Homo sapien
ttacttaataatatgccaaggacatttttctgt

SEQ ID NO: 661169 - DNA, 33 bp, Homo sapien
tctttattcatgattgaatcctggtattatgga

SEQ ID NO: 661170 - DNA, 33 bp, Homo sapien
tctttattcatgattgcatcctggtattatgga

SEQ ID NO: 661171 - DNA, 33 bp, Homo sapien
tgtttgcgaacattaaaaagattgagaagtttt

SEQ ID NO: 661172 - DNA, 33 bp, Homo sapien
tgtttgcgaacattaagaagattgagaagtttt

SEQ ID NO: 661173 - DNA, 33 bp, Homo sapien
cgaagaactccagctaaacaggaaagttgtttg

SEQ ID NO: 661174 - DNA, 33 bp, Homo sapien
cgaagaactccagctagacaggaaagttgtttg

SEQ ID NO: 661175 - DNA, 33 bp, Homo sapien
agctccactagttctgaaacttcattagactgc

SEQ ID NO: 661176 - DNA, 33 bp, Homo sapien
agctccactagttctggaacttcattagactgc

SEQ ID NO: 661177 - DNA, 33 bp, Homo sapien
actgggaaaactggtgcacattagaacagaact

SEQ ID NO: 661178 - DNA, 33 bp, Homo sapien
actgggaaaactggtgtacattagaacagaact

SEQ ID NO: 661179 - DNA, 33 bp, Homo sapien
ctggcgactcgtgtaacagacacaaggttgctg

SEQ ID NO: 661180 - DNA, 33 bp, Homo sapien
ctggcgactcgtgtaatagacacaaggttgctg

SEQ ID NO: 661181 - DNA, 33 bp, Homo sapien
caaggttaaacagctgaagcagggatttgaacc

SEQ ID NO: 661182 - DNA, 33 bp, Homo sapien
caaggttaaacagctggagcagggatttgaacc

SEQ ID NO: 661183 - DNA, 33 bp, Homo sapien
aaactatgaggctccaacctctggttccgccat

SEQ ID NO: 661184 - DNA, 33 bp, Homo sapien
aaactatgaggctccatcctctggttccgccat

SEQ ID NO: 661185 - DNA, 33 bp, Homo sapien
tggagagagacaacagaaaaccagaagataacc

SEQ ID NO: 661186 - DNA, 33 bp, Homo sapien
tggagagagacaacaggaaaccagaagataacc

SEQ ID NO: 661187 - DNA, 33 bp, Homo sapien
taagtggttagatctgaactaggcctgccttag

SEQ ID NO: 661188 - DNA, 33 bp, Homo sapien
taagtggttagatctgcactaggcctgccttag

SEQ ID NO: 661189 - DNA, 33 bp, Homo sapien
atttgtgccaagctacaggatatttgtctttcc

SEQ ID NO: 661190 - DNA, 33 bp, Homo sapien
atttgtgccaagctacgggatatttgtctttcc

SEQ ID NO: 661191 - DNA, 33 bp, Homo sapien
agatggttgcagaaagccgtcagttcaaggcag

SEQ ID NO: 661192 - DNA, 33 bp, Homo sapien
agatggttgcagaaaggcgtcagttcaaggcag

SEQ ID NO: 661193 - DNA, 33 bp, Homo sapien
accaaaccaagaacaagttgctaagggtatcct

SEQ ID NO: 661194 - DNA, 33 bp, Homo sapien
accaaaccaagaacaatttgctaagggtatcct

SEQ ID NO: 661195 - DNA, 33 bp, Homo sapien
tttaggatctcagcaaatggaattactcccaat

SEQ ID NO: 661196 - DNA, 33 bp, Homo sapien
tttaggatctcagcaagtggaattactcccaat

SEQ ID NO: 661197 - DNA, 33 bp, Homo sapien
agggggtcagatggccaggagcctaacaagagt

SEQ ID NO: 661198 - DNA, 33 bp, Homo sapien
agggggtcagatggcccggagcctaacaagagt

SEQ ID NO: 661199 - DNA, 33 bp, Homo sapien
atttccatcttccctacgtaactcaatgcccat

SEQ ID NO: 661200 - DNA, 33 bp, Homo sapien
atttccatcttccctaggtaactcaatgcccat

SEQ ID NO: 661201 - DNA, 33 bp, Homo sapien
agccgcagtgaaactcccgcttgctcatcgctg

SEQ ID NO: 661202 - DNA, 33 bp, Homo sapien
agccgcagtgaaactctcgcttgctcatcgctg

SEQ ID NO: 661203 - DNA, 33 bp, Homo sapien
cggctgcctctgacaccgtgcttcatcccaacc

SEQ ID NO: 661204 - DNA, 33 bp, Homo sapien
cggctgcctctgacactgtgcttcatcccaacc

SEQ ID NO: 661205 - DNA, 33 bp, Homo sapien
gaagagctctacttcccaccccagctcatccat

SEQ ID NO: 661206 - DNA, 33 bp, Homo sapien
gaagagctctacttcctaccccagctcatccat

SEQ ID NO: 661207 - DNA, 33 bp, Homo sapien
gaagacttcaaatcaccagagtgttggctgttt

SEQ ID NO: 661208 - DNA, 33 bp, Homo sapien
gaagacttcaaatcactagagtgttggctgttt

SEQ ID NO: 661209 - DNA, 33 bp, Homo sapien
aggtttgttgacaatgaattctctcagtttgtg

SEQ ID NO: 661210 - DNA, 33 bp, Homo sapien
aggtttgttgacaatgcattctctcagtttgtg

SEQ ID NO: 661211 - DNA, 33 bp, Homo sapien
gttcaaaggttgctaagaaaaatatatgcctga

SEQ ID NO: 661212 - DNA, 33 bp, Homo sapien
gttcaaaggttgctaataaaaatatatgcctga

SEQ ID NO: 661213 - DNA, 33 bp, Homo sapien
attttccactggattccaatttgtagtatgtga

SEQ ID NO: 661214 - DNA, 33 bp, Homo sapien
attttccactggattctaatttgtagtatgtga

SEQ ID NO: 661215 - DNA, 33 bp, Homo sapien
tcaaaatggtctaagacagagattcctgtttaa

SEQ ID NO: 661216 - DNA, 33 bp, Homo sapien
tcaaaatggtctaagatagagattcctgtttaa

SEQ ID NO: 661217 - DNA, 33 bp, Homo sapien
caattgagtcacaatcaatgtgcaacctttata

SEQ ID NO: 661218 - DNA, 33 bp, Homo sapien
caattgagtcacaatcgatgtgcaacctttata

SEQ ID NO: 661219 - DNA, 33 bp, Homo sapien
tgtatgtatcctatcacccaaagaatgaacata

SEQ ID NO: 661220 - DNA, 33 bp, Homo sapien
tgtatgtatcctatcatccaaagaatgaacata

SEQ ID NO: 661221 - DNA, 33 bp, Homo sapien
taaaccactgctaatcaaatgacaggtccatga

SEQ ID NO: 661222 - DNA, 33 bp, Homo sapien
taaaccactgctaatcgaatgacaggtccatga

SEQ ID NO: 661223 - DNA, 33 bp, Homo sapien
gcagggccaggactctaaatttcttactcattt

SEQ ID NO: 661224 - DNA, 33 bp, Homo sapien
gcagggccaggactctgaatttcttactcattt

SEQ ID NO: 661225 - DNA, 33 bp, Homo sapien
aacaaagaccaggagacaagacaacacaaagga

SEQ ID NO: 661226 - DNA, 33 bp, Homo sapien
aacaaagaccaggagagaagacaacacaaagga

SEQ ID NO: 661227 - DNA, 33 bp, Homo sapien
tgtaaactgtgtgcatcataatgacaaatatct

SEQ ID NO: 661228 - DNA, 33 bp, Homo sapien
tgtaaactgtgtgcatgataatgacaaatatct

SEQ ID NO: 661229 - DNA, 33 bp, Homo sapien
attctgtcacatcatccagttcactaattatcc

SEQ ID NO: 661230 - DNA, 33 bp, Homo sapien
attctgtcacatcatctagttcactaattatcc

SEQ ID NO: 661231 - DNA, 33 bp, Homo sapien
aaatatcttttgtgccaattctcattttttttc

SEQ ID NO: 661232 - DNA, 33 bp, Homo sapien
aaatatcttttgtgcccattctcattttttttc

SEQ ID NO: 661233 - DNA, 33 bp, Homo sapien
aaagcaccaaatagagaaaatccaatgaaagag

SEQ ID NO: 661234 - DNA, 33 bp, Homo sapien
aaagcaccaaatagagtaaatccaatgaaagag

SEQ ID NO: 661235 - DNA, 33 bp, Homo sapien
gaaatgtgtgtataatcatgtacctgccttcaa

SEQ ID NO: 661236 - DNA, 33 bp, Homo sapien
gaaatgtgtgtataattatgtacctgccttcaa

SEQ ID NO: 661237 - DNA, 33 bp, Homo sapien
tttttgaaggcttggagagtagaaaaacttaag

SEQ ID NO: 661238 - DNA, 33 bp, Homo sapien
tttttgaaggcttggatagtagaaaaacttaag

SEQ ID NO: 661239 - DNA, 33 bp, Homo sapien
actcatacgttcagcagtacaccattcacaata

SEQ ID NO: 661240 - DNA, 33 bp, Homo sapien
actcatacgttcagcattacaccattcacaata

SEQ ID NO: 661241 - DNA, 33 bp, Homo sapien
cacctggagtctctccacgacctgcactccttg

SEQ ID NO: 661242 - DNA, 33 bp, Homo sapien
cacctggagtctctccgcgacctgcactccttg

SEQ ID NO: 661243 - DNA, 33 bp, Homo sapien
tgttctcctgggaatacaactggtccacctgaa

SEQ ID NO: 661244 - DNA, 33 bp, Homo sapien
tgttctcctgggaatagaactggtccacctgaa

SEQ ID NO: 661245 - DNA, 33 bp, Homo sapien
cacacctttgattttacgggctgaaagaaatgt

SEQ ID NO: 661246 - DNA, 33 bp, Homo sapien
cacacctttgattttatgggctgaaagaaatgt

SEQ ID NO: 661247 - DNA, 33 bp, Homo sapien
ttcatatattcttatcacactaggacgataggg

SEQ ID NO: 661248 - DNA, 33 bp, Homo sapien
ttcatatattcttatcgcactaggacgataggg

SEQ ID NO: 661249 - DNA, 33 bp, Homo sapien
tgttggcacagcatacaaggtaattaaagacga

SEQ ID NO: 661250 - DNA, 33 bp, Homo sapien
tgttggcacagcatacgaggtaattaaagacga

SEQ ID NO: 661251 - DNA, 33 bp, Homo sapien
ggcaaaggccataagccactccagggcagaagg

SEQ ID NO: 661252 - DNA, 33 bp, Homo sapien
ggcaaaggccataagctactccagggcagaagg

SEQ ID NO: 661253 - DNA, 33 bp, Homo sapien
ccattgctgcctagaacgtctgtgcatatcact

SEQ ID NO: 661254 - DNA, 33 bp, Homo sapien
ccattgctgcctagaatgtctgtgcatatcact

SEQ ID NO: 661255 - DNA, 33 bp, Homo sapien
cccactggacataggacagccataatcagctat

SEQ ID NO: 661256 - DNA, 33 bp, Homo sapien
cccactggacataggagagccataatcagctat

SEQ ID NO: 661257 - DNA, 33 bp, Homo sapien
ttagtgttaaaatctccaactataattgtagat

SEQ ID NO: 661258 - DNA, 33 bp, Homo sapien
ttagtgttaaaatctcgaactataattgtagat

SEQ ID NO: 661259 - DNA, 33 bp, Homo sapien
atatcaggaatgaaatgagggctatcgctacag

SEQ ID NO: 661260 - DNA, 33 bp, Homo sapien
atatcaggaatgaaattagggctatcgctacag

SEQ ID NO: 661261 - DNA, 33 bp, Homo sapien
ttccacctgccttgctaaagtaatgctgctgtg

SEQ ID NO: 661262 - DNA, 33 bp, Homo sapien
ttccacctgccttgcttaagtaatgctgctgtg

SEQ ID NO: 661263 - DNA, 33 bp, Homo sapien
ggaggtagtgagagagacattttgatggaccac

SEQ ID NO: 661264 - DNA, 33 bp, Homo sapien
ggaggtagtgagagagccattttgatggaccac

SEQ ID NO: 661265 - DNA, 33 bp, Homo sapien
accttcttaaagtagcaatggtaagagcagata

SEQ ID NO: 661266 - DNA, 33 bp, Homo sapien
accttcttaaagtagcgatggtaagagcagata

SEQ ID NO: 661267 - DNA, 33 bp, Homo sapien
gtggtgatagttacacaaacttgttaatataac

SEQ ID NO: 661268 - DNA, 33 bp, Homo sapien
gtggtgatagttacacgaacttgttaatataac

SEQ ID NO: 661269 - DNA, 33 bp, Homo sapien
tcctaaatgaaaccaactgatggctcagaaaga

SEQ ID NO: 661270 - DNA, 33 bp, Homo sapien
tcctaaatgaaaccaattgatggctcagaaaga

SEQ ID NO: 661271 - DNA, 33 bp, Homo sapien
tgctcttcttggtaaccgatgtgaacatctctc

SEQ ID NO: 661272 - DNA, 33 bp, Homo sapien
tgctcttcttggtaactgatgtgaacatctctc

SEQ ID NO: 661273 - DNA, 33 bp, Homo sapien
ggagggcactgaagccaatttggccagacccaa

SEQ ID NO: 661274 - DNA, 33 bp, Homo sapien
ggagggcactgaagcccatttggccagacccaa

SEQ ID NO: 661275 - DNA, 33 bp, Homo sapien
tctttcccacttcttcccttgtgcagccctgtg

SEQ ID NO: 661276 - DNA, 33 bp, Homo sapien
tctttcccacttcttctcttgtgcagccctgtg

SEQ ID NO: 661277 - DNA, 33 bp, Homo sapien
tgtggaaactggcatcagaggcagcatcctatg

SEQ ID NO: 661278 - DNA, 33 bp, Homo sapien
tgtggaaactggcatcggaggcagcatcctatg

SEQ ID NO: 661279 - DNA, 33 bp, Homo sapien
tgagtggaaggcaatgacatcctgcaggaatgt

SEQ ID NO: 661280 - DNA, 33 bp, Homo sapien
tgagtggaaggcaatggcatcctgcaggaatgt

SEQ ID NO: 661281 - DNA, 33 bp, Homo sapien
ttgccacctcttactcgagaagccaggcaatgt

SEQ ID NO: 661282 - DNA, 33 bp, Homo sapien
ttgccacctcttactctagaagccaggcaatgt

SEQ ID NO: 661283 - DNA, 33 bp, Homo sapien
ggccattttcatatatcaagggtggcaaggtag

SEQ ID NO: 661284 - DNA, 33 bp, Homo sapien
ggccattttcatatattaagggtggcaaggtag

SEQ ID NO: 661285 - DNA, 33 bp, Homo sapien
atatatatattttaaaagcatccgtttacttct

SEQ ID NO: 661286 - DNA, 33 bp, Homo sapien
atatatatattttaaatgcatccgtttacttct

SEQ ID NO: 661287 - DNA, 33 bp, Homo sapien
cttcaggattccagagcattggacattgctgtg

SEQ ID NO: 661288 - DNA, 33 bp, Homo sapien
cttcaggattccagagtattggacattgctgtg

SEQ ID NO: 661289 - DNA, 33 bp, Homo sapien
atttagagtgaaaagaatctgttcaaatctgtg

SEQ ID NO: 661290 - DNA, 33 bp, Homo sapien
atttagagtgaaaagactctgttcaaatctgtg

SEQ ID NO: 661291 - DNA, 33 bp, Homo sapien
agtgctcagactgtccaaggctggatccgctgt

SEQ ID NO: 661292 - DNA, 33 bp, Homo sapien
agtgctcagactgtccgaggctggatccgctgt

SEQ ID NO: 661293 - DNA, 33 bp, Homo sapien
ctaccagcacatgatgaagtggataatgtttgt

SEQ ID NO: 661294 - DNA, 33 bp, Homo sapien
ctaccagcacatgatggagtggataatgtttgt

SEQ ID NO: 661295 - DNA, 33 bp, Homo sapien
caagtccttgtaccacaccttgaagagcaaggc

SEQ ID NO: 661296 - DNA, 33 bp, Homo sapien
caagtccttgtaccacgccttgaagagcaaggc

SEQ ID NO: 661297 - DNA, 33 bp, Homo sapien
tcaagggtgaaacatacactccactcataagga

SEQ ID NO: 661298 - DNA, 33 bp, Homo sapien
tcaagggtgaaacatatactccactcataagga

SEQ ID NO: 661299 - DNA, 33 bp, Homo sapien
ctcagttttcagaggactatttctgcccttctc

SEQ ID NO: 661300 - DNA, 33 bp, Homo sapien
ctcagttttcagaggagtatttctgcccttctc

SEQ ID NO: 661301 - DNA, 33 bp, Homo sapien
ggcttcctacaagccaagtattgatcctctggc

SEQ ID NO: 661302 - DNA, 33 bp, Homo sapien
ggcttcctacaagccatgtattgatcctctggc

SEQ ID NO: 661303 - DNA, 33 bp, Homo sapien
tccatcttctaggaacacagccagaaacacaac

SEQ ID NO: 661304 - DNA, 33 bp, Homo sapien
tccatcttctaggaacgcagccagaaacacaac

SEQ ID NO: 661305 - DNA, 33 bp, Homo sapien
tgtggccataggcaatgaccaaggagccctcac

SEQ ID NO: 661306 - DNA, 33 bp, Homo sapien
tgtggccataggcaattaccaaggagccctcac

SEQ ID NO: 661307 - DNA, 33 bp, Homo sapien
atttcacagacaagcaaaatgagttacataaat

SEQ ID NO: 661308 - DNA, 33 bp, Homo sapien
atttcacagacaagcacaatgagttacataaat

SEQ ID NO: 661309 - DNA, 33 bp, Homo sapien
tttagcgtaccacagaaatgaattctggacacc

SEQ ID NO: 661310 - DNA, 33 bp, Homo sapien
tttagcgtaccacagagatgaattctggacacc

SEQ ID NO: 661311 - DNA, 33 bp, Homo sapien
gatgtgtaagcatgaaagacttctgggactagc

SEQ ID NO: 661312 - DNA, 33 bp, Homo sapien
gatgtgtaagcatgaatgacttctgggactagc

SEQ ID NO: 661313 - DNA, 33 bp, Homo sapien
aacccttaaagaggaaatatgaccacaattgct

SEQ ID NO: 661314 - DNA, 33 bp, Homo sapien
aacccttaaagaggaactatgaccacaattgct

SEQ ID NO: 661315 - DNA, 33 bp, Homo sapien
aagaaaccttgacatcaatccctcagctatata

SEQ ID NO: 661316 - DNA, 33 bp, Homo sapien
aagaaaccttgacatcgatccctcagctatata

SEQ ID NO: 661317 - DNA, 33 bp, Homo sapien
agaaagctcatcattcaacttctagggcctgcg

SEQ ID NO: 661318 - DNA, 33 bp, Homo sapien
agaaagctcatcattcgacttctagggcctgcg

SEQ ID NO: 661319 - DNA, 33 bp, Homo sapien
actgacttggaaagaactgattacctgaaggac

SEQ ID NO: 661320 - DNA, 33 bp, Homo sapien
actgacttggaaagaattgattacctgaaggac

SEQ ID NO: 661321 - DNA, 33 bp, Homo sapien
tctggctgcttttatccatctggccaggtgcag

SEQ ID NO: 661322 - DNA, 33 bp, Homo sapien
tctggctgcttttatctatctggccaggtgcag

SEQ ID NO: 661323 - DNA, 33 bp, Homo sapien
cagcaccaagaattcacgtgaaaccacctggaa

SEQ ID NO: 661324 - DNA, 33 bp, Homo sapien
cagcaccaagaattcatgtgaaaccacctggaa

SEQ ID NO: 661325 - DNA, 33 bp, Homo sapien
ggttcagctgagcttgacaaagccggggactca

SEQ ID NO: 661326 - DNA, 33 bp, Homo sapien
ggttcagctgagcttgtcaaagccggggactca

SEQ ID NO: 661327 - DNA, 33 bp, Homo sapien
gcttaggctaaatatagagagagagatggctgc

SEQ ID NO: 661328 - DNA, 33 bp, Homo sapien
gcttaggctaaatatatagagagagatggctgc

SEQ ID NO: 661329 - DNA, 33 bp, Homo sapien
cctgaaatgcttccacacctactggcaagtcac

SEQ ID NO: 661330 - DNA, 33 bp, Homo sapien
cctgaaatgcttccacgcctactggcaagtcac

SEQ ID NO: 661331 - DNA, 33 bp, Homo sapien
ctcttgcatggattcacaccttcaggtctaagg

SEQ ID NO: 661332 - DNA, 33 bp, Homo sapien
ctcttgcatggattcataccttcaggtctaagg

SEQ ID NO: 661333 - DNA, 33 bp, Homo sapien
ctggccatccccttccaattatagaggtcttca

SEQ ID NO: 661334 - DNA, 33 bp, Homo sapien
ctggccatccccttcccattatagaggtcttca

SEQ ID NO: 661335 - DNA, 33 bp, Homo sapien
gtttcatctaagcctacaaaaatgccaaagagg

SEQ ID NO: 661336 - DNA, 33 bp, Homo sapien
gtttcatctaagcctataaaaatgccaaagagg

SEQ ID NO: 661337 - DNA, 33 bp, Homo sapien
gccaaagaggacagaaataatatcccacagggg

SEQ ID NO: 661338 - DNA, 33 bp, Homo sapien
gccaaagaggacagaagtaatatcccacagggg

SEQ ID NO: 661339 - DNA, 33 bp, Homo sapien
gtttctgctgtagtcacaacataaacctgatga

SEQ ID NO: 661340 - DNA, 33 bp, Homo sapien
gtttctgctgtagtcagaacataaacctgatga

SEQ ID NO: 661341 - DNA, 33 bp, Homo sapien
aaatgttataaaacggaacaaaaagctactggg

SEQ ID NO: 661342 - DNA, 33 bp, Homo sapien
aaatgttataaaacgggacaaaaagctactggg

SEQ ID NO: 661343 - DNA, 33 bp, Homo sapien
ggagacaactttctaacgctgcaattcagtgta

SEQ ID NO: 661344 - DNA, 33 bp, Homo sapien
ggagacaactttctaatgctgcaattcagtgta

SEQ ID NO: 661345 - DNA, 33 bp, Homo sapien
ccttctgtggacactccatttgacggcagaagt

SEQ ID NO: 661346 - DNA, 33 bp, Homo sapien
ccttctgtggacactctatttgacggcagaagt

SEQ ID NO: 661347 - DNA, 33 bp, Homo sapien
aaggtatagctattaaatactctttgttacaca

SEQ ID NO: 661348 - DNA, 33 bp, Homo sapien
aaggtatagctattaagtactctttgttacaca

SEQ ID NO: 661349 - DNA, 33 bp, Homo sapien
tcctctgccccatatcacctttgagcacctcct

SEQ ID NO: 661350 - DNA, 33 bp, Homo sapien
tcctctgccccatatcgcctttgagcacctcct

SEQ ID NO: 661351 - DNA, 33 bp, Homo sapien
catacatacttatgcaacctaattatcgactgg

SEQ ID NO: 661352 - DNA, 33 bp, Homo sapien
catacatacttatgcaccctaattatcgactgg

SEQ ID NO: 661353 - DNA, 33 bp, Homo sapien
gcttctctgagtaatcactttgtatgtcctgtg

SEQ ID NO: 661354 - DNA, 33 bp, Homo sapien
gcttctctgagtaatcgctttgtatgtcctgtg

SEQ ID NO: 661355 - DNA, 33 bp, Homo sapien
gaggaaagcaagtttggaactgagtgctagtgt

SEQ ID NO: 661356 - DNA, 33 bp, Homo sapien
gaggaaagcaagtttgtaactgagtgctagtgt

SEQ ID NO: 661357 - DNA, 33 bp, Homo sapien
tgttggataatgtgaaactccatgcaggtggtc

SEQ ID NO: 661358 - DNA, 33 bp, Homo sapien
tgttggataatgtgaacctccatgcaggtggtc

SEQ ID NO: 661359 - DNA, 33 bp, Homo sapien
aaatcttaggtggagaatatcacaagctaagac

SEQ ID NO: 661360 - DNA, 33 bp, Homo sapien
aaatcttaggtggagagtatcacaagctaagac

SEQ ID NO: 661361 - DNA, 33 bp, Homo sapien
caacgtaaattaaggaacctggagcttatgtaa

SEQ ID NO: 661362 - DNA, 33 bp, Homo sapien
caacgtaaattaaggagcctggagcttatgtaa

SEQ ID NO: 661363 - DNA, 33 bp, Homo sapien
tttccagagcagagacactttcctgcagccctt

SEQ ID NO: 661364 - DNA, 33 bp, Homo sapien
tttccagagcagagacgctttcctgcagccctt

SEQ ID NO: 661365 - DNA, 33 bp, Homo sapien
aaagtgctcctaacaaacagcagccaatactgc

SEQ ID NO: 661366 - DNA, 33 bp, Homo sapien
aaagtgctcctaacaagcagcagccaatactgc

SEQ ID NO: 661367 - DNA, 33 bp, Homo sapien
ctctgagccacacggcaaccaaggctggagctt

SEQ ID NO: 661368 - DNA, 33 bp, Homo sapien
ctctgagccacacggcgaccaaggctggagctt

SEQ ID NO: 661369 - DNA, 33 bp, Homo sapien
gccatcctagtgtcagaagaaggttcccaaagg

SEQ ID NO: 661370 - DNA, 33 bp, Homo sapien
gccatcctagtgtcaggagaaggttcccaaagg

SEQ ID NO: 661371 - DNA, 33 bp, Homo sapien
tctggtttcttgttgcacctctgttggttgctc

SEQ ID NO: 661372 - DNA, 33 bp, Homo sapien
tctggtttcttgttgcgcctctgttggttgctc

SEQ ID NO: 661373 - DNA, 33 bp, Homo sapien
ggtctagatgtgggccaaagtcctcttgcctct

SEQ ID NO: 661374 - DNA, 33 bp, Homo sapien
ggtctagatgtgggccgaagtcctcttgcctct

SEQ ID NO: 661375 - DNA, 33 bp, Homo sapien
ttaatcagggcatgaacaaaaggagaagatacc

SEQ ID NO: 661376 - DNA, 33 bp, Homo sapien
ttaatcagggcatgaagaaaaggagaagatacc

SEQ ID NO: 661377 - DNA, 33 bp, Homo sapien
gaagcaaacagacagaactttggatattcttta

SEQ ID NO: 661378 - DNA, 33 bp, Homo sapien
gaagcaaacagacagatctttggatattcttta

SEQ ID NO: 661379 - DNA, 33 bp, Homo sapien
atatatgttacaccccagcatacccatccacac

SEQ ID NO: 661380 - DNA, 33 bp, Homo sapien
atatatgttacaccccggcatacccatccacac

SEQ ID NO: 661381 - DNA, 33 bp, Homo sapien
agagaggccattcatcacttttcattctgcagt

SEQ ID NO: 661382 - DNA, 33 bp, Homo sapien
agagaggccattcatcgcttttcattctgcagt

SEQ ID NO: 661383 - DNA, 33 bp, Homo sapien
caaacaattagcctagaatattagatgtataaa

SEQ ID NO: 661384 - DNA, 33 bp, Homo sapien
caaacaattagcctaggatattagatgtataaa

SEQ ID NO: 661385 - DNA, 33 bp, Homo sapien
ccaagtgctttgttccaggaaaacatctccttc

SEQ ID NO: 661386 - DNA, 33 bp, Homo sapien
ccaagtgctttgttccgggaaaacatctccttc

SEQ ID NO: 661387 - DNA, 33 bp, Homo sapien
tctatagaaggagaaaccaaggctcaagaatcc

SEQ ID NO: 661388 - DNA, 33 bp, Homo sapien
tctatagaaggagaaatcaaggctcaagaatcc

SEQ ID NO: 661389 - DNA, 33 bp, Homo sapien
atttgtgtgttggtacaggtggatgtagttgtg

SEQ ID NO: 661390 - DNA, 33 bp, Homo sapien
atttgtgtgttggtacgggtggatgtagttgtg

SEQ ID NO: 661391 - DNA, 33 bp, Homo sapien
ggaaggtctcaatggaacaacagacacatttat

SEQ ID NO: 661392 - DNA, 33 bp, Homo sapien
ggaaggtctcaatggaccaacagacacatttat

SEQ ID NO: 661393 - DNA, 33 bp, Homo sapien
ccaatcagaggtatgagaaaggagatcagccaa

SEQ ID NO: 661394 - DNA, 33 bp, Homo sapien
ccaatcagaggtatgataaaggagatcagccaa

SEQ ID NO: 661395 - DNA, 33 bp, Homo sapien
tcagcatacctataaacgtccacaaaagtttgt

SEQ ID NO: 661396 - DNA, 33 bp, Homo sapien
tcagcatacctataaatgtccacaaaagtttgt

SEQ ID NO: 661397 - DNA, 33 bp, Homo sapien
gcccagtgcagttccacgtctcagtgtatattg

SEQ ID NO: 661398 - DNA, 33 bp, Homo sapien
gcccagtgcagttccatgtctcagtgtatattg

SEQ ID NO: 661399 - DNA, 33 bp, Homo sapien
taccaggctccatacacctgccattttattcca

SEQ ID NO: 661400 - DNA, 33 bp, Homo sapien
taccaggctccatacatctgccattttattcca

SEQ ID NO: 661401 - DNA, 33 bp, Homo sapien
catctcctccctgacacggtaaacaaggagtgg

SEQ ID NO: 661402 - DNA, 33 bp, Homo sapien
catctcctccctgacatggtaaacaaggagtgg

SEQ ID NO: 661403 - DNA, 33 bp, Homo sapien
caaagtcaaggcatgccctttagagacagcagc

SEQ ID NO: 661404 - DNA, 33 bp, Homo sapien
caaagtcaaggcatgctctttagagacagcagc

SEQ ID NO: 661405 - DNA, 33 bp, Homo sapien
ttgtgctattggtaaaactccctggcactgaga

SEQ ID NO: 661406 - DNA, 33 bp, Homo sapien
ttgtgctattggtaaagctccctggcactgaga

SEQ ID NO: 661407 - DNA, 33 bp, Homo sapien
agtcccaaagtttatacctctctgtgttagaat

SEQ ID NO: 661408 - DNA, 33 bp, Homo sapien
agtcccaaagtttatatctctctgtgttagaat

SEQ ID NO: 661409 - DNA, 33 bp, Homo sapien
ctcacttccaacctcagagagaagatatgcagc

SEQ ID NO: 661410 - DNA, 33 bp, Homo sapien
ctcacttccaacctcatagagaagatatgcagc

SEQ ID NO: 661411 - DNA, 33 bp, Homo sapien
ctctagaactgcttaccgaagcacagggtgaga

SEQ ID NO: 661412 - DNA, 33 bp, Homo sapien
ctctagaactgcttactgaagcacagggtgaga

SEQ ID NO: 661413 - DNA, 33 bp, Homo sapien
tccattccaaagccgaacaaaatcaattacgat

SEQ ID NO: 661414 - DNA, 33 bp, Homo sapien
tccattccaaagccgagcaaaatcaattacgat

SEQ ID NO: 661415 - DNA, 33 bp, Homo sapien
agatgctgctctgacaatagaatgaggctgggg

SEQ ID NO: 661416 - DNA, 33 bp, Homo sapien
agatgctgctctgacagtagaatgaggctgggg

SEQ ID NO: 661417 - DNA, 33 bp, Homo sapien
tctctagctcagttcacatgggatgagggtgag

SEQ ID NO: 661418 - DNA, 33 bp, Homo sapien
tctctagctcagttcagatgggatgagggtgag

SEQ ID NO: 661419 - DNA, 33 bp, Homo sapien
gttgtgagtttggggacgttagtctttggcatt

SEQ ID NO: 661420 - DNA, 33 bp, Homo sapien
gttgtgagtttggggatgttagtctttggcatt

SEQ ID NO: 661421 - DNA, 33 bp, Homo sapien
gaccctggattaactgaagtttagatgccttgg

SEQ ID NO: 661422 - DNA, 33 bp, Homo sapien
gaccctggattaactgcagtttagatgccttgg

SEQ ID NO: 661423 - DNA, 33 bp, Homo sapien
caaagacctagactataaaactggtaaaagtgg

SEQ ID NO: 661424 - DNA, 33 bp, Homo sapien
caaagacctagactatgaaactggtaaaagtgg

SEQ ID NO: 661425 - DNA, 33 bp, Homo sapien
agcaggtactgtggaaatgaggaagaaagtccc

SEQ ID NO: 661426 - DNA, 33 bp, Homo sapien
agcaggtactgtggaagtgaggaagaaagtccc

SEQ ID NO: 661427 - DNA, 33 bp, Homo sapien
gcattatgggttaggcaagggacagctttcttg

SEQ ID NO: 661428 - DNA, 33 bp, Homo sapien
gcattatgggttaggcgagggacagctttcttg

SEQ ID NO: 661429 - DNA, 33 bp, Homo sapien
agtccacctgggagaaactctcatctgcagcaa

SEQ ID NO: 661430 - DNA, 33 bp, Homo sapien
agtccacctgggagaagctctcatctgcagcaa

SEQ ID NO: 661431 - DNA, 33 bp, Homo sapien
acttcaacactaaatagtatggactggttatta

SEQ ID NO: 661432 - DNA, 33 bp, Homo sapien
acttcaacactaaatattatggactggttatta

SEQ ID NO: 661433 - DNA, 33 bp, Homo sapien
gcaaaagttaatacaacacatgatacagtccca

SEQ ID NO: 661434 - DNA, 33 bp, Homo sapien
gcaaaagttaatacaatacatgatacagtccca

SEQ ID NO: 661435 - DNA, 33 bp, Homo sapien
caaactttgcagtttgaaaatgtcaggatactg

SEQ ID NO: 661436 - DNA, 33 bp, Homo sapien
caaactttgcagtttggaaatgtcaggatactg

SEQ ID NO: 661437 - DNA, 33 bp, Homo sapien
ggacctcagaaatgaccaccttaaccttaatgt

SEQ ID NO: 661438 - DNA, 33 bp, Homo sapien
ggacctcagaaatgactaccttaaccttaatgt

SEQ ID NO: 661439 - DNA, 33 bp, Homo sapien
cttagatccactgatgaatcaacgtcaacagtt

SEQ ID NO: 661440 - DNA, 33 bp, Homo sapien
cttagatccactgatgcatcaacgtcaacagtt

SEQ ID NO: 661441 - DNA, 33 bp, Homo sapien
gtgagccttcaacaacgaactctctcccaacac

SEQ ID NO: 661442 - DNA, 33 bp, Homo sapien
gtgagccttcaacaactaactctctcccaacac

SEQ ID NO: 661443 - DNA, 33 bp, Homo sapien
acaagtgaaaacagcaaagaggaataagccact

SEQ ID NO: 661444 - DNA, 33 bp, Homo sapien
acaagtgaaaacagcagagaggaataagccact

SEQ ID NO: 661445 - DNA, 33 bp, Homo sapien
gactgtctgggtgttacagaaacaaacatccct

SEQ ID NO: 661446 - DNA, 33 bp, Homo sapien
gactgtctgggtgttatagaaacaaacatccct

SEQ ID NO: 661447 - DNA, 33 bp, Homo sapien
cgttggtgaagaaaacaatggcattagggcccc

SEQ ID NO: 661448 - DNA, 33 bp, Homo sapien
cgttggtgaagaaaacgatggcattagggcccc

SEQ ID NO: 661449 - DNA, 33 bp, Homo sapien
tttccactgctttgggccattgatgagttgaat

SEQ ID NO: 661450 - DNA, 33 bp, Homo sapien
tttccactgctttgggtcattgatgagttgaat

SEQ ID NO: 661451 - DNA, 33 bp, Homo sapien
actgtattagcatttcaacacaagatggaagcc

SEQ ID NO: 661452 - DNA, 33 bp, Homo sapien
actgtattagcatttcgacacaagatggaagcc

SEQ ID NO: 661453 - DNA, 33 bp, Homo sapien
tacatcttagtccaaacggaatgctgatgccaa

SEQ ID NO: 661454 - DNA, 33 bp, Homo sapien
tacatcttagtccaaatggaatgctgatgccaa

SEQ ID NO: 661455 - DNA, 33 bp, Homo sapien
aagacagacaagagaacggaataaatggaggaa

SEQ ID NO: 661456 - DNA, 33 bp, Homo sapien
aagacagacaagagaatggaataaatggaggaa

SEQ ID NO: 661457 - DNA, 33 bp, Homo sapien
aaggaaggcatcctacaaagacagtttaaaatt

SEQ ID NO: 661458 - DNA, 33 bp, Homo sapien
aaggaaggcatcctacgaagacagtttaaaatt

SEQ ID NO: 661459 - DNA, 33 bp, Homo sapien
agcaaagccctcagtacaggaccaggcagtaca

SEQ ID NO: 661460 - DNA, 33 bp, Homo sapien
agcaaagccctcagtataggaccaggcagtaca

SEQ ID NO: 661461 - DNA, 33 bp, Homo sapien
tctctgacctggtatgacagggagaactaaatg

SEQ ID NO: 661462 - DNA, 33 bp, Homo sapien
tctctgacctggtatgccagggagaactaaatg

SEQ ID NO: 661463 - DNA, 33 bp, Homo sapien
gcatgatagggttacccgaatacttgtaccatg

SEQ ID NO: 661464 - DNA, 33 bp, Homo sapien
gcatgatagggttacctgaatacttgtaccatg

SEQ ID NO: 661465 - DNA, 33 bp, Homo sapien
acaaatgaaaagaaacagcagggcaaatatgca

SEQ ID NO: 661466 - DNA, 33 bp, Homo sapien
acaaatgaaaagaaacggcagggcaaatatgca

SEQ ID NO: 661467 - DNA, 33 bp, Homo sapien
atctttaatactgacaaataacccagtgtcaga

SEQ ID NO: 661468 - DNA, 33 bp, Homo sapien
atctttaatactgacatataacccagtgtcaga

SEQ ID NO: 661469 - DNA, 33 bp, Homo sapien
aggtgagaaggaaagacggtgagctgctcactc

SEQ ID NO: 661470 - DNA, 33 bp, Homo sapien
aggtgagaaggaaagatggtgagctgctcactc

SEQ ID NO: 661471 - DNA, 33 bp, Homo sapien
aggtgaggaagaatacaaaaaagaaaagccaat

SEQ ID NO: 661472 - DNA, 33 bp, Homo sapien
aggtgaggaagaatacgaaaaagaaaagccaat

SEQ ID NO: 661473 - DNA, 33 bp, Homo sapien
aatcatgcaaaaataacgcaacacattctagaa

SEQ ID NO: 661474 - DNA, 33 bp, Homo sapien
aatcatgcaaaaataatgcaacacattctagaa

SEQ ID NO: 661475 - DNA, 33 bp, Homo sapien
acagagctcactgttaacaacctcccagatgcc

SEQ ID NO: 661476 - DNA, 33 bp, Homo sapien
acagagctcactgttagcaacctcccagatgcc

SEQ ID NO: 661477 - DNA, 33 bp, Homo sapien
tgattccataccaagactcataaacctgcctca

SEQ ID NO: 661478 - DNA, 33 bp, Homo sapien
tgattccataccaagattcataaacctgcctca

SEQ ID NO: 661479 - DNA, 33 bp, Homo sapien
tggatagtatgccattcaatatatataccacat

SEQ ID NO: 661480 - DNA, 33 bp, Homo sapien
tggatagtatgccattgaatatatataccacat

SEQ ID NO: 661481 - DNA, 33 bp, Homo sapien
aaagcccgaaataatgacaagtggattcatgaa

SEQ ID NO: 661482 - DNA, 33 bp, Homo sapien
aaagcccgaaataatggcaagtggattcatgaa

SEQ ID NO: 661483 - DNA, 33 bp, Homo sapien
gatgggccaggcatcaaagggcctcaaaccttt

SEQ ID NO: 661484 - DNA, 33 bp, Homo sapien
gatgggccaggcatcagagggcctcaaaccttt

SEQ ID NO: 661485 - DNA, 33 bp, Homo sapien
aaaagtctgatggaaaaagtgattctgaaggtt

SEQ ID NO: 661486 - DNA, 33 bp, Homo sapien
aaaagtctgatggaaacagtgattctgaaggtt

SEQ ID NO: 661487 - DNA, 33 bp, Homo sapien
tgggctggaagtagcacaggagaagagtggttg

SEQ ID NO: 661488 - DNA, 33 bp, Homo sapien
tgggctggaagtagcagaggagaagagtggttg

SEQ ID NO: 661489 - DNA, 33 bp, Homo sapien
ggttcggcttaaagacagagagacagtctcaga

SEQ ID NO: 661490 - DNA, 33 bp, Homo sapien
ggttcggcttaaagaccgagagacagtctcaga

SEQ ID NO: 661491 - DNA, 33 bp, Homo sapien
gcacaccaattctaacactaactgcagaattcc

SEQ ID NO: 661492 - DNA, 33 bp, Homo sapien
gcacaccaattctaactctaactgcagaattcc

SEQ ID NO: 661493 - DNA, 33 bp, Homo sapien
gtgggttttgatgaggcaatatggaaaatgatt

SEQ ID NO: 661494 - DNA, 33 bp, Homo sapien
gtgggttttgatgaggtaatatggaaaatgatt

SEQ ID NO: 661495 - DNA, 33 bp, Homo sapien
ttgttaacaatcacacaacatttccagctcccc

SEQ ID NO: 661496 - DNA, 33 bp, Homo sapien
ttgttaacaatcacacgacatttccagctcccc

SEQ ID NO: 661497 - DNA, 33 bp, Homo sapien
aacatcacagagagaaaaatcagacaagatgtg

SEQ ID NO: 661498 - DNA, 33 bp, Homo sapien
aacatcacagagagaagaatcagacaagatgtg

SEQ ID NO: 661499 - DNA, 33 bp, Homo sapien
tctggattcttactgaaaatgagaaggaagctg

SEQ ID NO: 661500 - DNA, 33 bp, Homo sapien
tctggattcttactgagaatgagaaggaagctg

SEQ ID NO: 661501 - DNA, 33 bp, Homo sapien
tcaaattggtctccaaatcagcagtgctatgga

SEQ ID NO: 661502 - DNA, 33 bp, Homo sapien
tcaaattggtctccaagtcagcagtgctatgga

SEQ ID NO: 661503 - DNA, 33 bp, Homo sapien
ttaacaacttccatgcagatgcattctaggctt

SEQ ID NO: 661504 - DNA, 33 bp, Homo sapien
ttaacaacttccatgcggatgcattctaggctt

SEQ ID NO: 661505 - DNA, 33 bp, Homo sapien
tgggcactttatgacccaatttccgttcctact

SEQ ID NO: 661506 - DNA, 33 bp, Homo sapien
tgggcactttatgacctaatttccgttcctact

SEQ ID NO: 661507 - DNA, 33 bp, Homo sapien
tctcctaaccatcacaataaactgtttaatcac

SEQ ID NO: 661508 - DNA, 33 bp, Homo sapien
tctcctaaccatcacagtaaactgtttaatcac

SEQ ID NO: 661509 - DNA, 33 bp, Homo sapien
actgggtaaaacctaccgactggtcaacttgtt

SEQ ID NO: 661510 - DNA, 33 bp, Homo sapien
actgggtaaaacctactgactggtcaacttgtt

SEQ ID NO: 661511 - DNA, 33 bp, Homo sapien
tcctttgtgaaatataacttcttggtaccaatg

SEQ ID NO: 661512 - DNA, 33 bp, Homo sapien
tcctttgtgaaatatatcttcttggtaccaatg

SEQ ID NO: 661513 - DNA, 33 bp, Homo sapien
aaaaccactgacctaaaggaaaccatcagtggg

SEQ ID NO: 661514 - DNA, 33 bp, Homo sapien
aaaaccactgacctaagggaaaccatcagtggg

SEQ ID NO: 661515 - DNA, 33 bp, Homo sapien
gtgtcacaataaccaacggagaaagaaacactc

SEQ ID NO: 661516 - DNA, 33 bp, Homo sapien
gtgtcacaataaccaatggagaaagaaacactc

SEQ ID NO: 661517 - DNA, 33 bp, Homo sapien
ttttttaaagatgagaaccatcaaagtaaacat

SEQ ID NO: 661518 - DNA, 33 bp, Homo sapien
ttttttaaagatgagagccatcaaagtaaacat

SEQ ID NO: 661519 - DNA, 33 bp, Homo sapien
ttacttttcttttaaaaatgctgcactatttct

SEQ ID NO: 661520 - DNA, 33 bp, Homo sapien
ttacttttcttttaaacatgctgcactatttct

SEQ ID NO: 661521 - DNA, 33 bp, Homo sapien
gcatcatcctaagcaaaattccctaagttttcc

SEQ ID NO: 661522 - DNA, 33 bp, Homo sapien
gcatcatcctaagcaacattccctaagttttcc

SEQ ID NO: 661523 - DNA, 33 bp, Homo sapien
gggtaaataaaggcaacgctggaccacaaatat

SEQ ID NO: 661524 - DNA, 33 bp, Homo sapien
gggtaaataaaggcaatgctggaccacaaatat

SEQ ID NO: 661525 - DNA, 33 bp, Homo sapien
ttccatttggatttaccgggcactgcctcttta

SEQ ID NO: 661526 - DNA, 33 bp, Homo sapien
ttccatttggatttactgggcactgcctcttta

SEQ ID NO: 661527 - DNA, 33 bp, Homo sapien
gcactgcctctttagacctcacacatctttctt

SEQ ID NO: 661528 - DNA, 33 bp, Homo sapien
gcactgcctctttagatctcacacatctttctt

SEQ ID NO: 661529 - DNA, 33 bp, Homo sapien
ttacatgttgtgaatcacgtcagtttcatacag

SEQ ID NO: 661530 - DNA, 33 bp, Homo sapien
ttacatgttgtgaatctcgtcagtttcatacag

SEQ ID NO: 661531 - DNA, 33 bp, Homo sapien
gtagatgctcctcctacggtttgtctacaagcg

SEQ ID NO: 661532 - DNA, 33 bp, Homo sapien
gtagatgctcctcctatggtttgtctacaagcg

SEQ ID NO: 661533 - DNA, 33 bp, Homo sapien
tgtcttaatgattaaacgtttatggttactcgc

SEQ ID NO: 661534 - DNA, 33 bp, Homo sapien
tgtcttaatgattaaatgtttatggttactcgc

SEQ ID NO: 661535 - DNA, 33 bp, Homo sapien
taactggctggccaaaagaaggaatgagtaaat

SEQ ID NO: 661536 - DNA, 33 bp, Homo sapien
taactggctggccaaacgaaggaatgagtaaat

SEQ ID NO: 661537 - DNA, 33 bp, Homo sapien
ggtcatctttgacttcacaaagtaggcttttat

SEQ ID NO: 661538 - DNA, 33 bp, Homo sapien
ggtcatctttgacttcgcaaagtaggcttttat

SEQ ID NO: 661539 - DNA, 33 bp, Homo sapien
cttctgtcattttaccaagaatacagtttacaa

SEQ ID NO: 661540 - DNA, 33 bp, Homo sapien
cttctgtcattttaccgagaatacagtttacaa

SEQ ID NO: 661541 - DNA, 33 bp, Homo sapien
accttcttgtataccaacatggcctctaatcat

SEQ ID NO: 661542 - DNA, 33 bp, Homo sapien
accttcttgtataccagcatggcctctaatcat

SEQ ID NO: 661543 - DNA, 33 bp, Homo sapien
cagaatctgggaactacagctgatgacattcct

SEQ ID NO: 661544 - DNA, 33 bp, Homo sapien
cagaatctgggaactatagctgatgacattcct

SEQ ID NO: 661545 - DNA, 33 bp, Homo sapien
tttatttataacttaaaaattgctgtttgtttt

SEQ ID NO: 661546 - DNA, 33 bp, Homo sapien
tttatttataacttaacaattgctgtttgtttt

SEQ ID NO: 661547 - DNA, 33 bp, Homo sapien
ggttgttatgtaatacaaattcaggtgtaagat

SEQ ID NO: 661548 - DNA, 33 bp, Homo sapien
ggttgttatgtaatactaattcaggtgtaagat

SEQ ID NO: 661549 - DNA, 33 bp, Homo sapien
agacagaccatgatgaatagaagagagaccact

SEQ ID NO: 661550 - DNA, 33 bp, Homo sapien
agacagaccatgatgagtagaagagagaccact

SEQ ID NO: 661551 - DNA, 33 bp, Homo sapien
aaccagagcaggaagacggcggcctaatgggac

SEQ ID NO: 661552 - DNA, 33 bp, Homo sapien
aaccagagcaggaagatggcggcctaatgggac

SEQ ID NO: 661553 - DNA, 33 bp, Homo sapien
tatgggataaaattcagatagcagcctctggat

SEQ ID NO: 661554 - DNA, 33 bp, Homo sapien
tatgggataaaattcatatagcagcctctggat

SEQ ID NO: 661555 - DNA, 33 bp, Homo sapien
agttgggatgagggaaagtgtgatatgtgtgga

SEQ ID NO: 661556 - DNA, 33 bp, Homo sapien
agttgggatgagggaatgtgtgatatgtgtgga

SEQ ID NO: 661557 - DNA, 33 bp, Homo sapien
cttaaaccatccaagcacttttcaaatgaatta

SEQ ID NO: 661558 - DNA, 33 bp, Homo sapien
cttaaaccatccaagctcttttcaaatgaatta

SEQ ID NO: 661559 - DNA, 33 bp, Homo sapien
atacaaagcataaccccataccctcaaggaggc

SEQ ID NO: 661560 - DNA, 33 bp, Homo sapien
atacaaagcataaccctataccctcaaggaggc

SEQ ID NO: 661561 - DNA, 33 bp, Homo sapien
cagctcatcaacatgagaaatgctggtgtccaa

SEQ ID NO: 661562 - DNA, 33 bp, Homo sapien
cagctcatcaacatgataaatgctggtgtccaa

SEQ ID NO: 661563 - DNA, 33 bp, Homo sapien
atggttcttgacatgcgccataaggccttcttg

SEQ ID NO: 661564 - DNA, 33 bp, Homo sapien
atggttcttgacatgctccataaggccttcttg

SEQ ID NO: 661565 - DNA, 33 bp, Homo sapien
ccttgatcaattgaagaaatagagcaaattgac

SEQ ID NO: 661566 - DNA, 33 bp, Homo sapien
ccttgatcaattgaaggaatagagcaaattgac

SEQ ID NO: 661567 - DNA, 33 bp, Homo sapien
tctgcaaggcaaccaccacctgcatcccagagt

SEQ ID NO: 661568 - DNA, 33 bp, Homo sapien
tctgcaaggcaaccacgacctgcatcccagagt

SEQ ID NO: 661569 - DNA, 33 bp, Homo sapien
cagagttcttgtcctccaagagtataaaatcaa

SEQ ID NO: 661570 - DNA, 33 bp, Homo sapien
cagagttcttgtcctcgaagagtataaaatcaa

SEQ ID NO: 661571 - DNA, 33 bp, Homo sapien
ttcccaatacatagtcaaaaatgaattccggaa

SEQ ID NO: 661572 - DNA, 33 bp, Homo sapien
ttcccaatacatagtcgaaaatgaattccggaa

SEQ ID NO: 661573 - DNA, 33 bp, Homo sapien
tatttaggtgacttagcatcattgaaatgttaa

SEQ ID NO: 661574 - DNA, 33 bp, Homo sapien
tatttaggtgacttaggatcattgaaatgttaa

SEQ ID NO: 661575 - DNA, 33 bp, Homo sapien
atcatgaatgaaggccaaattttgtgaaaggaa

SEQ ID NO: 661576 - DNA, 33 bp, Homo sapien
atcatgaatgaaggccgaattttgtgaaaggaa

SEQ ID NO: 661577 - DNA, 33 bp, Homo sapien
ctcccaaaaagatacactggagtccttacctct

SEQ ID NO: 661578 - DNA, 33 bp, Homo sapien
ctcccaaaaagatacattggagtccttacctct

SEQ ID NO: 661579 - DNA, 33 bp, Homo sapien
tttggtcagcgacaaaccacatatacaatgctg

SEQ ID NO: 661580 - DNA, 33 bp, Homo sapien
tttggtcagcgacaaatcacatatacaatgctg

SEQ ID NO: 661581 - DNA, 33 bp, Homo sapien
tggcaagtttaggaagaccacacctcaggtgag

SEQ ID NO: 661582 - DNA, 33 bp, Homo sapien
tggcaagtttaggaaggccacacctcaggtgag

SEQ ID NO: 661583 - DNA, 33 bp, Homo sapien
ttattggtccaacttgaaaggttgttggcctat

SEQ ID NO: 661584 - DNA, 33 bp, Homo sapien
ttattggtccaacttggaaggttgttggcctat

SEQ ID NO: 661585 - DNA, 33 bp, Homo sapien
agttcccagtgcctgtaaaaagagactcagaat

SEQ ID NO: 661586 - DNA, 33 bp, Homo sapien
agttcccagtgcctgttaaaagagactcagaat

SEQ ID NO: 661587 - DNA, 33 bp, Homo sapien
cttcagggactaaacaaggagagaacacacctg

SEQ ID NO: 661588 - DNA, 33 bp, Homo sapien
cttcagggactaaacagggagagaacacacctg

SEQ ID NO: 661589 - DNA, 33 bp, Homo sapien
gagaaccacttctccaaccagtagctgtgacta

SEQ ID NO: 661590 - DNA, 33 bp, Homo sapien
gagaaccacttctccagccagtagctgtgacta

SEQ ID NO: 661591 - DNA, 33 bp, Homo sapien
gacttcatgcccattcagaaagcttcttacaac

SEQ ID NO: 661592 - DNA, 33 bp, Homo sapien
gacttcatgcccattcggaaagcttcttacaac

SEQ ID NO: 661593 - DNA, 33 bp, Homo sapien
cacagaagactaaatccaatttggacccttagt

SEQ ID NO: 661594 - DNA, 33 bp, Homo sapien
cacagaagactaaatctaatttggacccttagt

SEQ ID NO: 661595 - DNA, 33 bp, Homo sapien
ggaagaaagccttagagtagaggtagttgtaca

SEQ ID NO: 661596 - DNA, 33 bp, Homo sapien
ggaagaaagccttagattagaggtagttgtaca

SEQ ID NO: 661597 - DNA, 33 bp, Homo sapien
tgggcctattagtccacatgaagagatttcttc

SEQ ID NO: 661598 - DNA, 33 bp, Homo sapien
tgggcctattagtccatatgaagagatttcttc

SEQ ID NO: 661599 - DNA, 33 bp, Homo sapien
cccatcaagtctgtcacggtccctggtggccac

SEQ ID NO: 661600 - DNA, 33 bp, Homo sapien
cccatcaagtctgtcatggtccctggtggccac

SEQ ID NO: 661601 - DNA, 33 bp, Homo sapien
gccacgaataagacacactcctttgcttgacgg

SEQ ID NO: 661602 - DNA, 33 bp, Homo sapien
gccacgaataagacactctcctttgcttgacgg

SEQ ID NO: 661603 - DNA, 33 bp, Homo sapien
agaaacagtttgacctgaaagcatttcgcaaat

SEQ ID NO: 661604 - DNA, 33 bp, Homo sapien
agaaacagtttgaccttaaagcatttcgcaaat

SEQ ID NO: 661605 - DNA, 33 bp, Homo sapien
atgtatattaagctagacatgaactcatattga

SEQ ID NO: 661606 - DNA, 33 bp, Homo sapien
atgtatattaagctagtcatgaactcatattga

SEQ ID NO: 661607 - DNA, 33 bp, Homo sapien
cagtcaaatgataaaaccacagttacagaattg

SEQ ID NO: 661608 - DNA, 33 bp, Homo sapien
cagtcaaatgataaaatcacagttacagaattg

SEQ ID NO: 661609 - DNA, 33 bp, Homo sapien
acctaaggaccctggcaatactcagtttccaag

SEQ ID NO: 661610 - DNA, 33 bp, Homo sapien
acctaaggaccctggcgatactcagtttccaag

SEQ ID NO: 661611 - DNA, 33 bp, Homo sapien
aaccccatgtgcagacacgataattttctaaaa

SEQ ID NO: 661612 - DNA, 33 bp, Homo sapien
aaccccatgtgcagactcgataattttctaaaa

SEQ ID NO: 661613 - DNA, 33 bp, Homo sapien
tgaccccaccccggccaaatgttggaggtgctt

SEQ ID NO: 661614 - DNA, 33 bp, Homo sapien
tgaccccaccccggccgaatgttggaggtgctt

SEQ ID NO: 661615 - DNA, 33 bp, Homo sapien
aacagtgataatgtgcactcaagaaataccttc

SEQ ID NO: 661616 - DNA, 33 bp, Homo sapien
aacagtgataatgtgcgctcaagaaataccttc

SEQ ID NO: 661617 - DNA, 33 bp, Homo sapien
agccctttggatcacaagactgctatggtaggt

SEQ ID NO: 661618 - DNA, 33 bp, Homo sapien
agccctttggatcacatgactgctatggtaggt

SEQ ID NO: 661619 - DNA, 33 bp, Homo sapien
ttacaaacatttatggacaacctactctattaa

SEQ ID NO: 661620 - DNA, 33 bp, Homo sapien
ttacaaacatttatgggcaacctactctattaa

SEQ ID NO: 661621 - DNA, 33 bp, Homo sapien
tcatttatcattagcccggcatcaagccagtca

SEQ ID NO: 661622 - DNA, 33 bp, Homo sapien
tcatttatcattagcctggcatcaagccagtca

SEQ ID NO: 661623 - DNA, 33 bp, Homo sapien
ggaagggcagccttaacaccagtgctgagaact

SEQ ID NO: 661624 - DNA, 33 bp, Homo sapien
ggaagggcagccttaataccagtgctgagaact

SEQ ID NO: 661625 - DNA, 33 bp, Homo sapien
tccttattcctgtcagactcttctcagggctgg

SEQ ID NO: 661626 - DNA, 33 bp, Homo sapien
tccttattcctgtcagtctcttctcagggctgg

SEQ ID NO: 661627 - DNA, 33 bp, Homo sapien
aatcatctctatccacaagagcttttgttaagg

SEQ ID NO: 661628 - DNA, 33 bp, Homo sapien
aatcatctctatccacgagagcttttgttaagg

SEQ ID NO: 661629 - DNA, 33 bp, Homo sapien
gtccttccaggtaaaactggcctgttaggaaga

SEQ ID NO: 661630 - DNA, 33 bp, Homo sapien
gtccttccaggtaaaattggcctgttaggaaga

SEQ ID NO: 661631 - DNA, 33 bp, Homo sapien
cataggctattggagccgcctgaaagccaaact

SEQ ID NO: 661632 - DNA, 33 bp, Homo sapien
cataggctattggagctgcctgaaagccaaact

SEQ ID NO: 661633 - DNA, 33 bp, Homo sapien
ccttcaatgtgaaagacaagttcctataccttg

SEQ ID NO: 661634 - DNA, 33 bp, Homo sapien
ccttcaatgtgaaagagaagttcctataccttg

SEQ ID NO: 661635 - DNA, 33 bp, Homo sapien
gaaaattggatagggacgccaaaatggagaatc

SEQ ID NO: 661636 - DNA, 33 bp, Homo sapien
gaaaattggatagggatgccaaaatggagaatc

SEQ ID NO: 661637 - DNA, 33 bp, Homo sapien
aagatggacataattaccacaatgagcagcaac

SEQ ID NO: 661638 - DNA, 33 bp, Homo sapien
aagatggacataattatcacaatgagcagcaac

SEQ ID NO: 661639 - DNA, 33 bp, Homo sapien
acccccattttacatacaggagagccatggtga

SEQ ID NO: 661640 - DNA, 33 bp, Homo sapien
acccccattttacatagaggagagccatggtga

SEQ ID NO: 661641 - DNA, 33 bp, Homo sapien
acattttggtttctgacgaccttgctaaataag

SEQ ID NO: 661642 - DNA, 33 bp, Homo sapien
acattttggtttctgatgaccttgctaaataag

SEQ ID NO: 661643 - DNA, 33 bp, Homo sapien
atatggcttattttccccatagattgtatctac

SEQ ID NO: 661644 - DNA, 33 bp, Homo sapien
atatggcttattttcctcatagattgtatctac

SEQ ID NO: 661645 - DNA, 33 bp, Homo sapien
cagcagcattatgtacaataacaaaaagtggaa

SEQ ID NO: 661646 - DNA, 33 bp, Homo sapien
cagcagcattatgtacgataacaaaaagtggaa

SEQ ID NO: 661647 - DNA, 33 bp, Homo sapien
gtgcactaagtggaccaaggacatttaaagtcc

SEQ ID NO: 661648 - DNA, 33 bp, Homo sapien
gtgcactaagtggaccgaggacatttaaagtcc

SEQ ID NO: 661649 - DNA, 33 bp, Homo sapien
ttttgtttatgtcctacgttggttaaacaaaat

SEQ ID NO: 661650 - DNA, 33 bp, Homo sapien
ttttgtttatgtcctatgttggttaaacaaaat

SEQ ID NO: 661651 - DNA, 33 bp, Homo sapien
atccacaatatcaaaacgagccggagaacacct

SEQ ID NO: 661652 - DNA, 33 bp, Homo sapien
atccacaatatcaaaatgagccggagaacacct

SEQ ID NO: 661653 - DNA, 33 bp, Homo sapien
tccaggttggtccaaacgattctctagtgcatt

SEQ ID NO: 661654 - DNA, 33 bp, Homo sapien
tccaggttggtccaaatgattctctagtgcatt

SEQ ID NO: 661655 - DNA, 33 bp, Homo sapien
agcatgttttgagggccattcatgtcatcaaca

SEQ ID NO: 661656 - DNA, 33 bp, Homo sapien
agcatgttttgagggctattcatgtcatcaaca

SEQ ID NO: 661657 - DNA, 33 bp, Homo sapien
ttcaatatagcagttacaagcagatatttgcac

SEQ ID NO: 661658 - DNA, 33 bp, Homo sapien
ttcaatatagcagttataagcagatatttgcac

SEQ ID NO: 661659 - DNA, 33 bp, Homo sapien
agacttttacacaccacgatctctgaaaaggaa

SEQ ID NO: 661660 - DNA, 33 bp, Homo sapien
agacttttacacaccatgatctctgaaaaggaa

SEQ ID NO: 661661 - DNA, 33 bp, Homo sapien
aaaattggatagaagaaagtattttaggtcata

SEQ ID NO: 661662 - DNA, 33 bp, Homo sapien
aaaattggatagaagagagtattttaggtcata

SEQ ID NO: 661663 - DNA, 33 bp, Homo sapien
cttacacagagtcaaccactattcaatttctat

SEQ ID NO: 661664 - DNA, 33 bp, Homo sapien
cttacacagagtcaactactattcaatttctat

SEQ ID NO: 661665 - DNA, 33 bp, Homo sapien
agacagggggcaccatgatacgggaccaaggct

SEQ ID NO: 661666 - DNA, 33 bp, Homo sapien
agacagggggcaccattatacgggaccaaggct

SEQ ID NO: 661667 - DNA, 33 bp, Homo sapien
tgtctcctgctatgaaagcttacaaactttttt

SEQ ID NO: 661668 - DNA, 33 bp, Homo sapien
tgtctcctgctatgaaggcttacaaactttttt

SEQ ID NO: 661669 - DNA, 33 bp, Homo sapien
ttgctgatcatatgcaccattggggatatcaaa

SEQ ID NO: 661670 - DNA, 33 bp, Homo sapien
ttgctgatcatatgcagcattggggatatcaaa

SEQ ID NO: 661671 - DNA, 33 bp, Homo sapien
cccacagcctggggaaaaaaaagcgcatcaatt

SEQ ID NO: 661672 - DNA, 33 bp, Homo sapien
cccacagcctggggaagaaaaagcgcatcaatt

SEQ ID NO: 661673 - DNA, 33 bp, Homo sapien
gtctccttgcctccaaatgtggtcacccctaac

SEQ ID NO: 661674 - DNA, 33 bp, Homo sapien
gtctccttgcctccaagtgtggtcacccctaac

SEQ ID NO: 661675 - DNA, 33 bp, Homo sapien
tccagagggcctcagaactcaatcccctttaca

SEQ ID NO: 661676 - DNA, 33 bp, Homo sapien
tccagagggcctcagagctcaatcccctttaca

SEQ ID NO: 661677 - DNA, 33 bp, Homo sapien
ctgaggctgccctcaaatgattcagcagggtag

SEQ ID NO: 661678 - DNA, 33 bp, Homo sapien
ctgaggctgccctcaagtgattcagcagggtag

SEQ ID NO: 661679 - DNA, 33 bp, Homo sapien
caaaatcagtatgtcagcactattttggtggtt

SEQ ID NO: 661680 - DNA, 33 bp, Homo sapien
caaaatcagtatgtcatcactattttggtggtt

SEQ ID NO: 661681 - DNA, 33 bp, Homo sapien
tgaagattgagactaacgggtagagaaaaggta

SEQ ID NO: 661682 - DNA, 33 bp, Homo sapien
tgaagattgagactaatgggtagagaaaaggta

SEQ ID NO: 661683 - DNA, 33 bp, Homo sapien
aagcacatacttcaggaagaaagaacttgttta

SEQ ID NO: 661684 - DNA, 33 bp, Homo sapien
aagcacatacttcagggagaaagaacttgttta

SEQ ID NO: 661685 - DNA, 33 bp, Homo sapien
gtaggcaattgtaacaaaaatggcatttgtgta

SEQ ID NO: 661686 - DNA, 33 bp, Homo sapien
gtaggcaattgtaacagaaatggcatttgtgta

SEQ ID NO: 661687 - DNA, 33 bp, Homo sapien
cagggaggggaacaagacacactgaggcctgtt

SEQ ID NO: 661688 - DNA, 33 bp, Homo sapien
cagggaggggaacaaggcacactgaggcctgtt

SEQ ID NO: 661689 - DNA, 33 bp, Homo sapien
ggcatcaggcagtgtcaaccacaggagccaaga

SEQ ID NO: 661690 - DNA, 33 bp, Homo sapien
ggcatcaggcagtgtccaccacaggagccaaga

SEQ ID NO: 661691 - DNA, 33 bp, Homo sapien
cacaggagccaagaaacgtctaagaggaggtga

SEQ ID NO: 661692 - DNA, 33 bp, Homo sapien
cacaggagccaagaaaggtctaagaggaggtga

SEQ ID NO: 661693 - DNA, 33 bp, Homo sapien
tggaggctgacaggccacgagaccccagagcaa

SEQ ID NO: 661694 - DNA, 33 bp, Homo sapien
tggaggctgacaggccgcgagaccccagagcaa

SEQ ID NO: 661695 - DNA, 33 bp, Homo sapien
tcaggtattgaaggaccatcaaagtgcttttaa

SEQ ID NO: 661696 - DNA, 33 bp, Homo sapien
tcaggtattgaaggactatcaaagtgcttttaa

SEQ ID NO: 661697 - DNA, 33 bp, Homo sapien
cctattagacactcaaaggcagatgtcaaggag

SEQ ID NO: 661698 - DNA, 33 bp, Homo sapien
cctattagacactcaagggcagatgtcaaggag

SEQ ID NO: 661699 - DNA, 33 bp, Homo sapien
gagcaggctttaccagaaccaaatgtactggca

SEQ ID NO: 661700 - DNA, 33 bp, Homo sapien
gagcaggctttaccagcaccaaatgtactggca

SEQ ID NO: 661701 - DNA, 33 bp, Homo sapien
tacaatcactttgcaaaattgtttgtcagtatc

SEQ ID NO: 661702 - DNA, 33 bp, Homo sapien
tacaatcactttgcaagattgtttgtcagtatc

SEQ ID NO: 661703 - DNA, 33 bp, Homo sapien
ctataaatgttatgcacgttgtcactcaatggc

SEQ ID NO: 661704 - DNA, 33 bp, Homo sapien
ctataaatgttatgcaggttgtcactcaatggc

SEQ ID NO: 661705 - DNA, 33 bp, Homo sapien
ttagtagaatacatggccatttgttgaatttca

SEQ ID NO: 661706 - DNA, 33 bp, Homo sapien
ttagtagaatacatggtcatttgttgaatttca

SEQ ID NO: 661707 - DNA, 33 bp, Homo sapien
acaaatgtttgtactcaatttacatgtagctta

SEQ ID NO: 661708 - DNA, 33 bp, Homo sapien
acaaatgtttgtactcgatttacatgtagctta

SEQ ID NO: 661709 - DNA, 33 bp, Homo sapien
aaaatattcaaacttactaaatttagaggtaaa

SEQ ID NO: 661710 - DNA, 33 bp, Homo sapien
aaaatattcaaacttattaaatttagaggtaaa

SEQ ID NO: 661711 - DNA, 33 bp, Homo sapien
catgctatttccctgacccacggtacattctct

SEQ ID NO: 661712 - DNA, 33 bp, Homo sapien
catgctatttccctgatccacggtacattctct

SEQ ID NO: 661713 - DNA, 33 bp, Homo sapien
aacattctaagtaccacgtgaaaagtatcactc

SEQ ID NO: 661714 - DNA, 33 bp, Homo sapien
aacattctaagtaccatgtgaaaagtatcactc

SEQ ID NO: 661715 - DNA, 33 bp, Homo sapien
tgttgaatttacagtcgctcagttcgtggaaac

SEQ ID NO: 661716 - DNA, 33 bp, Homo sapien
tgttgaatttacagtctctcagttcgtggaaac

SEQ ID NO: 661717 - DNA, 33 bp, Homo sapien
ggctccctatagcctcaaacctccaccaggctc

SEQ ID NO: 661718 - DNA, 33 bp, Homo sapien
ggctccctatagcctcgaacctccaccaggctc

SEQ ID NO: 661719 - DNA, 33 bp, Homo sapien
ataaacgaaagcggccaaaacacatttggaaac

SEQ ID NO: 661720 - DNA, 33 bp, Homo sapien
ataaacgaaagcggccgaaacacatttggaaac

SEQ ID NO: 661721 - DNA, 33 bp, Homo sapien
agagatatggacctcaagataatacaattcagt

SEQ ID NO: 661722 - DNA, 33 bp, Homo sapien
agagatatggacctcatgataatacaattcagt

SEQ ID NO: 661723 - DNA, 33 bp, Homo sapien
atgtgggcctagcttacggtatgtgagttctct

SEQ ID NO: 661724 - DNA, 33 bp, Homo sapien
atgtgggcctagcttatggtatgtgagttctct

SEQ ID NO: 661725 - DNA, 33 bp, Homo sapien
atctttgtagagtgtaaatcagccatccagtgg

SEQ ID NO: 661726 - DNA, 33 bp, Homo sapien
atctttgtagagtgtatatcagccatccagtgg

SEQ ID NO: 661727 - DNA, 33 bp, Homo sapien
gactagtgacagtccaatcctgtatttcacatc

SEQ ID NO: 661728 - DNA, 33 bp, Homo sapien
gactagtgacagtccattcctgtatttcacatc

SEQ ID NO: 661729 - DNA, 33 bp, Homo sapien
ccattacttggcataaacccagaggaatataaa

SEQ ID NO: 661730 - DNA, 33 bp, Homo sapien
ccattacttggcataagcccagaggaatataaa

SEQ ID NO: 661731 - DNA, 33 bp, Homo sapien
tttgcttttcttggaacatgctacagtttgtta

SEQ ID NO: 661732 - DNA, 33 bp, Homo sapien
tttgcttttcttggaagatgctacagtttgtta

SEQ ID NO: 661733 - DNA, 33 bp, Homo sapien
atggggttcctgagagacatattaacagattat

SEQ ID NO: 661734 - DNA, 33 bp, Homo sapien
atggggttcctgagagtcatattaacagattat

SEQ ID NO: 661735 - DNA, 33 bp, Homo sapien
tgtgtggtaatggcaacgtaatttctgtttgca

SEQ ID NO: 661736 - DNA, 33 bp, Homo sapien
tgtgtggtaatggcaatgtaatttctgtttgca

SEQ ID NO: 661737 - DNA, 33 bp, Homo sapien
gatgtgtaaaccaaaaatttggagatggacaaa

SEQ ID NO: 661738 - DNA, 33 bp, Homo sapien
gatgtgtaaaccaaaagtttggagatggacaaa

SEQ ID NO: 661739 - DNA, 33 bp, Homo sapien
agcacaagtgagagcccgagtgtggaaggtggt

SEQ ID NO: 661740 - DNA, 33 bp, Homo sapien
agcacaagtgagagcctgagtgtggaaggtggt

SEQ ID NO: 661741 - DNA, 33 bp, Homo sapien
ttttcccaatgttatactagcctgataggtatt

SEQ ID NO: 661742 - DNA, 33 bp, Homo sapien
ttttcccaatgttatattagcctgataggtatt

SEQ ID NO: 661743 - DNA, 33 bp, Homo sapien
ctcatttgaagtagcaagagaaactttccaaag

SEQ ID NO: 661744 - DNA, 33 bp, Homo sapien
ctcatttgaagtagcaggagaaactttccaaag

SEQ ID NO: 661745 - DNA, 33 bp, Homo sapien
cacaaaagaagttttacgaatggcccataaaca

SEQ ID NO: 661746 - DNA, 33 bp, Homo sapien
cacaaaagaagttttatgaatggcccataaaca

SEQ ID NO: 661747 - DNA, 33 bp, Homo sapien
agtgctgtattagttaaatatccagatggaaaa

SEQ ID NO: 661748 - DNA, 33 bp, Homo sapien
agtgctgtattagttacatatccagatggaaaa

SEQ ID NO: 661749 - DNA, 33 bp, Homo sapien
gacctgtcttttctctaaaatctgcatgaaacc

SEQ ID NO: 661750 - DNA, 33 bp, Homo sapien
gacctgtcttttctctgaaatctgcatgaaacc

SEQ ID NO: 661751 - DNA, 33 bp, Homo sapien
tcaactatgtccttgacgtctacgaccatgtat

SEQ ID NO: 661752 - DNA, 33 bp, Homo sapien
tcaactatgtccttgatgtctacgaccatgtat

SEQ ID NO: 661753 - DNA, 33 bp, Homo sapien
ataaaataaaaagaggaatctgaacatccttat

SEQ ID NO: 661754 - DNA, 33 bp, Homo sapien
ataaaataaaaagagggatctgaacatccttat

SEQ ID NO: 661755 - DNA, 33 bp, Homo sapien
gaaggaagatggggtcaaaatatgatagctgaa

SEQ ID NO: 661756 - DNA, 33 bp, Homo sapien
gaaggaagatggggtcgaaatatgatagctgaa

SEQ ID NO: 661757 - DNA, 33 bp, Homo sapien
ccatcccttctgtaaccagatgttttctgtggt

SEQ ID NO: 661758 - DNA, 33 bp, Homo sapien
ccatcccttctgtaactagatgttttctgtggt

SEQ ID NO: 661759 - DNA, 33 bp, Homo sapien
ggctctgtcattcctccaaccacagaaaacatc

SEQ ID NO: 661760 - DNA, 33 bp, Homo sapien
ggctctgtcattcctcgaaccacagaaaacatc

SEQ ID NO: 661761 - DNA, 33 bp, Homo sapien
cctgcctcttaaggtacagcctctcacccttca

SEQ ID NO: 661762 - DNA, 33 bp, Homo sapien
cctgcctcttaaggtatagcctctcacccttca

SEQ ID NO: 661763 - DNA, 33 bp, Homo sapien
ctgttttacaaaaataaaggagattatgagact

SEQ ID NO: 661764 - DNA, 33 bp, Homo sapien
ctgttttacaaaaatagaggagattatgagact

SEQ ID NO: 661765 - DNA, 33 bp, Homo sapien
ttctgttgtaaagacacaacgattcactaagtg

SEQ ID NO: 661766 - DNA, 33 bp, Homo sapien
ttctgttgtaaagacataacgattcactaagtg

SEQ ID NO: 661767 - DNA, 33 bp, Homo sapien
accaggcaagctgaaacacagattggactctct

SEQ ID NO: 661768 - DNA, 33 bp, Homo sapien
accaggcaagctgaaatacagattggactctct

SEQ ID NO: 661769 - DNA, 33 bp, Homo sapien
aggcatcatgtgatagcagcactaatagagatg

SEQ ID NO: 661770 - DNA, 33 bp, Homo sapien
aggcatcatgtgataggagcactaatagagatg

SEQ ID NO: 661771 - DNA, 33 bp, Homo sapien
tagtggtacataaaaacagggctataactacat

SEQ ID NO: 661772 - DNA, 33 bp, Homo sapien
tagtggtacataaaaatagggctataactacat

SEQ ID NO: 661773 - DNA, 33 bp, Homo sapien
atctgagtgcacaaaggccaaatatcccaaaat

SEQ ID NO: 661774 - DNA, 33 bp, Homo sapien
atctgagtgcacaaagtccaaatatcccaaaat

SEQ ID NO: 661775 - DNA, 33 bp, Homo sapien
atcttttctacaggaacgaaaatactcaaggac

SEQ ID NO: 661776 - DNA, 33 bp, Homo sapien
atcttttctacaggaatgaaaatactcaaggac

SEQ ID NO: 661777 - DNA, 33 bp, Homo sapien
atctgattttggagtccgaaaacttgagagggc

SEQ ID NO: 661778 - DNA, 33 bp, Homo sapien
atctgattttggagtctgaaaacttgagagggc

SEQ ID NO: 661779 - DNA, 33 bp, Homo sapien
agctggcaatgaggaaccaagaagactggtgta

SEQ ID NO: 661780 - DNA, 33 bp, Homo sapien
agctggcaatgaggaatcaagaagactggtgta

SEQ ID NO: 661781 - DNA, 33 bp, Homo sapien
aggtgaaacagttctaagagcagtaagaattcc

SEQ ID NO: 661782 - DNA, 33 bp, Homo sapien
aggtgaaacagttctatgagcagtaagaattcc

SEQ ID NO: 661783 - DNA, 33 bp, Homo sapien
tggcaaatagtgacacaatttgagaaccatggc

SEQ ID NO: 661784 - DNA, 33 bp, Homo sapien
tggcaaatagtgacaccatttgagaaccatggc

SEQ ID NO: 661785 - DNA, 33 bp, Homo sapien
ggggtctcatctgagaagattcaatggctgacg

SEQ ID NO: 661786 - DNA, 33 bp, Homo sapien
ggggtctcatctgagaggattcaatggctgacg

SEQ ID NO: 661787 - DNA, 33 bp, Homo sapien
ttttccagctaacaaaattgaagttgtatcacc

SEQ ID NO: 661788 - DNA, 33 bp, Homo sapien
ttttccagctaacaaagttgaagttgtatcacc

SEQ ID NO: 661789 - DNA, 33 bp, Homo sapien
ttggcttcaccacataccgatggtagagcccta

SEQ ID NO: 661790 - DNA, 33 bp, Homo sapien
ttggcttcaccacatatcgatggtagagcccta

SEQ ID NO: 661791 - DNA, 33 bp, Homo sapien
gcttcttatcaaacttaaagtctgtgttgaggt

SEQ ID NO: 661792 - DNA, 33 bp, Homo sapien
gcttcttatcaaacttgaagtctgtgttgaggt

SEQ ID NO: 661793 - DNA, 33 bp, Homo sapien
tcagctgttccaaatacaaagccttagtaatta

SEQ ID NO: 661794 - DNA, 33 bp, Homo sapien
tcagctgttccaaatataaagccttagtaatta

SEQ ID NO: 661795 - DNA, 33 bp, Homo sapien
gacaaacctcatgaatcaaaccaccacacatca

SEQ ID NO: 661796 - DNA, 33 bp, Homo sapien
gacaaacctcatgaatgaaaccaccacacatca

SEQ ID NO: 661797 - DNA, 33 bp, Homo sapien
tgagaatttatcataacctggtcaaggatcatt

SEQ ID NO: 661798 - DNA, 33 bp, Homo sapien
tgagaatttatcataagctggtcaaggatcatt

SEQ ID NO: 661799 - DNA, 33 bp, Homo sapien
ctaggcttgtttcagcagcacaaatgattggga

SEQ ID NO: 661800 - DNA, 33 bp, Homo sapien
ctaggcttgtttcagcggcacaaatgattggga

SEQ ID NO: 661801 - DNA, 33 bp, Homo sapien
tgcagcaccatcaaaaaatagcagacccctaac

SEQ ID NO: 661802 - DNA, 33 bp, Homo sapien
tgcagcaccatcaaaagatagcagacccctaac

SEQ ID NO: 661803 - DNA, 33 bp, Homo sapien
ggcagacaagaagtgccgaagaattaatccttc

SEQ ID NO: 661804 - DNA, 33 bp, Homo sapien
ggcagacaagaagtgctgaagaattaatccttc

SEQ ID NO: 661805 - DNA, 33 bp, Homo sapien
acctaacaactgggccccatagcctagtcaagt

SEQ ID NO: 661806 - DNA, 33 bp, Homo sapien
acctaacaactgggcctcatagcctagtcaagt

SEQ ID NO: 661807 - DNA, 33 bp, Homo sapien
acaaagtgaaaacctacaatagagacactaaag

SEQ ID NO: 661808 - DNA, 33 bp, Homo sapien
acaaagtgaaaacctataatagagacactaaag

SEQ ID NO: 661809 - DNA, 33 bp, Homo sapien
ctgctcaaggcaaagaccatttgtacaggcagc

SEQ ID NO: 661810 - DNA, 33 bp, Homo sapien
ctgctcaaggcaaagagcatttgtacaggcagc

SEQ ID NO: 661811 - DNA, 33 bp, Homo sapien
gctaattttctaattcacacctggaaagcaaat

SEQ ID NO: 661812 - DNA, 33 bp, Homo sapien
gctaattttctaattcgcacctggaaagcaaat

SEQ ID NO: 661813 - DNA, 33 bp, Homo sapien
agaaaggatttggagagctatttatggcaatcg

SEQ ID NO: 661814 - DNA, 33 bp, Homo sapien
agaaaggatttggagatctatttatggcaatcg

SEQ ID NO: 661815 - DNA, 33 bp, Homo sapien
catgcaggagcaagtaaaagaacatggcaagca

SEQ ID NO: 661816 - DNA, 33 bp, Homo sapien
catgcaggagcaagtagaagaacatggcaagca

SEQ ID NO: 661817 - DNA, 33 bp, Homo sapien
ctgcagctcctatgggcactggacaaatctgcc

SEQ ID NO: 661818 - DNA, 33 bp, Homo sapien
ctgcagctcctatgggtactggacaaatctgcc

SEQ ID NO: 661819 - DNA, 33 bp, Homo sapien
caggcaaggtctcctccagctggcacttgtaca

SEQ ID NO: 661820 - DNA, 33 bp, Homo sapien
caggcaaggtctcctctagctggcacttgtaca

SEQ ID NO: 661821 - DNA, 33 bp, Homo sapien
tggaacccttggaacactcactttggagtaagc

SEQ ID NO: 661822 - DNA, 33 bp, Homo sapien
tggaacccttggaacattcactttggagtaagc

SEQ ID NO: 661823 - DNA, 33 bp, Homo sapien
aactgtgctttatgtaagaattgaacaggaata

SEQ ID NO: 661824 - DNA, 33 bp, Homo sapien
aactgtgctttatgtaggaattgaacaggaata

SEQ ID NO: 661825 - DNA, 33 bp, Homo sapien
gctcatggatcttttggagaattggatgaaagt

SEQ ID NO: 661826 - DNA, 33 bp, Homo sapien
gctcatggatcttttgtagaattggatgaaagt

SEQ ID NO: 661827 - DNA, 33 bp, Homo sapien
ctgtgcctgaagtgcccaacattgtgctctgta

SEQ ID NO: 661828 - DNA, 33 bp, Homo sapien
ctgtgcctgaagtgcctaacattgtgctctgta

SEQ ID NO: 661829 - DNA, 33 bp, Homo sapien
cactagtcaaagggacagctttctcccataagt

SEQ ID NO: 661830 - DNA, 33 bp, Homo sapien
cactagtcaaagggacggctttctcccataagt

SEQ ID NO: 661831 - DNA, 33 bp, Homo sapien
cagcatggcagactgacgccaggttcccaggag

SEQ ID NO: 661832 - DNA, 33 bp, Homo sapien
cagcatggcagactgatgccaggttcccaggag

SEQ ID NO: 661833 - DNA, 33 bp, Homo sapien
tgtttttattgattgagcctcagatggatgggt

SEQ ID NO: 661834 - DNA, 33 bp, Homo sapien
tgtttttattgattgatcctcagatggatgggt

SEQ ID NO: 661835 - DNA, 33 bp, Homo sapien
ttaactaagactggaaaccctctcaggtctgca

SEQ ID NO: 661836 - DNA, 33 bp, Homo sapien
ttaactaagactggaacccctctcaggtctgca

SEQ ID NO: 661837 - DNA, 33 bp, Homo sapien
gttaatgcgatgattaaatggcctggatactca

SEQ ID NO: 661838 - DNA, 33 bp, Homo sapien
gttaatgcgatgattacatggcctggatactca

SEQ ID NO: 661839 - DNA, 33 bp, Homo sapien
agggctattgatgaaaatataaggcagtaattc

SEQ ID NO: 661840 - DNA, 33 bp, Homo sapien
agggctattgatgaaactataaggcagtaattc

SEQ ID NO: 661841 - DNA, 33 bp, Homo sapien
tgaacatttggagatcacagactcctttgagag

SEQ ID NO: 661842 - DNA, 33 bp, Homo sapien
tgaacatttggagatcgcagactcctttgagag

SEQ ID NO: 661843 - DNA, 33 bp, Homo sapien
tactagccattagttacaagtaagcaatagcca

SEQ ID NO: 661844 - DNA, 33 bp, Homo sapien
tactagccattagttataagtaagcaatagcca

SEQ ID NO: 661845 - DNA, 33 bp, Homo sapien
aagaggcccttgtactcaaggattcaccaactt

SEQ ID NO: 661846 - DNA, 33 bp, Homo sapien
aagaggcccttgtacttaaggattcaccaactt

SEQ ID NO: 661847 - DNA, 33 bp, Homo sapien
cttcagagcccttctaccaggtgtgcaagacag

SEQ ID NO: 661848 - DNA, 33 bp, Homo sapien
cttcagagcccttctatcaggtgtgcaagacag

SEQ ID NO: 661849 - DNA, 33 bp, Homo sapien
gtttatacatatggacgcttccctcctttacaa

SEQ ID NO: 661850 - DNA, 33 bp, Homo sapien
gtttatacatatggactcttccctcctttacaa

SEQ ID NO: 661851 - DNA, 33 bp, Homo sapien
ccccagaacaagagaacctcctattgcctttct

SEQ ID NO: 661852 - DNA, 33 bp, Homo sapien
ccccagaacaagagaatctcctattgcctttct

SEQ ID NO: 661853 - DNA, 33 bp, Homo sapien
cttcacatgaaggagaactttccaaaataagta

SEQ ID NO: 661854 - DNA, 33 bp, Homo sapien
cttcacatgaaggagatctttccaaaataagta

SEQ ID NO: 661855 - DNA, 33 bp, Homo sapien
cttttacagacatcaaagcaatagctcagagca

SEQ ID NO: 661856 - DNA, 33 bp, Homo sapien
cttttacagacatcaaggcaatagctcagagca

SEQ ID NO: 661857 - DNA, 33 bp, Homo sapien
ccaggtgtttttgataataagccaaagtctgta

SEQ ID NO: 661858 - DNA, 33 bp, Homo sapien
ccaggtgtttttgatagtaagccaaagtctgta

SEQ ID NO: 661859 - DNA, 33 bp, Homo sapien
atttctgcttatctagaattgcccaaaacagtc

SEQ ID NO: 661860 - DNA, 33 bp, Homo sapien
atttctgcttatctagcattgcccaaaacagtc

SEQ ID NO: 661861 - DNA, 33 bp, Homo sapien
attacttgctgcaggacagaatgacattttgag

SEQ ID NO: 661862 - DNA, 33 bp, Homo sapien
attacttgctgcaggagagaatgacattttgag

SEQ ID NO: 661863 - DNA, 33 bp, Homo sapien
tgtgaagcttaccttccattgggaggagacaga

SEQ ID NO: 661864 - DNA, 33 bp, Homo sapien
tgtgaagcttaccttctattgggaggagacaga

SEQ ID NO: 661865 - DNA, 33 bp, Homo sapien
gggctacagaattttccaagcgtctcctgttat

SEQ ID NO: 661866 - DNA, 33 bp, Homo sapien
gggctacagaattttctaagcgtctcctgttat

SEQ ID NO: 661867 - DNA, 33 bp, Homo sapien
tgctggtgggagctacagatcagtactggacaa

SEQ ID NO: 661868 - DNA, 33 bp, Homo sapien
tgctggtgggagctacggatcagtactggacaa

SEQ ID NO: 661869 - DNA, 33 bp, Homo sapien
gggtagaattgttagaacttagttgaaaggagg

SEQ ID NO: 661870 - DNA, 33 bp, Homo sapien
gggtagaattgttagaccttagttgaaaggagg

SEQ ID NO: 661871 - DNA, 33 bp, Homo sapien
gctttacctatctctccactctgacatactttg

SEQ ID NO: 661872 - DNA, 33 bp, Homo sapien
gctttacctatctctctactctgacatactttg

SEQ ID NO: 661873 - DNA, 33 bp, Homo sapien
aaatataagtgtaggaaaaaagttgttactatg

SEQ ID NO: 661874 - DNA, 33 bp, Homo sapien
aaatataagtgtaggagaaaagttgttactatg

SEQ ID NO: 661875 - DNA, 33 bp, Homo sapien
ccaaactggaaattacagaggatacactatggg

SEQ ID NO: 661876 - DNA, 33 bp, Homo sapien
ccaaactggaaattacggaggatacactatggg

SEQ ID NO: 661877 - DNA, 33 bp, Homo sapien
cagattaaaatcacaaatctaaattcaatgtgt

SEQ ID NO: 661878 - DNA, 33 bp, Homo sapien
cagattaaaatcacaagtctaaattcaatgtgt

SEQ ID NO: 661879 - DNA, 33 bp, Homo sapien
attttattctgttgtgaatgtcctgcttcttca

SEQ ID NO: 661880 - DNA, 33 bp, Homo sapien
attttattctgttgtggatgtcctgcttcttca

SEQ ID NO: 661881 - DNA, 33 bp, Homo sapien
ttgccactgatttgataacagagcaacctatga

SEQ ID NO: 661882 - DNA, 33 bp, Homo sapien
ttgccactgatttgatgacagagcaacctatga

SEQ ID NO: 661883 - DNA, 33 bp, Homo sapien
atgtcctagtcagttacattattgaacaagctc

SEQ ID NO: 661884 - DNA, 33 bp, Homo sapien
atgtcctagtcagttatattattgaacaagctc

SEQ ID NO: 661885 - DNA, 33 bp, Homo sapien
agtctggtattggtaacgctgaaaatgtgcagt

SEQ ID NO: 661886 - DNA, 33 bp, Homo sapien
agtctggtattggtaatgctgaaaatgtgcagt

SEQ ID NO: 661887 - DNA, 33 bp, Homo sapien
tatagtctgctttataaccctaatacaacagac

SEQ ID NO: 661888 - DNA, 33 bp, Homo sapien
tatagtctgctttatacccctaatacaacagac

SEQ ID NO: 661889 - DNA, 33 bp, Homo sapien
agaggataactagaatcaagtgcatggagagct

SEQ ID NO: 661890 - DNA, 33 bp, Homo sapien
agaggataactagaattaagtgcatggagagct

SEQ ID NO: 661891 - DNA, 33 bp, Homo sapien
agcctacaatacgcacagtgccataaaagccat

SEQ ID NO: 661892 - DNA, 33 bp, Homo sapien
agcctacaatacgcacggtgccataaaagccat

SEQ ID NO: 661893 - DNA, 33 bp, Homo sapien
gcctgaatatttgccaaaagcacataactgctt

SEQ ID NO: 661894 - DNA, 33 bp, Homo sapien
gcctgaatatttgccagaagcacataactgctt

SEQ ID NO: 661895 - DNA, 33 bp, Homo sapien
ctggatgaaactgagcaaggcctagagactaag

SEQ ID NO: 661896 - DNA, 33 bp, Homo sapien
ctggatgaaactgagcgaggcctagagactaag

SEQ ID NO: 661897 - DNA, 33 bp, Homo sapien
ccataacagactttaaaccagcgataatgcaac

SEQ ID NO: 661898 - DNA, 33 bp, Homo sapien
ccataacagactttaagccagcgataatgcaac

SEQ ID NO: 661899 - DNA, 33 bp, Homo sapien
gcctctcatatacaacggttgaatttcactcca

SEQ ID NO: 661900 - DNA, 33 bp, Homo sapien
gcctctcatatacaactgttgaatttcactcca

SEQ ID NO: 661901 - DNA, 33 bp, Homo sapien
tgaagaattaaggaagccctatgaacaacttta

SEQ ID NO: 661902 - DNA, 33 bp, Homo sapien
tgaagaattaaggaagtcctatgaacaacttta

SEQ ID NO: 661903 - DNA, 33 bp, Homo sapien
aaaatgtaggctaaaacggcatacattacacag

SEQ ID NO: 661904 - DNA, 33 bp, Homo sapien
aaaatgtaggctaaaatggcatacattacacag

SEQ ID NO: 661905 - DNA, 33 bp, Homo sapien
catcaagtatttattgaatgcactctagcactt

SEQ ID NO: 661906 - DNA, 33 bp, Homo sapien
catcaagtatttattgtatgcactctagcactt

SEQ ID NO: 661907 - DNA, 33 bp, Homo sapien
ctgaccaactgtcaaccgaagttctgaatagat

SEQ ID NO: 661908 - DNA, 33 bp, Homo sapien
ctgaccaactgtcaactgaagttctgaatagat

SEQ ID NO: 661909 - DNA, 33 bp, Homo sapien
ttcccatatcacctctaaagtaagccctttaat

SEQ ID NO: 661910 - DNA, 33 bp, Homo sapien
ttcccatatcacctctgaagtaagccctttaat

SEQ ID NO: 661911 - DNA, 33 bp, Homo sapien
gcagctagctcctttacggtttctgtagacctt

SEQ ID NO: 661912 - DNA, 33 bp, Homo sapien
gcagctagctcctttatggtttctgtagacctt

SEQ ID NO: 661913 - DNA, 33 bp, Homo sapien
tccttgcattcaaagacctgagggtgaatcctt

SEQ ID NO: 661914 - DNA, 33 bp, Homo sapien
tccttgcattcaaagatctgagggtgaatcctt

SEQ ID NO: 661915 - DNA, 33 bp, Homo sapien
aacatgtcagtgataaactcctactttgaactc

SEQ ID NO: 661916 - DNA, 33 bp, Homo sapien
aacatgtcagtgataacctcctactttgaactc

SEQ ID NO: 661917 - DNA, 33 bp, Homo sapien
ctgggaaagtggagaacggttttgagtagttga

SEQ ID NO: 661918 - DNA, 33 bp, Homo sapien
ctgggaaagtggagaatggttttgagtagttga

SEQ ID NO: 661919 - DNA, 33 bp, Homo sapien
accatagatagcaaaacgataggcgctcagtaa

SEQ ID NO: 661920 - DNA, 33 bp, Homo sapien
accatagatagcaaaatgataggcgctcagtaa

SEQ ID NO: 661921 - DNA, 33 bp, Homo sapien
tgagctgtgattgcaccaacgcactctagccca

SEQ ID NO: 661922 - DNA, 33 bp, Homo sapien
tgagctgtgattgcactaacgcactctagccca

SEQ ID NO: 661923 - DNA, 33 bp, Homo sapien
ccacttctacttaacactgtactacaggttcta

SEQ ID NO: 661924 - DNA, 33 bp, Homo sapien
ccacttctacttaacattgtactacaggttcta

SEQ ID NO: 661925 - DNA, 33 bp, Homo sapien
catatacccttcaccccgattcttcattattat

SEQ ID NO: 661926 - DNA, 33 bp, Homo sapien
catatacccttcaccctgattcttcattattat

SEQ ID NO: 661927 - DNA, 33 bp, Homo sapien
ccctaagacctgagtacacaattcggtggccag

SEQ ID NO: 661928 - DNA, 33 bp, Homo sapien
ccctaagacctgagtatacaattcggtggccag

SEQ ID NO: 661929 - DNA, 33 bp, Homo sapien
tccttagatttctctgcagtgtgtgtaggccaa

SEQ ID NO: 661930 - DNA, 33 bp, Homo sapien
tccttagatttctctggagtgtgtgtaggccaa

SEQ ID NO: 661931 - DNA, 33 bp, Homo sapien
ctgccatttaacagatgatcagaaattgcaaac

SEQ ID NO: 661932 - DNA, 33 bp, Homo sapien
ctgccatttaacagattatcagaaattgcaaac

SEQ ID NO: 661933 - DNA, 33 bp, Homo sapien
aatgtgcatgatgctgaagtcctaatccagtac

SEQ ID NO: 661934 - DNA, 33 bp, Homo sapien
aatgtgcatgatgctgcagtcctaatccagtac

SEQ ID NO: 661935 - DNA, 33 bp, Homo sapien
aagttattctaaccaactgaagtataccttcta

SEQ ID NO: 661936 - DNA, 33 bp, Homo sapien
aagttattctaaccaagtgaagtataccttcta

SEQ ID NO: 661937 - DNA, 33 bp, Homo sapien
gtagacagctgacagacgagtttaccaggttca

SEQ ID NO: 661938 - DNA, 33 bp, Homo sapien
gtagacagctgacagatgagtttaccaggttca

SEQ ID NO: 661939 - DNA, 33 bp, Homo sapien
tgaacagacaacatctaaaaggtgacagatcaa

SEQ ID NO: 661940 - DNA, 33 bp, Homo sapien
tgaacagacaacatctgaaaggtgacagatcaa

SEQ ID NO: 661941 - DNA, 33 bp, Homo sapien
ggtattggtgtcatagcaaggaatattcatgtt

SEQ ID NO: 661942 - DNA, 33 bp, Homo sapien
ggtattggtgtcataggaaggaatattcatgtt

SEQ ID NO: 661943 - DNA, 33 bp, Homo sapien
gttattagatattctgaaactgttattcaaagt

SEQ ID NO: 661944 - DNA, 33 bp, Homo sapien
gttattagatattctgcaactgttattcaaagt

SEQ ID NO: 661945 - DNA, 33 bp, Homo sapien
acataggtgtaccctgaatatagcgcaagttta

SEQ ID NO: 661946 - DNA, 33 bp, Homo sapien
acataggtgtaccctggatatagcgcaagttta

SEQ ID NO: 661947 - DNA, 33 bp, Homo sapien
tgtcaaatggttttacagaacagaaacattcca

SEQ ID NO: 661948 - DNA, 33 bp, Homo sapien
tgtcaaatggttttacggaacagaaacattcca

SEQ ID NO: 661949 - DNA, 33 bp, Homo sapien
gagggtacaggaagcacaaaagggactcaatag

SEQ ID NO: 661950 - DNA, 33 bp, Homo sapien
gagggtacaggaagcagaaaagggactcaatag

SEQ ID NO: 661951 - DNA, 33 bp, Homo sapien
atatgcagttattcatgatattgtcccctatac

SEQ ID NO: 661952 - DNA, 33 bp, Homo sapien
atatgcagttattcattatattgtcccctatac

SEQ ID NO: 661953 - DNA, 33 bp, Homo sapien
tattctttcttgaagccactgtgtacctaatgt

SEQ ID NO: 661954 - DNA, 33 bp, Homo sapien
tattctttcttgaagctactgtgtacctaatgt

SEQ ID NO: 661955 - DNA, 33 bp, Homo sapien
accatgggtctgataccgggaaactttttttgc

SEQ ID NO: 661956 - DNA, 33 bp, Homo sapien
accatgggtctgatactgggaaactttttttgc

SEQ ID NO: 661957 - DNA, 33 bp, Homo sapien
gctcttcttatcttggcactaatcagcagcttt

SEQ ID NO: 661958 - DNA, 33 bp, Homo sapien
gctcttcttatcttgggactaatcagcagcttt

SEQ ID NO: 661959 - DNA, 33 bp, Homo sapien
aattcagtatcccacactattttctggttgtac

SEQ ID NO: 661960 - DNA, 33 bp, Homo sapien
aattcagtatcccacagtattttctggttgtac

SEQ ID NO: 661961 - DNA, 33 bp, Homo sapien
agtcaacagcttccaagtgcaaaactctcactt

SEQ ID NO: 661962 - DNA, 33 bp, Homo sapien
agtcaacagcttccaattgcaaaactctcactt

SEQ ID NO: 661963 - DNA, 33 bp, Homo sapien
agcagaatacatcaaaatacacaaactgctaaa

SEQ ID NO: 661964 - DNA, 33 bp, Homo sapien
agcagaatacatcaaactacacaaactgctaaa

SEQ ID NO: 661965 - DNA, 33 bp, Homo sapien
taactaacagtacttacgagaaaactgtctttt

SEQ ID NO: 661966 - DNA, 33 bp, Homo sapien
taactaacagtacttatgagaaaactgtctttt

SEQ ID NO: 661967 - DNA, 33 bp, Homo sapien
tggacatctgtttacaaaaatagctcaactatc

SEQ ID NO: 661968 - DNA, 33 bp, Homo sapien
tggacatctgtttacagaaatagctcaactatc

SEQ ID NO: 661969 - DNA, 33 bp, Homo sapien
actaaatatgtcacacaaaaaaaacacttttta

SEQ ID NO: 661970 - DNA, 33 bp, Homo sapien
actaaatatgtcacacgaaaaaaacacttttta

SEQ ID NO: 661971 - DNA, 33 bp, Homo sapien
aatgagcaaaattacacgaaaacacttgctaac

SEQ ID NO: 661972 - DNA, 33 bp, Homo sapien
aatgagcaaaattacatgaaaacacttgctaac

SEQ ID NO: 661973 - DNA, 33 bp, Homo sapien
aaacaaaaggcatcaaagaatggcaagaattac

SEQ ID NO: 661974 - DNA, 33 bp, Homo sapien
aaacaaaaggcatcaaggaatggcaagaattac

SEQ ID NO: 661975 - DNA, 33 bp, Homo sapien
ttccttgtaggctgagcaccaaagagagatggg

SEQ ID NO: 661976 - DNA, 33 bp, Homo sapien
ttccttgtaggctgagtaccaaagagagatggg

SEQ ID NO: 661977 - DNA, 33 bp, Homo sapien
gtgttaacttgggagacgttaaagaagtggaaa

SEQ ID NO: 661978 - DNA, 33 bp, Homo sapien
gtgttaacttgggagatgttaaagaagtggaaa

SEQ ID NO: 661979 - DNA, 33 bp, Homo sapien
ggctgtcacattccaaaccatttgtttacaact

SEQ ID NO: 661980 - DNA, 33 bp, Homo sapien
ggctgtcacattccaagccatttgtttacaact

SEQ ID NO: 661981 - DNA, 33 bp, Homo sapien
attgaatgtacatgaaagaatgttttgtcttgt

SEQ ID NO: 661982 - DNA, 33 bp, Homo sapien
attgaatgtacatgaaggaatgttttgtcttgt

SEQ ID NO: 661983 - DNA, 33 bp, Homo sapien
gtcaaaagatccccaaaattatcatccaaaaca

SEQ ID NO: 661984 - DNA, 33 bp, Homo sapien
gtcaaaagatccccaagattatcatccaaaaca

SEQ ID NO: 661985 - DNA, 33 bp, Homo sapien
aagaaaggatagaaaccagcttggcttatacat

SEQ ID NO: 661986 - DNA, 33 bp, Homo sapien
aagaaaggatagaaactagcttggcttatacat

SEQ ID NO: 661987 - DNA, 33 bp, Homo sapien
tatctgtaaaacacaacgttggattccaacatt

SEQ ID NO: 661988 - DNA, 33 bp, Homo sapien
tatctgtaaaacacaaggttggattccaacatt

SEQ ID NO: 661989 - DNA, 33 bp, Homo sapien
tataaaatatttctgcaatacagctggaataat

SEQ ID NO: 661990 - DNA, 33 bp, Homo sapien
tataaaatatttctgcgatacagctggaataat

SEQ ID NO: 661991 - DNA, 33 bp, Homo sapien
gagaaagattttagggaccaggctagaagtggc

SEQ ID NO: 661992 - DNA, 33 bp, Homo sapien
gagaaagattttagggtccaggctagaagtggc

SEQ ID NO: 661993 - DNA, 33 bp, Homo sapien
tgttgacactttccaacgtagtttgtatttcat

SEQ ID NO: 661994 - DNA, 33 bp, Homo sapien
tgttgacactttccaatgtagtttgtatttcat

SEQ ID NO: 661995 - DNA, 33 bp, Homo sapien
taatcagtcgcagttcacctcctttaacaggtg

SEQ ID NO: 661996 - DNA, 33 bp, Homo sapien
taatcagtcgcagttcgcctcctttaacaggtg

SEQ ID NO: 661997 - DNA, 33 bp, Homo sapien
caatttcaagtcccaaaatcttctggctggaag

SEQ ID NO: 661998 - DNA, 33 bp, Homo sapien
caatttcaagtcccaatatcttctggctggaag

SEQ ID NO: 661999 - DNA, 33 bp, Homo sapien
cttacatgagtaaaaaacttagtaagagctgct

SEQ ID NO: 662000 - DNA, 33 bp, Homo sapien
cttacatgagtaaaaaccttagtaagagctgct

SEQ ID NO: 662001 - DNA, 33 bp, Homo sapien
taacccattgcttaaccgactccaattctctac

SEQ ID NO: 662002 - DNA, 33 bp, Homo sapien
taacccattgcttaactgactccaattctctac

SEQ ID NO: 662003 - DNA, 33 bp, Homo sapien
agggtactggaacaaacggatatctataaacaa

SEQ ID NO: 662004 - DNA, 33 bp, Homo sapien
agggtactggaacaaatggatatctataaacaa

SEQ ID NO: 662005 - DNA, 33 bp, Homo sapien
ttgttgtttctaaatccatatgagaattgacaa

SEQ ID NO: 662006 - DNA, 33 bp, Homo sapien
ttgttgtttctaaatctatatgagaattgacaa

SEQ ID NO: 662007 - DNA, 33 bp, Homo sapien
atagagacacagtgaaatccaactaaatgtcag

SEQ ID NO: 662008 - DNA, 33 bp, Homo sapien
atagagacacagtgaattccaactaaatgtcag

SEQ ID NO: 662009 - DNA, 33 bp, Homo sapien
tacaaagatattcagtcaaaagtcttgttccca

SEQ ID NO: 662010 - DNA, 33 bp, Homo sapien
tacaaagatattcagttaaaagtcttgttccca

SEQ ID NO: 662011 - DNA, 33 bp, Homo sapien
agtgggtacatattagaaaaaagagctagtcag

SEQ ID NO: 662012 - DNA, 33 bp, Homo sapien
agtgggtacatattagtaaaaagagctagtcag

SEQ ID NO: 662013 - DNA, 33 bp, Homo sapien
gagctaaacgattttaccatacagaggtagaga

SEQ ID NO: 662014 - DNA, 33 bp, Homo sapien
gagctaaacgattttatcatacagaggtagaga

SEQ ID NO: 662015 - DNA, 33 bp, Homo sapien
acaattttgtcccccaatctactggcagctccc

SEQ ID NO: 662016 - DNA, 33 bp, Homo sapien
acaattttgtcccccagtctactggcagctccc

SEQ ID NO: 662017 - DNA, 33 bp, Homo sapien
ggacacaagtatgcccagagtgtacccagacac

SEQ ID NO: 662018 - DNA, 33 bp, Homo sapien
ggacacaagtatgccccgagtgtacccagacac

SEQ ID NO: 662019 - DNA, 33 bp, Homo sapien
tcatgcttatgttaacactaaattttgggtacc

SEQ ID NO: 662020 - DNA, 33 bp, Homo sapien
tcatgcttatgttaacgctaaattttgggtacc

SEQ ID NO: 662021 - DNA, 33 bp, Homo sapien
gcttgcagctattgaagagtgataaggacacag

SEQ ID NO: 662022 - DNA, 33 bp, Homo sapien
gcttgcagctattgaatagtgataaggacacag

SEQ ID NO: 662023 - DNA, 33 bp, Homo sapien
agtcaggaatgacttgagtagtcaaagggcatg

SEQ ID NO: 662024 - DNA, 33 bp, Homo sapien
agtcaggaatgacttgcgtagtcaaagggcatg

SEQ ID NO: 662025 - DNA, 33 bp, Homo sapien
ctgatttagaaaggacagagcttaggaatcaag

SEQ ID NO: 662026 - DNA, 33 bp, Homo sapien
ctgatttagaaaggacggagcttaggaatcaag

SEQ ID NO: 662027 - DNA, 33 bp, Homo sapien
ggagatctggcattagaataacagagtggaggg

SEQ ID NO: 662028 - DNA, 33 bp, Homo sapien
ggagatctggcattaggataacagagtggaggg

SEQ ID NO: 662029 - DNA, 33 bp, Homo sapien
taaccttcttccaccacagagctctgagaatta

SEQ ID NO: 662030 - DNA, 33 bp, Homo sapien
taaccttcttccaccagagagctctgagaatta

SEQ ID NO: 662031 - DNA, 33 bp, Homo sapien
tgcaaatcaggaagaaagggctcaggcaaccgc

SEQ ID NO: 662032 - DNA, 33 bp, Homo sapien
tgcaaatcaggaagaacgggctcaggcaaccgc

SEQ ID NO: 662033 - DNA, 33 bp, Homo sapien
aatctagatttttgagcaggtcttgagttgtgt

SEQ ID NO: 662034 - DNA, 33 bp, Homo sapien
aatctagatttttgagtaggtcttgagttgtgt

SEQ ID NO: 662035 - DNA, 33 bp, Homo sapien
gctggattaagaatgacggacaggagaactacc

SEQ ID NO: 662036 - DNA, 33 bp, Homo sapien
gctggattaagaatgatggacaggagaactacc

SEQ ID NO: 662037 - DNA, 33 bp, Homo sapien
agaaagttaatcccaacagcatttagacagcat

SEQ ID NO: 662038 - DNA, 33 bp, Homo sapien
agaaagttaatcccaagagcatttagacagcat

SEQ ID NO: 662039 - DNA, 33 bp, Homo sapien
aagaagcagtgcccgagccaagcaaaggaatag

SEQ ID NO: 662040 - DNA, 33 bp, Homo sapien
aagaagcagtgcccgatccaagcaaaggaatag

SEQ ID NO: 662041 - DNA, 33 bp, Homo sapien
tgagcaccagtaggaaactctgtgtctcccaga

SEQ ID NO: 662042 - DNA, 33 bp, Homo sapien
tgagcaccagtaggaacctctgtgtctcccaga

SEQ ID NO: 662043 - DNA, 33 bp, Homo sapien
agtgggagaacacaaactaatacagctaaaata

SEQ ID NO: 662044 - DNA, 33 bp, Homo sapien
agtgggagaacacaaattaatacagctaaaata

SEQ ID NO: 662045 - DNA, 33 bp, Homo sapien
ttgatttgtaggaaaacgaaaacattgtgaatc

SEQ ID NO: 662046 - DNA, 33 bp, Homo sapien
ttgatttgtaggaaaatgaaaacattgtgaatc

SEQ ID NO: 662047 - DNA, 33 bp, Homo sapien
tttatcttgcatttaactcttaccaacaacact

SEQ ID NO: 662048 - DNA, 33 bp, Homo sapien
tttatcttgcatttaattcttaccaacaacact

SEQ ID NO: 662049 - DNA, 33 bp, Homo sapien
cactccaagatcttcaagctttcaggcaatgca

SEQ ID NO: 662050 - DNA, 33 bp, Homo sapien
cactccaagatcttcacgctttcaggcaatgca

SEQ ID NO: 662051 - DNA, 33 bp, Homo sapien
tgggtaaagaaaattaccagcaacaggaaagga

SEQ ID NO: 662052 - DNA, 33 bp, Homo sapien
tgggtaaagaaaattatcagcaacaggaaagga

SEQ ID NO: 662053 - DNA, 33 bp, Homo sapien
ttaacttgctgctggacagaaactttgattagg

SEQ ID NO: 662054 - DNA, 33 bp, Homo sapien
ttaacttgctgctggatagaaactttgattagg

SEQ ID NO: 662055 - DNA, 33 bp, Homo sapien
tttctgaagcctttcacatcacgtaaaactcat

SEQ ID NO: 662056 - DNA, 33 bp, Homo sapien
tttctgaagcctttcatatcacgtaaaactcat

SEQ ID NO: 662057 - DNA, 33 bp, Homo sapien
cagtctgagtaactgaatattaaagtggaagtt

SEQ ID NO: 662058 - DNA, 33 bp, Homo sapien
cagtctgagtaactgagtattaaagtggaagtt

SEQ ID NO: 662059 - DNA, 33 bp, Homo sapien
aaggtctcccaccatcaataaatgctccagttt

SEQ ID NO: 662060 - DNA, 33 bp, Homo sapien
aaggtctcccaccatcgataaatgctccagttt

SEQ ID NO: 662061 - DNA, 33 bp, Homo sapien
gttaaaccatcatttaccaagtatgccagttgc

SEQ ID NO: 662062 - DNA, 33 bp, Homo sapien
gttaaaccatcatttatcaagtatgccagttgc

SEQ ID NO: 662063 - DNA, 33 bp, Homo sapien
gaattacagcttaatcaatgttctggactctga

SEQ ID NO: 662064 - DNA, 33 bp, Homo sapien
gaattacagcttaatccatgttctggactctga

SEQ ID NO: 662065 - DNA, 33 bp, Homo sapien
cacagacaagggtaaaataaagactgggtggaa

SEQ ID NO: 662066 - DNA, 33 bp, Homo sapien
cacagacaagggtaaactaaagactgggtggaa

SEQ ID NO: 662067 - DNA, 33 bp, Homo sapien
ttggtgcgtgtgtatgcagaggcgaggacttta

SEQ ID NO: 662068 - DNA, 33 bp, Homo sapien
ttggtgcgtgtgtatgtagaggcgaggacttta

SEQ ID NO: 662069 - DNA, 33 bp, Homo sapien
cactcattctcatctacatctggcaaagtgcag

SEQ ID NO: 662070 - DNA, 33 bp, Homo sapien
cactcattctcatctatatctggcaaagtgcag

SEQ ID NO: 662071 - DNA, 33 bp, Homo sapien
cacacccttcctactccagacttttgataaagc

SEQ ID NO: 662072 - DNA, 33 bp, Homo sapien
cacacccttcctactctagacttttgataaagc

SEQ ID NO: 662073 - DNA, 33 bp, Homo sapien
tatgttgagaaggcaacaaatttaagatttaaa

SEQ ID NO: 662074 - DNA, 33 bp, Homo sapien
tatgttgagaaggcaataaatttaagatttaaa

SEQ ID NO: 662075 - DNA, 33 bp, Homo sapien
accacagtagcaaagcaaggaaaatgacccttt

SEQ ID NO: 662076 - DNA, 33 bp, Homo sapien
accacagtagcaaagcgaggaaaatgacccttt

SEQ ID NO: 662077 - DNA, 33 bp, Homo sapien
cgttcatttaaatgaacggaagagtgattatca

SEQ ID NO: 662078 - DNA, 33 bp, Homo sapien
cgttcatttaaatgaatggaagagtgattatca

SEQ ID NO: 662079 - DNA, 33 bp, Homo sapien
gttttttacaaaggtgccaagaaaattcaacag

SEQ ID NO: 662080 - DNA, 33 bp, Homo sapien
gttttttacaaaggtgtcaagaaaattcaacag

SEQ ID NO: 662081 - DNA, 33 bp, Homo sapien
acagttccatgagtacggacaaatatgttgatg

SEQ ID NO: 662082 - DNA, 33 bp, Homo sapien
acagttccatgagtactgacaaatatgttgatg

SEQ ID NO: 662083 - DNA, 33 bp, Homo sapien
agtggactcaagttgacgacttaagcttctggc

SEQ ID NO: 662084 - DNA, 33 bp, Homo sapien
agtggactcaagttgatgacttaagcttctggc

SEQ ID NO: 662085 - DNA, 33 bp, Homo sapien
aaatgtctgccttgaaagtagctatcagaaagt

SEQ ID NO: 662086 - DNA, 33 bp, Homo sapien
aaatgtctgccttgaatgtagctatcagaaagt

SEQ ID NO: 662087 - DNA, 33 bp, Homo sapien
tacttggggaattaaagataaagggcctgtgtt

SEQ ID NO: 662088 - DNA, 33 bp, Homo sapien
tacttggggaattaaatataaagggcctgtgtt

SEQ ID NO: 662089 - DNA, 33 bp, Homo sapien
tgtgggtatgaatcgacggtgtccctggagtgt

SEQ ID NO: 662090 - DNA, 33 bp, Homo sapien
tgtgggtatgaatcgatggtgtccctggagtgt

SEQ ID NO: 662091 - DNA, 33 bp, Homo sapien
cttgctccctatgtcactactcctcacccttcc

SEQ ID NO: 662092 - DNA, 33 bp, Homo sapien
cttgctccctatgtcattactcctcacccttcc

SEQ ID NO: 662093 - DNA, 33 bp, Homo sapien
tctgcttctcacataacgatagggtacaattca

SEQ ID NO: 662094 - DNA, 33 bp, Homo sapien
tctgcttctcacataatgatagggtacaattca

SEQ ID NO: 662095 - DNA, 33 bp, Homo sapien
actgagggatggcctcactcaaaatggtggtct

SEQ ID NO: 662096 - DNA, 33 bp, Homo sapien
actgagggatggcctcgctcaaaatggtggtct

SEQ ID NO: 662097 - DNA, 33 bp, Homo sapien
gagaactaaaggtcaacatattatgaatctcta

SEQ ID NO: 662098 - DNA, 33 bp, Homo sapien
gagaactaaaggtcaatatattatgaatctcta

SEQ ID NO: 662099 - DNA, 33 bp, Homo sapien
ctgttaatccagagaaagacctattttgctgat

SEQ ID NO: 662100 - DNA, 33 bp, Homo sapien
ctgttaatccagagaatgacctattttgctgat

SEQ ID NO: 662101 - DNA, 33 bp, Homo sapien
gatggaagcagtataccattctcacttgtttta

SEQ ID NO: 662102 - DNA, 33 bp, Homo sapien
gatggaagcagtatactattctcacttgtttta

SEQ ID NO: 662103 - DNA, 33 bp, Homo sapien
aagacacgagatgtgcactaagtttctgaaaac

SEQ ID NO: 662104 - DNA, 33 bp, Homo sapien
aagacacgagatgtgcgctaagtttctgaaaac

SEQ ID NO: 662105 - DNA, 33 bp, Homo sapien
tcaattctataggcaaaaaatacatcctttggt

SEQ ID NO: 662106 - DNA, 33 bp, Homo sapien
tcaattctataggcaataaatacatcctttggt

SEQ ID NO: 662107 - DNA, 33 bp, Homo sapien
ctgctgtatagtctccagcaagaggatattgtg

SEQ ID NO: 662108 - DNA, 33 bp, Homo sapien
ctgctgtatagtctccggcaagaggatattgtg

SEQ ID NO: 662109 - DNA, 33 bp, Homo sapien
tttctgctcctgatgacaccattatcattttta

SEQ ID NO: 662110 - DNA, 33 bp, Homo sapien
tttctgctcctgatgagaccattatcattttta

SEQ ID NO: 662111 - DNA, 33 bp, Homo sapien
agctttctatgcagtacacgtggtacgacccac

SEQ ID NO: 662112 - DNA, 33 bp, Homo sapien
agctttctatgcagtatacgtggtacgacccac

SEQ ID NO: 662113 - DNA, 33 bp, Homo sapien
ataactgcgtcgtttcaatgcacagtgcggtga

SEQ ID NO: 662114 - DNA, 33 bp, Homo sapien
ataactgcgtcgtttcgatgcacagtgcggtga

SEQ ID NO: 662115 - DNA, 33 bp, Homo sapien
aaatgaaacaatgagcaaactaagatgcaaata

SEQ ID NO: 662116 - DNA, 33 bp, Homo sapien
aaatgaaacaatgagcgaactaagatgcaaata

SEQ ID NO: 662117 - DNA, 33 bp, Homo sapien
taaattatccaattcaatcctcgtatactttgt

SEQ ID NO: 662118 - DNA, 33 bp, Homo sapien
taaattatccaattcagtcctcgtatactttgt

SEQ ID NO: 662119 - DNA, 33 bp, Homo sapien
ggcaaacagatttaaaataaagccaaaacagta

SEQ ID NO: 662120 - DNA, 33 bp, Homo sapien
ggcaaacagatttaaagtaaagccaaaacagta

SEQ ID NO: 662121 - DNA, 33 bp, Homo sapien
attaaaactactgtaaacactactgttccctgc

SEQ ID NO: 662122 - DNA, 33 bp, Homo sapien
attaaaactactgtaagcactactgttccctgc

SEQ ID NO: 662123 - DNA, 33 bp, Homo sapien
atctatgtcttaggtacgagtctgtaaaataca

SEQ ID NO: 662124 - DNA, 33 bp, Homo sapien
atctatgtcttaggtatgagtctgtaaaataca

SEQ ID NO: 662125 - DNA, 33 bp, Homo sapien
tccttagtgcctaagaaagggattttaagagag

SEQ ID NO: 662126 - DNA, 33 bp, Homo sapien
tccttagtgcctaagacagggattttaagagag

SEQ ID NO: 662127 - DNA, 33 bp, Homo sapien
gcaactgctaaatataagtctcccttgtgatgc

SEQ ID NO: 662128 - DNA, 33 bp, Homo sapien
gcaactgctaaatataggtctcccttgtgatgc

SEQ ID NO: 662129 - DNA, 33 bp, Homo sapien
aatacttctccatgaaaaaaggatttataaagc

SEQ ID NO: 662130 - DNA, 33 bp, Homo sapien
aatacttctccatgaacaaaggatttataaagc

SEQ ID NO: 662131 - DNA, 33 bp, Homo sapien
ttgggtgttattatcaatagtggcctcctcact

SEQ ID NO: 662132 - DNA, 33 bp, Homo sapien
ttgggtgttattatcagtagtggcctcctcact

SEQ ID NO: 662133 - DNA, 33 bp, Homo sapien
acttttttttttcagcaactgctatctcttgtg

SEQ ID NO: 662134 - DNA, 33 bp, Homo sapien
acttttttttttcagcgactgctatctcttgtg

SEQ ID NO: 662135 - DNA, 33 bp, Homo sapien
tgggaagttatccaacactccatcaaatctcaa

SEQ ID NO: 662136 - DNA, 33 bp, Homo sapien
tgggaagttatccaacgctccatcaaatctcaa

SEQ ID NO: 662137 - DNA, 33 bp, Homo sapien
acattaatgaaagaaaagtaagagacgctaaat

SEQ ID NO: 662138 - DNA, 33 bp, Homo sapien
acattaatgaaagaaacgtaagagacgctaaat

SEQ ID NO: 662139 - DNA, 33 bp, Homo sapien
tattttttacatccccaacaattttattagtgt

SEQ ID NO: 662140 - DNA, 33 bp, Homo sapien
tattttttacatcccctacaattttattagtgt

SEQ ID NO: 662141 - DNA, 33 bp, Homo sapien
actctgtgggttcagacatagccaaccacattt

SEQ ID NO: 662142 - DNA, 33 bp, Homo sapien
actctgtgggttcagatatagccaaccacattt

SEQ ID NO: 662143 - DNA, 33 bp, Homo sapien
tgaaatgactgactaccacaattagcttaatta

SEQ ID NO: 662144 - DNA, 33 bp, Homo sapien
tgaaatgactgactactacaattagcttaatta

SEQ ID NO: 662145 - DNA, 33 bp, Homo sapien
ttgaggtacatcattacattgtttatgtgaaat

SEQ ID NO: 662146 - DNA, 33 bp, Homo sapien
ttgaggtacatcattagattgtttatgtgaaat

SEQ ID NO: 662147 - DNA, 33 bp, Homo sapien
cagacttaaacatcccaaagtctgacagctctg

SEQ ID NO: 662148 - DNA, 33 bp, Homo sapien
cagacttaaacatcccgaagtctgacagctctg

SEQ ID NO: 662149 - DNA, 33 bp, Homo sapien
gttatcaatgggaagcaagaaggcaataaaact

SEQ ID NO: 662150 - DNA, 33 bp, Homo sapien
gttatcaatgggaagcgagaaggcaataaaact

SEQ ID NO: 662151 - DNA, 33 bp, Homo sapien
gacagattttgaaaaaagttatctaattggttc

SEQ ID NO: 662152 - DNA, 33 bp, Homo sapien
gacagattttgaaaaaggttatctaattggttc

SEQ ID NO: 662153 - DNA, 33 bp, Homo sapien
gtcctttgcacaatcaaccataattctgagttc

SEQ ID NO: 662154 - DNA, 33 bp, Homo sapien
gtcctttgcacaatcagccataattctgagttc

SEQ ID NO: 662155 - DNA, 33 bp, Homo sapien
tattgcctgaagggaacaaggaaaataaacatg

SEQ ID NO: 662156 - DNA, 33 bp, Homo sapien
tattgcctgaagggaataaggaaaataaacatg

SEQ ID NO: 662157 - DNA, 33 bp, Homo sapien
tcctcacatattctccactcataaagtcctctt

SEQ ID NO: 662158 - DNA, 33 bp, Homo sapien
tcctcacatattctccgctcataaagtcctctt

SEQ ID NO: 662159 - DNA, 33 bp, Homo sapien
ctacctatgataatcaatagaattacagacata

SEQ ID NO: 662160 - DNA, 33 bp, Homo sapien
ctacctatgataatcagtagaattacagacata

SEQ ID NO: 662161 - DNA, 33 bp, Homo sapien
aaatttgtcaaacttgaaggttgtaaagctcta

SEQ ID NO: 662162 - DNA, 33 bp, Homo sapien
aaatttgtcaaacttggaggttgtaaagctcta

SEQ ID NO: 662163 - DNA, 33 bp, Homo sapien
gccaagccatagacacactatatgattcggcat

SEQ ID NO: 662164 - DNA, 33 bp, Homo sapien
gccaagccatagacacgctatatgattcggcat

SEQ ID NO: 662165 - DNA, 33 bp, Homo sapien
ttgcctacagctgataacataagaccagggcca

SEQ ID NO: 662166 - DNA, 33 bp, Homo sapien
ttgcctacagctgatagcataagaccagggcca

SEQ ID NO: 662167 - DNA, 33 bp, Homo sapien
cagtgtggaggccaggccagatcttgatggttc

SEQ ID NO: 662168 - DNA, 33 bp, Homo sapien
cagtgtggaggccaggtcagatcttgatggttc

SEQ ID NO: 662169 - DNA, 33 bp, Homo sapien
ctataaaaagtgaaagcccacagtgaaaaatcc

SEQ ID NO: 662170 - DNA, 33 bp, Homo sapien
ctataaaaagtgaaaggccacagtgaaaaatcc

SEQ ID NO: 662171 - DNA, 33 bp, Homo sapien
atctctagaaaatataccacccatctcattgaa

SEQ ID NO: 662172 - DNA, 33 bp, Homo sapien
atctctagaaaatatatcacccatctcattgaa

SEQ ID NO: 662173 - DNA, 33 bp, Homo sapien
tttgcattcatggacactgaagctctgcatgat

SEQ ID NO: 662174 - DNA, 33 bp, Homo sapien
tttgcattcatggacattgaagctctgcatgat

SEQ ID NO: 662175 - DNA, 33 bp, Homo sapien
ctgtgtgtgaaagtcactagggatgttccctct

SEQ ID NO: 662176 - DNA, 33 bp, Homo sapien
ctgtgtgtgaaagtcattagggatgttccctct

SEQ ID NO: 662177 - DNA, 33 bp, Homo sapien
tttgctcgcttttcgacgggattatgcagagtt

SEQ ID NO: 662178 - DNA, 33 bp, Homo sapien
tttgctcgcttttcgatgggattatgcagagtt

SEQ ID NO: 662179 - DNA, 33 bp, Homo sapien
ggacttgctgtttacactctagtctgaaactca

SEQ ID NO: 662180 - DNA, 33 bp, Homo sapien
ggacttgctgtttacattctagtctgaaactca

SEQ ID NO: 662181 - DNA, 33 bp, Homo sapien
tctgataaatcaggtacaagctgaagatgatgg

SEQ ID NO: 662182 - DNA, 33 bp, Homo sapien
tctgataaatcaggtataagctgaagatgatgg

SEQ ID NO: 662183 - DNA, 33 bp, Homo sapien
cacactccagtgcttaataactataaatatcaa

SEQ ID NO: 662184 - DNA, 33 bp, Homo sapien
cacactccagtgcttactaactataaatatcaa

SEQ ID NO: 662185 - DNA, 33 bp, Homo sapien
tagtttaatattcaaaagttgttgtgggagtca

SEQ ID NO: 662186 - DNA, 33 bp, Homo sapien
tagtttaatattcaaaggttgttgtgggagtca

SEQ ID NO: 662187 - DNA, 33 bp, Homo sapien
ggatcctgcattagacagaaacggtggttctta

SEQ ID NO: 662188 - DNA, 33 bp, Homo sapien
ggatcctgcattagacggaaacggtggttctta

SEQ ID NO: 662189 - DNA, 33 bp, Homo sapien
gcattttctggtgcacaggacagattctcaaaa

SEQ ID NO: 662190 - DNA, 33 bp, Homo sapien
gcattttctggtgcactggacagattctcaaaa

SEQ ID NO: 662191 - DNA, 33 bp, Homo sapien
gttaatttgaagagtaaatgattccaattttaa

SEQ ID NO: 662192 - DNA, 33 bp, Homo sapien
gttaatttgaagagtacatgattccaattttaa

SEQ ID NO: 662193 - DNA, 33 bp, Homo sapien
tgttaacctaatcttacgtgccagtttacttag

SEQ ID NO: 662194 - DNA, 33 bp, Homo sapien
tgttaacctaatcttatgtgccagtttacttag

SEQ ID NO: 662195 - DNA, 33 bp, Homo sapien
atatgtgctcgccatcgaggcaaatttacacaa

SEQ ID NO: 662196 - DNA, 33 bp, Homo sapien
atatgtgctcgccatctaggcaaatttacacaa

SEQ ID NO: 662197 - DNA, 33 bp, Homo sapien
agataagaacgctatcgctggctgaacatattt

SEQ ID NO: 662198 - DNA, 33 bp, Homo sapien
agataagaacgctatctctggctgaacatattt

SEQ ID NO: 662199 - DNA, 33 bp, Homo sapien
tttttaccagtaaatagataagtgatctctttc

SEQ ID NO: 662200 - DNA, 33 bp, Homo sapien
tttttaccagtaaatatataagtgatctctttc

SEQ ID NO: 662201 - DNA, 33 bp, Homo sapien
agttttttgagaggggaatccagaagccgttca

SEQ ID NO: 662202 - DNA, 33 bp, Homo sapien
agttttttgagagggggatccagaagccgttca

SEQ ID NO: 662203 - DNA, 33 bp, Homo sapien
acaccatttggcattcacatcagcaatgtacaa

SEQ ID NO: 662204 - DNA, 33 bp, Homo sapien
acaccatttggcattcgcatcagcaatgtacaa

SEQ ID NO: 662205 - DNA, 33 bp, Homo sapien
cagggctcagtgcttcaacaaccaactgtacaa

SEQ ID NO: 662206 - DNA, 33 bp, Homo sapien
cagggctcagtgcttcgacaaccaactgtacaa

SEQ ID NO: 662207 - DNA, 33 bp, Homo sapien
gaacctctgaagaagacgcttttgtgcctttcc

SEQ ID NO: 662208 - DNA, 33 bp, Homo sapien
gaacctctgaagaagatgcttttgtgcctttcc

SEQ ID NO: 662209 - DNA, 33 bp, Homo sapien
aaaggagagtaaagagaaggctaggaagctaaa

SEQ ID NO: 662210 - DNA, 33 bp, Homo sapien
aaaggagagtaaagagtaggctaggaagctaaa

SEQ ID NO: 662211 - DNA, 33 bp, Homo sapien
atgagaaaatttaaaaatcacttctagaagtcc

SEQ ID NO: 662212 - DNA, 33 bp, Homo sapien
atgagaaaatttaaaagtcacttctagaagtcc

SEQ ID NO: 662213 - DNA, 33 bp, Homo sapien
tcctcttcttctaggacgtcaggaagctgagag

SEQ ID NO: 662214 - DNA, 33 bp, Homo sapien
tcctcttcttctaggatgtcaggaagctgagag

SEQ ID NO: 662215 - DNA, 33 bp, Homo sapien
agtgcctcacgttgccacacatttttcttaatt

SEQ ID NO: 662216 - DNA, 33 bp, Homo sapien
agtgcctcacgttgccgcacatttttcttaatt

SEQ ID NO: 662217 - DNA, 33 bp, Homo sapien
cttaaacacagggctccgagaaaataaatagca

SEQ ID NO: 662218 - DNA, 33 bp, Homo sapien
cttaaacacagggctcggagaaaataaatagca

SEQ ID NO: 662219 - DNA, 33 bp, Homo sapien
gtgagccagtagcacaactaggaaaccataaga

SEQ ID NO: 662220 - DNA, 33 bp, Homo sapien
gtgagccagtagcacagctaggaaaccataaga

SEQ ID NO: 662221 - DNA, 33 bp, Homo sapien
tggtgtctactcgaacagctgcccagttttatg

SEQ ID NO: 662222 - DNA, 33 bp, Homo sapien
tggtgtctactcgaacggctgcccagttttatg

SEQ ID NO: 662223 - DNA, 33 bp, Homo sapien
atgaagatggtgtcaactgaaatttgagagctt

SEQ ID NO: 662224 - DNA, 33 bp, Homo sapien
atgaagatggtgtcaattgaaatttgagagctt

SEQ ID NO: 662225 - DNA, 33 bp, Homo sapien
atatgtggttttgagacccattcagcagcttga

SEQ ID NO: 662226 - DNA, 33 bp, Homo sapien
atatgtggttttgagatccattcagcagcttga

SEQ ID NO: 662227 - DNA, 33 bp, Homo sapien
taaatcacttgtgaaactgtcaggaacatgaac

SEQ ID NO: 662228 - DNA, 33 bp, Homo sapien
taaatcacttgtgaaattgtcaggaacatgaac

SEQ ID NO: 662229 - DNA, 33 bp, Homo sapien
tgccattaatgccaaaaagagttaggcagggat

SEQ ID NO: 662230 - DNA, 33 bp, Homo sapien
tgccattaatgccaaagagagttaggcagggat

SEQ ID NO: 662231 - DNA, 33 bp, Homo sapien
gagactgtcaggtttcaaaaagaactttcttgg

SEQ ID NO: 662232 - DNA, 33 bp, Homo sapien
gagactgtcaggtttcgaaaagaactttcttgg

SEQ ID NO: 662233 - DNA, 33 bp, Homo sapien
taaagaccttttactcaatggtccttaaggctt

SEQ ID NO: 662234 - DNA, 33 bp, Homo sapien
taaagaccttttactcgatggtccttaaggctt

SEQ ID NO: 662235 - DNA, 33 bp, Homo sapien
gtagctagcgcaattccaaattgtcctggatga

SEQ ID NO: 662236 - DNA, 33 bp, Homo sapien
gtagctagcgcaattctaaattgtcctggatga

SEQ ID NO: 662237 - DNA, 33 bp, Homo sapien
ccattggcctgattgacgctttctcagaggctc

SEQ ID NO: 662238 - DNA, 33 bp, Homo sapien
ccattggcctgattgatgctttctcagaggctc

SEQ ID NO: 662239 - DNA, 33 bp, Homo sapien
agcccttctcaagattaaagccagataaggtat

SEQ ID NO: 662240 - DNA, 33 bp, Homo sapien
agcccttctcaagattgaagccagataaggtat

SEQ ID NO: 662241 - DNA, 33 bp, Homo sapien
ttcttaaatttcagaaaacatatccataattta

SEQ ID NO: 662242 - DNA, 33 bp, Homo sapien
ttcttaaatttcagaagacatatccataattta

SEQ ID NO: 662243 - DNA, 33 bp, Homo sapien
tgaattggaagcaggacaataaatttggaagta

SEQ ID NO: 662244 - DNA, 33 bp, Homo sapien
tgaattggaagcaggagaataaatttggaagta

SEQ ID NO: 662245 - DNA, 33 bp, Homo sapien
agactcagggtgcctaaggccagaaaagatttt

SEQ ID NO: 662246 - DNA, 33 bp, Homo sapien
agactcagggtgcctatggccagaaaagatttt

SEQ ID NO: 662247 - DNA, 33 bp, Homo sapien
aattattgctcagaaggcctttggcaaaccttt

SEQ ID NO: 662248 - DNA, 33 bp, Homo sapien
aattattgctcagaagtcctttggcaaaccttt

SEQ ID NO: 662249 - DNA, 33 bp, Homo sapien
ctgtgttaagtcactgcacagaaggttctgctc

SEQ ID NO: 662250 - DNA, 33 bp, Homo sapien
ctgtgttaagtcactgtacagaaggttctgctc

SEQ ID NO: 662251 - DNA, 33 bp, Homo sapien
ttgattcccttatcaacctatattcaagagcta

SEQ ID NO: 662252 - DNA, 33 bp, Homo sapien
ttgattcccttatcaagctatattcaagagcta

SEQ ID NO: 662253 - DNA, 33 bp, Homo sapien
tagcttagggtctcagaaagcaaacgcactttt

SEQ ID NO: 662254 - DNA, 33 bp, Homo sapien
tagcttagggtctcaggaagcaaacgcactttt

SEQ ID NO: 662255 - DNA, 33 bp, Homo sapien
ctcagtgagtctgggaactccaactctggtatt

SEQ ID NO: 662256 - DNA, 33 bp, Homo sapien
ctcagtgagtctgggacctccaactctggtatt

SEQ ID NO: 662257 - DNA, 33 bp, Homo sapien
aagcagaagctgcaaagatgtcctcaagtggtt

SEQ ID NO: 662258 - DNA, 33 bp, Homo sapien
aagcagaagctgcaaatatgtcctcaagtggtt

SEQ ID NO: 662259 - DNA, 33 bp, Homo sapien
ctctcatattgataagcaggtaaaatcatgttt

SEQ ID NO: 662260 - DNA, 33 bp, Homo sapien
ctctcatattgataagtaggtaaaatcatgttt

SEQ ID NO: 662261 - DNA, 33 bp, Homo sapien
tgacatcttcagtcacccaggagtcccattaac

SEQ ID NO: 662262 - DNA, 33 bp, Homo sapien
tgacatcttcagtcacgcaggagtcccattaac

SEQ ID NO: 662263 - DNA, 33 bp, Homo sapien
ataagttagggaagaaagtagctaatagcacca

SEQ ID NO: 662264 - DNA, 33 bp, Homo sapien
ataagttagggaagaacgtagctaatagcacca

SEQ ID NO: 662265 - DNA, 33 bp, Homo sapien
agtagggaacaagaaaggagactactgcagtta

SEQ ID NO: 662266 - DNA, 33 bp, Homo sapien
agtagggaacaagaaatgagactactgcagtta

SEQ ID NO: 662267 - DNA, 33 bp, Homo sapien
tagattccattgggacaagtagagtttgagggc

SEQ ID NO: 662268 - DNA, 33 bp, Homo sapien
tagattccattgggacgagtagagtttgagggc

SEQ ID NO: 662269 - DNA, 33 bp, Homo sapien
cataaccatgtcttgacggctattgccaaaggc

SEQ ID NO: 662270 - DNA, 33 bp, Homo sapien
cataaccatgtcttgatggctattgccaaaggc

SEQ ID NO: 662271 - DNA, 33 bp, Homo sapien
gaaggtcactaggtaaagcttgctgactggtga

SEQ ID NO: 662272 - DNA, 33 bp, Homo sapien
gaaggtcactaggtaaggcttgctgactggtga

SEQ ID NO: 662273 - DNA, 33 bp, Homo sapien
cccaccacctcatctacagaatgtcagtgatca

SEQ ID NO: 662274 - DNA, 33 bp, Homo sapien
cccaccacctcatctagagaatgtcagtgatca

SEQ ID NO: 662275 - DNA, 33 bp, Homo sapien
ctaaatcagaaaatgcaaatagcaacttagcta

SEQ ID NO: 662276 - DNA, 33 bp, Homo sapien
ctaaatcagaaaatgccaatagcaacttagcta

SEQ ID NO: 662277 - DNA, 33 bp, Homo sapien
ctgaggggccggtgacaggctcgctacttcagg

SEQ ID NO: 662278 - DNA, 33 bp, Homo sapien
ctgaggggccggtgacgggctcgctacttcagg

SEQ ID NO: 662279 - DNA, 33 bp, Homo sapien
ttccctgcccttaaccacagttgtacccagggc

SEQ ID NO: 662280 - DNA, 33 bp, Homo sapien
ttccctgcccttaacctcagttgtacccagggc

SEQ ID NO: 662281 - DNA, 33 bp, Homo sapien
tgagatccctacatgaaaagtggaccagcaagg

SEQ ID NO: 662282 - DNA, 33 bp, Homo sapien
tgagatccctacatgacaagtggaccagcaagg

SEQ ID NO: 662283 - DNA, 33 bp, Homo sapien
tactgtgtctgttccaatagtatgtcttctagt

SEQ ID NO: 662284 - DNA, 33 bp, Homo sapien
tactgtgtctgttccagtagtatgtcttctagt

SEQ ID NO: 662285 - DNA, 33 bp, Homo sapien
catccagactgcttccattctgaggcttggcca

SEQ ID NO: 662286 - DNA, 33 bp, Homo sapien
catccagactgcttccgttctgaggcttggcca

SEQ ID NO: 662287 - DNA, 33 bp, Homo sapien
gatgggaggaaacatcaaattaatatttatatc

SEQ ID NO: 662288 - DNA, 33 bp, Homo sapien
gatgggaggaaacatcgaattaatatttatatc

SEQ ID NO: 662289 - DNA, 33 bp, Homo sapien
gaggcaaacaacagaacgcaaacaacctataag

SEQ ID NO: 662290 - DNA, 33 bp, Homo sapien
gaggcaaacaacagaatgcaaacaacctataag

SEQ ID NO: 662291 - DNA, 33 bp, Homo sapien
cctttctaatcacataaaagctggtttggaagg

SEQ ID NO: 662292 - DNA, 33 bp, Homo sapien
cctttctaatcacatacaagctggtttggaagg

SEQ ID NO: 662293 - DNA, 33 bp, Homo sapien
gctgcaccataagcgacggcttcatcagggttg

SEQ ID NO: 662294 - DNA, 33 bp, Homo sapien
gctgcaccataagcgatggcttcatcagggttg

SEQ ID NO: 662295 - DNA, 33 bp, Homo sapien
aggatcaggaaaaaaaaatattgattactaggc

SEQ ID NO: 662296 - DNA, 33 bp, Homo sapien
aggatcaggaaaaaaatatattgattactaggc

SEQ ID NO: 662297 - DNA, 33 bp, Homo sapien
ctacttccgtaaagaaggtcaatggtagtttga

SEQ ID NO: 662298 - DNA, 33 bp, Homo sapien
ctacttccgtaaagaatgtcaatggtagtttga

SEQ ID NO: 662299 - DNA, 33 bp, Homo sapien
agttaggtgtgatgtgaagatgtcattctatat

SEQ ID NO: 662300 - DNA, 33 bp, Homo sapien
agttaggtgtgatgtgcagatgtcattctatat

SEQ ID NO: 662301 - DNA, 33 bp, Homo sapien
cactactttttccgaccgcttgcactggctcct

SEQ ID NO: 662302 - DNA, 33 bp, Homo sapien
cactactttttccgactgcttgcactggctcct

SEQ ID NO: 662303 - DNA, 33 bp, Homo sapien
acattggccctatatcaatagccattcttcttt

SEQ ID NO: 662304 - DNA, 33 bp, Homo sapien
acattggccctatatcgatagccattcttcttt

SEQ ID NO: 662305 - DNA, 33 bp, Homo sapien
taatttcaataataaacccagagcataagtgag

SEQ ID NO: 662306 - DNA, 33 bp, Homo sapien
taatttcaataataaatccagagcataagtgag

SEQ ID NO: 662307 - DNA, 33 bp, Homo sapien
tttggaaaataatacaaccctgtggactcaaaa

SEQ ID NO: 662308 - DNA, 33 bp, Homo sapien
tttggaaaataatacacccctgtggactcaaaa

SEQ ID NO: 662309 - DNA, 33 bp, Homo sapien
aaaaattagtttttcaaatgctgtctactgttt

SEQ ID NO: 662310 - DNA, 33 bp, Homo sapien
aaaaattagtttttcagatgctgtctactgttt

SEQ ID NO: 662311 - DNA, 33 bp, Homo sapien
ctcaggcttgaaaaacagtgccttttgatgagc

SEQ ID NO: 662312 - DNA, 33 bp, Homo sapien
ctcaggcttgaaaaacggtgccttttgatgagc

SEQ ID NO: 662313 - DNA, 33 bp, Homo sapien
agcaaacatgacaacaatcttcccattcttcag

SEQ ID NO: 662314 - DNA, 33 bp, Homo sapien
agcaaacatgacaacattcttcccattcttcag

SEQ ID NO: 662315 - DNA, 33 bp, Homo sapien
aacatcatctccaaataagtgcccagtactgtg

SEQ ID NO: 662316 - DNA, 33 bp, Homo sapien
aacatcatctccaaatgagtgcccagtactgtg

SEQ ID NO: 662317 - DNA, 33 bp, Homo sapien
gtaatgtcctctctgactacgttagtaacaaca

SEQ ID NO: 662318 - DNA, 33 bp, Homo sapien
gtaatgtcctctctgattacgttagtaacaaca

SEQ ID NO: 662319 - DNA, 33 bp, Homo sapien
tagttattgcacaacagaaaatcaacctgccac

SEQ ID NO: 662320 - DNA, 33 bp, Homo sapien
tagttattgcacaacataaaatcaacctgccac

SEQ ID NO: 662321 - DNA, 33 bp, Homo sapien
aaaaatcccattcacactacaaaaatgtaaaaa

SEQ ID NO: 662322 - DNA, 33 bp, Homo sapien
aaaaatcccattcacagtacaaaaatgtaaaaa

SEQ ID NO: 662323 - DNA, 33 bp, Homo sapien
ctcctctcactgttacaaggctgtgaaggaata

SEQ ID NO: 662324 - DNA, 33 bp, Homo sapien
ctcctctcactgttacgaggctgtgaaggaata

SEQ ID NO: 662325 - DNA, 33 bp, Homo sapien
ttagtagacaatcctacggtcattttaagttac

SEQ ID NO: 662326 - DNA, 33 bp, Homo sapien
ttagtagacaatcctatggtcattttaagttac

SEQ ID NO: 662327 - DNA, 33 bp, Homo sapien
aagctcccagttaagacctatgctgctagtcct

SEQ ID NO: 662328 - DNA, 33 bp, Homo sapien
aagctcccagttaagatctatgctgctagtcct

SEQ ID NO: 662329 - DNA, 33 bp, Homo sapien
caaagtaactgaaatgccacaattggattgttg

SEQ ID NO: 662330 - DNA, 33 bp, Homo sapien
caaagtaactgaaatggcacaattggattgttg

SEQ ID NO: 662331 - DNA, 33 bp, Homo sapien
acaaaacttcaatggacagtgtggtaggcacaa

SEQ ID NO: 662332 - DNA, 33 bp, Homo sapien
acaaaacttcaatggatagtgtggtaggcacaa

SEQ ID NO: 662333 - DNA, 33 bp, Homo sapien
tccataagttagaaccacttgatttcaagtaac

SEQ ID NO: 662334 - DNA, 33 bp, Homo sapien
tccataagttagaaccgcttgatttcaagtaac

SEQ ID NO: 662335 - DNA, 33 bp, Homo sapien
tcaggcccagactttacacctggtgcccttgac

SEQ ID NO: 662336 - DNA, 33 bp, Homo sapien
tcaggcccagactttatacctggtgcccttgac

SEQ ID NO: 662337 - DNA, 33 bp, Homo sapien
atgttagctgtggacaaccagaagttagtcacc

SEQ ID NO: 662338 - DNA, 33 bp, Homo sapien
atgttagctgtggacatccagaagttagtcacc

SEQ ID NO: 662339 - DNA, 33 bp, Homo sapien
ttcatcccagcagccaccttaggctagagcttc

SEQ ID NO: 662340 - DNA, 33 bp, Homo sapien
ttcatcccagcagccatcttaggctagagcttc

SEQ ID NO: 662341 - DNA, 33 bp, Homo sapien
ccagctgacatggtgaaatcatgctctccagct

SEQ ID NO: 662342 - DNA, 33 bp, Homo sapien
ccagctgacatggtgacatcatgctctccagct

SEQ ID NO: 662343 - DNA, 33 bp, Homo sapien
aacttcactgtaagaaataagtggggctcctcc

SEQ ID NO: 662344 - DNA, 33 bp, Homo sapien
aacttcactgtaagaagtaagtggggctcctcc

SEQ ID NO: 662345 - DNA, 33 bp, Homo sapien
actcataaaagaagaaatagcaacaaccaacat

SEQ ID NO: 662346 - DNA, 33 bp, Homo sapien
actcataaaagaagaactagcaacaaccaacat

SEQ ID NO: 662347 - DNA, 33 bp, Homo sapien
ggaattgaggtacacaacagctaagaaacttgt

SEQ ID NO: 662348 - DNA, 33 bp, Homo sapien
ggaattgaggtacacagcagctaagaaacttgt

SEQ ID NO: 662349 - DNA, 33 bp, Homo sapien
tttataaaatgcaaaaagtagaaatgtctggtt

SEQ ID NO: 662350 - DNA, 33 bp, Homo sapien
tttataaaatgcaaaaggtagaaatgtctggtt

SEQ ID NO: 662351 - DNA, 33 bp, Homo sapien
tctccaggaatgtaagaccgaccaatcagaacc

SEQ ID NO: 662352 - DNA, 33 bp, Homo sapien
tctccaggaatgtaaggccgaccaatcagaacc

SEQ ID NO: 662353 - DNA, 33 bp, Homo sapien
caagcatgctctgagcagcgcctcaatctgttt

SEQ ID NO: 662354 - DNA, 33 bp, Homo sapien
caagcatgctctgagcggcgcctcaatctgttt

SEQ ID NO: 662355 - DNA, 33 bp, Homo sapien
cagtgtgtttggtttaccacacagctcctgtat

SEQ ID NO: 662356 - DNA, 33 bp, Homo sapien
cagtgtgtttggtttatcacacagctcctgtat

SEQ ID NO: 662357 - DNA, 33 bp, Homo sapien
cctgagctaactgtcacggtaagtggaatgaaa

SEQ ID NO: 662358 - DNA, 33 bp, Homo sapien
cctgagctaactgtcatggtaagtggaatgaaa

SEQ ID NO: 662359 - DNA, 33 bp, Homo sapien
ccagggtgttggagccactttctccctcctctt

SEQ ID NO: 662360 - DNA, 33 bp, Homo sapien
ccagggtgttggagccgctttctccctcctctt

SEQ ID NO: 662361 - DNA, 33 bp, Homo sapien
ggtaaagtggcagctacgacctggcccaaggaa

SEQ ID NO: 662362 - DNA, 33 bp, Homo sapien
ggtaaagtggcagctatgacctggcccaaggaa

SEQ ID NO: 662363 - DNA, 33 bp, Homo sapien
cagcaactttgaagccactgcttacccttctct

SEQ ID NO: 662364 - DNA, 33 bp, Homo sapien
cagcaactttgaagccgctgcttacccttctct

SEQ ID NO: 662365 - DNA, 33 bp, Homo sapien
gactggtaatgaatgacgtcaaagctgctggca

SEQ ID NO: 662366 - DNA, 33 bp, Homo sapien
gactggtaatgaatgatgtcaaagctgctggca

SEQ ID NO: 662367 - DNA, 33 bp, Homo sapien
agaaggtctgaaaatacagaactttgatgtcct

SEQ ID NO: 662368 - DNA, 33 bp, Homo sapien
agaaggtctgaaaatatagaactttgatgtcct

SEQ ID NO: 662369 - DNA, 33 bp, Homo sapien
tgatctaggaggaccaatgagagataaatacat

SEQ ID NO: 662370 - DNA, 33 bp, Homo sapien
tgatctaggaggaccagtgagagataaatacat

SEQ ID NO: 662371 - DNA, 33 bp, Homo sapien
tttatatgggaagatacggtcaagggataactt

SEQ ID NO: 662372 - DNA, 33 bp, Homo sapien
tttatatgggaagatatggtcaagggataactt

SEQ ID NO: 662373 - DNA, 33 bp, Homo sapien
tcattgccttgctcaggaaattaaattctttat

SEQ ID NO: 662374 - DNA, 33 bp, Homo sapien
tcattgccttgctcagtaaattaaattctttat

SEQ ID NO: 662375 - DNA, 33 bp, Homo sapien
accaaccaattctccaatgccacctgggtgccc

SEQ ID NO: 662376 - DNA, 33 bp, Homo sapien
accaaccaattctccattgccacctgggtgccc

SEQ ID NO: 662377 - DNA, 33 bp, Homo sapien
cccctttcttttatgacagggtgtgccactgcc

SEQ ID NO: 662378 - DNA, 33 bp, Homo sapien
cccctttcttttatgatagggtgtgccactgcc

SEQ ID NO: 662379 - DNA, 33 bp, Homo sapien
aggcagccaaagcaaacgtgtatgggaacaagc

SEQ ID NO: 662380 - DNA, 33 bp, Homo sapien
aggcagccaaagcaaatgtgtatgggaacaagc

SEQ ID NO: 662381 - DNA, 33 bp, Homo sapien
tgtgttgagtgttgaactaaggcccagtaaggg

SEQ ID NO: 662382 - DNA, 33 bp, Homo sapien
tgtgttgagtgttgaattaaggcccagtaaggg

SEQ ID NO: 662383 - DNA, 33 bp, Homo sapien
gtccaggtaacaaataaagctaacactcgtttg

SEQ ID NO: 662384 - DNA, 33 bp, Homo sapien
gtccaggtaacaaatagagctaacactcgtttg

SEQ ID NO: 662385 - DNA, 33 bp, Homo sapien
aacttctagctgcaaacgcagttaaccagtatt

SEQ ID NO: 662386 - DNA, 33 bp, Homo sapien
aacttctagctgcaaatgcagttaaccagtatt

SEQ ID NO: 662387 - DNA, 33 bp, Homo sapien
acctttctgagagcgaagggctatttgaagcga

SEQ ID NO: 662388 - DNA, 33 bp, Homo sapien
acctttctgagagcgaggggctatttgaagcga

SEQ ID NO: 662389 - DNA, 33 bp, Homo sapien
cagattctacaacacaagtatatggcttattga

SEQ ID NO: 662390 - DNA, 33 bp, Homo sapien
cagattctacaacacaggtatatggcttattga

SEQ ID NO: 662391 - DNA, 33 bp, Homo sapien
aatcctagaccgttatgaagtcaaatgttgaca

SEQ ID NO: 662392 - DNA, 33 bp, Homo sapien
aatcctagaccgttattaagtcaaatgttgaca

SEQ ID NO: 662393 - DNA, 33 bp, Homo sapien
ttgaattgttctgacactcattcaacaataatt

SEQ ID NO: 662394 - DNA, 33 bp, Homo sapien
ttgaattgttctgacattcattcaacaataatt

SEQ ID NO: 662395 - DNA, 33 bp, Homo sapien
tccgtgtatgaagaatcacctgtggttgtttta

SEQ ID NO: 662396 - DNA, 33 bp, Homo sapien
tccgtgtatgaagaattacctgtggttgtttta

SEQ ID NO: 662397 - DNA, 33 bp, Homo sapien
taacagtatataaaggcaaggtctggaattaga

SEQ ID NO: 662398 - DNA, 33 bp, Homo sapien
taacagtatataaaggtaaggtctggaattaga

SEQ ID NO: 662399 - DNA, 33 bp, Homo sapien
gattcttttccagtgaagccaatagtttaaaga

SEQ ID NO: 662400 - DNA, 33 bp, Homo sapien
gattcttttccagtgaggccaatagtttaaaga

SEQ ID NO: 662401 - DNA, 33 bp, Homo sapien
tggatggcaaataagcaaagattttcaggccag

SEQ ID NO: 662402 - DNA, 33 bp, Homo sapien
tggatggcaaataagcgaagattttcaggccag

SEQ ID NO: 662403 - DNA, 33 bp, Homo sapien
ctacaaccccttagaagtcatctttctgcacta

SEQ ID NO: 662404 - DNA, 33 bp, Homo sapien
ctacaaccccttagaattcatctttctgcacta

SEQ ID NO: 662405 - DNA, 33 bp, Homo sapien
cataagagatcccccacgcaagcccttctacag

SEQ ID NO: 662406 - DNA, 33 bp, Homo sapien
cataagagatcccccatgcaagcccttctacag

SEQ ID NO: 662407 - DNA, 33 bp, Homo sapien
ttttttcttatccacacagttctggttttataa

SEQ ID NO: 662408 - DNA, 33 bp, Homo sapien
ttttttcttatccacagagttctggttttataa

SEQ ID NO: 662409 - DNA, 33 bp, Homo sapien
tacattaaaacaaatacggatgtggtatgttgt

SEQ ID NO: 662410 - DNA, 33 bp, Homo sapien
tacattaaaacaaatatggatgtggtatgttgt

SEQ ID NO: 662411 - DNA, 33 bp, Homo sapien
ttgcatggattccatgaataattctgctcaagg

SEQ ID NO: 662412 - DNA, 33 bp, Homo sapien
ttgcatggattccatgcataattctgctcaagg

SEQ ID NO: 662413 - DNA, 33 bp, Homo sapien
gttccagttcctccacagtcaattattttaaag

SEQ ID NO: 662414 - DNA, 33 bp, Homo sapien
gttccagttcctccacggtcaattattttaaag

SEQ ID NO: 662415 - DNA, 33 bp, Homo sapien
tagaagaagacacacaaatcatccagatgttgt

SEQ ID NO: 662416 - DNA, 33 bp, Homo sapien
tagaagaagacacacagatcatccagatgttgt

SEQ ID NO: 662417 - DNA, 33 bp, Homo sapien
ctaagcactgtgggaccgtagaatatttcaacc

SEQ ID NO: 662418 - DNA, 33 bp, Homo sapien
ctaagcactgtgggactgtagaatatttcaacc

SEQ ID NO: 662419 - DNA, 33 bp, Homo sapien
aaatcaattttgtgccccattaatggattgtaa

SEQ ID NO: 662420 - DNA, 33 bp, Homo sapien
aaatcaattttgtgcctcattaatggattgtaa

SEQ ID NO: 662421 - DNA, 33 bp, Homo sapien
aagtagtgggacagaactggagcagagggttcc

SEQ ID NO: 662422 - DNA, 33 bp, Homo sapien
aagtagtgggacagaattggagcagagggttcc

SEQ ID NO: 662423 - DNA, 33 bp, Homo sapien
atgcttgaccaaaaataagaaagacatagggtc

SEQ ID NO: 662424 - DNA, 33 bp, Homo sapien
atgcttgaccaaaaatgagaaagacatagggtc

SEQ ID NO: 662425 - DNA, 33 bp, Homo sapien
gagttgtctgccttagaacggccgtgccactca

SEQ ID NO: 662426 - DNA, 33 bp, Homo sapien
gagttgtctgccttaggacggccgtgccactca

SEQ ID NO: 662427 - DNA, 33 bp, Homo sapien
ggccatatctctgacccgaaagctcggcatgcc

SEQ ID NO: 662428 - DNA, 33 bp, Homo sapien
ggccatatctctgacctgaaagctcggcatgcc

SEQ ID NO: 662429 - DNA, 33 bp, Homo sapien
gcaattgggaacgtcacgctggtggtcactcaa

SEQ ID NO: 662430 - DNA, 33 bp, Homo sapien
gcaattgggaacgtcatgctggtggtcactcaa

SEQ ID NO: 662431 - DNA, 33 bp, Homo sapien
taaggcttcactctccactccccgagactttgc

SEQ ID NO: 662432 - DNA, 33 bp, Homo sapien
taaggcttcactctccgctccccgagactttgc

SEQ ID NO: 662433 - DNA, 33 bp, Homo sapien
tctgtttgacaaggtaaatctggcattcaggga

SEQ ID NO: 662434 - DNA, 33 bp, Homo sapien
tctgtttgacaaggtacatctggcattcaggga

SEQ ID NO: 662435 - DNA, 33 bp, Homo sapien
atccatcatcctcaaaagtgaagacctaacatc

SEQ ID NO: 662436 - DNA, 33 bp, Homo sapien
atccatcatcctcaaacgtgaagacctaacatc

SEQ ID NO: 662437 - DNA, 33 bp, Homo sapien
tgatttcctctcattcaagtggggatttcagct

SEQ ID NO: 662438 - DNA, 33 bp, Homo sapien
tgatttcctctcattcgagtggggatttcagct

SEQ ID NO: 662439 - DNA, 33 bp, Homo sapien
tgtgccatatattccaataggtgatgcatgaaa

SEQ ID NO: 662440 - DNA, 33 bp, Homo sapien
tgtgccatatattccagtaggtgatgcatgaaa

SEQ ID NO: 662441 - DNA, 33 bp, Homo sapien
catcctggatttaacacgtccaaaattagactc

SEQ ID NO: 662442 - DNA, 33 bp, Homo sapien
catcctggatttaacatgtccaaaattagactc

SEQ ID NO: 662443 - DNA, 33 bp, Homo sapien
gcaagaagcgtttctgaaaggaggaagagagaa

SEQ ID NO: 662444 - DNA, 33 bp, Homo sapien
gcaagaagcgtttctgtaaggaggaagagagaa

SEQ ID NO: 662445 - DNA, 33 bp, Homo sapien
gggttggggatgaatacgttcaggaatgagttg

SEQ ID NO: 662446 - DNA, 33 bp, Homo sapien
gggttggggatgaatatgttcaggaatgagttg

SEQ ID NO: 662447 - DNA, 33 bp, Homo sapien
ccagttctggggatcacgggccttgtgaaaact

SEQ ID NO: 662448 - DNA, 33 bp, Homo sapien
ccagttctggggatcatgggccttgtgaaaact

SEQ ID NO: 662449 - DNA, 33 bp, Homo sapien
acaggacaagctatccagcgatgcctgggaatc

SEQ ID NO: 662450 - DNA, 33 bp, Homo sapien
acaggacaagctatccggcgatgcctgggaatc

SEQ ID NO: 662451 - DNA, 33 bp, Homo sapien
ccactaaaataacagccattcatttgttgatct

SEQ ID NO: 662452 - DNA, 33 bp, Homo sapien
ccactaaaataacagctattcatttgttgatct

SEQ ID NO: 662453 - DNA, 33 bp, Homo sapien
accagggccaggagaaagtggaaagtgtgccca

SEQ ID NO: 662454 - DNA, 33 bp, Homo sapien
accagggccaggagaaggtggaaagtgtgccca

SEQ ID NO: 662455 - DNA, 33 bp, Homo sapien
ttcattaggattgctgacaatacttggagattg

SEQ ID NO: 662456 - DNA, 33 bp, Homo sapien
ttcattaggattgctggcaatacttggagattg

SEQ ID NO: 662457 - DNA, 33 bp, Homo sapien
cccatcagtgccaaaactcaactcaatctgaaa

SEQ ID NO: 662458 - DNA, 33 bp, Homo sapien
cccatcagtgccaaaagtcaactcaatctgaaa

SEQ ID NO: 662459 - DNA, 33 bp, Homo sapien
aaaccccttttagaacagacatgctcatgacag

SEQ ID NO: 662460 - DNA, 33 bp, Homo sapien
aaaccccttttagaactgacatgctcatgacag

SEQ ID NO: 662461 - DNA, 33 bp, Homo sapien
tggtgcctctctgatacgaatacactgacacgt

SEQ ID NO: 662462 - DNA, 33 bp, Homo sapien
tggtgcctctctgatatgaatacactgacacgt

SEQ ID NO: 662463 - DNA, 33 bp, Homo sapien
cagattaggtggaagacaaggactaagaaggaa

SEQ ID NO: 662464 - DNA, 33 bp, Homo sapien
cagattaggtggaagataaggactaagaaggaa

SEQ ID NO: 662465 - DNA, 33 bp, Homo sapien
atagagagcttggacaagttaccgaaggtcatc

SEQ ID NO: 662466 - DNA, 33 bp, Homo sapien
atagagagcttggacacgttaccgaaggtcatc

SEQ ID NO: 662467 - DNA, 33 bp, Homo sapien
ctgaatctcttatgcccggaacagtgcctggca

SEQ ID NO: 662468 - DNA, 33 bp, Homo sapien
ctgaatctcttatgcctggaacagtgcctggca

SEQ ID NO: 662469 - DNA, 33 bp, Homo sapien
ggtgatgtttatccatgataagccagttgtaca

SEQ ID NO: 662470 - DNA, 33 bp, Homo sapien
ggtgatgtttatccattataagccagttgtaca

SEQ ID NO: 662471 - DNA, 33 bp, Homo sapien
ccgcaccagtggcccaatccaacaggttatcca

SEQ ID NO: 662472 - DNA, 33 bp, Homo sapien
ccgcaccagtggcccagtccaacaggttatcca

SEQ ID NO: 662473 - DNA, 33 bp, Homo sapien
gaattattatcctacacggctctatactcctca

SEQ ID NO: 662474 - DNA, 33 bp, Homo sapien
gaattattatcctacatggctctatactcctca

SEQ ID NO: 662475 - DNA, 33 bp, Homo sapien
cataacaggtacttggaaaatacttgaatgggt

SEQ ID NO: 662476 - DNA, 33 bp, Homo sapien
cataacaggtacttggcaaatacttgaatgggt

SEQ ID NO: 662477 - DNA, 33 bp, Homo sapien
gtcagtaatatacaagcatcactgaggacactt

SEQ ID NO: 662478 - DNA, 33 bp, Homo sapien
gtcagtaatatacaaggatcactgaggacactt

SEQ ID NO: 662479 - DNA, 33 bp, Homo sapien
agggtaaaatggatgaatagatagaagtctctc

SEQ ID NO: 662480 - DNA, 33 bp, Homo sapien
agggtaaaatggatgagtagatagaagtctctc

SEQ ID NO: 662481 - DNA, 33 bp, Homo sapien
tatgtgtgtaggctaaatgaagagcaaccaaga

SEQ ID NO: 662482 - DNA, 33 bp, Homo sapien
tatgtgtgtaggctaagtgaagagcaaccaaga

SEQ ID NO: 662483 - DNA, 33 bp, Homo sapien
ctaccaatttagaacaagtcagttaaaattagg

SEQ ID NO: 662484 - DNA, 33 bp, Homo sapien
ctaccaatttagaacaggtcagttaaaattagg

SEQ ID NO: 662485 - DNA, 33 bp, Homo sapien
agacatcaagctacacactcaagaaatgctgca

SEQ ID NO: 662486 - DNA, 33 bp, Homo sapien
agacatcaagctacacgctcaagaaatgctgca

SEQ ID NO: 662487 - DNA, 33 bp, Homo sapien
aaggtcatcaatatcaaagacaaaaggtagata

SEQ ID NO: 662488 - DNA, 33 bp, Homo sapien
aaggtcatcaatatcagagacaaaaggtagata

SEQ ID NO: 662489 - DNA, 33 bp, Homo sapien; identical to SEQ ID NO: 662487

SEQ ID NO: 662490 - DNA, 33 bp, Homo sapien; identical to SEQ ID NO: 662488

SEQ ID NO: 662491 - DNA, 33 bp, Homo sapien
acaacaccaggaagaactcaacccactggaggg

SEQ ID NO: 662492 - DNA, 33 bp, Homo sapien
acaacaccaggaagaattcaacccactggaggg

SEQ ID NO: 662493 - DNA, 33 bp, Homo sapien
gatgtcccatctagggcatcagccaagggtctc

SEQ ID NO: 662494 - DNA, 33 bp, Homo sapien
gatgtcccatctagggtatcagccaagggtctc

SEQ ID NO: 662495 - DNA, 33 bp, Homo sapien
gagcttactttttaaacagcatggagaccaaaa

SEQ ID NO: 662496 - DNA, 33 bp, Homo sapien
gagcttactttttaaatagcatggagaccaaaa

SEQ ID NO: 662497 - DNA, 33 bp, Homo sapien
atctcttggtatctccagactctgccactctga

SEQ ID NO: 662498 - DNA, 33 bp, Homo sapien
atctcttggtatctccggactctgccactctga

SEQ ID NO: 662499 - DNA, 33 bp, Homo sapien
aatggaaaaactgaagcctggacatttatcata

SEQ ID NO: 662500 - DNA, 33 bp, Homo sapien
aatggaaaaactgaaggctggacatttatcata

SEQ ID NO: 662501 - DNA, 33 bp, Homo sapien
aacattatgatttactaaggtcatattatgtgc

SEQ ID NO: 662502 - DNA, 33 bp, Homo sapien
aacattatgatttactgaggtcatattatgtgc

SEQ ID NO: 662503 - DNA, 33 bp, Homo sapien
tgagctttgggtattacagtgaagaagagaagg

SEQ ID NO: 662504 - DNA, 33 bp, Homo sapien
tgagctttgggtattatagtgaagaagagaagg

SEQ ID NO: 662505 - DNA, 33 bp, Homo sapien
cactctcacgaaccccagaggacaagtggaatt

SEQ ID NO: 662506 - DNA, 33 bp, Homo sapien
cactctcacgaaccccggaggacaagtggaatt

SEQ ID NO: 662507 - DNA, 33 bp, Homo sapien
gaaatttaaaagttacaaagatgaatgcttttc

SEQ ID NO: 662508 - DNA, 33 bp, Homo sapien
gaaatttaaaagttacgaagatgaatgcttttc

SEQ ID NO: 662509 - DNA, 33 bp, Homo sapien
agatttaacccagagaacagctcaagcactcaa

SEQ ID NO: 662510 - DNA, 33 bp, Homo sapien
agatttaacccagagagcagctcaagcactcaa

SEQ ID NO: 662511 - DNA, 33 bp, Homo sapien
acttatgggctaataccactgattgaaaaaaaa

SEQ ID NO: 662512 - DNA, 33 bp, Homo sapien
acttatgggctaatactactgattgaaaaaaaa

SEQ ID NO: 662513 - DNA, 33 bp, Homo sapien
ttgtggtgtcgtgacaaaaaaaaggaaacataa

SEQ ID NO: 662514 - DNA, 33 bp, Homo sapien
ttgtggtgtcgtgacagaaaaaaggaaacataa

SEQ ID NO: 662515 - DNA, 33 bp, Homo sapien
ctttctaggttcaaaaatgaggcttatgtactt

SEQ ID NO: 662516 - DNA, 33 bp, Homo sapien
ctttctaggttcaaaagtgaggcttatgtactt

SEQ ID NO: 662517 - DNA, 33 bp, Homo sapien
actctggagttcgcatcatataatttttttatt

SEQ ID NO: 662518 - DNA, 33 bp, Homo sapien
actctggagttcgcattatataatttttttatt

SEQ ID NO: 662519 - DNA, 33 bp, Homo sapien
tgacatgaacctgtaacgaagcagacaaaaaca

SEQ ID NO: 662520 - DNA, 33 bp, Homo sapien
tgacatgaacctgtaatgaagcagacaaaaaca

SEQ ID NO: 662521 - DNA, 33 bp, Homo sapien
gttcaatttgctctaacggctcacaaaactcag

SEQ ID NO: 662522 - DNA, 33 bp, Homo sapien
gttcaatttgctctaatggctcacaaaactcag

SEQ ID NO: 662523 - DNA, 33 bp, Homo sapien
aaatctacttgaatgacggcagaacatgaagaa

SEQ ID NO: 662524 - DNA, 33 bp, Homo sapien
aaatctacttgaatgatggcagaacatgaagaa

SEQ ID NO: 662525 - DNA, 33 bp, Homo sapien
tagacccttaactaatcagaggaatgtaaaccc

SEQ ID NO: 662526 - DNA, 33 bp, Homo sapien
tagacccttaactaatgagaggaatgtaaaccc

SEQ ID NO: 662527 - DNA, 33 bp, Homo sapien
attgctggtgcaaataaaaaatggtatagccag

SEQ ID NO: 662528 - DNA, 33 bp, Homo sapien
attgctggtgcaaatataaaatggtatagccag

SEQ ID NO: 662529 - DNA, 33 bp, Homo sapien
ccaccatcatacagagaaaaaggcctgactctg

SEQ ID NO: 662530 - DNA, 33 bp, Homo sapien
ccaccatcatacagaggaaaaggcctgactctg

SEQ ID NO: 662531 - DNA, 33 bp, Homo sapien
tgattcagtttgaccacagaataaaatcatgga

SEQ ID NO: 662532 - DNA, 33 bp, Homo sapien
tgattcagtttgaccagagaataaaatcatgga

SEQ ID NO: 662533 - DNA, 33 bp, Homo sapien
actcacaggtctacagcagtcttgaaataccta

SEQ ID NO: 662534 - DNA, 33 bp, Homo sapien
actcacaggtctacagtagtcttgaaataccta

SEQ ID NO: 662535 - DNA, 33 bp, Homo sapien
gtttgaaagaccaaaaaaggccagtgtgactgg

SEQ ID NO: 662536 - DNA, 33 bp, Homo sapien
gtttgaaagaccaaaagaggccagtgtgactgg

SEQ ID NO: 662537 - DNA, 33 bp, Homo sapien
tatgttttggacagaaaatggggccagaatggt

SEQ ID NO: 662538 - DNA, 33 bp, Homo sapien
tatgttttggacagaagatggggccagaatggt

SEQ ID NO: 662539 - DNA, 33 bp, Homo sapien
acatgaggcactagaactctgtaacaatctaaa

SEQ ID NO: 662540 - DNA, 33 bp, Homo sapien
acatgaggcactagaattctgtaacaatctaaa

SEQ ID NO: 662541 - DNA, 33 bp, Homo sapien
acaatatgtgaccttacagctctgggcactaag

SEQ ID NO: 662542 - DNA, 33 bp, Homo sapien
acaatatgtgaccttatagctctgggcactaag

SEQ ID NO: 662543 - DNA, 33 bp, Homo sapien
aaaagttattagcataaagtaaggaggcttaaa

SEQ ID NO: 662544 - DNA, 33 bp, Homo sapien
aaaagttattagcatacagtaaggaggcttaaa

SEQ ID NO: 662545 - DNA, 33 bp, Homo sapien
aaagggtgctcattgcagatggaataatggcga

SEQ ID NO: 662546 - DNA, 33 bp, Homo sapien
aaagggtgctcattgccgatggaataatggcga

SEQ ID NO: 662547 - DNA, 33 bp, Homo sapien
agtctattctgtattcaaaattattgcatgtac

SEQ ID NO: 662548 - DNA, 33 bp, Homo sapien
agtctattctgtattcgaaattattgcatgtac

SEQ ID NO: 662549 - DNA, 33 bp, Homo sapien
tatgtccagaatttaactgcatataccttgggc

SEQ ID NO: 662550 - DNA, 33 bp, Homo sapien
tatgtccagaatttaagtgcatataccttgggc

SEQ ID NO: 662551 - DNA, 33 bp, Homo sapien
tctcccttcatgcaagacttctgctctcaggga

SEQ ID NO: 662552 - DNA, 33 bp, Homo sapien
tctcccttcatgcaaggcttctgctctcaggga

SEQ ID NO: 662553 - DNA, 33 bp, Homo sapien
ggagaccagatggaagcctgttgcacaaaggtc

SEQ ID NO: 662554 - DNA, 33 bp, Homo sapien
ggagaccagatggaaggctgttgcacaaaggtc

SEQ ID NO: 662555 - DNA, 33 bp, Homo sapien
taaccatgacagcatcacagatgggagaagtct

SEQ ID NO: 662556 - DNA, 33 bp, Homo sapien
taaccatgacagcatcgcagatgggagaagtct

SEQ ID NO: 662557 - DNA, 33 bp, Homo sapien
aggccttgaggaaccacagaggaacttctccct

SEQ ID NO: 662558 - DNA, 33 bp, Homo sapien
aggccttgaggaaccatagaggaacttctccct

SEQ ID NO: 662559 - DNA, 33 bp, Homo sapien
cagatgtgaagataaacgcagggtgcagaaatc

SEQ ID NO: 662560 - DNA, 33 bp, Homo sapien
cagatgtgaagataaatgcagggtgcagaaatc

SEQ ID NO: 662561 - DNA, 33 bp, Homo sapien
atatagcttcaaaataaccaatgaagagaaaaa

SEQ ID NO: 662562 - DNA, 33 bp, Homo sapien
atatagcttcaaaatatccaatgaagagaaaaa

SEQ ID NO: 662563 - DNA, 33 bp, Homo sapien
atagattgagccagaacacactcttgccaacag

SEQ ID NO: 662564 - DNA, 33 bp, Homo sapien
atagattgagccagaatacactcttgccaacag

SEQ ID NO: 662565 - DNA, 33 bp, Homo sapien
tcatagtaaaattgcagaatatcaaaacaaaat

SEQ ID NO: 662566 - DNA, 33 bp, Homo sapien
tcatagtaaaattgcataatatcaaaacaaaat

SEQ ID NO: 662567 - DNA, 33 bp, Homo sapien
ggtgactcggtgtttgaaaagctccaacaaggc

SEQ ID NO: 662568 - DNA, 33 bp, Homo sapien
ggtgactcggtgtttggaaagctccaacaaggc

SEQ ID NO: 662569 - DNA, 33 bp, Homo sapien
aatggaaaatagacaccattgccctttactgcc

SEQ ID NO: 662570 - DNA, 33 bp, Homo sapien
aatggaaaatagacacgattgccctttactgcc

SEQ ID NO: 662571 - DNA, 33 bp, Homo sapien
atatcacatggtgagacgaaggaagaaagagaa

SEQ ID NO: 662572 - DNA, 33 bp, Homo sapien
atatcacatggtgagatgaaggaagaaagagaa

SEQ ID NO: 662573 - DNA, 33 bp, Homo sapien
ccacaaaaactgtatacgccatcattccattta

SEQ ID NO: 662574 - DNA, 33 bp, Homo sapien
ccacaaaaactgtatatgccatcattccattta

SEQ ID NO: 662575 - DNA, 33 bp, Homo sapien
gagaaacagaaacacactagaagctgaagattt

SEQ ID NO: 662576 - DNA, 33 bp, Homo sapien
gagaaacagaaacacattagaagctgaagattt

SEQ ID NO: 662577 - DNA, 33 bp, Homo sapien
gtttcattagtcatcacagttacataaattaaa

SEQ ID NO: 662578 - DNA, 33 bp, Homo sapien
gtttcattagtcatcagagttacataaattaaa

SEQ ID NO: 662579 - DNA, 33 bp, Homo sapien
actcaccaacatcaacaaaaaaattacataacc

SEQ ID NO: 662580 - DNA, 33 bp, Homo sapien
actcaccaacatcaaccaaaaaattacataacc

SEQ ID NO: 662581 - DNA, 33 bp, Homo sapien
acttcaaaacacatgacagaatacctttcagga

SEQ ID NO: 662582 - DNA, 33 bp, Homo sapien
acttcaaaacacatgatagaatacctttcagga

SEQ ID NO: 662583 - DNA, 33 bp, Homo sapien
atatgcacgttgatgacatctacttttgcacac

SEQ ID NO: 662584 - DNA, 33 bp, Homo sapien
atatgcacgttgatgatatctacttttgcacac

SEQ ID NO: 662585 - DNA, 33 bp, Homo sapien
tgtggccatgtgacaggccataggagattttct

SEQ ID NO: 662586 - DNA, 33 bp, Homo sapien
tgtggccatgtgacagtccataggagattttct

SEQ ID NO: 662587 - DNA, 33 bp, Homo sapien
cctttgcagaggtcccaaattaagacagaatat

SEQ ID NO: 662588 - DNA, 33 bp, Homo sapien
cctttgcagaggtcccgaattaagacagaatat

SEQ ID NO: 662589 - DNA, 33 bp, Homo sapien
ctaaagcaatcactggaatagtatcaattagga

SEQ ID NO: 662590 - DNA, 33 bp, Homo sapien
ctaaagcaatcactgggatagtatcaattagga

SEQ ID NO: 662591 - DNA, 33 bp, Homo sapien
tgctgtttaatagaaactcagtgtttggtattg

SEQ ID NO: 662592 - DNA, 33 bp, Homo sapien
tgctgtttaatagaaattcagtgtttggtattg

SEQ ID NO: 662593 - DNA, 33 bp, Homo sapien
gtatgcgtggagaaaggcagtacatgtgctttt

SEQ ID NO: 662594 - DNA, 33 bp, Homo sapien
gtatgcgtggagaaagtcagtacatgtgctttt

SEQ ID NO: 662595 - DNA, 33 bp, Homo sapien
ccacgtactgatcactcaacttcaacattatca

SEQ ID NO: 662596 - DNA, 33 bp, Homo sapien
ccacgtactgatcacttaacttcaacattatca

SEQ ID NO: 662597 - DNA, 33 bp, Homo sapien
tgcttaactgagttgacagatgctcatagcaga

SEQ ID NO: 662598 - DNA, 33 bp, Homo sapien
tgcttaactgagttgatagatgctcatagcaga

SEQ ID NO: 662599 - DNA, 33 bp, Homo sapien
ttatctgttgactctcccactttcccttcctcc

SEQ ID NO: 662600 - DNA, 33 bp, Homo sapien
ttatctgttgactctctcactttcccttcctcc

SEQ ID NO: 662601 - DNA, 33 bp, Homo sapien
aggttatactcttgaaaaaaataggacaagcag

SEQ ID NO: 662602 - DNA, 33 bp, Homo sapien
aggttatactcttgaacaaaataggacaagcag

SEQ ID NO: 662603 - DNA, 33 bp, Homo sapien
gaggcatctacacaaactacaatcaacactctt

SEQ ID NO: 662604 - DNA, 33 bp, Homo sapien
gaggcatctacacaaattacaatcaacactctt

SEQ ID NO: 662605 - DNA, 33 bp, Homo sapien
acttcgagggtagtgacagttttttatatagcc

SEQ ID NO: 662606 - DNA, 33 bp, Homo sapien
acttcgagggtagtgagagttttttatatagcc

SEQ ID NO: 662607 - DNA, 33 bp, Homo sapien
aatctgacactatcaaatattggtgaagatgtg

SEQ ID NO: 662608 - DNA, 33 bp, Homo sapien
aatctgacactatcaattattggtgaagatgtg

SEQ ID NO: 662609 - DNA, 33 bp, Homo sapien
gagattgtctagtgcaacagtaggaggatctct

SEQ ID NO: 662610 - DNA, 33 bp, Homo sapien
gagattgtctagtgcagcagtaggaggatctct

SEQ ID NO: 662611 - DNA, 33 bp, Homo sapien
cacactccttcaggaaaaattccaaaagaagac

SEQ ID NO: 662612 - DNA, 33 bp, Homo sapien
cacactccttcaggaagaattccaaaagaagac

SEQ ID NO: 662613 - DNA, 33 bp, Homo sapien
agccttcattcacaaacactctactctttgcca

SEQ ID NO: 662614 - DNA, 33 bp, Homo sapien
agccttcattcacaaatactctactctttgcca

SEQ ID NO: 662615 - DNA, 33 bp, Homo sapien
atctccctgccatacaacagaagctgaagccag

SEQ ID NO: 662616 - DNA, 33 bp, Homo sapien
atctccctgccatacaccagaagctgaagccag

SEQ ID NO: 662617 - DNA, 33 bp, Homo sapien
tgaatgtttcttgtgtaaattcatagataaagt

SEQ ID NO: 662618 - DNA, 33 bp, Homo sapien
tgaatgtttcttgtgtgaattcatagataaagt

SEQ ID NO: 662619 - DNA, 33 bp, Homo sapien
attatgtcccatattcagaactgggcactaaat

SEQ ID NO: 662620 - DNA, 33 bp, Homo sapien
attatgtcccatattctgaactgggcactaaat

SEQ ID NO: 662621 - DNA, 33 bp, Homo sapien
gctcagaaggaatgacaaccctatcttcataga

SEQ ID NO: 662622 - DNA, 33 bp, Homo sapien
gctcagaaggaatgaccaccctatcttcataga

SEQ ID NO: 662623 - DNA, 33 bp, Homo sapien
cctgctagcctggacagtatctgtttccacttt

SEQ ID NO: 662624 - DNA, 33 bp, Homo sapien
cctgctagcctggacattatctgtttccacttt

SEQ ID NO: 662625 - DNA, 33 bp, Homo sapien
cagcttctcttccatgaattccaggttccttgt

SEQ ID NO: 662626 - DNA, 33 bp, Homo sapien
cagcttctcttccatggattccaggttccttgt

SEQ ID NO: 662627 - DNA, 33 bp, Homo sapien
ccttgacctgtatggaacactgtctgctgagta

SEQ ID NO: 662628 - DNA, 33 bp, Homo sapien
ccttgacctgtatggatcactgtctgctgagta

SEQ ID NO: 662629 - DNA, 33 bp, Homo sapien
agactcaaaactttagcagaacttttcattctt

SEQ ID NO: 662630 - DNA, 33 bp, Homo sapien
agactcaaaactttaggagaacttttcattctt

SEQ ID NO: 662631 - DNA, 33 bp, Homo sapien
ttctgtctttctaatgacacatataaacacatg

SEQ ID NO: 662632 - DNA, 33 bp, Homo sapien
ttctgtctttctaatggcacatataaacacatg

SEQ ID NO: 662633 - DNA, 33 bp, Homo sapien
caaagaccgacagacacacaataccatacccac

SEQ ID NO: 662634 - DNA, 33 bp, Homo sapien
caaagaccgacagacatacaataccatacccac

SEQ ID NO: 662635 - DNA, 33 bp, Homo sapien
gtaagcgcctgactgaatagcagatagtcccaa

SEQ ID NO: 662636 - DNA, 33 bp, Homo sapien
gtaagcgcctgactgagtagcagatagtcccaa

SEQ ID NO: 662637 - DNA, 33 bp, Homo sapien
gaggttgtggacaccaaactcagcatggcatat

SEQ ID NO: 662638 - DNA, 33 bp, Homo sapien
gaggttgtggacaccacactcagcatggcatat

SEQ ID NO: 662639 - DNA, 33 bp, Homo sapien
tttaaactcttgctcacgggcaattagattaca

SEQ ID NO: 662640 - DNA, 33 bp, Homo sapien
tttaaactcttgctcatgggcaattagattaca

SEQ ID NO: 662641 - DNA, 33 bp, Homo sapien
tgtttccaggctgctacgtgcagacatgagaga

SEQ ID NO: 662642 - DNA, 33 bp, Homo sapien
tgtttccaggctgctatgtgcagacatgagaga

SEQ ID NO: 662643 - DNA, 33 bp, Homo sapien
tgtgggttgggtagaaagataaacagccaagtg

SEQ ID NO: 662644 - DNA, 33 bp, Homo sapien
tgtgggttgggtagaacgataaacagccaagtg

SEQ ID NO: 662645 - DNA, 33 bp, Homo sapien
gcctgtcaggtctgccaatgacccaagcccagg

SEQ ID NO: 662646 - DNA, 33 bp, Homo sapien
gcctgtcaggtctgccgatgacccaagcccagg

SEQ ID NO: 662647 - DNA, 33 bp, Homo sapien
tttctaggctggattgaaaagatgtatttctgg

SEQ ID NO: 662648 - DNA, 33 bp, Homo sapien
tttctaggctggattggaaagatgtatttctgg

SEQ ID NO: 662649 - DNA, 33 bp, Homo sapien
tgaaagaggactctaaaggttatacaagatact

SEQ ID NO: 662650 - DNA, 33 bp, Homo sapien
tgaaagaggactctaagggttatacaagatact

SEQ ID NO: 662651 - DNA, 33 bp, Homo sapien
agggatcggtattgtacctccagcacatgggct

SEQ ID NO: 662652 - DNA, 33 bp, Homo sapien
agggatcggtattgtagctccagcacatgggct

SEQ ID NO: 662653 - DNA, 33 bp, Homo sapien
taaacaaaacaatgacgcaatttgatgcgcaat

SEQ ID NO: 662654 - DNA, 33 bp, Homo sapien
taaacaaaacaatgactcaatttgatgcgcaat

SEQ ID NO: 662655 - DNA, 33 bp, Homo sapien
gctttgagtacataggaaaaagcagagcctcca

SEQ ID NO: 662656 - DNA, 33 bp, Homo sapien
gctttgagtacataggcaaaagcagagcctcca

SEQ ID NO: 662657 - DNA, 33 bp, Homo sapien
cttgaccgtagctggcaacacacagcacttcag

SEQ ID NO: 662658 - DNA, 33 bp, Homo sapien
cttgaccgtagctggcgacacacagcacttcag

SEQ ID NO: 662659 - DNA, 33 bp, Homo sapien
acacaccaagctcatccaccccagtatcccact

SEQ ID NO: 662660 - DNA, 33 bp, Homo sapien
acacaccaagctcatcgaccccagtatcccact

SEQ ID NO: 662661 - DNA, 33 bp, Homo sapien
agtcgtcctctggatacgcagctgctgaacggc

SEQ ID NO: 662662 - DNA, 33 bp, Homo sapien
agtcgtcctctggatatgcagctgctgaacggc

SEQ ID NO: 662663 - DNA, 33 bp, Homo sapien
ttaaatgtgactattaagccatgtaagaagggc

SEQ ID NO: 662664 - DNA, 33 bp, Homo sapien
ttaaatgtgactattaggccatgtaagaagggc

SEQ ID NO: 662665 - DNA, 33 bp, Homo sapien
acagctgttgtacagaacactcccatcactcta

SEQ ID NO: 662666 - DNA, 33 bp, Homo sapien
acagctgttgtacagaccactcccatcactcta

SEQ ID NO: 662667 - DNA, 33 bp, Homo sapien
tttgaattctagtataggttgctgctgtcttcc

SEQ ID NO: 662668 - DNA, 33 bp, Homo sapien
tttgaattctagtatatgttgctgctgtcttcc

SEQ ID NO: 662669 - DNA, 33 bp, Homo sapien
gtcttagcatctggccacaaggggagcccagga

SEQ ID NO: 662670 - DNA, 33 bp, Homo sapien
gtcttagcatctggccgcaaggggagcccagga

SEQ ID NO: 662671 - DNA, 33 bp, Homo sapien
gatgatgcagccacaacgcagtggaaagtgcct

SEQ ID NO: 662672 - DNA, 33 bp, Homo sapien
gatgatgcagccacaatgcagtggaaagtgcct

SEQ ID NO: 662673 - DNA, 33 bp, Homo sapien
tcttcgtacaaggccaaaatcctacaagattac

SEQ ID NO: 662674 - DNA, 33 bp, Homo sapien
tcttcgtacaaggccacaatcctacaagattac

SEQ ID NO: 662675 - DNA, 33 bp, Homo sapien
acagtgcagtggacaaccagaacattctgctaa

SEQ ID NO: 662676 - DNA, 33 bp, Homo sapien
acagtgcagtggacaatcagaacattctgctaa

SEQ ID NO: 662677 - DNA, 33 bp, Homo sapien
ttgatgaggactcacaaactaatacaaatcatg

SEQ ID NO: 662678 - DNA, 33 bp, Homo sapien
ttgatgaggactcacagactaatacaaatcatg

SEQ ID NO: 662679 - DNA, 33 bp, Homo sapien
cctgaaataaggaaacaaaacaggcaaaatata

SEQ ID NO: 662680 - DNA, 33 bp, Homo sapien
cctgaaataaggaaacgaaacaggcaaaatata

SEQ ID NO: 662681 - DNA, 33 bp, Homo sapien
gtgttctatggggtgaagaaaaacattgacact

SEQ ID NO: 662682 - DNA, 33 bp, Homo sapien
gtgttctatggggtgaggaaaaacattgacact

SEQ ID NO: 662683 - DNA, 33 bp, Homo sapien
tttttttgctcaggcaaaccctcacacaggctt

SEQ ID NO: 662684 - DNA, 33 bp, Homo sapien
tttttttgctcaggcacaccctcacacaggctt

SEQ ID NO: 662685 - DNA, 33 bp, Homo sapien
attcacttcaagcttccaccgtcgactattcta

SEQ ID NO: 662686 - DNA, 33 bp, Homo sapien
attcacttcaagcttctaccgtcgactattcta

SEQ ID NO: 662687 - DNA, 33 bp, Homo sapien
tattcttccataggcactagtgaaaggtaatac

SEQ ID NO: 662688 - DNA, 33 bp, Homo sapien
tattcttccataggcattagtgaaaggtaatac

SEQ ID NO: 662689 - DNA, 33 bp, Homo sapien
tatttggctgatttaacggcctcaattacctta

SEQ ID NO: 662690 - DNA, 33 bp, Homo sapien
tatttggctgatttaatggcctcaattacctta

SEQ ID NO: 662691 - DNA, 33 bp, Homo sapien
agctccactcagtgagaatatgcaccctctact

SEQ ID NO: 662692 - DNA, 33 bp, Homo sapien
agctccactcagtgaggatatgcaccctctact

SEQ ID NO: 662693 - DNA, 33 bp, Homo sapien
gtaaagtgcagtaaaggaggttgagtgatgtgg

SEQ ID NO: 662694 - DNA, 33 bp, Homo sapien
gtaaagtgcagtaaagtaggttgagtgatgtgg

SEQ ID NO: 662695 - DNA, 33 bp, Homo sapien
cttacagataaatgtacataagcccatggtttt

SEQ ID NO: 662696 - DNA, 33 bp, Homo sapien
cttacagataaatgtatataagcccatggtttt

SEQ ID NO: 662697 - DNA, 33 bp, Homo sapien
ttctcttccccctatacggtatgcttccttcac

SEQ ID NO: 662698 - DNA, 33 bp, Homo sapien
ttctcttccccctatatggtatgcttccttcac

SEQ ID NO: 662699 - DNA, 33 bp, Homo sapien
atgctgcagagtcaacgaaaattttcccaatgg

SEQ ID NO: 662700 - DNA, 33 bp, Homo sapien
atgctgcagagtcaactaaaattttcccaatgg

SEQ ID NO: 662701 - DNA, 33 bp, Homo sapien
ttaatatcgtaaaacactcttggctgtaagttt

SEQ ID NO: 662702 - DNA, 33 bp, Homo sapien
ttaatatcgtaaaacattcttggctgtaagttt

SEQ ID NO: 662703 - DNA, 33 bp, Homo sapien
atccagtatttcaggggataaagatttccaaaa

SEQ ID NO: 662704 - DNA, 33 bp, Homo sapien
atccagtatttcagggtataaagatttccaaaa

SEQ ID NO: 662705 - DNA, 33 bp, Homo sapien
gcttagatctagtcaaacttatattactctttg

SEQ ID NO: 662706 - DNA, 33 bp, Homo sapien
gcttagatctagtcaagcttatattactctttg

SEQ ID NO: 662707 - DNA, 33 bp, Homo sapien
tactaattcagtgctaactctttttccagtcct

SEQ ID NO: 662708 - DNA, 33 bp, Homo sapien
tactaattcagtgctacctctttttccagtcct

SEQ ID NO: 662709 - DNA, 33 bp, Homo sapien
atactttcctaatctacgttgagtatttgtatg

SEQ ID NO: 662710 - DNA, 33 bp, Homo sapien
atactttcctaatctatgttgagtatttgtatg

SEQ ID NO: 662711 - DNA, 33 bp, Homo sapien
ttcctgagacaaaacacctcacaatgcttttac

SEQ ID NO: 662712 - DNA, 33 bp, Homo sapien
ttcctgagacaaaacagctcacaatgcttttac

SEQ ID NO: 662713 - DNA, 33 bp, Homo sapien
aaggttgttgctgaaaatgaaggaggcgtgggt

SEQ ID NO: 662714 - DNA, 33 bp, Homo sapien
aaggttgttgctgaaagtgaaggaggcgtgggt

SEQ ID NO: 662715 - DNA, 33 bp, Homo sapien
tctgcatggaattgaccgagtcttaaatctgtg

SEQ ID NO: 662716 - DNA, 33 bp, Homo sapien
tctgcatggaattgactgagtcttaaatctgtg

SEQ ID NO: 662717 - DNA, 33 bp, Homo sapien
taaacagccaaacctaaaagtgatcagcattcc

SEQ ID NO: 662718 - DNA, 33 bp, Homo sapien
taaacagccaaacctacaagtgatcagcattcc

SEQ ID NO: 662719 - DNA, 33 bp, Homo sapien
cagacaccaactctggaaaacttaagcctaaaa

SEQ ID NO: 662720 - DNA, 33 bp, Homo sapien
cagacaccaactctgggaaacttaagcctaaaa

SEQ ID NO: 662721 - DNA, 33 bp, Homo sapien
ggtggaatgttcataaaaaccaaagtgtgaaca

SEQ ID NO: 662722 - DNA, 33 bp, Homo sapien
ggtggaatgttcataacaaccaaagtgtgaaca

SEQ ID NO: 662723 - DNA, 33 bp, Homo sapien
catttattaggaggtacgaatcccagatgatag

SEQ ID NO: 662724 - DNA, 33 bp, Homo sapien
catttattaggaggtatgaatcccagatgatag

SEQ ID NO: 662725 - DNA, 33 bp, Homo sapien
aaaaacaactgtaaaaatgatcatcattacgga

SEQ ID NO: 662726 - DNA, 33 bp, Homo sapien
aaaaacaactgtaaaattgatcatcattacgga

SEQ ID NO: 662727 - DNA, 33 bp, Homo sapien
tatagagaagtgcaaaaaatggcaaaaaattag

SEQ ID NO: 662728 - DNA, 33 bp, Homo sapien
tatagagaagtgcaaagaatggcaaaaaattag

SEQ ID NO: 662729 - DNA, 33 bp, Homo sapien
taaaacaacaataaaaatgctttgccctcttta

SEQ ID NO: 662730 - DNA, 33 bp, Homo sapien
taaaacaacaataaaagtgctttgccctcttta

SEQ ID NO: 662731 - DNA, 33 bp, Homo sapien
gaatgaggcctttagaatcagcacccagcagct

SEQ ID NO: 662732 - DNA, 33 bp, Homo sapien
gaatgaggcctttagagtcagcacccagcagct

SEQ ID NO: 662733 - DNA, 33 bp, Homo sapien
tctttctgagctccagaatgtgaaaatgataca

SEQ ID NO: 662734 - DNA, 33 bp, Homo sapien
tctttctgagctccaggatgtgaaaatgataca

SEQ ID NO: 662735 - DNA, 33 bp, Homo sapien
gcttggaattcaggcaatagatatgaaacgcaa

SEQ ID NO: 662736 - DNA, 33 bp, Homo sapien
gcttggaattcaggcagtagatatgaaacgcaa

SEQ ID NO: 662737 - DNA, 33 bp, Homo sapien
tgtgagtgatgctgacaggcaaaggacagagac

SEQ ID NO: 662738 - DNA, 33 bp, Homo sapien
tgtgagtgatgctgacgggcaaaggacagagac

SEQ ID NO: 662739 - DNA, 33 bp, Homo sapien
tttaagattgggattaaggtttgtctgcatttg

SEQ ID NO: 662740 - DNA, 33 bp, Homo sapien
tttaagattgggattacggtttgtctgcatttg

SEQ ID NO: 662741 - DNA, 33 bp, Homo sapien
gctggaggacttgtcaaagctttaaaaatgcta

SEQ ID NO: 662742 - DNA, 33 bp, Homo sapien
gctggaggacttgtcagagctttaaaaatgcta

SEQ ID NO: 662743 - DNA, 33 bp, Homo sapien
caacacaggcacagaaccattcttcagatggga

SEQ ID NO: 662744 - DNA, 33 bp, Homo sapien
caacacaggcacagaagcattcttcagatggga

SEQ ID NO: 662745 - DNA, 33 bp, Homo sapien
gacaggcatcaattcaaccaacacgtgttaggt

SEQ ID NO: 662746 - DNA, 33 bp, Homo sapien
gacaggcatcaattcagccaacacgtgttaggt

SEQ ID NO: 662747 - DNA, 33 bp, Homo sapien
agtaagctccatgaaagaagatgctgtatctgc

SEQ ID NO: 662748 - DNA, 33 bp, Homo sapien
agtaagctccatgaaataagatgctgtatctgc

SEQ ID NO: 662749 - DNA, 33 bp, Homo sapien
cttccagcccttaatgaattccacgtgttaaca

SEQ ID NO: 662750 - DNA, 33 bp, Homo sapien
cttccagcccttaatggattccacgtgttaaca

SEQ ID NO: 662751 - DNA, 33 bp, Homo sapien
aatgttgaaacaaaccaaaggagtgttgaatgt

SEQ ID NO: 662752 - DNA, 33 bp, Homo sapien
aatgttgaaacaaaccgaaggagtgttgaatgt

SEQ ID NO: 662753 - DNA, 33 bp, Homo sapien
tccgccgtggcaaaataaggataaaataaaact

SEQ ID NO: 662754 - DNA, 33 bp, Homo sapien
tccgccgtggcaaaatgaggataaaataaaact

SEQ ID NO: 662755 - DNA, 33 bp, Homo sapien
ctaattcctttctaaacgtgttttctggaggag

SEQ ID NO: 662756 - DNA, 33 bp, Homo sapien
ctaattcctttctaaatgtgttttctggaggag

SEQ ID NO: 662757 - DNA, 33 bp, Homo sapien
gtagagactttggcaacgtgtataccttcattg

SEQ ID NO: 662758 - DNA, 33 bp, Homo sapien
gtagagactttggcaatgtgtataccttcattg

SEQ ID NO: 662759 - DNA, 33 bp, Homo sapien
gtggtcacaaggcagaagagcgactgtgttatc

SEQ ID NO: 662760 - DNA, 33 bp, Homo sapien
gtggtcacaaggcagaggagcgactgtgttatc

SEQ ID NO: 662761 - DNA, 33 bp, Homo sapien
aaagccaaacttgagaagataacacagtcgctc

SEQ ID NO: 662762 - DNA, 33 bp, Homo sapien
aaagccaaacttgagaggataacacagtcgctc

SEQ ID NO: 662763 - DNA, 33 bp, Homo sapien
gtggacgacggaggggcccaactcatcatactc

SEQ ID NO: 662764 - DNA, 33 bp, Homo sapien
gtggacgacggaggggtccaactcatcatactc

SEQ ID NO: 662765 - DNA, 33 bp, Homo sapien
ctggaatagccttcacaaagaaattgtccttga

SEQ ID NO: 662766 - DNA, 33 bp, Homo sapien
ctggaatagccttcacgaagaaattgtccttga

SEQ ID NO: 662767 - DNA, 33 bp, Homo sapien; identical to SEQ ID NO: 662765

SEQ ID NO: 662768 - DNA, 33 bp, Homo sapien; identical to SEQ ID NO: 662766

SEQ ID NO: 662769 - DNA, 33 bp, Homo sapien
gtggtgctagttccaaaataagcatgggactta

SEQ ID NO: 662770 - DNA, 33 bp, Homo sapien
gtggtgctagttccaagataagcatgggactta

SEQ ID NO: 662771 - DNA, 33 bp, Homo sapien
tgtttcagaaagtagaagtggccaggatcacct

SEQ ID NO: 662772 - DNA, 33 bp, Homo sapien
tgtttcagaaagtagacgtggccaggatcacct

SEQ ID NO: 662773 - DNA, 33 bp, Homo sapien
tttttttcttactaccaagagaatggctgcctg

SEQ ID NO: 662774 - DNA, 33 bp, Homo sapien
tttttttcttactacccagagaatggctgcctg

SEQ ID NO: 662775 - DNA, 33 bp, Homo sapien
ctttgtgaatctgacaatatgcccagactatgc

SEQ ID NO: 662776 - DNA, 33 bp, Homo sapien
ctttgtgaatctgacagtatgcccagactatgc

SEQ ID NO: 662777 - DNA, 33 bp, Homo sapien
tcagcaatgagctaagcccttttgcattctata

SEQ ID NO: 662778 - DNA, 33 bp, Homo sapien
tcagcaatgagctaagtccttttgcattctata

SEQ ID NO: 662779 - DNA, 33 bp, Homo sapien
cagtgttgtagaagaccatcctggagttaagga

SEQ ID NO: 662780 - DNA, 33 bp, Homo sapien
cagtgttgtagaagactatcctggagttaagga

SEQ ID NO: 662781 - DNA, 33 bp, Homo sapien
catgggctctgggaccaccttagaaatgaagcc

SEQ ID NO: 662782 - DNA, 33 bp, Homo sapien
catgggctctgggaccgccttagaaatgaagcc

SEQ ID NO: 662783 - DNA, 33 bp, Homo sapien
ccacctccttatccagaaccttggccttgagca

SEQ ID NO: 662784 - DNA, 33 bp, Homo sapien
ccacctccttatccaggaccttggccttgagca

SEQ ID NO: 662785 - DNA, 33 bp, Homo sapien
atagtgatcatttacacggctacatagtggtct

SEQ ID NO: 662786 - DNA, 33 bp, Homo sapien
atagtgatcatttacatggctacatagtggtct

SEQ ID NO: 662787 - DNA, 33 bp, Homo sapien
agtcagttgccaataactgccaaagattgtaag

SEQ ID NO: 662788 - DNA, 33 bp, Homo sapien
agtcagttgccaataattgccaaagattgtaag

SEQ ID NO: 662789 - DNA, 33 bp, Homo sapien
agtcttgggttcagaactggcttatgttcatcc

SEQ ID NO: 662790 - DNA, 33 bp, Homo sapien
agtcttgggttcagaagtggcttatgttcatcc

SEQ ID NO: 662791 - DNA, 33 bp, Homo sapien
cagctgaacatatagcacttaattcagctagtt

SEQ ID NO: 662792 - DNA, 33 bp, Homo sapien
cagctgaacatatagcgcttaattcagctagtt

SEQ ID NO: 662793 - DNA, 33 bp, Homo sapien
accaagatggtggataaatatagctgcttatgg

SEQ ID NO: 662794 - DNA, 33 bp, Homo sapien
accaagatggtggatagatatagctgcttatgg

SEQ ID NO: 662795 - DNA, 33 bp, Homo sapien
gactgaggtatatttgcagaaggatgttagtct

SEQ ID NO: 662796 - DNA, 33 bp, Homo sapien
gactgaggtatatttgtagaaggatgttagtct

SEQ ID NO: 662797 - DNA, 33 bp, Homo sapien
ctcagtgtctcctaaacagagaccatttgcctc

SEQ ID NO: 662798 - DNA, 33 bp, Homo sapien
ctcagtgtctcctaaatagagaccatttgcctc

SEQ ID NO: 662799 - DNA, 33 bp, Homo sapien
tgcgcctcttgggcagaagtttcctggttcctc

SEQ ID NO: 662800 - DNA, 33 bp, Homo sapien
tgcgcctcttgggcaggagtttcctggttcctc

SEQ ID NO: 662801 - DNA, 33 bp, Homo sapien
tttgatccctgcaaccactgaagctgccagcca

SEQ ID NO: 662802 - DNA, 33 bp, Homo sapien
tttgatccctgcaaccgctgaagctgccagcca

SEQ ID NO: 662803 - DNA, 33 bp, Homo sapien
tttaaattttatgaaaagctggttaggcaggca

SEQ ID NO: 662804 - DNA, 33 bp, Homo sapien
tttaaattttatgaaaggctggttaggcaggca

SEQ ID NO: 662805 - DNA, 33 bp, Homo sapien
acctcccccataggaagaccacataaaactacc

SEQ ID NO: 662806 - DNA, 33 bp, Homo sapien
acctcccccataggaataccacataaaactacc

SEQ ID NO: 662807 - DNA, 33 bp, Homo sapien
tgtatcactgttaggagaaatcgtattgatttc

SEQ ID NO: 662808 - DNA, 33 bp, Homo sapien
tgtatcactgttaggataaatcgtattgatttc

SEQ ID NO: 662809 - DNA, 33 bp, Homo sapien
ttgaaaggtagataaaactgaaatttacataga

SEQ ID NO: 662810 - DNA, 33 bp, Homo sapien
ttgaaaggtagataaagctgaaatttacataga

SEQ ID NO: 662811 - DNA, 33 bp, Homo sapien
ggcctgcaaatcatagaagtgatgggcaaagca

SEQ ID NO: 662812 - DNA, 33 bp, Homo sapien
ggcctgcaaatcatagcagtgatgggcaaagca

SEQ ID NO: 662813 - DNA, 33 bp, Homo sapien
gacttgaagtattttacaaccctttctgaatct

SEQ ID NO: 662814 - DNA, 33 bp, Homo sapien
gacttgaagtattttataaccctttctgaatct

SEQ ID NO: 662815 - DNA, 33 bp, Homo sapien
catacagcagtgaggacagttaggatcaggata

SEQ ID NO: 662816 - DNA, 33 bp, Homo sapien
catacagcagtgaggatagttaggatcaggata

SEQ ID NO: 662817 - DNA, 33 bp, Homo sapien
aatcctccagttttagaagcttaacacacaaaa

SEQ ID NO: 662818 - DNA, 33 bp, Homo sapien
aatcctccagttttagcagcttaacacacaaaa

SEQ ID NO: 662819 - DNA, 33 bp, Homo sapien
tctggaagctatgtaacggctcagacacacaga

SEQ ID NO: 662820 - DNA, 33 bp, Homo sapien
tctggaagctatgtaagggctcagacacacaga

SEQ ID NO: 662821 - DNA, 33 bp, Homo sapien
gaagtgtcaggagcccaaaagaagctctgaaca

SEQ ID NO: 662822 - DNA, 33 bp, Homo sapien
gaagtgtcaggagcccgaaagaagctctgaaca

SEQ ID NO: 662823 - DNA, 33 bp, Homo sapien
aaaatacatgaagaacaatttcacgaagaggat

SEQ ID NO: 662824 - DNA, 33 bp, Homo sapien
aaaatacatgaagaaccatttcacgaagaggat

SEQ ID NO: 662825 - DNA, 33 bp, Homo sapien
agaaaacaggagaaacggtcttgaggctttctt

SEQ ID NO: 662826 - DNA, 33 bp, Homo sapien
agaaaacaggagaaactgtcttgaggctttctt

SEQ ID NO: 662827 - DNA, 33 bp, Homo sapien
catttctgctccacaaatcaagagaactagtac

SEQ ID NO: 662828 - DNA, 33 bp, Homo sapien
catttctgctccacaagtcaagagaactagtac

SEQ ID NO: 662829 - DNA, 33 bp, Homo sapien
ggagaccatagtttggaactctgaacgtgaact

SEQ ID NO: 662830 - DNA, 33 bp, Homo sapien
ggagaccatagtttgggactctgaacgtgaact

SEQ ID NO: 662831 - DNA, 33 bp, Homo sapien
gcaaaatcagggaaccaagtctaaaactgatag

SEQ ID NO: 662832 - DNA, 33 bp, Homo sapien
gcaaaatcagggaaccgagtctaaaactgatag

SEQ ID NO: 662833 - DNA, 33 bp, Homo sapien
gcaatgaggtgggaaaggtatgctggaccaggc

SEQ ID NO: 662834 - DNA, 33 bp, Homo sapien
gcaatgaggtgggaaatgtatgctggaccaggc

SEQ ID NO: 662835 - DNA, 33 bp, Homo sapien
ttgcaggcaggtagtccaaatgcatgcatccct

SEQ ID NO: 662836 - DNA, 33 bp, Homo sapien
ttgcaggcaggtagtctaaatgcatgcatccct

SEQ ID NO: 662837 - DNA, 33 bp, Homo sapien
agataacatgggccaaattgaaacagtttcctt

SEQ ID NO: 662838 - DNA, 33 bp, Homo sapien
agataacatgggccaagttgaaacagtttcctt

SEQ ID NO: 662839 - DNA, 33 bp, Homo sapien
aagagatctcattccacgccttgtgctccttca

SEQ ID NO: 662840 - DNA, 33 bp, Homo sapien
aagagatctcattccatgccttgtgctccttca

SEQ ID NO: 662841 - DNA, 33 bp, Homo sapien
actagtttcaattgccacaataaagtacgtctg

SEQ ID NO: 662842 - DNA, 33 bp, Homo sapien
actagtttcaattgccgcaataaagtacgtctg

SEQ ID NO: 662843 - DNA, 33 bp, Homo sapien
gtctaaatgatgtagccattagcctggcataaa

SEQ ID NO: 662844 - DNA, 33 bp, Homo sapien
gtctaaatgatgtagctattagcctggcataaa

SEQ ID NO: 662845 - DNA, 33 bp, Homo sapien
ggtaataggatgacaacaggatcctgaaatatc

SEQ ID NO: 662846 - DNA, 33 bp, Homo sapien
ggtaataggatgacaataggatcctgaaatatc

SEQ ID NO: 662847 - DNA, 33 bp, Homo sapien
atgtaggctgacatgaaatgatttacgctgtct

SEQ ID NO: 662848 - DNA, 33 bp, Homo sapien
atgtaggctgacatgagatgatttacgctgtct

SEQ ID NO: 662849 - DNA, 33 bp, Homo sapien
ttgattttagagaccacattatgcagaagatac

SEQ ID NO: 662850 - DNA, 33 bp, Homo sapien
ttgattttagagaccatattatgcagaagatac

SEQ ID NO: 662851 - DNA, 33 bp, Homo sapien
agaacacagaggaaacagccacttttaaatgat

SEQ ID NO: 662852 - DNA, 33 bp, Homo sapien
agaacacagaggaaacggccacttttaaatgat

SEQ ID NO: 662853 - DNA, 33 bp, Homo sapien
cttacaaaaaggaataactgattttctctgaac

SEQ ID NO: 662854 - DNA, 33 bp, Homo sapien
cttacaaaaaggaatatctgattttctctgaac

SEQ ID NO: 662855 - DNA, 33 bp, Homo sapien
gccccagctgccagccaccatcaattgtcagcc

SEQ ID NO: 662856 - DNA, 33 bp, Homo sapien
gccccagctgccagccgccatcaattgtcagcc

SEQ ID NO: 662857 - DNA, 33 bp, Homo sapien
gtgatgcaaaccaacccgaatttgggctcaata

SEQ ID NO: 662858 - DNA, 33 bp, Homo sapien
gtgatgcaaaccaacctgaatttgggctcaata

SEQ ID NO: 662859 - DNA, 33 bp, Homo sapien
ttttaaattagagccaatcttcttcctgccttc

SEQ ID NO: 662860 - DNA, 33 bp, Homo sapien
ttttaaattagagccagtcttcttcctgccttc

SEQ ID NO: 662861 - DNA, 33 bp, Homo sapien
tttcattcgttacttaaagcacttgactaagtg

SEQ ID NO: 662862 - DNA, 33 bp, Homo sapien
tttcattcgttacttatagcacttgactaagtg

SEQ ID NO: 662863 - DNA, 33 bp, Homo sapien
gcactttggtgatacacgggaaagtcacacgag

SEQ ID NO: 662864 - DNA, 33 bp, Homo sapien
gcactttggtgatacatgggaaagtcacacgag

SEQ ID NO: 662865 - DNA, 33 bp, Homo sapien
gtcaaagagccagaacagtctcaggcagttacc

SEQ ID NO: 662866 - DNA, 33 bp, Homo sapien
gtcaaagagccagaacggtctcaggcagttacc

SEQ ID NO: 662867 - DNA, 33 bp, Homo sapien
ccagactaaggaacgacatcaatagttatagta

SEQ ID NO: 662868 - DNA, 33 bp, Homo sapien
ccagactaaggaacgatatcaatagttatagta

SEQ ID NO: 662869 - DNA, 33 bp, Homo sapien
aaagagacttgtccaacatcaccttctggagcc

SEQ ID NO: 662870 - DNA, 33 bp, Homo sapien
aaagagacttgtccaagatcaccttctggagcc

SEQ ID NO: 662871 - DNA, 33 bp, Homo sapien
acacttcagcaacaaagcaaccagttgagtcat

SEQ ID NO: 662872 - DNA, 33 bp, Homo sapien
acacttcagcaacaaatcaaccagttgagtcat

SEQ ID NO: 662873 - DNA, 33 bp, Homo sapien
cagtgctaaaactttcacatatttccttcaaaa

SEQ ID NO: 662874 - DNA, 33 bp, Homo sapien
cagtgctaaaactttcgcatatttccttcaaaa

SEQ ID NO: 662875 - DNA, 33 bp, Homo sapien
atgaatctcacctgaactagtctcaaggggtac

SEQ ID NO: 662876 - DNA, 33 bp, Homo sapien
atgaatctcacctgaattagtctcaaggggtac

SEQ ID NO: 662877 - DNA, 33 bp, Homo sapien
caaagctggaagataacagagacaccccagagc

SEQ ID NO: 662878 - DNA, 33 bp, Homo sapien
caaagctggaagataatagagacaccccagagc

SEQ ID NO: 662879 - DNA, 33 bp, Homo sapien
gaattaaatgatataaatacgtgtctggcacag

SEQ ID NO: 662880 - DNA, 33 bp, Homo sapien
gaattaaatgatataattacgtgtctggcacag

SEQ ID NO: 662881 - DNA, 33 bp, Homo sapien
acatgtgacatgtatacaggaaatagggtcaac

SEQ ID NO: 662882 - DNA, 33 bp, Homo sapien
acatgtgacatgtatataggaaatagggtcaac

SEQ ID NO: 662883 - DNA, 33 bp, Homo sapien
tacagacacacatcacagaatgacattttggtc

SEQ ID NO: 662884 - DNA, 33 bp, Homo sapien
tacagacacacatcacggaatgacattttggtc

SEQ ID NO: 662885 - DNA, 33 bp, Homo sapien
caactggcaaaacttaacaatggtgaaatgaaa

SEQ ID NO: 662886 - DNA, 33 bp, Homo sapien
caactggcaaaacttatcaatggtgaaatgaaa

SEQ ID NO: 662887 - DNA, 33 bp, Homo sapien
ataatgttatctaccacatctgattgttgtgag

SEQ ID NO: 662888 - DNA, 33 bp, Homo sapien
ataatgttatctaccatatctgattgttgtgag

SEQ ID NO: 662889 - DNA, 33 bp, Homo sapien
tttgaatttgtgcccaatatctgttttcaaaga

SEQ ID NO: 662890 - DNA, 33 bp, Homo sapien
tttgaatttgtgcccagtatctgttttcaaaga

SEQ ID NO: 662891 - DNA, 33 bp, Homo sapien
catttaacaaaatatgccagatagcttttcatt

SEQ ID NO: 662892 - DNA, 33 bp, Homo sapien
catttaacaaaatatgtcagatagcttttcatt

SEQ ID NO: 662893 - DNA, 33 bp, Homo sapien
gcaatatctgccattccaacttcgtatagttca

SEQ ID NO: 662894 - DNA, 33 bp, Homo sapien
gcaatatctgccattctaacttcgtatagttca

SEQ ID NO: 662895 - DNA, 33 bp, Homo sapien
agcatgaatgggcagacagctgagagagactat

SEQ ID NO: 662896 - DNA, 33 bp, Homo sapien
agcatgaatgggcagagagctgagagagactat

SEQ ID NO: 662897 - DNA, 33 bp, Homo sapien
aaactcaagaggcaaactcatgacaacaaccca

SEQ ID NO: 662898 - DNA, 33 bp, Homo sapien
aaactcaagaggcaaagtcatgacaacaaccca

SEQ ID NO: 662899 - DNA, 33 bp, Homo sapien
agctcccagaatgctacggtcactgtatctgct

SEQ ID NO: 662900 - DNA, 33 bp, Homo sapien
agctcccagaatgctatggtcactgtatctgct

SEQ ID NO: 662901 - DNA, 33 bp, Homo sapien
actataatagattaaaagacatcaaatatgact

SEQ ID NO: 662902 - DNA, 33 bp, Homo sapien
actataatagattaaaggacatcaaatatgact

SEQ ID NO: 662903 - DNA, 33 bp, Homo sapien
atacaaaagtataaaacggaacgcttagcttac

SEQ ID NO: 662904 - DNA, 33 bp, Homo sapien
atacaaaagtataaaatggaacgcttagcttac

SEQ ID NO: 662905 - DNA, 33 bp, Homo sapien
tgactttccttgattgcaattgtgtataaatta

SEQ ID NO: 662906 - DNA, 33 bp, Homo sapien
tgactttccttgattgtaattgtgtataaatta

SEQ ID NO: 662907 - DNA, 33 bp, Homo sapien
gaagaacccatgtgacaggggagccaatcacca

SEQ ID NO: 662908 - DNA, 33 bp, Homo sapien
gaagaacccatgtgacgggggagccaatcacca

SEQ ID NO: 662909 - DNA, 33 bp, Homo sapien
gagccaaacccagcacagatggtctgactccaa

SEQ ID NO: 662910 - DNA, 33 bp, Homo sapien
gagccaaacccagcacggatggtctgactccaa

SEQ ID NO: 662911 - DNA, 33 bp, Homo sapien
tagacatgacagtaaacatccagaaaattgagt

SEQ ID NO: 662912 - DNA, 33 bp, Homo sapien
tagacatgacagtaaatatccagaaaattgagt

SEQ ID NO: 662913 - DNA, 33 bp, Homo sapien
tcgcatcatcttttgcaccactcatgattcagg

SEQ ID NO: 662914 - DNA, 33 bp, Homo sapien
tcgcatcatcttttgcgccactcatgattcagg

SEQ ID NO: 662915 - DNA, 33 bp, Homo sapien
ccctaaataaagtagcactgtctgccaatattt

SEQ ID NO: 662916 - DNA, 33 bp, Homo sapien
ccctaaataaagtagcgctgtctgccaatattt

SEQ ID NO: 662917 - DNA, 33 bp, Homo sapien
gatctttccaactcacccacaagtccctgttgg

SEQ ID NO: 662918 - DNA, 33 bp, Homo sapien
gatctttccaactcacgcacaagtccctgttgg

SEQ ID NO: 662919 - DNA, 33 bp, Homo sapien
cccctcaaagtacgtacattcaaaacagactca

SEQ ID NO: 662920 - DNA, 33 bp, Homo sapien
cccctcaaagtacgtatattcaaaacagactca

SEQ ID NO: 662921 - DNA, 33 bp, Homo sapien
agttaaccaggaaaaaaagttggataagaataa

SEQ ID NO: 662922 - DNA, 33 bp, Homo sapien
agttaaccaggaaaaacagttggataagaataa

SEQ ID NO: 662923 - DNA, 33 bp, Homo sapien
cccagcatggagtaaacgcttaaactgtgctta

SEQ ID NO: 662924 - DNA, 33 bp, Homo sapien
cccagcatggagtaaatgcttaaactgtgctta

SEQ ID NO: 662925 - DNA, 33 bp, Homo sapien
gggagacaggcaatgaatacataggaccatgtt

SEQ ID NO: 662926 - DNA, 33 bp, Homo sapien
gggagacaggcaatgattacataggaccatgtt

SEQ ID NO: 662927 - DNA, 33 bp, Homo sapien
tgccattttcaggcacagaggacaaaacaaaca

SEQ ID NO: 662928 - DNA, 33 bp, Homo sapien
tgccattttcaggcacggaggacaaaacaaaca

SEQ ID NO: 662929 - DNA, 33 bp, Homo sapien
caagctaaccttcgcgcatggcagctgtggagc

SEQ ID NO: 662930 - DNA, 33 bp, Homo sapien
caagctaaccttcgcgtatggcagctgtggagc

SEQ ID NO: 662931 - DNA, 33 bp, Homo sapien
aaactccttgagggaaagattcttcagcggtgt

SEQ ID NO: 662932 - DNA, 33 bp, Homo sapien
aaactccttgagggaaggattcttcagcggtgt

SEQ ID NO: 662933 - DNA, 33 bp, Homo sapien
caaaacctagtaagtcaaggaaaatggagacaa

SEQ ID NO: 662934 - DNA, 33 bp, Homo sapien
caaaacctagtaagtccaggaaaatggagacaa

SEQ ID NO: 662935 - DNA, 33 bp, Homo sapien
actatgtaattttgtgccaatcactttccctgc

SEQ ID NO: 662936 - DNA, 33 bp, Homo sapien
actatgtaattttgtgtcaatcactttccctgc

SEQ ID NO: 662937 - DNA, 33 bp, Homo sapien
tctaacctggacttcactcagctatgatggttt

SEQ ID NO: 662938 - DNA, 33 bp, Homo sapien
tctaacctggacttcattcagctatgatggttt

SEQ ID NO: 662939 - DNA, 33 bp, Homo sapien
tggtcttctctggaaacgtgaacagcagcttca

SEQ ID NO: 662940 - DNA, 33 bp, Homo sapien
tggtcttctctggaaatgtgaacagcagcttca

SEQ ID NO: 662941 - DNA, 33 bp, Homo sapien
ggtgggtctcctcagagattacagctttagaaa

SEQ ID NO: 662942 - DNA, 33 bp, Homo sapien
ggtgggtctcctcagatattacagctttagaaa

SEQ ID NO: 662943 - DNA, 33 bp, Homo sapien
agcctggatgaagagccgaggaaaaggaacact

SEQ ID NO: 662944 - DNA, 33 bp, Homo sapien
agcctggatgaagagcggaggaaaaggaacact

SEQ ID NO: 662945 - DNA, 33 bp, Homo sapien
tgacctgctttctgtcactactgattttccctt

SEQ ID NO: 662946 - DNA, 33 bp, Homo sapien
tgacctgctttctgtcgctactgattttccctt

SEQ ID NO: 662947 - DNA, 33 bp, Homo sapien
gaggctatggcaacagaccaggtgagaagcgat

SEQ ID NO: 662948 - DNA, 33 bp, Homo sapien
gaggctatggcaacaggccaggtgagaagcgat

SEQ ID NO: 662949 - DNA, 33 bp, Homo sapien
aagaaaggcagacaggaatggagaaaaatgcag

SEQ ID NO: 662950 - DNA, 33 bp, Homo sapien
aagaaaggcagacaggcatggagaaaaatgcag

SEQ ID NO: 662951 - DNA, 33 bp, Homo sapien
catggtaggaagggaaatacatatgcaggggct

SEQ ID NO: 662952 - DNA, 33 bp, Homo sapien
catggtaggaagggaagtacatatgcaggggct

SEQ ID NO: 662953 - DNA, 33 bp, Homo sapien
ctggacagcattccaaaaagaccatgtgttctc

SEQ ID NO: 662954 - DNA, 33 bp, Homo sapien
ctggacagcattccaagaagaccatgtgttctc

SEQ ID NO: 662955 - DNA, 33 bp, Homo sapien
tatgcaccatgttctacgagagctatttggacc

SEQ ID NO: 662956 - DNA, 33 bp, Homo sapien
tatgcaccatgttctatgagagctatttggacc

SEQ ID NO: 662957 - DNA, 33 bp, Homo sapien
gaaatggtctcataaaccttgtcattgcagtcc

SEQ ID NO: 662958 - DNA, 33 bp, Homo sapien
gaaatggtctcataaatcttgtcattgcagtcc

SEQ ID NO: 662959 - DNA, 33 bp, Homo sapien
gtagagtctcggttaaatattcccacctgttgc

SEQ ID NO: 662960 - DNA, 33 bp, Homo sapien
gtagagtctcggttaagtattcccacctgttgc

SEQ ID NO: 662961 - DNA, 33 bp, Homo sapien
catcgtgaacaacaaaaatatattgatctaaac

SEQ ID NO: 662962 - DNA, 33 bp, Homo sapien
catcgtgaacaacaaagatatattgatctaaac

SEQ ID NO: 662963 - DNA, 33 bp, Homo sapien
gatggcacatgataaacggtatgtatttgcccg

SEQ ID NO: 662964 - DNA, 33 bp, Homo sapien
gatggcacatgataaatggtatgtatttgcccg

SEQ ID NO: 662965 - DNA, 33 bp, Homo sapien
gctgttatctaacccacgactaattggaccctg

SEQ ID NO: 662966 - DNA, 33 bp, Homo sapien
gctgttatctaacccatgactaattggaccctg

SEQ ID NO: 662967 - DNA, 33 bp, Homo sapien
gatttcctctgcagcaatacagtttatccagat

SEQ ID NO: 662968 - DNA, 33 bp, Homo sapien
gatttcctctgcagcagtacagtttatccagat

SEQ ID NO: 662969 - DNA, 33 bp, Homo sapien
cacatattcaatgaaactaaggaaatgtttgta

SEQ ID NO: 662970 - DNA, 33 bp, Homo sapien
cacatattcaatgaaagtaaggaaatgtttgta

SEQ ID NO: 662971 - DNA, 33 bp, Homo sapien
aattccagtcactgaaatataacatctgattta

SEQ ID NO: 662972 - DNA, 33 bp, Homo sapien
aattccagtcactgaagtataacatctgattta

SEQ ID NO: 662973 - DNA, 33 bp, Homo sapien
gttcaaccatgttagaatatttgcccagtgggc

SEQ ID NO: 662974 - DNA, 33 bp, Homo sapien
gttcaaccatgttagattatttgcccagtgggc

SEQ ID NO: 662975 - DNA, 33 bp, Homo sapien
agtctcccagcccccaagtatgaagctgagtca

SEQ ID NO: 662976 - DNA, 33 bp, Homo sapien
agtctcccagcccccaggtatgaagctgagtca

SEQ ID NO: 662977 - DNA, 33 bp, Homo sapien
tcagtttttcaagacccatttaataatttctca

SEQ ID NO: 662978 - DNA, 33 bp, Homo sapien
tcagtttttcaagacctatttaataatttctca

SEQ ID NO: 662979 - DNA, 33 bp, Homo sapien
tcatcacagtaatcctaaagacagatgtttctg

SEQ ID NO: 662980 - DNA, 33 bp, Homo sapien
tcatcacagtaatcctgaagacagatgtttctg

SEQ ID NO: 662981 - DNA, 33 bp, Homo sapien
cccattacggctgcctcacttctcttcaattgg

SEQ ID NO: 662982 - DNA, 33 bp, Homo sapien
cccattacggctgcctgacttctcttcaattgg

SEQ ID NO: 662983 - DNA, 33 bp, Homo sapien
atcagatggtatttgtcaacttactgctctgaa

SEQ ID NO: 662984 - DNA, 33 bp, Homo sapien
atcagatggtatttgttaacttactgctctgaa

SEQ ID NO: 662985 - DNA, 33 bp, Homo sapien
atccagattcgagaaacagtgtctagctatgtc

SEQ ID NO: 662986 - DNA, 33 bp, Homo sapien
atccagattcgagaaagagtgtctagctatgtc

SEQ ID NO: 662987 - DNA, 33 bp, Homo sapien
gaaagacaggtgggtgcagtgatggcagggcct

SEQ ID NO: 662988 - DNA, 33 bp, Homo sapien
gaaagacaggtgggtgtagtgatggcagggcct

SEQ ID NO: 662989 - DNA, 33 bp, Homo sapien
gcacctcctctgtccaagatatgatgccaagta

SEQ ID NO: 662990 - DNA, 33 bp, Homo sapien
gcacctcctctgtccaggatatgatgccaagta

SEQ ID NO: 662991 - DNA, 33 bp, Homo sapien
ccgtcccaagcaattaaactgcctagaaggcaa

SEQ ID NO: 662992 - DNA, 33 bp, Homo sapien
ccgtcccaagcaattatactgcctagaaggcaa

SEQ ID NO: 662993 - DNA, 33 bp, Homo sapien
attctcacctgcaaatcaaatgctagcactggc

SEQ ID NO: 662994 - DNA, 33 bp, Homo sapien
attctcacctgcaaattaaatgctagcactggc

SEQ ID NO: 662995 - DNA, 33 bp, Homo sapien
agggataaaggaagaacggacagaaggagggaa

SEQ ID NO: 662996 - DNA, 33 bp, Homo sapien
agggataaaggaagaatggacagaaggagggaa

SEQ ID NO: 662997 - DNA, 33 bp, Homo sapien
tgatcttgagtaaaataagggcattagccataa

SEQ ID NO: 662998 - DNA, 33 bp, Homo sapien
tgatcttgagtaaaatgagggcattagccataa

SEQ ID NO: 662999 - DNA, 33 bp, Homo sapien
ggcagagcaaggaagaatagacctgagagatga

SEQ ID NO: 663000 - DNA, 33 bp, Homo sapien
ggcagagcaaggaagagtagacctgagagatga

SEQ ID NO: 663001 - DNA, 33 bp, Homo sapien
gtgggcaggttttcctaactgaattaagtgttc

SEQ ID NO: 663002 - DNA, 33 bp, Homo sapien
gtgggcaggttttcctgactgaattaagtgttc

SEQ ID NO: 663003 - DNA, 33 bp, Homo sapien
ggtaagttcatttggcagactgtaatataaaat

SEQ ID NO: 663004 - DNA, 33 bp, Homo sapien
ggtaagttcatttggcggactgtaatataaaat

SEQ ID NO: 663005 - DNA, 33 bp, Homo sapien
cttctgttttaaccttaaagccatgagaatcca

SEQ ID NO: 663006 - DNA, 33 bp, Homo sapien
cttctgttttaacctttaagccatgagaatcca

SEQ ID NO: 663007 - DNA, 33 bp, Homo sapien
tatacttttagaaatccagtagacagcagtgtt

SEQ ID NO: 663008 - DNA, 33 bp, Homo sapien
tatacttttagaaatctagtagacagcagtgtt

SEQ ID NO: 663009 - DNA, 33 bp, Homo sapien
ttgtggactgatgccaataagttttaccttcag

SEQ ID NO: 663010 - DNA, 33 bp, Homo sapien
ttgtggactgatgccattaagttttaccttcag

SEQ ID NO: 663011 - DNA, 33 bp, Homo sapien
aggagagtaagagggaccttgtgtttgagacag

SEQ ID NO: 663012 - DNA, 33 bp, Homo sapien
aggagagtaagagggagcttgtgtttgagacag

SEQ ID NO: 663013 - DNA, 33 bp, Homo sapien
ctgctgagagatccagacatataagaatgaaga

SEQ ID NO: 663014 - DNA, 33 bp, Homo sapien
ctgctgagagatccagtcatataagaatgaaga

SEQ ID NO: 663015 - DNA, 33 bp, Homo sapien
aatacttacctccccaatactcaagtcctacca

SEQ ID NO: 663016 - DNA, 33 bp, Homo sapien
aatacttacctccccagtactcaagtcctacca

SEQ ID NO: 663017 - DNA, 33 bp, Homo sapien
gcccaagtctcacaggcaaaaaatggtcaagct

SEQ ID NO: 663018 - DNA, 33 bp, Homo sapien
gcccaagtctcacaggtaaaaaatggtcaagct

SEQ ID NO: 663019 - DNA, 33 bp, Homo sapien
agtgagaactacaaggccatcttgtctagcacc

SEQ ID NO: 663020 - DNA, 33 bp, Homo sapien
agtgagaactacaagggcatcttgtctagcacc

SEQ ID NO: 663021 - DNA, 33 bp, Homo sapien
tagcatttaatagatacggttgttttagcttct

SEQ ID NO: 663022 - DNA, 33 bp, Homo sapien
tagcatttaatagatatggttgttttagcttct

SEQ ID NO: 663023 - DNA, 33 bp, Homo sapien
acatataattcacacaacaaatgaaacctagga

SEQ ID NO: 663024 - DNA, 33 bp, Homo sapien
acatataattcacacagcaaatgaaacctagga

SEQ ID NO: 663025 - DNA, 33 bp, Homo sapien
acccctgttttatggaacaagacatgaataaaa

SEQ ID NO: 663026 - DNA, 33 bp, Homo sapien
acccctgttttatggatcaagacatgaataaaa

SEQ ID NO: 663027 - DNA, 33 bp, Homo sapien
gtctttctgaagtcaaaacacagtacaactctt

SEQ ID NO: 663028 - DNA, 33 bp, Homo sapien
gtctttctgaagtcaatacacagtacaactctt

SEQ ID NO: 663029 - DNA, 33 bp, Homo sapien
agcacttgtttttgaaccataaactgtggtccc

SEQ ID NO: 663030 - DNA, 33 bp, Homo sapien
agcacttgtttttgaatcataaactgtggtccc

SEQ ID NO: 663031 - DNA, 33 bp, Homo sapien
tatggactaaggaaagccttccctgctagagga

SEQ ID NO: 663032 - DNA, 33 bp, Homo sapien
tatggactaaggaaaggcttccctgctagagga

SEQ ID NO: 663033 - DNA, 33 bp, Homo sapien
aaccatgctcccaacactactcactctgaaatc

SEQ ID NO: 663034 - DNA, 33 bp, Homo sapien
aaccatgctcccaacagtactcactctgaaatc

SEQ ID NO: 663035 - DNA, 33 bp, Homo sapien
tccttactcagcccagcatggaaggtgttcaca

SEQ ID NO: 663036 - DNA, 33 bp, Homo sapien
tccttactcagcccagtatggaaggtgttcaca

SEQ ID NO: 663037 - DNA, 33 bp, Homo sapien
tgatggccttctggagccaaattgtaatactct

SEQ ID NO: 663038 - DNA, 33 bp, Homo sapien
tgatggccttctggagtcaaattgtaatactct

SEQ ID NO: 663039 - DNA, 33 bp, Homo sapien
gtcagttttaaagatcaacacttggaatcagaa

SEQ ID NO: 663040 - DNA, 33 bp, Homo sapien
gtcagttttaaagatcgacacttggaatcagaa

SEQ ID NO: 663041 - DNA, 33 bp, Homo sapien
aataggctggaaagacagtaataagccaaagat

SEQ ID NO: 663042 - DNA, 33 bp, Homo sapien
aataggctggaaagacggtaataagccaaagat

SEQ ID NO: 663043 - DNA, 33 bp, Homo sapien
ccggagtttgtcgctgaaagtgtgggaatagaa

SEQ ID NO: 663044 - DNA, 33 bp, Homo sapien
ccggagtttgtcgctggaagtgtgggaatagaa

SEQ ID NO: 663045 - DNA, 33 bp, Homo sapien
cttctgtttgtgggacgctccttccctcacacc

SEQ ID NO: 663046 - DNA, 33 bp, Homo sapien
cttctgtttgtgggactctccttccctcacacc

SEQ ID NO: 663047 - DNA, 33 bp, Homo sapien
tgaataagaggctcacactgtctgctgtgttgt

SEQ ID NO: 663048 - DNA, 33 bp, Homo sapien
tgaataagaggctcacgctgtctgctgtgttgt

SEQ ID NO: 663049 - DNA, 33 bp, Homo sapien
atggtaggtttagagagtccagtattcataaag

SEQ ID NO: 663050 - DNA, 33 bp, Homo sapien
atggtaggtttagagattccagtattcataaag

SEQ ID NO: 663051 - DNA, 33 bp, Homo sapien
tgactctcatctatacacagggatggctcaggc

SEQ ID NO: 663052 - DNA, 33 bp, Homo sapien
tgactctcatctatacgcagggatggctcaggc

SEQ ID NO: 663053 - DNA, 33 bp, Homo sapien
gaggaaagggcttcaacgttcctctgctcttct

SEQ ID NO: 663054 - DNA, 33 bp, Homo sapien
gaggaaagggcttcaaggttcctctgctcttct

SEQ ID NO: 663055 - DNA, 33 bp, Homo sapien
tgttttctgaagtcagaccatggactgtagatt

SEQ ID NO: 663056 - DNA, 33 bp, Homo sapien
tgttttctgaagtcaggccatggactgtagatt

SEQ ID NO: 663057 - DNA, 33 bp, Homo sapien
gttttgctctgatgaacgccctgggctgacaat

SEQ ID NO: 663058 - DNA, 33 bp, Homo sapien
gttttgctctgatgaatgccctgggctgacaat

SEQ ID NO: 663059 - DNA, 33 bp, Homo sapien
agactcaattttaagaaggcacatcagcatgaa

SEQ ID NO: 663060 - DNA, 33 bp, Homo sapien
agactcaattttaagacggcacatcagcatgaa

SEQ ID NO: 663061 - DNA, 33 bp, Homo sapien
atatccctccatattcaaaccaatacagttgaa

SEQ ID NO: 663062 - DNA, 33 bp, Homo sapien
atatccctccatattccaaccaatacagttgaa

SEQ ID NO: 663063 - DNA, 33 bp, Homo sapien
tggggtgatgctatccaaagtctttaagtaatc

SEQ ID NO: 663064 - DNA, 33 bp, Homo sapien
tggggtgatgctatccgaagtctttaagtaatc

SEQ ID NO: 663065 - DNA, 33 bp, Homo sapien
tatacccagaacaagcacaagtagaggtgggaa

SEQ ID NO: 663066 - DNA, 33 bp, Homo sapien
tatacccagaacaagcgcaagtagaggtgggaa

SEQ ID NO: 663067 - DNA, 33 bp, Homo sapien
aaagatgacagtaacaacttctaagtatcaagt

SEQ ID NO: 663068 - DNA, 33 bp, Homo sapien
aaagatgacagtaacagcttctaagtatcaagt

SEQ ID NO: 663069 - DNA, 33 bp, Homo sapien
ccatttatagcgttaacgtattgctatggtttg

SEQ ID NO: 663070 - DNA, 33 bp, Homo sapien
ccatttatagcgttaatgtattgctatggtttg

SEQ ID NO: 663071 - DNA, 33 bp, Homo sapien
agggcaagctggagaacgaccctgtaaattcca

SEQ ID NO: 663072 - DNA, 33 bp, Homo sapien
agggcaagctggagaatgaccctgtaaattcca

SEQ ID NO: 663073 - DNA, 33 bp, Homo sapien
agctttcattgggcacaattaacaaaagtgtac

SEQ ID NO: 663074 - DNA, 33 bp, Homo sapien
agctttcattgggcacgattaacaaaagtgtac

SEQ ID NO: 663075 - DNA, 33 bp, Homo sapien
taattagcttatagccacagtgataattgggcc

SEQ ID NO: 663076 - DNA, 33 bp, Homo sapien
taattagcttatagccgcagtgataattgggcc

SEQ ID NO: 663077 - DNA, 33 bp, Homo sapien
attttccagaagttcacgctctgcaaggcctta

SEQ ID NO: 663078 - DNA, 33 bp, Homo sapien
attttccagaagttcaggctctgcaaggcctta

SEQ ID NO: 663079 - DNA, 33 bp, Homo sapien
aagggatggggccagacaatgagcaggtggtct

SEQ ID NO: 663080 - DNA, 33 bp, Homo sapien
aagggatggggccagataatgagcaggtggtct

SEQ ID NO: 663081 - DNA, 33 bp, Homo sapien
agcaaagggtttggcacctataaatagaatttc

SEQ ID NO: 663082 - DNA, 33 bp, Homo sapien
agcaaagggtttggcagctataaatagaatttc

SEQ ID NO: 663083 - DNA, 33 bp, Homo sapien
aggattagggctgaaaataccaaacctttttta

SEQ ID NO: 663084 - DNA, 33 bp, Homo sapien
aggattagggctgaaagtaccaaacctttttta

SEQ ID NO: 663085 - DNA, 33 bp, Homo sapien
cctccctctctgtataaagcaaaacaagtctct

SEQ ID NO: 663086 - DNA, 33 bp, Homo sapien
cctccctctctgtatatagcaaaacaagtctct

SEQ ID NO: 663087 - DNA, 33 bp, Homo sapien
ataatacccagctaaacgccctcactagtcatc

SEQ ID NO: 663088 - DNA, 33 bp, Homo sapien
ataatacccagctaaatgccctcactagtcatc

SEQ ID NO: 663089 - DNA, 33 bp, Homo sapien
ctgttcggtgataacgaatgctggggttggtta

SEQ ID NO: 663090 - DNA, 33 bp, Homo sapien
ctgttcggtgataacgtatgctggggttggtta

SEQ ID NO: 663091 - DNA, 33 bp, Homo sapien
cttgatttcaaagggcacacaaggccacacaga

SEQ ID NO: 663092 - DNA, 33 bp, Homo sapien
cttgatttcaaagggcgcacaaggccacacaga

SEQ ID NO: 663093 - DNA, 33 bp, Homo sapien
tgtcattgaattgaagaccagcttggataatcc

SEQ ID NO: 663094 - DNA, 33 bp, Homo sapien
tgtcattgaattgaaggccagcttggataatcc

SEQ ID NO: 663095 - DNA, 33 bp, Homo sapien
agatcaaggtcccaaactgcctattgctggagg

SEQ ID NO: 663096 - DNA, 33 bp, Homo sapien
agatcaaggtcccaaattgcctattgctggagg

SEQ ID NO: 663097 - DNA, 33 bp, Homo sapien
ccatgcaagttatgacagaaggttggaaatggt

SEQ ID NO: 663098 - DNA, 33 bp, Homo sapien
ccatgcaagttatgactgaaggttggaaatggt

SEQ ID NO: 663099 - DNA, 33 bp, Homo sapien
gtctcaaattcacagtaaaggcagttaagggca

SEQ ID NO: 663100 - DNA, 33 bp, Homo sapien
gtctcaaattcacagtcaaggcagttaagggca

SEQ ID NO: 663101 - DNA, 33 bp, Homo sapien
ggggaaaaacctctacacatttggtcccagaag

SEQ ID NO: 663102 - DNA, 33 bp, Homo sapien
ggggaaaaacctctacgcatttggtcccagaag

SEQ ID NO: 663103 - DNA, 33 bp, Homo sapien
cctcacatctatccacagcattttgccagcttt

SEQ ID NO: 663104 - DNA, 33 bp, Homo sapien
cctcacatctatccacggcattttgccagcttt

SEQ ID NO: 663105 - DNA, 33 bp, Homo sapien
tggtacacagcagagcactcaagaggcttcttc

SEQ ID NO: 663106 - DNA, 33 bp, Homo sapien
tggtacacagcagagcgctcaagaggcttcttc

SEQ ID NO: 663107 - DNA, 33 bp, Homo sapien
agcagtccactaacaaccccatggcttcacatg

SEQ ID NO: 663108 - DNA, 33 bp, Homo sapien
agcagtccactaacaatcccatggcttcacatg

SEQ ID NO: 663109 - DNA, 33 bp, Homo sapien
tcacatatattctatcactgatgatgccaccat

SEQ ID NO: 663110 - DNA, 33 bp, Homo sapien
tcacatatattctatcgctgatgatgccaccat

SEQ ID NO: 663111 - DNA, 33 bp, Homo sapien
acaattttttcacatagaagtgtgccttaaaat

SEQ ID NO: 663112 - DNA, 33 bp, Homo sapien
acaattttttcacatataagtgtgccttaaaat

SEQ ID NO: 663113 - DNA, 33 bp, Homo sapien
cctgtctccaactcaccggtatctgctctcatg

SEQ ID NO: 663114 - DNA, 33 bp, Homo sapien
cctgtctccaactcactggtatctgctctcatg

SEQ ID NO: 663115 - DNA, 33 bp, Homo sapien
agaggaaggtgtgaacgaatcacatggggagtg

SEQ ID NO: 663116 - DNA, 33 bp, Homo sapien
agaggaaggtgtgaactaatcacatggggagtg

SEQ ID NO: 663117 - DNA, 33 bp, Homo sapien
tccattcctgaccatcacctcctatcgcctcct

SEQ ID NO: 663118 - DNA, 33 bp, Homo sapien
tccattcctgaccatcgcctcctatcgcctcct

SEQ ID NO: 663119 - DNA, 33 bp, Homo sapien
ctgtattttcatgaaaaagtatgggtacatcag

SEQ ID NO: 663120 - DNA, 33 bp, Homo sapien
ctgtattttcatgaaagagtatgggtacatcag

SEQ ID NO: 663121 - DNA, 33 bp, Homo sapien
ttctgcctagaatgccaccaaatactgtgcacc

SEQ ID NO: 663122 - DNA, 33 bp, Homo sapien
ttctgcctagaatgccgccaaatactgtgcacc

SEQ ID NO: 663123 - DNA, 33 bp, Homo sapien
atcaatacgaaggaagcaacatgagccaagttg

SEQ ID NO: 663124 - DNA, 33 bp, Homo sapien
atcaatacgaaggaagtaacatgagccaagttg

SEQ ID NO: 663125 - DNA, 33 bp, Homo sapien
tccccagtgctctagacggataaaattaacaga

SEQ ID NO: 663126 - DNA, 33 bp, Homo sapien
tccccagtgctctagatggataaaattaacaga

SEQ ID NO: 663127 - DNA, 33 bp, Homo sapien
gtaaatggccttttagaacaacacctgacctat

SEQ ID NO: 663128 - DNA, 33 bp, Homo sapien
gtaaatggccttttagcacaacacctgacctat

SEQ ID NO: 663129 - DNA, 33 bp, Homo sapien
tctatcactgtgcaacactcattccttccaagc

SEQ ID NO: 663130 - DNA, 33 bp, Homo sapien
tctatcactgtgcaacgctcattccttccaagc

SEQ ID NO: 663131 - DNA, 33 bp, Homo sapien
aagctgattcagagaacatacattcttataagg

SEQ ID NO: 663132 - DNA, 33 bp, Homo sapien
aagctgattcagagaagatacattcttataagg

SEQ ID NO: 663133 - DNA, 33 bp, Homo sapien
tgtcatgatgcaaacaagtcttcaatctggttc

SEQ ID NO: 663134 - DNA, 33 bp, Homo sapien
tgtcatgatgcaaacatgtcttcaatctggttc

SEQ ID NO: 663135 - DNA, 33 bp, Homo sapien
ttctggcatccataaaagtgagacaataagttt

SEQ ID NO: 663136 - DNA, 33 bp, Homo sapien
ttctggcatccataaacgtgagacaataagttt

SEQ ID NO: 663137 - DNA, 33 bp, Homo sapien
ttattgagtgacaaagcactttaactctgaaac

SEQ ID NO: 663138 - DNA, 33 bp, Homo sapien
ttattgagtgacaaaggactttaactctgaaac

SEQ ID NO: 663139 - DNA, 33 bp, Homo sapien
gattgttggatgagagcctatgattgggcaaat

SEQ ID NO: 663140 - DNA, 33 bp, Homo sapien
gattgttggatgagagtctatgattgggcaaat

SEQ ID NO: 663141 - DNA, 33 bp, Homo sapien
aacaaaaacataaggacagccagaatccatccc

SEQ ID NO: 663142 - DNA, 33 bp, Homo sapien
aacaaaaacataaggatagccagaatccatccc

SEQ ID NO: 663143 - DNA, 33 bp, Homo sapien
tcaaagaggagacagaacaaggaaagagactga

SEQ ID NO: 663144 - DNA, 33 bp, Homo sapien
tcaaagaggagacagagcaaggaaagagactga

SEQ ID NO: 663145 - DNA, 33 bp, Homo sapien
tttggggacagaaaaggcctaggtgcaagagca

SEQ ID NO: 663146 - DNA, 33 bp, Homo sapien
tttggggacagaaaagtcctaggtgcaagagca

SEQ ID NO: 663147 - DNA, 33 bp, Homo sapien
tttatcattatacctacgtgtggttcaactgaa

SEQ ID NO: 663148 - DNA, 33 bp, Homo sapien
tttatcattatacctatgtgtggttcaactgaa

SEQ ID NO: 663149 - DNA, 33 bp, Homo sapien
ttcctagcattctaatcagcaactgagaggttt

SEQ ID NO: 663150 - DNA, 33 bp, Homo sapien
ttcctagcattctaattagcaactgagaggttt

SEQ ID NO: 663151 - DNA, 33 bp, Homo sapien
ttgtccaaaatcagacagaagggaaataatact

SEQ ID NO: 663152 - DNA, 33 bp, Homo sapien
ttgtccaaaatcagacggaagggaaataatact

SEQ ID NO: 663153 - DNA, 33 bp, Homo sapien
gtttttataaggactacgagttagtatatgtaa

SEQ ID NO: 663154 - DNA, 33 bp, Homo sapien
gtttttataaggactatgagttagtatatgtaa

SEQ ID NO: 663155 - DNA, 33 bp, Homo sapien
gactgcaggaaaagcagtagaggcagtatagca

SEQ ID NO: 663156 - DNA, 33 bp, Homo sapien
gactgcaggaaaagcattagaggcagtatagca

SEQ ID NO: 663157 - DNA, 33 bp, Homo sapien
gtgagcagaaaagactaaagaccttgagaagtc

SEQ ID NO: 663158 - DNA, 33 bp, Homo sapien
gtgagcagaaaagactgaagaccttgagaagtc

SEQ ID NO: 663159 - DNA, 33 bp, Homo sapien
ccagtttccgaagaagaatcctagaatgctttt

SEQ ID NO: 663160 - DNA, 33 bp, Homo sapien
ccagtttccgaagaaggatcctagaatgctttt

SEQ ID NO: 663161 - DNA, 33 bp, Homo sapien
ttcctttcttctgcaaagccgggtagatgtctc

SEQ ID NO: 663162 - DNA, 33 bp, Homo sapien
ttcctttcttctgcaatgccgggtagatgtctc

SEQ ID NO: 663163 - DNA, 33 bp, Homo sapien
ttgatcacagttcctacgggctgatgttccaaa

SEQ ID NO: 663164 - DNA, 33 bp, Homo sapien
ttgatcacagttcctatgggctgatgttccaaa

SEQ ID NO: 663165 - DNA, 33 bp, Homo sapien
acacttggtcgactccacattcgccaagtcctc

SEQ ID NO: 663166 - DNA, 33 bp, Homo sapien
acacttggtcgactccgcattcgccaagtcctc

SEQ ID NO: 663167 - DNA, 33 bp, Homo sapien
gagaacacctatacagcccagaatccggggata

SEQ ID NO: 663168 - DNA, 33 bp, Homo sapien
gagaacacctatacagtccagaatccggggata

SEQ ID NO: 663169 - DNA, 33 bp, Homo sapien
aacaggaatttgatatgaatgggccaagttttc

SEQ ID NO: 663170 - DNA, 33 bp, Homo sapien
aacaggaatttgatattaatgggccaagttttc

SEQ ID NO: 663171 - DNA, 33 bp, Homo sapien
agggcagtacacggagaaataaggagacctgtc

SEQ ID NO: 663172 - DNA, 33 bp, Homo sapien
agggcagtacacggagcaataaggagacctgtc

SEQ ID NO: 663173 - DNA, 33 bp, Homo sapien
ctgtcttctaacttgaaaaccacgtgttccagg

SEQ ID NO: 663174 - DNA, 33 bp, Homo sapien
ctgtcttctaacttgataaccacgtgttccagg

SEQ ID NO: 663175 - DNA, 33 bp, Homo sapien
gagagcaagcgggtcaaaatttaagctgggaaa

SEQ ID NO: 663176 - DNA, 33 bp, Homo sapien
gagagcaagcgggtcagaatttaagctgggaaa

SEQ ID NO: 663177 - DNA, 33 bp, Homo sapien
tcttattattcacctcaaagacactacaattaa

SEQ ID NO: 663178 - DNA, 33 bp, Homo sapien
tcttattattcacctccaagacactacaattaa

SEQ ID NO: 663179 - DNA, 33 bp, Homo sapien
ggccactcttctaagaaatccaggacagatatt

SEQ ID NO: 663180 - DNA, 33 bp, Homo sapien
ggccactcttctaagacatccaggacagatatt

SEQ ID NO: 663181 - DNA, 33 bp, Homo sapien
gctcaaacacttcatcaaaatgggtgttctgag

SEQ ID NO: 663182 - DNA, 33 bp, Homo sapien
gctcaaacacttcatcgaaatgggtgttctgag

SEQ ID NO: 663183 - DNA, 33 bp, Homo sapien
tgtgggctcctcctaccatgttaatgccccaga

SEQ ID NO: 663184 - DNA, 33 bp, Homo sapien
tgtgggctcctcctactatgttaatgccccaga

SEQ ID NO: 663185 - DNA, 33 bp, Homo sapien
cataaggaaaagttcaatatttccacaaagaaa

SEQ ID NO: 663186 - DNA, 33 bp, Homo sapien
cataaggaaaagttcagtatttccacaaagaaa

SEQ ID NO: 663187 - DNA, 33 bp, Homo sapien
gctctgctacttccctaacaagcaaggactgca

SEQ ID NO: 663188 - DNA, 33 bp, Homo sapien
gctctgctacttccctgacaagcaaggactgca

SEQ ID NO: 663189 - DNA, 33 bp, Homo sapien
agtgggatgtaagtcaatagccaaagataggtg

SEQ ID NO: 663190 - DNA, 33 bp, Homo sapien
agtgggatgtaagtcagtagccaaagataggtg

SEQ ID NO: 663191 - DNA, 33 bp, Homo sapien
aggtaggagaacagacactgtaggaattttggt

SEQ ID NO: 663192 - DNA, 33 bp, Homo sapien
aggtaggagaacagaccctgtaggaattttggt

SEQ ID NO: 663193 - DNA, 33 bp, Homo sapien
tacgatgctgtgggaaagaattacatcttctaa

SEQ ID NO: 663194 - DNA, 33 bp, Homo sapien
tacgatgctgtgggaaggaattacatcttctaa

SEQ ID NO: 663195 - DNA, 33 bp, Homo sapien
catgtagagaagtaacgggaacaatcttcataa

SEQ ID NO: 663196 - DNA, 33 bp, Homo sapien
catgtagagaagtaactggaacaatcttcataa

SEQ ID NO: 663197 - DNA, 33 bp, Homo sapien
gtgagctttactttacaagtcggaatcccagtt

SEQ ID NO: 663198 - DNA, 33 bp, Homo sapien
gtgagctttactttaccagtcggaatcccagtt

SEQ ID NO: 663199 - DNA, 33 bp, Homo sapien
ttgacattttcagcaactggagtatttgttagc

SEQ ID NO: 663200 - DNA, 33 bp, Homo sapien
ttgacattttcagcaattggagtatttgttagc

SEQ ID NO: 663201 - DNA, 33 bp, Homo sapien
ctcatgcatttttaccagatttgttgaaacaag

SEQ ID NO: 663202 - DNA, 33 bp, Homo sapien
ctcatgcatttttaccggatttgttgaaacaag

SEQ ID NO: 663203 - DNA, 33 bp, Homo sapien
gagaaggaccacacaccacgataatcagcagag

SEQ ID NO: 663204 - DNA, 33 bp, Homo sapien
gagaaggaccacacacgacgataatcagcagag

SEQ ID NO: 663205 - DNA, 33 bp, Homo sapien
atacatcaaattgataaagaaaccaagactaca

SEQ ID NO: 663206 - DNA, 33 bp, Homo sapien
atacatcaaattgatagagaaaccaagactaca

SEQ ID NO: 663207 - DNA, 33 bp, Homo sapien
atgataggtaaatccacattgtcagcatctcca

SEQ ID NO: 663208 - DNA, 33 bp, Homo sapien
atgataggtaaatccatattgtcagcatctcca

SEQ ID NO: 663209 - DNA, 33 bp, Homo sapien
ggtattttcagaggacacagacatgtgaatcag

SEQ ID NO: 663210 - DNA, 33 bp, Homo sapien
ggtattttcagaggactcagacatgtgaatcag

SEQ ID NO: 663211 - DNA, 33 bp, Homo sapien
agctgagcagaaagaggttgggtcttagtgtct

SEQ ID NO: 663212 - DNA, 33 bp, Homo sapien
agctgagcagaaagagtttgggtcttagtgtct

SEQ ID NO: 663213 - DNA, 33 bp, Homo sapien
tctctgcagattaatccacttccatgctaccac

SEQ ID NO: 663214 - DNA, 33 bp, Homo sapien
tctctgcagattaatctacttccatgctaccac

SEQ ID NO: 663215 - DNA, 33 bp, Homo sapien
aaccccaaatctaacacgataggcttgtataat

SEQ ID NO: 663216 - DNA, 33 bp, Homo sapien
aaccccaaatctaacatgataggcttgtataat

SEQ ID NO: 663217 - DNA, 33 bp, Homo sapien
gagcaacaaatggtaacgatgaccgcacattcc

SEQ ID NO: 663218 - DNA, 33 bp, Homo sapien
gagcaacaaatggtaatgatgaccgcacattcc

SEQ ID NO: 663219 - DNA, 33 bp, Homo sapien
cttgaaaaactaggatcaaggagccgattactg

SEQ ID NO: 663220 - DNA, 33 bp, Homo sapien
cttgaaaaactaggatgaaggagccgattactg

SEQ ID NO: 663221 - DNA, 33 bp, Homo sapien
gtaagccccacattcccgaaatctggatcctgt

SEQ ID NO: 663222 - DNA, 33 bp, Homo sapien
gtaagccccacattcctgaaatctggatcctgt

SEQ ID NO: 663223 - DNA, 33 bp, Homo sapien
ttttcttgctctgatcacccttatattcatgcc

SEQ ID NO: 663224 - DNA, 33 bp, Homo sapien
ttttcttgctctgatcgcccttatattcatgcc

SEQ ID NO: 663225 - DNA, 33 bp, Homo sapien
ttcatgccgtgatttacagtcaatcagcaaaga

SEQ ID NO: 663226 - DNA, 33 bp, Homo sapien
ttcatgccgtgatttagagtcaatcagcaaaga

SEQ ID NO: 663227 - DNA, 33 bp, Homo sapien
cacgctaatctcagaaaataataatagctagag

SEQ ID NO: 663228 - DNA, 33 bp, Homo sapien
cacgctaatctcagaagataataatagctagag

SEQ ID NO: 663229 - DNA, 33 bp, Homo sapien
gcaaatgcagatattaggtggaaactaaaaagc

SEQ ID NO: 663230 - DNA, 33 bp, Homo sapien
gcaaatgcagatattatgtggaaactaaaaagc

SEQ ID NO: 663231 - DNA, 33 bp, Homo sapien
tatggtcaacttttcactcattttttattcaaa

SEQ ID NO: 663232 - DNA, 33 bp, Homo sapien
tatggtcaacttttcattcattttttattcaaa

SEQ ID NO: 663233 - DNA, 33 bp, Homo sapien
tcacctcttggtttgccaatgagagaaacaaga

SEQ ID NO: 663234 - DNA, 33 bp, Homo sapien
tcacctcttggtttgcgaatgagagaaacaaga

SEQ ID NO: 663235 - DNA, 33 bp, Homo sapien
gggtatcagacacactaacccagagttccctgg

SEQ ID NO: 663236 - DNA, 33 bp, Homo sapien
gggtatcagacacactcacccagagttccctgg

SEQ ID NO: 663237 - DNA, 33 bp, Homo sapien
ctaccatatgccagacactgtgttgcgtgaaaa

SEQ ID NO: 663238 - DNA, 33 bp, Homo sapien
ctaccatatgccagacgctgtgttgcgtgaaaa

SEQ ID NO: 663239 - DNA, 33 bp, Homo sapien
aaaatgtagctgagggaagatgtagttgagggg

SEQ ID NO: 663240 - DNA, 33 bp, Homo sapien
aaaatgtagctgaggggagatgtagttgagggg

SEQ ID NO: 663241 - DNA, 33 bp, Homo sapien
atgtagctgaggggaaatgtagctgaggggaaa

SEQ ID NO: 663242 - DNA, 33 bp, Homo sapien
atgtagctgaggggaagtgtagctgaggggaaa

SEQ ID NO: 663243 - DNA, 33 bp, Homo sapien
tacaagaaacaaaagagcaaagcggatactaaa

SEQ ID NO: 663244 - DNA, 33 bp, Homo sapien
tacaagaaacaaaagatcaaagcggatactaaa

SEQ ID NO: 663245 - DNA, 33 bp, Homo sapien
aaatatcaaaaaaagaagtgcagtttaggatgt

SEQ ID NO: 663246 - DNA, 33 bp, Homo sapien
aaatatcaaaaaaagatgtgcagtttaggatgt

SEQ ID NO: 663247 - DNA, 33 bp, Homo sapien
ccaaatgcaaaaaagaaaggatcagagtgagca

SEQ ID NO: 663248 - DNA, 33 bp, Homo sapien
ccaaatgcaaaaaagagaggatcagagtgagca

SEQ ID NO: 663249 - DNA, 33 bp, Homo sapien
ctcctgccaaagattcccctcctttctgcattt

SEQ ID NO: 663250 - DNA, 33 bp, Homo sapien
ctcctgccaaagattctcctcctttctgcattt

SEQ ID NO: 663251 - DNA, 33 bp, Homo sapien
aagcaaaatccatgtacagtttacctatcagaa

SEQ ID NO: 663252 - DNA, 33 bp, Homo sapien
aagcaaaatccatgtagagtttacctatcagaa

SEQ ID NO: 663253 - DNA, 33 bp, Homo sapien
ctgcctgccagggacccgagacctaggcttact

SEQ ID NO: 663254 - DNA, 33 bp, Homo sapien
ctgcctgccagggacctgagacctaggcttact

SEQ ID NO: 663255 - DNA, 33 bp, Homo sapien
ttgtactcagaaagagaatgggcacaggaatca

SEQ ID NO: 663256 - DNA, 33 bp, Homo sapien
ttgtactcagaaagagcatgggcacaggaatca

SEQ ID NO: 663257 - DNA, 33 bp, Homo sapien
ggccttgggtgagtcacgtagcctctctaagct

SEQ ID NO: 663258 - DNA, 33 bp, Homo sapien
ggccttgggtgagtcatgtagcctctctaagct

SEQ ID NO: 663259 - DNA, 33 bp, Homo sapien
gggagggaagggtaaaaccatatataactgagc

SEQ ID NO: 663260 - DNA, 33 bp, Homo sapien
gggagggaagggtaaagccatatataactgagc

SEQ ID NO: 663261 - DNA, 33 bp, Homo sapien
aacctgtacccaatgacaaaatgatgatgaatt

SEQ ID NO: 663262 - DNA, 33 bp, Homo sapien
aacctgtacccaatgataaaatgatgatgaatt

SEQ ID NO: 663263 - DNA, 33 bp, Homo sapien
ttaccatgtccgattacctctgtcaacaacatc

SEQ ID NO: 663264 - DNA, 33 bp, Homo sapien
ttaccatgtccgattatctctgtcaacaacatc

SEQ ID NO: 663265 - DNA, 33 bp, Homo sapien
acagctgaagatactaacatgcctaatcctgaa

SEQ ID NO: 663266 - DNA, 33 bp, Homo sapien
acagctgaagatactaccatgcctaatcctgaa

SEQ ID NO: 663267 - DNA, 33 bp, Homo sapien
tatcttcagctgtaataaagagaaacttgagaa

SEQ ID NO: 663268 - DNA, 33 bp, Homo sapien
tatcttcagctgtaatgaagagaaacttgagaa

SEQ ID NO: 663269 - DNA, 33 bp, Homo sapien
tgagatgagatgcaaagtctttctttggagggt

SEQ ID NO: 663270 - DNA, 33 bp, Homo sapien
tgagatgagatgcaaattctttctttggagggt

SEQ ID NO: 663271 - DNA, 33 bp, Homo sapien
ttaaatggccctcaaaagatactcctcttacaa

SEQ ID NO: 663272 - DNA, 33 bp, Homo sapien
ttaaatggccctcaaaggatactcctcttacaa

SEQ ID NO: 663273 - DNA, 33 bp, Homo sapien
gtagagcaaactggaacgaactatgttttactg

SEQ ID NO: 663274 - DNA, 33 bp, Homo sapien
gtagagcaaactggaatgaactatgttttactg

SEQ ID NO: 663275 - DNA, 33 bp, Homo sapien
ccttcttttgactctacgtgtaatgagatccat

SEQ ID NO: 663276 - DNA, 33 bp, Homo sapien
ccttcttttgactctatgtgtaatgagatccat

SEQ ID NO: 663277 - DNA, 33 bp, Homo sapien
tttgaagagagccaccagagactttccttgtgg

SEQ ID NO: 663278 - DNA, 33 bp, Homo sapien
tttgaagagagccaccggagactttccttgtgg

SEQ ID NO: 663279 - DNA, 33 bp, Homo sapien
gtgcagacaatttgacacacttggagaattatt

SEQ ID NO: 663280 - DNA, 33 bp, Homo sapien
gtgcagacaatttgacgcacttggagaattatt

SEQ ID NO: 663281 - DNA, 33 bp, Homo sapien
caataactaaaagcaacgaatctagccagcatt

SEQ ID NO: 663282 - DNA, 33 bp, Homo sapien
caataactaaaagcaatgaatctagccagcatt

SEQ ID NO: 663283 - DNA, 33 bp, Homo sapien
tcagatttcagtctcaactatgccatagctcac

SEQ ID NO: 663284 - DNA, 33 bp, Homo sapien
tcagatttcagtctcagctatgccatagctcac

SEQ ID NO: 663285 - DNA, 33 bp, Homo sapien
tcagagtgcaggctccaaagccagaaagaccca

SEQ ID NO: 663286 - DNA, 33 bp, Homo sapien
tcagagtgcaggctccgaagccagaaagaccca

SEQ ID NO: 663287 - DNA, 33 bp, Homo sapien
acatgtgtaagaggcccggcaaagtgcctgtta

SEQ ID NO: 663288 - DNA, 33 bp, Homo sapien
acatgtgtaagaggcctggcaaagtgcctgtta

SEQ ID NO: 663289 - DNA, 33 bp, Homo sapien
actatgaaaacagctaccagaaaacattgggaa

SEQ ID NO: 663290 - DNA, 33 bp, Homo sapien
actatgaaaacagctatcagaaaacattgggaa

SEQ ID NO: 663291 - DNA, 33 bp, Homo sapien
agtaaccaaataataaagcttgtcttaaactgt

SEQ ID NO: 663292 - DNA, 33 bp, Homo sapien
agtaaccaaataataatgcttgtcttaaactgt

SEQ ID NO: 663293 - DNA, 33 bp, Homo sapien
gaggctgttattaaccaaacctcctggctgggc

SEQ ID NO: 663294 - DNA, 33 bp, Homo sapien
gaggctgttattaaccgaacctcctggctgggc

SEQ ID NO: 663295 - DNA, 33 bp, Homo sapien
tcaagcatcttgctaaccatttgtgacagtgta

SEQ ID NO: 663296 - DNA, 33 bp, Homo sapien
tcaagcatcttgctaagcatttgtgacagtgta

SEQ ID NO: 663297 - DNA, 33 bp, Homo sapien
ccttctaagatcaatgaattcagccaaccaggg

SEQ ID NO: 663298 - DNA, 33 bp, Homo sapien
ccttctaagatcaatggattcagccaaccaggg

SEQ ID NO: 663299 - DNA, 33 bp, Homo sapien
accttcagtaagtgacccactctctccccagtc

SEQ ID NO: 663300 - DNA, 33 bp, Homo sapien
accttcagtaagtgactcactctctccccagtc

SEQ ID NO: 663301 - DNA, 33 bp, Homo sapien
ggttaatatagcattgcagaatgagaggaatgc

SEQ ID NO: 663302 - DNA, 33 bp, Homo sapien
ggttaatatagcattgtagaatgagaggaatgc

SEQ ID NO: 663303 - DNA, 33 bp, Homo sapien
caggcactgactagcacgatgaggcctcagagg

SEQ ID NO: 663304 - DNA, 33 bp, Homo sapien
caggcactgactagcatgatgaggcctcagagg

SEQ ID NO: 663305 - DNA, 33 bp, Homo sapien
aaactcagattgcaaaagtacctgaaatgtatc

SEQ ID NO: 663306 - DNA, 33 bp, Homo sapien
aaactcagattgcaaaggtacctgaaatgtatc

SEQ ID NO: 663307 - DNA, 33 bp, Homo sapien
tgttccctgtcaaggaaggagacaatccgccct

SEQ ID NO: 663308 - DNA, 33 bp, Homo sapien
tgttccctgtcaaggacggagacaatccgccct

SEQ ID NO: 663309 - DNA, 33 bp, Homo sapien
ccaagcctcaggcatcccatcaaggaaatgggg

SEQ ID NO: 663310 - DNA, 33 bp, Homo sapien
ccaagcctcaggcatctcatcaaggaaatgggg

SEQ ID NO: 663311 - DNA, 33 bp, Homo sapien
tcaggaagttcttgagcaggttattgaaggtct

SEQ ID NO: 663312 - DNA, 33 bp, Homo sapien
tcaggaagttcttgaggaggttattgaaggtct

SEQ ID NO: 663313 - DNA, 33 bp, Homo sapien
gaatatcaaggacaaacgcattgggggaagcct

SEQ ID NO: 663314 - DNA, 33 bp, Homo sapien
gaatatcaaggacaaatgcattgggggaagcct

SEQ ID NO: 663315 - DNA, 33 bp, Homo sapien
tcacattgcttgatgactcagaatcactcttct

SEQ ID NO: 663316 - DNA, 33 bp, Homo sapien
tcacattgcttgatgagtcagaatcactcttct

SEQ ID NO: 663317 - DNA, 33 bp, Homo sapien
tattttttcactaaaaagcagtgacaagaccat

SEQ ID NO: 663318 - DNA, 33 bp, Homo sapien
tattttttcactaaaacgcagtgacaagaccat

SEQ ID NO: 663319 - DNA, 33 bp, Homo sapien
cttggggtgagggtgacggtagacaaaggaaga

SEQ ID NO: 663320 - DNA, 33 bp, Homo sapien
cttggggtgagggtgatggtagacaaaggaaga

SEQ ID NO: 663321 - DNA, 33 bp, Homo sapien
cagagtttatttcacagtcagttctaaatattt

SEQ ID NO: 663322 - DNA, 33 bp, Homo sapien
cagagtttatttcacattcagttctaaatattt

SEQ ID NO: 663323 - DNA, 33 bp, Homo sapien
aatcaccacaacttcaatattccatacagctct

SEQ ID NO: 663324 - DNA, 33 bp, Homo sapien
aatcaccacaacttcagtattccatacagctct

SEQ ID NO: 663325 - DNA, 33 bp, Homo sapien
taacgatattcaccgcacagatgagtaactaaa

SEQ ID NO: 663326 - DNA, 33 bp, Homo sapien
taacgatattcaccgcgcagatgagtaactaaa

SEQ ID NO: 663327 - DNA, 33 bp, Homo sapien
gttgggtctgataccaaaacttgtccagtgtga

SEQ ID NO: 663328 - DNA, 33 bp, Homo sapien
gttgggtctgataccagaacttgtccagtgtga

SEQ ID NO: 663329 - DNA, 33 bp, Homo sapien
taataggtcaaagaaactattgccatgttgtgt

SEQ ID NO: 663330 - DNA, 33 bp, Homo sapien
taataggtcaaagaaagtattgccatgttgtgt

SEQ ID NO: 663331 - DNA, 33 bp, Homo sapien
tcaggtgcagtaacagacaaaatctctaggaaa

SEQ ID NO: 663332 - DNA, 33 bp, Homo sapien
tcaggtgcagtaacaggcaaaatctctaggaaa

SEQ ID NO: 663333 - DNA, 33 bp, Homo sapien
tgtgacttaggaaaagaagtgctaaatgctgtt

SEQ ID NO: 663334 - DNA, 33 bp, Homo sapien
tgtgacttaggaaaaggagtgctaaatgctgtt

SEQ ID NO: 663335 - DNA, 33 bp, Homo sapien
tgagtaagtacactgaatagttcaccttgaccc

SEQ ID NO: 663336 - DNA, 33 bp, Homo sapien
tgagtaagtacactgagtagttcaccttgaccc

SEQ ID NO: 663337 - DNA, 33 bp, Homo sapien
gctttgtatttgtctgcacattcttaggctgtt

SEQ ID NO: 663338 - DNA, 33 bp, Homo sapien
gctttgtatttgtctgtacattcttaggctgtt

SEQ ID NO: 663339 - DNA, 33 bp, Homo sapien
agtgcacttgtaaaaacgtgtagatgctagagc

SEQ ID NO: 663340 - DNA, 33 bp, Homo sapien
agtgcacttgtaaaaatgtgtagatgctagagc

SEQ ID NO: 663341 - DNA, 33 bp, Homo sapien
tgcgcttgctggtcaactgaggctgtcactcaa

SEQ ID NO: 663342 - DNA, 33 bp, Homo sapien
tgcgcttgctggtcaattgaggctgtcactcaa

SEQ ID NO: 663343 - DNA, 33 bp, Homo sapien
aactggaagtgcagcacgaggcccagattcttg

SEQ ID NO: 663344 - DNA, 33 bp, Homo sapien
aactggaagtgcagcatgaggcccagattcttg

SEQ ID NO: 663345 - DNA, 33 bp, Homo sapien
tactacttacagaaccaagcacagaggactcag

SEQ ID NO: 663346 - DNA, 33 bp, Homo sapien
tactacttacagaaccgagcacagaggactcag

SEQ ID NO: 663347 - DNA, 33 bp, Homo sapien
ttgcacctaaaaccacaaagagttagtgcaatt

SEQ ID NO: 663348 - DNA, 33 bp, Homo sapien
ttgcacctaaaaccaccaagagttagtgcaatt

SEQ ID NO: 663349 - DNA, 33 bp, Homo sapien
cttccacttctcccgaacaatcagctttccaag

SEQ ID NO: 663350 - DNA, 33 bp, Homo sapien
cttccacttctcccgaccaatcagctttccaag

SEQ ID NO: 663351 - DNA, 33 bp, Homo sapien
taagcacaggctgttacggatatttgccaagcg

SEQ ID NO: 663352 - DNA, 33 bp, Homo sapien
taagcacaggctgttatggatatttgccaagcg

SEQ ID NO: 663353 - DNA, 33 bp, Homo sapien
aaagactaagcagatcacttgcctccaaatagg

SEQ ID NO: 663354 - DNA, 33 bp, Homo sapien
aaagactaagcagatcgcttgcctccaaatagg

SEQ ID NO: 663355 - DNA, 33 bp, Homo sapien
cttgatttccatgctcgaagcacaaattacaag

SEQ ID NO: 663356 - DNA, 33 bp, Homo sapien
cttgatttccatgctctaagcacaaattacaag

SEQ ID NO: 663357 - DNA, 33 bp, Homo sapien
agcaggaaatctgaaaagtagcctgtgtcaaag

SEQ ID NO: 663358 - DNA, 33 bp, Homo sapien
agcaggaaatctgaaaggtagcctgtgtcaaag

SEQ ID NO: 663359 - DNA, 33 bp, Homo sapien
aataatagcaaacacaacaaatgattaaactca

SEQ ID NO: 663360 - DNA, 33 bp, Homo sapien
aataatagcaaacacagcaaatgattaaactca

SEQ ID NO: 663361 - DNA, 33 bp, Homo sapien
agacagacaggatagcaaaagggattggtacag

SEQ ID NO: 663362 - DNA, 33 bp, Homo sapien
agacagacaggatagcgaaagggattggtacag

SEQ ID NO: 663363 - DNA, 33 bp, Homo sapien
ctttctcaatcagtcaaccctccatccaactct

SEQ ID NO: 663364 - DNA, 33 bp, Homo sapien
ctttctcaatcagtcacccctccatccaactct

SEQ ID NO: 663365 - DNA, 33 bp, Homo sapien
gggagaatagataagacgaaagcattatcagaa

SEQ ID NO: 663366 - DNA, 33 bp, Homo sapien
gggagaatagataagatgaaagcattatcagaa

SEQ ID NO: 663367 - DNA, 33 bp, Homo sapien
tctccacttcctttaccgcacagttctgataat

SEQ ID NO: 663368 - DNA, 33 bp, Homo sapien
tctccacttcctttactgcacagttctgataat

SEQ ID NO: 663369 - DNA, 33 bp, Homo sapien
taaaaacaatccatcaatcttggaacatgcttt

SEQ ID NO: 663370 - DNA, 33 bp, Homo sapien
taaaaacaatccatcagtcttggaacatgcttt

SEQ ID NO: 663371 - DNA, 33 bp, Homo sapien
taaggctgcaaggagaaatctgaaactgaggac

SEQ ID NO: 663372 - DNA, 33 bp, Homo sapien
taaggctgcaaggagagatctgaaactgaggac

SEQ ID NO: 663373 - DNA, 33 bp, Homo sapien
catgcttgattaaatacgctgtttctcatgaac

SEQ ID NO: 663374 - DNA, 33 bp, Homo sapien
catgcttgattaaatatgctgtttctcatgaac

SEQ ID NO: 663375 - DNA, 33 bp, Homo sapien
tttggggattaaacaacttgtgtgggtataaag

SEQ ID NO: 663376 - DNA, 33 bp, Homo sapien
tttggggattaaacaagttgtgtgggtataaag

SEQ ID NO: 663377 - DNA, 33 bp, Homo sapien
tgttattgattcctgcacaacctctgaatcact

SEQ ID NO: 663378 - DNA, 33 bp, Homo sapien
tgttattgattcctgcgcaacctctgaatcact

SEQ ID NO: 663379 - DNA, 33 bp, Homo sapien
tgtacgtgaaccagaaagagtggaatctgggac

SEQ ID NO: 663380 - DNA, 33 bp, Homo sapien
tgtacgtgaaccagaaggagtggaatctgggac

SEQ ID NO: 663381 - DNA, 33 bp, Homo sapien
ttgttaaagcctcgtcggaaatttcacaaatgg

SEQ ID NO: 663382 - DNA, 33 bp, Homo sapien
ttgttaaagcctcgtctgaaatttcacaaatgg

SEQ ID NO: 663383 - DNA, 33 bp, Homo sapien
ctgttgtctggcagaaaaaaatgacctgaaaat

SEQ ID NO: 663384 - DNA, 33 bp, Homo sapien
ctgttgtctggcagaagaaaatgacctgaaaat

SEQ ID NO: 663385 - DNA, 33 bp, Homo sapien
caagcctctgtactaacgctgttgtctggcaga

SEQ ID NO: 663386 - DNA, 33 bp, Homo sapien
caagcctctgtactaatgctgttgtctggcaga

SEQ ID NO: 663387 - DNA, 33 bp, Homo sapien
ttaaaggagttattaaggcagttcttccctatt

SEQ ID NO: 663388 - DNA, 33 bp, Homo sapien
ttaaaggagttattaatgcagttcttccctatt

SEQ ID NO: 663389 - DNA, 33 bp, Homo sapien
attgcagggagatttgcaaagtgctagagtttt

SEQ ID NO: 663390 - DNA, 33 bp, Homo sapien
attgcagggagatttgtaaagtgctagagtttt

SEQ ID NO: 663391 - DNA, 33 bp, Homo sapien
aatttaagatgtgaaccatggtcttcaggagct

SEQ ID NO: 663392 - DNA, 33 bp, Homo sapien
aatttaagatgtgaactatggtcttcaggagct

SEQ ID NO: 663393 - DNA, 33 bp, Homo sapien
agcccattaggatctaacttctaaccctcttca

SEQ ID NO: 663394 - DNA, 33 bp, Homo sapien
agcccattaggatctatcttctaaccctcttca

SEQ ID NO: 663395 - DNA, 33 bp, Homo sapien
tcacgctagtgagtcacgattagttatgaggta

SEQ ID NO: 663396 - DNA, 33 bp, Homo sapien
tcacgctagtgagtcatgattagttatgaggta

SEQ ID NO: 663397 - DNA, 33 bp, Homo sapien
gtatgctggtgtcagacgtagcaaatccagaca

SEQ ID NO: 663398 - DNA, 33 bp, Homo sapien
gtatgctggtgtcagatgtagcaaatccagaca

SEQ ID NO: 663399 - DNA, 33 bp, Homo sapien
tctcataaacagaagacgaaatgtgaacccaga

SEQ ID NO: 663400 - DNA, 33 bp, Homo sapien
tctcataaacagaagatgaaatgtgaacccaga

SEQ ID NO: 663401 - DNA, 33 bp, Homo sapien
aggcacttataatagcccttggacacttggcta

SEQ ID NO: 663402 - DNA, 33 bp, Homo sapien
aggcacttataatagcgcttggacacttggcta

SEQ ID NO: 663403 - DNA, 33 bp, Homo sapien
cttgagtcacaatgaccacctgtgtcctgaggg

SEQ ID NO: 663404 - DNA, 33 bp, Homo sapien
cttgagtcacaatgacgacctgtgtcctgaggg

SEQ ID NO: 663405 - DNA, 33 bp, Homo sapien
tggaaagcttcatacaggacattgttttgagtt

SEQ ID NO: 663406 - DNA, 33 bp, Homo sapien
tggaaagcttcatacatgacattgttttgagtt

SEQ ID NO: 663407 - DNA, 33 bp, Homo sapien
gtgatgtcaaaagtcaatgaccttgaggaggaa

SEQ ID NO: 663408 - DNA, 33 bp, Homo sapien
gtgatgtcaaaagtcagtgaccttgaggaggaa

SEQ ID NO: 663409 - DNA, 33 bp, Homo sapien
gaaaatgccagactgactaatgacacctttttc

SEQ ID NO: 663410 - DNA, 33 bp, Homo sapien
gaaaatgccagactgattaatgacacctttttc

SEQ ID NO: 663411 - DNA, 33 bp, Homo sapien
acaccctatgacctctaactgagatgttggcag

SEQ ID NO: 663412 - DNA, 33 bp, Homo sapien
acaccctatgacctctcactgagatgttggcag

SEQ ID NO: 663413 - DNA, 33 bp, Homo sapien
cgaccaagcacacttcaaaattagcaatcttct

SEQ ID NO: 663414 - DNA, 33 bp, Homo sapien
cgaccaagcacacttcgaaattagcaatcttct

SEQ ID NO: 663415 - DNA, 33 bp, Homo sapien
cactaaacttctgtccccaaagtcctgactgct

SEQ ID NO: 663416 - DNA, 33 bp, Homo sapien
cactaaacttctgtcctcaaagtcctgactgct

SEQ ID NO: 663417 - DNA, 33 bp, Homo sapien
aggagggcccacctccacgagacctgctgaggg

SEQ ID NO: 663418 - DNA, 33 bp, Homo sapien
aggagggcccacctccgcgagacctgctgaggg

SEQ ID NO: 663419 - DNA, 33 bp, Homo sapien
tgcggactaggaccaacgttccttgaaaccact

SEQ ID NO: 663420 - DNA, 33 bp, Homo sapien
tgcggactaggaccaaggttccttgaaaccact

SEQ ID NO: 663421 - DNA, 33 bp, Homo sapien
gaaggacagaagagtaacagtctaggaaaggga

SEQ ID NO: 663422 - DNA, 33 bp, Homo sapien
gaaggacagaagagtagcagtctaggaaaggga

SEQ ID NO: 663423 - DNA, 33 bp, Homo sapien
gcttatcactccttcacagagactcagtagtat

SEQ ID NO: 663424 - DNA, 33 bp, Homo sapien
gcttatcactccttcatagagactcagtagtat

SEQ ID NO: 663425 - DNA, 33 bp, Homo sapien
ctccctcttagctgagaagaagcctctgtgaat

SEQ ID NO: 663426 - DNA, 33 bp, Homo sapien
ctccctcttagctgaggagaagcctctgtgaat

SEQ ID NO: 663427 - DNA, 33 bp, Homo sapien
caatgcagactttggaatatctcattagaagga

SEQ ID NO: 663428 - DNA, 33 bp, Homo sapien
caatgcagactttggagtatctcattagaagga

SEQ ID NO: 663429 - DNA, 33 bp, Homo sapien
aggagggatgacattccaggtatcaggagtagc

SEQ ID NO: 663430 - DNA, 33 bp, Homo sapien
aggagggatgacattctaggtatcaggagtagc

SEQ ID NO: 663431 - DNA, 33 bp, Homo sapien
ctcaaacacctgcagaagtaaggcaggtagcat

SEQ ID NO: 663432 - DNA, 33 bp, Homo sapien
ctcaaacacctgcagaggtaaggcaggtagcat

SEQ ID NO: 663433 - DNA, 33 bp, Homo sapien
attctgctttagacaaaattgtacaccttaaaa

SEQ ID NO: 663434 - DNA, 33 bp, Homo sapien
attctgctttagacaacattgtacaccttaaaa

SEQ ID NO: 663435 - DNA, 33 bp, Homo sapien
attgccagactgaattaaatcactatgcctagc

SEQ ID NO: 663436 - DNA, 33 bp, Homo sapien
attgccagactgaattgaatcactatgcctagc

SEQ ID NO: 663437 - DNA, 33 bp, Homo sapien
ctatgttgcacgttcccgccctatggacagtct

SEQ ID NO: 663438 - DNA, 33 bp, Homo sapien
ctatgttgcacgttcctgccctatggacagtct

SEQ ID NO: 663439 - DNA, 33 bp, Homo sapien
atgtgcaactgtcagaataagctaccgactgtg

SEQ ID NO: 663440 - DNA, 33 bp, Homo sapien
atgtgcaactgtcagagtaagctaccgactgtg

SEQ ID NO: 663441 - DNA, 33 bp, Homo sapien
tagtggtaggatgcaactaagcactgtgacttg

SEQ ID NO: 663442 - DNA, 33 bp, Homo sapien
tagtggtaggatgcaattaagcactgtgacttg

SEQ ID NO: 663443 - DNA, 33 bp, Homo sapien
gcagactcctcctaaccatcagaaagcttttgc

SEQ ID NO: 663444 - DNA, 33 bp, Homo sapien
gcagactcctcctaactatcagaaagcttttgc

SEQ ID NO: 663445 - DNA, 33 bp, Homo sapien
tcaaactataccgcaaagctatggtaaccaaaa

SEQ ID NO: 663446 - DNA, 33 bp, Homo sapien
tcaaactataccgcaaggctatggtaaccaaaa

SEQ ID NO: 663447 - DNA, 33 bp, Homo sapien
ggcaaactggttaaaaaaaataatgactcacgt

SEQ ID NO: 663448 - DNA, 33 bp, Homo sapien
ggcaaactggttaaaacaaataatgactcacgt

SEQ ID NO: 663449 - DNA, 33 bp, Homo sapien
cttaatctggccataacttagctgcaggaactc

SEQ ID NO: 663450 - DNA, 33 bp, Homo sapien
cttaatctggccataatttagctgcaggaactc

SEQ ID NO: 663451 - DNA, 33 bp, Homo sapien
cccagtccccctcactcagcactgtcagttggc

SEQ ID NO: 663452 - DNA, 33 bp, Homo sapien
cccagtccccctcacttagcactgtcagttggc

SEQ ID NO: 663453 - DNA, 33 bp, Homo sapien
aagctaggataaactacgtagagggcttctttt

SEQ ID NO: 663454 - DNA, 33 bp, Homo sapien
aagctaggataaactatgtagagggcttctttt

SEQ ID NO: 663455 - DNA, 33 bp, Homo sapien
ttatagctgcctctcacgtaaaagaagccctct

SEQ ID NO: 663456 - DNA, 33 bp, Homo sapien
ttatagctgcctctcaggtaaaagaagccctct

SEQ ID NO: 663457 - DNA, 33 bp, Homo sapien
agccaatcagcacaccgcatttttctagccaca

SEQ ID NO: 663458 - DNA, 33 bp, Homo sapien
agccaatcagcacacctcatttttctagccaca

SEQ ID NO: 663459 - DNA, 33 bp, Homo sapien
aaatccagaaatgaagaacctgtctctctccca

SEQ ID NO: 663460 - DNA, 33 bp, Homo sapien
aaatccagaaatgaaggacctgtctctctccca

SEQ ID NO: 663461 - DNA, 33 bp, Homo sapien
agactatttgaatcctcagaaccagttgcacct

SEQ ID NO: 663462 - DNA, 33 bp, Homo sapien
agactatttgaatccttagaaccagttgcacct

SEQ ID NO: 663463 - DNA, 33 bp, Homo sapien
acacatatctctaaacacacaagaatgaaaata

SEQ ID NO: 663464 - DNA, 33 bp, Homo sapien
acacatatctctaaacgcacaagaatgaaaata

SEQ ID NO: 663465 - DNA, 33 bp, Homo sapien
tctgacatagtctacccgaacaagaaggaacca

SEQ ID NO: 663466 - DNA, 33 bp, Homo sapien
tctgacatagtctacctgaacaagaaggaacca

SEQ ID NO: 663467 - DNA, 33 bp, Homo sapien
acaaatgaattctagcaaatattcaaaatgcag

SEQ ID NO: 663468 - DNA, 33 bp, Homo sapien
acaaatgaattctagcgaatattcaaaatgcag

SEQ ID NO: 663469 - DNA, 33 bp, Homo sapien
caaagaaaatgccataaccccacatcaaaaact

SEQ ID NO: 663470 - DNA, 33 bp, Homo sapien
caaagaaaatgccatagccccacatcaaaaact

SEQ ID NO: 663471 - DNA, 33 bp, Homo sapien
tttctgcctgcttttcactgctctttaatgttt

SEQ ID NO: 663472 - DNA, 33 bp, Homo sapien
tttctgcctgcttttcgctgctctttaatgttt

SEQ ID NO: 663473 - DNA, 33 bp, Homo sapien
aattgttttgggtagacagtagggaggtgaagc

SEQ ID NO: 663474 - DNA, 33 bp, Homo sapien
aattgttttgggtagatagtagggaggtgaagc

SEQ ID NO: 663475 - DNA, 33 bp, Homo sapien
aggtaaactggtttgacgctaaattattctttt

SEQ ID NO: 663476 - DNA, 33 bp, Homo sapien
aggtaaactggtttgatgctaaattattctttt

SEQ ID NO: 663477 - DNA, 33 bp, Homo sapien
ccaactaattctatgaaatcatcatcagcttga

SEQ ID NO: 663478 - DNA, 33 bp, Homo sapien
ccaactaattctatgacatcatcatcagcttga

SEQ ID NO: 663479 - DNA, 33 bp, Homo sapien
tgctgtggtccaagaccatgtctggtatgattt

SEQ ID NO: 663480 - DNA, 33 bp, Homo sapien
tgctgtggtccaagactatgtctggtatgattt

SEQ ID NO: 663481 - DNA, 33 bp, Homo sapien
atgatgaaaacacatcaacacaaggggtaacaa

SEQ ID NO: 663482 - DNA, 33 bp, Homo sapien
atgatgaaaacacatcgacacaaggggtaacaa

SEQ ID NO: 663483 - DNA, 33 bp, Homo sapien
aagcacccagagccgaactcctaacacttgtgg

SEQ ID NO: 663484 - DNA, 33 bp, Homo sapien
aagcacccagagccgacctcctaacacttgtgg

SEQ ID NO: 663485 - DNA, 33 bp, Homo sapien
gcacttacatggattaccttttagactttataa

SEQ ID NO: 663486 - DNA, 33 bp, Homo sapien
gcacttacatggattatcttttagactttataa

SEQ ID NO: 663487 - DNA, 33 bp, Homo sapien
ccagaaaagtgaatcaaatgctcacgaacaagt

SEQ ID NO: 663488 - DNA, 33 bp, Homo sapien
ccagaaaagtgaatcatatgctcacgaacaagt

SEQ ID NO: 663489 - DNA, 33 bp, Homo sapien
aaaggcagcaatttaaaggaaacagctgatagg

SEQ ID NO: 663490 - DNA, 33 bp, Homo sapien
aaaggcagcaatttaacggaaacagctgatagg

SEQ ID NO: 663491 - DNA, 33 bp, Homo sapien
ttctttatagcaatgcaaaatagactaatataa

SEQ ID NO: 663492 - DNA, 33 bp, Homo sapien
ttctttatagcaatgcgaaatagactaatataa

SEQ ID NO: 663493 - DNA, 33 bp, Homo sapien
tctgctttggtgctcacagagaaacttcccatg

SEQ ID NO: 663494 - DNA, 33 bp, Homo sapien
tctgctttggtgctcagagagaaacttcccatg

SEQ ID NO: 663495 - DNA, 33 bp, Homo sapien
ggccttctccagataaccatctttcactcacag

SEQ ID NO: 663496 - DNA, 33 bp, Homo sapien
ggccttctccagataatcatctttcactcacag

SEQ ID NO: 663497 - DNA, 33 bp, Homo sapien
tcagctcctagtaaccaagccttgaaattacac

SEQ ID NO: 663498 - DNA, 33 bp, Homo sapien
tcagctcctagtaaccgagccttgaaattacac

SEQ ID NO: 663499 - DNA, 33 bp, Homo sapien
gtacatggtacttcaaaaatatcaccctgaagt

SEQ ID NO: 663500 - DNA, 33 bp, Homo sapien
gtacatggtacttcaacaatatcaccctgaagt

SEQ ID NO: 663501 - DNA, 33 bp, Homo sapien
cctggattaactccacaggactccagaagctga

SEQ ID NO: 663502 - DNA, 33 bp, Homo sapien
cctggattaactccacgggactccagaagctga

SEQ ID NO: 663503 - DNA, 33 bp, Homo sapien
atcctgtggtattattaaaagtatcttccacat

SEQ ID NO: 663504 - DNA, 33 bp, Homo sapien
atcctgtggtattattcaaagtatcttccacat

SEQ ID NO: 663505 - DNA, 33 bp, Homo sapien
gtgccatcttgtagcacacggaacaagccatca

SEQ ID NO: 663506 - DNA, 33 bp, Homo sapien
gtgccatcttgtagcagacggaacaagccatca

SEQ ID NO: 663507 - DNA, 33 bp, Homo sapien
accatctcacgtccctcaacacaacaggtccct

SEQ ID NO: 663508 - DNA, 33 bp, Homo sapien
accatctcacgtcccttaacacaacaggtccct

SEQ ID NO: 663509 - DNA, 33 bp, Homo sapien
acctcatttacaacctcaactcaaaagtagatc

SEQ ID NO: 663510 - DNA, 33 bp, Homo sapien
acctcatttacaaccttaactcaaaagtagatc

SEQ ID NO: 663511 - DNA, 33 bp, Homo sapien
gaggactcttcagttaagggacaattattacat

SEQ ID NO: 663512 - DNA, 33 bp, Homo sapien
gaggactcttcagttaggggacaattattacat

SEQ ID NO: 663513 - DNA, 33 bp, Homo sapien
tccaagtgtgaaggaaagtctggagagtttgga

SEQ ID NO: 663514 - DNA, 33 bp, Homo sapien
tccaagtgtgaaggaaggtctggagagtttgga

SEQ ID NO: 663515 - DNA, 33 bp, Homo sapien
gcctgaagagtcgggggacagacagtggccagg

SEQ ID NO: 663516 - DNA, 33 bp, Homo sapien
gcctgaagagtcggggtacagacagtggccagg

SEQ ID NO: 663517 - DNA, 33 bp, Homo sapien
tggatctaagataccaacagcatcccacactcc

SEQ ID NO: 663518 - DNA, 33 bp, Homo sapien
tggatctaagataccagcagcatcccacactcc

SEQ ID NO: 663519 - DNA, 33 bp, Homo sapien
cccaaggccatgtgtgcaaagaagcaggtggac

SEQ ID NO: 663520 - DNA, 33 bp, Homo sapien
cccaaggccatgtgtgtaaagaagcaggtggac

SEQ ID NO: 663521 - DNA, 33 bp, Homo sapien
tggctaccctcaatgacgccaactccacaaccc

SEQ ID NO: 663522 - DNA, 33 bp, Homo sapien
tggctaccctcaatgatgccaactccacaaccc

SEQ ID NO: 663523 - DNA, 33 bp, Homo sapien
acaggcaggctaacgaactagctgagttcacac

SEQ ID NO: 663524 - DNA, 33 bp, Homo sapien
acaggcaggctaacgagctagctgagttcacac

SEQ ID NO: 663525 - DNA, 33 bp, Homo sapien
tgactacagtgaccaacggctatcattaatatc

SEQ ID NO: 663526 - DNA, 33 bp, Homo sapien
tgactacagtgaccaatggctatcattaatatc

SEQ ID NO: 663527 - DNA, 33 bp, Homo sapien
tttgcctaaaatatgacgtatgctgaagtggaa

SEQ ID NO: 663528 - DNA, 33 bp, Homo sapien
tttgcctaaaatatgatgtatgctgaagtggaa

SEQ ID NO: 663529 - DNA, 33 bp, Homo sapien
cttctgtgaagaagtaaacaagccaggggccaa

SEQ ID NO: 663530 - DNA, 33 bp, Homo sapien
cttctgtgaagaagtagacaagccaggggccaa

SEQ ID NO: 663531 - DNA, 33 bp, Homo sapien
tatcttttcatttctaacagattttgcttcaat

SEQ ID NO: 663532 - DNA, 33 bp, Homo sapien
tatcttttcatttctatcagattttgcttcaat

SEQ ID NO: 663533 - DNA, 33 bp, Homo sapien
agcaacaaagaaaagacagataagtcagacatc

SEQ ID NO: 663534 - DNA, 33 bp, Homo sapien
agcaacaaagaaaagatagataagtcagacatc

SEQ ID NO: 663535 - DNA, 33 bp, Homo sapien
caaagaagttctgtggacattctctccttcgag

SEQ ID NO: 663536 - DNA, 33 bp, Homo sapien
caaagaagttctgtgggcattctctccttcgag

SEQ ID NO: 663537 - DNA, 33 bp, Homo sapien
ttttttccactttaagaagaggctgactgagtt

SEQ ID NO: 663538 - DNA, 33 bp, Homo sapien
ttttttccactttaaggagaggctgactgagtt

SEQ ID NO: 663539 - DNA, 33 bp, Homo sapien
cagtcctattgaacacagtattggaagttctgg

SEQ ID NO: 663540 - DNA, 33 bp, Homo sapien
cagtcctattgaacacggtattggaagttctgg

SEQ ID NO: 663541 - DNA, 33 bp, Homo sapien
gaatcttgactttccaaatgtcaggaatcctga

SEQ ID NO: 663542 - DNA, 33 bp, Homo sapien
gaatcttgactttccagatgtcaggaatcctga

SEQ ID NO: 663543 - DNA, 33 bp, Homo sapien
gatacaagaatggcagaaaattgataattagtg

SEQ ID NO: 663544 - DNA, 33 bp, Homo sapien
gatacaagaatggcaggaaattgataattagtg

SEQ ID NO: 663545 - DNA, 33 bp, Homo sapien
atatccgacaaaagaccagtatccagaatatac

SEQ ID NO: 663546 - DNA, 33 bp, Homo sapien
atatccgacaaaagactagtatccagaatatac

SEQ ID NO: 663547 - DNA, 33 bp, Homo sapien
actctgggtggagtaaagaagagagtgagacaa

SEQ ID NO: 663548 - DNA, 33 bp, Homo sapien
actctgggtggagtaaggaagagagtgagacaa

SEQ ID NO: 663549 - DNA, 33 bp, Homo sapien
gtctggggcatcttcccctacctgtctacctgt

SEQ ID NO: 663550 - DNA, 33 bp, Homo sapien
gtctggggcatcttcctctacctgtctacctgt

SEQ ID NO: 663551 - DNA, 33 bp, Homo sapien
aatcgaccttgacctaaaagccaagctatattt

SEQ ID NO: 663552 - DNA, 33 bp, Homo sapien
aatcgaccttgacctagaagccaagctatattt

SEQ ID NO: 663553 - DNA, 33 bp, Homo sapien
gggtcagctagtctaacctgggactaggctttg

SEQ ID NO: 663554 - DNA, 33 bp, Homo sapien
gggtcagctagtctaatctgggactaggctttg

SEQ ID NO: 663555 - DNA, 33 bp, Homo sapien
ctaggtttctagaagacgctcaggtgtaaggca

SEQ ID NO: 663556 - DNA, 33 bp, Homo sapien
ctaggtttctagaagatgctcaggtgtaaggca

SEQ ID NO: 663557 - DNA, 33 bp, Homo sapien
agggtgttgtttagaccgagtggttaggggcac

SEQ ID NO: 663558 - DNA, 33 bp, Homo sapien
agggtgttgtttagactgagtggttaggggcac

SEQ ID NO: 663559 - DNA, 33 bp, Homo sapien
gtattaggaggtagacactttcaaggtgattag

SEQ ID NO: 663560 - DNA, 33 bp, Homo sapien
gtattaggaggtagacgctttcaaggtgattag

SEQ ID NO: 663561 - DNA, 33 bp, Homo sapien
cagaattgatgtagagaacaaaactattgcttc

SEQ ID NO: 663562 - DNA, 33 bp, Homo sapien
cagaattgatgtagaggacaaaactattgcttc

SEQ ID NO: 663563 - DNA, 33 bp, Homo sapien
ccattttgaaggtccacgttaacctgactcaac

SEQ ID NO: 663564 - DNA, 33 bp, Homo sapien
ccattttgaaggtccatgttaacctgactcaac

SEQ ID NO: 663565 - DNA, 33 bp, Homo sapien
aattcataagttagtacatatgcccagagctgt

SEQ ID NO: 663566 - DNA, 33 bp, Homo sapien
aattcataagttagtatatatgcccagagctgt

SEQ ID NO: 663567 - DNA, 33 bp, Homo sapien
cagtgactactgccaaataattaaatttaaaat

SEQ ID NO: 663568 - DNA, 33 bp, Homo sapien
cagtgactactgccaattaattaaatttaaaat

SEQ ID NO: 663569 - DNA, 33 bp, Homo sapien
ccatgaacaatgattacacccagtgcttagata

SEQ ID NO: 663570 - DNA, 33 bp, Homo sapien
ccatgaacaatgattatacccagtgcttagata

SEQ ID NO: 663571 - DNA, 33 bp, Homo sapien
ttgagctgaatgatcacgaaaacaccatatcaa

SEQ ID NO: 663572 - DNA, 33 bp, Homo sapien
ttgagctgaatgatcatgaaaacaccatatcaa

SEQ ID NO: 663573 - DNA, 33 bp, Homo sapien
caaataacactattagaaaatcaccagtttgct

SEQ ID NO: 663574 - DNA, 33 bp, Homo sapien
caaataacactattaggaaatcaccagtttgct

SEQ ID NO: 663575 - DNA, 33 bp, Homo sapien
gtaatttttcagcacaatattttgactataaac

SEQ ID NO: 663576 - DNA, 33 bp, Homo sapien
gtaatttttcagcacagtattttgactataaac

SEQ ID NO: 663577 - DNA, 33 bp, Homo sapien
acctgtctaagcaacaaacttcagtggtttcta

SEQ ID NO: 663578 - DNA, 33 bp, Homo sapien
acctgtctaagcaacagacttcagtggtttcta

SEQ ID NO: 663579 - DNA, 33 bp, Homo sapien
atatgggggagttccacgatatactgtcaagag

SEQ ID NO: 663580 - DNA, 33 bp, Homo sapien
atatgggggagttccatgatatactgtcaagag

SEQ ID NO: 663581 - DNA, 33 bp, Homo sapien
ataaatgtttgttgaacatatgaatgtagtcat

SEQ ID NO: 663582 - DNA, 33 bp, Homo sapien
ataaatgtttgttgaatatatgaatgtagtcat

SEQ ID NO: 663583 - DNA, 33 bp, Homo sapien
tataatgctgctcagagaatttttccagattta

SEQ ID NO: 663584 - DNA, 33 bp, Homo sapien
tataatgctgctcagataatttttccagattta

SEQ ID NO: 663585 - DNA, 33 bp, Homo sapien
agagccctggctgaaacactacattacatgatt

SEQ ID NO: 663586 - DNA, 33 bp, Homo sapien
agagccctggctgaaagactacattacatgatt

SEQ ID NO: 663587 - DNA, 33 bp, Homo sapien
cgcttttcactctctcactccatgcatcttctc

SEQ ID NO: 663588 - DNA, 33 bp, Homo sapien
cgcttttcactctctctctccatgcatcttctc

SEQ ID NO: 663589 - DNA, 33 bp, Homo sapien
cttagaaagaaccaacacttaagaatgaactgg

SEQ ID NO: 663590 - DNA, 33 bp, Homo sapien
cttagaaagaaccaacgcttaagaatgaactgg

SEQ ID NO: 663591 - DNA, 33 bp, Homo sapien
ttggaccctaggccagaacttaatctctctgag

SEQ ID NO: 663592 - DNA, 33 bp, Homo sapien
ttggaccctaggccaggacttaatctctctgag

SEQ ID NO: 663593 - DNA, 33 bp, Homo sapien
ctcccatcggcaaaagcatcacgatgatagtaa

SEQ ID NO: 663594 - DNA, 33 bp, Homo sapien
ctcccatcggcaaaagtatcacgatgatagtaa

SEQ ID NO: 663595 - DNA, 33 bp, Homo sapien
tcccactgggtgtcaacgtcaggccttaaatct

SEQ ID NO: 663596 - DNA, 33 bp, Homo sapien
tcccactgggtgtcaatgtcaggccttaaatct

SEQ ID NO: 663597 - DNA, 33 bp, Homo sapien
gatacctgtatttccacgctccaccctgtgaaa

SEQ ID NO: 663598 - DNA, 33 bp, Homo sapien
gatacctgtatttccatgctccaccctgtgaaa

SEQ ID NO: 663599 - DNA, 33 bp, Homo sapien
ttgaaggaggttttcacattaacatagtcataa

SEQ ID NO: 663600 - DNA, 33 bp, Homo sapien
ttgaaggaggttttcatattaacatagtcataa

SEQ ID NO: 663601 - DNA, 33 bp, Homo sapien
gattaggcctgagggacatgaagagccagcagt

SEQ ID NO: 663602 - DNA, 33 bp, Homo sapien
gattaggcctgagggagatgaagagccagcagt

SEQ ID NO: 663603 - DNA, 33 bp, Homo sapien
tcaaattaagtagctacgggcagggtgcaatga

SEQ ID NO: 663604 - DNA, 33 bp, Homo sapien
tcaaattaagtagctatgggcagggtgcaatga

SEQ ID NO: 663605 - DNA, 33 bp, Homo sapien
gacattctgaaagggacgctttgagcctgaaat

SEQ ID NO: 663606 - DNA, 33 bp, Homo sapien
gacattctgaaagggaggctttgagcctgaaat

SEQ ID NO: 663607 - DNA, 33 bp, Homo sapien
ctctagcagccattccagacaatgaggtaccta

SEQ ID NO: 663608 - DNA, 33 bp, Homo sapien
ctctagcagccattccggacaatgaggtaccta

SEQ ID NO: 663609 - DNA, 33 bp, Homo sapien
ggttttccaaaatgcaataatacagaaagaatt

SEQ ID NO: 663610 - DNA, 33 bp, Homo sapien
ggttttccaaaatgcagtaatacagaaagaatt

SEQ ID NO: 663611 - DNA, 33 bp, Homo sapien
agccgatcaaggatgacgtttggctttttctct

SEQ ID NO: 663612 - DNA, 33 bp, Homo sapien
agccgatcaaggatgatgtttggctttttctct

SEQ ID NO: 663613 - DNA, 33 bp, Homo sapien
tttctgcttctgtaaaatagggataaaagccat

SEQ ID NO: 663614 - DNA, 33 bp, Homo sapien
tttctgcttctgtaaagtagggataaaagccat

SEQ ID NO: 663615 - DNA, 33 bp, Homo sapien
ttgtcaatcttcccagcaaatctgcagagtaga

SEQ ID NO: 663616 - DNA, 33 bp, Homo sapien
ttgtcaatcttcccaggaaatctgcagagtaga

SEQ ID NO: 663617 - DNA, 33 bp, Homo sapien
agcgaaagaggccaccacagacaaataaaaatc

SEQ ID NO: 663618 - DNA, 33 bp, Homo sapien
agcgaaagaggccaccgcagacaaataaaaatc

SEQ ID NO: 663619 - DNA, 33 bp, Homo sapien
gaaagtgagaaaacaacgataaagattactgtg

SEQ ID NO: 663620 - DNA, 33 bp, Homo sapien
gaaagtgagaaaacaatgataaagattactgtg

SEQ ID NO: 663621 - DNA, 33 bp, Homo sapien
actgcacattttcatcacagagaatctccgccc

SEQ ID NO: 663622 - DNA, 33 bp, Homo sapien
actgcacattttcatcgcagagaatctccgccc

SEQ ID NO: 663623 - DNA, 33 bp, Homo sapien
agacgatcctggtttgaaatattctgtcctgct

SEQ ID NO: 663624 - DNA, 33 bp, Homo sapien
agacgatcctggtttgtaatattctgtcctgct

SEQ ID NO: 663625 - DNA, 33 bp, Homo sapien
ttgaaaaattccattcaaatgttccagctgaac

SEQ ID NO: 663626 - DNA, 33 bp, Homo sapien
ttgaaaaattccattcgaatgttccagctgaac

SEQ ID NO: 663627 - DNA, 33 bp, Homo sapien
ttctgtgctaaaaatacgacaaggtaatcattt

SEQ ID NO: 663628 - DNA, 33 bp, Homo sapien
ttctgtgctaaaaatatgacaaggtaatcattt

SEQ ID NO: 663629 - DNA, 33 bp, Homo sapien
ttcacttctaattctaaggttattctgattgct

SEQ ID NO: 663630 - DNA, 33 bp, Homo sapien
ttcacttctaattctacggttattctgattgct

SEQ ID NO: 663631 - DNA, 33 bp, Homo sapien
cacttaggacctagaaagttgcaagacaattcc

SEQ ID NO: 663632 - DNA, 33 bp, Homo sapien
cacttaggacctagaaggttgcaagacaattcc

SEQ ID NO: 663633 - DNA, 33 bp, Homo sapien
gagtttaaatctacaactgacacatttaaaatc

SEQ ID NO: 663634 - DNA, 33 bp, Homo sapien
gagtttaaatctacaattgacacatttaaaatc

SEQ ID NO: 663635 - DNA, 33 bp, Homo sapien
tatttttaaataaatccatgctcgtctagagcc

SEQ ID NO: 663636 - DNA, 33 bp, Homo sapien
tatttttaaataaatcgatgctcgtctagagcc

SEQ ID NO: 663637 - DNA, 33 bp, Homo sapien
attgaggttgcttccacgtcgttaacttccagg

SEQ ID NO: 663638 - DNA, 33 bp, Homo sapien
attgaggttgcttccaggtcgttaacttccagg

SEQ ID NO: 663639 - DNA, 33 bp, Homo sapien
ggccaggctggcctcacagtaggtgctcagtta

SEQ ID NO: 663640 - DNA, 33 bp, Homo sapien
ggccaggctggcctcatagtaggtgctcagtta

SEQ ID NO: 663641 - DNA, 33 bp, Homo sapien
cactgcattcccttgaaccctaattttcccagc

SEQ ID NO: 663642 - DNA, 33 bp, Homo sapien
cactgcattcccttgagccctaattttcccagc

SEQ ID NO: 663643 - DNA, 33 bp, Homo sapien
acagggctatctgcccacaggaagagatacaaa

SEQ ID NO: 663644 - DNA, 33 bp, Homo sapien
acagggctatctgcccgcaggaagagatacaaa

SEQ ID NO: 663645 - DNA, 33 bp, Homo sapien
attgtgttgttcatccactgacataatctattc

SEQ ID NO: 663646 - DNA, 33 bp, Homo sapien
attgtgttgttcatccgctgacataatctattc

SEQ ID NO: 663647 - DNA, 33 bp, Homo sapien
cacttgataaagagtaagcatccaaccaacatt

SEQ ID NO: 663648 - DNA, 33 bp, Homo sapien
cacttgataaagagtaggcatccaaccaacatt

SEQ ID NO: 663649 - DNA, 33 bp, Homo sapien
accacctggaccatagaaagaattttaaaatat

SEQ ID NO: 663650 - DNA, 33 bp, Homo sapien
accacctggaccataggaagaattttaaaatat

SEQ ID NO: 663651 - DNA, 33 bp, Homo sapien
ttcaatgtgcccgtgaataaattgggggtttcc

SEQ ID NO: 663652 - DNA, 33 bp, Homo sapien
ttcaatgtgcccgtgattaaattgggggtttcc

SEQ ID NO: 663653 - DNA, 33 bp, Homo sapien
cgcagaaccccctcccaaattcacagtttcatc

SEQ ID NO: 663654 - DNA, 33 bp, Homo sapien
cgcagaaccccctcccgaattcacagtttcatc

SEQ ID NO: 663655 - DNA, 33 bp, Homo sapien
cctgaggacagatggaggcagcagttggcagct

SEQ ID NO: 663656 - DNA, 33 bp, Homo sapien
cctgaggacagatggatgcagcagttggcagct

SEQ ID NO: 663657 - DNA, 33 bp, Homo sapien
ttaggcttcatcaagcaaggcctgagcaaaatg

SEQ ID NO: 663658 - DNA, 33 bp, Homo sapien
ttaggcttcatcaagcgaggcctgagcaaaatg

SEQ ID NO: 663659 - DNA, 33 bp, Homo sapien
actttttaaaaaaccacgtgcatatgctaaaaa

SEQ ID NO: 663660 - DNA, 33 bp, Homo sapien
actttttaaaaaaccatgtgcatatgctaaaaa

SEQ ID NO: 663661 - DNA, 33 bp, Homo sapien
ttgctccaatcaggaccgagccctcattctcta

SEQ ID NO: 663662 - DNA, 33 bp, Homo sapien
ttgctccaatcaggactgagccctcattctcta

SEQ ID NO: 663663 - DNA, 33 bp, Homo sapien
caatgcctggtgttcagtagctctcattgattc

SEQ ID NO: 663664 - DNA, 33 bp, Homo sapien
caatgcctggtgttcattagctctcattgattc

SEQ ID NO: 663665 - DNA, 33 bp, Homo sapien
ggaggaaggtattgagaaaaaaagagtgtacag

SEQ ID NO: 663666 - DNA, 33 bp, Homo sapien
ggaggaaggtattgaggaaaaaagagtgtacag

SEQ ID NO: 663667 - DNA, 33 bp, Homo sapien
tcctggcatcagatcaagatcccactgctgtga

SEQ ID NO: 663668 - DNA, 33 bp, Homo sapien
tcctggcatcagatcaggatcccactgctgtga

SEQ ID NO: 663669 - DNA, 33 bp, Homo sapien
cttgggcactggttgaaatacagattcaaagca

SEQ ID NO: 663670 - DNA, 33 bp, Homo sapien
cttgggcactggttgagatacagattcaaagca

SEQ ID NO: 663671 - DNA, 33 bp, Homo sapien
gccagagcagctgacacctgcaaggctcagcat

SEQ ID NO: 663672 - DNA, 33 bp, Homo sapien
gccagagcagctgacatctgcaaggctcagcat

SEQ ID NO: 663673 - DNA, 33 bp, Homo sapien
gtgttttcaagaggtcaccaatctccattcatt

SEQ ID NO: 663674 - DNA, 33 bp, Homo sapien
gtgttttcaagaggtctccaatctccattcatt

SEQ ID NO: 663675 - DNA, 33 bp, Homo sapien
taagttttggacattacggagtttttggtgctt

SEQ ID NO: 663676 - DNA, 33 bp, Homo sapien
taagttttggacattatggagtttttggtgctt

SEQ ID NO: 663677 - DNA, 33 bp, Homo sapien
tttaagtctacagtacaggacaaaggaggctgt

SEQ ID NO: 663678 - DNA, 33 bp, Homo sapien
tttaagtctacagtacgggacaaaggaggctgt

SEQ ID NO: 663679 - DNA, 33 bp, Homo sapien
tcatgtccttcaccacaaactgaaatataatgt

SEQ ID NO: 663680 - DNA, 33 bp, Homo sapien
tcatgtccttcaccaccaactgaaatataatgt

SEQ ID NO: 663681 - DNA, 33 bp, Homo sapien
aaaggaccagtcaagaatcagacacagagggac

SEQ ID NO: 663682 - DNA, 33 bp, Homo sapien
aaaggaccagtcaagagtcagacacagagggac

SEQ ID NO: 663683 - DNA, 33 bp, Homo sapien
caacactgagctccacaaggctgggaactttgt

SEQ ID NO: 663684 - DNA, 33 bp, Homo sapien
caacactgagctccacgaggctgggaactttgt

SEQ ID NO: 663685 - DNA, 33 bp, Homo sapien
tgttgtagaatgtgaactcttggttatagaaag

SEQ ID NO: 663686 - DNA, 33 bp, Homo sapien
tgttgtagaatgtgaagtcttggttatagaaag

SEQ ID NO: 663687 - DNA, 33 bp, Homo sapien
agagatgtcagcagtgcagactagaagcagtca

SEQ ID NO: 663688 - DNA, 33 bp, Homo sapien
agagatgtcagcagtgtagactagaagcagtca

SEQ ID NO: 663689 - DNA, 33 bp, Homo sapien
tcagttacagtgttggccagatttcgggagcag

SEQ ID NO: 663690 - DNA, 33 bp, Homo sapien
tcagttacagtgttggtcagatttcgggagcag

SEQ ID NO: 663691 - DNA, 33 bp, Homo sapien
gtatatcacctgtctcaaggaaagggagtccag

SEQ ID NO: 663692 - DNA, 33 bp, Homo sapien
gtatatcacctgtctcgaggaaagggagtccag

SEQ ID NO: 663693 - DNA, 33 bp, Homo sapien
cactaccctctccttaccatctattcaacacca

SEQ ID NO: 663694 - DNA, 33 bp, Homo sapien
cactaccctctccttatcatctattcaacacca

SEQ ID NO: 663695 - DNA, 33 bp, Homo sapien
ccttgctgctgtctcaataaagatcatgatgat

SEQ ID NO: 663696 - DNA, 33 bp, Homo sapien
ccttgctgctgtctcactaaagatcatgatgat

SEQ ID NO: 663697 - DNA, 33 bp, Homo sapien
aattgcctcacttctacggcaagacgccagcag

SEQ ID NO: 663698 - DNA, 33 bp, Homo sapien
aattgcctcacttctatggcaagacgccagcag

SEQ ID NO: 663699 - DNA, 33 bp, Homo sapien
acaatgtgcttctctcacgcaggtcatgccccg

SEQ ID NO: 663700 - DNA, 33 bp, Homo sapien
acaatgtgcttctctcgcgcaggtcatgccccg

SEQ ID NO: 663701 - DNA, 33 bp, Homo sapien
catgtgagtgccattacacagttgaaaagatgg

SEQ ID NO: 663702 - DNA, 33 bp, Homo sapien
catgtgagtgccattatacagttgaaaagatgg

SEQ ID NO: 663703 - DNA, 33 bp, Homo sapien
tttccgttctgttggcaaatgcggctttacctc

SEQ ID NO: 663704 - DNA, 33 bp, Homo sapien
tttccgttctgttggcgaatgcggctttacctc

SEQ ID NO: 663705 - DNA, 33 bp, Homo sapien
actagtctcatccacactagcctttagttttaa

SEQ ID NO: 663706 - DNA, 33 bp, Homo sapien
actagtctcatccacagtagcctttagttttaa

SEQ ID NO: 663707 - DNA, 33 bp, Homo sapien
accagaaggattgattgaaaaggtaactctgac

SEQ ID NO: 663708 - DNA, 33 bp, Homo sapien
accagaaggattgatttaaaaggtaactctgac

SEQ ID NO: 663709 - DNA, 33 bp, Homo sapien
cagtccttgcttaccccctctgagctgcacagc

SEQ ID NO: 663710 - DNA, 33 bp, Homo sapien
cagtccttgcttacccgctctgagctgcacagc

SEQ ID NO: 663711 - DNA, 33 bp, Homo sapien
gttcctctattcccagaaaaggtgactccacag

SEQ ID NO: 663712 - DNA, 33 bp, Homo sapien
gttcctctattcccagcaaaggtgactccacag

SEQ ID NO: 663713 - DNA, 33 bp, Homo sapien
ccaggagagaatacccaaagtacaatttcttct

SEQ ID NO: 663714 - DNA, 33 bp, Homo sapien
ccaggagagaatacccgaagtacaatttcttct

SEQ ID NO: 663715 - DNA, 33 bp, Homo sapien
tcgatgaataatataacagggttaaagcagttc

SEQ ID NO: 663716 - DNA, 33 bp, Homo sapien
tcgatgaataatataatagggttaaagcagttc

SEQ ID NO: 663717 - DNA, 33 bp, Homo sapien
aagtggaagataatgcacttgccttcagtctgg

SEQ ID NO: 663718 - DNA, 33 bp, Homo sapien
aagtggaagataatgcgcttgccttcagtctgg

SEQ ID NO: 663719 - DNA, 33 bp, Homo sapien
cctcttacataaaaggaagtgtctaaagtcagc

SEQ ID NO: 663720 - DNA, 33 bp, Homo sapien
cctcttacataaaaggtagtgtctaaagtcagc

SEQ ID NO: 663721 - DNA, 33 bp, Homo sapien
acaggctgcataaaatgaaaacacctgattttg

SEQ ID NO: 663722 - DNA, 33 bp, Homo sapien
acaggctgcataaaattaaaacacctgattttg

SEQ ID NO: 663723 - DNA, 33 bp, Homo sapien
gacatgttggtcccaccagtttctatcaatcac

SEQ ID NO: 663724 - DNA, 33 bp, Homo sapien
gacatgttggtcccactagtttctatcaatcac

SEQ ID NO: 663725 - DNA, 33 bp, Homo sapien
attagtatctctagcccggactcttttcttgat

SEQ ID NO: 663726 - DNA, 33 bp, Homo sapien
attagtatctctagcctggactcttttcttgat

SEQ ID NO: 663727 - DNA, 33 bp, Homo sapien
atcaacctctctcacacgaactaccaagaactt

SEQ ID NO: 663728 - DNA, 33 bp, Homo sapien
atcaacctctctcacatgaactaccaagaactt

SEQ ID NO: 663729 - DNA, 33 bp, Homo sapien
aagtgcattaacaaagacgatgtggagccctga

SEQ ID NO: 663730 - DNA, 33 bp, Homo sapien
aagtgcattaacaaaggcgatgtggagccctga

SEQ ID NO: 663731 - DNA, 33 bp, Homo sapien
tttgtatgagtgagaaaaggtgtcccttgaagt

SEQ ID NO: 663732 - DNA, 33 bp, Homo sapien
tttgtatgagtgagaagaggtgtcccttgaagt

SEQ ID NO: 663733 - DNA, 33 bp, Homo sapien
ccagaatcaatgttaaaatctttggtggttgat

SEQ ID NO: 663734 - DNA, 33 bp, Homo sapien
ccagaatcaatgttaacatctttggtggttgat

SEQ ID NO: 663735 - DNA, 33 bp, Homo sapien
cactctcaaagattccagactcagaaagagttg

SEQ ID NO: 663736 - DNA, 33 bp, Homo sapien
cactctcaaagattccggactcagaaagagttg

SEQ ID NO: 663737 - DNA, 33 bp, Homo sapien
gtaagagacaaaaggcaccaatgagaagattca

SEQ ID NO: 663738 - DNA, 33 bp, Homo sapien
gtaagagacaaaaggcgccaatgagaagattca

SEQ ID NO: 663739 - DNA, 33 bp, Homo sapien
cttggactgacaaaatcacagtgataggccatg

SEQ ID NO: 663740 - DNA, 33 bp, Homo sapien
cttggactgacaaaattacagtgataggccatg

SEQ ID NO: 663741 - DNA, 33 bp, Homo sapien
ttgaatgtgatgaaaaacaaacatccagaagca

SEQ ID NO: 663742 - DNA, 33 bp, Homo sapien
ttgaatgtgatgaaaagcaaacatccagaagca

SEQ ID NO: 663743 - DNA, 33 bp, Homo sapien
gtaactttgcacttgtcaatccaccagtcttcc

SEQ ID NO: 663744 - DNA, 33 bp, Homo sapien
gtaactttgcacttgtgaatccaccagtcttcc

SEQ ID NO: 663745 - DNA, 33 bp, Homo sapien
ggattttaatggtggaacgtgtatcagtataaa

SEQ ID NO: 663746 - DNA, 33 bp, Homo sapien
ggattttaatggtggagcgtgtatcagtataaa

SEQ ID NO: 663747 - DNA, 33 bp, Homo sapien
tcaaaatgtaggcaagaacttggaagggctgaa

SEQ ID NO: 663748 - DNA, 33 bp, Homo sapien
tcaaaatgtaggcaaggacttggaagggctgaa

SEQ ID NO: 663749 - DNA, 33 bp, Homo sapien
agcacatctaaacgcaatagaacaggcacgtca

SEQ ID NO: 663750 - DNA, 33 bp, Homo sapien
agcacatctaaacgcagtagaacaggcacgtca

SEQ ID NO: 663751 - DNA, 33 bp, Homo sapien
ggcccaaactcatccaatattggaaacttttca

SEQ ID NO: 663752 - DNA, 33 bp, Homo sapien
ggcccaaactcatccagtattggaaacttttca

SEQ ID NO: 663753 - DNA, 33 bp, Homo sapien
tgtgtgatcaagtaaacgcaagatggtagaaaa

SEQ ID NO: 663754 - DNA, 33 bp, Homo sapien
tgtgtgatcaagtaaatgcaagatggtagaaaa

SEQ ID NO: 663755 - DNA, 33 bp, Homo sapien
cggtcgtgtgtacttacaacggttgttctcaga

SEQ ID NO: 663756 - DNA, 33 bp, Homo sapien
cggtcgtgtgtacttataacggttgttctcaga

SEQ ID NO: 663757 - DNA, 33 bp, Homo sapien
gtgctgggtgtttgtaaaggacttagcttccac

SEQ ID NO: 663758 - DNA, 33 bp, Homo sapien
gtgctgggtgtttgtagaggacttagcttccac

SEQ ID NO: 663759 - DNA, 33 bp, Homo sapien
cggccctcaacattccaatatactgcatacaaa

SEQ ID NO: 663760 - DNA, 33 bp, Homo sapien
cggccctcaacattcccatatactgcatacaaa

SEQ ID NO: 663761 - DNA, 33 bp, Homo sapien
tacgcctccatctgtaaacttgctccccgcctt

SEQ ID NO: 663762 - DNA, 33 bp, Homo sapien
tacgcctccatctgtacacttgctccccgcctt

SEQ ID NO: 663763 - DNA, 33 bp, Homo sapien
ggccttgtccaacaacagcatttcacacttatt

SEQ ID NO: 663764 - DNA, 33 bp, Homo sapien
ggccttgtccaacaacggcatttcacacttatt

SEQ ID NO: 663765 - DNA, 33 bp, Homo sapien
ccctcagcacttcacaataggccaatccctagc

SEQ ID NO: 663766 - DNA, 33 bp, Homo sapien
ccctcagcacttcacagtaggccaatccctagc

SEQ ID NO: 663767 - DNA, 33 bp, Homo sapien
tttgagtaattcacccaagattacacagctaat

SEQ ID NO: 663768 - DNA, 33 bp, Homo sapien
tttgagtaattcacccgagattacacagctaat

SEQ ID NO: 663769 - DNA, 33 bp, Homo sapien
gataagggatgtgtaacagtcaacacatttcct

SEQ ID NO: 663770 - DNA, 33 bp, Homo sapien
gataagggatgtgtaatagtcaacacatttcct

SEQ ID NO: 663771 - DNA, 33 bp, Homo sapien
agtgcttttctttggagcatttgttaaagaaat

SEQ ID NO: 663772 - DNA, 33 bp, Homo sapien
agtgcttttctttggatcatttgttaaagaaat

SEQ ID NO: 663773 - DNA, 33 bp, Homo sapien
aaaaatgatcatctgcaaaatattcaattgtgg

SEQ ID NO: 663774 - DNA, 33 bp, Homo sapien
aaaaatgatcatctgccaaatattcaattgtgg

SEQ ID NO: 663775 - DNA, 33 bp, Homo sapien
aacaaaaacgagagaacatgaaacacttatggc

SEQ ID NO: 663776 - DNA, 33 bp, Homo sapien
aacaaaaacgagagaatatgaaacacttatggc

SEQ ID NO: 663777 - DNA, 33 bp, Homo sapien
aagactgtgatacataaaatacagtactttctt

SEQ ID NO: 663778 - DNA, 33 bp, Homo sapien
aagactgtgatacatataatacagtactttctt

SEQ ID NO: 663779 - DNA, 33 bp, Homo sapien
agtgtcctataagtgaagatgcaagtgctatgt

SEQ ID NO: 663780 - DNA, 33 bp, Homo sapien
agtgtcctataagtgaggatgcaagtgctatgt

SEQ ID NO: 663781 - DNA, 33 bp, Homo sapien
aaagtcttttgaaataagagaccatgtaagtag

SEQ ID NO: 663782 - DNA, 33 bp, Homo sapien
aaagtcttttgaaatacgagaccatgtaagtag

SEQ ID NO: 663783 - DNA, 33 bp, Homo sapien
cctgattcgtgcctgaacccttttataatagca

SEQ ID NO: 663784 - DNA, 33 bp, Homo sapien
cctgattcgtgcctgagcccttttataatagca

SEQ ID NO: 663785 - DNA, 33 bp, Homo sapien
tgagtgtcttgtgaccagctttggtggaaggtc

SEQ ID NO: 663786 - DNA, 33 bp, Homo sapien
tgagtgtcttgtgaccggctttggtggaaggtc

SEQ ID NO: 663787 - DNA, 33 bp, Homo sapien
ttcaattatattcctccatgactgttcactctt

SEQ ID NO: 663788 - DNA, 33 bp, Homo sapien
ttcaattatattcctctatgactgttcactctt

SEQ ID NO: 663789 - DNA, 33 bp, Homo sapien
ctcagtaagcagtatgaattatctttactggag

SEQ ID NO: 663790 - DNA, 33 bp, Homo sapien
ctcagtaagcagtatggattatctttactggag

SEQ ID NO: 663791 - DNA, 33 bp, Homo sapien
cttactgagcctagtaaatgccacaagcttagt

SEQ ID NO: 663792 - DNA, 33 bp, Homo sapien
cttactgagcctagtagatgccacaagcttagt

SEQ ID NO: 663793 - DNA, 33 bp, Homo sapien
agaaatattttccacactacttttgaacttttt

SEQ ID NO: 663794 - DNA, 33 bp, Homo sapien
agaaatattttccacattacttttgaacttttt

SEQ ID NO: 663795 - DNA, 33 bp, Homo sapien
acaaacttttacacagcctcaaaagcatgactc

SEQ ID NO: 663796 - DNA, 33 bp, Homo sapien
acaaacttttacacaggctcaaaagcatgactc

SEQ ID NO: 663797 - DNA, 33 bp, Homo sapien
acaaccacataagtaactgacctgcagaaacat

SEQ ID NO: 663798 - DNA, 33 bp, Homo sapien
acaaccacataagtaattgacctgcagaaacat

SEQ ID NO: 663799 - DNA, 33 bp, Homo sapien
cagcggcgctaacagcaatgaccaattagagct

SEQ ID NO: 663800 - DNA, 33 bp, Homo sapien
cagcggcgctaacagcgatgaccaattagagct

SEQ ID NO: 663801 - DNA, 33 bp, Homo sapien
ggcagccgtgcaaagccctgcagattcagaaat

SEQ ID NO: 663802 - DNA, 33 bp, Homo sapien
ggcagccgtgcaaagcgctgcagattcagaaat

SEQ ID NO: 663803 - DNA, 33 bp, Homo sapien
ttattcttgtggaatccaagaatagaatttcat

SEQ ID NO: 663804 - DNA, 33 bp, Homo sapien
ttattcttgtggaatctaagaatagaatttcat

SEQ ID NO: 663805 - DNA, 33 bp, Homo sapien
acctccaaaacagttacggtgctctagagactg

SEQ ID NO: 663806 - DNA, 33 bp, Homo sapien
acctccaaaacagttagggtgctctagagactg

SEQ ID NO: 663807 - DNA, 33 bp, Homo sapien
ttgtgtgcctgtgctccaatcctgctgtgtcat

SEQ ID NO: 663808 - DNA, 33 bp, Homo sapien
ttgtgtgcctgtgctctaatcctgctgtgtcat

SEQ ID NO: 663809 - DNA, 33 bp, Homo sapien
tgtcaggactgaatgacgactacagaaagagca

SEQ ID NO: 663810 - DNA, 33 bp, Homo sapien
tgtcaggactgaatgatgactacagaaagagca

SEQ ID NO: 663811 - DNA, 33 bp, Homo sapien
ccgtctagaacctgtgaatcttccattatggag

SEQ ID NO: 663812 - DNA, 33 bp, Homo sapien
ccgtctagaacctgtgtatcttccattatggag

SEQ ID NO: 663813 - DNA, 33 bp, Homo sapien
caaaggaggaaggtgaagtcaaagggacagacc

SEQ ID NO: 663814 - DNA, 33 bp, Homo sapien
caaaggaggaaggtgacgtcaaagggacagacc

SEQ ID NO: 663815 - DNA, 33 bp, Homo sapien
gtcactatcagtactaagtggatttctcacacg

SEQ ID NO: 663816 - DNA, 33 bp, Homo sapien
gtcactatcagtactatgtggatttctcacacg

SEQ ID NO: 663817 - DNA, 33 bp, Homo sapien
tttctgtattgtttcaactgtgtaactgggttt

SEQ ID NO: 663818 - DNA, 33 bp, Homo sapien
tttctgtattgtttcagctgtgtaactgggttt

SEQ ID NO: 663819 - DNA, 33 bp, Homo sapien
tcgtatgcactgtgggaaagttcttaaaggaac

SEQ ID NO: 663820 - DNA, 33 bp, Homo sapien
tcgtatgcactgtgggcaagttcttaaaggaac

SEQ ID NO: 663821 - DNA, 33 bp, Homo sapien
ttttctcaaagggtcccattttgtgcatgacta

SEQ ID NO: 663822 - DNA, 33 bp, Homo sapien
ttttctcaaagggtcctattttgtgcatgacta

SEQ ID NO: 663823 - DNA, 33 bp, Homo sapien
ccaattgggtttaaaacatacgcttagaaaact

SEQ ID NO: 663824 - DNA, 33 bp, Homo sapien
ccaattgggtttaaaatatacgcttagaaaact

SEQ ID NO: 663825 - DNA, 33 bp, Homo sapien
cagggaggagaacatcacagaggcaattatccc

SEQ ID NO: 663826 - DNA, 33 bp, Homo sapien
cagggaggagaacatcgcagaggcaattatccc

SEQ ID NO: 663827 - DNA, 33 bp, Homo sapien
gataatctcaagtcccaaaattagattgaagga

SEQ ID NO: 663828 - DNA, 33 bp, Homo sapien
gataatctcaagtcccgaaattagattgaagga

SEQ ID NO: 663829 - DNA, 33 bp, Homo sapien
cttcacatcatacccccaaatcaatgctggtgg

SEQ ID NO: 663830 - DNA, 33 bp, Homo sapien
cttcacatcatacccctaaatcaatgctggtgg

SEQ ID NO: 663831 - DNA, 33 bp, Homo sapien
atgtatatataactccaacacatcattaagaaa

SEQ ID NO: 663832 - DNA, 33 bp, Homo sapien
atgtatatataactccgacacatcattaagaaa

SEQ ID NO: 663833 - DNA, 33 bp, Homo sapien
tactctaagagaaaaaacctatggcccactttg

SEQ ID NO: 663834 - DNA, 33 bp, Homo sapien
tactctaagagaaaaagcctatggcccactttg

SEQ ID NO: 663835 - DNA, 33 bp, Homo sapien
gacattggccattgcactactctgaagttttgt

SEQ ID NO: 663836 - DNA, 33 bp, Homo sapien
gacattggccattgcagtactctgaagttttgt

SEQ ID NO: 663837 - DNA, 33 bp, Homo sapien
atcactgtgcgaccaacgacatctaccctctgg

SEQ ID NO: 663838 - DNA, 33 bp, Homo sapien
atcactgtgcgaccaatgacatctaccctctgg

SEQ ID NO: 663839 - DNA, 33 bp, Homo sapien
tcctgggtgacaagtccacatggtttccatttg

SEQ ID NO: 663840 - DNA, 33 bp, Homo sapien
tcctgggtgacaagtctacatggtttccatttg

SEQ ID NO: 663841 - DNA, 33 bp, Homo sapien
cacaaagaggccggcacggaaatcgtttgactg

SEQ ID NO: 663842 - DNA, 33 bp, Homo sapien
cacaaagaggccggcatggaaatcgtttgactg

SEQ ID NO: 663843 - DNA, 33 bp, Homo sapien
caaatacacttccccaaataaggcattgttgct

SEQ ID NO: 663844 - DNA, 33 bp, Homo sapien
caaatacacttccccagataaggcattgttgct

SEQ ID NO: 663845 - DNA, 33 bp, Homo sapien
aaaatgcatttgaaaacgtaagttgactgccca

SEQ ID NO: 663846 - DNA, 33 bp, Homo sapien
aaaatgcatttgaaaatgtaagttgactgccca

SEQ ID NO: 663847 - DNA, 33 bp, Homo sapien
tcttgacatactaaaaattgccaaacctttgtc

SEQ ID NO: 663848 - DNA, 33 bp, Homo sapien
tcttgacatactaaaagttgccaaacctttgtc

SEQ ID NO: 663849 - DNA, 33 bp, Homo sapien
gctctcagcgcttcaagtatgttagcagcagcc

SEQ ID NO: 663850 - DNA, 33 bp, Homo sapien
gctctcagcgcttcaattatgttagcagcagcc

SEQ ID NO: 663851 - DNA, 33 bp, Homo sapien
tacttgagttttccaactgatatctggagacct

SEQ ID NO: 663852 - DNA, 33 bp, Homo sapien
tacttgagttttccaattgatatctggagacct

SEQ ID NO: 663853 - DNA, 33 bp, Homo sapien
atcggaaggcccaatacaggacagtaaaaaagg

SEQ ID NO: 663854 - DNA, 33 bp, Homo sapien
atcggaaggcccaatataggacagtaaaaaagg

SEQ ID NO: 663855 - DNA, 33 bp, Homo sapien
atggccaagcagatacacccggatagatattgc

SEQ ID NO: 663856 - DNA, 33 bp, Homo sapien
atggccaagcagatacgcccggatagatattgc

SEQ ID NO: 663857 - DNA, 33 bp, Homo sapien
tatttgttgagtgaataaatgatcttaaagatc

SEQ ID NO: 663858 - DNA, 33 bp, Homo sapien
tatttgttgagtgaattaatgatcttaaagatc

SEQ ID NO: 663859 - DNA, 33 bp, Homo sapien
gaacagtgatggaaaggctctcaaacagtgact

SEQ ID NO: 663860 - DNA, 33 bp, Homo sapien
gaacagtgatggaaagtctctcaaacagtgact

SEQ ID NO: 663861 - DNA, 33 bp, Homo sapien
ccagggctctgaacaactgcgctaagaagcctt

SEQ ID NO: 663862 - DNA, 33 bp, Homo sapien
ccagggctctgaacaattgcgctaagaagcctt

SEQ ID NO: 663863 - DNA, 33 bp, Homo sapien; identical to SEQ ID NO: 663861

SEQ ID NO: 663864 - DNA, 33 bp, Homo sapien; identical to SEQ ID NO: 663862

SEQ ID NO: 663865 - DNA, 33 bp, Homo sapien
cattaaaatacccaaaaaggccggacacagtgg

SEQ ID NO: 663866 - DNA, 33 bp, Homo sapien
cattaaaatacccaaagaggccggacacagtgg

SEQ ID NO: 663867 - DNA, 33 bp, Homo sapien
tgcctggaatcatatcacatactagtactgtga

SEQ ID NO: 663868 - DNA, 33 bp, Homo sapien
tgcctggaatcatatctcatactagtactgtga

SEQ ID NO: 663869 - DNA, 33 bp, Homo sapien
gctccaagtacggctccattggcttattggact

SEQ ID NO: 663870 - DNA, 33 bp, Homo sapien
gctccaagtacggctctattggcttattggact

SEQ ID NO: 663871 - DNA, 33 bp, Homo sapien
aggctcagtcgcagaacagagtggctttgcagc

SEQ ID NO: 663872 - DNA, 33 bp, Homo sapien
aggctcagtcgcagaatagagtggctttgcagc

SEQ ID NO: 663873 - DNA, 33 bp, Homo sapien
tcttccaataaaataaatgctgaagaccactta

SEQ ID NO: 663874 - DNA, 33 bp, Homo sapien
tcttccaataaaataagtgctgaagaccactta

SEQ ID NO: 663875 - DNA, 33 bp, Homo sapien
aagagaccgagctcccaagatacgtgtgagaaa

SEQ ID NO: 663876 - DNA, 33 bp, Homo sapien
aagagaccgagctccctagatacgtgtgagaaa

SEQ ID NO: 663877 - DNA, 33 bp, Homo sapien
agggacttgttcaaaacttaaccaaactttaat

SEQ ID NO: 663878 - DNA, 33 bp, Homo sapien
agggacttgttcaaaatttaaccaaactttaat

SEQ ID NO: 663879 - DNA, 33 bp, Homo sapien
acagaaatccaattaaccagagcactccaatgg

SEQ ID NO: 663880 - DNA, 33 bp, Homo sapien
acagaaatccaattaatcagagcactccaatgg

SEQ ID NO: 663881 - DNA, 33 bp, Homo sapien
gtttttaaatgtctaacgtctataaagcccaat

SEQ ID NO: 663882 - DNA, 33 bp, Homo sapien
gtttttaaatgtctaatgtctataaagcccaat

SEQ ID NO: 663883 - DNA, 33 bp, Homo sapien
ggtaataaggggttcacgagtcctaattttaca

SEQ ID NO: 663884 - DNA, 33 bp, Homo sapien
ggtaataaggggttcatgagtcctaattttaca

SEQ ID NO: 663885 - DNA, 33 bp, Homo sapien
acactctaggtttcaccggatgtgctaagactc

SEQ ID NO: 663886 - DNA, 33 bp, Homo sapien
acactctaggtttcactggatgtgctaagactc

SEQ ID NO: 663887 - DNA, 33 bp, Homo sapien
tgagaagcccattaggccagatacagtctctcc

SEQ ID NO: 663888 - DNA, 33 bp, Homo sapien
tgagaagcccattaggtcagatacagtctctcc

SEQ ID NO: 663889 - DNA, 33 bp, Homo sapien
ggagggagcctcataaactggcttggaccctgc

SEQ ID NO: 663890 - DNA, 33 bp, Homo sapien
ggagggagcctcataagctggcttggaccctgc

SEQ ID NO: 663891 - DNA, 33 bp, Homo sapien
gcagtactaaagaaaggcctgatggtgattcct

SEQ ID NO: 663892 - DNA, 33 bp, Homo sapien
gcagtactaaagaaagtcctgatggtgattcct

SEQ ID NO: 663893 - DNA, 33 bp, Homo sapien
atgcaatggagtgttacaaggccctggaacagc

SEQ ID NO: 663894 - DNA, 33 bp, Homo sapien
atgcaatggagtgttataaggccctggaacagc

SEQ ID NO: 663895 - DNA, 33 bp, Homo sapien
atttatccaagagcaacgccagattgaaggcac

SEQ ID NO: 663896 - DNA, 33 bp, Homo sapien
atttatccaagagcaatgccagattgaaggcac

SEQ ID NO: 663897 - DNA, 33 bp, Homo sapien
agaaaatactaatagaagatcctgaaagcttcc

SEQ ID NO: 663898 - DNA, 33 bp, Homo sapien
agaaaatactaatagaggatcctgaaagcttcc

SEQ ID NO: 663899 - DNA, 33 bp, Homo sapien
attccatatttagggaagtcaactcaaaactat

SEQ ID NO: 663900 - DNA, 33 bp, Homo sapien
attccatatttagggaggtcaactcaaaactat

SEQ ID NO: 663901 - DNA, 33 bp, Homo sapien
ctgtaaaactagtacaagtgaagttgggattca

SEQ ID NO: 663902 - DNA, 33 bp, Homo sapien
ctgtaaaactagtacaggtgaagttgggattca

SEQ ID NO: 663903 - DNA, 33 bp, Homo sapien
agtccaaagctctaaccgaagctagtgccaaaa

SEQ ID NO: 663904 - DNA, 33 bp, Homo sapien
agtccaaagctctaactgaagctagtgccaaaa

SEQ ID NO: 663905 - DNA, 33 bp, Homo sapien
gtatcattatttaacaacttaccaatttcataa

SEQ ID NO: 663906 - DNA, 33 bp, Homo sapien
gtatcattatttaacatcttaccaatttcataa

SEQ ID NO: 663907 - DNA, 33 bp, Homo sapien
atgaactgacctataccaacagagtctatgcag

SEQ ID NO: 663908 - DNA, 33 bp, Homo sapien
atgaactgacctatacgaacagagtctatgcag

SEQ ID NO: 663909 - DNA, 33 bp, Homo sapien
ggaaagcaacagccaccacaaggtgccaaccta

SEQ ID NO: 663910 - DNA, 33 bp, Homo sapien
ggaaagcaacagccactacaaggtgccaaccta

SEQ ID NO: 663911 - DNA, 33 bp, Homo sapien
aacctgaatagatgacccacaaattaaacaggg

SEQ ID NO: 663912 - DNA, 33 bp, Homo sapien
aacctgaatagatgacgcacaaattaaacaggg

SEQ ID NO: 663913 - DNA, 33 bp, Homo sapien
agatagaatgctgatagggtcatcttctcagtg

SEQ ID NO: 663914 - DNA, 33 bp, Homo sapien
agatagaatgctgatatggtcatcttctcagtg

SEQ ID NO: 663915 - DNA, 33 bp, Homo sapien
gaaaatagcaaaggaaatgaaaatgtcccatcc

SEQ ID NO: 663916 - DNA, 33 bp, Homo sapien
gaaaatagcaaaggaagtgaaaatgtcccatcc

SEQ ID NO: 663917 - DNA, 33 bp, Homo sapien
gggactgaattcctcagcctttgtagcacacga

SEQ ID NO: 663918 - DNA, 33 bp, Homo sapien
gggactgaattcctcatcctttgtagcacacga

SEQ ID NO: 663919 - DNA, 33 bp, Homo sapien
caaatgctgctctacactaaccggattggttgt

SEQ ID NO: 663920 - DNA, 33 bp, Homo sapien
caaatgctgctctacattaaccggattggttgt

SEQ ID NO: 663921 - DNA, 33 bp, Homo sapien
gtacttcaatctaataaaggaaagtctacattg

SEQ ID NO: 663922 - DNA, 33 bp, Homo sapien
gtacttcaatctaatagaggaaagtctacattg

SEQ ID NO: 663923 - DNA, 33 bp, Homo sapien
gcagtttctagagaacccggtcttatcgtgggt

SEQ ID NO: 663924 - DNA, 33 bp, Homo sapien
gcagtttctagagaactcggtcttatcgtgggt

SEQ ID NO: 663925 - DNA, 33 bp, Homo sapien
tgctgctactcatcaaatatctattctttttcc

SEQ ID NO: 663926 - DNA, 33 bp, Homo sapien
tgctgctactcatcaagtatctattctttttcc

SEQ ID NO: 663927 - DNA, 33 bp, Homo sapien
tcttccactagtgtgcactccaaccctcaccct

SEQ ID NO: 663928 - DNA, 33 bp, Homo sapien
tcttccactagtgtgcgctccaaccctcaccct

SEQ ID NO: 663929 - DNA, 33 bp, Homo sapien
aggtgttttagaggtacaatcagtgcagcttga

SEQ ID NO: 663930 - DNA, 33 bp, Homo sapien
aggtgttttagaggtagaatcagtgcagcttga

SEQ ID NO: 663931 - DNA, 33 bp, Homo sapien
atatgctacagtggaaatatcctccttttcttg

SEQ ID NO: 663932 - DNA, 33 bp, Homo sapien
atatgctacagtggaagtatcctccttttcttg

SEQ ID NO: 663933 - DNA, 33 bp, Homo sapien
aatagattgtgctgaaacctttattattattta

SEQ ID NO: 663934 - DNA, 33 bp, Homo sapien
aatagattgtgctgaaccctttattattattta

SEQ ID NO: 663935 - DNA, 33 bp, Homo sapien
cagttgaacacagatcaaactccttgttctaca

SEQ ID NO: 663936 - DNA, 33 bp, Homo sapien
cagttgaacacagatcgaactccttgttctaca

SEQ ID NO: 663937 - DNA, 33 bp, Homo sapien
tgtatctgttgaaaacaattagcaccaagaagc

SEQ ID NO: 663938 - DNA, 33 bp, Homo sapien
tgtatctgttgaaaacgattagcaccaagaagc

SEQ ID NO: 663939 - DNA, 33 bp, Homo sapien
attttcttcactctgcaaaatactgactataaa

SEQ ID NO: 663940 - DNA, 33 bp, Homo sapien
attttcttcactctgcgaaatactgactataaa

SEQ ID NO: 663941 - DNA, 33 bp, Homo sapien
ttaaaaaaagccaagacagcatatgtattctaa

SEQ ID NO: 663942 - DNA, 33 bp, Homo sapien
ttaaaaaaagccaagagagcatatgtattctaa

SEQ ID NO: 663943 - DNA, 33 bp, Homo sapien
cctaattgttgtaagactccattgctgtctctt

SEQ ID NO: 663944 - DNA, 33 bp, Homo sapien
cctaattgttgtaagattccattgctgtctctt

SEQ ID NO: 663945 - DNA, 33 bp, Homo sapien
caagcactacacctaaagcaaaaactttctgct

SEQ ID NO: 663946 - DNA, 33 bp, Homo sapien
caagcactacacctaaggcaaaaactttctgct

SEQ ID NO: 663947 - DNA, 33 bp, Homo sapien
ctcccactctagaggaggtgacctatattctat

SEQ ID NO: 663948 - DNA, 33 bp, Homo sapien
ctcccactctagaggatgtgacctatattctat

SEQ ID NO: 663949 - DNA, 33 bp, Homo sapien
aatctctgcatttgaaatgttaagatgaactca

SEQ ID NO: 663950 - DNA, 33 bp, Homo sapien
aatctctgcatttgaagtgttaagatgaactca

SEQ ID NO: 663951 - DNA, 33 bp, Homo sapien
agtcccagataagaaaataaggactggattccc

SEQ ID NO: 663952 - DNA, 33 bp, Homo sapien
agtcccagataagaaagtaaggactggattccc

SEQ ID NO: 663953 - DNA, 33 bp, Homo sapien
aaagattctgcaatgcacaggagagtcttccag

SEQ ID NO: 663954 - DNA, 33 bp, Homo sapien
aaagattctgcaatgcgcaggagagtcttccag

SEQ ID NO: 663955 - DNA, 33 bp, Homo sapien
ttttgtgacaactgaaaaaactgcacacagaac

SEQ ID NO: 663956 - DNA, 33 bp, Homo sapien
ttttgtgacaactgaagaaactgcacacagaac

SEQ ID NO: 663957 - DNA, 33 bp, Homo sapien
tgatcttgttcatctacgtcctttgttatatcc

SEQ ID NO: 663958 - DNA, 33 bp, Homo sapien
tgatcttgttcatctatgtcctttgttatatcc

SEQ ID NO: 663959 - DNA, 33 bp, Homo sapien
atgaatcagtaaagaaatatgcaaaataggctg

SEQ ID NO: 663960 - DNA, 33 bp, Homo sapien
atgaatcagtaaagaagtatgcaaaataggctg

SEQ ID NO: 663961 - DNA, 33 bp, Homo sapien
ctggctggatataacgaaaccctggagcagtcc

SEQ ID NO: 663962 - DNA, 33 bp, Homo sapien
ctggctggatataacgcaaccctggagcagtcc

SEQ ID NO: 663963 - DNA, 33 bp, Homo sapien
tatgtttcaaaatctacggagaagtttgagttg

SEQ ID NO: 663964 - DNA, 33 bp, Homo sapien
tatgtttcaaaatctatggagaagtttgagttg

SEQ ID NO: 663965 - DNA, 33 bp, Homo sapien
tcttgatgactgtccccaaatgataatgaagca

SEQ ID NO: 663966 - DNA, 33 bp, Homo sapien
tcttgatgactgtccctaaatgataatgaagca

SEQ ID NO: 663967 - DNA, 33 bp, Homo sapien
caaaaactgtaatagcaataatagtgacaatgt

SEQ ID NO: 663968 - DNA, 33 bp, Homo sapien
caaaaactgtaatagcgataatagtgacaatgt

SEQ ID NO: 663969 - DNA, 33 bp, Homo sapien
agaaaaaaaacgtaaggcctgctgcatacagag

SEQ ID NO: 663970 - DNA, 33 bp, Homo sapien
agaaaaaaaacgtaagtcctgctgcatacagag

SEQ ID NO: 663971 - DNA, 33 bp, Homo sapien
ttttgtgaggatgtaaataatgacttccaagct

SEQ ID NO: 663972 - DNA, 33 bp, Homo sapien
ttttgtgaggatgtaagtaatgacttccaagct

SEQ ID NO: 663973 - DNA, 33 bp, Homo sapien
tttaaagtctatactacctgatgttaatataac

SEQ ID NO: 663974 - DNA, 33 bp, Homo sapien
tttaaagtctatactatctgatgttaatataac

SEQ ID NO: 663975 - DNA, 33 bp, Homo sapien
tatctgtaggttcatgcatccaggagcatatgc

SEQ ID NO: 663976 - DNA, 33 bp, Homo sapien
tatctgtaggttcatgtatccaggagcatatgc

SEQ ID NO: 663977 - DNA, 33 bp, Homo sapien
agcagtaatcacgataaccaaagagtacaaaca

SEQ ID NO: 663978 - DNA, 33 bp, Homo sapien
agcagtaatcacgatagccaaagagtacaaaca

SEQ ID NO: 663979 - DNA, 33 bp, Homo sapien
atgtaaaatggtgcaacgactgcggaaaacagt

SEQ ID NO: 663980 - DNA, 33 bp, Homo sapien
atgtaaaatggtgcaatgactgcggaaaacagt

SEQ ID NO: 663981 - DNA, 33 bp, Homo sapien
accatctgtgtattacccaagtcctttgtccat

SEQ ID NO: 663982 - DNA, 33 bp, Homo sapien
accatctgtgtattactcaagtcctttgtccat

SEQ ID NO: 663983 - DNA, 33 bp, Homo sapien
atactgtctaaaacaactcatggaatgggagaa

SEQ ID NO: 663984 - DNA, 33 bp, Homo sapien
atactgtctaaaacaagtcatggaatgggagaa

SEQ ID NO: 663985 - DNA, 33 bp, Homo sapien
tatgaggcatatatacactaaacacagttataa

SEQ ID NO: 663986 - DNA, 33 bp, Homo sapien
tatgaggcatatatactctaaacacagttataa

SEQ ID NO: 663987 - DNA, 33 bp, Homo sapien
tagggtgcttatcacaaaatgtacttacttgtt

SEQ ID NO: 663988 - DNA, 33 bp, Homo sapien
tagggtgcttatcacagaatgtacttacttgtt

SEQ ID NO: 663989 - DNA, 33 bp, Homo sapien
aaagttcacataactacacaccaaaagtcgatt

SEQ ID NO: 663990 - DNA, 33 bp, Homo sapien
aaagttcacataactatacaccaaaagtcgatt

SEQ ID NO: 663991 - DNA, 33 bp, Homo sapien
tattgagtgacaggaaatcttttcattcattca

SEQ ID NO: 663992 - DNA, 33 bp, Homo sapien
tattgagtgacaggaattcttttcattcattca

SEQ ID NO: 663993 - DNA, 33 bp, Homo sapien
ccctctatgcacatagaactcaactctttatag

SEQ ID NO: 663994 - DNA, 33 bp, Homo sapien
ccctctatgcacataggactcaactctttatag

SEQ ID NO: 663995 - DNA, 33 bp, Homo sapien
gtgagcagactaattcacaaatggagaatcaaa

SEQ ID NO: 663996 - DNA, 33 bp, Homo sapien
gtgagcagactaattcgcaaatggagaatcaaa

SEQ ID NO: 663997 - DNA, 33 bp, Homo sapien
gtgaagttgtcacatgaatcgactcaggacctc

SEQ ID NO: 663998 - DNA, 33 bp, Homo sapien
gtgaagttgtcacatggatcgactcaggacctc

SEQ ID NO: 663999 - DNA, 33 bp, Homo sapien
tcttccctcctgcataaggtgcaaattcctgat

SEQ ID NO: 664000 - DNA, 33 bp, Homo sapien
tcttccctcctgcatatggtgcaaattcctgat

SEQ ID NO: 664001 - DNA, 33 bp, Homo sapien
tttaccacactgtcataagagagccattattat

SEQ ID NO: 664002 - DNA, 33 bp, Homo sapien
tttaccacactgtcatgagagagccattattat

SEQ ID NO: 664003 - DNA, 33 bp, Homo sapien
gctgaacaatacaagaacttctaagagtgcagc

SEQ ID NO: 664004 - DNA, 33 bp, Homo sapien
gctgaacaatacaagagcttctaagagtgcagc

SEQ ID NO: 664005 - DNA, 33 bp, Homo sapien
tactagtatcttattacgtacttacctctctaa

SEQ ID NO: 664006 - DNA, 33 bp, Homo sapien
tactagtatcttattatgtacttacctctctaa

SEQ ID NO: 664007 - DNA, 33 bp, Homo sapien
gaaatgtctcccaaagaatggctgtatacatat

SEQ ID NO: 664008 - DNA, 33 bp, Homo sapien
gaaatgtctcccaaagtatggctgtatacatat

SEQ ID NO: 664009 - DNA, 33 bp, Homo sapien
tctctctctcacagctaaactttttgaacaagt

SEQ ID NO: 664010 - DNA, 33 bp, Homo sapien
tctctctctcacagctgaactttttgaacaagt

SEQ ID NO: 664011 - DNA, 33 bp, Homo sapien
actgcttttcctcctgccacagggcttttcatg

SEQ ID NO: 664012 - DNA, 33 bp, Homo sapien
actgcttttcctcctgtcacagggcttttcatg

SEQ ID NO: 664013 - DNA, 33 bp, Homo sapien
agtactgtagaacatgaacattcaacattttgt

SEQ ID NO: 664014 - DNA, 33 bp, Homo sapien
agtactgtagaacatggacattcaacattttgt

SEQ ID NO: 664015 - DNA, 33 bp, Homo sapien
aaactcaaagtattccaagaatttctcctgccc

SEQ ID NO: 664016 - DNA, 33 bp, Homo sapien
aaactcaaagtattccgagaatttctcctgccc

SEQ ID NO: 664017 - DNA, 33 bp, Homo sapien; identical to SEQ ID NO: 664015

SEQ ID NO: 664018 - DNA, 33 bp, Homo sapien; identical to SEQ ID NO: 664016

SEQ ID NO: 664019 - DNA, 33 bp, Homo sapien
aggaatatttgagccacagataggaaaaaaaat

SEQ ID NO: 664020 - DNA, 33 bp, Homo sapien
aggaatatttgagccatagataggaaaaaaaat

SEQ ID NO: 664021 - DNA, 33 bp, Homo sapien
aacttctagaacccaccggctattggtgaggct

SEQ ID NO: 664022 - DNA, 33 bp, Homo sapien
aacttctagaacccactggctattggtgaggct

SEQ ID NO: 664023 - DNA, 33 bp, Homo sapien
ccatgtaagtaagcaaatcaattgttaaattaa

SEQ ID NO: 664024 - DNA, 33 bp, Homo sapien
ccatgtaagtaagcaagtcaattgttaaattaa

SEQ ID NO: 664025 - DNA, 33 bp, Homo sapien
attcccattctgatgacggctgtttaaagttga

SEQ ID NO: 664026 - DNA, 33 bp, Homo sapien
attcccattctgatgatggctgtttaaagttga

SEQ ID NO: 664027 - DNA, 33 bp, Homo sapien
atattgttaggatcaactgtttttttcctgttt

SEQ ID NO: 664028 - DNA, 33 bp, Homo sapien
atattgttaggatcaattgtttttttcctgttt

SEQ ID NO: 664029 - DNA, 33 bp, Homo sapien
cagcttcatgactgaaaatggaagcaaccacca

SEQ ID NO: 664030 - DNA, 33 bp, Homo sapien
cagcttcatgactgaagatggaagcaaccacca

SEQ ID NO: 664031 - DNA, 33 bp, Homo sapien
cccaaggcactgaagaatagccccaggtcttgg

SEQ ID NO: 664032 - DNA, 33 bp, Homo sapien
cccaaggcactgaagagtagccccaggtcttgg

SEQ ID NO: 664033 - DNA, 33 bp, Homo sapien
agcagcattagcattacgttgaagcttactaga

SEQ ID NO: 664034 - DNA, 33 bp, Homo sapien
agcagcattagcattatgttgaagcttactaga

SEQ ID NO: 664035 - DNA, 33 bp, Homo sapien
aacaaacgattaatacagctgaagcactcccca

SEQ ID NO: 664036 - DNA, 33 bp, Homo sapien
aacaaacgattaatacggctgaagcactcccca

SEQ ID NO: 664037 - DNA, 33 bp, Homo sapien
tctatggtgcgtacaaataagttgactgcttca

SEQ ID NO: 664038 - DNA, 33 bp, Homo sapien
tctatggtgcgtacaagtaagttgactgcttca

SEQ ID NO: 664039 - DNA, 33 bp, Homo sapien
ctccaggtataatagacgaaaggcaattccagt

SEQ ID NO: 664040 - DNA, 33 bp, Homo sapien
ctccaggtataatagaggaaaggcaattccagt

SEQ ID NO: 664041 - DNA, 33 bp, Homo sapien
cactattgcttggaaccctggaaatacgagctc

SEQ ID NO: 664042 - DNA, 33 bp, Homo sapien
cactattgcttggaactctggaaatacgagctc

SEQ ID NO: 664043 - DNA, 33 bp, Homo sapien
ggaccccttttgctagaaactgctacttcctcc

SEQ ID NO: 664044 - DNA, 33 bp, Homo sapien
ggaccccttttgctaggaactgctacttcctcc

SEQ ID NO: 664045 - DNA, 33 bp, Homo sapien
cctctcttgtgatatcccttgaactgtttgtgt

SEQ ID NO: 664046 - DNA, 33 bp, Homo sapien
cctctcttgtgatatctcttgaactgtttgtgt

SEQ ID NO: 664047 - DNA, 33 bp, Homo sapien
atgcctcaagaccaacactaaagaactgtcaga

SEQ ID NO: 664048 - DNA, 33 bp, Homo sapien
atgcctcaagaccaacgctaaagaactgtcaga

SEQ ID NO: 664049 - DNA, 33 bp, Homo sapien
aagaaggaattttctacgacttccaggactctt

SEQ ID NO: 664050 - DNA, 33 bp, Homo sapien
aagaaggaattttctatgacttccaggactctt

SEQ ID NO: 664051 - DNA, 33 bp, Homo sapien
atctttcagaggaggtaacaattggaaatgccc

SEQ ID NO: 664052 - DNA, 33 bp, Homo sapien
atctttcagaggaggtgacaattggaaatgccc

SEQ ID NO: 664053 - DNA, 33 bp, Homo sapien
ccttttagccttctcacatcaccattctatatg

SEQ ID NO: 664054 - DNA, 33 bp, Homo sapien
ccttttagccttctcagatcaccattctatatg

SEQ ID NO: 664055 - DNA, 33 bp, Homo sapien
tgagatgttcaggcaggaaaatatcttcattaa

SEQ ID NO: 664056 - DNA, 33 bp, Homo sapien
tgagatgttcaggcagtaaaatatcttcattaa

SEQ ID NO: 664057 - DNA, 33 bp, Homo sapien
tcattacaccaaagaaaaacactatattcatta

SEQ ID NO: 664058 - DNA, 33 bp, Homo sapien
tcattacaccaaagaagaacactatattcatta

SEQ ID NO: 664059 - DNA, 33 bp, Homo sapien
ctggaagtttcatataaatggtatcatactgta

SEQ ID NO: 664060 - DNA, 33 bp, Homo sapien
ctggaagtttcatatacatggtatcatactgta

SEQ ID NO: 664061 - DNA, 33 bp, Homo sapien
cagtatactggttgagcatccttaagctgaaaa

SEQ ID NO: 664062 - DNA, 33 bp, Homo sapien
cagtatactggttgaggatccttaagctgaaaa

SEQ ID NO: 664063 - DNA, 33 bp, Homo sapien
ggctgaccagctctaactagtatgaacaggata

SEQ ID NO: 664064 - DNA, 33 bp, Homo sapien
ggctgaccagctctaagtagtatgaacaggata

SEQ ID NO: 664065 - DNA, 33 bp, Homo sapien
aaattatttggcagggaatgatgactcatgcct

SEQ ID NO: 664066 - DNA, 33 bp, Homo sapien
aaattatttggcagggtatgatgactcatgcct

SEQ ID NO: 664067 - DNA, 33 bp, Homo sapien
agattcataaacgtgacgacaaacttatccaat

SEQ ID NO: 664068 - DNA, 33 bp, Homo sapien
agattcataaacgtgatgacaaacttatccaat

SEQ ID NO: 664069 - DNA, 33 bp, Homo sapien
tctcatctccacaattgttgctttaggaattcc

SEQ ID NO: 664070 - DNA, 33 bp, Homo sapien
tctcatctccacaatttttgctttaggaattcc

SEQ ID NO: 664071 - DNA, 33 bp, Homo sapien
gttgccaagtaagtggcaacaaggtgtagtgtt

SEQ ID NO: 664072 - DNA, 33 bp, Homo sapien
gttgccaagtaagtggtaacaaggtgtagtgtt

SEQ ID NO: 664073 - DNA, 33 bp, Homo sapien
taatttgcagtaatgtgaactatgtatttggaa

SEQ ID NO: 664074 - DNA, 33 bp, Homo sapien
taatttgcagtaatgttaactatgtatttggaa

SEQ ID NO: 664075 - DNA, 33 bp, Homo sapien
attaaacaacttgtccaaaaccacacaatagga

SEQ ID NO: 664076 - DNA, 33 bp, Homo sapien
attaaacaacttgtccgaaaccacacaatagga

SEQ ID NO: 664077 - DNA, 33 bp, Homo sapien
cttcaaagcaaacagacaatagcaggtcatcat

SEQ ID NO: 664078 - DNA, 33 bp, Homo sapien
cttcaaagcaaacagagaatagcaggtcatcat

SEQ ID NO: 664079 - DNA, 33 bp, Homo sapien
tacaaagctaaatagacaggcatttttttgttg

SEQ ID NO: 664080 - DNA, 33 bp, Homo sapien
tacaaagctaaatagataggcatttttttgttg

SEQ ID NO: 664081 - DNA, 33 bp, Homo sapien
acagttagatacaagcactttcaagtaccataa

SEQ ID NO: 664082 - DNA, 33 bp, Homo sapien
acagttagatacaagctctttcaagtaccataa

SEQ ID NO: 664083 - DNA, 33 bp, Homo sapien
aaagcgtaagtatgcaagttccctaagggctgt

SEQ ID NO: 664084 - DNA, 33 bp, Homo sapien
aaagcgtaagtatgcaggttccctaagggctgt

SEQ ID NO: 664085 - DNA, 33 bp, Homo sapien
tatactttcccactgaagagccgtcagcaggaa

SEQ ID NO: 664086 - DNA, 33 bp, Homo sapien
tatactttcccactgaggagccgtcagcaggaa

SEQ ID NO: 664087 - DNA, 33 bp, Homo sapien
acatattctgaaagagcattccgaaagatggga

SEQ ID NO: 664088 - DNA, 33 bp, Homo sapien
acatattctgaaagaggattccgaaagatggga

SEQ ID NO: 664089 - DNA, 33 bp, Homo sapien
tacttaagttgagttacagatgtgtgaaaaaat

SEQ ID NO: 664090 - DNA, 33 bp, Homo sapien
tacttaagttgagttatagatgtgtgaaaaaat

SEQ ID NO: 664091 - DNA, 33 bp, Homo sapien
gctgcctggaggagaaacctggaggccgtagca

SEQ ID NO: 664092 - DNA, 33 bp, Homo sapien
gctgcctggaggagaagcctggaggccgtagca

SEQ ID NO: 664093 - DNA, 33 bp, Homo sapien; identical to SEQ ID NO: 664091

SEQ ID NO: 664094 - DNA, 33 bp, Homo sapien; identical to SEQ ID NO: 664092

SEQ ID NO: 664095 - DNA, 33 bp, Homo sapien
aagaaaagttagaccaagacagagtcaatagag

SEQ ID NO: 664096 - DNA, 33 bp, Homo sapien
aagaaaagttagaccaggacagagtcaatagag

SEQ ID NO: 664097 - DNA, 33 bp, Homo sapien
aagtagagatttctacacttgggagctcactat

SEQ ID NO: 664098 - DNA, 33 bp, Homo sapien
aagtagagatttctacgcttgggagctcactat

SEQ ID NO: 664099 - DNA, 33 bp, Homo sapien
gaacctgccaagaaaaacgccaattagaaaact

SEQ ID NO: 664100 - DNA, 33 bp, Homo sapien
gaacctgccaagaaaagcgccaattagaaaact

SEQ ID NO: 664101 - DNA, 33 bp, Homo sapien
atgtaaccatgcaaaacgcacagtgactttttg

SEQ ID NO: 664102 - DNA, 33 bp, Homo sapien
atgtaaccatgcaaaatgcacagtgactttttg

SEQ ID NO: 664103 - DNA, 33 bp, Homo sapien
taaattcttttccactcagactccaccaaacac

SEQ ID NO: 664104 - DNA, 33 bp, Homo sapien
taaattcttttccacttagactccaccaaacac

SEQ ID NO: 664105 - DNA, 33 bp, Homo sapien
ggtattgatgatttgccgagtttgcaatgaatt

SEQ ID NO: 664106 - DNA, 33 bp, Homo sapien
ggtattgatgatttgctgagtttgcaatgaatt

SEQ ID NO: 664107 - DNA, 33 bp, Homo sapien
atgcgaaagtacagcccgcagattggaaattta

SEQ ID NO: 664108 - DNA, 33 bp, Homo sapien
atgcgaaagtacagcctgcagattggaaattta

SEQ ID NO: 664109 - DNA, 33 bp, Homo sapien
ctctatcatatcaatgcaagaatgggaaatgtc

SEQ ID NO: 664110 - DNA, 33 bp, Homo sapien
ctctatcatatcaatggaagaatgggaaatgtc

SEQ ID NO: 664111 - DNA, 33 bp, Homo sapien
tgcgtggaagatgaaccgtagggagttaagagt

SEQ ID NO: 664112 - DNA, 33 bp, Homo sapien
tgcgtggaagatgaactgtagggagttaagagt

SEQ ID NO: 664113 - DNA, 33 bp, Homo sapien
atttgcgtgtgtctccagcattgtctgggagag

SEQ ID NO: 664114 - DNA, 33 bp, Homo sapien
atttgcgtgtgtctcccgcattgtctgggagag

SEQ ID NO: 664115 - DNA, 33 bp, Homo sapien
ttactgatgttactggaagaggtcttgactgaa

SEQ ID NO: 664116 - DNA, 33 bp, Homo sapien
ttactgatgttactggtagaggtcttgactgaa

SEQ ID NO: 664117 - DNA, 33 bp, Homo sapien
tccttgctttgccgtgcattttgtccaattctt

SEQ ID NO: 664118 - DNA, 33 bp, Homo sapien
tccttgctttgccgtgtattttgtccaattctt

SEQ ID NO: 664119 - DNA, 33 bp, Homo sapien
acatagacaaatatctcacaaggtagggtgaca

SEQ ID NO: 664120 - DNA, 33 bp, Homo sapien
acatagacaaatatctgacaaggtagggtgaca

SEQ ID NO: 664121 - DNA, 33 bp, Homo sapien
ctgctaaaggctcttacctggcatctgtccagg

SEQ ID NO: 664122 - DNA, 33 bp, Homo sapien
ctgctaaaggctcttagctggcatctgtccagg

SEQ ID NO: 664123 - DNA, 33 bp, Homo sapien
acactgtatttgggagcaagcagctaccatgtt

SEQ ID NO: 664124 - DNA, 33 bp, Homo sapien
acactgtatttgggaggaagcagctaccatgtt

SEQ ID NO: 664125 - DNA, 33 bp, Homo sapien
attcacctcacaggtaagcaaagactgaaccaa

SEQ ID NO: 664126 - DNA, 33 bp, Homo sapien
attcacctcacaggtaggcaaagactgaaccaa

SEQ ID NO: 664127 - DNA, 33 bp, Homo sapien
ttggcctcacccagtgcaatatgtgaggatgtt

SEQ ID NO: 664128 - DNA, 33 bp, Homo sapien
ttggcctcacccagtggaatatgtgaggatgtt

SEQ ID NO: 664129 - DNA, 33 bp, Homo sapien
acattttcaaccatgcagcagctgtgcttcatc

SEQ ID NO: 664130 - DNA, 33 bp, Homo sapien
acattttcaaccatgccgcagctgtgcttcatc

SEQ ID NO: 664131 - DNA, 33 bp, Homo sapien
gactagtctattagaacgccggcttcttgtctt

SEQ ID NO: 664132 - DNA, 33 bp, Homo sapien
gactagtctattagaatgccggcttcttgtctt

SEQ ID NO: 664133 - DNA, 33 bp, Homo sapien
agatcacactcttcaacagccgacatacctgtg

SEQ ID NO: 664134 - DNA, 33 bp, Homo sapien
agatcacactcttcaatagccgacatacctgtg

SEQ ID NO: 664135 - DNA, 33 bp, Homo sapien
agagtgggacaaacaacgagtgctagagattct

SEQ ID NO: 664136 - DNA, 33 bp, Homo sapien
agagtgggacaaacaatgagtgctagagattct

SEQ ID NO: 664137 - DNA, 33 bp, Homo sapien
gaaacagcatcaacccagaaatggagacagtga

SEQ ID NO: 664138 - DNA, 33 bp, Homo sapien
gaaacagcatcaacccggaaatggagacagtga

SEQ ID NO: 664139 - DNA, 33 bp, Homo sapien
catcattctacttggaactggctcatcaagccc

SEQ ID NO: 664140 - DNA, 33 bp, Homo sapien
catcattctacttggatctggctcatcaagccc

SEQ ID NO: 664141 - DNA, 33 bp, Homo sapien
aaagcctgtaagccatcatgagtctgcaactca

SEQ ID NO: 664142 - DNA, 33 bp, Homo sapien
aaagcctgtaagccatgatgagtctgcaactca

SEQ ID NO: 664143 - DNA, 33 bp, Homo sapien
atgttagaatacaaaaagatactccacatcata

SEQ ID NO: 664144 - DNA, 33 bp, Homo sapien
atgttagaatacaaaacgatactccacatcata

SEQ ID NO: 664145 - DNA, 33 bp, Homo sapien
caacaaactgattctaaaggcaaaagacacaaa

SEQ ID NO: 664146 - DNA, 33 bp, Homo sapien
caacaaactgattctagaggcaaaagacacaaa

SEQ ID NO: 664147 - DNA, 33 bp, Homo sapien
ggaggccaaggtagataaatcaactgaagtcag

SEQ ID NO: 664148 - DNA, 33 bp, Homo sapien
ggaggccaaggtagatgaatcaactgaagtcag

SEQ ID NO: 664149 - DNA, 33 bp, Homo sapien
atcactatttactaaaagcctatcatgtgccag

SEQ ID NO: 664150 - DNA, 33 bp, Homo sapien
atcactatttactaaaggcctatcatgtgccag

SEQ ID NO: 664151 - DNA, 33 bp, Homo sapien
taaagtatttaagatacgtgctttagatatcat

SEQ ID NO: 664152 - DNA, 33 bp, Homo sapien
taaagtatttaagatatgtgctttagatatcat

SEQ ID NO: 664153 - DNA, 33 bp, Homo sapien
agcacagcttccaatgcagaagaaaatggctct

SEQ ID NO: 664154 - DNA, 33 bp, Homo sapien
agcacagcttccaatgtagaagaaaatggctct

SEQ ID NO: 664155 - DNA, 33 bp, Homo sapien
ctgatctgcaagtcgacgtaaatctaggtaaaa

SEQ ID NO: 664156 - DNA, 33 bp, Homo sapien
ctgatctgcaagtcgatgtaaatctaggtaaaa

SEQ ID NO: 664157 - DNA, 33 bp, Homo sapien
aaatattgtacacctacgtatctaaattatgtt

SEQ ID NO: 664158 - DNA, 33 bp, Homo sapien
aaatattgtacacctatgtatctaaattatgtt

SEQ ID NO: 664159 - DNA, 33 bp, Homo sapien
ccctgctggaggctgcagaatgagattaatggg

SEQ ID NO: 664160 - DNA, 33 bp, Homo sapien
ccctgctggaggctgcggaatgagattaatggg

SEQ ID NO: 664161 - DNA, 33 bp, Homo sapien
ttctttttctctgctacgccatttgtctgcttg

SEQ ID NO: 664162 - DNA, 33 bp, Homo sapien
ttctttttctctgctatgccatttgtctgcttg

SEQ ID NO: 664163 - DNA, 33 bp, Homo sapien
aaatatcacttcaacacgtgacattagccacat

SEQ ID NO: 664164 - DNA, 33 bp, Homo sapien
aaatatcacttcaacatgtgacattagccacat

SEQ ID NO: 664165 - DNA, 33 bp, Homo sapien
ggctctgccaccagataaactagcttcagggca

SEQ ID NO: 664166 - DNA, 33 bp, Homo sapien
ggctctgccaccagatgaactagcttcagggca

SEQ ID NO: 664167 - DNA, 33 bp, Homo sapien
tttctgcacttcagaaacaatcacttgggtggg

SEQ ID NO: 664168 - DNA, 33 bp, Homo sapien
tttctgcacttcagaatcaatcacttgggtggg

SEQ ID NO: 664169 - DNA, 33 bp, Homo sapien
ttgagcaagactcttccattctctgggctgagg

SEQ ID NO: 664170 - DNA, 33 bp, Homo sapien
ttgagcaagactcttctattctctgggctgagg

SEQ ID NO: 664171 - DNA, 33 bp, Homo sapien
actgctgggtcaaaagaaaggtgcaagtttaat

SEQ ID NO: 664172 - DNA, 33 bp, Homo sapien
actgctgggtcaaaaggaaggtgcaagtttaat

SEQ ID NO: 664173 - DNA, 33 bp, Homo sapien
taaagccttctggctcaagagagtgaaccaaac

SEQ ID NO: 664174 - DNA, 33 bp, Homo sapien
taaagccttctggctcgagagagtgaaccaaac

SEQ ID NO: 664175 - DNA, 33 bp, Homo sapien
gattagagcttcatcacaggaattttgtggggg

SEQ ID NO: 664176 - DNA, 33 bp, Homo sapien
gattagagcttcatcataggaattttgtggggg

SEQ ID NO: 664177 - DNA, 33 bp, Homo sapien
ttagccagtacccccacaataatgttaagagtg

SEQ ID NO: 664178 - DNA, 33 bp, Homo sapien
ttagccagtacccccagaataatgttaagagtg

SEQ ID NO: 664179 - DNA, 33 bp, Homo sapien
ccctttggaatttagaacggttgaatgaaattg

SEQ ID NO: 664180 - DNA, 33 bp, Homo sapien
ccctttggaatttagagcggttgaatgaaattg

SEQ ID NO: 664181 - DNA, 33 bp, Homo sapien
tttaatagacagcaagaatttatatgtggattt

SEQ ID NO: 664182 - DNA, 33 bp, Homo sapien
tttaatagacagcaaggatttatatgtggattt

SEQ ID NO: 664183 - DNA, 33 bp, Homo sapien
tcttggtccacagcacaagaactctctttctct

SEQ ID NO: 664184 - DNA, 33 bp, Homo sapien
tcttggtccacagcacgagaactctctttctct

SEQ ID NO: 664185 - DNA, 33 bp, Homo sapien
ggaagagcttttgcataaaactgtgtaaaaatg

SEQ ID NO: 664186 - DNA, 33 bp, Homo sapien
ggaagagcttttgcatgaaactgtgtaaaaatg

SEQ ID NO: 664187 - DNA, 33 bp, Homo sapien
gtctctcgtgttatacaaacttaagagtttcct

SEQ ID NO: 664188 - DNA, 33 bp, Homo sapien
gtctctcgtgttatacgaacttaagagtttcct

SEQ ID NO: 664189 - DNA, 33 bp, Homo sapien
atttctcctgctttcacagtgactgcctctcac

SEQ ID NO: 664190 - DNA, 33 bp, Homo sapien
atttctcctgctttcatagtgactgcctctcac

SEQ ID NO: 664191 - DNA, 33 bp, Homo sapien
atttttcagaacttacaccaccatggaggcaaa

SEQ ID NO: 664192 - DNA, 33 bp, Homo sapien
atttttcagaacttacgccaccatggaggcaaa

SEQ ID NO: 664193 - DNA, 33 bp, Homo sapien
taagtttaaaggaacacgtgactgtaaaatctc

SEQ ID NO: 664194 - DNA, 33 bp, Homo sapien
taagtttaaaggaacatgtgactgtaaaatctc

SEQ ID NO: 664195 - DNA, 33 bp, Homo sapien
gagaacaggcatattgcatgggaacagcaggaa

SEQ ID NO: 664196 - DNA, 33 bp, Homo sapien
gagaacaggcatattgtatgggaacagcaggaa

SEQ ID NO: 664197 - DNA, 33 bp, Homo sapien
ccaacactctgcaaggaaagaactaaacgttgc

SEQ ID NO: 664198 - DNA, 33 bp, Homo sapien
ccaacactctgcaagggaagaactaaacgttgc

SEQ ID NO: 664199 - DNA, 33 bp, Homo sapien
aatagatgttacttggaaaaaggagttgtgtga

SEQ ID NO: 664200 - DNA, 33 bp, Homo sapien
aatagatgttacttgggaaaaggagttgtgtga

SEQ ID NO: 664201 - DNA, 33 bp, Homo sapien
tctgagttctgagagcaccccataacattctga

SEQ ID NO: 664202 - DNA, 33 bp, Homo sapien
tctgagttctgagagccccccataacattctga

SEQ ID NO: 664203 - DNA, 33 bp, Homo sapien
tttgcaaaaattgtggaaaaggacagagtgtag

SEQ ID NO: 664204 - DNA, 33 bp, Homo sapien
tttgcaaaaattgtgggaaaggacagagtgtag

SEQ ID NO: 664205 - DNA, 33 bp, Homo sapien
gtatgagtacatgaacagaaaaacaattcagga

SEQ ID NO: 664206 - DNA, 33 bp, Homo sapien
gtatgagtacatgaacggaaaaacaattcagga

SEQ ID NO: 664207 - DNA, 33 bp, Homo sapien
aagctcagggggttgcacacatttatttatttt

SEQ ID NO: 664208 - DNA, 33 bp, Homo sapien
aagctcagggggttgcccacatttatttatttt

SEQ ID NO: 664209 - DNA, 33 bp, Homo sapien
cctccactcaaccagaaatggacacttcctttg

SEQ ID NO: 664210 - DNA, 33 bp, Homo sapien
cctccactcaaccagagatggacacttcctttg

SEQ ID NO: 664211 - DNA, 33 bp, Homo sapien
aaccaggaggagtccaactggtcttagaatgtg

SEQ ID NO: 664212 - DNA, 33 bp, Homo sapien
aaccaggaggagtccagctggtcttagaatgtg

SEQ ID NO: 664213 - DNA, 33 bp, Homo sapien
aatgaatatgcccagtaaataaggaatagtgaa

SEQ ID NO: 664214 - DNA, 33 bp, Homo sapien
aatgaatatgcccagtgaataaggaatagtgaa

SEQ ID NO: 664215 - DNA, 33 bp, Homo sapien
ataaaagtagtagagcaatgaatgaggtttagg

SEQ ID NO: 664216 - DNA, 33 bp, Homo sapien
ataaaagtagtagagcgatgaatgaggtttagg

SEQ ID NO: 664217 - DNA, 33 bp, Homo sapien
ggtcttgtaggtaaatcaagactttgaatcagg

SEQ ID NO: 664218 - DNA, 33 bp, Homo sapien
ggtcttgtaggtaaatgaagactttgaatcagg

SEQ ID NO: 664219 - DNA, 33 bp, Homo sapien
tcttaggttcctctccaacacagcactctatgc

SEQ ID NO: 664220 - DNA, 33 bp, Homo sapien
tcttaggttcctctccgacacagcactctatgc

SEQ ID NO: 664221 - DNA, 33 bp, Homo sapien
gtgaaacacatctttgaattctaaaggcagaaa

SEQ ID NO: 664222 - DNA, 33 bp, Homo sapien
gtgaaacacatctttgtattctaaaggcagaaa

SEQ ID NO: 664223 - DNA, 33 bp, Homo sapien
ctgtcactttgctaaaacaacgaagctgctacc

SEQ ID NO: 664224 - DNA, 33 bp, Homo sapien
ctgtcactttgctaaaccaacgaagctgctacc

SEQ ID NO: 664225 - DNA, 33 bp, Homo sapien
gcataatgccataggacgagtttctcagaaagc

SEQ ID NO: 664226 - DNA, 33 bp, Homo sapien
gcataatgccataggatgagtttctcagaaagc

SEQ ID NO: 664227 - DNA, 33 bp, Homo sapien
ctgagtcctgcctgtgcagcctttagagttgca

SEQ ID NO: 664228 - DNA, 33 bp, Homo sapien
ctgagtcctgcctgtgtagcctttagagttgca

SEQ ID NO: 664229 - DNA, 33 bp, Homo sapien
ggctcaaacaaaaaggaaatgtaactggctcct

SEQ ID NO: 664230 - DNA, 33 bp, Homo sapien
ggctcaaacaaaaagggaatgtaactggctcct

SEQ ID NO: 664231 - DNA, 33 bp, Homo sapien
gaggtggtactctttaggccagcacaaccactc

SEQ ID NO: 664232 - DNA, 33 bp, Homo sapien
gaggtggtactctttatgccagcacaaccactc

SEQ ID NO: 664233 - DNA, 33 bp, Homo sapien
taaattcactcaaaatgaatgtgttatagctgg

SEQ ID NO: 664234 - DNA, 33 bp, Homo sapien
taaattcactcaaaattaatgtgttatagctgg

SEQ ID NO: 664235 - DNA, 33 bp, Homo sapien
aacacttagtcaaacacggatatcattttttag

SEQ ID NO: 664236 - DNA, 33 bp, Homo sapien
aacacttagtcaaacatggatatcattttttag

SEQ ID NO: 664237 - DNA, 33 bp, Homo sapien
ttatcacatgaaatagaaatagttgtcacacaa

SEQ ID NO: 664238 - DNA, 33 bp, Homo sapien
ttatcacatgaaatagtaatagttgtcacacaa

SEQ ID NO: 664239 - DNA, 33 bp, Homo sapien
cctttgacagtgagcacagagttatcacatgaa

SEQ ID NO: 664240 - DNA, 33 bp, Homo sapien
cctttgacagtgagcatagagttatcacatgaa

SEQ ID NO: 664241 - DNA, 33 bp, Homo sapien
tgacatcgtagtctagcatgggccaaggaacaa

SEQ ID NO: 664242 - DNA, 33 bp, Homo sapien
tgacatcgtagtctagtatgggccaaggaacaa

SEQ ID NO: 664243 - DNA, 33 bp, Homo sapien
gtacacaacagcacaacggttcaaaaaatgaaa

SEQ ID NO: 664244 - DNA, 33 bp, Homo sapien
gtacacaacagcacaatggttcaaaaaatgaaa

SEQ ID NO: 664245 - DNA, 33 bp, Homo sapien
aatgcacaagaagtaacagagctatctgtgtgt

SEQ ID NO: 664246 - DNA, 33 bp, Homo sapien
aatgcacaagaagtaatagagctatctgtgtgt

SEQ ID NO: 664247 - DNA, 33 bp, Homo sapien
cttgagaggctagagaagaagacttgaatgggt

SEQ ID NO: 664248 - DNA, 33 bp, Homo sapien
cttgagaggctagagaggaagacttgaatgggt

SEQ ID NO: 664249 - DNA, 33 bp, Homo sapien
tgatcccctagcaggacgtccatttcttcagta

SEQ ID NO: 664250 - DNA, 33 bp, Homo sapien
tgatcccctagcaggatgtccatttcttcagta

SEQ ID NO: 664251 - DNA, 33 bp, Homo sapien
gaagcagccatgcagcaatctcagtaaaaagca

SEQ ID NO: 664252 - DNA, 33 bp, Homo sapien
gaagcagccatgcagcgatctcagtaaaaagca

SEQ ID NO: 664253 - DNA, 33 bp, Homo sapien
gtctgcaatgcctgtgacaattaatatcaactt

SEQ ID NO: 664254 - DNA, 33 bp, Homo sapien
gtctgcaatgcctgtgtcaattaatatcaactt

SEQ ID NO: 664255 - DNA, 33 bp, Homo sapien
ggaatctcattaacacaatcaccttctctagag

SEQ ID NO: 664256 - DNA, 33 bp, Homo sapien
ggaatctcattaacacgatcaccttctctagag

SEQ ID NO: 664257 - DNA, 33 bp, Homo sapien
aaacagtactgtgcaactcttaatggcatttta

SEQ ID NO: 664258 - DNA, 33 bp, Homo sapien
aaacagtactgtgcaattcttaatggcatttta

SEQ ID NO: 664259 - DNA, 33 bp, Homo sapien
ctccatctctgggtaaaggggttgagttgggga

SEQ ID NO: 664260 - DNA, 33 bp, Homo sapien
ctccatctctgggtaagggggttgagttgggga

SEQ ID NO: 664261 - DNA, 33 bp, Homo sapien
aaatataattattcccactctccaggcttttag

SEQ ID NO: 664262 - DNA, 33 bp, Homo sapien
aaatataattattcccgctctccaggcttttag

SEQ ID NO: 664263 - DNA, 33 bp, Homo sapien
aacagctcttttctgcaaagggtttttagctct

SEQ ID NO: 664264 - DNA, 33 bp, Homo sapien
aacagctcttttctgcgaagggtttttagctct

SEQ ID NO: 664265 - DNA, 33 bp, Homo sapien
agagacaactggcaagaccaccacaacagctga

SEQ ID NO: 664266 - DNA, 33 bp, Homo sapien
agagacaactggcaagtccaccacaacagctga

SEQ ID NO: 664267 - DNA, 33 bp, Homo sapien
ttctttctttttctccagatccacaccatattc

SEQ ID NO: 664268 - DNA, 33 bp, Homo sapien
ttctttctttttctccggatccacaccatattc

SEQ ID NO: 664269 - DNA, 33 bp, Homo sapien
cgatctctaagactacagagattggactcctat

SEQ ID NO: 664270 - DNA, 33 bp, Homo sapien
cgatctctaagactacggagattggactcctat

SEQ ID NO: 664271 - DNA, 33 bp, Homo sapien
ggtctatgagaaagtacaagccagtcgatctct

SEQ ID NO: 664272 - DNA, 33 bp, Homo sapien
ggtctatgagaaagtagaagccagtcgatctct

SEQ ID NO: 664273 - DNA, 33 bp, Homo sapien
ccttcctttgctcaggcaattataatcatatgc

SEQ ID NO: 664274 - DNA, 33 bp, Homo sapien
ccttcctttgctcagggaattataatcatatgc

SEQ ID NO: 664275 - DNA, 33 bp, Homo sapien
aggtgaccaaaccagcactgtgatctttagctc

SEQ ID NO: 664276 - DNA, 33 bp, Homo sapien
aggtgaccaaaccagccctgtgatctttagctc

SEQ ID NO: 664277 - DNA, 33 bp, Homo sapien
cctccttctctgttgacgatgtggcttacaatt

SEQ ID NO: 664278 - DNA, 33 bp, Homo sapien
cctccttctctgttgatgatgtggcttacaatt

SEQ ID NO: 664279 - DNA, 33 bp, Homo sapien
gtgtccagatgagatacatttttttgagggggg

SEQ ID NO: 664280 - DNA, 33 bp, Homo sapien
gtgtccagatgagatatatttttttgagggggg

SEQ ID NO: 664281 - DNA, 33 bp, Homo sapien
ccaatgtagaattactcaggataacagaggaag

SEQ ID NO: 664282 - DNA, 33 bp, Homo sapien
ccaatgtagaattactgaggataacagaggaag

SEQ ID NO: 664283 - DNA, 33 bp, Homo sapien
ctcttctaagcactctaaaagcattattttatt

SEQ ID NO: 664284 - DNA, 33 bp, Homo sapien
ctcttctaagcactctgaaagcattattttatt

SEQ ID NO: 664285 - DNA, 33 bp, Homo sapien
ccactaaaaggaaatgaagagttccagggctgc

SEQ ID NO: 664286 - DNA, 33 bp, Homo sapien
ccactaaaaggaaatgtagagttccagggctgc

SEQ ID NO: 664287 - DNA, 33 bp, Homo sapien
tctttcccaattagtaacagcataagttgtaac

SEQ ID NO: 664288 - DNA, 33 bp, Homo sapien
tctttcccaattagtatcagcataagttgtaac

SEQ ID NO: 664289 - DNA, 33 bp, Homo sapien
caaagtttcgagtggcaactttctcttcattca

SEQ ID NO: 664290 - DNA, 33 bp, Homo sapien
caaagtttcgagtggctactttctcttcattca

SEQ ID NO: 664291 - DNA, 33 bp, Homo sapien
aaaggcaaaaacttcaatcttcaaggtcaaatg

SEQ ID NO: 664292 - DNA, 33 bp, Homo sapien
aaaggcaaaaacttcagtcttcaaggtcaaatg

SEQ ID NO: 664293 - DNA, 33 bp, Homo sapien
agtagtataactaagacgcttgataagcttact

SEQ ID NO: 664294 - DNA, 33 bp, Homo sapien
agtagtataactaagatgcttgataagcttact

SEQ ID NO: 664295 - DNA, 33 bp, Homo sapien
ttccaaagatgaggaaaaaaaggagttggaaga

SEQ ID NO: 664296 - DNA, 33 bp, Homo sapien
ttccaaagatgaggaagaaaaggagttggaaga

SEQ ID NO: 664297 - DNA, 33 bp, Homo sapien
taaattattgacatgacagatactccatttacc

SEQ ID NO: 664298 - DNA, 33 bp, Homo sapien
taaattattgacatgatagatactccatttacc

SEQ ID NO: 664299 - DNA, 33 bp, Homo sapien
atcaaaagctccaaaacgtattgaaacactttg

SEQ ID NO: 664300 - DNA, 33 bp, Homo sapien
atcaaaagctccaaaatgtattgaaacactttg

SEQ ID NO: 664301 - DNA, 33 bp, Homo sapien
tgtttctcaagagcaaatgttacctcctcaggg

SEQ ID NO: 664302 - DNA, 33 bp, Homo sapien
tgtttctcaagagcaagtgttacctcctcaggg

SEQ ID NO: 664303 - DNA, 33 bp, Homo sapien
cattactaattttctacgtgtgtgattattccg

SEQ ID NO: 664304 - DNA, 33 bp, Homo sapien
cattactaattttctatgtgtgtgattattccg

SEQ ID NO: 664305 - DNA, 33 bp, Homo sapien
tcagctggtgcatcccaaaatctgccgtctaag

SEQ ID NO: 664306 - DNA, 33 bp, Homo sapien
tcagctggtgcatcccgaaatctgccgtctaag

SEQ ID NO: 664307 - DNA, 33 bp, Homo sapien
aatagatcacttcagtgaaacagttgtgtccta

SEQ ID NO: 664308 - DNA, 33 bp, Homo sapien
aatagatcacttcagttaaacagttgtgtccta

SEQ ID NO: 664309 - DNA, 33 bp, Homo sapien
aatagctacatacaaccgactctttgttttgag

SEQ ID NO: 664310 - DNA, 33 bp, Homo sapien
aatagctacatacaactgactctttgttttgag

SEQ ID NO: 664311 - DNA, 33 bp, Homo sapien
tggttttgttttccacagcttgcggtgttcaga

SEQ ID NO: 664312 - DNA, 33 bp, Homo sapien
tggttttgttttccacggcttgcggtgttcaga

SEQ ID NO: 664313 - DNA, 33 bp, Homo sapien
tttgggcctaagttccagaattttctttcaagt

SEQ ID NO: 664314 - DNA, 33 bp, Homo sapien
tttgggcctaagttccggaattttctttcaagt

SEQ ID NO: 664315 - DNA, 33 bp, Homo sapien
aaggtgactcaagcaccggggttatcagctctc

SEQ ID NO: 664316 - DNA, 33 bp, Homo sapien
aaggtgactcaagcacgggggttatcagctctc

SEQ ID NO: 664317 - DNA, 33 bp, Homo sapien
aaaacagttcctacaacgtccatggttcttttt

SEQ ID NO: 664318 - DNA, 33 bp, Homo sapien
aaaacagttcctacaatgtccatggttcttttt

SEQ ID NO: 664319 - DNA, 33 bp, Homo sapien
attccttggcgcagaaccttttcctcgcatcat

SEQ ID NO: 664320 - DNA, 33 bp, Homo sapien
attccttggcgcagaatcttttcctcgcatcat

SEQ ID NO: 664321 - DNA, 33 bp, Homo sapien
tctcttctgagtttaactggctccaatacccaa

SEQ ID NO: 664322 - DNA, 33 bp, Homo sapien
tctcttctgagtttaattggctccaatacccaa

SEQ ID NO: 664323 - DNA, 33 bp, Homo sapien
cctatatgagaaatacaatctgaacgttctggt

SEQ ID NO: 664324 - DNA, 33 bp, Homo sapien
cctatatgagaaatacgatctgaacgttctggt

SEQ ID NO: 664325 - DNA, 33 bp, Homo sapien
cctgagggtctctgaacaaatattgattccctg

SEQ ID NO: 664326 - DNA, 33 bp, Homo sapien
cctgagggtctctgaataaatattgattccctg

SEQ ID NO: 664327 - DNA, 33 bp, Homo sapien
atttcacaagcacttacggtggctttaacctca

SEQ ID NO: 664328 - DNA, 33 bp, Homo sapien
atttcacaagcacttatggtggctttaacctca

SEQ ID NO: 664329 - DNA, 33 bp, Homo sapien
agtgttgtgccagtaaaaaacatgatacagttg

SEQ ID NO: 664330 - DNA, 33 bp, Homo sapien
agtgttgtgccagtaagaaacatgatacagttg

SEQ ID NO: 664331 - DNA, 33 bp, Homo sapien
atgagcaagctgagaccgtagaggtgttgtcat

SEQ ID NO: 664332 - DNA, 33 bp, Homo sapien
atgagcaagctgagactgtagaggtgttgtcat

SEQ ID NO: 664333 - DNA, 33 bp, Homo sapien
tagacagacttttcagaagagagagatatctgt

SEQ ID NO: 664334 - DNA, 33 bp, Homo sapien
tagacagacttttcaggagagagagatatctgt

SEQ ID NO: 664335 - DNA, 33 bp, Homo sapien
aatcaatatccaagcaagtaactgttccaataa

SEQ ID NO: 664336 - DNA, 33 bp, Homo sapien
aatcaatatccaagcacgtaactgttccaataa

SEQ ID NO: 664337 - DNA, 33 bp, Homo sapien
tgtgcctgataccaccacagtgaatgttgttta

SEQ ID NO: 664338 - DNA, 33 bp, Homo sapien
tgtgcctgataccaccgcagtgaatgttgttta

SEQ ID NO: 664339 - DNA, 33 bp, Homo sapien
catcagccaaggccagacagggcagttacagaa

SEQ ID NO: 664340 - DNA, 33 bp, Homo sapien
catcagccaaggccagtcagggcagttacagaa

SEQ ID NO: 664341 - DNA, 33 bp, Homo sapien
ttgaacatctagagaacaggagtccctaaagaa

SEQ ID NO: 664342 - DNA, 33 bp, Homo sapien
ttgaacatctagagaataggagtccctaaagaa

SEQ ID NO: 664343 - DNA, 33 bp, Homo sapien
cagtgtgaaatatggcagtttgcatgatgagct

SEQ ID NO: 664344 - DNA, 33 bp, Homo sapien
cagtgtgaaatatggcggtttgcatgatgagct

SEQ ID NO: 664345 - DNA, 33 bp, Homo sapien
ggtaagtcacagatccagatttaagccaaaccc

SEQ ID NO: 664346 - DNA, 33 bp, Homo sapien
ggtaagtcacagatccggatttaagccaaaccc

SEQ ID NO: 664347 - DNA, 33 bp, Homo sapien
agttattttctcctaactgggcttcctttttct

SEQ ID NO: 664348 - DNA, 33 bp, Homo sapien
agttattttctcctaattgggcttcctttttct

SEQ ID NO: 664349 - DNA, 33 bp, Homo sapien
cataaactatggaagcaactatattaaaaactg

SEQ ID NO: 664350 - DNA, 33 bp, Homo sapien
cataaactatggaagccactatattaaaaactg

SEQ ID NO: 664351 - DNA, 33 bp, Homo sapien
tacgctgtcagccatcacacatagcatagaaaa

SEQ ID NO: 664352 - DNA, 33 bp, Homo sapien
tacgctgtcagccatcgcacatagcatagaaaa

SEQ ID NO: 664353 - DNA, 33 bp, Homo sapien
aagtcttctaattcataaacacagcatgtgttt

SEQ ID NO: 664354 - DNA, 33 bp, Homo sapien
aagtcttctaattcatgaacacagcatgtgttt

SEQ ID NO: 664355 - DNA, 33 bp, Homo sapien
gtcactggctcactcaatcataggcagagatgg

SEQ ID NO: 664356 - DNA, 33 bp, Homo sapien
gtcactggctcactcagtcataggcagagatgg

SEQ ID NO: 664357 - DNA, 33 bp, Homo sapien
tggccatagttcagtgaaaatctgcaaatctcc

SEQ ID NO: 664358 - DNA, 33 bp, Homo sapien
tggccatagttcagtgcaaatctgcaaatctcc

SEQ ID NO: 664359 - DNA, 33 bp, Homo sapien
tttaaaagctgtggcacgaagattggccttgca

SEQ ID NO: 664360 - DNA, 33 bp, Homo sapien
tttaaaagctgtggcatgaagattggccttgca

SEQ ID NO: 664361 - DNA, 33 bp, Homo sapien
gtaaaactcaaacttaacaagaggctttggatt

SEQ ID NO: 664362 - DNA, 33 bp, Homo sapien
gtaaaactcaaacttatcaagaggctttggatt

SEQ ID NO: 664363 - DNA, 33 bp, Homo sapien
tagaacagggaaagacagggctgagaagagaaa

SEQ ID NO: 664364 - DNA, 33 bp, Homo sapien
tagaacagggaaagacggggctgagaagagaaa

SEQ ID NO: 664365 - DNA, 33 bp, Homo sapien
cttggctaaggaaacaccacagcgtacctttat

SEQ ID NO: 664366 - DNA, 33 bp, Homo sapien
cttggctaaggaaacatcacagcgtacctttat

SEQ ID NO: 664367 - DNA, 33 bp, Homo sapien
agggaactaagtgggagctatctccaatggaaa

SEQ ID NO: 664368 - DNA, 33 bp, Homo sapien
agggaactaagtgggatctatctccaatggaaa

SEQ ID NO: 664369 - DNA, 33 bp, Homo sapien
atctagcctttagaacggtgagagaatacattt

SEQ ID NO: 664370 - DNA, 33 bp, Homo sapien
atctagcctttagaactgtgagagaatacattt

SEQ ID NO: 664371 - DNA, 33 bp, Homo sapien
gaaactaatgcctgaaagttatcacagtctaac

SEQ ID NO: 664372 - DNA, 33 bp, Homo sapien
gaaactaatgcctgaaggttatcacagtctaac

SEQ ID NO: 664373 - DNA, 33 bp, Homo sapien
ctagcaatctgcactaaaactctcatggcagcc

SEQ ID NO: 664374 - DNA, 33 bp, Homo sapien
ctagcaatctgcactagaactctcatggcagcc

SEQ ID NO: 664375 - DNA, 33 bp, Homo sapien
acaaggccagtattacaggcacttctcagtacc

SEQ ID NO: 664376 - DNA, 33 bp, Homo sapien
acaaggccagtattacgggcacttctcagtacc

SEQ ID NO: 664377 - DNA, 33 bp, Homo sapien
acagatcagtggaacacaatcaactacttctct

SEQ ID NO: 664378 - DNA, 33 bp, Homo sapien
acagatcagtggaacataatcaactacttctct

SEQ ID NO: 664379 - DNA, 33 bp, Homo sapien
cgttctccatcttcccaattcaaaaccctacac

SEQ ID NO: 664380 - DNA, 33 bp, Homo sapien
cgttctccatcttcccgattcaaaaccctacac

SEQ ID NO: 664381 - DNA, 33 bp, Homo sapien
aaggtaattgatgccaactacaactgccaatac

SEQ ID NO: 664382 - DNA, 33 bp, Homo sapien
aaggtaattgatgccagctacaactgccaatac

SEQ ID NO: 664383 - DNA, 33 bp, Homo sapien
tcccttggccttaaccacaggctgctggaatcc

SEQ ID NO: 664384 - DNA, 33 bp, Homo sapien
tcccttggccttaaccgcaggctgctggaatcc

SEQ ID NO: 664385 - DNA, 33 bp, Homo sapien
ccaaaattgtatgtacagatcttgggacataaa

SEQ ID NO: 664386 - DNA, 33 bp, Homo sapien
ccaaaattgtatgtacggatcttgggacataaa

SEQ ID NO: 664387 - DNA, 33 bp, Homo sapien
ctaataaataagccagaaatgcttatcagagaa

SEQ ID NO: 664388 - DNA, 33 bp, Homo sapien
ctaataaataagccaggaatgcttatcagagaa

SEQ ID NO: 664389 - DNA, 33 bp, Homo sapien
gggaataagggtttcacgcttgacttcaaaggc

SEQ ID NO: 664390 - DNA, 33 bp, Homo sapien
gggaataagggtttcatgcttgacttcaaaggc

SEQ ID NO: 664391 - DNA, 33 bp, Homo sapien
atcaatttattcactcacttatcacgtttatca

SEQ ID NO: 664392 - DNA, 33 bp, Homo sapien
atcaatttattcactcgcttatcacgtttatca

SEQ ID NO: 664393 - DNA, 33 bp, Homo sapien
cattgacatttacaccaatcctagataagatgt

SEQ ID NO: 664394 - DNA, 33 bp, Homo sapien
cattgacatttacaccgatcctagataagatgt

SEQ ID NO: 664395 - DNA, 33 bp, Homo sapien
agttattaagtcatcaataacttcagagaaata

SEQ ID NO: 664396 - DNA, 33 bp, Homo sapien
agttattaagtcatcagtaacttcagagaaata

SEQ ID NO: 664397 - DNA, 33 bp, Homo sapien
ctgagttgaagagctacagatgggagttagggt

SEQ ID NO: 664398 - DNA, 33 bp, Homo sapien
ctgagttgaagagctagagatgggagttagggt

SEQ ID NO: 664399 - DNA, 33 bp, Homo sapien
tgagtgaaggatgacacactctgcagtaggaaa

SEQ ID NO: 664400 - DNA, 33 bp, Homo sapien
tgagtgaaggatgacatactctgcagtaggaaa

SEQ ID NO: 664401 - DNA, 33 bp, Homo sapien
ggagttttctattaaaagactgaaggcaagtgt

SEQ ID NO: 664402 - DNA, 33 bp, Homo sapien
ggagttttctattaaaggactgaaggcaagtgt

SEQ ID NO: 664403 - DNA, 33 bp, Homo sapien
tacctctgcaaccaaccattgaccaaaatgccc

SEQ ID NO: 664404 - DNA, 33 bp, Homo sapien
tacctctgcaaccaactattgaccaaaatgccc

SEQ ID NO: 664405 - DNA, 33 bp, Homo sapien
gtatacatcggccctaactggaatctgatgact

SEQ ID NO: 664406 - DNA, 33 bp, Homo sapien
gtatacatcggccctagctggaatctgatgact

SEQ ID NO: 664407 - DNA, 33 bp, Homo sapien
tgtctaggagaaaagtaaatggcatatgggcaa

SEQ ID NO: 664408 - DNA, 33 bp, Homo sapien
tgtctaggagaaaagtcaatggcatatgggcaa

SEQ ID NO: 664409 - DNA, 33 bp, Homo sapien
tagcaaggaactattacaagagctggttttaga

SEQ ID NO: 664410 - DNA, 33 bp, Homo sapien
tagcaaggaactattataagagctggttttaga

SEQ ID NO: 664411 - DNA, 33 bp, Homo sapien
gttcttgcttctatccaagttaatcttcctgca

SEQ ID NO: 664412 - DNA, 33 bp, Homo sapien
gttcttgcttctatccgagttaatcttcctgca

SEQ ID NO: 664413 - DNA, 33 bp, Homo sapien
gggagttaaggggtagaaagagacaaagtccgc

SEQ ID NO: 664414 - DNA, 33 bp, Homo sapien
gggagttaaggggtaggaagagacaaagtccgc

SEQ ID NO: 664415 - DNA, 33 bp, Homo sapien
gatctttaaaatgtgaataatgctaccaccaag

SEQ ID NO: 664416 - DNA, 33 bp, Homo sapien
gatctttaaaatgtgattaatgctaccaccaag

SEQ ID NO: 664417 - DNA, 33 bp, Homo sapien
cgttttcactacaaaaattaatctaaggtgaat

SEQ ID NO: 664418 - DNA, 33 bp, Homo sapien
cgttttcactacaaaatttaatctaaggtgaat

SEQ ID NO: 664419 - DNA, 33 bp, Homo sapien
agtctcgtggaggttcaagcccacttctcccgg

SEQ ID NO: 664420 - DNA, 33 bp, Homo sapien
agtctcgtggaggttcgagcccacttctcccgg

SEQ ID NO: 664421 - DNA, 33 bp, Homo sapien
tatattctcatagtcgaagatgttaatgaagtt

SEQ ID NO: 664422 - DNA, 33 bp, Homo sapien
tatattctcatagtcggagatgttaatgaagtt

SEQ ID NO: 664423 - DNA, 33 bp, Homo sapien
ccagttctcaacacaaacatttggctaggaatt

SEQ ID NO: 664424 - DNA, 33 bp, Homo sapien
ccagttctcaacacaatcatttggctaggaatt

SEQ ID NO: 664425 - DNA, 33 bp, Homo sapien
aacacgtgcttgtatcaaccaaaaaacctatga

SEQ ID NO: 664426 - DNA, 33 bp, Homo sapien
aacacgtgcttgtatcgaccaaaaaacctatga

SEQ ID NO: 664427 - DNA, 33 bp, Homo sapien
aagggagtttgagaaagcgaccctataaagttg

SEQ ID NO: 664428 - DNA, 33 bp, Homo sapien
aagggagtttgagaaatcgaccctataaagttg

SEQ ID NO: 664429 - DNA, 33 bp, Homo sapien
ttctctacattttctaccttcccaaagcctctt

SEQ ID NO: 664430 - DNA, 33 bp, Homo sapien
ttctctacattttctagcttcccaaagcctctt

SEQ ID NO: 664431 - DNA, 33 bp, Homo sapien
aacagttacaaaggcacctaaaatatcaaccag

SEQ ID NO: 664432 - DNA, 33 bp, Homo sapien
aacagttacaaaggcagctaaaatatcaaccag

SEQ ID NO: 664433 - DNA, 33 bp, Homo sapien
tgagacaatttggcacacagaaataaagcgtat

SEQ ID NO: 664434 - DNA, 33 bp, Homo sapien
tgagacaatttggcacgcagaaataaagcgtat

SEQ ID NO: 664435 - DNA, 33 bp, Homo sapien
actagctctgctgttacccaggaaacaaaaaag

SEQ ID NO: 664436 - DNA, 33 bp, Homo sapien
actagctctgctgttagccaggaaacaaaaaag

SEQ ID NO: 664437 - DNA, 33 bp, Homo sapien
gatttccttgtttcagacaaaacatattaagtc

SEQ ID NO: 664438 - DNA, 33 bp, Homo sapien
gatttccttgtttcaggcaaaacatattaagtc

SEQ ID NO: 664439 - DNA, 33 bp, Homo sapien
ttttggtggatagatacccatatttgccaaaat

SEQ ID NO: 664440 - DNA, 33 bp, Homo sapien
ttttggtggatagatagccatatttgccaaaat

SEQ ID NO: 664441 - DNA, 33 bp, Homo sapien
ggaaaataatgtagtccatttgtttgcctctgt

SEQ ID NO: 664442 - DNA, 33 bp, Homo sapien
ggaaaataatgtagtctatttgtttgcctctgt

SEQ ID NO: 664443 - DNA, 33 bp, Homo sapien
ggactaccacctaggaaatactcacaatgggag

SEQ ID NO: 664444 - DNA, 33 bp, Homo sapien
ggactaccacctaggagatactcacaatgggag

SEQ ID NO: 664445 - DNA, 33 bp, Homo sapien
ttgcatttttaaccagccagttaggttttgcta

SEQ ID NO: 664446 - DNA, 33 bp, Homo sapien
ttgcatttttaaccagtcagttaggttttgcta

SEQ ID NO: 664447 - DNA, 33 bp, Homo sapien
tggttattcattatccaagatgacttttccttg

SEQ ID NO: 664448 - DNA, 33 bp, Homo sapien
tggttattcattatccgagatgacttttccttg

SEQ ID NO: 664449 - DNA, 33 bp, Homo sapien
gccactaacagctaacagggcagaggtcaggac

SEQ ID NO: 664450 - DNA, 33 bp, Homo sapien
gccactaacagctaaccgggcagaggtcaggac

SEQ ID NO: 664451 - DNA, 33 bp, Homo sapien
tgtctatgactatccaagctaatggaactccat

SEQ ID NO: 664452 - DNA, 33 bp, Homo sapien
tgtctatgactatccaggctaatggaactccat

SEQ ID NO: 664453 - DNA, 33 bp, Homo sapien
tgacagccagaaaggaaacataaatggaactca

SEQ ID NO: 664454 - DNA, 33 bp, Homo sapien
tgacagccagaaaggacacataaatggaactca

SEQ ID NO: 664455 - DNA, 33 bp, Homo sapien
acaaaacgacttttcccatatacttctcctctt

SEQ ID NO: 664456 - DNA, 33 bp, Homo sapien
acaaaacgacttttcctatatacttctcctctt

SEQ ID NO: 664457 - DNA, 33 bp, Homo sapien
gtggctggggttgcacgagaagatgtggctgtc

SEQ ID NO: 664458 - DNA, 33 bp, Homo sapien
gtggctggggttgcactagaagatgtggctgtc

SEQ ID NO: 664459 - DNA, 33 bp, Homo sapien
aggccacggttccccaatgacgcttcctctata

SEQ ID NO: 664460 - DNA, 33 bp, Homo sapien
aggccacggttccccagtgacgcttcctctata

SEQ ID NO: 664461 - DNA, 33 bp, Homo sapien
agaaaacagaccaaaaactgaacatagaacata

SEQ ID NO: 664462 - DNA, 33 bp, Homo sapien
agaaaacagaccaaaagctgaacatagaacata

SEQ ID NO: 664463 - DNA, 33 bp, Homo sapien
aatatggccaccacaacttctccttcctatact

SEQ ID NO: 664464 - DNA, 33 bp, Homo sapien
aatatggccaccacaatttctccttcctatact

SEQ ID NO: 664465 - DNA, 33 bp, Homo sapien
gtgtactgattataacagcatgaggtggcaagg

SEQ ID NO: 664466 - DNA, 33 bp, Homo sapien
gtgtactgattataacggcatgaggtggcaagg

SEQ ID NO: 664467 - DNA, 33 bp, Homo sapien
ttaaattaatacagatcaactatgaaaagacct

SEQ ID NO: 664468 - DNA, 33 bp, Homo sapien
ttaaattaatacagatgaactatgaaaagacct

SEQ ID NO: 664469 - DNA, 33 bp, Homo sapien
ctgtaagcattgattaaatgccaaatgatatcc

SEQ ID NO: 664470 - DNA, 33 bp, Homo sapien
ctgtaagcattgattatatgccaaatgatatcc

SEQ ID NO: 664471 - DNA, 33 bp, Homo sapien
gagctaagtaaggccaaaatgctcaagcggagg

SEQ ID NO: 664472 - DNA, 33 bp, Homo sapien
gagctaagtaaggccagaatgctcaagcggagg

SEQ ID NO: 664473 - DNA, 33 bp, Homo sapien
aaggcatattcaagtcaaagtaaaattaagcta

SEQ ID NO: 664474 - DNA, 33 bp, Homo sapien
aaggcatattcaagtcgaagtaaaattaagcta

SEQ ID NO: 664475 - DNA, 33 bp, Homo sapien
gactgtctgtcttggccacttatttctcttcaa

SEQ ID NO: 664476 - DNA, 33 bp, Homo sapien
gactgtctgtcttggctacttatttctcttcaa

SEQ ID NO: 664477 - DNA, 33 bp, Homo sapien
tatccttaaagagtgaagttgccttattctaca

SEQ ID NO: 664478 - DNA, 33 bp, Homo sapien
tatccttaaagagtgatgttgccttattctaca

SEQ ID NO: 664479 - DNA, 33 bp, Homo sapien
aaccttccagggaaaaaatatagtctgatttaa

SEQ ID NO: 664480 - DNA, 33 bp, Homo sapien
aaccttccagggaaaagatatagtctgatttaa

SEQ ID NO: 664481 - DNA, 33 bp, Homo sapien
tactacacatccatacagaagaatgaaatcatg

SEQ ID NO: 664482 - DNA, 33 bp, Homo sapien
tactacacatccatacggaagaatgaaatcatg

SEQ ID NO: 664483 - DNA, 33 bp, Homo sapien
gcaaggtaaatacagccgatgggaacaccctgg

SEQ ID NO: 664484 - DNA, 33 bp, Homo sapien
gcaaggtaaatacagctgatgggaacaccctgg

SEQ ID NO: 664485 - DNA, 33 bp, Homo sapien
tgtgttcacactgtcaacgggaaggtagcagtt

SEQ ID NO: 664486 - DNA, 33 bp, Homo sapien
tgtgttcacactgtcagcgggaaggtagcagtt

SEQ ID NO: 664487 - DNA, 33 bp, Homo sapien
ctctgggagacatgagaaacatagaccaaacag

SEQ ID NO: 664488 - DNA, 33 bp, Homo sapien
ctctgggagacatgaggaacatagaccaaacag

SEQ ID NO: 664489 - DNA, 33 bp, Homo sapien
cttgttaaataggaaacgttgctgtatttatcc

SEQ ID NO: 664490 - DNA, 33 bp, Homo sapien
cttgttaaataggaaatgttgctgtatttatcc

SEQ ID NO: 664491 - DNA, 33 bp, Homo sapien
aaagtgtggcatggaaaaataacccatcaacct

SEQ ID NO: 664492 - DNA, 33 bp, Homo sapien
aaagtgtggcatggaagaataacccatcaacct

SEQ ID NO: 664493 - DNA, 33 bp, Homo sapien
tcagaattccacacaacggtagaatatccacat

SEQ ID NO: 664494 - DNA, 33 bp, Homo sapien
tcagaattccacacaagggtagaatatccacat

SEQ ID NO: 664495 - DNA, 33 bp, Homo sapien
agtgcagcttttcctaccatggcaatgtaatta

SEQ ID NO: 664496 - DNA, 33 bp, Homo sapien
agtgcagcttttcctatcatggcaatgtaatta

SEQ ID NO: 664497 - DNA, 33 bp, Homo sapien
ttgtataactttgtgacagatcagaagggaaga

SEQ ID NO: 664498 - DNA, 33 bp, Homo sapien
ttgtataactttgtgatagatcagaagggaaga

SEQ ID NO: 664499 - DNA, 33 bp, Homo sapien
tcgattaatgaaatcacctatgaaagacagctg

SEQ ID NO: 664500 - DNA, 33 bp, Homo sapien
tcgattaatgaaatcatctatgaaagacagctg

SEQ ID NO: 664501 - DNA, 33 bp, Homo sapien
ccagcatcgggaactcacacagcttggtaaatt

SEQ ID NO: 664502 - DNA, 33 bp, Homo sapien
ccagcatcgggaactcgcacagcttggtaaatt

SEQ ID NO: 664503 - DNA, 33 bp, Homo sapien
aggggactgatatttaaaaggaaaaatctctaa

SEQ ID NO: 664504 - DNA, 33 bp, Homo sapien
aggggactgatatttagaaggaaaaatctctaa

SEQ ID NO: 664505 - DNA, 33 bp, Homo sapien
ggtgataaattgggtacgatctgcctctttttc

SEQ ID NO: 664506 - DNA, 33 bp, Homo sapien
ggtgataaattgggtatgatctgcctctttttc

SEQ ID NO: 664507 - DNA, 33 bp, Homo sapien
gtcaagaataagacaactgattaagggtgataa

SEQ ID NO: 664508 - DNA, 33 bp, Homo sapien
gtcaagaataagacaattgattaagggtgataa

SEQ ID NO: 664509 - DNA, 33 bp, Homo sapien
ctatactgtaggcacaagagggctaaatattat

SEQ ID NO: 664510 - DNA, 33 bp, Homo sapien
ctatactgtaggcacaggagggctaaatattat

SEQ ID NO: 664511 - DNA, 33 bp, Homo sapien
gattaaggagattggcaatgttagcccaaaata

SEQ ID NO: 664512 - DNA, 33 bp, Homo sapien
gattaaggagattggcgatgttagcccaaaata

SEQ ID NO: 664513 - DNA, 33 bp, Homo sapien
ttcaggatttctagtactaatttgcaagaaaaa

SEQ ID NO: 664514 - DNA, 33 bp, Homo sapien
ttcaggatttctagtattaatttgcaagaaaaa

SEQ ID NO: 664515 - DNA, 33 bp, Homo sapien
ttccatgttgtaggtaacattttaagcactata

SEQ ID NO: 664516 - DNA, 33 bp, Homo sapien
ttccatgttgtaggtagcattttaagcactata

SEQ ID NO: 664517 - DNA, 33 bp, Homo sapien
caaagataacttgaaccgaagtgaaattatctg

SEQ ID NO: 664518 - DNA, 33 bp, Homo sapien
caaagataacttgaactgaagtgaaattatctg

SEQ ID NO: 664519 - DNA, 33 bp, Homo sapien
gaggagtcctctctggcattagctcttcaggac

SEQ ID NO: 664520 - DNA, 33 bp, Homo sapien
gaggagtcctctctggtattagctcttcaggac

SEQ ID NO: 664521 - DNA, 33 bp, Homo sapien
ctcgatatgtaaaaacaatcctcttggtacttc

SEQ ID NO: 664522 - DNA, 33 bp, Homo sapien
ctcgatatgtaaaaaccatcctcttggtacttc

SEQ ID NO: 664523 - DNA, 33 bp, Homo sapien
aagctgaggcaaatggcaactggcagaaagtga

SEQ ID NO: 664524 - DNA, 33 bp, Homo sapien
aagctgaggcaaatggtaactggcagaaagtga

SEQ ID NO: 664525 - DNA, 33 bp, Homo sapien
gagacaagaggaagaactgaataatcagtgcaa

SEQ ID NO: 664526 - DNA, 33 bp, Homo sapien
gagacaagaggaagaattgaataatcagtgcaa

SEQ ID NO: 664527 - DNA, 33 bp, Homo sapien
agtcactcccatgtaaacacaactctcaaaacc

SEQ ID NO: 664528 - DNA, 33 bp, Homo sapien
agtcactcccatgtaagcacaactctcaaaacc

SEQ ID NO: 664529 - DNA, 33 bp, Homo sapien
atttataaaaacagaacggattaggctgactat

SEQ ID NO: 664530 - DNA, 33 bp, Homo sapien
atttataaaaacagaatggattaggctgactat

SEQ ID NO: 664531 - DNA, 33 bp, Homo sapien
cataaagaatggactacaggagagagagtccag

SEQ ID NO: 664532 - DNA, 33 bp, Homo sapien
cataaagaatggactataggagagagagtccag

SEQ ID NO: 664533 - DNA, 33 bp, Homo sapien
attacaaattatgataagtgctacgattggggc

SEQ ID NO: 664534 - DNA, 33 bp, Homo sapien
attacaaattatgatatgtgctacgattggggc

SEQ ID NO: 664535 - DNA, 33 bp, Homo sapien
tgagctgagactggagaaaggtagaattattgc

SEQ ID NO: 664536 - DNA, 33 bp, Homo sapien
tgagctgagactggagcaaggtagaattattgc

SEQ ID NO: 664537 - DNA, 33 bp, Homo sapien
ttttgatgtgcaacccaattattaatgactata

SEQ ID NO: 664538 - DNA, 33 bp, Homo sapien
ttttgatgtgcaaccctattattaatgactata

SEQ ID NO: 664539 - DNA, 33 bp, Homo sapien
caccaactgcaacgtccaaaagttgtggcaaat

SEQ ID NO: 664540 - DNA, 33 bp, Homo sapien
caccaactgcaacgtctaaaagttgtggcaaat

SEQ ID NO: 664541 - DNA, 33 bp, Homo sapien
tggcagagcttgactgacaaaatcaatccatgc

SEQ ID NO: 664542 - DNA, 33 bp, Homo sapien
tggcagagcttgactggcaaaatcaatccatgc

SEQ ID NO: 664543 - DNA, 33 bp, Homo sapien
taatctatttaaggagcaggaatgttcatcttc

SEQ ID NO: 664544 - DNA, 33 bp, Homo sapien
taatctatttaaggaggaggaatgttcatcttc

SEQ ID NO: 664545 - DNA, 33 bp, Homo sapien
gaaagtcacctccagaacagaattggacacaat

SEQ ID NO: 664546 - DNA, 33 bp, Homo sapien
gaaagtcacctccagaccagaattggacacaat

SEQ ID NO: 664547 - DNA, 33 bp, Homo sapien
aaatggaatgtacagaacttatcgccacccttg

SEQ ID NO: 664548 - DNA, 33 bp, Homo sapien
aaatggaatgtacagatcttatcgccacccttg

SEQ ID NO: 664549 - DNA, 33 bp, Homo sapien
taacttatatgacagacaaaagattcatattcc

SEQ ID NO: 664550 - DNA, 33 bp, Homo sapien
taacttatatgacagagaaaagattcatattcc

SEQ ID NO: 664551 - DNA, 33 bp, Homo sapien
tatgttatctcatgtaatacaccctcaaccatc

SEQ ID NO: 664552 - DNA, 33 bp, Homo sapien
tatgttatctcatgtagtacaccctcaaccatc

SEQ ID NO: 664553 - DNA, 33 bp, Homo sapien
tcgtaggacacttagcactttccactatgtgct

SEQ ID NO: 664554 - DNA, 33 bp, Homo sapien
tcgtaggacacttagcgctttccactatgtgct

SEQ ID NO: 664555 - DNA, 33 bp, Homo sapien
ctctcttttacttgcacacttaagaaaggcttt

SEQ ID NO: 664556 - DNA, 33 bp, Homo sapien
ctctcttttacttgcagacttaagaaaggcttt

SEQ ID NO: 664557 - DNA, 33 bp, Homo sapien
ggatatgatagacacaaaatcaggatgccgagt

SEQ ID NO: 664558 - DNA, 33 bp, Homo sapien
ggatatgatagacacacaatcaggatgccgagt

SEQ ID NO: 664559 - DNA, 33 bp, Homo sapien
tttagtgaatgtgaccaagtctcgcactgcctt

SEQ ID NO: 664560 - DNA, 33 bp, Homo sapien
tttagtgaatgtgaccgagtctcgcactgcctt

SEQ ID NO: 664561 - DNA, 33 bp, Homo sapien
ttttctgatggaagaacgtgggatacccagaga

SEQ ID NO: 664562 - DNA, 33 bp, Homo sapien
ttttctgatggaagaaggtgggatacccagaga

SEQ ID NO: 664563 - DNA, 33 bp, Homo sapien
cccagtctctattcacggaccagtttgtaaagc

SEQ ID NO: 664564 - DNA, 33 bp, Homo sapien
cccagtctctattcactgaccagtttgtaaagc

SEQ ID NO: 664565 - DNA, 33 bp, Homo sapien
caaatgtgttgtctctcaaattagtcacataag

SEQ ID NO: 664566 - DNA, 33 bp, Homo sapien
caaatgtgttgtctctgaaattagtcacataag

SEQ ID NO: 664567 - DNA, 33 bp, Homo sapien
aattactactcatttacgtttggtggtccatgt

SEQ ID NO: 664568 - DNA, 33 bp, Homo sapien
aattactactcatttatgtttggtggtccatgt

SEQ ID NO: 664569 - DNA, 33 bp, Homo sapien
tggtcagttagtattacgtcagagacacttgtg

SEQ ID NO: 664570 - DNA, 33 bp, Homo sapien
tggtcagttagtattatgtcagagacacttgtg

SEQ ID NO: 664571 - DNA, 33 bp, Homo sapien
caattctctggtattgaatagagcagataacta

SEQ ID NO: 664572 - DNA, 33 bp, Homo sapien
caattctctggtattgtatagagcagataacta

SEQ ID NO: 664573 - DNA, 33 bp, Homo sapien
aggtgcttttttccccagagaagtagagttgtt

SEQ ID NO: 664574 - DNA, 33 bp, Homo sapien
aggtgcttttttccccggagaagtagagttgtt

SEQ ID NO: 664575 - DNA, 33 bp, Homo sapien
gtttctttgttgaaaacagcttactaaaggctt

SEQ ID NO: 664576 - DNA, 33 bp, Homo sapien
gtttctttgttgaaaagagcttactaaaggctt

SEQ ID NO: 664577 - DNA, 33 bp, Homo sapien
tgatgtgaaggattaaacctgttgagctatttg

SEQ ID NO: 664578 - DNA, 33 bp, Homo sapien
tgatgtgaaggattaagcctgttgagctatttg

SEQ ID NO: 664579 - DNA, 33 bp, Homo sapien
tgaagttgctatggacaatggtggcttggtgtg

SEQ ID NO: 664580 - DNA, 33 bp, Homo sapien
tgaagttgctatggacgatggtggcttggtgtg

SEQ ID NO: 664581 - DNA, 33 bp, Homo sapien
gttgtgcaagccaacaacaaaagagccacataa

SEQ ID NO: 664582 - DNA, 33 bp, Homo sapien
gttgtgcaagccaacagcaaaagagccacataa

SEQ ID NO: 664583 - DNA, 33 bp, Homo sapien
cccatccctggtctcacgagttgtggtcagtga

SEQ ID NO: 664584 - DNA, 33 bp, Homo sapien
cccatccctggtctcatgagttgtggtcagtga

SEQ ID NO: 664585 - DNA, 33 bp, Homo sapien
gtccgcacaaggaaaacctgagccctttatctt

SEQ ID NO: 664586 - DNA, 33 bp, Homo sapien
gtccgcacaaggaaaatctgagccctttatctt

SEQ ID NO: 664587 - DNA, 33 bp, Homo sapien
acacctccatttctaccgggaaacatgtgggat

SEQ ID NO: 664588 - DNA, 33 bp, Homo sapien
acacctccatttctactgggaaacatgtgggat

SEQ ID NO: 664589 - DNA, 33 bp, Homo sapien
tttactcttgatgaccacgtctccagagactgc

SEQ ID NO: 664590 - DNA, 33 bp, Homo sapien
tttactcttgatgaccgcgtctccagagactgc

SEQ ID NO: 664591 - DNA, 33 bp, Homo sapien
gcagccacgtctttacagagtccctcacacgag

SEQ ID NO: 664592 - DNA, 33 bp, Homo sapien
gcagccacgtctttacggagtccctcacacgag

SEQ ID NO: 664593 - DNA, 33 bp, Homo sapien
acttccatctccagaaaccaactaaataatgga

SEQ ID NO: 664594 - DNA, 33 bp, Homo sapien
acttccatctccagaagccaactaaataatgga

SEQ ID NO: 664595 - DNA, 33 bp, Homo sapien
ggtggaaggggagagacagcgtgtgaatgaggg

SEQ ID NO: 664596 - DNA, 33 bp, Homo sapien
ggtggaaggggagagagagcgtgtgaatgaggg

SEQ ID NO: 664597 - DNA, 33 bp, Homo sapien
cagggtgccagtgatgccaatgcctagaacatt

SEQ ID NO: 664598 - DNA, 33 bp, Homo sapien
cagggtgccagtgatgtcaatgcctagaacatt

SEQ ID NO: 664599 - DNA, 33 bp, Homo sapien
gaataaaatgttgcagaagattaataaggtcct

SEQ ID NO: 664600 - DNA, 33 bp, Homo sapien
gaataaaatgttgcaggagattaataaggtcct

SEQ ID NO: 664601 - DNA, 33 bp, Homo sapien
tggaacctctgtttccccaagaattatgtagtg

SEQ ID NO: 664602 - DNA, 33 bp, Homo sapien
tggaacctctgtttccgcaagaattatgtagtg

SEQ ID NO: 664603 - DNA, 33 bp, Homo sapien
tttgtttacagggataactgggttcttccttct

SEQ ID NO: 664604 - DNA, 33 bp, Homo sapien
tttgtttacagggatacctgggttcttccttct

SEQ ID NO: 664605 - DNA, 33 bp, Homo sapien
caagtacagctaaagacgctgaatggggattta

SEQ ID NO: 664606 - DNA, 33 bp, Homo sapien
caagtacagctaaagatgctgaatggggattta

SEQ ID NO: 664607 - DNA, 33 bp, Homo sapien
atatgggcaaaatataatagtttcatagttctt

SEQ ID NO: 664608 - DNA, 33 bp, Homo sapien
atatgggcaaaatatactagtttcatagttctt

SEQ ID NO: 664609 - DNA, 33 bp, Homo sapien
atgtagtttggacaccaaaagaggaaaaacaaa

SEQ ID NO: 664610 - DNA, 33 bp, Homo sapien
atgtagtttggacaccgaaagaggaaaaacaaa

SEQ ID NO: 664611 - DNA, 33 bp, Homo sapien
ttgaatgatggaactgacagaatatggctttgg

SEQ ID NO: 664612 - DNA, 33 bp, Homo sapien
ttgaatgatggaactggcagaatatggctttgg

SEQ ID NO: 664613 - DNA, 33 bp, Homo sapien
aagagaaaaataaatacactgctgccctgacac

SEQ ID NO: 664614 - DNA, 33 bp, Homo sapien
aagagaaaaataaatatactgctgccctgacac

SEQ ID NO: 664615 - DNA, 33 bp, Homo sapien
catataatggaagttaccaagttatgaaagtgt

SEQ ID NO: 664616 - DNA, 33 bp, Homo sapien
catataatggaagttatcaagttatgaaagtgt

SEQ ID NO: 664617 - DNA, 33 bp, Homo sapien
gtgtctctcaggtcacccacagtttaaagacca

SEQ ID NO: 664618 - DNA, 33 bp, Homo sapien
gtgtctctcaggtcactcacagtttaaagacca

SEQ ID NO: 664619 - DNA, 33 bp, Homo sapien
accaccttcattcccactatcattaccttgagc

SEQ ID NO: 664620 - DNA, 33 bp, Homo sapien
accaccttcattcccagtatcattaccttgagc

SEQ ID NO: 664621 - DNA, 33 bp, Homo sapien
cagcatcctgtgtttggattgctaaacctggca

SEQ ID NO: 664622 - DNA, 33 bp, Homo sapien
cagcatcctgtgtttgtattgctaaacctggca

SEQ ID NO: 664623 - DNA, 33 bp, Homo sapien
tcaggtcacccactcaactgctgaatttgttct

SEQ ID NO: 664624 - DNA, 33 bp, Homo sapien
tcaggtcacccactcagctgctgaatttgttct

SEQ ID NO: 664625 - DNA, 33 bp, Homo sapien
tttttcctcttcttctaactagttgggccaagc

SEQ ID NO: 664626 - DNA, 33 bp, Homo sapien
tttttcctcttcttctgactagttgggccaagc

SEQ ID NO: 664627 - DNA, 33 bp, Homo sapien
attccatgcagaaggaaaagcatgatatggatg

SEQ ID NO: 664628 - DNA, 33 bp, Homo sapien
attccatgcagaaggagaagcatgatatggatg

SEQ ID NO: 664629 - DNA, 33 bp, Homo sapien
gtatggtctcttattaagggtaataggaaagat

SEQ ID NO: 664630 - DNA, 33 bp, Homo sapien
gtatggtctcttattaggggtaataggaaagat

SEQ ID NO: 664631 - DNA, 33 bp, Homo sapien
agtaacactaaaggcacgtatcaaaaaagtggg

SEQ ID NO: 664632 - DNA, 33 bp, Homo sapien
agtaacactaaaggcaggtatcaaaaaagtggg

SEQ ID NO: 664633 - DNA, 33 bp, Homo sapien
gacagataaagtaggacggctagtagaaagaaa

SEQ ID NO: 664634 - DNA, 33 bp, Homo sapien
gacagataaagtaggatggctagtagaaagaaa

SEQ ID NO: 664635 - DNA, 33 bp, Homo sapien
atgaattttgggatgaggacatcgtgtggcttt

SEQ ID NO: 664636 - DNA, 33 bp, Homo sapien
atgaattttgggatgatgacatcgtgtggcttt

SEQ ID NO: 664637 - DNA, 33 bp, Homo sapien
caagttgcagcatggaatagcatgtctccatct

SEQ ID NO: 664638 - DNA, 33 bp, Homo sapien
caagttgcagcatggagtagcatgtctccatct

SEQ ID NO: 664639 - DNA, 33 bp, Homo sapien
ctgctactctgtatctcaccaagtaataattct

SEQ ID NO: 664640 - DNA, 33 bp, Homo sapien
ctgctactctgtatcttaccaagtaataattct

SEQ ID NO: 664641 - DNA, 33 bp, Homo sapien
agagtcatagaaagcacatcccactcttaatcc

SEQ ID NO: 664642 - DNA, 33 bp, Homo sapien
agagtcatagaaagcatatcccactcttaatcc

SEQ ID NO: 664643 - DNA, 33 bp, Homo sapien
ccacagtggtccacgaaggaggaaacttctacc

SEQ ID NO: 664644 - DNA, 33 bp, Homo sapien
ccacagtggtccacgagggaggaaacttctacc

SEQ ID NO: 664645 - DNA, 33 bp, Homo sapien
tagatcctgacactaaagaaatgctggagcttt

SEQ ID NO: 664646 - DNA, 33 bp, Homo sapien
tagatcctgacactaaggaaatgctggagcttt

SEQ ID NO: 664647 - DNA, 33 bp, Homo sapien
gcccttctataacaaaagtccaatgtttctgaa

SEQ ID NO: 664648 - DNA, 33 bp, Homo sapien
gcccttctataacaaatgtccaatgtttctgaa

SEQ ID NO: 664649 - DNA, 33 bp, Homo sapien
accactgcataatagacgaatataagaaatctg

SEQ ID NO: 664650 - DNA, 33 bp, Homo sapien
accactgcataatagatgaatataagaaatctg

SEQ ID NO: 664651 - DNA, 33 bp, Homo sapien
gacttggtgatagaagcagagtatttccaggac

SEQ ID NO: 664652 - DNA, 33 bp, Homo sapien
gacttggtgatagaagtagagtatttccaggac

SEQ ID NO: 664653 - DNA, 33 bp, Homo sapien
cttaccagtataacaacagagcagaagagataa

SEQ ID NO: 664654 - DNA, 33 bp, Homo sapien
cttaccagtataacaatagagcagaagagataa

SEQ ID NO: 664655 - DNA, 33 bp, Homo sapien
tctgcaaagtgggatgcaaacttacagaagatt

SEQ ID NO: 664656 - DNA, 33 bp, Homo sapien
tctgcaaagtgggatggaaacttacagaagatt

SEQ ID NO: 664657 - DNA, 33 bp, Homo sapien
gggttaggaatgagaccgggaaagcaggataaa

SEQ ID NO: 664658 - DNA, 33 bp, Homo sapien
gggttaggaatgagactgggaaagcaggataaa

SEQ ID NO: 664659 - DNA, 33 bp, Homo sapien
gtttcccttattgcaacgcttaatggtagtgtt

SEQ ID NO: 664660 - DNA, 33 bp, Homo sapien
gtttcccttattgcaatgcttaatggtagtgtt

SEQ ID NO: 664661 - DNA, 33 bp, Homo sapien
atggtgtttggttcaacatatcattagagccaa

SEQ ID NO: 664662 - DNA, 33 bp, Homo sapien
atggtgtttggttcaatatatcattagagccaa

SEQ ID NO: 664663 - DNA, 33 bp, Homo sapien
gatttgacaattcaaaaccagattctgaagaat

SEQ ID NO: 664664 - DNA, 33 bp, Homo sapien
gatttgacaattcaaacccagattctgaagaat

SEQ ID NO: 664665 - DNA, 33 bp, Homo sapien
agctactataaaaacaatctatgcttaggaata

SEQ ID NO: 664666 - DNA, 33 bp, Homo sapien
agctactataaaaacagtctatgcttaggaata

SEQ ID NO: 664667 - DNA, 33 bp, Homo sapien
catgaaagtgaggggaactgaaacttaaatttt

SEQ ID NO: 664668 - DNA, 33 bp, Homo sapien
catgaaagtgaggggacctgaaacttaaatttt

SEQ ID NO: 664669 - DNA, 33 bp, Homo sapien
aaccaatataatgctcaagaagcagaacttgaa

SEQ ID NO: 664670 - DNA, 33 bp, Homo sapien
aaccaatataatgctcgagaagcagaacttgaa

SEQ ID NO: 664671 - DNA, 33 bp, Homo sapien
gacagtaacagagtagacagagatatggagcaa

SEQ ID NO: 664672 - DNA, 33 bp, Homo sapien
gacagtaacagagtaggcagagatatggagcaa

SEQ ID NO: 664673 - DNA, 33 bp, Homo sapien
cggtgtacctagcaaaatggctaaaatgaaata

SEQ ID NO: 664674 - DNA, 33 bp, Homo sapien
cggtgtacctagcaaactggctaaaatgaaata

SEQ ID NO: 664675 - DNA, 33 bp, Homo sapien
ttaaaagaatgattagacaactcacagagtgaa

SEQ ID NO: 664676 - DNA, 33 bp, Homo sapien
ttaaaagaatgattaggcaactcacagagtgaa

SEQ ID NO: 664677 - DNA, 33 bp, Homo sapien
ttgtcaactgtttttcgctcaagcctcacatcc

SEQ ID NO: 664678 - DNA, 33 bp, Homo sapien
ttgtcaactgtttttctctcaagcctcacatcc

SEQ ID NO: 664679 - DNA, 33 bp, Homo sapien
cccggactgtttagcaatagcgctagtagatac

SEQ ID NO: 664680 - DNA, 33 bp, Homo sapien
cccggactgtttagcagtagcgctagtagatac

SEQ ID NO: 664681 - DNA, 33 bp, Homo sapien
aagtgagttcctcttcaagctgttaaaacactt

SEQ ID NO: 664682 - DNA, 33 bp, Homo sapien
aagtgagttcctcttcgagctgttaaaacactt

SEQ ID NO: 664683 - DNA, 33 bp, Homo sapien
tgtagggtaaaagacacctctcaagaatctttc

SEQ ID NO: 664684 - DNA, 33 bp, Homo sapien
tgtagggtaaaagacatctctcaagaatctttc

SEQ ID NO: 664685 - DNA, 33 bp, Homo sapien
gtgattacacaagttacgacctatttttctagc

SEQ ID NO: 664686 - DNA, 33 bp, Homo sapien
gtgattacacaagttatgacctatttttctagc

SEQ ID NO: 664687 - DNA, 33 bp, Homo sapien
gttgattgtaaagatagaaggcccaataattcc

SEQ ID NO: 664688 - DNA, 33 bp, Homo sapien
gttgattgtaaagatataaggcccaataattcc

SEQ ID NO: 664689 - DNA, 33 bp, Homo sapien
gtgaaaaagtcaatgacgatgaagaacgtattc

SEQ ID NO: 664690 - DNA, 33 bp, Homo sapien
gtgaaaaagtcaatgatgatgaagaacgtattc

SEQ ID NO: 664691 - DNA, 33 bp, Homo sapien
ctttaattgctctcaccatctgcagcatagaga

SEQ ID NO: 664692 - DNA, 33 bp, Homo sapien
ctttaattgctctcactatctgcagcatagaga

SEQ ID NO: 664693 - DNA, 33 bp, Homo sapien
aggcaaacatgataaactgtacttatacaaacc

SEQ ID NO: 664694 - DNA, 33 bp, Homo sapien
aggcaaacatgataaagtgtacttatacaaacc

SEQ ID NO: 664695 - DNA, 33 bp, Homo sapien
atcaaaaccatgacaaaacgagagtgaagagaa

SEQ ID NO: 664696 - DNA, 33 bp, Homo sapien
atcaaaaccatgacaacacgagagtgaagagaa

SEQ ID NO: 664697 - DNA, 33 bp, Homo sapien
ccttgcaatatcgacaccttctgccacccttct

SEQ ID NO: 664698 - DNA, 33 bp, Homo sapien
ccttgcaatatcgacagcttctgccacccttct

SEQ ID NO: 664699 - DNA, 33 bp, Homo sapien
ctgattcagcgggtccaagtcttacatttctaa

SEQ ID NO: 664700 - DNA, 33 bp, Homo sapien
ctgattcagcgggtccgagtcttacatttctaa

SEQ ID NO: 664701 - DNA, 33 bp, Homo sapien
tttattgcgaatagataaagaagagagagtagc

SEQ ID NO: 664702 - DNA, 33 bp, Homo sapien
tttattgcgaatagatgaagaagagagagtagc

SEQ ID NO: 664703 - DNA, 33 bp, Homo sapien
aactagtgagtaaagcaacactttagaattatg

SEQ ID NO: 664704 - DNA, 33 bp, Homo sapien
aactagtgagtaaagcgacactttagaattatg

SEQ ID NO: 664705 - DNA, 33 bp, Homo sapien
tatgtatggattaggcaaggtcatctgtaacac

SEQ ID NO: 664706 - DNA, 33 bp, Homo sapien
tatgtatggattaggcgaggtcatctgtaacac

SEQ ID NO: 664707 - DNA, 33 bp, Homo sapien
cctaaggacctagaaacattgtgttggaaaaat

SEQ ID NO: 664708 - DNA, 33 bp, Homo sapien
cctaaggacctagaaatattgtgttggaaaaat

SEQ ID NO: 664709 - DNA, 33 bp, Homo sapien
tgatagccagaatggcagacaaatccaagagta

SEQ ID NO: 664710 - DNA, 33 bp, Homo sapien
tgatagccagaatggcggacaaatccaagagta

SEQ ID NO: 664711 - DNA, 33 bp, Homo sapien
aagcacagcaccttaaagagaaacagcctggag

SEQ ID NO: 664712 - DNA, 33 bp, Homo sapien
aagcacagcaccttaacgagaaacagcctggag

SEQ ID NO: 664713 - DNA, 33 bp, Homo sapien
gaattaatcaaccacaatgataagctgtttatc

SEQ ID NO: 664714 - DNA, 33 bp, Homo sapien
gaattaatcaaccacagtgataagctgtttatc

SEQ ID NO: 664715 - DNA, 33 bp, Homo sapien
ggtggtggttcaagcactaggccatctatataa

SEQ ID NO: 664716 - DNA, 33 bp, Homo sapien
ggtggtggttcaagcagtaggccatctatataa

SEQ ID NO: 664717 - DNA, 33 bp, Homo sapien
atcagctcttctggacccgatctttggctcctg

SEQ ID NO: 664718 - DNA, 33 bp, Homo sapien
atcagctcttctggactcgatctttggctcctg

SEQ ID NO: 664719 - DNA, 33 bp, Homo sapien
attagcagcctcaccaagtaattcacactcaca

SEQ ID NO: 664720 - DNA, 33 bp, Homo sapien
attagcagcctcaccaggtaattcacactcaca

SEQ ID NO: 664721 - DNA, 33 bp, Homo sapien
ttaatatcagctactacggcagcctttaagcca

SEQ ID NO: 664722 - DNA, 33 bp, Homo sapien
ttaatatcagctactatggcagcctttaagcca

SEQ ID NO: 664723 - DNA, 33 bp, Homo sapien
ctcaaaactagtacttcaaaatacagcaacatg

SEQ ID NO: 664724 - DNA, 33 bp, Homo sapien
ctcaaaactagtactttaaaatacagcaacatg

SEQ ID NO: 664725 - DNA, 33 bp, Homo sapien
acaaatgagccctaatgaaaagaagtggctctg

SEQ ID NO: 664726 - DNA, 33 bp, Homo sapien
acaaatgagccctaattaaaagaagtggctctg

SEQ ID NO: 664727 - DNA, 33 bp, Homo sapien
atgaattaaggggaaactgctatctaatagtga

SEQ ID NO: 664728 - DNA, 33 bp, Homo sapien
atgaattaaggggaaattgctatctaatagtga

SEQ ID NO: 664729 - DNA, 33 bp, Homo sapien
ctgttagggtggatagaataggagtgcttagaa

SEQ ID NO: 664730 - DNA, 33 bp, Homo sapien
ctgttagggtggataggataggagtgcttagaa

SEQ ID NO: 664731 - DNA, 33 bp, Homo sapien
caaaagatggtatcacacagtagcacaagccaa

SEQ ID NO: 664732 - DNA, 33 bp, Homo sapien
caaaagatggtatcacgcagtagcacaagccaa

SEQ ID NO: 664733 - DNA, 33 bp, Homo sapien
ataaggagaaacataactaaaactgtcaaaaca

SEQ ID NO: 664734 - DNA, 33 bp, Homo sapien
ataaggagaaacataattaaaactgtcaaaaca

SEQ ID NO: 664735 - DNA, 33 bp, Homo sapien
cacctcttgtgtcctcactacttaggaatttct

SEQ ID NO: 664736 - DNA, 33 bp, Homo sapien
cacctcttgtgtcctcgctacttaggaatttct

SEQ ID NO: 664737 - DNA, 33 bp, Homo sapien
ttctctacactgcaaacgtggtcctatattcca

SEQ ID NO: 664738 - DNA, 33 bp, Homo sapien
ttctctacactgcaaatgtggtcctatattcca

SEQ ID NO: 664739 - DNA, 33 bp, Homo sapien
ctctgcctggcaactaagttgatgggagcagat

SEQ ID NO: 664740 - DNA, 33 bp, Homo sapien
ctctgcctggcaactaggttgatgggagcagat

SEQ ID NO: 664741 - DNA, 33 bp, Homo sapien
gggtgattcagggaaagagcagtagcaggagag

SEQ ID NO: 664742 - DNA, 33 bp, Homo sapien
gggtgattcagggaaatagcagtagcaggagag

SEQ ID NO: 664743 - DNA, 33 bp, Homo sapien
aaagaaattgtccacaatcatgtttggtatctt

SEQ ID NO: 664744 - DNA, 33 bp, Homo sapien
aaagaaattgtccacagtcatgtttggtatctt

SEQ ID NO: 664745 - DNA, 33 bp, Homo sapien
ttcaaaagctaaaagtgaattttcataagcagg

SEQ ID NO: 664746 - DNA, 33 bp, Homo sapien
ttcaaaagctaaaagttaattttcataagcagg

SEQ ID NO: 664747 - DNA, 33 bp, Homo sapien
atagacaacaaactcaaacaacagcaatggaaa

SEQ ID NO: 664748 - DNA, 33 bp, Homo sapien
atagacaacaaactcagacaacagcaatggaaa

SEQ ID NO: 664749 - DNA, 33 bp, Homo sapien
tctaagaggaaacgaaatatggctcccagtacc

SEQ ID NO: 664750 - DNA, 33 bp, Homo sapien
tctaagaggaaacgaattatggctcccagtacc

SEQ ID NO: 664751 - DNA, 33 bp, Homo sapien
ccataatttactcagacggaactgctactgccc

SEQ ID NO: 664752 - DNA, 33 bp, Homo sapien
ccataatttactcagatggaactgctactgccc

SEQ ID NO: 664753 - DNA, 33 bp, Homo sapien
tgcccaccaagtctaacctcattatgctgttat

SEQ ID NO: 664754 - DNA, 33 bp, Homo sapien
tgcccaccaagtctaatctcattatgctgttat

SEQ ID NO: 664755 - DNA, 33 bp, Homo sapien
gtgactgctttgcttacgtatccctgactccat

SEQ ID NO: 664756 - DNA, 33 bp, Homo sapien
gtgactgctttgcttatgtatccctgactccat

SEQ ID NO: 664757 - DNA, 33 bp, Homo sapien
tattggattgcaacaaaaatagactatttattt

SEQ ID NO: 664758 - DNA, 33 bp, Homo sapien
tattggattgcaacaagaatagactatttattt

SEQ ID NO: 664759 - DNA, 33 bp, Homo sapien
ttgaagctctttacaaactgcatctccccttcc

SEQ ID NO: 664760 - DNA, 33 bp, Homo sapien
ttgaagctctttacaatctgcatctccccttcc

SEQ ID NO: 664761 - DNA, 33 bp, Homo sapien
tgcaatatttaaagtcaaagctgtctgcatttc

SEQ ID NO: 664762 - DNA, 33 bp, Homo sapien
tgcaatatttaaagtctaagctgtctgcatttc

SEQ ID NO: 664763 - DNA, 33 bp, Homo sapien
ttttcttagtaaatcacgtaaactcctctgtca

SEQ ID NO: 664764 - DNA, 33 bp, Homo sapien
ttttcttagtaaatcatgtaaactcctctgtca

SEQ ID NO: 664765 - DNA, 33 bp, Homo sapien
tcctccatctctagaacggtaagtttgacagat

SEQ ID NO: 664766 - DNA, 33 bp, Homo sapien
tcctccatctctagaatggtaagtttgacagat

SEQ ID NO: 664767 - DNA, 33 bp, Homo sapien
tgctcttctgtaagataaaagatgcaactagat

SEQ ID NO: 664768 - DNA, 33 bp, Homo sapien
tgctcttctgtaagatgaaagatgcaactagat

SEQ ID NO: 664769 - DNA, 33 bp, Homo sapien
tttattctccaacttacaatagctgatatcaat

SEQ ID NO: 664770 - DNA, 33 bp, Homo sapien
tttattctccaacttataatagctgatatcaat

SEQ ID NO: 664771 - DNA, 33 bp, Homo sapien
ttacaaaaacgatagacgtcatgagaagcaaaa

SEQ ID NO: 664772 - DNA, 33 bp, Homo sapien
ttacaaaaacgatagatgtcatgagaagcaaaa

SEQ ID NO: 664773 - DNA, 33 bp, Homo sapien
gattatactggtttgcgagatattttggtctgt

SEQ ID NO: 664774 - DNA, 33 bp, Homo sapien
gattatactggtttgctagatattttggtctgt

SEQ ID NO: 664775 - DNA, 33 bp, Homo sapien
gcattgtgtacaagcacgttcaggcagaaaatc

SEQ ID NO: 664776 - DNA, 33 bp, Homo sapien
gcattgtgtacaagcatgttcaggcagaaaatc

SEQ ID NO: 664777 - DNA, 33 bp, Homo sapien
aaggcattacatcaacaaacaggctgacttaac

SEQ ID NO: 664778 - DNA, 33 bp, Homo sapien
aaggcattacatcaaccaacaggctgacttaac

SEQ ID NO: 664779 - DNA, 33 bp, Homo sapien
aagatactctgttaaactggctgaattaatgaa

SEQ ID NO: 664780 - DNA, 33 bp, Homo sapien
aagatactctgttaaagtggctgaattaatgaa

SEQ ID NO: 664781 - DNA, 33 bp, Homo sapien
atgagacagcccctaactattaaggatgccaag

SEQ ID NO: 664782 - DNA, 33 bp, Homo sapien
atgagacagcccctaagtattaaggatgccaag

SEQ ID NO: 664783 - DNA, 33 bp, Homo sapien
tgtggtgtaactgccacggaaagacaatgatgg

SEQ ID NO: 664784 - DNA, 33 bp, Homo sapien
tgtggtgtaactgccatggaaagacaatgatgg

SEQ ID NO: 664785 - DNA, 33 bp, Homo sapien
caaagaaatatcacaaatgaaggaatctgggaa

SEQ ID NO: 664786 - DNA, 33 bp, Homo sapien
caaagaaatatcacaactgaaggaatctgggaa

SEQ ID NO: 664787 - DNA, 33 bp, Homo sapien
gtaggatagatgtatacatgaagaggagtttat

SEQ ID NO: 664788 - DNA, 33 bp, Homo sapien
gtaggatagatgtatatatgaagaggagtttat

SEQ ID NO: 664789 - DNA, 33 bp, Homo sapien
tacccttcaaaactgagagaaataagcgtttgc

SEQ ID NO: 664790 - DNA, 33 bp, Homo sapien
tacccttcaaaactgatagaaataagcgtttgc

SEQ ID NO: 664791 - DNA, 33 bp, Homo sapien
tcagcactggtgttgcccctataatcttattat

SEQ ID NO: 664792 - DNA, 33 bp, Homo sapien
tcagcactggtgttgctcctataatcttattat

SEQ ID NO: 664793 - DNA, 33 bp, Homo sapien
tatttagctgtatcctaacaatagaacctgcct

SEQ ID NO: 664794 - DNA, 33 bp, Homo sapien
tatttagctgtatcctgacaatagaacctgcct

SEQ ID NO: 664795 - DNA, 33 bp, Homo sapien
ggctgactgaaggaaccctgcttagaaaaccat

SEQ ID NO: 664796 - DNA, 33 bp, Homo sapien
ggctgactgaaggaactctgcttagaaaaccat

SEQ ID NO: 664797 - DNA, 33 bp, Homo sapien
cccatcctggttaaaagagctaacacctttctt

SEQ ID NO: 664798 - DNA, 33 bp, Homo sapien
cccatcctggttaaaatagctaacacctttctt

SEQ ID NO: 664799 - DNA, 33 bp, Homo sapien
atattgcccaggcttaagtaaaacaaaatactg

SEQ ID NO: 664800 - DNA, 33 bp, Homo sapien
atattgcccaggcttatgtaaaacaaaatactg

SEQ ID NO: 664801 - DNA, 33 bp, Homo sapien
aggaaactgaaggcccaatgtgttggctcacac

SEQ ID NO: 664802 - DNA, 33 bp, Homo sapien
aggaaactgaaggcccgatgtgttggctcacac

SEQ ID NO: 664803 - DNA, 33 bp, Homo sapien
caatactgcagagagaaagaggtgacccttatt

SEQ ID NO: 664804 - DNA, 33 bp, Homo sapien
caatactgcagagagagagaggtgacccttatt

SEQ ID NO: 664805 - DNA, 33 bp, Homo sapien
catatttgtatgtttgaaagctcatttaggatg

SEQ ID NO: 664806 - DNA, 33 bp, Homo sapien
catatttgtatgtttgcaagctcatttaggatg

SEQ ID NO: 664807 - DNA, 33 bp, Homo sapien
agaaaaaggtagtgacagagtttgacattgttc

SEQ ID NO: 664808 - DNA, 33 bp, Homo sapien
agaaaaaggtagtgacggagtttgacattgttc

SEQ ID NO: 664809 - DNA, 33 bp, Homo sapien
tgtcgtgctttaccaacaattaaatgatttagc

SEQ ID NO: 664810 - DNA, 33 bp, Homo sapien
tgtcgtgctttaccaagaattaaatgatttagc

SEQ ID NO: 664811 - DNA, 33 bp, Homo sapien
attgtctactaagcaaggatggagatttgacac

SEQ ID NO: 664812 - DNA, 33 bp, Homo sapien
attgtctactaagcaatgatggagatttgacac

SEQ ID NO: 664813 - DNA, 33 bp, Homo sapien
ttattatgtgcaaccacatttccaaatcttcac

SEQ ID NO: 664814 - DNA, 33 bp, Homo sapien
ttattatgtgcaaccatatttccaaatcttcac

SEQ ID NO: 664815 - DNA, 33 bp, Homo sapien
taagggagtgtgaagtaaaaacagagtggcaac

SEQ ID NO: 664816 - DNA, 33 bp, Homo sapien
taagggagtgtgaagtgaaaacagagtggcaac

SEQ ID NO: 664817 - DNA, 33 bp, Homo sapien
aaggattagacaggtaagagagccacaaagtct

SEQ ID NO: 664818 - DNA, 33 bp, Homo sapien
aaggattagacaggtaggagagccacaaagtct

SEQ ID NO: 664819 - DNA, 33 bp, Homo sapien
agtagaaggaagttcacagcggactacttgtaa

SEQ ID NO: 664820 - DNA, 33 bp, Homo sapien
agtagaaggaagttcatagcggactacttgtaa

SEQ ID NO: 664821 - DNA, 33 bp, Homo sapien
agggaaagaggcataacaggtagctgagtgcat

SEQ ID NO: 664822 - DNA, 33 bp, Homo sapien
agggaaagaggcataataggtagctgagtgcat

SEQ ID NO: 664823 - DNA, 33 bp, Homo sapien
ttactgtgaacctagacgatcgcctgttttttg

SEQ ID NO: 664824 - DNA, 33 bp, Homo sapien
ttactgtgaacctagatgatcgcctgttttttg

SEQ ID NO: 664825 - DNA, 33 bp, Homo sapien
tctacaggagtacaaagtttctatgataagagc

SEQ ID NO: 664826 - DNA, 33 bp, Homo sapien
tctacaggagtacaaattttctatgataagagc

SEQ ID NO: 664827 - DNA, 33 bp, Homo sapien
ctccttctgggactccaattagttacatactag

SEQ ID NO: 664828 - DNA, 33 bp, Homo sapien
ctccttctgggactccgattagttacatactag

SEQ ID NO: 664829 - DNA, 33 bp, Homo sapien
tcctggtcccttcaaacatgttctcacatttca

SEQ ID NO: 664830 - DNA, 33 bp, Homo sapien
tcctggtcccttcaaatatgttctcacatttca

SEQ ID NO: 664831 - DNA, 33 bp, Homo sapien
actgaaagccaaaagaactgcattctcatccca

SEQ ID NO: 664832 - DNA, 33 bp, Homo sapien
actgaaagccaaaagacctgcattctcatccca

SEQ ID NO: 664833 - DNA, 33 bp, Homo sapien
aatgttgcaaaattccactctgtattctgagca

SEQ ID NO: 664834 - DNA, 33 bp, Homo sapien
aatgttgcaaaattccgctctgtattctgagca

SEQ ID NO: 664835 - DNA, 33 bp, Homo sapien
aaaagatcacctagcaagtaagcactgatagca

SEQ ID NO: 664836 - DNA, 33 bp, Homo sapien
aaaagatcacctagcacgtaagcactgatagca

SEQ ID NO: 664837 - DNA, 33 bp, Homo sapien
aaagtctttctctaacggcaaacctccctattt

SEQ ID NO: 664838 - DNA, 33 bp, Homo sapien
aaagtctttctctaactgcaaacctccctattt

SEQ ID NO: 664839 - DNA, 33 bp, Homo sapien
caaagcagaaaagaaaacaatggcagtatttca

SEQ ID NO: 664840 - DNA, 33 bp, Homo sapien
caaagcagaaaagaaagcaatggcagtatttca

SEQ ID NO: 664841 - DNA, 33 bp, Homo sapien
tatcttagaatgtgaaataacagctatttgagt

SEQ ID NO: 664842 - DNA, 33 bp, Homo sapien
tatcttagaatgtgaagtaacagctatttgagt

SEQ ID NO: 664843 - DNA, 33 bp, Homo sapien
ttattgatcatctatgaagtgaccggcacattt

SEQ ID NO: 664844 - DNA, 33 bp, Homo sapien
ttattgatcatctatggagtgaccggcacattt

SEQ ID NO: 664845 - DNA, 33 bp, Homo sapien
tcccaaagctccttgacctggtacagaacttca

SEQ ID NO: 664846 - DNA, 33 bp, Homo sapien
tcccaaagctccttgatctggtacagaacttca

SEQ ID NO: 664847 - DNA, 33 bp, Homo sapien
tttgtaccagtaccagaacaaacatcagtacca

SEQ ID NO: 664848 - DNA, 33 bp, Homo sapien
tttgtaccagtaccagtacaaacatcagtacca

SEQ ID NO: 664849 - DNA, 33 bp, Homo sapien
gatttcaaaccccctccattctagaactttcct

SEQ ID NO: 664850 - DNA, 33 bp, Homo sapien
gatttcaaaccccctctattctagaactttcct

SEQ ID NO: 664851 - DNA, 33 bp, Homo sapien
ttgcttacctgtccacaaatctagcttccagac

SEQ ID NO: 664852 - DNA, 33 bp, Homo sapien
ttgcttacctgtccacgaatctagcttccagac

SEQ ID NO: 664853 - DNA, 33 bp, Homo sapien
atgagaatgatctaacagcaaggataacacaca

SEQ ID NO: 664854 - DNA, 33 bp, Homo sapien
atgagaatgatctaaccgcaaggataacacaca

SEQ ID NO: 664855 - DNA, 33 bp, Homo sapien
cttagtgaatttcacccagcccatgttttcttg

SEQ ID NO: 664856 - DNA, 33 bp, Homo sapien
cttagtgaatttcacctagcccatgttttcttg

SEQ ID NO: 664857 - DNA, 33 bp, Homo sapien
gtaaatggcctattatcacagtgatatttagtg

SEQ ID NO: 664858 - DNA, 33 bp, Homo sapien
gtaaatggcctattattacagtgatatttagtg

SEQ ID NO: 664859 - DNA, 33 bp, Homo sapien
acataaagagctttcacggattaaaggtacaaa

SEQ ID NO: 664860 - DNA, 33 bp, Homo sapien
acataaagagctttcatggattaaaggtacaaa

SEQ ID NO: 664861 - DNA, 33 bp, Homo sapien
atgaggcacctgaacactaaatattcgtgatat

SEQ ID NO: 664862 - DNA, 33 bp, Homo sapien
atgaggcacctgaacattaaatattcgtgatat

SEQ ID NO: 664863 - DNA, 33 bp, Homo sapien
ccataatcagcatttgaaacataaggaagggtc

SEQ ID NO: 664864 - DNA, 33 bp, Homo sapien
ccataatcagcatttggaacataaggaagggtc

SEQ ID NO: 664865 - DNA, 33 bp, Homo sapien
ctgtctatgctactcccggaacaagctagtttt

SEQ ID NO: 664866 - DNA, 33 bp, Homo sapien
ctgtctatgctactcctggaacaagctagtttt

SEQ ID NO: 664867 - DNA, 33 bp, Homo sapien
aatgaatacagcgaaaatgacaatactgccaaa

SEQ ID NO: 664868 - DNA, 33 bp, Homo sapien
aatgaatacagcgaaagtgacaatactgccaaa

SEQ ID NO: 664869 - DNA, 33 bp, Homo sapien
tcaaagtggcatcatcacataaaaaataaacgt

SEQ ID NO: 664870 - DNA, 33 bp, Homo sapien
tcaaagtggcatcatcgcataaaaaataaacgt

SEQ ID NO: 664871 - DNA, 33 bp, Homo sapien
aagaagatctaccacagatgtcaactcttgaaa

SEQ ID NO: 664872 - DNA, 33 bp, Homo sapien
aagaagatctaccacatatgtcaactcttgaaa

SEQ ID NO: 664873 - DNA, 33 bp, Homo sapien
ctgttgaaaggatgaactcttaaatggttcaca

SEQ ID NO: 664874 - DNA, 33 bp, Homo sapien
ctgttgaaaggatgaattcttaaatggttcaca

SEQ ID NO: 664875 - DNA, 33 bp, Homo sapien
acatcatttggtatcaccactaatttttatttt

SEQ ID NO: 664876 - DNA, 33 bp, Homo sapien
acatcatttggtatcatcactaatttttatttt

SEQ ID NO: 664877 - DNA, 33 bp, Homo sapien
tttttcagaatctacaagtaagcaaaatgttct

SEQ ID NO: 664878 - DNA, 33 bp, Homo sapien
tttttcagaatctacaggtaagcaaaatgttct

SEQ ID NO: 664879 - DNA, 33 bp, Homo sapien
gccataagaaatggaaagaaagtcatattcatt

SEQ ID NO: 664880 - DNA, 33 bp, Homo sapien
gccataagaaatggaaggaaagtcatattcatt

SEQ ID NO: 664881 - DNA, 33 bp, Homo sapien
tattgctcaacgtttagactactattttgatac

SEQ ID NO: 664882 - DNA, 33 bp, Homo sapien
tattgctcaacgtttatactactattttgatac

SEQ ID NO: 664883 - DNA, 33 bp, Homo sapien; identical to SEQ ID NO: 664881

SEQ ID NO: 664884 - DNA, 33 bp, Homo sapien; identical to SEQ ID NO: 664882

SEQ ID NO: 664885 - DNA, 33 bp, Homo sapien
gaacgcatggaagaaaataaaaggctggtcagt

SEQ ID NO: 664886 - DNA, 33 bp, Homo sapien
gaacgcatggaagaaagtaaaaggctggtcagt

SEQ ID NO: 664887 - DNA, 33 bp, Homo sapien
catctacagaatcaaccggccattttctcccag

SEQ ID NO: 664888 - DNA, 33 bp, Homo sapien
catctacagaatcaactggccattttctcccag

SEQ ID NO: 664889 - DNA, 33 bp, Homo sapien
ctgactttaaacagcaaatcatgtaaagcataa

SEQ ID NO: 664890 - DNA, 33 bp, Homo sapien
ctgactttaaacagcagatcatgtaaagcataa

SEQ ID NO: 664891 - DNA, 33 bp, Homo sapien
aaaataaataataaccaaacagcagacctgaag

SEQ ID NO: 664892 - DNA, 33 bp, Homo sapien
aaaataaataataaccgaacagcagacctgaag

SEQ ID NO: 664893 - DNA, 33 bp, Homo sapien
cagcttttttgcatgacggataataataatagc

SEQ ID NO: 664894 - DNA, 33 bp, Homo sapien
cagcttttttgcatgatggataataataatagc

SEQ ID NO: 664895 - DNA, 33 bp, Homo sapien
caaagtaaggtgccagaaaaaggtcttagagtt

SEQ ID NO: 664896 - DNA, 33 bp, Homo sapien
caaagtaaggtgccaggaaaaggtcttagagtt

SEQ ID NO: 664897 - DNA, 33 bp, Homo sapien
gaaggaggactccataagtacatttcttgtatt

SEQ ID NO: 664898 - DNA, 33 bp, Homo sapien
gaaggaggactccataggtacatttcttgtatt

SEQ ID NO: 664899 - DNA, 33 bp, Homo sapien
ggaaggaagatgacaaattaggcttacagatct

SEQ ID NO: 664900 - DNA, 33 bp, Homo sapien
ggaaggaagatgacaagttaggcttacagatct

SEQ ID NO: 664901 - DNA, 33 bp, Homo sapien
attctgggcagttagaacatcaataggtgagta

SEQ ID NO: 664902 - DNA, 33 bp, Homo sapien
attctgggcagttagatcatcaataggtgagta

SEQ ID NO: 664903 - DNA, 33 bp, Homo sapien
aataaaggtattatacaagccatattgctgtga

SEQ ID NO: 664904 - DNA, 33 bp, Homo sapien
aataaaggtattataccagccatattgctgtga

SEQ ID NO: 664905 - DNA, 33 bp, Homo sapien
aaagtttgtcaattccacaaaatgttaaatgta

SEQ ID NO: 664906 - DNA, 33 bp, Homo sapien
aaagtttgtcaattcctcaaaatgttaaatgta

SEQ ID NO: 664907 - DNA, 33 bp, Homo sapien
ttcatgtaacccagaaaaggtaatcataaaaat

SEQ ID NO: 664908 - DNA, 33 bp, Homo sapien
ttcatgtaacccagaagaggtaatcataaaaat

SEQ ID NO: 664909 - DNA, 33 bp, Homo sapien
cctatttgttttagaaagatggcactagcaaaa

SEQ ID NO: 664910 - DNA, 33 bp, Homo sapien
cctatttgttttagaatgatggcactagcaaaa

SEQ ID NO: 664911 - DNA, 33 bp, Homo sapien
gattgctttttaggaaacatactcagatatata

SEQ ID NO: 664912 - DNA, 33 bp, Homo sapien
gattgctttttaggaagcatactcagatatata

SEQ ID NO: 664913 - DNA, 33 bp, Homo sapien
taaactcagagatgataaacagtaactctagtg

SEQ ID NO: 664914 - DNA, 33 bp, Homo sapien
taaactcagagatgatgaacagtaactctagtg

SEQ ID NO: 664915 - DNA, 33 bp, Homo sapien
cctgtcctaaaatttacaaggcaagtcatattt

SEQ ID NO: 664916 - DNA, 33 bp, Homo sapien
cctgtcctaaaatttataaggcaagtcatattt

SEQ ID NO: 664917 - DNA, 33 bp, Homo sapien
catggagtaccaagagcagcaagagtggaatct

SEQ ID NO: 664918 - DNA, 33 bp, Homo sapien
catggagtaccaagaggagcaagagtggaatct

SEQ ID NO: 664919 - DNA, 33 bp, Homo sapien
ctaatagctagactcacatatccattagcctgc

SEQ ID NO: 664920 - DNA, 33 bp, Homo sapien
ctaatagctagactcatatatccattagcctgc

SEQ ID NO: 664921 - DNA, 33 bp, Homo sapien
taccgaaataatcagaaatgttgaaacgttttc

SEQ ID NO: 664922 - DNA, 33 bp, Homo sapien
taccgaaataatcagagatgttgaaacgttttc

SEQ ID NO: 664923 - DNA, 33 bp, Homo sapien
ttaaggcatttctacactcttccctcttccttt

SEQ ID NO: 664924 - DNA, 33 bp, Homo sapien
ttaaggcatttctacattcttccctcttccttt

SEQ ID NO: 664925 - DNA, 33 bp, Homo sapien
gcattggtggtagccactcatgtacaaatcact

SEQ ID NO: 664926 - DNA, 33 bp, Homo sapien
gcattggtggtagccattcatgtacaaatcact

SEQ ID NO: 664927 - DNA, 33 bp, Homo sapien
tagagcattcgtaaaacacataggagtaaacca

SEQ ID NO: 664928 - DNA, 33 bp, Homo sapien
tagagcattcgtaaaatacataggagtaaacca

SEQ ID NO: 664929 - DNA, 33 bp, Homo sapien
atggagatttcataaactctcaattaaccttaa

SEQ ID NO: 664930 - DNA, 33 bp, Homo sapien
atggagatttcataaagtctcaattaaccttaa

SEQ ID NO: 664931 - DNA, 33 bp, Homo sapien
atttctttggtctttagagcaagaatatatttt

SEQ ID NO: 664932 - DNA, 33 bp, Homo sapien
atttctttggtctttatagcaagaatatatttt

SEQ ID NO: 664933 - DNA, 33 bp, Homo sapien
ggtagagtagtgaagccctcaacttgctcttac

SEQ ID NO: 664934 - DNA, 33 bp, Homo sapien
ggtagagtagtgaagctctcaacttgctcttac

SEQ ID NO: 664935 - DNA, 33 bp, Homo sapien
gtaaataggctactccagcgaaggtgctaagtc

SEQ ID NO: 664936 - DNA, 33 bp, Homo sapien
gtaaataggctactccggcgaaggtgctaagtc

SEQ ID NO: 664937 - DNA, 33 bp, Homo sapien
gtgtcagtcattctacgaagcactttatttgcc

SEQ ID NO: 664938 - DNA, 33 bp, Homo sapien
gtgtcagtcattctactaagcactttatttgcc

SEQ ID NO: 664939 - DNA, 33 bp, Homo sapien
tgttggttttcatccaagtatagtcaatgttag

SEQ ID NO: 664940 - DNA, 33 bp, Homo sapien
tgttggttttcatccaggtatagtcaatgttag

SEQ ID NO: 664941 - DNA, 33 bp, Homo sapien
tcaaaatgtaaatgagaactctcgcttgggcta

SEQ ID NO: 664942 - DNA, 33 bp, Homo sapien
tcaaaatgtaaatgaggactctcgcttgggcta

SEQ ID NO: 664943 - DNA, 33 bp, Homo sapien
ctttcctccaatttaaactctagcataaacctg

SEQ ID NO: 664944 - DNA, 33 bp, Homo sapien
ctttcctccaatttaatctctagcataaacctg

SEQ ID NO: 664945 - DNA, 33 bp, Homo sapien
tattgcaaagtatatgaaagtggttaaccctgt

SEQ ID NO: 664946 - DNA, 33 bp, Homo sapien
tattgcaaagtatatgcaagtggttaaccctgt

SEQ ID NO: 664947 - DNA, 33 bp, Homo sapien
gatgggatgtttttccactcatttgtgtcctat

SEQ ID NO: 664948 - DNA, 33 bp, Homo sapien
gatgggatgtttttcctctcatttgtgtcctat

SEQ ID NO: 664949 - DNA, 33 bp, Homo sapien
gcacctacttaactgaaatgtccccagtctgct

SEQ ID NO: 664950 - DNA, 33 bp, Homo sapien
gcacctacttaactgatatgtccccagtctgct

SEQ ID NO: 664951 - DNA, 33 bp, Homo sapien
gtttaccaccgagaaaagtgatctttatgtctc

SEQ ID NO: 664952 - DNA, 33 bp, Homo sapien
gtttaccaccgagaaaggtgatctttatgtctc

SEQ ID NO: 664953 - DNA, 33 bp, Homo sapien
agttctcctttcatcaataacacttgtagggac

SEQ ID NO: 664954 - DNA, 33 bp, Homo sapien
agttctcctttcatcagtaacacttgtagggac

SEQ ID NO: 664955 - DNA, 33 bp, Homo sapien
catggaatgtaataagccattttttaaagctat

SEQ ID NO: 664956 - DNA, 33 bp, Homo sapien
catggaatgtaataagtcattttttaaagctat

SEQ ID NO: 664957 - DNA, 33 bp, Homo sapien
tacattcccaccaacagaggacaagagtttttc

SEQ ID NO: 664958 - DNA, 33 bp, Homo sapien
tacattcccaccaacataggacaagagtttttc

SEQ ID NO: 664959 - DNA, 33 bp, Homo sapien
ttgcctctttacaagacgttggcattgttttca

SEQ ID NO: 664960 - DNA, 33 bp, Homo sapien
ttgcctctttacaagatgttggcattgttttca

SEQ ID NO: 664961 - DNA, 33 bp, Homo sapien
actcttttgtgtaaagacaaggaaaaatatatt

SEQ ID NO: 664962 - DNA, 33 bp, Homo sapien
actcttttgtgtaaagtcaaggaaaaatatatt

SEQ ID NO: 664963 - DNA, 33 bp, Homo sapien
ttattatagaaacgtaaatatgttggcaatgct

SEQ ID NO: 664964 - DNA, 33 bp, Homo sapien
ttattatagaaacgtacatatgttggcaatgct

SEQ ID NO: 664965 - DNA, 33 bp, Homo sapien
agataaaaatcgctggaatgtcaaccttttacc

SEQ ID NO: 664966 - DNA, 33 bp, Homo sapien
agataaaaatcgctgggatgtcaaccttttacc

SEQ ID NO: 664967 - DNA, 33 bp, Homo sapien
ctccttgctggcaaaaattgtaagttttagata

SEQ ID NO: 664968 - DNA, 33 bp, Homo sapien
ctccttgctggcaaaatttgtaagttttagata

SEQ ID NO: 664969 - DNA, 33 bp, Homo sapien
tggattctatggatcaagtaagttggttattca

SEQ ID NO: 664970 - DNA, 33 bp, Homo sapien
tggattctatggatcaggtaagttggttattca

SEQ ID NO: 664971 - DNA, 33 bp, Homo sapien
tccttgctggactctcaaaacaaaatgtgctta

SEQ ID NO: 664972 - DNA, 33 bp, Homo sapien
tccttgctggactctcgaaacaaaatgtgctta

SEQ ID NO: 664973 - DNA, 33 bp, Homo sapien
ccaacaccacaactacacataaacagtgaggca

SEQ ID NO: 664974 - DNA, 33 bp, Homo sapien
ccaacaccacaactacccataaacagtgaggca

SEQ ID NO: 664975 - DNA, 33 bp, Homo sapien
aagaataacagaaatacgctcttgcacttaaca

SEQ ID NO: 664976 - DNA, 33 bp, Homo sapien
aagaataacagaaatatgctcttgcacttaaca

SEQ ID NO: 664977 - DNA, 33 bp, Homo sapien
gtattaatctttaactcacattcaaaagaaaag

SEQ ID NO: 664978 - DNA, 33 bp, Homo sapien
gtattaatctttaactgacattcaaaagaaaag

SEQ ID NO: 664979 - DNA, 33 bp, Homo sapien
agaagttggtctaacacggagacaatagctata

SEQ ID NO: 664980 - DNA, 33 bp, Homo sapien
agaagttggtctaacatggagacaatagctata

SEQ ID NO: 664981 - DNA, 33 bp, Homo sapien
caggcacacagaaaataaagttgctttctacaa

SEQ ID NO: 664982 - DNA, 33 bp, Homo sapien
caggcacacagaaaatgaagttgctttctacaa

SEQ ID NO: 664983 - DNA, 33 bp, Homo sapien
tttgttgaatctgtacacttgagaataatcttt

SEQ ID NO: 664984 - DNA, 33 bp, Homo sapien
tttgttgaatctgtacgcttgagaataatcttt

SEQ ID NO: 664985 - DNA, 33 bp, Homo sapien
atcacctaagtatccaacctagcaagccttagc

SEQ ID NO: 664986 - DNA, 33 bp, Homo sapien
atcacctaagtatccatcctagcaagccttagc

SEQ ID NO: 664987 - DNA, 33 bp, Homo sapien
agccaaaggaaattgacaacataccccatgcaa

SEQ ID NO: 664988 - DNA, 33 bp, Homo sapien
agccaaaggaaattgataacataccccatgcaa

SEQ ID NO: 664989 - DNA, 33 bp, Homo sapien
acaaagtagagaaaaggagctcagccaattatt

SEQ ID NO: 664990 - DNA, 33 bp, Homo sapien
acaaagtagagaaaagtagctcagccaattatt

SEQ ID NO: 664991 - DNA, 33 bp, Homo sapien
gaggctagagaatatacagattgtgattagctt

SEQ ID NO: 664992 - DNA, 33 bp, Homo sapien
gaggctagagaatatagagattgtgattagctt

SEQ ID NO: 664993 - DNA, 33 bp, Homo sapien
aaaggtacatgataggcacaagacatattgtgc

SEQ ID NO: 664994 - DNA, 33 bp, Homo sapien
aaaggtacatgataggtacaagacatattgtgc

SEQ ID NO: 664995 - DNA, 33 bp, Homo sapien
taaatttgcattgattcaaggacaaaatttctg

SEQ ID NO: 664996 - DNA, 33 bp, Homo sapien
taaatttgcattgatttaaggacaaaatttctg

SEQ ID NO: 664997 - DNA, 33 bp, Homo sapien
aatctcctccatgacaaaacttcagctttggtt

SEQ ID NO: 664998 - DNA, 33 bp, Homo sapien
aatctcctccatgacacaacttcagctttggtt

SEQ ID NO: 664999 - DNA, 33 bp, Homo sapien
aaggtgcattcttcaacattttccaaacctatt

SEQ ID NO: 665000 - DNA, 33 bp, Homo sapien
aaggtgcattcttcaatattttccaaacctatt

SEQ ID NO: 665001 - DNA, 33 bp, Homo sapien
aagaggataatggctgaagattttttggtttgt

SEQ ID NO: 665002 - DNA, 33 bp, Homo sapien
aagaggataatggctgcagattttttggtttgt

SEQ ID NO: 665003 - DNA, 33 bp, Homo sapien
aaagatatgtggacagacctttctaaatgggca

SEQ ID NO: 665004 - DNA, 33 bp, Homo sapien
aaagatatgtggacaggcctttctaaatgggca

SEQ ID NO: 665005 - DNA, 33 bp, Homo sapien
gagattgtgcagaaaaactctcacttttagaac

SEQ ID NO: 665006 - DNA, 33 bp, Homo sapien
gagattgtgcagaaaacctctcacttttagaac

SEQ ID NO: 665007 - DNA, 33 bp, Homo sapien
gtataaataatttataccttagtctgcactgta

SEQ ID NO: 665008 - DNA, 33 bp, Homo sapien
gtataaataatttatagcttagtctgcactgta

SEQ ID NO: 665009 - DNA, 33 bp, Homo sapien
gagtttagactctaaacgttcttatcccagaaa

SEQ ID NO: 665010 - DNA, 33 bp, Homo sapien
gagtttagactctaaatgttcttatcccagaaa

SEQ ID NO: 665011 - DNA, 33 bp, Homo sapien
gaattctagactgcagaactgtgtgagggaaaa

SEQ ID NO: 665012 - DNA, 33 bp, Homo sapien
gaattctagactgcaggactgtgtgagggaaaa

SEQ ID NO: 665013 - DNA, 33 bp, Homo sapien
atcagtgatttcccaactgatatacttttgaat

SEQ ID NO: 665014 - DNA, 33 bp, Homo sapien
atcagtgatttcccaagtgatatacttttgaat

SEQ ID NO: 665015 - DNA, 33 bp, Homo sapien
tccctctgcaaaggaacttaaggaatatataat

SEQ ID NO: 665016 - DNA, 33 bp, Homo sapien
tccctctgcaaaggaatttaaggaatatataat

SEQ ID NO: 665017 - DNA, 33 bp, Homo sapien
cctgtttttctatagcacaatcatggaaaagac

SEQ ID NO: 665018 - DNA, 33 bp, Homo sapien
cctgtttttctatagctcaatcatggaaaagac

SEQ ID NO: 665019 - DNA, 33 bp, Homo sapien
acagagatctttgttacgctattggtgacatac

SEQ ID NO: 665020 - DNA, 33 bp, Homo sapien
acagagatctttgttatgctattggtgacatac

SEQ ID NO: 665021 - DNA, 33 bp, Homo sapien
gcactttaaggaaaaaaatctgcatcaacttta

SEQ ID NO: 665022 - DNA, 33 bp, Homo sapien
gcactttaaggaaaaatatctgcatcaacttta

SEQ ID NO: 665023 - DNA, 33 bp, Homo sapien
tgattaaaaacagatcacaaagaacaagtggaa

SEQ ID NO: 665024 - DNA, 33 bp, Homo sapien
tgattaaaaacagatcgcaaagaacaagtggaa

SEQ ID NO: 665025 - DNA, 33 bp, Homo sapien
atgcaacaaatgcaaccaattaataatgtctaa

SEQ ID NO: 665026 - DNA, 33 bp, Homo sapien
atgcaacaaatgcaacgaattaataatgtctaa

SEQ ID NO: 665027 - DNA, 33 bp, Homo sapien
cttgcttggagcactacaaaagtcttctaaatt

SEQ ID NO: 665028 - DNA, 33 bp, Homo sapien
cttgcttggagcactataaaagtcttctaaatt

SEQ ID NO: 665029 - DNA, 33 bp, Homo sapien
taacatagggatttcagaaaagctagcatcagc

SEQ ID NO: 665030 - DNA, 33 bp, Homo sapien
taacatagggatttcataaaagctagcatcagc

SEQ ID NO: 665031 - DNA, 33 bp, Homo sapien
tctcctgactacataccaaaaaccccacccagg

SEQ ID NO: 665032 - DNA, 33 bp, Homo sapien
tctcctgactacatacgaaaaaccccacccagg

SEQ ID NO: 665033 - DNA, 33 bp, Homo sapien
aatcaccagtattaaactctgatcatgacttta

SEQ ID NO: 665034 - DNA, 33 bp, Homo sapien
aatcaccagtattaaattctgatcatgacttta

SEQ ID NO: 665035 - DNA, 33 bp, Homo sapien
tagccatgtaaaattacgccaggttcaaaaagc

SEQ ID NO: 665036 - DNA, 33 bp, Homo sapien
tagccatgtaaaattaggccaggttcaaaaagc

SEQ ID NO: 665037 - DNA, 33 bp, Homo sapien
ctagtaaacctcatcaaatcctgactattaaaa

SEQ ID NO: 665038 - DNA, 33 bp, Homo sapien
ctagtaaacctcatcagatcctgactattaaaa

SEQ ID NO: 665039 - DNA, 33 bp, Homo sapien
ttcaaggagcaaataccaagtcaatatacatga

SEQ ID NO: 665040 - DNA, 33 bp, Homo sapien
ttcaaggagcaaatactaagtcaatatacatga

SEQ ID NO: 665041 - DNA, 33 bp, Homo sapien
agaaattagtgcagtaaatttatagggtcatac

SEQ ID NO: 665042 - DNA, 33 bp, Homo sapien
agaaattagtgcagtacatttatagggtcatac

SEQ ID NO: 665043 - DNA, 33 bp, Homo sapien
acatcttcataatcacaaaaatggcgaaaaatt

SEQ ID NO: 665044 - DNA, 33 bp, Homo sapien
acatcttcataatcactaaaatggcgaaaaatt

SEQ ID NO: 665045 - DNA, 33 bp, Homo sapien
agtaattcaaaactcaacggtatcaatttctac

SEQ ID NO: 665046 - DNA, 33 bp, Homo sapien
agtaattcaaaactcatcggtatcaatttctac

SEQ ID NO: 665047 - DNA, 33 bp, Homo sapien
tagtggcaaagagagaagtttaggagatatgag

SEQ ID NO: 665048 - DNA, 33 bp, Homo sapien
tagtggcaaagagagaggtttaggagatatgag

SEQ ID NO: 665049 - DNA, 33 bp, Homo sapien
atcacaagaaaaagaaaggtgagcacagtacaa

SEQ ID NO: 665050 - DNA, 33 bp, Homo sapien
atcacaagaaaaagaagggtgagcacagtacaa

SEQ ID NO: 665051 - DNA, 33 bp, Homo sapien
gatttggctatcttctaactctatcattcccct

SEQ ID NO: 665052 - DNA, 33 bp, Homo sapien
gatttggctatcttctgactctatcattcccct

SEQ ID NO: 665053 - DNA, 33 bp, Homo sapien
caattctgcataccaacatactaaaagtagaac

SEQ ID NO: 665054 - DNA, 33 bp, Homo sapien
caattctgcataccaatatactaaaagtagaac

SEQ ID NO: 665055 - DNA, 33 bp, Homo sapien
tttaatgaaatttcacggattactatcttgctt

SEQ ID NO: 665056 - DNA, 33 bp, Homo sapien
tttaatgaaatttcactgattactatcttgctt

SEQ ID NO: 665057 - DNA, 33 bp, Homo sapien
aactttgatttcgaaactaatgattgtgtttga

SEQ ID NO: 665058 - DNA, 33 bp, Homo sapien
aactttgatttcgaaagtaatgattgtgtttga

SEQ ID NO: 665059 - DNA, 33 bp, Homo sapien
aagagcacatggctaagaagaattttgagcaat

SEQ ID NO: 665060 - DNA, 33 bp, Homo sapien
aagagcacatggctaataagaattttgagcaat

SEQ ID NO: 665061 - DNA, 33 bp, Homo sapien
gtagttcaatttcaaaacacaaaaaagtatctg

SEQ ID NO: 665062 - DNA, 33 bp, Homo sapien
gtagttcaatttcaaatcacaaaaaagtatctg

SEQ ID NO: 665063 - DNA, 33 bp, Homo sapien
tggaaaagcagaaatgcaacagggagttgagct

SEQ ID NO: 665064 - DNA, 33 bp, Homo sapien
tggaaaagcagaaatgtaacagggagttgagct

SEQ ID NO: 665065 - DNA, 33 bp, Homo sapien
taagctcattctaacccctaagtccatacacta

SEQ ID NO: 665066 - DNA, 33 bp, Homo sapien
taagctcattctaacctctaagtccatacacta

SEQ ID NO: 665067 - DNA, 33 bp, Homo sapien
ttatgttgaacaaaaaaccagtggaaaactcat

SEQ ID NO: 665068 - DNA, 33 bp, Homo sapien
ttatgttgaacaaaaagccagtggaaaactcat

SEQ ID NO: 665069 - DNA, 33 bp, Homo sapien
ctaaaattgcaggtcacgttataggtagaagga

SEQ ID NO: 665070 - DNA, 33 bp, Homo sapien
ctaaaattgcaggtcatgttataggtagaagga

SEQ ID NO: 665071 - DNA, 33 bp, Homo sapien
cgtaaatttatgagaagagtcacacttcctgtt

SEQ ID NO: 665072 - DNA, 33 bp, Homo sapien
cgtaaatttatgagaatagtcacacttcctgtt

SEQ ID NO: 665073 - DNA, 33 bp, Homo sapien
tgtctatatgggggctaagaaaaccttgaaaaa

SEQ ID NO: 665074 - DNA, 33 bp, Homo sapien
tgtctatatgggggctgagaaaaccttgaaaaa

SEQ ID NO: 665075 - DNA, 33 bp, Homo sapien
tatcaacaatatcctacggaccgggcagaattg

SEQ ID NO: 665076 - DNA, 33 bp, Homo sapien
tatcaacaatatcctatggaccgggcagaattg

SEQ ID NO: 665077 - DNA, 33 bp, Homo sapien
cacacacacaagaatcgctatcagtcaaataaa

SEQ ID NO: 665078 - DNA, 33 bp, Homo sapien
cacacacacaagaatctctatcagtcaaataaa

SEQ ID NO: 665079 - DNA, 33 bp, Homo sapien
taatagataaaatggcaaaatgtgaccttccgg

SEQ ID NO: 665080 - DNA, 33 bp, Homo sapien
taatagataaaatggcgaaatgtgaccttccgg

SEQ ID NO: 665081 - DNA, 33 bp, Homo sapien
gaatactgaagtatagcaagagttgttttggac

SEQ ID NO: 665082 - DNA, 33 bp, Homo sapien
gaatactgaagtataggaagagttgttttggac

SEQ ID NO: 665083 - DNA, 33 bp, Homo sapien
caatcaaaggtaaccaactatccgaactgtgtt

SEQ ID NO: 665084 - DNA, 33 bp, Homo sapien
caatcaaaggtaaccagctatccgaactgtgtt

SEQ ID NO: 665085 - DNA, 33 bp, Homo sapien
ttttctttgagactccaagctcttattcccaac

SEQ ID NO: 665086 - DNA, 33 bp, Homo sapien
ttttctttgagactccgagctcttattcccaac

SEQ ID NO: 665087 - DNA, 33 bp, Homo sapien
aattgaatcaaaggcacaaatggagaaatctga

SEQ ID NO: 665088 - DNA, 33 bp, Homo sapien
aattgaatcaaaggcagaaatggagaaatctga

SEQ ID NO: 665089 - DNA, 33 bp, Homo sapien
tgaatgttattagaaccaaataagagcctgctc

SEQ ID NO: 665090 - DNA, 33 bp, Homo sapien
tgaatgttattagaacgaaataagagcctgctc

SEQ ID NO: 665091 - DNA, 33 bp, Homo sapien
aatccaaatgtgttcaagtaagctaatgccttc

SEQ ID NO: 665092 - DNA, 33 bp, Homo sapien
aatccaaatgtgttcaggtaagctaatgccttc

SEQ ID NO: 665093 - DNA, 33 bp, Homo sapien
cttttgtcatcttaaccgcaagtcaacccaata

SEQ ID NO: 665094 - DNA, 33 bp, Homo sapien
cttttgtcatcttaactgcaagtcaacccaata

SEQ ID NO: 665095 - DNA, 33 bp, Homo sapien
ccattatcaaaccacacaaggggtgctcagtca

SEQ ID NO: 665096 - DNA, 33 bp, Homo sapien
ccattatcaaaccacagaaggggtgctcagtca

SEQ ID NO: 665097 - DNA, 33 bp, Homo sapien
aagaaatgggaaagtacgggcaattcaaagggt

SEQ ID NO: 665098 - DNA, 33 bp, Homo sapien
aagaaatgggaaagtatgggcaattcaaagggt

SEQ ID NO: 665099 - DNA, 33 bp, Homo sapien
ataacatcgatttctgcatttttatatggttaa

SEQ ID NO: 665100 - DNA, 33 bp, Homo sapien
ataacatcgatttctggatttttatatggttaa

SEQ ID NO: 665101 - DNA, 33 bp, Homo sapien
aggatggacagaattaagaaaaataactaatgg

SEQ ID NO: 665102 - DNA, 33 bp, Homo sapien
aggatggacagaattaggaaaaataactaatgg

SEQ ID NO: 665103 - DNA, 33 bp, Homo sapien
attttcaaaatgttcaatcagttaaaccaatat

SEQ ID NO: 665104 - DNA, 33 bp, Homo sapien
attttcaaaatgttcagtcagttaaaccaatat

SEQ ID NO: 665105 - DNA, 33 bp, Homo sapien
aaatcaactaagaaacagtgaagttagtctaca

SEQ ID NO: 665106 - DNA, 33 bp, Homo sapien
aaatcaactaagaaacggtgaagttagtctaca

SEQ ID NO: 665107 - DNA, 33 bp, Homo sapien
tataaagcaaatattaacaagccataaaggtga

SEQ ID NO: 665108 - DNA, 33 bp, Homo sapien
tataaagcaaatattagcaagccataaaggtga

SEQ ID NO: 665109 - DNA, 33 bp, Homo sapien
ctgctattgttgaatgaagggatctgtaaatat

SEQ ID NO: 665110 - DNA, 33 bp, Homo sapien
ctgctattgttgaatggagggatctgtaaatat

SEQ ID NO: 665111 - DNA, 33 bp, Homo sapien
aaattaaaagacctaggaggcatgaaatcaata

SEQ ID NO: 665112 - DNA, 33 bp, Homo sapien
aaattaaaagacctagtaggcatgaaatcaata

SEQ ID NO: 665113 - DNA, 33 bp, Homo sapien
aactctggttaagatacgtattaggaggcaaca

SEQ ID NO: 665114 - DNA, 33 bp, Homo sapien
aactctggttaagatatgtattaggaggcaaca

SEQ ID NO: 665115 - DNA, 33 bp, Homo sapien
ctctcctttactgcaagatcaagcactatgtct

SEQ ID NO: 665116 - DNA, 33 bp, Homo sapien
ctctcctttactgcaatatcaagcactatgtct

SEQ ID NO: 665117 - DNA, 33 bp, Homo sapien
tgttacgacaggcagtgaaatttcaggtgaata

SEQ ID NO: 665118 - DNA, 33 bp, Homo sapien
tgttacgacaggcagttaaatttcaggtgaata

SEQ ID NO: 665119 - DNA, 33 bp, Homo sapien
aagactatgggccaaccgtcagaaaagtgctaa

SEQ ID NO: 665120 - DNA, 33 bp, Homo sapien
aagactatgggccaactgtcagaaaagtgctaa

SEQ ID NO: 665121 - DNA, 33 bp, Homo sapien
cttagaatactcatggcatcataatggctactg

SEQ ID NO: 665122 - DNA, 33 bp, Homo sapien
cttagaatactcatgggatcataatggctactg

SEQ ID NO: 665123 - DNA, 33 bp, Homo sapien
ttctgcatattcactacgaaaaattagaaacaa

SEQ ID NO: 665124 - DNA, 33 bp, Homo sapien
ttctgcatattcactaggaaaaattagaaacaa

SEQ ID NO: 665125 - DNA, 33 bp, Homo sapien
aagaatagaaaaccacaatgctgactgataaca

SEQ ID NO: 665126 - DNA, 33 bp, Homo sapien
aagaatagaaaaccacgatgctgactgataaca

SEQ ID NO: 665127 - DNA, 33 bp, Homo sapien
gcttaaagttacatccacgtcattctgaattag

SEQ ID NO: 665128 - DNA, 33 bp, Homo sapien
gcttaaagttacatccgcgtcattctgaattag

SEQ ID NO: 665129 - DNA, 33 bp, Homo sapien
atccatgagttcatacagatataaatacaacac

SEQ ID NO: 665130 - DNA, 33 bp, Homo sapien
atccatgagttcataccgatataaatacaacac

SEQ ID NO: 665131 - DNA, 33 bp, Homo sapien
actatgtttttttccacgttcccattctggtgt

SEQ ID NO: 665132 - DNA, 33 bp, Homo sapien
actatgtttttttccatgttcccattctggtgt

SEQ ID NO: 665133 - DNA, 33 bp, Homo sapien
catgcagtacttgaaactcccctgattcaataa

SEQ ID NO: 665134 - DNA, 33 bp, Homo sapien
catgcagtacttgaaattcccctgattcaataa

SEQ ID NO: 665135 - DNA, 33 bp, Homo sapien
tagaagccatcacttgaataactcgtgtctgtt

SEQ ID NO: 665136 - DNA, 33 bp, Homo sapien
tagaagccatcacttgtataactcgtgtctgtt

SEQ ID NO: 665137 - DNA, 33 bp, Homo sapien
gaagaatcagtcattcacaacttagaaaacaga

SEQ ID NO: 665138 - DNA, 33 bp, Homo sapien
gaagaatcagtcattcgcaacttagaaaacaga

SEQ ID NO: 665139 - DNA, 33 bp, Homo sapien
aggacacatttcctaaaaatgaactggtgcaga

SEQ ID NO: 665140 - DNA, 33 bp, Homo sapien
aggacacatttcctaagaatgaactggtgcaga

SEQ ID NO: 665141 - DNA, 33 bp, Homo sapien
aacacattgaaatgaaaagttagttggaattta

SEQ ID NO: 665142 - DNA, 33 bp, Homo sapien
aacacattgaaatgaagagttagttggaattta

SEQ ID NO: 665143 - DNA, 33 bp, Homo sapien
atataatgtctaggaaattccatttggtaaact

SEQ ID NO: 665144 - DNA, 33 bp, Homo sapien
atataatgtctaggaagttccatttggtaaact

SEQ ID NO: 665145 - DNA, 33 bp, Homo sapien
tacacacaaatcgacaaactggattacactgaa

SEQ ID NO: 665146 - DNA, 33 bp, Homo sapien
tacacacaaatcgacacactggattacactgaa

SEQ ID NO: 665147 - DNA, 33 bp, Homo sapien
tagaactgatcacttcacacccatattcagctc

SEQ ID NO: 665148 - DNA, 33 bp, Homo sapien
tagaactgatcacttcgcacccatattcagctc

SEQ ID NO: 665149 - DNA, 33 bp, Homo sapien
gtgtgtgttacagcaactcttttagctttgcca

SEQ ID NO: 665150 - DNA, 33 bp, Homo sapien
gtgtgtgttacagcaagtcttttagctttgcca

SEQ ID NO: 665151 - DNA, 33 bp, Homo sapien
cctctctcctgagaaaagaacacttgttgggat

SEQ ID NO: 665152 - DNA, 33 bp, Homo sapien
cctctctcctgagaaatgaacacttgttgggat

SEQ ID NO: 665153 - DNA, 33 bp, Homo sapien
catgccacagtctatcaccttcataaagtgttc

SEQ ID NO: 665154 - DNA, 33 bp, Homo sapien
catgccacagtctatcgccttcataaagtgttc

SEQ ID NO: 665155 - DNA, 33 bp, Homo sapien
cgtaatctacagtctaaccatgctgcattgttt

SEQ ID NO: 665156 - DNA, 33 bp, Homo sapien
cgtaatctacagtctagccatgctgcattgttt

SEQ ID NO: 665157 - DNA, 33 bp, Homo sapien
ctggctgaaaaatacaataaacacaatgaaaca

SEQ ID NO: 665158 - DNA, 33 bp, Homo sapien
ctggctgaaaaatacagtaaacacaatgaaaca

SEQ ID NO: 665159 - DNA, 33 bp, Homo sapien
ctaagttgtggattcacgtagctagcccatgct

SEQ ID NO: 665160 - DNA, 33 bp, Homo sapien
ctaagttgtggattcatgtagctagcccatgct

SEQ ID NO: 665161 - DNA, 33 bp, Homo sapien
tgcctttctttacttccctgagctgcacaatag

SEQ ID NO: 665162 - DNA, 33 bp, Homo sapien
tgcctttctttacttctctgagctgcacaatag

SEQ ID NO: 665163 - DNA, 33 bp, Homo sapien
tatctcaaaagccagactccctgattgccactg

SEQ ID NO: 665164 - DNA, 33 bp, Homo sapien
tatctcaaaagccagattccctgattgccactg

SEQ ID NO: 665165 - DNA, 33 bp, Homo sapien
tcatttgaatagatgccgaaaactcatttgaca

SEQ ID NO: 665166 - DNA, 33 bp, Homo sapien
tcatttgaatagatgctgaaaactcatttgaca

SEQ ID NO: 665167 - DNA, 33 bp, Homo sapien
catggaccccattgcaaacgtaggagcagctat

SEQ ID NO: 665168 - DNA, 33 bp, Homo sapien
catggaccccattgcagacgtaggagcagctat

SEQ ID NO: 665169 - DNA, 33 bp, Homo sapien
agaatccacactcaccaaagcacctggtaacaa

SEQ ID NO: 665170 - DNA, 33 bp, Homo sapien
agaatccacactcaccgaagcacctggtaacaa

SEQ ID NO: 665171 - DNA, 33 bp, Homo sapien
tgtaactattggtacaaattggaatggcagttt

SEQ ID NO: 665172 - DNA, 33 bp, Homo sapien
tgtaactattggtacacattggaatggcagttt

SEQ ID NO: 665173 - DNA, 33 bp, Homo sapien
ttcaagtttataatcacgcaaaagcagcattca

SEQ ID NO: 665174 - DNA, 33 bp, Homo sapien
ttcaagtttataatcatgcaaaagcagcattca

SEQ ID NO: 665175 - DNA, 33 bp, Homo sapien
tttgctttagaaattgcatgaatctttgggtat

SEQ ID NO: 665176 - DNA, 33 bp, Homo sapien
tttgctttagaaattgtatgaatctttgggtat

SEQ ID NO: 665177 - DNA, 33 bp, Homo sapien
aaggcaaattttagagcagaagtgaaaggttat

SEQ ID NO: 665178 - DNA, 33 bp, Homo sapien
aaggcaaattttagagtagaagtgaaaggttat

SEQ ID NO: 665179 - DNA, 33 bp, Homo sapien
accaaaaaggagcaaacgtacaagactaacaac

SEQ ID NO: 665180 - DNA, 33 bp, Homo sapien
accaaaaaggagcaaatgtacaagactaacaac

SEQ ID NO: 665181 - DNA, 33 bp, Homo sapien
aaggggaagaacccagacgaaccatttccagct

SEQ ID NO: 665182 - DNA, 33 bp, Homo sapien
aaggggaagaacccagccgaaccatttccagct

SEQ ID NO: 665183 - DNA, 33 bp, Homo sapien
tctgtacttccattaacatatctgatcctcaat

SEQ ID NO: 665184 - DNA, 33 bp, Homo sapien
tctgtacttccattaatatatctgatcctcaat

SEQ ID NO: 665185 - DNA, 33 bp, Homo sapien
ataccaagtcccatgaaaaggaaaattaatagg

SEQ ID NO: 665186 - DNA, 33 bp, Homo sapien
ataccaagtcccatgagaaggaaaattaatagg

SEQ ID NO: 665187 - DNA, 33 bp, Homo sapien
cttatgtaattttctcccagttcatttttaggc

SEQ ID NO: 665188 - DNA, 33 bp, Homo sapien
cttatgtaattttctctcagttcatttttaggc

SEQ ID NO: 665189 - DNA, 33 bp, Homo sapien
caaggttaatggtacacggtaagaccggctcat

SEQ ID NO: 665190 - DNA, 33 bp, Homo sapien
caaggttaatggtacatggtaagaccggctcat

SEQ ID NO: 665191 - DNA, 33 bp, Homo sapien
ttcatctctctcctacaagtcttgtgtctgtgg

SEQ ID NO: 665192 - DNA, 33 bp, Homo sapien
ttcatctctctcctacgagtcttgtgtctgtgg

SEQ ID NO: 665193 - DNA, 33 bp, Homo sapien
gcccacatgtctcagacaagttccactgctaac

SEQ ID NO: 665194 - DNA, 33 bp, Homo sapien
gcccacatgtctcagataagttccactgctaac

SEQ ID NO: 665195 - DNA, 33 bp, Homo sapien
gatccatgttcttgaccgaaaaccaaggtgact

SEQ ID NO: 665196 - DNA, 33 bp, Homo sapien
gatccatgttcttgactgaaaaccaaggtgact

SEQ ID NO: 665197 - DNA, 33 bp, Homo sapien
agtggctatggtgaagacaagctggaagcaaaa

SEQ ID NO: 665198 - DNA, 33 bp, Homo sapien
agtggctatggtgaaggcaagctggaagcaaaa

SEQ ID NO: 665199 - DNA, 33 bp, Homo sapien
attttgtaatttacacacatcagaactgaaaaa

SEQ ID NO: 665200 - DNA, 33 bp, Homo sapien
attttgtaatttacacccatcagaactgaaaaa

SEQ ID NO: 665201 - DNA, 33 bp, Homo sapien
gttttatggttttcaaggtagagctttttcact

SEQ ID NO: 665202 - DNA, 33 bp, Homo sapien
gttttatggttttcaatgtagagctttttcact

SEQ ID NO: 665203 - DNA, 33 bp, Homo sapien
atcaatttcttgcatcaatgttttatggttttc

SEQ ID NO: 665204 - DNA, 33 bp, Homo sapien
atcaatttcttgcatcgatgttttatggttttc

SEQ ID NO: 665205 - DNA, 33 bp, Homo sapien
tgcctttgaatatcagactccaagttcttcagc

SEQ ID NO: 665206 - DNA, 33 bp, Homo sapien
tgcctttgaatatcaggctccaagttcttcagc

SEQ ID NO: 665207 - DNA, 33 bp, Homo sapien
gtgctgtggtagagatcaaacatttgaccttgg

SEQ ID NO: 665208 - DNA, 33 bp, Homo sapien
gtgctgtggtagagattaaacatttgaccttgg

SEQ ID NO: 665209 - DNA, 33 bp, Homo sapien
agtttaattcagttacaatgtgggcagagctaa

SEQ ID NO: 665210 - DNA, 33 bp, Homo sapien
agtttaattcagttacgatgtgggcagagctaa

SEQ ID NO: 665211 - DNA, 33 bp, Homo sapien
cttaacttttgtgtaaatataaatccaaaaata

SEQ ID NO: 665212 - DNA, 33 bp, Homo sapien
cttaacttttgtgtaactataaatccaaaaata

SEQ ID NO: 665213 - DNA, 33 bp, Homo sapien
tcaagtcagtagccatgaagagacagaaaattg

SEQ ID NO: 665214 - DNA, 33 bp, Homo sapien
tcaagtcagtagccattaagagacagaaaattg

SEQ ID NO: 665215 - DNA, 33 bp, Homo sapien
atttcaaaataacagcaaccggatatgaaggta

SEQ ID NO: 665216 - DNA, 33 bp, Homo sapien
atttcaaaataacagccaccggatatgaaggta

SEQ ID NO: 665217 - DNA, 33 bp, Homo sapien
caattactgaattccaatgataatgagtaaatc

SEQ ID NO: 665218 - DNA, 33 bp, Homo sapien
caattactgaattccagtgataatgagtaaatc

SEQ ID NO: 665219 - DNA, 33 bp, Homo sapien
gtgaaatgcttatgacccaaagtttaagagtaa

SEQ ID NO: 665220 - DNA, 33 bp, Homo sapien
gtgaaatgcttatgactcaaagtttaagagtaa

SEQ ID NO: 665221 - DNA, 33 bp, Homo sapien
tttccacgcttttcagaaaggtgagactaccaa

SEQ ID NO: 665222 - DNA, 33 bp, Homo sapien
tttccacgcttttcaggaaggtgagactaccaa

SEQ ID NO: 665223 - DNA, 33 bp, Homo sapien
ctgtcagctagtttaacgagcgaatcatcctgc

SEQ ID NO: 665224 - DNA, 33 bp, Homo sapien
ctgtcagctagtttaaggagcgaatcatcctgc

SEQ ID NO: 665225 - DNA, 33 bp, Homo sapien
ggttgtttgcagttgaacttaccctagaacctc

SEQ ID NO: 665226 - DNA, 33 bp, Homo sapien
ggttgtttgcagttgatcttaccctagaacctc

SEQ ID NO: 665227 - DNA, 33 bp, Homo sapien
atccatgagttgcttgaagaaacctttcaataa

SEQ ID NO: 665228 - DNA, 33 bp, Homo sapien
atccatgagttgcttgcagaaacctttcaataa

SEQ ID NO: 665229 - DNA, 33 bp, Homo sapien
ctcaaatttggccgcacctattatcttttttgc

SEQ ID NO: 665230 - DNA, 33 bp, Homo sapien
ctcaaatttggccgcatctattatcttttttgc

SEQ ID NO: 665231 - DNA, 33 bp, Homo sapien
cataaatccacaaacacagtcaacaatctattc

SEQ ID NO: 665232 - DNA, 33 bp, Homo sapien
cataaatccacaaacagagtcaacaatctattc

SEQ ID NO: 665233 - DNA, 33 bp, Homo sapien
accaagccatttataaagaaatcacctccatga

SEQ ID NO: 665234 - DNA, 33 bp, Homo sapien
accaagccatttataaggaaatcacctccatga

SEQ ID NO: 665235 - DNA, 33 bp, Homo sapien
tgggtttttatatgtacggtggatcaaatttgc

SEQ ID NO: 665236 - DNA, 33 bp, Homo sapien
tgggtttttatatgtatggtggatcaaatttgc

SEQ ID NO: 665237 - DNA, 33 bp, Homo sapien
gggttgtcagtgcttaacatgcttttcgtctca

SEQ ID NO: 665238 - DNA, 33 bp, Homo sapien
gggttgtcagtgcttatcatgcttttcgtctca

SEQ ID NO: 665239 - DNA, 33 bp, Homo sapien
gaaacagaatgaaatccatgatccaatattact

SEQ ID NO: 665240 - DNA, 33 bp, Homo sapien
gaaacagaatgaaatctatgatccaatattact

SEQ ID NO: 665241 - DNA, 33 bp, Homo sapien
tgaatacaatatggaaactgcatatattgccat

SEQ ID NO: 665242 - DNA, 33 bp, Homo sapien
tgaatacaatatggaacctgcatatattgccat

SEQ ID NO: 665243 - DNA, 33 bp, Homo sapien
aacttgcctctcaaaaagtcaggtaaacacaaa

SEQ ID NO: 665244 - DNA, 33 bp, Homo sapien
aacttgcctctcaaaacgtcaggtaaacacaaa

SEQ ID NO: 665245 - DNA, 33 bp, Homo sapien
atggaagataaacatgacataattgaaataaaa

SEQ ID NO: 665246 - DNA, 33 bp, Homo sapien
atggaagataaacatggcataattgaaataaaa

SEQ ID NO: 665247 - DNA, 33 bp, Homo sapien
ttttgttttgcctccacgaagttagtttttgtt

SEQ ID NO: 665248 - DNA, 33 bp, Homo sapien
ttttgttttgcctccatgaagttagtttttgtt

SEQ ID NO: 665249 - DNA, 33 bp, Homo sapien
aagttggatgtcattgcagtctcaaaggtgtgc

SEQ ID NO: 665250 - DNA, 33 bp, Homo sapien
aagttggatgtcattgtagtctcaaaggtgtgc

SEQ ID NO: 665251 - DNA, 33 bp, Homo sapien
tcagttaagacatagagcaaatgcccttgacat

SEQ ID NO: 665252 - DNA, 33 bp, Homo sapien
tcagttaagacatagatcaaatgcccttgacat

SEQ ID NO: 665253 - DNA, 33 bp, Homo sapien
gatttatgacaggtatcaagatgttattcacct

SEQ ID NO: 665254 - DNA, 33 bp, Homo sapien
gatttatgacaggtatgaagatgttattcacct

SEQ ID NO: 665255 - DNA, 33 bp, Homo sapien
gattttccatgataaaagacaattcatatttgc

SEQ ID NO: 665256 - DNA, 33 bp, Homo sapien
gattttccatgataaaggacaattcatatttgc

SEQ ID NO: 665257 - DNA, 33 bp, Homo sapien
ttgctgtatatggagacgacttttaaaaaaatg

SEQ ID NO: 665258 - DNA, 33 bp, Homo sapien
ttgctgtatatggagatgacttttaaaaaaatg

SEQ ID NO: 665259 - DNA, 33 bp, Homo sapien
agcattcagccctttacccaatattgagttata

SEQ ID NO: 665260 - DNA, 33 bp, Homo sapien
agcattcagccctttatccaatattgagttata

SEQ ID NO: 665261 - DNA, 33 bp, Homo sapien
agacaagagtattccacataggccaggaatggt

SEQ ID NO: 665262 - DNA, 33 bp, Homo sapien
agacaagagtattccagataggccaggaatggt

SEQ ID NO: 665263 - DNA, 33 bp, Homo sapien
ccaggtttcctctctcaatagctcctgtaaaac

SEQ ID NO: 665264 - DNA, 33 bp, Homo sapien
ccaggtttcctctctcgatagctcctgtaaaac

SEQ ID NO: 665265 - DNA, 33 bp, Homo sapien
tataccaaatggccacagtaacctaaaagcatg

SEQ ID NO: 665266 - DNA, 33 bp, Homo sapien
tataccaaatggccaccgtaacctaaaagcatg

SEQ ID NO: 665267 - DNA, 33 bp, Homo sapien
tctactcataaaatgtaacacaatgaatccttt

SEQ ID NO: 665268 - DNA, 33 bp, Homo sapien
tctactcataaaatgtgacacaatgaatccttt

SEQ ID NO: 665269 - DNA, 33 bp, Homo sapien
ttttaaagcaccatataactagcattatcttac

SEQ ID NO: 665270 - DNA, 33 bp, Homo sapien
ttttaaagcaccatatgactagcattatcttac

SEQ ID NO: 665271 - DNA, 33 bp, Homo sapien
ggcaagaaaatgggcaaatagaagcagaatgac

SEQ ID NO: 665272 - DNA, 33 bp, Homo sapien
ggcaagaaaatgggcatatagaagcagaatgac

SEQ ID NO: 665273 - DNA, 33 bp, Homo sapien
ataagggatttaaagccagtgatttttggaagc

SEQ ID NO: 665274 - DNA, 33 bp, Homo sapien
ataagggatttaaagcgagtgatttttggaagc

SEQ ID NO: 665275 - DNA, 33 bp, Homo sapien
acataatggactgatacctatttcaactctcaa

SEQ ID NO: 665276 - DNA, 33 bp, Homo sapien
acataatggactgatatctatttcaactctcaa

SEQ ID NO: 665277 - DNA, 33 bp, Homo sapien
attggtctttagttcacgatttctactagtatg

SEQ ID NO: 665278 - DNA, 33 bp, Homo sapien
attggtctttagttcatgatttctactagtatg

SEQ ID NO: 665279 - DNA, 33 bp, Homo sapien
tattacttaataaatacggtgctcaattccaag

SEQ ID NO: 665280 - DNA, 33 bp, Homo sapien
tattacttaataaatatggtgctcaattccaag

SEQ ID NO: 665281 - DNA, 33 bp, Homo sapien
gtagacatagatgcgaacataggaataattaca

SEQ ID NO: 665282 - DNA, 33 bp, Homo sapien
gtagacatagatgcgagcataggaataattaca

SEQ ID NO: 665283 - DNA, 33 bp, Homo sapien
gtttgttttgtgattaaatgaagcaatgccttg

SEQ ID NO: 665284 - DNA, 33 bp, Homo sapien
gtttgttttgtgattagatgaagcaatgccttg

SEQ ID NO: 665285 - DNA, 33 bp, Homo sapien
caatagtgtaaaaggcaatggtgcataaaactg

SEQ ID NO: 665286 - DNA, 33 bp, Homo sapien
caatagtgtaaaaggcgatggtgcataaaactg

SEQ ID NO: 665287 - DNA, 33 bp, Homo sapien
aatggaacatatcacaagaaatgaaacagacaa

SEQ ID NO: 665288 - DNA, 33 bp, Homo sapien
aatggaacatatcacatgaaatgaaacagacaa

SEQ ID NO: 665289 - DNA, 33 bp, Homo sapien
tggtacagcttgagcacaagagttgtcgtttac

SEQ ID NO: 665290 - DNA, 33 bp, Homo sapien
tggtacagcttgagcagaagagttgtcgtttac

SEQ ID NO: 665291 - DNA, 33 bp, Homo sapien
aaggaattgaaagcataaaatatgtgagtagtt

SEQ ID NO: 665292 - DNA, 33 bp, Homo sapien
aaggaattgaaagcatgaaatatgtgagtagtt

SEQ ID NO: 665293 - DNA, 33 bp, Homo sapien
ctttttgtgacataagacaggatttttaaactt

SEQ ID NO: 665294 - DNA, 33 bp, Homo sapien
ctttttgtgacataaggcaggatttttaaactt

SEQ ID NO: 665295 - DNA, 33 bp, Homo sapien
tcacctcatataaaacaggccactgagttaatg

SEQ ID NO: 665296 - DNA, 33 bp, Homo sapien
tcacctcatataaaacgggccactgagttaatg

SEQ ID NO: 665297 - DNA, 33 bp, Homo sapien
tttccatggttgtttacaattcttcccttcagt

SEQ ID NO: 665298 - DNA, 33 bp, Homo sapien
tttccatggttgtttataattcttcccttcagt

SEQ ID NO: 665299 - DNA, 33 bp, Homo sapien
atatttgctttgtggcactttctgtgtattttg

SEQ ID NO: 665300 - DNA, 33 bp, Homo sapien
atatttgctttgtggcgctttctgtgtattttg

SEQ ID NO: 665301 - DNA, 33 bp, Homo sapien
gtgagtaaatcccaacaaagaccagaactccca

SEQ ID NO: 665302 - DNA, 33 bp, Homo sapien
gtgagtaaatcccaaccaagaccagaactccca

SEQ ID NO: 665303 - DNA, 33 bp, Homo sapien
cagacagtacctcaaaagttaagttgagagcct

SEQ ID NO: 665304 - DNA, 33 bp, Homo sapien
cagacagtacctcaaaggttaagttgagagcct

SEQ ID NO: 665305 - DNA, 33 bp, Homo sapien
aagataaagaatttccactgcaatatcagaggt

SEQ ID NO: 665306 - DNA, 33 bp, Homo sapien
aagataaagaatttccgctgcaatatcagaggt

SEQ ID NO: 665307 - DNA, 33 bp, Homo sapien
tcatagaatgataggacgactcatggttctgtg

SEQ ID NO: 665308 - DNA, 33 bp, Homo sapien
tcatagaatgataggatgactcatggttctgtg

SEQ ID NO: 665309 - DNA, 33 bp, Homo sapien
agaggaagtattattaacctcggtgtacagaca

SEQ ID NO: 665310 - DNA, 33 bp, Homo sapien
agaggaagtattattatcctcggtgtacagaca

SEQ ID NO: 665311 - DNA, 33 bp, Homo sapien
gatgaagtcacgttgaactgggtttgatttcac

SEQ ID NO: 665312 - DNA, 33 bp, Homo sapien
gatgaagtcacgttgacctgggtttgatttcac

SEQ ID NO: 665313 - DNA, 33 bp, Homo sapien
cagaaaaatggatagacagtagtgatcacaagt

SEQ ID NO: 665314 - DNA, 33 bp, Homo sapien
cagaaaaatggatagatagtagtgatcacaagt

SEQ ID NO: 665315 - DNA, 33 bp, Homo sapien
tgaccttctgtacaaagattgccccatcagata

SEQ ID NO: 665316 - DNA, 33 bp, Homo sapien
tgaccttctgtacaaatattgccccatcagata

SEQ ID NO: 665317 - DNA, 33 bp, Homo sapien
tttgtcacacattataaatagagtacccaggag

SEQ ID NO: 665318 - DNA, 33 bp, Homo sapien
tttgtcacacattatagatagagtacccaggag

SEQ ID NO: 665319 - DNA, 33 bp, Homo sapien
tttagaccgctgacaacaaggtgacattgtttt

SEQ ID NO: 665320 - DNA, 33 bp, Homo sapien
tttagaccgctgacaataaggtgacattgtttt

SEQ ID NO: 665321 - DNA, 33 bp, Homo sapien
tctcccgaaatcaccacgttcatcaagatgata

SEQ ID NO: 665322 - DNA, 33 bp, Homo sapien
tctcccgaaatcaccatgttcatcaagatgata

SEQ ID NO: 665323 - DNA, 33 bp, Homo sapien
ctctcttagcctacccaagcaagtcaggccaag

SEQ ID NO: 665324 - DNA, 33 bp, Homo sapien
ctctcttagcctacccgagcaagtcaggccaag

SEQ ID NO: 665325 - DNA, 33 bp, Homo sapien
ttgacttttgagaacactcggtcagggctcata

SEQ ID NO: 665326 - DNA, 33 bp, Homo sapien
ttgacttttgagaacattcggtcagggctcata

SEQ ID NO: 665327 - DNA, 33 bp, Homo sapien
cccattcaacaagctaaatagagtcattaaggg

SEQ ID NO: 665328 - DNA, 33 bp, Homo sapien
cccattcaacaagctagatagagtcattaaggg

SEQ ID NO: 665329 - DNA, 33 bp, Homo sapien
agaaatctccaagtacacatctcctctgccttc

SEQ ID NO: 665330 - DNA, 33 bp, Homo sapien
agaaatctccaagtacccatctcctctgccttc

SEQ ID NO: 665331 - DNA, 33 bp, Homo sapien
aattcattgccagaaaataaaatgtcccttgaa

SEQ ID NO: 665332 - DNA, 33 bp, Homo sapien
aattcattgccagaaagtaaaatgtcccttgaa

SEQ ID NO: 665333 - DNA, 33 bp, Homo sapien
cagctctcatgttgccactgtagaacgatgacc

SEQ ID NO: 665334 - DNA, 33 bp, Homo sapien
cagctctcatgttgccgctgtagaacgatgacc

SEQ ID NO: 665335 - DNA, 33 bp, Homo sapien
agattgtttgtggttagctgccggctcctgttc

SEQ ID NO: 665336 - DNA, 33 bp, Homo sapien
agattgtttgtggttatctgccggctcctgttc

SEQ ID NO: 665337 - DNA, 33 bp, Homo sapien
aatttgtcataacatacgaaacagaggagaagg

SEQ ID NO: 665338 - DNA, 33 bp, Homo sapien
aatttgtcataacataggaaacagaggagaagg

SEQ ID NO: 665339 - DNA, 33 bp, Homo sapien
ccaaagaagagcctgaataacaaaacaatccta

SEQ ID NO: 665340 - DNA, 33 bp, Homo sapien
ccaaagaagagcctgagtaacaaaacaatccta

SEQ ID NO: 665341 - DNA, 33 bp, Homo sapien
ccaaatttggaaaaaaatctatgcaaagtttaa

SEQ ID NO: 665342 - DNA, 33 bp, Homo sapien
ccaaatttggaaaaaagtctatgcaaagtttaa

SEQ ID NO: 665343 - DNA, 33 bp, Homo sapien
tgtgaaattgctccccaagatgtctaaccttgc

SEQ ID NO: 665344 - DNA, 33 bp, Homo sapien
tgtgaaattgctcccctagatgtctaaccttgc

SEQ ID NO: 665345 - DNA, 33 bp, Homo sapien
attcctgtggctgtccaaaactaatattatttt

SEQ ID NO: 665346 - DNA, 33 bp, Homo sapien
attcctgtggctgtccgaaactaatattatttt

SEQ ID NO: 665347 - DNA, 33 bp, Homo sapien
aatctagcttggaaaaccttaaggaacttaata

SEQ ID NO: 665348 - DNA, 33 bp, Homo sapien
aatctagcttggaaaatcttaaggaacttaata

SEQ ID NO: 665349 - DNA, 33 bp, Homo sapien
aaatccacatccacaactgaagataatttcact

SEQ ID NO: 665350 - DNA, 33 bp, Homo sapien
aaatccacatccacaattgaagataatttcact

SEQ ID NO: 665351 - DNA, 33 bp, Homo sapien
gagatagacatttataagagaagctggagaagt

SEQ ID NO: 665352 - DNA, 33 bp, Homo sapien
gagatagacatttataggagaagctggagaagt

SEQ ID NO: 665353 - DNA, 33 bp, Homo sapien
gatatatgaaaacgtaaccctttcccactgagc

SEQ ID NO: 665354 - DNA, 33 bp, Homo sapien
gatatatgaaaacgtatccctttcccactgagc

SEQ ID NO: 665355 - DNA, 33 bp, Homo sapien
ataacctctctgctgaacttaagcctcacacat

SEQ ID NO: 665356 - DNA, 33 bp, Homo sapien
ataacctctctgctgaccttaagcctcacacat

SEQ ID NO: 665357 - DNA, 33 bp, Homo sapien
atcatctacagaggaagagggatacgaagaaga

SEQ ID NO: 665358 - DNA, 33 bp, Homo sapien
atcatctacagaggaatagggatacgaagaaga

SEQ ID NO: 665359 - DNA, 33 bp, Homo sapien
aataattcctgcagcaaaggagaaggatttgcc

SEQ ID NO: 665360 - DNA, 33 bp, Homo sapien
aataattcctgcagcacaggagaaggatttgcc

SEQ ID NO: 665361 - DNA, 33 bp, Homo sapien
gacagactagatgataacctggtcaaggggctg

SEQ ID NO: 665362 - DNA, 33 bp, Homo sapien
gacagactagatgataccctggtcaaggggctg

SEQ ID NO: 665363 - DNA, 33 bp, Homo sapien
taaattagactgggaaggtaagtaaacaggcta

SEQ ID NO: 665364 - DNA, 33 bp, Homo sapien
taaattagactgggaatgtaagtaaacaggcta

SEQ ID NO: 665365 - DNA, 33 bp, Homo sapien
tccaaaactcattgcactaaaaagttttataca

SEQ ID NO: 665366 - DNA, 33 bp, Homo sapien
tccaaaactcattgcattaaaaagttttataca

SEQ ID NO: 665367 - DNA, 33 bp, Homo sapien
aaacacaagtgtaaaacgtaaaaggcataaatc

SEQ ID NO: 665368 - DNA, 33 bp, Homo sapien
aaacacaagtgtaaaaggtaaaaggcataaatc

SEQ ID NO: 665369 - DNA, 33 bp, Homo sapien
tgtctgttctcagaggaaaagaaacacatctaa

SEQ ID NO: 665370 - DNA, 33 bp, Homo sapien
tgtctgttctcagagggaaagaaacacatctaa

SEQ ID NO: 665371 - DNA, 33 bp, Homo sapien
aaatagaaactgttgaaagatctctgatgtaga

SEQ ID NO: 665372 - DNA, 33 bp, Homo sapien
aaatagaaactgttgacagatctctgatgtaga

SEQ ID NO: 665373 - DNA, 33 bp, Homo sapien
tttctaatgtttaaagactaacacgcaaatgag

SEQ ID NO: 665374 - DNA, 33 bp, Homo sapien
tttctaatgtttaaaggctaacacgcaaatgag

SEQ ID NO: 665375 - DNA, 33 bp, Homo sapien
accaagctaaatgcaaataaggcccttaaagaa

SEQ ID NO: 665376 - DNA, 33 bp, Homo sapien
accaagctaaatgcaagtaaggcccttaaagaa

SEQ ID NO: 665377 - DNA, 33 bp, Homo sapien
cttctgctccatcaaaatgaaagaagtagattc

SEQ ID NO: 665378 - DNA, 33 bp, Homo sapien
cttctgctccatcaaactgaaagaagtagattc

SEQ ID NO: 665379 - DNA, 33 bp, Homo sapien
taatgataaactggaaaaagaaaatgtgacaca

SEQ ID NO: 665380 - DNA, 33 bp, Homo sapien
taatgataaactggaagaagaaaatgtgacaca

SEQ ID NO: 665381 - DNA, 33 bp, Homo sapien
aagctgaggatgtgcgcagccttaggaccctgt

SEQ ID NO: 665382 - DNA, 33 bp, Homo sapien
aagctgaggatgtgcgtagccttaggaccctgt

SEQ ID NO: 665383 - DNA, 33 bp, Homo sapien
aaacattctaaaattgaataatggggatgactg

SEQ ID NO: 665384 - DNA, 33 bp, Homo sapien
aaacattctaaaattgcataatggggatgactg

SEQ ID NO: 665385 - DNA, 33 bp, Homo sapien
atctgtttgtttccatgatatatcccaaacact

SEQ ID NO: 665386 - DNA, 33 bp, Homo sapien
atctgtttgtttccattatatatcccaaacact

SEQ ID NO: 665387 - DNA, 33 bp, Homo sapien
tgtttactgaatggtaagagaaacaccctgtgg

SEQ ID NO: 665388 - DNA, 33 bp, Homo sapien
tgtttactgaatggtaggagaaacaccctgtgg

SEQ ID NO: 665389 - DNA, 33 bp, Homo sapien
ccaaaatgcctatcacaacagtaagatttaata

SEQ ID NO: 665390 - DNA, 33 bp, Homo sapien
ccaaaatgcctatcactacagtaagatttaata

SEQ ID NO: 665391 - DNA, 33 bp, Homo sapien
atcttcacacacactagctttcacatggatgcc

SEQ ID NO: 665392 - DNA, 33 bp, Homo sapien
atcttcacacacactatctttcacatggatgcc

SEQ ID NO: 665393 - DNA, 33 bp, Homo sapien
agcccactctggacaacgaacagacaaaccaca

SEQ ID NO: 665394 - DNA, 33 bp, Homo sapien
agcccactctggacaatgaacagacaaaccaca

SEQ ID NO: 665395 - DNA, 33 bp, Homo sapien
agaacaactacccaaagacttgtataaacaaga

SEQ ID NO: 665396 - DNA, 33 bp, Homo sapien
agaacaactacccaaatacttgtataaacaaga

SEQ ID NO: 665397 - DNA, 33 bp, Homo sapien
atgaaatgctacaaccacaataagcataatcca

SEQ ID NO: 665398 - DNA, 33 bp, Homo sapien
atgaaatgctacaaccgcaataagcataatcca

SEQ ID NO: 665399 - DNA, 33 bp, Homo sapien
ttttaagtagcacataccataaaacttcgtttt

SEQ ID NO: 665400 - DNA, 33 bp, Homo sapien
ttttaagtagcacatatcataaaacttcgtttt

SEQ ID NO: 665401 - DNA, 33 bp, Homo sapien
ggtaaagacagaaataacagcacttctttttct

SEQ ID NO: 665402 - DNA, 33 bp, Homo sapien
ggtaaagacagaaatatcagcacttctttttct

SEQ ID NO: 665403 - DNA, 33 bp, Homo sapien
gaagatggtagattggcagaagtctcttttctc

SEQ ID NO: 665404 - DNA, 33 bp, Homo sapien
gaagatggtagattggtagaagtctcttttctc

SEQ ID NO: 665405 - DNA, 33 bp, Homo sapien
atttatttactgtgtaataaactatcattaaat

SEQ ID NO: 665406 - DNA, 33 bp, Homo sapien
atttatttactgtgtactaaactatcattaaat

SEQ ID NO: 665407 - DNA, 33 bp, Homo sapien
atgtctcatggaaaaaattaatggttttctgtt

SEQ ID NO: 665408 - DNA, 33 bp, Homo sapien
atgtctcatggaaaaagttaatggttttctgtt

SEQ ID NO: 665409 - DNA, 33 bp, Homo sapien
atgaggaattaaatgcagaagacatgagtatag

SEQ ID NO: 665410 - DNA, 33 bp, Homo sapien
atgaggaattaaatgcggaagacatgagtatag

SEQ ID NO: 665411 - DNA, 33 bp, Homo sapien
tttggaagctctgtataactaagtgagccaata

SEQ ID NO: 665412 - DNA, 33 bp, Homo sapien
tttggaagctctgtatgactaagtgagccaata

SEQ ID NO: 665413 - DNA, 33 bp, Homo sapien
taactttgacagctgaaagtgggcttgcaagaa

SEQ ID NO: 665414 - DNA, 33 bp, Homo sapien
taactttgacagctgagagtgggcttgcaagaa

SEQ ID NO: 665415 - DNA, 33 bp, Homo sapien
ggaggaatgggacatccactttagagttatttc

SEQ ID NO: 665416 - DNA, 33 bp, Homo sapien
ggaggaatgggacatctactttagagttatttc

SEQ ID NO: 665417 - DNA, 33 bp, Homo sapien
tagtgtagtatcaacaataagccttgaaaccaa

SEQ ID NO: 665418 - DNA, 33 bp, Homo sapien
tagtgtagtatcaacagtaagccttgaaaccaa

SEQ ID NO: 665419 - DNA, 33 bp, Homo sapien
gtggtaacagcttgtacgaatctccagttaatt

SEQ ID NO: 665420 - DNA, 33 bp, Homo sapien
gtggtaacagcttgtatgaatctccagttaatt

SEQ ID NO: 665421 - DNA, 33 bp, Homo sapien
tttgaccattaattaaccagttcacgaaacatg

SEQ ID NO: 665422 - DNA, 33 bp, Homo sapien
tttgaccattaattaatcagttcacgaaacatg

SEQ ID NO: 665423 - DNA, 33 bp, Homo sapien
ttcagaacgattaacacggaccagccatagaaa

SEQ ID NO: 665424 - DNA, 33 bp, Homo sapien
ttcagaacgattaacatggaccagccatagaaa

SEQ ID NO: 665425 - DNA, 33 bp, Homo sapien
tagatcaagtgaatgcaagtcagtttataaacc

SEQ ID NO: 665426 - DNA, 33 bp, Homo sapien
tagatcaagtgaatgccagtcagtttataaacc

SEQ ID NO: 665427 - DNA, 33 bp, Homo sapien
ataaatattggatgccaatagggtgccacatag

SEQ ID NO: 665428 - DNA, 33 bp, Homo sapien
ataaatattggatgccgatagggtgccacatag

SEQ ID NO: 665429 - DNA, 33 bp, Homo sapien
tttatttttcatagttcaaacagctcaaaggtc

SEQ ID NO: 665430 - DNA, 33 bp, Homo sapien
tttatttttcatagttgaaacagctcaaaggtc

SEQ ID NO: 665431 - DNA, 33 bp, Homo sapien
tcagatctgaccgacaccatacaatgagagcaa

SEQ ID NO: 665432 - DNA, 33 bp, Homo sapien
tcagatctgaccgacatcatacaatgagagcaa

SEQ ID NO: 665433 - DNA, 33 bp, Homo sapien
ttatgagaataactcaaagaagaagactagaag

SEQ ID NO: 665434 - DNA, 33 bp, Homo sapien
ttatgagaataactcagagaagaagactagaag

SEQ ID NO: 665435 - DNA, 33 bp, Homo sapien
gactgaattcagaaaaatttaccttcaccctca

SEQ ID NO: 665436 - DNA, 33 bp, Homo sapien
gactgaattcagaaaattttaccttcaccctca

SEQ ID NO: 665437 - DNA, 33 bp, Homo sapien
actaggagtgtctaaagttctagaaagctgtag

SEQ ID NO: 665438 - DNA, 33 bp, Homo sapien
actaggagtgtctaaatttctagaaagctgtag

SEQ ID NO: 665439 - DNA, 33 bp, Homo sapien
aacttaacatataatcaaacaacagaccattag

SEQ ID NO: 665440 - DNA, 33 bp, Homo sapien
aacttaacatataatctaacaacagaccattag

SEQ ID NO: 665441 - DNA, 33 bp, Homo sapien
tttggcctcttttcaccaagacattaaataatc

SEQ ID NO: 665442 - DNA, 33 bp, Homo sapien
tttggcctcttttcactaagacattaaataatc

SEQ ID NO: 665443 - DNA, 33 bp, Homo sapien
tctcagtgcagaaataaatttgaatattaattt

SEQ ID NO: 665444 - DNA, 33 bp, Homo sapien
tctcagtgcagaaatacatttgaatattaattt

SEQ ID NO: 665445 - DNA, 33 bp, Homo sapien
aaacttggaaaaaatacagaattctggactcca

SEQ ID NO: 665446 - DNA, 33 bp, Homo sapien
aaacttggaaaaaatatagaattctggactcca

SEQ ID NO: 665447 - DNA, 33 bp, Homo sapien
gttcctaaatgtctgacgtattaactattttct

SEQ ID NO: 665448 - DNA, 33 bp, Homo sapien
gttcctaaatgtctgatgtattaactattttct

SEQ ID NO: 665449 - DNA, 33 bp, Homo sapien
cattttagataccactaagaacttttgttattc

SEQ ID NO: 665450 - DNA, 33 bp, Homo sapien
cattttagataccactgagaacttttgttattc

SEQ ID NO: 665451 - DNA, 33 bp, Homo sapien
tgaagtcttgaaccacacaaaatcatccaggag

SEQ ID NO: 665452 - DNA, 33 bp, Homo sapien
tgaagtcttgaaccacgcaaaatcatccaggag

SEQ ID NO: 665453 - DNA, 33 bp, Homo sapien
ctgaaattagagaaacaaattccaggcttgcac

SEQ ID NO: 665454 - DNA, 33 bp, Homo sapien
ctgaaattagagaaacgaattccaggcttgcac

SEQ ID NO: 665455 - DNA, 33 bp, Homo sapien
gggttaaagctgttcaaatttacaaatgttcat

SEQ ID NO: 665456 - DNA, 33 bp, Homo sapien
gggttaaagctgttcagatttacaaatgttcat

SEQ ID NO: 665457 - DNA, 33 bp, Homo sapien
tgttgttgaaaatgcaatgaggaaaatataatt

SEQ ID NO: 665458 - DNA, 33 bp, Homo sapien
tgttgttgaaaatgcagtgaggaaaatataatt

SEQ ID NO: 665459 - DNA, 33 bp, Homo sapien
atatgttttggataatcagtgtggctaacagta

SEQ ID NO: 665460 - DNA, 33 bp, Homo sapien
atatgttttggataattagtgtggctaacagta

SEQ ID NO: 665461 - DNA, 33 bp, Homo sapien
aatctctacaccgataccacaactcagtaattc

SEQ ID NO: 665462 - DNA, 33 bp, Homo sapien
aatctctacaccgatatcacaactcagtaattc

SEQ ID NO: 665463 - DNA, 33 bp, Homo sapien
tcaaatgcctgctagaacttttcctcattgtct

SEQ ID NO: 665464 - DNA, 33 bp, Homo sapien
tcaaatgcctgctagatcttttcctcattgtct

SEQ ID NO: 665465 - DNA, 33 bp, Homo sapien
tgtagtgaaaagggaactggacttaaagtcaga

SEQ ID NO: 665466 - DNA, 33 bp, Homo sapien
tgtagtgaaaagggaattggacttaaagtcaga

SEQ ID NO: 665467 - DNA, 33 bp, Homo sapien
acatagattaagttggcatcaatttgtttatca

SEQ ID NO: 665468 - DNA, 33 bp, Homo sapien
acatagattaagttggtatcaatttgtttatca

SEQ ID NO: 665469 - DNA, 33 bp, Homo sapien
tagtaaaaagatgtgaccttcttttcttggaca

SEQ ID NO: 665470 - DNA, 33 bp, Homo sapien
tagtaaaaagatgtgagcttcttttcttggaca

SEQ ID NO: 665471 - DNA, 33 bp, Homo sapien
tgaaaaacagctgaaacgggggatatggacgtg

SEQ ID NO: 665472 - DNA, 33 bp, Homo sapien
tgaaaaacagctgaaatgggggatatggacgtg

SEQ ID NO: 665473 - DNA, 33 bp, Homo sapien
cctacatcatcataaccatttgtagacaagctc

SEQ ID NO: 665474 - DNA, 33 bp, Homo sapien
cctacatcatcataacgatttgtagacaagctc

SEQ ID NO: 665475 - DNA, 33 bp, Homo sapien
gagagcactgtggaatcaaacgaaggtgtatgt

SEQ ID NO: 665476 - DNA, 33 bp, Homo sapien
gagagcactgtggaattaaacgaaggtgtatgt

SEQ ID NO: 665477 - DNA, 33 bp, Homo sapien
tttcctgattgtgaaaatgatttatgaaaattc

SEQ ID NO: 665478 - DNA, 33 bp, Homo sapien
tttcctgattgtgaaagtgatttatgaaaattc

SEQ ID NO: 665479 - DNA, 33 bp, Homo sapien
ccctcaggagttcacacggtgattctcagcata

SEQ ID NO: 665480 - DNA, 33 bp, Homo sapien
ccctcaggagttcacatggtgattctcagcata

SEQ ID NO: 665481 - DNA, 33 bp, Homo sapien
tttttcatctgtttcaagacaatttgtaactgc

SEQ ID NO: 665482 - DNA, 33 bp, Homo sapien
tttttcatctgtttcaggacaatttgtaactgc

SEQ ID NO: 665483 - DNA, 33 bp, Homo sapien
agtaagggtgtactaccgctactgtgttacttg

SEQ ID NO: 665484 - DNA, 33 bp, Homo sapien
agtaagggtgtactactgctactgtgttacttg

SEQ ID NO: 665485 - DNA, 33 bp, Homo sapien
taagtggcgtagcattcaagaggaagtagagcg

SEQ ID NO: 665486 - DNA, 33 bp, Homo sapien
taagtggcgtagcattgaagaggaagtagagcg

SEQ ID NO: 665487 - DNA, 33 bp, Homo sapien
tttgaccaaaatgccaatactgataggaacaat

SEQ ID NO: 665488 - DNA, 33 bp, Homo sapien
tttgaccaaaatgccagtactgataggaacaat

SEQ ID NO: 665489 - DNA, 33 bp, Homo sapien
aggaatctgtaatttgcagtcctgtttcaacta

SEQ ID NO: 665490 - DNA, 33 bp, Homo sapien
aggaatctgtaatttgtagtcctgtttcaacta

SEQ ID NO: 665491 - DNA, 33 bp, Homo sapien
tagttcctaatgggtcaagtactatggtgttac

SEQ ID NO: 665492 - DNA, 33 bp, Homo sapien
tagttcctaatgggtcgagtactatggtgttac

SEQ ID NO: 665493 - DNA, 33 bp, Homo sapien
ggcaaatattgaattaaagagttccttacatgt

SEQ ID NO: 665494 - DNA, 33 bp, Homo sapien
ggcaaatattgaattagagagttccttacatgt

SEQ ID NO: 665495 - DNA, 33 bp, Homo sapien
aggccaattaggcttgaactatttccactctct

SEQ ID NO: 665496 - DNA, 33 bp, Homo sapien
aggccaattaggcttggactatttccactctct

SEQ ID NO: 665497 - DNA, 33 bp, Homo sapien
ccaagatgaaatgtctaaattgtcagaaaaaaa

SEQ ID NO: 665498 - DNA, 33 bp, Homo sapien
ccaagatgaaatgtctgaattgtcagaaaaaaa

SEQ ID NO: 665499 - DNA, 33 bp, Homo sapien
tttatttctcaactacacttgatctagattcat

SEQ ID NO: 665500 - DNA, 33 bp, Homo sapien
tttatttctcaactacccttgatctagattcat

SEQ ID NO: 665501 - DNA, 33 bp, Homo sapien
tctctagcacttggagacggtgaagaaatttgc

SEQ ID NO: 665502 - DNA, 33 bp, Homo sapien
tctctagcacttggaggcggtgaagaaatttgc

SEQ ID NO: 665503 - DNA, 33 bp, Homo sapien
tacaacagaatcctaaactaaacacaatgatta

SEQ ID NO: 665504 - DNA, 33 bp, Homo sapien
tacaacagaatcctaagctaaacacaatgatta

SEQ ID NO: 665505 - DNA, 33 bp, Homo sapien
aaaattagtgagaccaaagaggttagcagggct

SEQ ID NO: 665506 - DNA, 33 bp, Homo sapien
aaaattagtgagaccagagaggttagcagggct

SEQ ID NO: 665507 - DNA, 33 bp, Homo sapien
attagacagctctacacatatgccggggatatt

SEQ ID NO: 665508 - DNA, 33 bp, Homo sapien
attagacagctctacagatatgccggggatatt

SEQ ID NO: 665509 - DNA, 33 bp, Homo sapien
aaattattgacgccaacctgtggattttctgaa

SEQ ID NO: 665510 - DNA, 33 bp, Homo sapien
aaattattgacgccaagctgtggattttctgaa

SEQ ID NO: 665511 - DNA, 33 bp, Homo sapien
agcacaagttatggaacgaagatgtggttgatc

SEQ ID NO: 665512 - DNA, 33 bp, Homo sapien
agcacaagttatggaatgaagatgtggttgatc

SEQ ID NO: 665513 - DNA, 33 bp, Homo sapien
attttttcatggttcaatctcggtagacaatat

SEQ ID NO: 665514 - DNA, 33 bp, Homo sapien
attttttcatggttcagtctcggtagacaatat

SEQ ID NO: 665515 - DNA, 33 bp, Homo sapien
tgtggtgtctgcattaactacaggtgagtgagt

SEQ ID NO: 665516 - DNA, 33 bp, Homo sapien
tgtggtgtctgcattatctacaggtgagtgagt

SEQ ID NO: 665517 - DNA, 33 bp, Homo sapien
agaaccaatctcctacaaatactgtgggatgac

SEQ ID NO: 665518 - DNA, 33 bp, Homo sapien
agaaccaatctcctacgaatactgtgggatgac

SEQ ID NO: 665519 - DNA, 33 bp, Homo sapien
tgattctggattctgcactttttaattccaata

SEQ ID NO: 665520 - DNA, 33 bp, Homo sapien
tgattctggattctgcgctttttaattccaata

SEQ ID NO: 665521 - DNA, 33 bp, Homo sapien
cctattgctttggtgaaaaccatgcatactcct

SEQ ID NO: 665522 - DNA, 33 bp, Homo sapien
cctattgctttggtgacaaccatgcatactcct

SEQ ID NO: 665523 - DNA, 33 bp, Homo sapien
tcttagatggtaaccaaatcttttaagtgcata

SEQ ID NO: 665524 - DNA, 33 bp, Homo sapien
tcttagatggtaaccacatcttttaagtgcata

SEQ ID NO: 665525 - DNA, 33 bp, Homo sapien
tgggcagataacgagactaggagtttgacacca

SEQ ID NO: 665526 - DNA, 33 bp, Homo sapien
tgggcagataacgagagtaggagtttgacacca

SEQ ID NO: 665527 - DNA, 33 bp, Homo sapien
acacaggaagtcacaaagggtgtctagacagat

SEQ ID NO: 665528 - DNA, 33 bp, Homo sapien
acacaggaagtcacaaggggtgtctagacagat

SEQ ID NO: 665529 - DNA, 33 bp, Homo sapien
agattgattggagtaccaggaggagacagggag

SEQ ID NO: 665530 - DNA, 33 bp, Homo sapien
agattgattggagtacgaggaggagacagggag

SEQ ID NO: 665531 - DNA, 33 bp, Homo sapien
aactgcaactagtgtccaatataaccaaatagc

SEQ ID NO: 665532 - DNA, 33 bp, Homo sapien
aactgcaactagtgtctaatataaccaaatagc

SEQ ID NO: 665533 - DNA, 33 bp, Homo sapien
catacagctatctgaaaattgaacaacctactc

SEQ ID NO: 665534 - DNA, 33 bp, Homo sapien
catacagctatctgaagattgaacaacctactc

SEQ ID NO: 665535 - DNA, 33 bp, Homo sapien
aaatggattttcaaggaaacttgtagaccagta

SEQ ID NO: 665536 - DNA, 33 bp, Homo sapien
aaatggattttcaagggaacttgtagaccagta

SEQ ID NO: 665537 - DNA, 33 bp, Homo sapien
gtttcagagcattgtacgttgtcctctgttgta

SEQ ID NO: 665538 - DNA, 33 bp, Homo sapien
gtttcagagcattgtatgttgtcctctgttgta

SEQ ID NO: 665539 - DNA, 33 bp, Homo sapien
aaaactggcagtgaagaactcatatccagggac

SEQ ID NO: 665540 - DNA, 33 bp, Homo sapien
aaaactggcagtgaagtactcatatccagggac

SEQ ID NO: 665541 - DNA, 33 bp, Homo sapien
gtgcttaaatacatccactgaaacacagttgac

SEQ ID NO: 665542 - DNA, 33 bp, Homo sapien
gtgcttaaatacatccgctgaaacacagttgac

SEQ ID NO: 665543 - DNA, 33 bp, Homo sapien
atcatacttcattagaccgtcaatattccaggc

SEQ ID NO: 665544 - DNA, 33 bp, Homo sapien
atcatacttcattagagcgtcaatattccaggc

SEQ ID NO: 665545 - DNA, 33 bp, Homo sapien
tttgttttagattccaacatatgaagaactgtg

SEQ ID NO: 665546 - DNA, 33 bp, Homo sapien
tttgttttagattccatcatatgaagaactgtg

SEQ ID NO: 665547 - DNA, 33 bp, Homo sapien
aaaatgtaagagaagaaacttaggcaagttttt

SEQ ID NO: 665548 - DNA, 33 bp, Homo sapien
aaaatgtaagagaagacacttaggcaagttttt

SEQ ID NO: 665549 - DNA, 33 bp, Homo sapien
gttattcatttggcaacgacttgaaactcatga

SEQ ID NO: 665550 - DNA, 33 bp, Homo sapien
gttattcatttggcaaggacttgaaactcatga

SEQ ID NO: 665551 - DNA, 33 bp, Homo sapien
cttgcacagaaataccagaaaggaaaagaagca

SEQ ID NO: 665552 - DNA, 33 bp, Homo sapien
cttgcacagaaataccggaaaggaaaagaagca

SEQ ID NO: 665553 - DNA, 33 bp, Homo sapien
atctcaagcattgaaaatggtatgtaataagct

SEQ ID NO: 665554 - DNA, 33 bp, Homo sapien
atctcaagcattgaaagtggtatgtaataagct

SEQ ID NO: 665555 - DNA, 33 bp, Homo sapien
gggtttaagaaaagtcagactaggagatgaagg

SEQ ID NO: 665556 - DNA, 33 bp, Homo sapien
gggtttaagaaaagtcggactaggagatgaagg

SEQ ID NO: 665557 - DNA, 33 bp, Homo sapien
accatacctccatagactagttgatttgagact

SEQ ID NO: 665558 - DNA, 33 bp, Homo sapien
accatacctccatagattagttgatttgagact

SEQ ID NO: 665559 - DNA, 33 bp, Homo sapien
aggaattctacctatgaagttccctctatctat

SEQ ID NO: 665560 - DNA, 33 bp, Homo sapien
aggaattctacctatggagttccctctatctat

SEQ ID NO: 665561 - DNA, 33 bp, Homo sapien
ggaacgtccctcattcaagtaaaggaagacgag

SEQ ID NO: 665562 - DNA, 33 bp, Homo sapien
ggaacgtccctcattcgagtaaaggaagacgag

SEQ ID NO: 665563 - DNA, 33 bp, Homo sapien
aggtggagagacatcaaatgtgtgtgagcagac

SEQ ID NO: 665564 - DNA, 33 bp, Homo sapien
aggtggagagacatcagatgtgtgtgagcagac

SEQ ID NO: 665565 - DNA, 33 bp, Homo sapien
gtgcctggcgctacagaaagtactcagtgaaag

SEQ ID NO: 665566 - DNA, 33 bp, Homo sapien
gtgcctggcgctacaggaagtactcagtgaaag

SEQ ID NO: 665567 - DNA, 33 bp, Homo sapien
ttgggtagtaatgctccaactcttttgaaagct

SEQ ID NO: 665568 - DNA, 33 bp, Homo sapien
ttgggtagtaatgctcgaactcttttgaaagct

SEQ ID NO: 665569 - DNA, 33 bp, Homo sapien
aaaagaatcatcagcaccctacggaaaattgtt

SEQ ID NO: 665570 - DNA, 33 bp, Homo sapien
aaaagaatcatcagcatcctacggaaaattgtt

SEQ ID NO: 665571 - DNA, 33 bp, Homo sapien
aagtatggaatttacaaagactctggatcttga

SEQ ID NO: 665572 - DNA, 33 bp, Homo sapien
aagtatggaatttacagagactctggatcttga

SEQ ID NO: 665573 - DNA, 33 bp, Homo sapien
cttgtttttcctatcacacaaatcattcctcac

SEQ ID NO: 665574 - DNA, 33 bp, Homo sapien
cttgtttttcctatcatacaaatcattcctcac

SEQ ID NO: 665575 - DNA, 33 bp, Homo sapien
gcttggtgttatgaaaattgtcagaatcaaaat

SEQ ID NO: 665576 - DNA, 33 bp, Homo sapien
gcttggtgttatgaaagttgtcagaatcaaaat

SEQ ID NO: 665577 - DNA, 33 bp, Homo sapien
ggaaaatcctgacaaacaaagcctggaaaggcc

SEQ ID NO: 665578 - DNA, 33 bp, Homo sapien
ggaaaatcctgacaaataaagcctggaaaggcc

SEQ ID NO: 665579 - DNA, 33 bp, Homo sapien
tgcggaacttctgatagaatgctgagggcgact

SEQ ID NO: 665580 - DNA, 33 bp, Homo sapien
tgcggaacttctgatataatgctgagggcgact

SEQ ID NO: 665581 - DNA, 33 bp, Homo sapien
gatgtgcctatataaacgtctgttgcattcata

SEQ ID NO: 665582 - DNA, 33 bp, Homo sapien
gatgtgcctatataaatgtctgttgcattcata

SEQ ID NO: 665583 - DNA, 33 bp, Homo sapien
ctacaatgaaaaagaaccataagtcataccaaa

SEQ ID NO: 665584 - DNA, 33 bp, Homo sapien
ctacaatgaaaaagaatcataagtcataccaaa

SEQ ID NO: 665585 - DNA, 33 bp, Homo sapien
atagccattccaggaaagtagtaatatgtttat

SEQ ID NO: 665586 - DNA, 33 bp, Homo sapien
atagccattccaggaacgtagtaatatgtttat

SEQ ID NO: 665587 - DNA, 33 bp, Homo sapien
gtttcttcattggtcacctattttttggttgtc

SEQ ID NO: 665588 - DNA, 33 bp, Homo sapien
gtttcttcattggtcagctattttttggttgtc

SEQ ID NO: 665589 - DNA, 33 bp, Homo sapien
ggacacctgactagcacatttcattatacagac

SEQ ID NO: 665590 - DNA, 33 bp, Homo sapien
ggacacctgactagcatatttcattatacagac

SEQ ID NO: 665591 - DNA, 33 bp, Homo sapien
taaagttcaaaatggcacactgaaaataacttg

SEQ ID NO: 665592 - DNA, 33 bp, Homo sapien
taaagttcaaaatggcgcactgaaaataacttg

SEQ ID NO: 665593 - DNA, 33 bp, Homo sapien
atttaactgtttggtaagccaatgttactcagt

SEQ ID NO: 665594 - DNA, 33 bp, Homo sapien
atttaactgtttggtacgccaatgttactcagt

SEQ ID NO: 665595 - DNA, 33 bp, Homo sapien
tgatgtgttttatttcccagattacagaaagaa

SEQ ID NO: 665596 - DNA, 33 bp, Homo sapien
tgatgtgttttatttctcagattacagaaagaa

SEQ ID NO: 665597 - DNA, 33 bp, Homo sapien
ttatgtctattgcataaaaggtttttgttccct

SEQ ID NO: 665598 - DNA, 33 bp, Homo sapien
ttatgtctattgcatacaaggtttttgttccct

SEQ ID NO: 665599 - DNA, 33 bp, Homo sapien
aaaatagacaactcaaagacttaaaaacaagca

SEQ ID NO: 665600 - DNA, 33 bp, Homo sapien
aaaatagacaactcaaggacttaaaaacaagca

SEQ ID NO: 665601 - DNA, 33 bp, Homo sapien
tttaaatctctggcataagtaggtatttaaagc

SEQ ID NO: 665602 - DNA, 33 bp, Homo sapien
tttaaatctctggcatgagtaggtatttaaagc

SEQ ID NO: 665603 - DNA, 33 bp, Homo sapien
gctttctaaagctttcacctgaataaaatagaa

SEQ ID NO: 665604 - DNA, 33 bp, Homo sapien
gctttctaaagctttcgcctgaataaaatagaa

SEQ ID NO: 665605 - DNA, 33 bp, Homo sapien
tagtatggaatctcacaatgcatttacccattt

SEQ ID NO: 665606 - DNA, 33 bp, Homo sapien
tagtatggaatctcacgatgcatttacccattt

SEQ ID NO: 665607 - DNA, 33 bp, Homo sapien
gtttattccagatataagacctacttgagaaca

SEQ ID NO: 665608 - DNA, 33 bp, Homo sapien
gtttattccagatatatgacctacttgagaaca

SEQ ID NO: 665609 - DNA, 33 bp, Homo sapien
tatatctaaaggtgtacgctatcctgctatttc

SEQ ID NO: 665610 - DNA, 33 bp, Homo sapien
tatatctaaaggtgtatgctatcctgctatttc

SEQ ID NO: 665611 - DNA, 33 bp, Homo sapien
tattctgtttctttacggacatcactacgctaa

SEQ ID NO: 665612 - DNA, 33 bp, Homo sapien
tattctgtttctttactgacatcactacgctaa

SEQ ID NO: 665613 - DNA, 33 bp, Homo sapien
tacttgcttcctttatcaaaacacacttttggt

SEQ ID NO: 665614 - DNA, 33 bp, Homo sapien
tacttgcttcctttatgaaaacacacttttggt

SEQ ID NO: 665615 - DNA, 33 bp, Homo sapien
ttgtttgaatggatcactaatttaggatattac

SEQ ID NO: 665616 - DNA, 33 bp, Homo sapien
ttgtttgaatggatcagtaatttaggatattac

SEQ ID NO: 665617 - DNA, 33 bp, Homo sapien
ctgtcacaaaagtaaacgctgttcagaaaccat

SEQ ID NO: 665618 - DNA, 33 bp, Homo sapien
ctgtcacaaaagtaaatgctgttcagaaaccat

SEQ ID NO: 665619 - DNA, 33 bp, Homo sapien
actcaaacttttggcaatctgcaaactgtgagg

SEQ ID NO: 665620 - DNA, 33 bp, Homo sapien
actcaaacttttggcagtctgcaaactgtgagg

SEQ ID NO: 665621 - DNA, 33 bp, Homo sapien
tttgtgaactctccaaagacaaccatatatgac

SEQ ID NO: 665622 - DNA, 33 bp, Homo sapien
tttgtgaactctccaaggacaaccatatatgac

SEQ ID NO: 665623 - DNA, 33 bp, Homo sapien
attagccagttattcaccttttgtaaacctcct

SEQ ID NO: 665624 - DNA, 33 bp, Homo sapien
attagccagttattcagcttttgtaaacctcct

SEQ ID NO: 665625 - DNA, 33 bp, Homo sapien
tcttgggttttgctcaatgtagtcactttgtct

SEQ ID NO: 665626 - DNA, 33 bp, Homo sapien
tcttgggttttgctcagtgtagtcactttgtct

SEQ ID NO: 665627 - DNA, 33 bp, Homo sapien
gtgtattgatccagcaccaaaagacttggctgg

SEQ ID NO: 665628 - DNA, 33 bp, Homo sapien
gtgtattgatccagcagcaaaagacttggctgg

SEQ ID NO: 665629 - DNA, 33 bp, Homo sapien
tttgtatgctattctacagtgggcctccatcac

SEQ ID NO: 665630 - DNA, 33 bp, Homo sapien
tttgtatgctattctatagtgggcctccatcac

SEQ ID NO: 665631 - DNA, 33 bp, Homo sapien
taatgaaaatgtttgcaatgttgcaatgttgcc

SEQ ID NO: 665632 - DNA, 33 bp, Homo sapien
taatgaaaatgtttgccatgttgcaatgttgcc

SEQ ID NO: 665633 - DNA, 33 bp, Homo sapien
aacattcgcagttgaaataaagaactctcatgg

SEQ ID NO: 665634 - DNA, 33 bp, Homo sapien
aacattcgcagttgaagtaaagaactctcatgg

SEQ ID NO: 665635 - DNA, 33 bp, Homo sapien
ttcactatgatgcataagctaatatcaataaac

SEQ ID NO: 665636 - DNA, 33 bp, Homo sapien
ttcactatgatgcataggctaatatcaataaac

SEQ ID NO: 665637 - DNA, 33 bp, Homo sapien
cttcaggataagcaaaaaacatacttcaaaaat

SEQ ID NO: 665638 - DNA, 33 bp, Homo sapien
cttcaggataagcaaagaacatacttcaaaaat

SEQ ID NO: 665639 - DNA, 33 bp, Homo sapien
ctttatttaaccttggcaaatgaatgctagtgt

SEQ ID NO: 665640 - DNA, 33 bp, Homo sapien
ctttatttaaccttgggaaatgaatgctagtgt

SEQ ID NO: 665641 - DNA, 33 bp, Homo sapien
ctctgttgcacccttgcattttgtcaacatgga

SEQ ID NO: 665642 - DNA, 33 bp, Homo sapien
ctctgttgcacccttgtattttgtcaacatgga

SEQ ID NO: 665643 - DNA, 33 bp, Homo sapien
agcaactatcattgaaaatttcttgttttaata

SEQ ID NO: 665644 - DNA, 33 bp, Homo sapien
agcaactatcattgaagatttcttgttttaata

SEQ ID NO: 665645 - DNA, 33 bp, Homo sapien
taaaaatatggcttttaaaaaatactggacttt

SEQ ID NO: 665646 - DNA, 33 bp, Homo sapien
taaaaatatggctttttaaaaatactggacttt

SEQ ID NO: 665647 - DNA, 33 bp, Homo sapien
aaaatacacaccataaagtacttgttttcacct

SEQ ID NO: 665648 - DNA, 33 bp, Homo sapien
aaaatacacaccataatgtacttgttttcacct

SEQ ID NO: 665649 - DNA, 33 bp, Homo sapien
atcaatggtcattttcgaaagagcaagtaggtc

SEQ ID NO: 665650 - DNA, 33 bp, Homo sapien
atcaatggtcattttctaaagagcaagtaggtc

SEQ ID NO: 665651 - DNA, 33 bp, Homo sapien
tatgaatatgaggtgaagccaagttccactgaa

SEQ ID NO: 665652 - DNA, 33 bp, Homo sapien
tatgaatatgaggtgaggccaagttccactgaa

SEQ ID NO: 665653 - DNA, 33 bp, Homo sapien
ctccattattcttcacactttaccaactaactt

SEQ ID NO: 665654 - DNA, 33 bp, Homo sapien
ctccattattcttcacgctttaccaactaactt

SEQ ID NO: 665655 - DNA, 33 bp, Homo sapien
cagtcaggtgtaataccctcaagaaatccccaa

SEQ ID NO: 665656 - DNA, 33 bp, Homo sapien
cagtcaggtgtaatactctcaagaaatccccaa

SEQ ID NO: 665657 - DNA, 33 bp, Homo sapien
ggatatggagacacaacatctgaggttccctgg

SEQ ID NO: 665658 - DNA, 33 bp, Homo sapien
ggatatggagacacaatatctgaggttccctgg

SEQ ID NO: 665659 - DNA, 33 bp, Homo sapien
aggggttatgaaacagaccttcccctcaatata

SEQ ID NO: 665660 - DNA, 33 bp, Homo sapien
aggggttatgaaacagcccttcccctcaatata

SEQ ID NO: 665661 - DNA, 33 bp, Homo sapien
ggccatatttcatagacgtcagatattttccca

SEQ ID NO: 665662 - DNA, 33 bp, Homo sapien
ggccatatttcatagatgtcagatattttccca

SEQ ID NO: 665663 - DNA, 33 bp, Homo sapien
atactaaaattgttgaacttgacaatgaagttt

SEQ ID NO: 665664 - DNA, 33 bp, Homo sapien
atactaaaattgttgaccttgacaatgaagttt

SEQ ID NO: 665665 - DNA, 33 bp, Homo sapien
ataaaagagaaaactaaaatagcttgcagaccc

SEQ ID NO: 665666 - DNA, 33 bp, Homo sapien
ataaaagagaaaactacaatagcttgcagaccc

SEQ ID NO: 665667 - DNA, 33 bp, Homo sapien
aagtaccatctggctccgaacacatcatcctgt

SEQ ID NO: 665668 - DNA, 33 bp, Homo sapien
aagtaccatctggctctgaacacatcatcctgt

SEQ ID NO: 665669 - DNA, 33 bp, Homo sapien
ataggcacctataggcaaattgtagtacaaacc

SEQ ID NO: 665670 - DNA, 33 bp, Homo sapien
ataggcacctataggcgaattgtagtacaaacc

SEQ ID NO: 665671 - DNA, 33 bp, Homo sapien
ccacttgttccccagcaatggttcttagccaga

SEQ ID NO: 665672 - DNA, 33 bp, Homo sapien
ccacttgttccccagcgatggttcttagccaga

SEQ ID NO: 665673 - DNA, 33 bp, Homo sapien
ctgcagtcaactggagccagaacttctcagagg

SEQ ID NO: 665674 - DNA, 33 bp, Homo sapien
ctgcagtcaactggaggcagaacttctcagagg

SEQ ID NO: 665675 - DNA, 33 bp, Homo sapien
gaggcaatgtcaagataaaatcacaacaactgc

SEQ ID NO: 665676 - DNA, 33 bp, Homo sapien
gaggcaatgtcaagatgaaatcacaacaactgc

SEQ ID NO: 665677 - DNA, 33 bp, Homo sapien
agtcatttaagcaaaagtagttttattataagc

SEQ ID NO: 665678 - DNA, 33 bp, Homo sapien
agtcatttaagcaaaattagttttattataagc

SEQ ID NO: 665679 - DNA, 33 bp, Homo sapien
aatctgtttccttagcagaagctcacaaacaaa

SEQ ID NO: 665680 - DNA, 33 bp, Homo sapien
aatctgtttccttagctgaagctcacaaacaaa

SEQ ID NO: 665681 - DNA, 33 bp, Homo sapien
tattgctacacctttaaaaacacagactcattt

SEQ ID NO: 665682 - DNA, 33 bp, Homo sapien
tattgctacacctttagaaacacagactcattt

SEQ ID NO: 665683 - DNA, 33 bp, Homo sapien
ttttgtctgtgccaaaccaaaacaaacaaacaa

SEQ ID NO: 665684 - DNA, 33 bp, Homo sapien
ttttgtctgtgccaaagcaaaacaaacaaacaa

SEQ ID NO: 665685 - DNA, 33 bp, Homo sapien
cacttataccactgacacataataaggactgaa

SEQ ID NO: 665686 - DNA, 33 bp, Homo sapien
cacttataccactgacgcataataaggactgaa

SEQ ID NO: 665687 - DNA, 33 bp, Homo sapien
ctttatagaaacacaactggattaagacagtga

SEQ ID NO: 665688 - DNA, 33 bp, Homo sapien
ctttatagaaacacaattggattaagacagtga

SEQ ID NO: 665689 - DNA, 33 bp, Homo sapien
ttgttaccacttacaacgatgttattatttcta

SEQ ID NO: 665690 - DNA, 33 bp, Homo sapien
ttgttaccacttacaatgatgttattatttcta

SEQ ID NO: 665691 - DNA, 33 bp, Homo sapien
tcttccgctaatgttaaggttacatccaaataa

SEQ ID NO: 665692 - DNA, 33 bp, Homo sapien
tcttccgctaatgttagggttacatccaaataa

SEQ ID NO: 665693 - DNA, 33 bp, Homo sapien
ggagagatagtcagaacgtatttgaagtcctga

SEQ ID NO: 665694 - DNA, 33 bp, Homo sapien
ggagagatagtcagaatgtatttgaagtcctga

SEQ ID NO: 665695 - DNA, 33 bp, Homo sapien
gggattagggtcactacgtagaaaatagaaaca

SEQ ID NO: 665696 - DNA, 33 bp, Homo sapien
gggattagggtcactatgtagaaaatagaaaca

SEQ ID NO: 665697 - DNA, 33 bp, Homo sapien
atgggaagtaaatacaagggaagagcatggtgg

SEQ ID NO: 665698 - DNA, 33 bp, Homo sapien
atgggaagtaaatacatgggaagagcatggtgg

SEQ ID NO: 665699 - DNA, 33 bp, Homo sapien
ttattccgtctacttaaaatgctcagaacattt

SEQ ID NO: 665700 - DNA, 33 bp, Homo sapien
ttattccgtctacttacaatgctcagaacattt

SEQ ID NO: 665701 - DNA, 33 bp, Homo sapien
gggttttacaaagggactattttgtggtggtgg

SEQ ID NO: 665702 - DNA, 33 bp, Homo sapien
gggttttacaaagggattattttgtggtggtgg

SEQ ID NO: 665703 - DNA, 33 bp, Homo sapien
tatcttcaggcattaaatgatggcaatagtaat

SEQ ID NO: 665704 - DNA, 33 bp, Homo sapien
tatcttcaggcattaagtgatggcaatagtaat

SEQ ID NO: 665705 - DNA, 33 bp, Homo sapien
cttcttggacgcaagtaaaaacctggtaataga

SEQ ID NO: 665706 - DNA, 33 bp, Homo sapien
cttcttggacgcaagtgaaaacctggtaataga

SEQ ID NO: 665707 - DNA, 33 bp, Homo sapien
tggaagaaaccttaacggctggattagcgaaat

SEQ ID NO: 665708 - DNA, 33 bp, Homo sapien
tggaagaaaccttaactgctggattagcgaaat

SEQ ID NO: 665709 - DNA, 33 bp, Homo sapien
ttgaaaagttttagcccattcaaatctagcaag

SEQ ID NO: 665710 - DNA, 33 bp, Homo sapien
ttgaaaagttttagcctattcaaatctagcaag

SEQ ID NO: 665711 - DNA, 33 bp, Homo sapien; identical to SEQ ID NO: 665709

SEQ ID NO: 665712 - DNA, 33 bp, Homo sapien; identical to SEQ ID NO: 665710

SEQ ID NO: 665713 - DNA, 33 bp, Homo sapien
aatactttaatcaacaaagagcaactatgttct

SEQ ID NO: 665714 - DNA, 33 bp, Homo sapien
aatactttaatcaacagagagcaactatgttct

SEQ ID NO: 665715 - DNA, 33 bp, Homo sapien
ctcagctaaaacagaaaagagaaatttgagacc

SEQ ID NO: 665716 - DNA, 33 bp, Homo sapien
ctcagctaaaacagaagagagaaatttgagacc

SEQ ID NO: 665717 - DNA, 33 bp, Homo sapien
aactggcaaggttggacataacacagtatgaca

SEQ ID NO: 665718 - DNA, 33 bp, Homo sapien
aactggcaaggttggatataacacagtatgaca

SEQ ID NO: 665719 - DNA, 33 bp, Homo sapien
atcaatggaacagaacaaaatctggaaacatta

SEQ ID NO: 665720 - DNA, 33 bp, Homo sapien
atcaatggaacagaacgaaatctggaaacatta

SEQ ID NO: 665721 - DNA, 33 bp, Homo sapien
taatctctcatcaataagccaatctcttgctct

SEQ ID NO: 665722 - DNA, 33 bp, Homo sapien
taatctctcatcaataggccaatctcttgctct

SEQ ID NO: 665723 - DNA, 33 bp, Homo sapien
taccttgtaatggtcacgtcaaagcagttctct

SEQ ID NO: 665724 - DNA, 33 bp, Homo sapien
taccttgtaatggtcatgtcaaagcagttctct

SEQ ID NO: 665725 - DNA, 33 bp, Homo sapien
gcaccctaaaaatacacattaaatcaaggaagc

SEQ ID NO: 665726 - DNA, 33 bp, Homo sapien
gcaccctaaaaatacatattaaatcaaggaagc

SEQ ID NO: 665727 - DNA, 33 bp, Homo sapien
atcttgaaatcaaacaatgtaaaaagatggata

SEQ ID NO: 665728 - DNA, 33 bp, Homo sapien
atcttgaaatcaaacactgtaaaaagatggata

SEQ ID NO: 665729 - DNA, 33 bp, Homo sapien
gttgaggcaaagtaaactatatcctgagctcat

SEQ ID NO: 665730 - DNA, 33 bp, Homo sapien
gttgaggcaaagtaaattatatcctgagctcat

SEQ ID NO: 665731 - DNA, 33 bp, Homo sapien
cacaagaacagactaaaactaggcatatcctta

SEQ ID NO: 665732 - DNA, 33 bp, Homo sapien
cacaagaacagactaagactaggcatatcctta

SEQ ID NO: 665733 - DNA, 33 bp, Homo sapien
acgtgtccggttaacacagcagagtgaactttt

SEQ ID NO: 665734 - DNA, 33 bp, Homo sapien
acgtgtccggttaacatagcagagtgaactttt

SEQ ID NO: 665735 - DNA, 33 bp, Homo sapien
ggaatatggcatggaagtgttccttctacacat

SEQ ID NO: 665736 - DNA, 33 bp, Homo sapien
ggaatatggcatggaattgttccttctacacat

SEQ ID NO: 665737 - DNA, 33 bp, Homo sapien
aacatctgaaaaatacaccacatcattaatcat

SEQ ID NO: 665738 - DNA, 33 bp, Homo sapien
aacatctgaaaaatactccacatcattaatcat

SEQ ID NO: 665739 - DNA, 33 bp, Homo sapien
ctgctgaaagtaatcacggatgacaaacacaaa

SEQ ID NO: 665740 - DNA, 33 bp, Homo sapien
ctgctgaaagtaatcatggatgacaaacacaaa

SEQ ID NO: 665741 - DNA, 33 bp, Homo sapien
ttgccattttcagaacacacaaataaagatttt

SEQ ID NO: 665742 - DNA, 33 bp, Homo sapien
ttgccattttcagaacgcacaaataaagatttt

SEQ ID NO: 665743 - DNA, 33 bp, Homo sapien
atagtagaatatagtgcatggcaaatttatata

SEQ ID NO: 665744 - DNA, 33 bp, Homo sapien
atagtagaatatagtgtatggcaaatttatata

SEQ ID NO: 665745 - DNA, 33 bp, Homo sapien
cttcttggataacacaagtagtcctccatttat

SEQ ID NO: 665746 - DNA, 33 bp, Homo sapien
cttcttggataacacatgtagtcctccatttat

SEQ ID NO: 665747 - DNA, 33 bp, Homo sapien
agtttcaaactaaataccaggtgtgtttataca

SEQ ID NO: 665748 - DNA, 33 bp, Homo sapien
agtttcaaactaaatatcaggtgtgtttataca

SEQ ID NO: 665749 - DNA, 33 bp, Homo sapien
cacgtgtgacacctacacattaacaatagggat

SEQ ID NO: 665750 - DNA, 33 bp, Homo sapien
cacgtgtgacacctacgcattaacaatagggat

SEQ ID NO: 665751 - DNA, 33 bp, Homo sapien
aagaatgtaagtttaacgagggcaaagatttat

SEQ ID NO: 665752 - DNA, 33 bp, Homo sapien
aagaatgtaagtttaatgagggcaaagatttat

SEQ ID NO: 665753 - DNA, 33 bp, Homo sapien
ctgagaccatgccctccagttacactggcctta

SEQ ID NO: 665754 - DNA, 33 bp, Homo sapien
ctgagaccatgccctctagttacactggcctta

SEQ ID NO: 665755 - DNA, 33 bp, Homo sapien
gatagtgtggttctcacattaaacataatagag

SEQ ID NO: 665756 - DNA, 33 bp, Homo sapien
gatagtgtggttctcagattaaacataatagag

SEQ ID NO: 665757 - DNA, 33 bp, Homo sapien
tgaactaatcgcaatcaacaattcttggctcag

SEQ ID NO: 665758 - DNA, 33 bp, Homo sapien
tgaactaatcgcaatcgacaattcttggctcag

SEQ ID NO: 665759 - DNA, 33 bp, Homo sapien
ggacttttgcaatctacgatcttgttcatcatt

SEQ ID NO: 665760 - DNA, 33 bp, Homo sapien
ggacttttgcaatctatgatcttgttcatcatt

SEQ ID NO: 665761 - DNA, 33 bp, Homo sapien
aatacttgacggattaacaggcatagtgttctt

SEQ ID NO: 665762 - DNA, 33 bp, Homo sapien
aatacttgacggattagcaggcatagtgttctt

SEQ ID NO: 665763 - DNA, 33 bp, Homo sapien
gaagcagagagtttcacgctcttgaaggatctt

SEQ ID NO: 665764 - DNA, 33 bp, Homo sapien
gaagcagagagtttcatgctcttgaaggatctt

SEQ ID NO: 665765 - DNA, 33 bp, Homo sapien
ctactctcttcctccaaaatgaggctttaacat

SEQ ID NO: 665766 - DNA, 33 bp, Homo sapien
ctactctcttcctccagaatgaggctttaacat

SEQ ID NO: 665767 - DNA, 33 bp, Homo sapien
acaagaataagctaaaagtgtcaggagaaccct

SEQ ID NO: 665768 - DNA, 33 bp, Homo sapien
acaagaataagctaaaggtgtcaggagaaccct

SEQ ID NO: 665769 - DNA, 33 bp, Homo sapien
gcacaaagctatcctaacctacaaacagtggac

SEQ ID NO: 665770 - DNA, 33 bp, Homo sapien
gcacaaagctatcctagcctacaaacagtggac

SEQ ID NO: 665771 - DNA, 33 bp, Homo sapien
aaatggtttgttttcacgattttaatccagtgc

SEQ ID NO: 665772 - DNA, 33 bp, Homo sapien
aaatggtttgttttcatgattttaatccagtgc

SEQ ID NO: 665773 - DNA, 33 bp, Homo sapien
ttcaataaatggcaaccagaaatgaacaactca

SEQ ID NO: 665774 - DNA, 33 bp, Homo sapien
ttcaataaatggcaactagaaatgaacaactca

SEQ ID NO: 665775 - DNA, 33 bp, Homo sapien
aaccataaaactagaagatgttggggggctatt

SEQ ID NO: 665776 - DNA, 33 bp, Homo sapien
aaccataaaactagaatatgttggggggctatt

SEQ ID NO: 665777 - DNA, 33 bp, Homo sapien
aaacagtccccagctaagcaacaattttccagt

SEQ ID NO: 665778 - DNA, 33 bp, Homo sapien
aaacagtccccagctaggcaacaattttccagt

SEQ ID NO: 665779 - DNA, 33 bp, Homo sapien
acagtaccttctgtataactattgacactcata

SEQ ID NO: 665780 - DNA, 33 bp, Homo sapien
acagtaccttctgtatgactattgacactcata

SEQ ID NO: 665781 - DNA, 33 bp, Homo sapien
ttgactccaatcatcaaagattagttttgcctg

SEQ ID NO: 665782 - DNA, 33 bp, Homo sapien
ttgactccaatcatcatagattagttttgcctg

SEQ ID NO: 665783 - DNA, 33 bp, Homo sapien
aaatatgttttctggccaaattctgcattgata

SEQ ID NO: 665784 - DNA, 33 bp, Homo sapien
aaatatgttttctggctaaattctgcattgata

SEQ ID NO: 665785 - DNA, 33 bp, Homo sapien
tgtacctgtcaagtgaatacaactaaaaatgaa

SEQ ID NO: 665786 - DNA, 33 bp, Homo sapien
tgtacctgtcaagtgagtacaactaaaaatgaa

SEQ ID NO: 665787 - DNA, 33 bp, Homo sapien
acaactagctaacagcactatggcagaaacaaa

SEQ ID NO: 665788 - DNA, 33 bp, Homo sapien
acaactagctaacagctctatggcagaaacaaa

SEQ ID NO: 665789 - DNA, 33 bp, Homo sapien
aggcgctctgtttttacaactcatgatgactgt

SEQ ID NO: 665790 - DNA, 33 bp, Homo sapien
aggcgctctgtttttataactcatgatgactgt

SEQ ID NO: 665791 - DNA, 33 bp, Homo sapien
atgaagaaagatcaagcatatgacagcgattaa

SEQ ID NO: 665792 - DNA, 33 bp, Homo sapien
atgaagaaagatcaagtatatgacagcgattaa

SEQ ID NO: 665793 - DNA, 33 bp, Homo sapien
ttctgatgtgagtatccctgtctgatataacca

SEQ ID NO: 665794 - DNA, 33 bp, Homo sapien
ttctgatgtgagtatctctgtctgatataacca

SEQ ID NO: 665795 - DNA, 33 bp, Homo sapien
atgccatcacaggtaaacaaaattgtataaatg

SEQ ID NO: 665796 - DNA, 33 bp, Homo sapien
atgccatcacaggtaatcaaaattgtataaatg

SEQ ID NO: 665797 - DNA, 33 bp, Homo sapien
gaaggagggattcctacgctaggattgtagaga

SEQ ID NO: 665798 - DNA, 33 bp, Homo sapien
gaaggagggattcctatgctaggattgtagaga

SEQ ID NO: 665799 - DNA, 33 bp, Homo sapien
ccataataccatggcacatatcagacatttcta

SEQ ID NO: 665800 - DNA, 33 bp, Homo sapien
ccataataccatggcatatatcagacatttcta

SEQ ID NO: 665801 - DNA, 33 bp, Homo sapien
tttggaaatttctggaaaccttttgaatggctt

SEQ ID NO: 665802 - DNA, 33 bp, Homo sapien
tttggaaatttctggagaccttttgaatggctt

SEQ ID NO: 665803 - DNA, 33 bp, Homo sapien
acttgccaataaattaaatgaaactattcatgt

SEQ ID NO: 665804 - DNA, 33 bp, Homo sapien
acttgccaataaattagatgaaactattcatgt

SEQ ID NO: 665805 - DNA, 33 bp, Homo sapien
gttttaaagtacccaaatgttaaaggcatgccc

SEQ ID NO: 665806 - DNA, 33 bp, Homo sapien
gttttaaagtacccaagtgttaaaggcatgccc

SEQ ID NO: 665807 - DNA, 33 bp, Homo sapien
acttgagtatgtaataaaagttaggcagatgaa

SEQ ID NO: 665808 - DNA, 33 bp, Homo sapien
acttgagtatgtaatagaagttaggcagatgaa

SEQ ID NO: 665809 - DNA, 33 bp, Homo sapien
aaaagatatttgtgtaaaccaagccttaaaaaa

SEQ ID NO: 665810 - DNA, 33 bp, Homo sapien
aaaagatatttgtgtacaccaagccttaaaaaa

SEQ ID NO: 665811 - DNA, 33 bp, Homo sapien
ggactgtacctctaaacagcttggttacaagag

SEQ ID NO: 665812 - DNA, 33 bp, Homo sapien
ggactgtacctctaaatagcttggttacaagag

SEQ ID NO: 665813 - DNA, 33 bp, Homo sapien
caacagctatctgtgacaactagagaacatagt

SEQ ID NO: 665814 - DNA, 33 bp, Homo sapien
caacagctatctgtgagaactagagaacatagt

SEQ ID NO: 665815 - DNA, 33 bp, Homo sapien
gtcacatttacatcaccgaacttagattattta

SEQ ID NO: 665816 - DNA, 33 bp, Homo sapien
gtcacatttacatcacggaacttagattattta

SEQ ID NO: 665817 - DNA, 33 bp, Homo sapien
taacagcaaattcttacataacattcgacatgt

SEQ ID NO: 665818 - DNA, 33 bp, Homo sapien
taacagcaaattcttatataacattcgacatgt

SEQ ID NO: 665819 - DNA, 33 bp, Homo sapien
tgtgacacaagtatacaatgtatgatgataaaa

SEQ ID NO: 665820 - DNA, 33 bp, Homo sapien
tgtgacacaagtatacgatgtatgatgataaaa

SEQ ID NO: 665821 - DNA, 33 bp, Homo sapien
ggctggaattattgccacaaaccataataattg

SEQ ID NO: 665822 - DNA, 33 bp, Homo sapien
ggctggaattattgccgcaaaccataataattg

SEQ ID NO: 665823 - DNA, 33 bp, Homo sapien
tcttcctgtgtacctacccctgattctagggca

SEQ ID NO: 665824 - DNA, 33 bp, Homo sapien
tcttcctgtgtacctatccctgattctagggca

SEQ ID NO: 665825 - DNA, 33 bp, Homo sapien
caaaatctgtgttttacattaagaatgctgtaa

SEQ ID NO: 665826 - DNA, 33 bp, Homo sapien
caaaatctgtgttttatattaagaatgctgtaa

SEQ ID NO: 665827 - DNA, 33 bp, Homo sapien
gtctatagtgacagcaataccctcatcttacag

SEQ ID NO: 665828 - DNA, 33 bp, Homo sapien
gtctatagtgacagcagtaccctcatcttacag

SEQ ID NO: 665829 - DNA, 33 bp, Homo sapien
ttcgtttggatcaaagactccaatgaaaccaat

SEQ ID NO: 665830 - DNA, 33 bp, Homo sapien
ttcgtttggatcaaaggctccaatgaaaccaat

SEQ ID NO: 665831 - DNA, 33 bp, Homo sapien
cttcatgttttataaaccatctgggtcttctca

SEQ ID NO: 665832 - DNA, 33 bp, Homo sapien
cttcatgttttataaatcatctgggtcttctca

SEQ ID NO: 665833 - DNA, 33 bp, Homo sapien
ttaaagtagacctaaacagcgagataatagtaa

SEQ ID NO: 665834 - DNA, 33 bp, Homo sapien
ttaaagtagacctaaagagcgagataatagtaa

SEQ ID NO: 665835 - DNA, 33 bp, Homo sapien
gcaatagtaagaagagaagacaccttcatttca

SEQ ID NO: 665836 - DNA, 33 bp, Homo sapien
gcaatagtaagaagaggagacaccttcatttca

SEQ ID NO: 665837 - DNA, 33 bp, Homo sapien
tgatcttcaaactccaaactccaatctccaaag

SEQ ID NO: 665838 - DNA, 33 bp, Homo sapien
tgatcttcaaactccagactccaatctccaaag

SEQ ID NO: 665839 - DNA, 33 bp, Homo sapien
aaatgtagtcatcttcaagaaatgaaatagttc

SEQ ID NO: 665840 - DNA, 33 bp, Homo sapien
aaatgtagtcatcttcgagaaatgaaatagttc

SEQ ID NO: 665841 - DNA, 33 bp, Homo sapien
cttcctgtttcctttcaatgtgcctatgaccag

SEQ ID NO: 665842 - DNA, 33 bp, Homo sapien
cttcctgtttcctttccatgtgcctatgaccag

SEQ ID NO: 665843 - DNA, 33 bp, Homo sapien
tgtgcatcttgactgcaccccaaagaggctcca

SEQ ID NO: 665844 - DNA, 33 bp, Homo sapien
tgtgcatcttgactgcgccccaaagaggctcca

SEQ ID NO: 665845 - DNA, 33 bp, Homo sapien
gttaagatgcggatagcaaaaacaactgggcaa

SEQ ID NO: 665846 - DNA, 33 bp, Homo sapien
gttaagatgcggatagtaaaaacaactgggcaa

SEQ ID NO: 665847 - DNA, 33 bp, Homo sapien
ggctgtgtgatggaaacgctacagagagcctcc

SEQ ID NO: 665848 - DNA, 33 bp, Homo sapien
ggctgtgtgatggaaatgctacagagagcctcc

SEQ ID NO: 665849 - DNA, 33 bp, Homo sapien
ggccactccacctagaaagattatacgctcact

SEQ ID NO: 665850 - DNA, 33 bp, Homo sapien
ggccactccacctagacagattatacgctcact

SEQ ID NO: 665851 - DNA, 33 bp, Homo sapien
tgaatttatggagagacaaagggaccgtggata

SEQ ID NO: 665852 - DNA, 33 bp, Homo sapien
tgaatttatggagagataaagggaccgtggata

SEQ ID NO: 665853 - DNA, 33 bp, Homo sapien
ctaacttggataagaacatcacaaatttctatt

SEQ ID NO: 665854 - DNA, 33 bp, Homo sapien
ctaacttggataagaagatcacaaatttctatt

SEQ ID NO: 665855 - DNA, 33 bp, Homo sapien
acaccaaataaacacaagctgaatttctgttta

SEQ ID NO: 665856 - DNA, 33 bp, Homo sapien
acaccaaataaacacaggctgaatttctgttta

SEQ ID NO: 665857 - DNA, 33 bp, Homo sapien
atttcagtatcttaacactctgacttctcaaca

SEQ ID NO: 665858 - DNA, 33 bp, Homo sapien
atttcagtatcttaaccctctgacttctcaaca

SEQ ID NO: 665859 - DNA, 33 bp, Homo sapien
tcaaactgagaaaataaaatcagcaatatataa

SEQ ID NO: 665860 - DNA, 33 bp, Homo sapien
tcaaactgagaaaatagaatcagcaatatataa

SEQ ID NO: 665861 - DNA, 33 bp, Homo sapien
cgagatgatatggcaacttgaatccccctaaaa

SEQ ID NO: 665862 - DNA, 33 bp, Homo sapien
cgagatgatatggcaagttgaatccccctaaaa

SEQ ID NO: 665863 - DNA, 33 bp, Homo sapien
tctgctatgaagcttacaggatattatgtgtct

SEQ ID NO: 665864 - DNA, 33 bp, Homo sapien
tctgctatgaagcttagaggatattatgtgtct

SEQ ID NO: 665865 - DNA, 33 bp, Homo sapien
actagcattccagagacggttagctgtaaatat

SEQ ID NO: 665866 - DNA, 33 bp, Homo sapien
actagcattccagagatggttagctgtaaatat

SEQ ID NO: 665867 - DNA, 33 bp, Homo sapien
ttatgacagatatagacagtttgtagataagaa

SEQ ID NO: 665868 - DNA, 33 bp, Homo sapien
ttatgacagatatagagagtttgtagataagaa

SEQ ID NO: 665869 - DNA, 33 bp, Homo sapien
tattagaaaacacagcaaacatattgccaacat

SEQ ID NO: 665870 - DNA, 33 bp, Homo sapien
tattagaaaacacagcgaacatattgccaacat

SEQ ID NO: 665871 - DNA, 33 bp, Homo sapien
ctgggttggaagatcactatgttttcttgtctt

SEQ ID NO: 665872 - DNA, 33 bp, Homo sapien
ctgggttggaagatcattatgttttcttgtctt

SEQ ID NO: 665873 - DNA, 33 bp, Homo sapien
atagaccaatgaaaaggaatagggaacccagaa

SEQ ID NO: 665874 - DNA, 33 bp, Homo sapien
atagaccaatgaaaagtaatagggaacccagaa

SEQ ID NO: 665875 - DNA, 33 bp, Homo sapien
gaaattcattttgtaaactataccaatatctta

SEQ ID NO: 665876 - DNA, 33 bp, Homo sapien
gaaattcattttgtaagctataccaatatctta

SEQ ID NO: 665877 - DNA, 33 bp, Homo sapien
tattgtacataaaacacaaaatgtaattccagt

SEQ ID NO: 665878 - DNA, 33 bp, Homo sapien
tattgtacataaaacagaaaatgtaattccagt

SEQ ID NO: 665879 - DNA, 33 bp, Homo sapien
acatcaaagggcttgcacaaaaatttacattga

SEQ ID NO: 665880 - DNA, 33 bp, Homo sapien
acatcaaagggcttgcccaaaaatttacattga

SEQ ID NO: 665881 - DNA, 33 bp, Homo sapien
tgcctcgccagaaaagaaggaagattctaagtc

SEQ ID NO: 665882 - DNA, 33 bp, Homo sapien
tgcctcgccagaaaaggaggaagattctaagtc

SEQ ID NO: 665883 - DNA, 33 bp, Homo sapien
gggtactcaagagatcagactaggccaggcatg

SEQ ID NO: 665884 - DNA, 33 bp, Homo sapien
gggtactcaagagatcggactaggccaggcatg

SEQ ID NO: 665885 - DNA, 33 bp, Homo sapien
agaaagtattacgcaccattactcatgtaacat

SEQ ID NO: 665886 - DNA, 33 bp, Homo sapien
agaaagtattacgcactattactcatgtaacat

SEQ ID NO: 665887 - DNA, 33 bp, Homo sapien
tcaagcttgtcacaggcatgaattccaaactct

SEQ ID NO: 665888 - DNA, 33 bp, Homo sapien
tcaagcttgtcacagggatgaattccaaactct

SEQ ID NO: 665889 - DNA, 33 bp, Homo sapien
tctttctgtattttcaacaatggtaactggcac

SEQ ID NO: 665890 - DNA, 33 bp, Homo sapien
tctttctgtattttcagcaatggtaactggcac

SEQ ID NO: 665891 - DNA, 33 bp, Homo sapien
tggtaaactgctgttcacttgtttggacttaac

SEQ ID NO: 665892 - DNA, 33 bp, Homo sapien
tggtaaactgctgttcgcttgtttggacttaac

SEQ ID NO: 665893 - DNA, 33 bp, Homo sapien
agacagtgggcacctaacttacaagtttatcta

SEQ ID NO: 665894 - DNA, 33 bp, Homo sapien
agacagtgggcacctaccttacaagtttatcta

SEQ ID NO: 665895 - DNA, 33 bp, Homo sapien
atggagtaattgaaagacacctaaaataacaat

SEQ ID NO: 665896 - DNA, 33 bp, Homo sapien
atggagtaattgaaagtcacctaaaataacaat

SEQ ID NO: 665897 - DNA, 33 bp, Homo sapien
agcataaagataggcactacataggaacatctc

SEQ ID NO: 665898 - DNA, 33 bp, Homo sapien
agcataaagataggcattacataggaacatctc

SEQ ID NO: 665899 - DNA, 33 bp, Homo sapien
tttatgctgtaaatcactcatcttgtctttttg

SEQ ID NO: 665900 - DNA, 33 bp, Homo sapien
tttatgctgtaaatcattcatcttgtctttttg

SEQ ID NO: 665901 - DNA, 33 bp, Homo sapien
agttacaatcttaaaacggtagccctgcggtgg

SEQ ID NO: 665902 - DNA, 33 bp, Homo sapien
agttacaatcttaaaatggtagccctgcggtgg

SEQ ID NO: 665903 - DNA, 33 bp, Homo sapien
aagtttatagattctcggaagcccatccttaat

SEQ ID NO: 665904 - DNA, 33 bp, Homo sapien
aagtttatagattctctgaagcccatccttaat

SEQ ID NO: 665905 - DNA, 33 bp, Homo sapien
aatgagcagactcaaaaaacaaatgaaagaaga

SEQ ID NO: 665906 - DNA, 33 bp, Homo sapien
aatgagcagactcaaagaacaaatgaaagaaga

SEQ ID NO: 665907 - DNA, 33 bp, Homo sapien
aaataagttgaattcaaaattgtcctttttatg

SEQ ID NO: 665908 - DNA, 33 bp, Homo sapien
aaataagttgaattcacaattgtcctttttatg

SEQ ID NO: 665909 - DNA, 33 bp, Homo sapien
caaggtctctccgaataagattatgacacaaag

SEQ ID NO: 665910 - DNA, 33 bp, Homo sapien
caaggtctctccgaatgagattatgacacaaag

SEQ ID NO: 665911 - DNA, 33 bp, Homo sapien
ttatgttcacagcaaactcagttcccttcaaat

SEQ ID NO: 665912 - DNA, 33 bp, Homo sapien
ttatgttcacagcaaattcagttcccttcaaat

SEQ ID NO: 665913 - DNA, 33 bp, Homo sapien
acctggagtatgagacagaataaggaaggcacc

SEQ ID NO: 665914 - DNA, 33 bp, Homo sapien
acctggagtatgagacggaataaggaaggcacc

SEQ ID NO: 665915 - DNA, 33 bp, Homo sapien
aatactagctaccagaaacataagattctcaga

SEQ ID NO: 665916 - DNA, 33 bp, Homo sapien
aatactagctaccagagacataagattctcaga

SEQ ID NO: 665917 - DNA, 33 bp, Homo sapien
tgcagaataaatctgaatactcggtcaatattt

SEQ ID NO: 665918 - DNA, 33 bp, Homo sapien
tgcagaataaatctgagtactcggtcaatattt

SEQ ID NO: 665919 - DNA, 33 bp, Homo sapien
aatccacatttttgaaacttggcctatatttgc

SEQ ID NO: 665920 - DNA, 33 bp, Homo sapien
aatccacatttttgaatcttggcctatatttgc

SEQ ID NO: 665921 - DNA, 33 bp, Homo sapien
gtttatttacccacaaactgtttagtgccagac

SEQ ID NO: 665922 - DNA, 33 bp, Homo sapien
gtttatttacccacaatctgtttagtgccagac

SEQ ID NO: 665923 - DNA, 33 bp, Homo sapien
cctctgggagctgagccgcaacaaggcaatgag

SEQ ID NO: 665924 - DNA, 33 bp, Homo sapien
cctctgggagctgagcggcaacaaggcaatgag

SEQ ID NO: 665925 - DNA, 33 bp, Homo sapien
attatgaatactgttacagagtttgttagttgg

SEQ ID NO: 665926 - DNA, 33 bp, Homo sapien
attatgaatactgttatagagtttgttagttgg

SEQ ID NO: 665927 - DNA, 33 bp, Homo sapien
attgctgccagtacaacgatctgtatttagctt

SEQ ID NO: 665928 - DNA, 33 bp, Homo sapien
attgctgccagtacaatgatctgtatttagctt

SEQ ID NO: 665929 - DNA, 33 bp, Homo sapien
gcagtgaagattttgcccagggtcccctgttgt

SEQ ID NO: 665930 - DNA, 33 bp, Homo sapien
gcagtgaagattttgcgcagggtcccctgttgt

SEQ ID NO: 665931 - DNA, 33 bp, Homo sapien
atcagtgaaataggaaatccctctccaacctcc

SEQ ID NO: 665932 - DNA, 33 bp, Homo sapien
atcagtgaaataggaactccctctccaacctcc

SEQ ID NO: 665933 - DNA, 33 bp, Homo sapien
ccacatagatttcagacgaagtttgggaaagcc

SEQ ID NO: 665934 - DNA, 33 bp, Homo sapien
ccacatagatttcagatgaagtttgggaaagcc

SEQ ID NO: 665935 - DNA, 33 bp, Homo sapien
cagaattcacttacaacaaaatcacttccattc

SEQ ID NO: 665936 - DNA, 33 bp, Homo sapien
cagaattcacttacaagaaaatcacttccattc

SEQ ID NO: 665937 - DNA, 33 bp, Homo sapien
gcccatgttctagtcactcatcctttctcagtc

SEQ ID NO: 665938 - DNA, 33 bp, Homo sapien
gcccatgttctagtcattcatcctttctcagtc

SEQ ID NO: 665939 - DNA, 33 bp, Homo sapien
cagtctcactcctaccactacaagagacacctg

SEQ ID NO: 665940 - DNA, 33 bp, Homo sapien
cagtctcactcctaccgctacaagagacacctg

SEQ ID NO: 665941 - DNA, 33 bp, Homo sapien
ggagtttctcagagaacaggcataagagaagtg

SEQ ID NO: 665942 - DNA, 33 bp, Homo sapien
ggagtttctcagagaataggcataagagaagtg

SEQ ID NO: 665943 - DNA, 33 bp, Homo sapien
ccatttctcacacaaaaccctctctgctacttc

SEQ ID NO: 665944 - DNA, 33 bp, Homo sapien
ccatttctcacacaaagccctctctgctacttc

SEQ ID NO: 665945 - DNA, 33 bp, Homo sapien
ttagtttccctattaaacagcaagtgcctttcc

SEQ ID NO: 665946 - DNA, 33 bp, Homo sapien
ttagtttccctattaatcagcaagtgcctttcc

SEQ ID NO: 665947 - DNA, 33 bp, Homo sapien
acttgttcattaatgcacctggtattacctcct

SEQ ID NO: 665948 - DNA, 33 bp, Homo sapien
acttgttcattaatgcgcctggtattacctcct

SEQ ID NO: 665949 - DNA, 33 bp, Homo sapien
aaatgaacaacaaatacgccgcagtcagagaac

SEQ ID NO: 665950 - DNA, 33 bp, Homo sapien
aaatgaacaacaaatatgccgcagtcagagaac

SEQ ID NO: 665951 - DNA, 33 bp, Homo sapien
catgcatgtttgttcaataggcatgtgtcagga

SEQ ID NO: 665952 - DNA, 33 bp, Homo sapien
catgcatgtttgttcagtaggcatgtgtcagga

SEQ ID NO: 665953 - DNA, 33 bp, Homo sapien
ttggctagaaatttgaataccaaaatccagtgg

SEQ ID NO: 665954 - DNA, 33 bp, Homo sapien
ttggctagaaatttgactaccaaaatccagtgg

SEQ ID NO: 665955 - DNA, 33 bp, Homo sapien
tggtcttctagttagcacctgtccatcattcag

SEQ ID NO: 665956 - DNA, 33 bp, Homo sapien
tggtcttctagttagctcctgtccatcattcag

SEQ ID NO: 665957 - DNA, 33 bp, Homo sapien
caaagacaacctctgagagaaaatataaaatgt

SEQ ID NO: 665958 - DNA, 33 bp, Homo sapien
caaagacaacctctgatagaaaatataaaatgt

SEQ ID NO: 665959 - DNA, 33 bp, Homo sapien
taaaactagtaatacactaagatgcacaaaaaa

SEQ ID NO: 665960 - DNA, 33 bp, Homo sapien
taaaactagtaatacattaagatgcacaaaaaa

SEQ ID NO: 665961 - DNA, 33 bp, Homo sapien
aaatttgtccaagacactggagctagcaccttc

SEQ ID NO: 665962 - DNA, 33 bp, Homo sapien
aaatttgtccaagacagtggagctagcaccttc

SEQ ID NO: 665963 - DNA, 33 bp, Homo sapien
catgtagtcacagcaaagtttacatggaacata

SEQ ID NO: 665964 - DNA, 33 bp, Homo sapien
catgtagtcacagcaaggtttacatggaacata

SEQ ID NO: 665965 - DNA, 33 bp, Homo sapien
tttctggacatgatcacataaaaaacacttatc

SEQ ID NO: 665966 - DNA, 33 bp, Homo sapien
tttctggacatgatcatataaaaaacacttatc

SEQ ID NO: 665967 - DNA, 33 bp, Homo sapien
ttacaggtggtataaaggaactttacagaaaag

SEQ ID NO: 665968 - DNA, 33 bp, Homo sapien
ttacaggtggtataaatgaactttacagaaaag

SEQ ID NO: 665969 - DNA, 33 bp, Homo sapien
tagggcctgtaatataatagatgccgattatga

SEQ ID NO: 665970 - DNA, 33 bp, Homo sapien
tagggcctgtaatatactagatgccgattatga

SEQ ID NO: 665971 - DNA, 33 bp, Homo sapien
gaggagggcaattcaaactttctccactgaaac

SEQ ID NO: 665972 - DNA, 33 bp, Homo sapien
gaggagggcaattcaacctttctccactgaaac

SEQ ID NO: 665973 - DNA, 33 bp, Homo sapien
ttgtctaccatttgcccagaggtcacttttctc

SEQ ID NO: 665974 - DNA, 33 bp, Homo sapien
ttgtctaccatttgcctagaggtcacttttctc

SEQ ID NO: 665975 - DNA, 33 bp, Homo sapien
gaagggccatttgtcaaggctagaaatgtaaag

SEQ ID NO: 665976 - DNA, 33 bp, Homo sapien
gaagggccatttgtcacggctagaaatgtaaag

SEQ ID NO: 665977 - DNA, 33 bp, Homo sapien
taaagaaatgccagtgaacagtaaggattctcc

SEQ ID NO: 665978 - DNA, 33 bp, Homo sapien
taaagaaatgccagtggacagtaaggattctcc

SEQ ID NO: 665979 - DNA, 33 bp, Homo sapien
cataagtagagaaacaaaaattgaactcaaaat

SEQ ID NO: 665980 - DNA, 33 bp, Homo sapien
cataagtagagaaacacaaattgaactcaaaat

SEQ ID NO: 665981 - DNA, 33 bp, Homo sapien
ccaaacagtgaggtcaggtttagaaaattattt

SEQ ID NO: 665982 - DNA, 33 bp, Homo sapien
ccaaacagtgaggtcatgtttagaaaattattt

SEQ ID NO: 665983 - DNA, 33 bp, Homo sapien
atgccattaaaagtgaaagaaatgctatattta

SEQ ID NO: 665984 - DNA, 33 bp, Homo sapien
atgccattaaaagtgagagaaatgctatattta

SEQ ID NO: 665985 - DNA, 33 bp, Homo sapien
ccattattgctcaccaatatttatcacgtggta

SEQ ID NO: 665986 - DNA, 33 bp, Homo sapien
ccattattgctcaccagtatttatcacgtggta

SEQ ID NO: 665987 - DNA, 33 bp, Homo sapien
aaaacaccgctaattaacattttcttacctgta

SEQ ID NO: 665988 - DNA, 33 bp, Homo sapien
aaaacaccgctaattaccattttcttacctgta

SEQ ID NO: 665989 - DNA, 33 bp, Homo sapien
ctgcccaacaatgctcactcaatagatatttgt

SEQ ID NO: 665990 - DNA, 33 bp, Homo sapien
ctgcccaacaatgctcgctcaatagatatttgt

SEQ ID NO: 665991 - DNA, 33 bp, Homo sapien
aatttagttagggagacagatgtcaaattacca

SEQ ID NO: 665992 - DNA, 33 bp, Homo sapien
aatttagttagggagatagatgtcaaattacca

SEQ ID NO: 665993 - DNA, 33 bp, Homo sapien
atcacttagcacaaaaggtaattacacaatcat

SEQ ID NO: 665994 - DNA, 33 bp, Homo sapien
atcacttagcacaaaatgtaattacacaatcat

SEQ ID NO: 665995 - DNA, 33 bp, Homo sapien
ccaatttctaaccaccacatggcatttcagtat

SEQ ID NO: 665996 - DNA, 33 bp, Homo sapien
ccaatttctaaccaccgcatggcatttcagtat

SEQ ID NO: 665997 - DNA, 33 bp, Homo sapien
acacatcagaggcagcaaggagagtgagaaatc

SEQ ID NO: 665998 - DNA, 33 bp, Homo sapien
acacatcagaggcagcgaggagagtgagaaatc

SEQ ID NO: 665999 - DNA, 33 bp, Homo sapien
gcctccagtgcaagagactaaataaataatgct

SEQ ID NO: 666000 - DNA, 33 bp, Homo sapien
gcctccagtgcaagaggctaaataaataatgct

SEQ ID NO: 666001 - DNA, 33 bp, Homo sapien
caactggaatttcaaccgttctgattttgtaat

SEQ ID NO: 666002 - DNA, 33 bp, Homo sapien
caactggaatttcaacggttctgattttgtaat

SEQ ID NO: 666003 - DNA, 33 bp, Homo sapien
aaacgattttgagccaatgatttggtatctaat

SEQ ID NO: 666004 - DNA, 33 bp, Homo sapien
aaacgattttgagccagtgatttggtatctaat

SEQ ID NO: 666005 - DNA, 33 bp, Homo sapien
agaaactttgcaggaacgtcaaggaatatgaca

SEQ ID NO: 666006 - DNA, 33 bp, Homo sapien
agaaactttgcaggaatgtcaaggaatatgaca

SEQ ID NO: 666007 - DNA, 33 bp, Homo sapien
tgctcacagttgaaataatgaggtacaaatgac

SEQ ID NO: 666008 - DNA, 33 bp, Homo sapien
tgctcacagttgaaatgatgaggtacaaatgac

SEQ ID NO: 666009 - DNA, 33 bp, Homo sapien
gattaatgcatgacaaagggttaatcacaagat

SEQ ID NO: 666010 - DNA, 33 bp, Homo sapien
gattaatgcatgacaacgggttaatcacaagat

SEQ ID NO: 666011 - DNA, 33 bp, Homo sapien
tatgagatgagagataaggggtaaattaacaaa

SEQ ID NO: 666012 - DNA, 33 bp, Homo sapien
tatgagatgagagatagggggtaaattaacaaa

SEQ ID NO: 666013 - DNA, 33 bp, Homo sapien
gctcactggcaaatgactaggtagcataatcat

SEQ ID NO: 666014 - DNA, 33 bp, Homo sapien
gctcactggcaaatgattaggtagcataatcat

SEQ ID NO: 666015 - DNA, 33 bp, Homo sapien
ggttctgcaggaagaaaatagtaacaagagaat

SEQ ID NO: 666016 - DNA, 33 bp, Homo sapien
ggttctgcaggaagaagatagtaacaagagaat

SEQ ID NO: 666017 - DNA, 33 bp, Homo sapien
aatttttgcagctgacaattttaccacttcttg

SEQ ID NO: 666018 - DNA, 33 bp, Homo sapien
aatttttgcagctgaccattttaccacttcttg

SEQ ID NO: 666019 - DNA, 33 bp, Homo sapien
tcatagagtagaataaaccattacagctctgat

SEQ ID NO: 666020 - DNA, 33 bp, Homo sapien
tcatagagtagaataagccattacagctctgat

SEQ ID NO: 666021 - DNA, 33 bp, Homo sapien
agattttgctatgatacgcttgtgtaagttgga

SEQ ID NO: 666022 - DNA, 33 bp, Homo sapien
agattttgctatgatatgcttgtgtaagttgga

SEQ ID NO: 666023 - DNA, 33 bp, Homo sapien
tgcagccagcatttaaaatagtgtgtttttctc

SEQ ID NO: 666024 - DNA, 33 bp, Homo sapien
tgcagccagcatttaatatagtgtgtttttctc

SEQ ID NO: 666025 - DNA, 33 bp, Homo sapien
atcaagcttatttctacgtcactgtcactaaag

SEQ ID NO: 666026 - DNA, 33 bp, Homo sapien
atcaagcttatttctatgtcactgtcactaaag

SEQ ID NO: 666027 - DNA, 33 bp, Homo sapien
gaaggatctttgtccagcatagaattagcaaca

SEQ ID NO: 666028 - DNA, 33 bp, Homo sapien
gaaggatctttgtccatcatagaattagcaaca

SEQ ID NO: 666029 - DNA, 33 bp, Homo sapien
tgtaaatcatggaaacagtcaatggatattaga

SEQ ID NO: 666030 - DNA, 33 bp, Homo sapien
tgtaaatcatggaaacggtcaatggatattaga

SEQ ID NO: 666031 - DNA, 33 bp, Homo sapien
ctacagctactctgaacctcttaaccttcccat

SEQ ID NO: 666032 - DNA, 33 bp, Homo sapien
ctacagctactctgaatctcttaaccttcccat

SEQ ID NO: 666033 - DNA, 33 bp, Homo sapien
gtgagcctccgaacaaacaattctgactaattt

SEQ ID NO: 666034 - DNA, 33 bp, Homo sapien
gtgagcctccgaacaatcaattctgactaattt

SEQ ID NO: 666035 - DNA, 33 bp, Homo sapien
ctctgagagccagaaacgtgtgggctttttgtt

SEQ ID NO: 666036 - DNA, 33 bp, Homo sapien
ctctgagagccagaaatgtgtgggctttttgtt

SEQ ID NO: 666037 - DNA, 33 bp, Homo sapien
cctccacaatcatagaagttgctagacctaata

SEQ ID NO: 666038 - DNA, 33 bp, Homo sapien
cctccacaatcatagaggttgctagacctaata

SEQ ID NO: 666039 - DNA, 33 bp, Homo sapien
ctctgcattctaataggctacgtccaagaattc

SEQ ID NO: 666040 - DNA, 33 bp, Homo sapien
ctctgcattctaatagtctacgtccaagaattc

SEQ ID NO: 666041 - DNA, 33 bp, Homo sapien
cacaggtaagcaatacaaaaatggcagagctgt

SEQ ID NO: 666042 - DNA, 33 bp, Homo sapien
cacaggtaagcaatacgaaaatggcagagctgt

SEQ ID NO: 666043 - DNA, 33 bp, Homo sapien
cctgactgaagaatggcccaactgtaggcaaat

SEQ ID NO: 666044 - DNA, 33 bp, Homo sapien
cctgactgaagaatgggccaactgtaggcaaat

SEQ ID NO: 666045 - DNA, 33 bp, Homo sapien
cactttataactgataactaaaaatgtccagct

SEQ ID NO: 666046 - DNA, 33 bp, Homo sapien
cactttataactgatacctaaaaatgtccagct

SEQ ID NO: 666047 - DNA, 33 bp, Homo sapien
caggaaatgaatttcaatagatgctttctaatc

SEQ ID NO: 666048 - DNA, 33 bp, Homo sapien
caggaaatgaatttcagtagatgctttctaatc

SEQ ID NO: 666049 - DNA, 33 bp, Homo sapien
taaaacacctgttcagcacatatcaaataaaat

SEQ ID NO: 666050 - DNA, 33 bp, Homo sapien
taaaacacctgttcagtacatatcaaataaaat

SEQ ID NO: 666051 - DNA, 33 bp, Homo sapien
gtttgcttctagacaagatgtgtgacagtatgt

SEQ ID NO: 666052 - DNA, 33 bp, Homo sapien
gtttgcttctagacaatatgtgtgacagtatgt

SEQ ID NO: 666053 - DNA, 33 bp, Homo sapien
atggttcattcaaatcacacaggtacatttcta

SEQ ID NO: 666054 - DNA, 33 bp, Homo sapien
atggttcattcaaatcgcacaggtacatttcta

SEQ ID NO: 666055 - DNA, 33 bp, Homo sapien
ctcatttatcaaatgcaaaaactgaagggcaga

SEQ ID NO: 666056 - DNA, 33 bp, Homo sapien
ctcatttatcaaatgcgaaaactgaagggcaga

SEQ ID NO: 666057 - DNA, 33 bp, Homo sapien
gagaaactgccacaggccagaggagactaagga

SEQ ID NO: 666058 - DNA, 33 bp, Homo sapien
gagaaactgccacaggtcagaggagactaagga

SEQ ID NO: 666059 - DNA, 33 bp, Homo sapien
catattgtagacttaaaattaaattgcccataa

SEQ ID NO: 666060 - DNA, 33 bp, Homo sapien
catattgtagacttaagattaaattgcccataa

SEQ ID NO: 666061 - DNA, 33 bp, Homo sapien
tggtttgacaatacaccaacacatacacataat

SEQ ID NO: 666062 - DNA, 33 bp, Homo sapien
tggtttgacaatacactaacacatacacataat

SEQ ID NO: 666063 - DNA, 33 bp, Homo sapien
gatggactcttattacaggagcagaaactagaa

SEQ ID NO: 666064 - DNA, 33 bp, Homo sapien
gatggactcttattactggagcagaaactagaa

SEQ ID NO: 666065 - DNA, 33 bp, Homo sapien
ttgctcatgtttcatcgcctctagcatatcttc

SEQ ID NO: 666066 - DNA, 33 bp, Homo sapien
ttgctcatgtttcatctcctctagcatatcttc

SEQ ID NO: 666067 - DNA, 33 bp, Homo sapien
ttcaacatgactcttgaaactgatactcaactt

SEQ ID NO: 666068 - DNA, 33 bp, Homo sapien
ttcaacatgactcttggaactgatactcaactt

SEQ ID NO: 666069 - DNA, 33 bp, Homo sapien
tactttggatataccaccacgaaaaattcacaa

SEQ ID NO: 666070 - DNA, 33 bp, Homo sapien
tactttggatataccatcacgaaaaattcacaa

SEQ ID NO: 666071 - DNA, 33 bp, Homo sapien
aagaaattatggctgaaaatgtaaccaaatttc

SEQ ID NO: 666072 - DNA, 33 bp, Homo sapien
aagaaattatggctgacaatgtaaccaaatttc

SEQ ID NO: 666073 - DNA, 33 bp, Homo sapien
tgataatcaaactagactctagcaaaatattga

SEQ ID NO: 666074 - DNA, 33 bp, Homo sapien
tgataatcaaactagagtctagcaaaatattga

SEQ ID NO: 666075 - DNA, 33 bp, Homo sapien
aggcccctagtccagcacaaattcaccaagtgg

SEQ ID NO: 666076 - DNA, 33 bp, Homo sapien
aggcccctagtccagcgcaaattcaccaagtgg

SEQ ID NO: 666077 - DNA, 33 bp, Homo sapien
aacctaatcctacttacgtgcattattaattga

SEQ ID NO: 666078 - DNA, 33 bp, Homo sapien
aacctaatcctacttatgtgcattattaattga

SEQ ID NO: 666079 - DNA, 33 bp, Homo sapien
atgagcagatcggttacgacagttcacaccagt

SEQ ID NO: 666080 - DNA, 33 bp, Homo sapien
atgagcagatcggttaggacagttcacaccagt

SEQ ID NO: 666081 - DNA, 33 bp, Homo sapien
cttccagaccctgagaatacaacaggattataa

SEQ ID NO: 666082 - DNA, 33 bp, Homo sapien
cttccagaccctgagagtacaacaggattataa

SEQ ID NO: 666083 - DNA, 33 bp, Homo sapien
cttttccaccagataaactcaagatttctgtgc

SEQ ID NO: 666084 - DNA, 33 bp, Homo sapien
cttttccaccagataagctcaagatttctgtgc

SEQ ID NO: 666085 - DNA, 33 bp, Homo sapien
atggtcaggagtaagaactgctgagagtaattt

SEQ ID NO: 666086 - DNA, 33 bp, Homo sapien
atggtcaggagtaagacctgctgagagtaattt

SEQ ID NO: 666087 - DNA, 33 bp, Homo sapien
aataatacatagaacactgcatctaatgtgaat

SEQ ID NO: 666088 - DNA, 33 bp, Homo sapien
aataatacatagaacattgcatctaatgtgaat

SEQ ID NO: 666089 - DNA, 33 bp, Homo sapien
tacgaagtgaagaataagcatgtttcatctcag

SEQ ID NO: 666090 - DNA, 33 bp, Homo sapien
tacgaagtgaagaataggcatgtttcatctcag

SEQ ID NO: 666091 - DNA, 33 bp, Homo sapien
agagaacactgtgatgaacttctaaaaatcaac

SEQ ID NO: 666092 - DNA, 33 bp, Homo sapien
agagaacactgtgatggacttctaaaaatcaac

SEQ ID NO: 666093 - DNA, 33 bp, Homo sapien
aggcaaattcactatgaagaatcagatacttca

SEQ ID NO: 666094 - DNA, 33 bp, Homo sapien
aggcaaattcactatgtagaatcagatacttca

SEQ ID NO: 666095 - DNA, 33 bp, Homo sapien
aaaccaaattcaatcagaattcaaaatgagtcc

SEQ ID NO: 666096 - DNA, 33 bp, Homo sapien
aaaccaaattcaatcataattcaaaatgagtcc

SEQ ID NO: 666097 - DNA, 33 bp, Homo sapien
tgtttgcatgtgtgtagctatgtgccagctgtt

SEQ ID NO: 666098 - DNA, 33 bp, Homo sapien
tgtttgcatgtgtgtatctatgtgccagctgtt

SEQ ID NO: 666099 - DNA, 33 bp, Homo sapien
catagacaaagcttccagataccagggacaaag

SEQ ID NO: 666100 - DNA, 33 bp, Homo sapien
catagacaaagcttcccgataccagggacaaag

SEQ ID NO: 666101 - DNA, 33 bp, Homo sapien
tagtgtttgatatttacactctcttccctttca

SEQ ID NO: 666102 - DNA, 33 bp, Homo sapien
tagtgtttgatatttatactctcttccctttca

SEQ ID NO: 666103 - DNA, 33 bp, Homo sapien
actgacgtggtacactcagatgatggcattatt

SEQ ID NO: 666104 - DNA, 33 bp, Homo sapien
actgacgtggtacactgagatgatggcattatt

SEQ ID NO: 666105 - DNA, 33 bp, Homo sapien
gtgaacagagtcatgaatagttgaaaaaataca

SEQ ID NO: 666106 - DNA, 33 bp, Homo sapien
gtgaacagagtcatgagtagttgaaaaaataca

SEQ ID NO: 666107 - DNA, 33 bp, Homo sapien
tgttattaaagtagcacagttaacaaccatgaa

SEQ ID NO: 666108 - DNA, 33 bp, Homo sapien
tgttattaaagtagcatagttaacaaccatgaa

SEQ ID NO: 666109 - DNA, 33 bp, Homo sapien
atgcttcttcagcaatcactgagtctaattgcc

SEQ ID NO: 666110 - DNA, 33 bp, Homo sapien
atgcttcttcagcaatgactgagtctaattgcc

SEQ ID NO: 666111 - DNA, 33 bp, Homo sapien
ggcaaataaacacatgaaaaattgtccaatatc

SEQ ID NO: 666112 - DNA, 33 bp, Homo sapien
ggcaaataaacacatggaaaattgtccaatatc

SEQ ID NO: 666113 - DNA, 33 bp, Homo sapien
tttggctatcagttcaaaagcctcatgccagca

SEQ ID NO: 666114 - DNA, 33 bp, Homo sapien
tttggctatcagttcagaagcctcatgccagca

SEQ ID NO: 666115 - DNA, 33 bp, Homo sapien
ctatcatagtaacaacacatttgaatgaatgat

SEQ ID NO: 666116 - DNA, 33 bp, Homo sapien
ctatcatagtaacaacccatttgaatgaatgat

SEQ ID NO: 666117 - DNA, 33 bp, Homo sapien
ttcaatggtcaggtaacgcttctcctggatcag

SEQ ID NO: 666118 - DNA, 33 bp, Homo sapien
ttcaatggtcaggtaatgcttctcctggatcag

SEQ ID NO: 666119 - DNA, 33 bp, Homo sapien
aaacaagcctgattgacactactcgattttaag

SEQ ID NO: 666120 - DNA, 33 bp, Homo sapien
aaacaagcctgattgatactactcgattttaag

SEQ ID NO: 666121 - DNA, 33 bp, Homo sapien
caggagttaggggagaaaagacgaataggtgga

SEQ ID NO: 666122 - DNA, 33 bp, Homo sapien
caggagttaggggagagaagacgaataggtgga

SEQ ID NO: 666123 - DNA, 33 bp, Homo sapien
aatatattttaagaagaaaagcaagatgtaaaa

SEQ ID NO: 666124 - DNA, 33 bp, Homo sapien
aatatattttaagaagtaaagcaagatgtaaaa

SEQ ID NO: 666125 - DNA, 33 bp, Homo sapien
atataaggaaagccataacaattagctcaaaaa

SEQ ID NO: 666126 - DNA, 33 bp, Homo sapien
atataaggaaagccatgacaattagctcaaaaa

SEQ ID NO: 666127 - DNA, 33 bp, Homo sapien
cttgtcatctcaacaagactgcactttgcttga

SEQ ID NO: 666128 - DNA, 33 bp, Homo sapien
cttgtcatctcaacaatactgcactttgcttga

SEQ ID NO: 666129 - DNA, 33 bp, Homo sapien
gagctcaacaacagaaacttgctctcatcaagg

SEQ ID NO: 666130 - DNA, 33 bp, Homo sapien
gagctcaacaacagaatcttgctctcatcaagg

SEQ ID NO: 666131 - DNA, 33 bp, Homo sapien
ccctcttgacctgctaagtatgtaattgagcat

SEQ ID NO: 666132 - DNA, 33 bp, Homo sapien
ccctcttgacctgctaggtatgtaattgagcat

SEQ ID NO: 666133 - DNA, 33 bp, Homo sapien
ccattgagttgaacaacgtaaatgaatgaattt

SEQ ID NO: 666134 - DNA, 33 bp, Homo sapien
ccattgagttgaacaatgtaaatgaatgaattt

SEQ ID NO: 666135 - DNA, 33 bp, Homo sapien
agaggtgagaatttggcattaggcaaagagaag

SEQ ID NO: 666136 - DNA, 33 bp, Homo sapien
agaggtgagaatttggtattaggcaaagagaag

SEQ ID NO: 666137 - DNA, 33 bp, Homo sapien
cttcactttcaatacacattatggacatttttc

SEQ ID NO: 666138 - DNA, 33 bp, Homo sapien
cttcactttcaatacatattatggacatttttc

SEQ ID NO: 666139 - DNA, 33 bp, Homo sapien
aggccatgatttaaaacaggaagtgacattgaa

SEQ ID NO: 666140 - DNA, 33 bp, Homo sapien
aggccatgatttaaaagaggaagtgacattgaa

SEQ ID NO: 666141 - DNA, 33 bp, Homo sapien
taggactttttctggaactattcacacattcag

SEQ ID NO: 666142 - DNA, 33 bp, Homo sapien
taggactttttctggacctattcacacattcag

SEQ ID NO: 666143 - DNA, 33 bp, Homo sapien
aaatgttcatttatcaaccgcataaactactga

SEQ ID NO: 666144 - DNA, 33 bp, Homo sapien
aaatgttcatttatcacccgcataaactactga

SEQ ID NO: 666145 - DNA, 33 bp, Homo sapien
cttgaaatggtggataacaactattcttctgtg

SEQ ID NO: 666146 - DNA, 33 bp, Homo sapien
cttgaaatggtggatatcaactattcttctgtg

SEQ ID NO: 666147 - DNA, 33 bp, Homo sapien
aaacaaaaatggctgccaatcagagtctcacat

SEQ ID NO: 666148 - DNA, 33 bp, Homo sapien
aaacaaaaatggctgcgaatcagagtctcacat

SEQ ID NO: 666149 - DNA, 33 bp, Homo sapien
gcaatgaaattgtacaagtccggattctgttgt

SEQ ID NO: 666150 - DNA, 33 bp, Homo sapien
gcaatgaaattgtacacgtccggattctgttgt

SEQ ID NO: 666151 - DNA, 33 bp, Homo sapien
aatttcttacaagtagccctgtcttccaaagct

SEQ ID NO: 666152 - DNA, 33 bp, Homo sapien
aatttcttacaagtagtcctgtcttccaaagct

SEQ ID NO: 666153 - DNA, 33 bp, Homo sapien
atagtagcaacaattacactaatgagtacattt

SEQ ID NO: 666154 - DNA, 33 bp, Homo sapien
atagtagcaacaattatactaatgagtacattt

SEQ ID NO: 666155 - DNA, 33 bp, Homo sapien
tctcaggtgcgacagaacataatgtgcaaggaa

SEQ ID NO: 666156 - DNA, 33 bp, Homo sapien
tctcaggtgcgacagagcataatgtgcaaggaa

SEQ ID NO: 666157 - DNA, 33 bp, Homo sapien
ctcttctaattggagcctcttaaattgaaggag

SEQ ID NO: 666158 - DNA, 33 bp, Homo sapien
ctcttctaattggagcttcttaaattgaaggag

SEQ ID NO: 666159 - DNA, 33 bp, Homo sapien
atggcagagattagtaccaacttcaaggattta

SEQ ID NO: 666160 - DNA, 33 bp, Homo sapien
atggcagagattagtatcaacttcaaggattta

SEQ ID NO: 666161 - DNA, 33 bp, Homo sapien
tctttgttgaacttcacgcctgtgctttatata

SEQ ID NO: 666162 - DNA, 33 bp, Homo sapien
tctttgttgaacttcatgcctgtgctttatata

SEQ ID NO: 666163 - DNA, 33 bp, Homo sapien
tagttctaagaaaacaccacttatccagtttcc

SEQ ID NO: 666164 - DNA, 33 bp, Homo sapien
tagttctaagaaaacagcacttatccagtttcc

SEQ ID NO: 666165 - DNA, 33 bp, Homo sapien
gacttttctactttaacatttcctgagagactt

SEQ ID NO: 666166 - DNA, 33 bp, Homo sapien
gacttttctactttaatatttcctgagagactt

SEQ ID NO: 666167 - DNA, 33 bp, Homo sapien
taatttgagggaacgaaggtagctccagagctg

SEQ ID NO: 666168 - DNA, 33 bp, Homo sapien
taatttgagggaacgatggtagctccagagctg

SEQ ID NO: 666169 - DNA, 33 bp, Homo sapien
gccttttgtagtatataagccaaaagttaattt

SEQ ID NO: 666170 - DNA, 33 bp, Homo sapien
gccttttgtagtatatgagccaaaagttaattt

SEQ ID NO: 666171 - DNA, 33 bp, Homo sapien
ctgcaccacctatagcccctggattgctaatag

SEQ ID NO: 666172 - DNA, 33 bp, Homo sapien
ctgcaccacctatagctcctggattgctaatag

SEQ ID NO: 666173 - DNA, 33 bp, Homo sapien
gattataaatgggaacacatgcaaatgtctact

SEQ ID NO: 666174 - DNA, 33 bp, Homo sapien
gattataaatgggaacgcatgcaaatgtctact

SEQ ID NO: 666175 - DNA, 33 bp, Homo sapien
taaatgcaaatctttaaaagccatcaaaacctg

SEQ ID NO: 666176 - DNA, 33 bp, Homo sapien
taaatgcaaatctttataagccatcaaaacctg

SEQ ID NO: 666177 - DNA, 33 bp, Homo sapien
tactgaagaaccttacacagatgtcacactagc

SEQ ID NO: 666178 - DNA, 33 bp, Homo sapien
tactgaagaaccttacgcagatgtcacactagc

SEQ ID NO: 666179 - DNA, 33 bp, Homo sapien
ctcagccattcctcaagaaccaaattaagttca

SEQ ID NO: 666180 - DNA, 33 bp, Homo sapien
ctcagccattcctcaataaccaaattaagttca

SEQ ID NO: 666181 - DNA, 33 bp, Homo sapien
caactcaaaggaacaactagttatgattttagg

SEQ ID NO: 666182 - DNA, 33 bp, Homo sapien
caactcaaaggaacaattagttatgattttagg

SEQ ID NO: 666183 - DNA, 33 bp, Homo sapien
aaacacataaaaaaacgcaacattattagccag

SEQ ID NO: 666184 - DNA, 33 bp, Homo sapien
aaacacataaaaaaactcaacattattagccag

SEQ ID NO: 666185 - DNA, 33 bp, Homo sapien
gatacccttggaagtacagatgctgttaatatt

SEQ ID NO: 666186 - DNA, 33 bp, Homo sapien
gatacccttggaagtatagatgctgttaatatt

SEQ ID NO: 666187 - DNA, 33 bp, Homo sapien
accctactcacctatcaaacattaattgatttt

SEQ ID NO: 666188 - DNA, 33 bp, Homo sapien
accctactcacctatctaacattaattgatttt

SEQ ID NO: 666189 - DNA, 33 bp, Homo sapien
aaatgtaggcaaattgaatccaataacatatga

SEQ ID NO: 666190 - DNA, 33 bp, Homo sapien
aaatgtaggcaaattgcatccaataacatatga

SEQ ID NO: 666191 - DNA, 33 bp, Homo sapien
ttaacttcacctcaaaagtagcacaacttttaa

SEQ ID NO: 666192 - DNA, 33 bp, Homo sapien
ttaacttcacctcaaacgtagcacaacttttaa

SEQ ID NO: 666193 - DNA, 33 bp, Homo sapien
tgaataatcaaactgaagaaggagaagcaagat

SEQ ID NO: 666194 - DNA, 33 bp, Homo sapien
tgaataatcaaactgaggaaggagaagcaagat

SEQ ID NO: 666195 - DNA, 33 bp, Homo sapien
attattctgtataacaatgctaaagttggtatg

SEQ ID NO: 666196 - DNA, 33 bp, Homo sapien
attattctgtataacagtgctaaagttggtatg

SEQ ID NO: 666197 - DNA, 33 bp, Homo sapien
tgacacaaagacagtacgctttattttacatct

SEQ ID NO: 666198 - DNA, 33 bp, Homo sapien
tgacacaaagacagtatgctttattttacatct

SEQ ID NO: 666199 - DNA, 33 bp, Homo sapien
aacttacattccagtgcataaagatgagaacaa

SEQ ID NO: 666200 - DNA, 33 bp, Homo sapien
aacttacattccagtgtataaagatgagaacaa

SEQ ID NO: 666201 - DNA, 33 bp, Homo sapien
gagggtagagcaaatgcaaattccttgaggcag

SEQ ID NO: 666202 - DNA, 33 bp, Homo sapien
gagggtagagcaaatgtaaattccttgaggcag

SEQ ID NO: 666203 - DNA, 33 bp, Homo sapien
actgcagattttcccaagaaaccaggtgcataa

SEQ ID NO: 666204 - DNA, 33 bp, Homo sapien
actgcagattttcccaggaaaccaggtgcataa

SEQ ID NO: 666205 - DNA, 33 bp, Homo sapien
caaaagcaccaaataaggtagctgagtatccag

SEQ ID NO: 666206 - DNA, 33 bp, Homo sapien
caaaagcaccaaataatgtagctgagtatccag

SEQ ID NO: 666207 - DNA, 33 bp, Homo sapien
atgtacagataatctgaatgagagaaaactatc

SEQ ID NO: 666208 - DNA, 33 bp, Homo sapien
atgtacagataatctggatgagagaaaactatc

SEQ ID NO: 666209 - DNA, 33 bp, Homo sapien
caaataatcacccaaacgtattagagagaacaa

SEQ ID NO: 666210 - DNA, 33 bp, Homo sapien
caaataatcacccaaatgtattagagagaacaa

SEQ ID NO: 666211 - DNA, 33 bp, Homo sapien
ttgagtctgacttttacggtttcttaggtggta

SEQ ID NO: 666212 - DNA, 33 bp, Homo sapien
ttgagtctgacttttatggtttcttaggtggta

SEQ ID NO: 666213 - DNA, 33 bp, Homo sapien
gcaggattcagagaaaaattttgttgcctacag

SEQ ID NO: 666214 - DNA, 33 bp, Homo sapien
gcaggattcagagaaacattttgttgcctacag

SEQ ID NO: 666215 - DNA, 33 bp, Homo sapien
ttcttatctcagagtgcagccttttctgtatac

SEQ ID NO: 666216 - DNA, 33 bp, Homo sapien
ttcttatctcagagtgtagccttttctgtatac

SEQ ID NO: 666217 - DNA, 33 bp, Homo sapien
ggattatcagcatttaagccagagttgcaaatt

SEQ ID NO: 666218 - DNA, 33 bp, Homo sapien
ggattatcagcatttaggccagagttgcaaatt

SEQ ID NO: 666219 - DNA, 33 bp, Homo sapien
aatatagtgtatcgagactaatttctgtgaaat

SEQ ID NO: 666220 - DNA, 33 bp, Homo sapien
aatatagtgtatcgaggctaatttctgtgaaat

SEQ ID NO: 666221 - DNA, 33 bp, Homo sapien
agaatacataatggcaccctatcctaacatttt

SEQ ID NO: 666222 - DNA, 33 bp, Homo sapien
agaatacataatggcatcctatcctaacatttt

SEQ ID NO: 666223 - DNA, 33 bp, Homo sapien
catcatttttcaagtacggtgagttggcttggt

SEQ ID NO: 666224 - DNA, 33 bp, Homo sapien
catcatttttcaagtatggtgagttggcttggt

SEQ ID NO: 666225 - DNA, 33 bp, Homo sapien
agcatccaaacctgccaaaatccaatggaaaag

SEQ ID NO: 666226 - DNA, 33 bp, Homo sapien
agcatccaaacctgccgaaatccaatggaaaag

SEQ ID NO: 666227 - DNA, 33 bp, Homo sapien
gaaaagatgcatttcaacaatcaggaagagcca

SEQ ID NO: 666228 - DNA, 33 bp, Homo sapien
gaaaagatgcatttcagcaatcaggaagagcca

SEQ ID NO: 666229 - DNA, 33 bp, Homo sapien
ctatatgcacaagagacgtaaatttgatgaaaa

SEQ ID NO: 666230 - DNA, 33 bp, Homo sapien
ctatatgcacaagagatgtaaatttgatgaaaa

SEQ ID NO: 666231 - DNA, 33 bp, Homo sapien
caaaataatcataataccaaactggcttttaat

SEQ ID NO: 666232 - DNA, 33 bp, Homo sapien
caaaataatcataatagcaaactggcttttaat

SEQ ID NO: 666233 - DNA, 33 bp, Homo sapien
cccttcctcatctaccccagggacctcagcctt

SEQ ID NO: 666234 - DNA, 33 bp, Homo sapien
cccttcctcatctacctcagggacctcagcctt

SEQ ID NO: 666235 - DNA, 33 bp, Homo sapien
aacagggtaatataaaagaaaccagacagatga

SEQ ID NO: 666236 - DNA, 33 bp, Homo sapien
aacagggtaatataaaggaaaccagacagatga

SEQ ID NO: 666237 - DNA, 33 bp, Homo sapien
tatgtctctatccacaatccaacgtgagaaatt

SEQ ID NO: 666238 - DNA, 33 bp, Homo sapien
tatgtctctatccacagtccaacgtgagaaatt

SEQ ID NO: 666239 - DNA, 33 bp, Homo sapien
taaaaaatgatgcttaaaaacgatccctctgtg

SEQ ID NO: 666240 - DNA, 33 bp, Homo sapien
taaaaaatgatgcttacaaacgatccctctgtg

SEQ ID NO: 666241 - DNA, 33 bp, Homo sapien
ctatgcagataatgaaatcttcacctcgtcact

SEQ ID NO: 666242 - DNA, 33 bp, Homo sapien
ctatgcagataatgaattcttcacctcgtcact

SEQ ID NO: 666243 - DNA, 33 bp, Homo sapien
ctctgttctctctaatcatgtttttatggtttg

SEQ ID NO: 666244 - DNA, 33 bp, Homo sapien
ctctgttctctctaattatgtttttatggtttg

SEQ ID NO: 666245 - DNA, 33 bp, Homo sapien
agtggtgctttgaaaaagaaatggaatttataa

SEQ ID NO: 666246 - DNA, 33 bp, Homo sapien
agtggtgctttgaaaaggaaatggaatttataa

SEQ ID NO: 666247 - DNA, 33 bp, Homo sapien
aactaaccaaacaaaaagtcctctcctatggat

SEQ ID NO: 666248 - DNA, 33 bp, Homo sapien
aactaaccaaacaaaaggtcctctcctatggat

SEQ ID NO: 666249 - DNA, 33 bp, Homo sapien
cttggtaataacattacgtactaagtgaatcag

SEQ ID NO: 666250 - DNA, 33 bp, Homo sapien
cttggtaataacattatgtactaagtgaatcag

SEQ ID NO: 666251 - DNA, 33 bp, Homo sapien
tatatctttagtctcacctagaaataatgtcac

SEQ ID NO: 666252 - DNA, 33 bp, Homo sapien
tatatctttagtctcatctagaaataatgtcac

SEQ ID NO: 666253 - DNA, 33 bp, Homo sapien
cattcatttataaacactgatgaagacaaatgt

SEQ ID NO: 666254 - DNA, 33 bp, Homo sapien
cattcatttataaacattgatgaagacaaatgt

SEQ ID NO: 666255 - DNA, 33 bp, Homo sapien
tgtttgaaatcaataacgttctttgtccatctt

SEQ ID NO: 666256 - DNA, 33 bp, Homo sapien
tgtttgaaatcaataatgttctttgtccatctt

SEQ ID NO: 666257 - DNA, 33 bp, Homo sapien
gctccaccctatcaataaggctccaccacacta

SEQ ID NO: 666258 - DNA, 33 bp, Homo sapien
gctccaccctatcaatgaggctccaccacacta

SEQ ID NO: 666259 - DNA, 33 bp, Homo sapien
agttagtgctggtcaacggagccacactaaagc

SEQ ID NO: 666260 - DNA, 33 bp, Homo sapien
agttagtgctggtcaatggagccacactaaagc

SEQ ID NO: 666261 - DNA, 33 bp, Homo sapien
atattatgctgtctagccaaagaaaatgagatc

SEQ ID NO: 666262 - DNA, 33 bp, Homo sapien
atattatgctgtctaggcaaagaaaatgagatc

SEQ ID NO: 666263 - DNA, 33 bp, Homo sapien
ctgcatacctgccatgaatacatttaaagcata

SEQ ID NO: 666264 - DNA, 33 bp, Homo sapien
ctgcatacctgccatgcatacatttaaagcata

SEQ ID NO: 666265 - DNA, 33 bp, Homo sapien
tgctgcctttattttacgaattccagcccatag

SEQ ID NO: 666266 - DNA, 33 bp, Homo sapien
tgctgcctttattttatgaattccagcccatag

SEQ ID NO: 666267 - DNA, 33 bp, Homo sapien
aagtaagccatctttaaggagcaagtccttctt

SEQ ID NO: 666268 - DNA, 33 bp, Homo sapien
aagtaagccatctttagggagcaagtccttctt

SEQ ID NO: 666269 - DNA, 33 bp, Homo sapien
caataagtgttctatacggttctttgtcacatt

SEQ ID NO: 666270 - DNA, 33 bp, Homo sapien
caataagtgttctatatggttctttgtcacatt

SEQ ID NO: 666271 - DNA, 33 bp, Homo sapien
gttgtatgtatgttgacaggtttgctaactggt

SEQ ID NO: 666272 - DNA, 33 bp, Homo sapien
gttgtatgtatgttgataggtttgctaactggt

SEQ ID NO: 666273 - DNA, 33 bp, Homo sapien
ccccacaaataggtaacggcagagctggccctg

SEQ ID NO: 666274 - DNA, 33 bp, Homo sapien
ccccacaaataggtaatggcagagctggccctg

SEQ ID NO: 666275 - DNA, 33 bp, Homo sapien
attcatacacaattcccaaaaagttcaccacta

SEQ ID NO: 666276 - DNA, 33 bp, Homo sapien
attcatacacaattcctaaaaagttcaccacta

SEQ ID NO: 666277 - DNA, 33 bp, Homo sapien
attaaagctgccaaataatacaggtcttggtga

SEQ ID NO: 666278 - DNA, 33 bp, Homo sapien
attaaagctgccaaatgatacaggtcttggtga

SEQ ID NO: 666279 - DNA, 33 bp, Homo sapien
gggactcccaaaaaagcaaggaacacaatgtct

SEQ ID NO: 666280 - DNA, 33 bp, Homo sapien
gggactcccaaaaaagtaaggaacacaatgtct

SEQ ID NO: 666281 - DNA, 33 bp, Homo sapien
agtgacagagcttctcaacaagttagactttta

SEQ ID NO: 666282 - DNA, 33 bp, Homo sapien
agtgacagagcttctcgacaagttagactttta

SEQ ID NO: 666283 - DNA, 33 bp, Homo sapien
aatagttctttttgtacgtaaacatgatatttt

SEQ ID NO: 666284 - DNA, 33 bp, Homo sapien
aatagttctttttgtaggtaaacatgatatttt

SEQ ID NO: 666285 - DNA, 33 bp, Homo sapien
gtgctggatgaactacacaaaaagaacatacaa

SEQ ID NO: 666286 - DNA, 33 bp, Homo sapien
gtgctggatgaactacgcaaaaagaacatacaa

SEQ ID NO: 666287 - DNA, 33 bp, Homo sapien
gaaactgctgtaacctaagaaataagtcacagt

SEQ ID NO: 666288 - DNA, 33 bp, Homo sapien
gaaactgctgtaacctgagaaataagtcacagt

SEQ ID NO: 666289 - DNA, 33 bp, Homo sapien
tttaatgactgattcaagtctctgctccaatta

SEQ ID NO: 666290 - DNA, 33 bp, Homo sapien
tttaatgactgattcaggtctctgctccaatta

SEQ ID NO: 666291 - DNA, 33 bp, Homo sapien
tatatacaacaaagaaaacataccagcaatata

SEQ ID NO: 666292 - DNA, 33 bp, Homo sapien
tatatacaacaaagaagacataccagcaatata

SEQ ID NO: 666293 - DNA, 33 bp, Homo sapien
ggtagcaaaggaggtaaagtaaataggaattat

SEQ ID NO: 666294 - DNA, 33 bp, Homo sapien
ggtagcaaaggaggtacagtaaataggaattat

SEQ ID NO: 666295 - DNA, 33 bp, Homo sapien
atgagaaagaaatcacactaagatgcaagcttg

SEQ ID NO: 666296 - DNA, 33 bp, Homo sapien
atgagaaagaaatcacgctaagatgcaagcttg

SEQ ID NO: 666297 - DNA, 33 bp, Homo sapien
tacctagggcaccaggaaatcaccttttaccca

SEQ ID NO: 666298 - DNA, 33 bp, Homo sapien
tacctagggcaccaggcaatcaccttttaccca

SEQ ID NO: 666299 - DNA, 33 bp, Homo sapien
tttatctacctcatgactatcagaacacaccat

SEQ ID NO: 666300 - DNA, 33 bp, Homo sapien
tttatctacctcatgattatcagaacacaccat

SEQ ID NO: 666301 - DNA, 33 bp, Homo sapien
acataatttgaaatcacgttttcacacattaaa

SEQ ID NO: 666302 - DNA, 33 bp, Homo sapien
acataatttgaaatcatgttttcacacattaaa

SEQ ID NO: 666303 - DNA, 33 bp, Homo sapien
tacagctctctcttaacgatgaagaagaggggt

SEQ ID NO: 666304 - DNA, 33 bp, Homo sapien
tacagctctctcttaatgatgaagaagaggggt

SEQ ID NO: 666305 - DNA, 33 bp, Homo sapien
aagtgtcttatcaacacgactcgcttaattcaa

SEQ ID NO: 666306 - DNA, 33 bp, Homo sapien
aagtgtcttatcaacatgactcgcttaattcaa

SEQ ID NO: 666307 - DNA, 33 bp, Homo sapien
ttgaaaacttgtctaactaggtctaaaagagcc

SEQ ID NO: 666308 - DNA, 33 bp, Homo sapien
ttgaaaacttgtctaagtaggtctaaaagagcc

SEQ ID NO: 666309 - DNA, 33 bp, Homo sapien
agtgctttctattctgcaatcttgctgacaatc

SEQ ID NO: 666310 - DNA, 33 bp, Homo sapien
agtgctttctattctgtaatcttgctgacaatc

SEQ ID NO: 666311 - DNA, 33 bp, Homo sapien
agatagaaatgccatccagccaggagagaaaaa

SEQ ID NO: 666312 - DNA, 33 bp, Homo sapien
agatagaaatgccatctagccaggagagaaaaa

SEQ ID NO: 666313 - DNA, 33 bp, Homo sapien
ttgtacttaaggatgacggaaagtctaacatga

SEQ ID NO: 666314 - DNA, 33 bp, Homo sapien
ttgtacttaaggatgatggaaagtctaacatga

SEQ ID NO: 666315 - DNA, 33 bp, Homo sapien
gctggggaccgaagaacaaagacgttcagacca

SEQ ID NO: 666316 - DNA, 33 bp, Homo sapien
gctggggaccgaagaagaaagacgttcagacca

SEQ ID NO: 666317 - DNA, 33 bp, Homo sapien
tcttctcaagagcacacatgcttgattcacagc

SEQ ID NO: 666318 - DNA, 33 bp, Homo sapien
tcttctcaagagcacatatgcttgattcacagc

SEQ ID NO: 666319 - DNA, 33 bp, Homo sapien
ttccctatcatcatacacctggcactttacaca

SEQ ID NO: 666320 - DNA, 33 bp, Homo sapien
ttccctatcatcatactcctggcactttacaca

SEQ ID NO: 666321 - DNA, 33 bp, Homo sapien
ctatgtttgatatgtcaactttacttgaggccc

SEQ ID NO: 666322 - DNA, 33 bp, Homo sapien
ctatgtttgatatgtcgactttacttgaggccc

SEQ ID NO: 666323 - DNA, 33 bp, Homo sapien
caggaaattgtctatcaatgtacgtgccactgt

SEQ ID NO: 666324 - DNA, 33 bp, Homo sapien
caggaaattgtctatcgatgtacgtgccactgt

SEQ ID NO: 666325 - DNA, 33 bp, Homo sapien
tgacttctaactgttacacaaagactgcctact

SEQ ID NO: 666326 - DNA, 33 bp, Homo sapien
tgacttctaactgttatacaaagactgcctact

SEQ ID NO: 666327 - DNA, 33 bp, Homo sapien
gagattattttagaaaacacatgaatgtacatc

SEQ ID NO: 666328 - DNA, 33 bp, Homo sapien
gagattattttagaaagcacatgaatgtacatc

SEQ ID NO: 666329 - DNA, 33 bp, Homo sapien
attgaaacagcggaaaaaaatgagctacaggtg

SEQ ID NO: 666330 - DNA, 33 bp, Homo sapien
attgaaacagcggaaacaaatgagctacaggtg

SEQ ID NO: 666331 - DNA, 33 bp, Homo sapien
ggttgagagtgattacacagagtatggcacaat

SEQ ID NO: 666332 - DNA, 33 bp, Homo sapien
ggttgagagtgattacgcagagtatggcacaat

SEQ ID NO: 666333 - DNA, 33 bp, Homo sapien
catgttgggaggtaaccgtaatattgtggacat

SEQ ID NO: 666334 - DNA, 33 bp, Homo sapien
catgttgggaggtaactgtaatattgtggacat

SEQ ID NO: 666335 - DNA, 33 bp, Homo sapien
acaaaattcaacagacagatgaaagtccatgca

SEQ ID NO: 666336 - DNA, 33 bp, Homo sapien
acaaaattcaacagacggatgaaagtccatgca

SEQ ID NO: 666337 - DNA, 33 bp, Homo sapien
cttagactaatttgaactgaaccaagctgagac

SEQ ID NO: 666338 - DNA, 33 bp, Homo sapien
cttagactaatttgaattgaaccaagctgagac

SEQ ID NO: 666339 - DNA, 33 bp, Homo sapien
cgtaaatgctccctacaatacccctagtaagta

SEQ ID NO: 666340 - DNA, 33 bp, Homo sapien
cgtaaatgctccctactatacccctagtaagta

SEQ ID NO: 666341 - DNA, 33 bp, Homo sapien
gagccaaaaacatggagagagaaaatgttattg

SEQ ID NO: 666342 - DNA, 33 bp, Homo sapien
gagccaaaaacatggatagagaaaatgttattg

SEQ ID NO: 666343 - DNA, 33 bp, Homo sapien
agatgtcagtttttctcaacttgatgtataaat

SEQ ID NO: 666344 - DNA, 33 bp, Homo sapien
agatgtcagtttttctgaacttgatgtataaat

SEQ ID NO: 666345 - DNA, 33 bp, Homo sapien
accttccagaaaagaactgagttggaatatctc

SEQ ID NO: 666346 - DNA, 33 bp, Homo sapien
accttccagaaaagaattgagttggaatatctc

SEQ ID NO: 666347 - DNA, 33 bp, Homo sapien
acttaattccatcggaccaaagtgaactaacca

SEQ ID NO: 666348 - DNA, 33 bp, Homo sapien
acttaattccatcggatcaaagtgaactaacca

SEQ ID NO: 666349 - DNA, 33 bp, Homo sapien
ttaggttataaataaacggcaggtgttttctga

SEQ ID NO: 666350 - DNA, 33 bp, Homo sapien
ttaggttataaataaatggcaggtgttttctga

SEQ ID NO: 666351 - DNA, 33 bp, Homo sapien
cttgacattgctgccacgattcccagagaagtg

SEQ ID NO: 666352 - DNA, 33 bp, Homo sapien
cttgacattgctgccatgattcccagagaagtg

SEQ ID NO: 666353 - DNA, 33 bp, Homo sapien
tgaaaaaggtatgcctaagaatcctggcaatcc

SEQ ID NO: 666354 - DNA, 33 bp, Homo sapien
tgaaaaaggtatgcctcagaatcctggcaatcc

SEQ ID NO: 666355 - DNA, 33 bp, Homo sapien
ataggtgattgaggtacaggtggtctaggatca

SEQ ID NO: 666356 - DNA, 33 bp, Homo sapien
ataggtgattgaggtataggtggtctaggatca

SEQ ID NO: 666357 - DNA, 33 bp, Homo sapien
gtcgagttcaaagtcacctatgtgtggatggta

SEQ ID NO: 666358 - DNA, 33 bp, Homo sapien
gtcgagttcaaagtcagctatgtgtggatggta

SEQ ID NO: 666359 - DNA, 33 bp, Homo sapien
acactgaactgttctacctcggattaaaacata

SEQ ID NO: 666360 - DNA, 33 bp, Homo sapien
acactgaactgttctatctcggattaaaacata

SEQ ID NO: 666361 - DNA, 33 bp, Homo sapien
attcaagtaattcttaaaactgccattttctat

SEQ ID NO: 666362 - DNA, 33 bp, Homo sapien
attcaagtaattcttacaactgccattttctat

SEQ ID NO: 666363 - DNA, 33 bp, Homo sapien
gtgatacaagagagaacattttcaaagtcacag

SEQ ID NO: 666364 - DNA, 33 bp, Homo sapien
gtgatacaagagagaatattttcaaagtcacag

SEQ ID NO: 666365 - DNA, 33 bp, Homo sapien
cgcatctagatgtagtcaacaacccagtatttc

SEQ ID NO: 666366 - DNA, 33 bp, Homo sapien
cgcatctagatgtagtgaacaacccagtatttc

SEQ ID NO: 666367 - DNA, 33 bp, Homo sapien
tcataaaatgccacaagtatgaaaatataaaaa

SEQ ID NO: 666368 - DNA, 33 bp, Homo sapien
tcataaaatgccacaattatgaaaatataaaaa

SEQ ID NO: 666369 - DNA, 33 bp, Homo sapien
attcttttaaaaaatcgaaagttggctggtccg

SEQ ID NO: 666370 - DNA, 33 bp, Homo sapien
attcttttaaaaaatctaaagttggctggtccg

SEQ ID NO: 666371 - DNA, 33 bp, Homo sapien
accttccaaacctaacacgattgtaaataccat

SEQ ID NO: 666372 - DNA, 33 bp, Homo sapien
accttccaaacctaactcgattgtaaataccat

SEQ ID NO: 666373 - DNA, 33 bp, Homo sapien
aaaaaatcaaattctaccctaccatgaaacatg

SEQ ID NO: 666374 - DNA, 33 bp, Homo sapien
aaaaaatcaaattctatcctaccatgaaacatg

SEQ ID NO: 666375 - DNA, 33 bp, Homo sapien
gcagagcaagagttaactgtatggactgaacta

SEQ ID NO: 666376 - DNA, 33 bp, Homo sapien
gcagagcaagagttaattgtatggactgaacta

SEQ ID NO: 666377 - DNA, 33 bp, Homo sapien
aaagaaaacttccagggcactaattgaaaggct

SEQ ID NO: 666378 - DNA, 33 bp, Homo sapien
aaagaaaacttccaggtcactaattgaaaggct

SEQ ID NO: 666379 - DNA, 33 bp, Homo sapien
cagtccaagttgctcaatctggctttgggtggc

SEQ ID NO: 666380 - DNA, 33 bp, Homo sapien
cagtccaagttgctcagtctggctttgggtggc

SEQ ID NO: 666381 - DNA, 33 bp, Homo sapien
ttgtgagctctggatacactaagtcccatgcca

SEQ ID NO: 666382 - DNA, 33 bp, Homo sapien
ttgtgagctctggatatactaagtcccatgcca

SEQ ID NO: 666383 - DNA, 33 bp, Homo sapien
ttctcacagatttaggaagtacctcaaaaattt

SEQ ID NO: 666384 - DNA, 33 bp, Homo sapien
ttctcacagatttaggcagtacctcaaaaattt

SEQ ID NO: 666385 - DNA, 33 bp, Homo sapien
tctatcaaaaccaagagtaaaatccatttctta

SEQ ID NO: 666386 - DNA, 33 bp, Homo sapien
tctatcaaaaccaagattaaaatccatttctta

SEQ ID NO: 666387 - DNA, 33 bp, Homo sapien
ttaagcgaagaaaataagaggtagtgtaattga

SEQ ID NO: 666388 - DNA, 33 bp, Homo sapien
ttaagcgaagaaaataggaggtagtgtaattga

SEQ ID NO: 666389 - DNA, 33 bp, Homo sapien
ggctgtactctttgcacctttttttcataagtc

SEQ ID NO: 666390 - DNA, 33 bp, Homo sapien
ggctgtactctttgcagctttttttcataagtc

SEQ ID NO: 666391 - DNA, 33 bp, Homo sapien
cactactcccacatacaggacataaccacaccc

SEQ ID NO: 666392 - DNA, 33 bp, Homo sapien
cactactcccacatacgggacataaccacaccc

SEQ ID NO: 666393 - DNA, 33 bp, Homo sapien
aattccctgggacgcaatataaatccaagagta

SEQ ID NO: 666394 - DNA, 33 bp, Homo sapien
aattccctgggacgcagtataaatccaagagta

SEQ ID NO: 666395 - DNA, 33 bp, Homo sapien
gctctgaatttgggcactaacttttgttaagtt

SEQ ID NO: 666396 - DNA, 33 bp, Homo sapien
gctctgaatttgggcattaacttttgttaagtt

SEQ ID NO: 666397 - DNA, 33 bp, Homo sapien
cacttgcaaccaacaaaccaacactacatctag

SEQ ID NO: 666398 - DNA, 33 bp, Homo sapien
cacttgcaaccaacaagccaacactacatctag

SEQ ID NO: 666399 - DNA, 33 bp, Homo sapien
aaaacgtggcactgtacgattcagcagcattaa

SEQ ID NO: 666400 - DNA, 33 bp, Homo sapien
aaaacgtggcactgtatgattcagcagcattaa

SEQ ID NO: 666401 - DNA, 33 bp, Homo sapien
agatacagcaaactgaaccctgagagaatatat

SEQ ID NO: 666402 - DNA, 33 bp, Homo sapien
agatacagcaaactgatccctgagagaatatat

SEQ ID NO: 666403 - DNA, 33 bp, Homo sapien
caacatttgtggggccgagtaatctgactgagg

SEQ ID NO: 666404 - DNA, 33 bp, Homo sapien
caacatttgtggggcctagtaatctgactgagg

SEQ ID NO: 666405 - DNA, 33 bp, Homo sapien
ctcctggaatttacacaatgaatggaaaaaggc

SEQ ID NO: 666406 - DNA, 33 bp, Homo sapien
ctcctggaatttacacgatgaatggaaaaaggc

SEQ ID NO: 666407 - DNA, 33 bp, Homo sapien
aaacagaacagaaatacggactgcatgaccttt

SEQ ID NO: 666408 - DNA, 33 bp, Homo sapien
aaacagaacagaaatatggactgcatgaccttt

SEQ ID NO: 666409 - DNA, 33 bp, Homo sapien
gagaaactgttcatgccgactctcctttgtctg

SEQ ID NO: 666410 - DNA, 33 bp, Homo sapien
gagaaactgttcatgctgactctcctttgtctg

SEQ ID NO: 666411 - DNA, 33 bp, Homo sapien
aacatggagcacatcccatttcctttggtactc

SEQ ID NO: 666412 - DNA, 33 bp, Homo sapien
aacatggagcacatcctatttcctttggtactc

SEQ ID NO: 666413 - DNA, 33 bp, Homo sapien
ctctaaacgcattgcaagagatatctagcctcc

SEQ ID NO: 666414 - DNA, 33 bp, Homo sapien
ctctaaacgcattgcaggagatatctagcctcc

SEQ ID NO: 666415 - DNA, 33 bp, Homo sapien
attttttaaggtttcacaggagtctgtccagtt

SEQ ID NO: 666416 - DNA, 33 bp, Homo sapien
attttttaaggtttcataggagtctgtccagtt

SEQ ID NO: 666417 - DNA, 33 bp, Homo sapien
cagcaaccaaatgcacagtaacattcactcact

SEQ ID NO: 666418 - DNA, 33 bp, Homo sapien
cagcaaccaaatgcacggtaacattcactcact

SEQ ID NO: 666419 - DNA, 33 bp, Homo sapien
ctcccagaaattataacggaaggaagaaggtat

SEQ ID NO: 666420 - DNA, 33 bp, Homo sapien
ctcccagaaattataatggaaggaagaaggtat

SEQ ID NO: 666421 - DNA, 33 bp, Homo sapien
cctatcagcaaacaaaccagaattacaggtact

SEQ ID NO: 666422 - DNA, 33 bp, Homo sapien
cctatcagcaaacaaatcagaattacaggtact

SEQ ID NO: 666423 - DNA, 33 bp, Homo sapien
tagaacggaggaagaaaaggctgattgaggaaa

SEQ ID NO: 666424 - DNA, 33 bp, Homo sapien
tagaacggaggaagaagaggctgattgaggaaa

SEQ ID NO: 666425 - DNA, 33 bp, Homo sapien
attttgatggtctgtcccacctctgccttaata

SEQ ID NO: 666426 - DNA, 33 bp, Homo sapien
attttgatggtctgtctcacctctgccttaata

SEQ ID NO: 666427 - DNA, 33 bp, Homo sapien
agacttctatattacccacaaatgctcagtttt

SEQ ID NO: 666428 - DNA, 33 bp, Homo sapien
agacttctatattacctacaaatgctcagtttt

SEQ ID NO: 666429 - DNA, 33 bp, Homo sapien
tatcaactggcccagaaattattctcaggtaaa

SEQ ID NO: 666430 - DNA, 33 bp, Homo sapien
tatcaactggcccagagattattctcaggtaaa

SEQ ID NO: 666431 - DNA, 33 bp, Homo sapien
accagccttttccaaaaaccatcactgctttca

SEQ ID NO: 666432 - DNA, 33 bp, Homo sapien
accagccttttccaaagaccatcactgctttca

SEQ ID NO: 666433 - DNA, 33 bp, Homo sapien
aataatctggcacaacaacttgtaataaaggag

SEQ ID NO: 666434 - DNA, 33 bp, Homo sapien
aataatctggcacaactacttgtaataaaggag

SEQ ID NO: 666435 - DNA, 33 bp, Homo sapien
actgcaagacctaagaagatagccagaggggaa

SEQ ID NO: 666436 - DNA, 33 bp, Homo sapien
actgcaagacctaagaggatagccagaggggaa

SEQ ID NO: 666437 - DNA, 33 bp, Homo sapien
gacttctgctaaacacagggctttccagagtca

SEQ ID NO: 666438 - DNA, 33 bp, Homo sapien
gacttctgctaaacacggggctttccagagtca

SEQ ID NO: 666439 - DNA, 33 bp, Homo sapien
aactgatcaaaccaacccaagaaacatgagaat

SEQ ID NO: 666440 - DNA, 33 bp, Homo sapien
aactgatcaaaccaactcaagaaacatgagaat

SEQ ID NO: 666441 - DNA, 33 bp, Homo sapien
tgaagcaaccggaccactaccatcaaaaaatga

SEQ ID NO: 666442 - DNA, 33 bp, Homo sapien
tgaagcaaccggaccattaccatcaaaaaatga

SEQ ID NO: 666443 - DNA, 33 bp, Homo sapien
tatggtaaggcttcataagtgttttgaatgagc

SEQ ID NO: 666444 - DNA, 33 bp, Homo sapien
tatggtaaggcttcatgagtgttttgaatgagc

SEQ ID NO: 666445 - DNA, 33 bp, Homo sapien
cagatttggcacataacttacaaatctgctttg

SEQ ID NO: 666446 - DNA, 33 bp, Homo sapien
cagatttggcacataatttacaaatctgctttg

SEQ ID NO: 666447 - DNA, 33 bp, Homo sapien
atttacagtttcttaaaccaatagtcaccactc

SEQ ID NO: 666448 - DNA, 33 bp, Homo sapien
atttacagtttcttaatccaatagtcaccactc

SEQ ID NO: 666449 - DNA, 33 bp, Homo sapien
aagttaaacctccttacaaccttgcaagtatgt

SEQ ID NO: 666450 - DNA, 33 bp, Homo sapien
aagttaaacctccttagaaccttgcaagtatgt

SEQ ID NO: 666451 - DNA, 33 bp, Homo sapien
aaaagtttatccaaaaaagaaattgtccatgaa

SEQ ID NO: 666452 - DNA, 33 bp, Homo sapien
aaaagtttatccaaaagagaaattgtccatgaa

SEQ ID NO: 666453 - DNA, 33 bp, Homo sapien
ctcttaaattatctccacgttcagtgccaccac

SEQ ID NO: 666454 - DNA, 33 bp, Homo sapien
ctcttaaattatctccgcgttcagtgccaccac

SEQ ID NO: 666455 - DNA, 33 bp, Homo sapien
agagcagaaagtctacaagaatcaggaaggaag

SEQ ID NO: 666456 - DNA, 33 bp, Homo sapien
agagcagaaagtctaccagaatcaggaaggaag

SEQ ID NO: 666457 - DNA, 33 bp, Homo sapien
tattggttaaatcaaacgttacaagttgacttt

SEQ ID NO: 666458 - DNA, 33 bp, Homo sapien
tattggttaaatcaaatgttacaagttgacttt

SEQ ID NO: 666459 - DNA, 33 bp, Homo sapien
tatactagaatcatccaaagagcttttaaaaat

SEQ ID NO: 666460 - DNA, 33 bp, Homo sapien
tatactagaatcatccgaagagcttttaaaaat

SEQ ID NO: 666461 - DNA, 33 bp, Homo sapien
catggaccttccactaactctgaaaagtcttgt

SEQ ID NO: 666462 - DNA, 33 bp, Homo sapien
catggaccttccactagctctgaaaagtcttgt

SEQ ID NO: 666463 - DNA, 33 bp, Homo sapien
tcaaactgctagtggagcttcttttgttttgtg

SEQ ID NO: 666464 - DNA, 33 bp, Homo sapien
tcaaactgctagtggatcttcttttgttttgtg

SEQ ID NO: 666465 - DNA, 33 bp, Homo sapien
tcaatgtgttctcatacgcaccgaatgcaccaa

SEQ ID NO: 666466 - DNA, 33 bp, Homo sapien
tcaatgtgttctcatatgcaccgaatgcaccaa

SEQ ID NO: 666467 - DNA, 33 bp, Homo sapien
ctgatcggtaaacaaaatatggaagagccacag

SEQ ID NO: 666468 - DNA, 33 bp, Homo sapien
ctgatcggtaaacaaagtatggaagagccacag

SEQ ID NO: 666469 - DNA, 33 bp, Homo sapien
agctccatgaaggtaggagccagacctattcat

SEQ ID NO: 666470 - DNA, 33 bp, Homo sapien
agctccatgaaggtagtagccagacctattcat

SEQ ID NO: 666471 - DNA, 33 bp, Homo sapien
tcagcttttatcagaaaatactggatgtactag

SEQ ID NO: 666472 - DNA, 33 bp, Homo sapien
tcagcttttatcagaacatactggatgtactag

SEQ ID NO: 666473 - DNA, 33 bp, Homo sapien
ataatttgtgctgttccaccattctatgttgat

SEQ ID NO: 666474 - DNA, 33 bp, Homo sapien
ataatttgtgctgttctaccattctatgttgat

SEQ ID NO: 666475 - DNA, 33 bp, Homo sapien
gtcctttatttggaaccataatcaaggcagaca

SEQ ID NO: 666476 - DNA, 33 bp, Homo sapien
gtcctttatttggaactataatcaaggcagaca

SEQ ID NO: 666477 - DNA, 33 bp, Homo sapien
tattggtttctaaatacggttctccaatgaaag

SEQ ID NO: 666478 - DNA, 33 bp, Homo sapien
tattggtttctaaatatggttctccaatgaaag

SEQ ID NO: 666479 - DNA, 33 bp, Homo sapien
attaattgaatgaaaaatgaacgaggccaacaa

SEQ ID NO: 666480 - DNA, 33 bp, Homo sapien
attaattgaatgaaaagtgaacgaggccaacaa

SEQ ID NO: 666481 - DNA, 33 bp, Homo sapien
atctatgtggaggaatcagccaacgataagatc

SEQ ID NO: 666482 - DNA, 33 bp, Homo sapien
atctatgtggaggaattagccaacgataagatc

SEQ ID NO: 666483 - DNA, 33 bp, Homo sapien
cgtctaacttcagagaatataaacctgcagtag

SEQ ID NO: 666484 - DNA, 33 bp, Homo sapien
cgtctaacttcagagagtataaacctgcagtag

SEQ ID NO: 666485 - DNA, 33 bp, Homo sapien
cgcccctgtgaatgacagagttttcctttcctc

SEQ ID NO: 666486 - DNA, 33 bp, Homo sapien
cgcccctgtgaatgacggagttttcctttcctc

SEQ ID NO: 666487 - DNA, 33 bp, Homo sapien
atttgggtcaagatgcaagtggcatgtttagtt

SEQ ID NO: 666488 - DNA, 33 bp, Homo sapien
atttgggtcaagatgcgagtggcatgtttagtt

SEQ ID NO: 666489 - DNA, 33 bp, Homo sapien
gtgttgtaagtactgccgaattattaatttcca

SEQ ID NO: 666490 - DNA, 33 bp, Homo sapien
gtgttgtaagtactgctgaattattaatttcca

SEQ ID NO: 666491 - DNA, 33 bp, Homo sapien
cgatgttgtgtgataaatgaactagtcaataga

SEQ ID NO: 666492 - DNA, 33 bp, Homo sapien
cgatgttgtgtgataagtgaactagtcaataga

SEQ ID NO: 666493 - DNA, 33 bp, Homo sapien
aggagacacagttctgaaaagataaagtggcca

SEQ ID NO: 666494 - DNA, 33 bp, Homo sapien
aggagacacagttctgcaaagataaagtggcca

SEQ ID NO: 666495 - DNA, 33 bp, Homo sapien
atggtactttccaaaacaacaatctccagcagt

SEQ ID NO: 666496 - DNA, 33 bp, Homo sapien
atggtactttccaaaataacaatctccagcagt

SEQ ID NO: 666497 - DNA, 33 bp, Homo sapien
gcataatctggagatacagtcagtttggctgtc

SEQ ID NO: 666498 - DNA, 33 bp, Homo sapien
gcataatctggagatatagtcagtttggctgtc

SEQ ID NO: 666499 - DNA, 33 bp, Homo sapien
acatattgggaaatgacaacaacaccaagacag

SEQ ID NO: 666500 - DNA, 33 bp, Homo sapien
acatattgggaaatgataacaacaccaagacag

SEQ ID NO: 666501 - DNA, 33 bp, Homo sapien
aaatagggctctgaataagaactttttagggcc

SEQ ID NO: 666502 - DNA, 33 bp, Homo sapien
aaatagggctctgaatgagaactttttagggcc

SEQ ID NO: 666503 - DNA, 33 bp, Homo sapien
acagaagggtgaagaacatttaaggtgctcatt

SEQ ID NO: 666504 - DNA, 33 bp, Homo sapien
acagaagggtgaagaatatttaaggtgctcatt

SEQ ID NO: 666505 - DNA, 33 bp, Homo sapien
acacatatcctcatcaatctacctttggtctca

SEQ ID NO: 666506 - DNA, 33 bp, Homo sapien
acacatatcctcatcagtctacctttggtctca

SEQ ID NO: 666507 - DNA, 33 bp, Homo sapien
ggagcttagggagaaaacatctggaaaaaagaa

SEQ ID NO: 666508 - DNA, 33 bp, Homo sapien
ggagcttagggagaaagcatctggaaaaaagaa

SEQ ID NO: 666509 - DNA, 33 bp, Homo sapien
atgttgtattcagactcaaacggaaaagaagat

SEQ ID NO: 666510 - DNA, 33 bp, Homo sapien
atgttgtattcagacttaaacggaaaagaagat

SEQ ID NO: 666511 - DNA, 33 bp, Homo sapien
ctgttctaatcacttcacacatattcactcatt

SEQ ID NO: 666512 - DNA, 33 bp, Homo sapien
ctgttctaatcacttcgcacatattcactcatt

SEQ ID NO: 666513 - DNA, 33 bp, Homo sapien
gggcaccagagactcaaagagggtgaatgtaca

SEQ ID NO: 666514 - DNA, 33 bp, Homo sapien
gggcaccagagactcacagagggtgaatgtaca

SEQ ID NO: 666515 - DNA, 33 bp, Homo sapien
atgtgccaggcccagcacttgaaagagatgcaa

SEQ ID NO: 666516 - DNA, 33 bp, Homo sapien
atgtgccaggcccagcgcttgaaagagatgcaa

SEQ ID NO: 666517 - DNA, 33 bp, Homo sapien
gagaaagctgagaaaacagatggaatcgaaaga

SEQ ID NO: 666518 - DNA, 33 bp, Homo sapien
gagaaagctgagaaaagagatggaatcgaaaga

SEQ ID NO: 666519 - DNA, 33 bp, Homo sapien
accagttttccattcccagaagtctctgccttg

SEQ ID NO: 666520 - DNA, 33 bp, Homo sapien
accagttttccattcctagaagtctctgccttg

SEQ ID NO: 666521 - DNA, 33 bp, Homo sapien
tcgctctccagggccacagaccttcttgtcact

SEQ ID NO: 666522 - DNA, 33 bp, Homo sapien
tcgctctccagggccatagaccttcttgtcact

SEQ ID NO: 666523 - DNA, 33 bp, Homo sapien
tcagagatgaagtagcaaagttatggaatatcg

SEQ ID NO: 666524 - DNA, 33 bp, Homo sapien
tcagagatgaagtagcgaagttatggaatatcg

SEQ ID NO: 666525 - DNA, 33 bp, Homo sapien
ggcagtatgtgtattcaaataaaactgaagttc

SEQ ID NO: 666526 - DNA, 33 bp, Homo sapien
ggcagtatgtgtattctaataaaactgaagttc

SEQ ID NO: 666527 - DNA, 33 bp, Homo sapien
cccattttaactttcaaatactcaagaatataa

SEQ ID NO: 666528 - DNA, 33 bp, Homo sapien
cccattttaactttcagatactcaagaatataa

SEQ ID NO: 666529 - DNA, 33 bp, Homo sapien
atttgttcgaatataaatggaaagtagtgagat

SEQ ID NO: 666530 - DNA, 33 bp, Homo sapien
atttgttcgaatataactggaaagtagtgagat

SEQ ID NO: 666531 - DNA, 33 bp, Homo sapien
ctccaggctattagccaccggatttctgaaaca

SEQ ID NO: 666532 - DNA, 33 bp, Homo sapien
ctccaggctattagccgccggatttctgaaaca

SEQ ID NO: 666533 - DNA, 33 bp, Homo sapien
atgtgtaaaatagctgaagaagtaaggatgtga

SEQ ID NO: 666534 - DNA, 33 bp, Homo sapien
atgtgtaaaatagctggagaagtaaggatgtga

SEQ ID NO: 666535 - DNA, 33 bp, Homo sapien
attttgatgactacgaaaaaggattgggcagtg

SEQ ID NO: 666536 - DNA, 33 bp, Homo sapien
attttgatgactacgagaaaggattgggcagtg

SEQ ID NO: 666537 - DNA, 33 bp, Homo sapien
tctgtggcactgttgaactttgaggaaactcct

SEQ ID NO: 666538 - DNA, 33 bp, Homo sapien
tctgtggcactgttgatctttgaggaaactcct

SEQ ID NO: 666539 - DNA, 33 bp, Homo sapien
cactccgttgagataccgtacttggtttaacca

SEQ ID NO: 666540 - DNA, 33 bp, Homo sapien
cactccgttgagatactgtacttggtttaacca

SEQ ID NO: 666541 - DNA, 33 bp, Homo sapien
actcaaaacaacgttaccagataggtactatca

SEQ ID NO: 666542 - DNA, 33 bp, Homo sapien
actcaaaacaacgttatcagataggtactatca

SEQ ID NO: 666543 - DNA, 33 bp, Homo sapien
acatcatggatattgacgctgtgctagaaccaa

SEQ ID NO: 666544 - DNA, 33 bp, Homo sapien
acatcatggatattgatgctgtgctagaaccaa

SEQ ID NO: 666545 - DNA, 33 bp, Homo sapien
ttcttgcaaaatgggaacctcactctgaaaagc

SEQ ID NO: 666546 - DNA, 33 bp, Homo sapien
ttcttgcaaaatgggaccctcactctgaaaagc

SEQ ID NO: 666547 - DNA, 33 bp, Homo sapien
ctcattaccaacaaggacagtaaaggaatcgca

SEQ ID NO: 666548 - DNA, 33 bp, Homo sapien
ctcattaccaacaagggcagtaaaggaatcgca

SEQ ID NO: 666549 - DNA, 33 bp, Homo sapien
tatcctaaatgccaaacgaggagcttcaaagca

SEQ ID NO: 666550 - DNA, 33 bp, Homo sapien
tatcctaaatgccaaatgaggagcttcaaagca

SEQ ID NO: 666551 - DNA, 33 bp, Homo sapien
tttctgccttttgaaacgttgagtaatcaaaac

SEQ ID NO: 666552 - DNA, 33 bp, Homo sapien
tttctgccttttgaaatgttgagtaatcaaaac

SEQ ID NO: 666553 - DNA, 33 bp, Homo sapien
aatgtggacgattgctcaagtggagggatggta

SEQ ID NO: 666554 - DNA, 33 bp, Homo sapien
aatgtggacgattgctgaagtggagggatggta

SEQ ID NO: 666555 - DNA, 33 bp, Homo sapien
tggacactcctgaaggcaatcctatgaggagcc

SEQ ID NO: 666556 - DNA, 33 bp, Homo sapien
tggacactcctgaaggtaatcctatgaggagcc

SEQ ID NO: 666557 - DNA, 33 bp, Homo sapien
atacaggaagagcaaaaatctaaagagaggaag

SEQ ID NO: 666558 - DNA, 33 bp, Homo sapien
atacaggaagagcaaagatctaaagagaggaag

SEQ ID NO: 666559 - DNA, 33 bp, Homo sapien
tttggaggtgaaccccactgtgatttcatggac

SEQ ID NO: 666560 - DNA, 33 bp, Homo sapien
tttggaggtgaaccccgctgtgatttcatggac

SEQ ID NO: 666561 - DNA, 33 bp, Homo sapien
ccacataatgagcttacataacttcaggaagca

SEQ ID NO: 666562 - DNA, 33 bp, Homo sapien
ccacataatgagcttagataacttcaggaagca

SEQ ID NO: 666563 - DNA, 33 bp, Homo sapien
tttttgtttaacctaacaattggccggccctag

SEQ ID NO: 666564 - DNA, 33 bp, Homo sapien
tttttgtttaacctaataattggccggccctag

SEQ ID NO: 666565 - DNA, 33 bp, Homo sapien
agttgagaattgactaccactggaaaaatattc

SEQ ID NO: 666566 - DNA, 33 bp, Homo sapien
agttgagaattgactatcactggaaaaatattc

SEQ ID NO: 666567 - DNA, 33 bp, Homo sapien
caaggtcctggaggaactatattaacgtgttca

SEQ ID NO: 666568 - DNA, 33 bp, Homo sapien
caaggtcctggaggaattatattaacgtgttca

SEQ ID NO: 666569 - DNA, 33 bp, Homo sapien
cttctacttgtgtgaacgtgggaaagttactta

SEQ ID NO: 666570 - DNA, 33 bp, Homo sapien
cttctacttgtgtgaatgtgggaaagttactta

SEQ ID NO: 666571 - DNA, 33 bp, Homo sapien
agtccaagctggggaaaataggcttttgtagag

SEQ ID NO: 666572 - DNA, 33 bp, Homo sapien
agtccaagctggggaatataggcttttgtagag

SEQ ID NO: 666573 - DNA, 33 bp, Homo sapien
aggctatggtcataccaatgaatacctatgaat

SEQ ID NO: 666574 - DNA, 33 bp, Homo sapien
aggctatggtcatacctatgaatacctatgaat

SEQ ID NO: 666575 - DNA, 33 bp, Homo sapien
ctgtacaatatcacaaacaattcaatgtccaat

SEQ ID NO: 666576 - DNA, 33 bp, Homo sapien
ctgtacaatatcacaagcaattcaatgtccaat

SEQ ID NO: 666577 - DNA, 33 bp, Homo sapien
gtaatggtcctctgcccgattcctttgtcctaa

SEQ ID NO: 666578 - DNA, 33 bp, Homo sapien
gtaatggtcctctgcctgattcctttgtcctaa

SEQ ID NO: 666579 - DNA, 33 bp, Homo sapien
tttggcagaattcttcccttagcctcagcagct

SEQ ID NO: 666580 - DNA, 33 bp, Homo sapien
tttggcagaattcttctcttagcctcagcagct

SEQ ID NO: 666581 - DNA, 33 bp, Homo sapien
aatccaaaaagcttcaatagaaatttagatagt

SEQ ID NO: 666582 - DNA, 33 bp, Homo sapien
aatccaaaaagcttcagtagaaatttagatagt

SEQ ID NO: 666583 - DNA, 33 bp, Homo sapien
gtcatactggagagaacagtgactacctctaaa

SEQ ID NO: 666584 - DNA, 33 bp, Homo sapien
gtcatactggagagaagagtgactacctctaaa

SEQ ID NO: 666585 - DNA, 33 bp, Homo sapien
caataggctgtctaaaaaaggtggtcaaggaac

SEQ ID NO: 666586 - DNA, 33 bp, Homo sapien
caataggctgtctaaagaaggtggtcaaggaac

SEQ ID NO: 666587 - DNA, 33 bp, Homo sapien
gtaagagaagctgatcaaggactctttttacct

SEQ ID NO: 666588 - DNA, 33 bp, Homo sapien
gtaagagaagctgatcgaggactctttttacct

SEQ ID NO: 666589 - DNA, 33 bp, Homo sapien
aaccataggaaagcacagcgtggcaaaagtgaa

SEQ ID NO: 666590 - DNA, 33 bp, Homo sapien
aaccataggaaagcacggcgtggcaaaagtgaa

SEQ ID NO: 666591 - DNA, 33 bp, Homo sapien
gatgagtcataacaaaaggtatgaaaagaatct

SEQ ID NO: 666592 - DNA, 33 bp, Homo sapien
gatgagtcataacaaacggtatgaaaagaatct

SEQ ID NO: 666593 - DNA, 33 bp, Homo sapien
ggagtggtgagaatacaatgttcttttcccact

SEQ ID NO: 666594 - DNA, 33 bp, Homo sapien
ggagtggtgagaatactatgttcttttcccact

SEQ ID NO: 666595 - DNA, 33 bp, Homo sapien
acacccattggttaacactatcctagcctctta

SEQ ID NO: 666596 - DNA, 33 bp, Homo sapien
acacccattggttaacgctatcctagcctctta

SEQ ID NO: 666597 - DNA, 33 bp, Homo sapien
gtttttcttgctgaacagacaaattatctaaga

SEQ ID NO: 666598 - DNA, 33 bp, Homo sapien
gtttttcttgctgaacggacaaattatctaaga

SEQ ID NO: 666599 - DNA, 33 bp, Homo sapien
attacatagcttactaagactgagtactgagga

SEQ ID NO: 666600 - DNA, 33 bp, Homo sapien
attacatagcttactaggactgagtactgagga

SEQ ID NO: 666601 - DNA, 33 bp, Homo sapien
acagagaaggatatacagatggaggaagtccag

SEQ ID NO: 666602 - DNA, 33 bp, Homo sapien
acagagaaggatatacggatggaggaagtccag

SEQ ID NO: 666603 - DNA, 33 bp, Homo sapien
ataactgtatccataccaggcacaatgtggaac

SEQ ID NO: 666604 - DNA, 33 bp, Homo sapien
ataactgtatccatactaggcacaatgtggaac

SEQ ID NO: 666605 - DNA, 33 bp, Homo sapien
tacaagcctcttctgaaaaatctatgcttttct

SEQ ID NO: 666606 - DNA, 33 bp, Homo sapien
tacaagcctcttctgataaatctatgcttttct

SEQ ID NO: 666607 - DNA, 33 bp, Homo sapien
tttcacaaatttgtcacgtcaaataattatcaa

SEQ ID NO: 666608 - DNA, 33 bp, Homo sapien
tttcacaaatttgtcaggtcaaataattatcaa

SEQ ID NO: 666609 - DNA, 33 bp, Homo sapien
aaagtgccttcaccaacttatattcacaccagc

SEQ ID NO: 666610 - DNA, 33 bp, Homo sapien
aaagtgccttcaccaatttatattcacaccagc

SEQ ID NO: 666611 - DNA, 33 bp, Homo sapien
taaactgtgagtgtaaaagacttctggttttat

SEQ ID NO: 666612 - DNA, 33 bp, Homo sapien
taaactgtgagtgtaacagacttctggttttat

SEQ ID NO: 666613 - DNA, 33 bp, Homo sapien
ggtctacacacttgcaatgataagctgttgaag

SEQ ID NO: 666614 - DNA, 33 bp, Homo sapien
ggtctacacacttgcagtgataagctgttgaag

SEQ ID NO: 666615 - DNA, 33 bp, Homo sapien
atttaaacctattacacagccatggtcaacatg

SEQ ID NO: 666616 - DNA, 33 bp, Homo sapien
atttaaacctattacatagccatggtcaacatg

SEQ ID NO: 666617 - DNA, 33 bp, Homo sapien
tcttgaaaacaagccacgtaagtcatcaagtga

SEQ ID NO: 666618 - DNA, 33 bp, Homo sapien
tcttgaaaacaagccatgtaagtcatcaagtga

SEQ ID NO: 666619 - DNA, 33 bp, Homo sapien
actgttagaccttaagaaatgggtagaactgaa

SEQ ID NO: 666620 - DNA, 33 bp, Homo sapien
actgttagaccttaaggaatgggtagaactgaa

SEQ ID NO: 666621 - DNA, 33 bp, Homo sapien
gacatttgctataaaacatgcatggtgcctcct

SEQ ID NO: 666622 - DNA, 33 bp, Homo sapien
gacatttgctataaaatatgcatggtgcctcct

SEQ ID NO: 666623 - DNA, 33 bp, Homo sapien
tactaaaaccattgcaggtagccaaattttagt

SEQ ID NO: 666624 - DNA, 33 bp, Homo sapien
tactaaaaccattgcatgtagccaaattttagt

SEQ ID NO: 666625 - DNA, 33 bp, Homo sapien
caatgattatgctaaaattgtgcagtatggtta

SEQ ID NO: 666626 - DNA, 33 bp, Homo sapien
caatgattatgctaaacttgtgcagtatggtta

SEQ ID NO: 666627 - DNA, 33 bp, Homo sapien
agaagattggattatacgtaaccttcttattac

SEQ ID NO: 666628 - DNA, 33 bp, Homo sapien
agaagattggattatatgtaaccttcttattac

SEQ ID NO: 666629 - DNA, 33 bp, Homo sapien
aataaaaaacaatcgcaacttatgcaaatcaag

SEQ ID NO: 666630 - DNA, 33 bp, Homo sapien
aataaaaaacaatcgcgacttatgcaaatcaag

SEQ ID NO: 666631 - DNA, 33 bp, Homo sapien
ctgtaaggcatatcacagacttcttgtgctgac

SEQ ID NO: 666632 - DNA, 33 bp, Homo sapien
ctgtaaggcatatcacggacttcttgtgctgac

SEQ ID NO: 666633 - DNA, 33 bp, Homo sapien
tggaatctttgaatgacgatgattgactatata

SEQ ID NO: 666634 - DNA, 33 bp, Homo sapien
tggaatctttgaatgatgatgattgactatata

SEQ ID NO: 666635 - DNA, 33 bp, Homo sapien
cactccccatttgctccaattgtgactgctaaa

SEQ ID NO: 666636 - DNA, 33 bp, Homo sapien
cactccccatttgctctaattgtgactgctaaa

SEQ ID NO: 666637 - DNA, 33 bp, Homo sapien
atgagattgttaatgaagctaaatgacatggct

SEQ ID NO: 666638 - DNA, 33 bp, Homo sapien
atgagattgttaatgaggctaaatgacatggct

SEQ ID NO: 666639 - DNA, 33 bp, Homo sapien
gatccgtacttttccaacttgaaagtaatcatg

SEQ ID NO: 666640 - DNA, 33 bp, Homo sapien
gatccgtacttttccagcttgaaagtaatcatg

SEQ ID NO: 666641 - DNA, 33 bp, Homo sapien
actggatttgaaaataagttaatggcaaaagga

SEQ ID NO: 666642 - DNA, 33 bp, Homo sapien
actggatttgaaaatatgttaatggcaaaagga

SEQ ID NO: 666643 - DNA, 33 bp, Homo sapien
agcgggcctcagtggcaaagtacaaagtaaagt

SEQ ID NO: 666644 - DNA, 33 bp, Homo sapien
agcgggcctcagtggcgaagtacaaagtaaagt

SEQ ID NO: 666645 - DNA, 33 bp, Homo sapien
ctcaaggccaagcctactaaatgacaagagaaa

SEQ ID NO: 666646 - DNA, 33 bp, Homo sapien
ctcaaggccaagcctattaaatgacaagagaaa

SEQ ID NO: 666647 - DNA, 33 bp, Homo sapien
ccatcaacttttagcaaggtgtagagttaccat

SEQ ID NO: 666648 - DNA, 33 bp, Homo sapien
ccatcaacttttagcacggtgtagagttaccat

SEQ ID NO: 666649 - DNA, 33 bp, Homo sapien
cagaaatgtccttagccgaaaatgtacaagcct

SEQ ID NO: 666650 - DNA, 33 bp, Homo sapien
cagaaatgtccttagctgaaaatgtacaagcct

SEQ ID NO: 666651 - DNA, 33 bp, Homo sapien
tatgactatttttacacgaccactgaactctga

SEQ ID NO: 666652 - DNA, 33 bp, Homo sapien
tatgactatttttacatgaccactgaactctga

SEQ ID NO: 666653 - DNA, 33 bp, Homo sapien
aacagcatcagcataacgtgggatcttgttaga

SEQ ID NO: 666654 - DNA, 33 bp, Homo sapien
aacagcatcagcataatgtgggatcttgttaga

SEQ ID NO: 666655 - DNA, 33 bp, Homo sapien
agcacagtcaaataaccaaaggggacaggctgt

SEQ ID NO: 666656 - DNA, 33 bp, Homo sapien
agcacagtcaaataactaaaggggacaggctgt

SEQ ID NO: 666657 - DNA, 33 bp, Homo sapien
aaatgtccacatagtccccttttggtaggaaaa

SEQ ID NO: 666658 - DNA, 33 bp, Homo sapien
aaatgtccacatagtctccttttggtaggaaaa

SEQ ID NO: 666659 - DNA, 33 bp, Homo sapien
cctcttccctgtttgcagatggttgtcctcaca

SEQ ID NO: 666660 - DNA, 33 bp, Homo sapien
cctcttccctgtttgccgatggttgtcctcaca

SEQ ID NO: 666661 - DNA, 33 bp, Homo sapien
ggagatgccagagactcactttaccaacattcc

SEQ ID NO: 666662 - DNA, 33 bp, Homo sapien
ggagatgccagagacttactttaccaacattcc

SEQ ID NO: 666663 - DNA, 33 bp, Homo sapien
agcaactgatcattaaacatgactttgcccttt

SEQ ID NO: 666664 - DNA, 33 bp, Homo sapien
agcaactgatcattaagcatgactttgcccttt

SEQ ID NO: 666665 - DNA, 33 bp, Homo sapien
tctaaagtcccaggtaaggaaaggagagaggag

SEQ ID NO: 666666 - DNA, 33 bp, Homo sapien
tctaaagtcccaggtagggaaaggagagaggag

SEQ ID NO: 666667 - DNA, 33 bp, Homo sapien
gacaatactcttgaaagccaatacagaaagagt

SEQ ID NO: 666668 - DNA, 33 bp, Homo sapien
gacaatactcttgaaatccaatacagaaagagt

SEQ ID NO: 666669 - DNA, 33 bp, Homo sapien
ttcaacccatgaataccagctgtgtgctcccag

SEQ ID NO: 666670 - DNA, 33 bp, Homo sapien
ttcaacccatgaatactagctgtgtgctcccag

SEQ ID NO: 666671 - DNA, 33 bp, Homo sapien
caaccagtctacagagaaacaatgaattaggtc

SEQ ID NO: 666672 - DNA, 33 bp, Homo sapien
caaccagtctacagagcaacaatgaattaggtc

SEQ ID NO: 666673 - DNA, 33 bp, Homo sapien
cattttcctttcccaacgcatctagtatttttc

SEQ ID NO: 666674 - DNA, 33 bp, Homo sapien
cattttcctttcccaatgcatctagtatttttc

SEQ ID NO: 666675 - DNA, 33 bp, Homo sapien
gtcggctaactgaaaactacaaccacagaaact

SEQ ID NO: 666676 - DNA, 33 bp, Homo sapien
gtcggctaactgaaaagtacaaccacagaaact

SEQ ID NO: 666677 - DNA, 33 bp, Homo sapien
ggtgccccaaaacagaaagagttaagctgctga

SEQ ID NO: 666678 - DNA, 33 bp, Homo sapien
ggtgccccaaaacagacagagttaagctgctga

SEQ ID NO: 666679 - DNA, 33 bp, Homo sapien
tgcgtcaatagtggcaaccgtcttcagacaaaa

SEQ ID NO: 666680 - DNA, 33 bp, Homo sapien
tgcgtcaatagtggcatccgtcttcagacaaaa

SEQ ID NO: 666681 - DNA, 33 bp, Homo sapien
cctccaagatggataaagattataaaatagtca

SEQ ID NO: 666682 - DNA, 33 bp, Homo sapien
cctccaagatggataaggattataaaatagtca

SEQ ID NO: 666683 - DNA, 33 bp, Homo sapien
ttaaattttgtttttaacatgagcagctttgtg

SEQ ID NO: 666684 - DNA, 33 bp, Homo sapien
ttaaattttgtttttaccatgagcagctttgtg

SEQ ID NO: 666685 - DNA, 33 bp, Homo sapien
accatggctacccttaaacccctcgtgaagccc

SEQ ID NO: 666686 - DNA, 33 bp, Homo sapien
accatggctacccttagacccctcgtgaagccc

SEQ ID NO: 666687 - DNA, 33 bp, Homo sapien
tatagcattgaaggcacatattggaaaagaaga

SEQ ID NO: 666688 - DNA, 33 bp, Homo sapien
tatagcattgaaggcatatattggaaaagaaga

SEQ ID NO: 666689 - DNA, 33 bp, Homo sapien
gaagataagccttaaactaggagaatatacttg

SEQ ID NO: 666690 - DNA, 33 bp, Homo sapien
gaagataagccttaaattaggagaatatacttg

SEQ ID NO: 666691 - DNA, 33 bp, Homo sapien
taaagaaaactattaacatgttgaggcaagtac

SEQ ID NO: 666692 - DNA, 33 bp, Homo sapien
taaagaaaactattaatatgttgaggcaagtac

SEQ ID NO: 666693 - DNA, 33 bp, Homo sapien
tcaagtatcctttcaccgtacttgcctcaacat

SEQ ID NO: 666694 - DNA, 33 bp, Homo sapien
tcaagtatcctttcactgtacttgcctcaacat

SEQ ID NO: 666695 - DNA, 33 bp, Homo sapien
tctatcagacagcaccacttaagactaactagg

SEQ ID NO: 666696 - DNA, 33 bp, Homo sapien
tctatcagacagcaccgcttaagactaactagg

SEQ ID NO: 666697 - DNA, 33 bp, Homo sapien
agtactctggctataacgagggtgaccatccag

SEQ ID NO: 666698 - DNA, 33 bp, Homo sapien
agtactctggctataatgagggtgaccatccag

SEQ ID NO: 666699 - DNA, 33 bp, Homo sapien
cccatatatgcgtaaacgttgatgaggttggga

SEQ ID NO: 666700 - DNA, 33 bp, Homo sapien
cccatatatgcgtaaaggttgatgaggttggga

SEQ ID NO: 666701 - DNA, 33 bp, Homo sapien
aaactagctgctgaaacagatacacctataatc

SEQ ID NO: 666702 - DNA, 33 bp, Homo sapien
aaactagctgctgaaatagatacacctataatc

SEQ ID NO: 666703 - DNA, 33 bp, Homo sapien
taaaaaccctagtgaccccagcaaattagaagt

SEQ ID NO: 666704 - DNA, 33 bp, Homo sapien
taaaaaccctagtgactccagcaaattagaagt

SEQ ID NO: 666705 - DNA, 33 bp, Homo sapien
atctaggcctggcataccactggtcatgtggat

SEQ ID NO: 666706 - DNA, 33 bp, Homo sapien
atctaggcctggcatatcactggtcatgtggat

SEQ ID NO: 666707 - DNA, 33 bp, Homo sapien
aaccggagacagtacaggaatcattctcattat

SEQ ID NO: 666708 - DNA, 33 bp, Homo sapien
aaccggagacagtacatgaatcattctcattat

SEQ ID NO: 666709 - DNA, 33 bp, Homo sapien
ctccggttcactacacaagtcattaccccgtga

SEQ ID NO: 666710 - DNA, 33 bp, Homo sapien
ctccggttcactacacgagtcattaccccgtga

SEQ ID NO: 666711 - DNA, 33 bp, Homo sapien
atgcaggttatttcaacgtgagagctttaaaat

SEQ ID NO: 666712 - DNA, 33 bp, Homo sapien
atgcaggttatttcaatgtgagagctttaaaat

SEQ ID NO: 666713 - DNA, 33 bp, Homo sapien
agttggggtggtatacagacaagccctggtgat

SEQ ID NO: 666714 - DNA, 33 bp, Homo sapien
agttggggtggtatacggacaagccctggtgat

SEQ ID NO: 666715 - DNA, 33 bp, Homo sapien
cattgcttaaacaaacccagtacattcatatat

SEQ ID NO: 666716 - DNA, 33 bp, Homo sapien
cattgcttaaacaaacgcagtacattcatatat

SEQ ID NO: 666717 - DNA, 33 bp, Homo sapien
acacacatggtggtaaacagaagccatgatgca

SEQ ID NO: 666718 - DNA, 33 bp, Homo sapien
acacacatggtggtaagcagaagccatgatgca

SEQ ID NO: 666719 - DNA, 33 bp, Homo sapien
tgccaaaacttgtgccggagacacttagtgaca

SEQ ID NO: 666720 - DNA, 33 bp, Homo sapien
tgccaaaacttgtgcctgagacacttagtgaca

SEQ ID NO: 666721 - DNA, 33 bp, Homo sapien
gtcagtggtttgttggaaccggtacataccagc

SEQ ID NO: 666722 - DNA, 33 bp, Homo sapien
gtcagtggtttgttgggaccggtacataccagc

SEQ ID NO: 666723 - DNA, 33 bp, Homo sapien
tcagttaatctgaaatgaaaaaacaaagtaaaa

SEQ ID NO: 666724 - DNA, 33 bp, Homo sapien
tcagttaatctgaaattaaaaaacaaagtaaaa

SEQ ID NO: 666725 - DNA, 33 bp, Homo sapien
ttagctttatttccgacgtaatttctgccggaa

SEQ ID NO: 666726 - DNA, 33 bp, Homo sapien
ttagctttatttccgaggtaatttctgccggaa

SEQ ID NO: 666727 - DNA, 33 bp, Homo sapien
attgtgatttggaggaggaggtaactagaaggg

SEQ ID NO: 666728 - DNA, 33 bp, Homo sapien
attgtgatttggaggatgaggtaactagaaggg

SEQ ID NO: 666729 - DNA, 33 bp, Homo sapien
gatcctatgggcctaaataacatcaggaaaggt

SEQ ID NO: 666730 - DNA, 33 bp, Homo sapien
gatcctatgggcctaagtaacatcaggaaaggt

SEQ ID NO: 666731 - DNA, 33 bp, Homo sapien
gctggctttgtctcaaactcttctggtgtaaga

SEQ ID NO: 666732 - DNA, 33 bp, Homo sapien
gctggctttgtctcaagctcttctggtgtaaga

SEQ ID NO: 666733 - DNA, 33 bp, Homo sapien
actcttcttcggtggtaaatggataaaaggaga

SEQ ID NO: 666734 - DNA, 33 bp, Homo sapien
actcttcttcggtggtgaatggataaaaggaga

SEQ ID NO: 666735 - DNA, 33 bp, Homo sapien
gaaaactataaatagaacacagtcacgtactat

SEQ ID NO: 666736 - DNA, 33 bp, Homo sapien
gaaaactataaatagatcacagtcacgtactat

SEQ ID NO: 666737 - DNA, 33 bp, Homo sapien
ggaagtcaggaagtgacaaaacctcccatctgg

SEQ ID NO: 666738 - DNA, 33 bp, Homo sapien
ggaagtcaggaagtgataaaacctcccatctgg

SEQ ID NO: 666739 - DNA, 33 bp, Homo sapien
atatcaatgtgtcttaacagctgtcacaagtaa

SEQ ID NO: 666740 - DNA, 33 bp, Homo sapien
atatcaatgtgtcttatcagctgtcacaagtaa

SEQ ID NO: 666741 - DNA, 33 bp, Homo sapien
ccagtattttagagtaacattgacaatcaggct

SEQ ID NO: 666742 - DNA, 33 bp, Homo sapien
ccagtattttagagtaccattgacaatcaggct

SEQ ID NO: 666743 - DNA, 33 bp, Homo sapien
caatcaggctcaatcaaaggaaatgtaatcata

SEQ ID NO: 666744 - DNA, 33 bp, Homo sapien
caatcaggctcaatcacaggaaatgtaatcata

SEQ ID NO: 666745 - DNA, 33 bp, Homo sapien
cacattctgagaacagcaggtggttaaaattgc

SEQ ID NO: 666746 - DNA, 33 bp, Homo sapien
cacattctgagaacagtaggtggttaaaattgc

SEQ ID NO: 666747 - DNA, 33 bp, Homo sapien
aaagtcaaatagctgcaaaagtggcaaagttgc

SEQ ID NO: 666748 - DNA, 33 bp, Homo sapien
aaagtcaaatagctgcgaaagtggcaaagttgc

SEQ ID NO: 666749 - DNA, 33 bp, Homo sapien
tgtgagattttttggcagcatgtattactttgg

SEQ ID NO: 666750 - DNA, 33 bp, Homo sapien
tgtgagattttttggcggcatgtattactttgg

SEQ ID NO: 666751 - DNA, 33 bp, Homo sapien
ctctaacttggggatcaacttccaatacttttt

SEQ ID NO: 666752 - DNA, 33 bp, Homo sapien
ctctaacttggggatcgacttccaatacttttt

SEQ ID NO: 666753 - DNA, 33 bp, Homo sapien
aataccatggttgctaagaaaattatcaaccaa

SEQ ID NO: 666754 - DNA, 33 bp, Homo sapien
aataccatggttgctatgaaaattatcaaccaa

SEQ ID NO: 666755 - DNA, 33 bp, Homo sapien
tgcagagaagagcaggaaaatgatagagaagag

SEQ ID NO: 666756 - DNA, 33 bp, Homo sapien
tgcagagaagagcagggaaatgatagagaagag

SEQ ID NO: 666757 - DNA, 33 bp, Homo sapien
gtgtatgctctgttcaatcgttttgctgaatat

SEQ ID NO: 666758 - DNA, 33 bp, Homo sapien
gtgtatgctctgttcagtcgttttgctgaatat

SEQ ID NO: 666759 - DNA, 33 bp, Homo sapien
tcttcaaaatgtagtaaaagtactcttgcttct

SEQ ID NO: 666760 - DNA, 33 bp, Homo sapien
tcttcaaaatgtagtagaagtactcttgcttct

SEQ ID NO: 666761 - DNA, 33 bp, Homo sapien
tgtactccacaaaagacatagttacagtagcac

SEQ ID NO: 666762 - DNA, 33 bp, Homo sapien
tgtactccacaaaagatatagttacagtagcac

SEQ ID NO: 666763 - DNA, 33 bp, Homo sapien
tgatactatactgtgaaacatggtaagtatttg

SEQ ID NO: 666764 - DNA, 33 bp, Homo sapien
tgatactatactgtgacacatggtaagtatttg

SEQ ID NO: 666765 - DNA, 33 bp, Homo sapien
attcattaaaccttaaaggtccagaaggatctc

SEQ ID NO: 666766 - DNA, 33 bp, Homo sapien
attcattaaaccttaagggtccagaaggatctc

SEQ ID NO: 666767 - DNA, 33 bp, Homo sapien; identical to SEQ ID NO: 666765

SEQ ID NO: 666768 - DNA, 33 bp, Homo sapien; identical to SEQ ID NO: 666766

SEQ ID NO: 666769 - DNA, 33 bp, Homo sapien
atctgctcagttcaggaaaggcactaattctct

SEQ ID NO: 666770 - DNA, 33 bp, Homo sapien
atctgctcagttcaggtaaggcactaattctct

SEQ ID NO: 666771 - DNA, 33 bp, Homo sapien
ggaatgttgcaagattcaaagaagaagcaacca

SEQ ID NO: 666772 - DNA, 33 bp, Homo sapien
ggaatgttgcaagattgaaagaagaagcaacca

SEQ ID NO: 666773 - DNA, 33 bp, Homo sapien
aattatttttatggacacagtaatcaaaataga

SEQ ID NO: 666774 - DNA, 33 bp, Homo sapien
aattatttttatggacgcagtaatcaaaataga

SEQ ID NO: 666775 - DNA, 33 bp, Homo sapien
acttcaaaacaccaaaatcaaagataaagtctt

SEQ ID NO: 666776 - DNA, 33 bp, Homo sapien
acttcaaaacaccaaagtcaaagataaagtctt

SEQ ID NO: 666777 - DNA, 33 bp, Homo sapien
taatacattttaaagacgctgagaaaaaatata

SEQ ID NO: 666778 - DNA, 33 bp, Homo sapien
taatacattttaaagatgctgagaaaaaatata

SEQ ID NO: 666779 - DNA, 33 bp, Homo sapien
tggaatccagaaagaaagagatgcaagaaggaa

SEQ ID NO: 666780 - DNA, 33 bp, Homo sapien
tggaatccagaaagaatgagatgcaagaaggaa

SEQ ID NO: 666781 - DNA, 33 bp, Homo sapien
gtttttgttaatctgcaaattgaagcagttgga

SEQ ID NO: 666782 - DNA, 33 bp, Homo sapien
gtttttgttaatctgcgaattgaagcagttgga

SEQ ID NO: 666783 - DNA, 33 bp, Homo sapien
tactctttgtggtttaactctaacatttcaaca

SEQ ID NO: 666784 - DNA, 33 bp, Homo sapien
tactctttgtggtttagctctaacatttcaaca

SEQ ID NO: 666785 - DNA, 33 bp, Homo sapien
ccccctgtgaggttcacgctgtgtatagactag

SEQ ID NO: 666786 - DNA, 33 bp, Homo sapien
ccccctgtgaggttcatgctgtgtatagactag

SEQ ID NO: 666787 - DNA, 33 bp, Homo sapien
tgaactttatgtctaaatatccaagagaacttg

SEQ ID NO: 666788 - DNA, 33 bp, Homo sapien
tgaactttatgtctaagtatccaagagaacttg

SEQ ID NO: 666789 - DNA, 33 bp, Homo sapien
tctttcctattatttcgccaatgttcaacacag

SEQ ID NO: 666790 - DNA, 33 bp, Homo sapien
tctttcctattatttctccaatgttcaacacag

SEQ ID NO: 666791 - DNA, 33 bp, Homo sapien
agttcatactgatataagcaagtctatcttttc

SEQ ID NO: 666792 - DNA, 33 bp, Homo sapien
agttcatactgatataggcaagtctatcttttc

SEQ ID NO: 666793 - DNA, 33 bp, Homo sapien
atttccacaatataccagcggtgaaatgaagtt

SEQ ID NO: 666794 - DNA, 33 bp, Homo sapien
atttccacaatatacccgcggtgaaatgaagtt

SEQ ID NO: 666795 - DNA, 33 bp, Homo sapien
gcctgtgtccaaagccaaaggtattcaaaacat

SEQ ID NO: 666796 - DNA, 33 bp, Homo sapien
gcctgtgtccaaagccgaaggtattcaaaacat

SEQ ID NO: 666797 - DNA, 33 bp, Homo sapien
agacattttatggctacctgtatcacccattat

SEQ ID NO: 666798 - DNA, 33 bp, Homo sapien
agacattttatggctagctgtatcacccattat

SEQ ID NO: 666799 - DNA, 33 bp, Homo sapien
taattataatatattcacatgctatctccttta

SEQ ID NO: 666800 - DNA, 33 bp, Homo sapien
taattataatatattcgcatgctatctccttta

SEQ ID NO: 666801 - DNA, 33 bp, Homo sapien
aagatttatttggcgacaactttccaggcaatg

SEQ ID NO: 666802 - DNA, 33 bp, Homo sapien
aagatttatttggcgagaactttccaggcaatg

SEQ ID NO: 666803 - DNA, 33 bp, Homo sapien
ctgttggagattcttaggagctgtgaatggagg

SEQ ID NO: 666804 - DNA, 33 bp, Homo sapien
ctgttggagattcttatgagctgtgaatggagg

SEQ ID NO: 666805 - DNA, 33 bp, Homo sapien
tgatgaaagaaattgacgcattagctgggtgtg

SEQ ID NO: 666806 - DNA, 33 bp, Homo sapien
tgatgaaagaaattgaggcattagctgggtgtg

SEQ ID NO: 666807 - DNA, 33 bp, Homo sapien
caatattcttggaatgccactgtgttaaaggtc

SEQ ID NO: 666808 - DNA, 33 bp, Homo sapien
caatattcttggaatgtcactgtgttaaaggtc

SEQ ID NO: 666809 - DNA, 33 bp, Homo sapien
atgggctggccctggcaaaaggtacaactcaca

SEQ ID NO: 666810 - DNA, 33 bp, Homo sapien
atgggctggccctggcgaaaggtacaactcaca

SEQ ID NO: 666811 - DNA, 33 bp, Homo sapien
tggaaatgagtattaacagttagtgaattatct

SEQ ID NO: 666812 - DNA, 33 bp, Homo sapien
tggaaatgagtattaagagttagtgaattatct

SEQ ID NO: 666813 - DNA, 33 bp, Homo sapien
taagcactgcaataccactacagtcgatctgat

SEQ ID NO: 666814 - DNA, 33 bp, Homo sapien
taagcactgcaataccgctacagtcgatctgat

SEQ ID NO: 666815 - DNA, 33 bp, Homo sapien
gttcttcgaaatttcaaatatgaatcctccaat

SEQ ID NO: 666816 - DNA, 33 bp, Homo sapien
gttcttcgaaatttcagatatgaatcctccaat

SEQ ID NO: 666817 - DNA, 33 bp, Homo sapien
caagagtgaccagggaagccttttgtggaagag

SEQ ID NO: 666818 - DNA, 33 bp, Homo sapien
caagagtgaccagggacgccttttgtggaagag

SEQ ID NO: 666819 - DNA, 33 bp, Homo sapien
aaatataattctttccagaggaacttaatcctg

SEQ ID NO: 666820 - DNA, 33 bp, Homo sapien
aaatataattctttccggaggaacttaatcctg

SEQ ID NO: 666821 - DNA, 33 bp, Homo sapien
actctcacattgatgactaagtttcaacacatg

SEQ ID NO: 666822 - DNA, 33 bp, Homo sapien
actctcacattgatgattaagtttcaacacatg

SEQ ID NO: 666823 - DNA, 33 bp, Homo sapien
caatgattttcatgtcaaaagagcctctgccta

SEQ ID NO: 666824 - DNA, 33 bp, Homo sapien
caatgattttcatgtctaaagagcctctgccta

SEQ ID NO: 666825 - DNA, 33 bp, Homo sapien
ggaaaagctttataacaggtgtgtcatatgctt

SEQ ID NO: 666826 - DNA, 33 bp, Homo sapien
ggaaaagctttataaccggtgtgtcatatgctt

SEQ ID NO: 666827 - DNA, 33 bp, Homo sapien
cacgcctgagatttggccactcacctatgtttt

SEQ ID NO: 666828 - DNA, 33 bp, Homo sapien
cacgcctgagatttggtcactcacctatgtttt

SEQ ID NO: 666829 - DNA, 33 bp, Homo sapien
atgcactttgaaaggaactcacaaaactggttc

SEQ ID NO: 666830 - DNA, 33 bp, Homo sapien
atgcactttgaaaggacctcacaaaactggttc

SEQ ID NO: 666831 - DNA, 33 bp, Homo sapien
atggttgttcaaaaaaatgcttgaattaggagt

SEQ ID NO: 666832 - DNA, 33 bp, Homo sapien
atggttgttcaaaaaagtgcttgaattaggagt

SEQ ID NO: 666833 - DNA, 33 bp, Homo sapien
ccaggcttgatttttgaagagatagtagcctgg

SEQ ID NO: 666834 - DNA, 33 bp, Homo sapien
ccaggcttgatttttggagagatagtagcctgg

SEQ ID NO: 666835 - DNA, 33 bp, Homo sapien
aataaggattaaatgcaatgtgcttaaaagagt

SEQ ID NO: 666836 - DNA, 33 bp, Homo sapien
aataaggattaaatgccatgtgcttaaaagagt

SEQ ID NO: 666837 - DNA, 33 bp, Homo sapien
ggaagtgctgaacttcaccctcctctcctttcc

SEQ ID NO: 666838 - DNA, 33 bp, Homo sapien
ggaagtgctgaacttctccctcctctcctttcc

SEQ ID NO: 666839 - DNA, 33 bp, Homo sapien
tgtttcactgtctccacagcataaacataaata

SEQ ID NO: 666840 - DNA, 33 bp, Homo sapien
tgtttcactgtctccagagcataaacataaata

SEQ ID NO: 666841 - DNA, 33 bp, Homo sapien
cttggccttaacaacaaggaattcggatggcta

SEQ ID NO: 666842 - DNA, 33 bp, Homo sapien
cttggccttaacaacagggaattcggatggcta

SEQ ID NO: 666843 - DNA, 33 bp, Homo sapien
ggcacttcagcattaacatgtccatgatcatct

SEQ ID NO: 666844 - DNA, 33 bp, Homo sapien
ggcacttcagcattaatatgtccatgatcatct

SEQ ID NO: 666845 - DNA, 33 bp, Homo sapien
cattgcaattgcttaacaaacacaatagaaaag

SEQ ID NO: 666846 - DNA, 33 bp, Homo sapien
cattgcaattgcttaagaaacacaatagaaaag

SEQ ID NO: 666847 - DNA, 33 bp, Homo sapien
catcacctgtgccagcaccaattgaccagtcgt

SEQ ID NO: 666848 - DNA, 33 bp, Homo sapien
catcacctgtgccagctccaattgaccagtcgt

SEQ ID NO: 666849 - DNA, 33 bp, Homo sapien
cagaaggactattctccaaaagccctccttgga

SEQ ID NO: 666850 - DNA, 33 bp, Homo sapien
cagaaggactattctctaaaagccctccttgga

SEQ ID NO: 666851 - DNA, 33 bp, Homo sapien
aggacctgtagagaccacacaaattctacacta

SEQ ID NO: 666852 - DNA, 33 bp, Homo sapien
aggacctgtagagaccgcacaaattctacacta

SEQ ID NO: 666853 - DNA, 33 bp, Homo sapien
aagacccagtctccaggaattcagagtcttaac

SEQ ID NO: 666854 - DNA, 33 bp, Homo sapien
aagacccagtctccagtaattcagagtcttaac

SEQ ID NO: 666855 - DNA, 33 bp, Homo sapien
cagcgagctatgtgaccggtgggagtgtcataa

SEQ ID NO: 666856 - DNA, 33 bp, Homo sapien
cagcgagctatgtgactggtgggagtgtcataa

SEQ ID NO: 666857 - DNA, 33 bp, Homo sapien
tcaccactcacactccaataaatatcttctgta

SEQ ID NO: 666858 - DNA, 33 bp, Homo sapien
tcaccactcacactccgataaatatcttctgta

SEQ ID NO: 666859 - DNA, 33 bp, Homo sapien
catttagtcttaattacggtggacagttcccat

SEQ ID NO: 666860 - DNA, 33 bp, Homo sapien
catttagtcttaattatggtggacagttcccat

SEQ ID NO: 666861 - DNA, 33 bp, Homo sapien
gtgctgactgccttcacgtggcttggaattaaa

SEQ ID NO: 666862 - DNA, 33 bp, Homo sapien
gtgctgactgccttcatgtggcttggaattaaa

SEQ ID NO: 666863 - DNA, 33 bp, Homo sapien
aagagtacattttcccccctttctctgaaggag

SEQ ID NO: 666864 - DNA, 33 bp, Homo sapien
aagagtacattttcccgcctttctctgaaggag

SEQ ID NO: 666865 - DNA, 33 bp, Homo sapien
aaaggatggctcacaacgcagtttatgaaaagg

SEQ ID NO: 666866 - DNA, 33 bp, Homo sapien
aaaggatggctcacaaggcagtttatgaaaagg

SEQ ID NO: 666867 - DNA, 33 bp, Homo sapien
aggcagtgtagactataaggtgtgagaaacctt

SEQ ID NO: 666868 - DNA, 33 bp, Homo sapien
aggcagtgtagactatgaggtgtgagaaacctt

SEQ ID NO: 666869 - DNA, 33 bp, Homo sapien
tgtttcttttcttcaacgctggatataaataca

SEQ ID NO: 666870 - DNA, 33 bp, Homo sapien
tgtttcttttcttcaatgctggatataaataca

SEQ ID NO: 666871 - DNA, 33 bp, Homo sapien
atggaagattacttaacgccaggcttgtggtgc

SEQ ID NO: 666872 - DNA, 33 bp, Homo sapien
atggaagattacttaatgccaggcttgtggtgc

SEQ ID NO: 666873 - DNA, 33 bp, Homo sapien
cacttaggtattggaacctcacactcaaatctg

SEQ ID NO: 666874 - DNA, 33 bp, Homo sapien
cacttaggtattggaatctcacactcaaatctg

SEQ ID NO: 666875 - DNA, 33 bp, Homo sapien
catagaactgaaacacagtgcagaacagaagtt

SEQ ID NO: 666876 - DNA, 33 bp, Homo sapien
catagaactgaaacacggtgcagaacagaagtt

SEQ ID NO: 666877 - DNA, 33 bp, Homo sapien
aagaaatggccacaaccgtgttttccatttgga

SEQ ID NO: 666878 - DNA, 33 bp, Homo sapien
aagaaatggccacaacggtgttttccatttgga

SEQ ID NO: 666879 - DNA, 33 bp, Homo sapien
aagtaggagttagaaaacagtagaaccgaggtg

SEQ ID NO: 666880 - DNA, 33 bp, Homo sapien
aagtaggagttagaaagcagtagaaccgaggtg

SEQ ID NO: 666881 - DNA, 33 bp, Homo sapien
tcctagagattgcaaggcaccttcagaaaattc

SEQ ID NO: 666882 - DNA, 33 bp, Homo sapien
tcctagagattgcaagtcaccttcagaaaattc

SEQ ID NO: 666883 - DNA, 33 bp, Homo sapien
gtcccaagctggtgaaaagtattaattagatag

SEQ ID NO: 666884 - DNA, 33 bp, Homo sapien
gtcccaagctggtgaagagtattaattagatag

SEQ ID NO: 666885 - DNA, 33 bp, Homo sapien
ggcccattgagctccacgctccgtttgtccaca

SEQ ID NO: 666886 - DNA, 33 bp, Homo sapien
ggcccattgagctccatgctccgtttgtccaca

SEQ ID NO: 666887 - DNA, 33 bp, Homo sapien
tgaagctctgaaatgggataataggcagggtgt

SEQ ID NO: 666888 - DNA, 33 bp, Homo sapien
tgaagctctgaaatggtataataggcagggtgt

SEQ ID NO: 666889 - DNA, 33 bp, Homo sapien
actgcctgataccccacatttagtcccagtcct

SEQ ID NO: 666890 - DNA, 33 bp, Homo sapien
actgcctgataccccatatttagtcccagtcct

SEQ ID NO: 666891 - DNA, 33 bp, Homo sapien
atcatccacctataaaagaaatgcactgtgtga

SEQ ID NO: 666892 - DNA, 33 bp, Homo sapien
atcatccacctataaaggaaatgcactgtgtga

SEQ ID NO: 666893 - DNA, 33 bp, Homo sapien
tgatccctgcagcagtcacagtctgattcaaca

SEQ ID NO: 666894 - DNA, 33 bp, Homo sapien
tgatccctgcagcagtgacagtctgattcaaca

SEQ ID NO: 666895 - DNA, 33 bp, Homo sapien
tacatttttggcactcacgtgagctttttcatg

SEQ ID NO: 666896 - DNA, 33 bp, Homo sapien
tacatttttggcactcgcgtgagctttttcatg

SEQ ID NO: 666897 - DNA, 33 bp, Homo sapien
atatcatatttttaaaatggcttgcttgagaaa

SEQ ID NO: 666898 - DNA, 33 bp, Homo sapien
atatcatatttttaaagtggcttgcttgagaaa

SEQ ID NO: 666899 - DNA, 33 bp, Homo sapien
gcgtagtgaggcttaaaatactgactgctcatc

SEQ ID NO: 666900 - DNA, 33 bp, Homo sapien
gcgtagtgaggcttaagatactgactgctcatc

SEQ ID NO: 666901 - DNA, 33 bp, Homo sapien
ttacttaatgtttcggccaggaagcatttaaca

SEQ ID NO: 666902 - DNA, 33 bp, Homo sapien
ttacttaatgtttcggtcaggaagcatttaaca

SEQ ID NO: 666903 - DNA, 33 bp, Homo sapien
ttttgctcttgcggtcccatctgttcctccagg

SEQ ID NO: 666904 - DNA, 33 bp, Homo sapien
ttttgctcttgcggtcgcatctgttcctccagg

SEQ ID NO: 666905 - DNA, 33 bp, Homo sapien
taaagacttacagaaccgggctctagcctgtta

SEQ ID NO: 666906 - DNA, 33 bp, Homo sapien
taaagacttacagaactgggctctagcctgtta

SEQ ID NO: 666907 - DNA, 33 bp, Homo sapien
gtgaaggctgaattgccaggcactttaaaggca

SEQ ID NO: 666908 - DNA, 33 bp, Homo sapien
gtgaaggctgaattgctaggcactttaaaggca

SEQ ID NO: 666909 - DNA, 33 bp, Homo sapien
tatggaccaaaagatacgcatgaagagtttctc

SEQ ID NO: 666910 - DNA, 33 bp, Homo sapien
tatggaccaaaagatatgcatgaagagtttctc

SEQ ID NO: 666911 - DNA, 33 bp, Homo sapien
ccaccaagtggagatgccaagtaaatagtcagt

SEQ ID NO: 666912 - DNA, 33 bp, Homo sapien
ccaccaagtggagatgtcaagtaaatagtcagt

SEQ ID NO: 666913 - DNA, 33 bp, Homo sapien
tggctacaaattagaaggactccagagagctta

SEQ ID NO: 666914 - DNA, 33 bp, Homo sapien
tggctacaaattagaatgactccagagagctta

SEQ ID NO: 666915 - DNA, 33 bp, Homo sapien
aatgacttcagcacaacgagcggggaagcttag

SEQ ID NO: 666916 - DNA, 33 bp, Homo sapien
aatgacttcagcacaaggagcggggaagcttag

SEQ ID NO: 666917 - DNA, 33 bp, Homo sapien
taagtgaccaagttaacatctcctttctaggct

SEQ ID NO: 666918 - DNA, 33 bp, Homo sapien
taagtgaccaagttaatatctcctttctaggct

SEQ ID NO: 666919 - DNA, 33 bp, Homo sapien
tgtcaagagcaagaaaataccttgagcctggtg

SEQ ID NO: 666920 - DNA, 33 bp, Homo sapien
tgtcaagagcaagaaagtaccttgagcctggtg

SEQ ID NO: 666921 - DNA, 33 bp, Homo sapien
gaaataagcttagtgccatccaatagggagcat

SEQ ID NO: 666922 - DNA, 33 bp, Homo sapien
gaaataagcttagtgctatccaatagggagcat

SEQ ID NO: 666923 - DNA, 33 bp, Homo sapien
tgctgatgtttagttgcactacatttcctttat

SEQ ID NO: 666924 - DNA, 33 bp, Homo sapien
tgctgatgtttagttgtactacatttcctttat

SEQ ID NO: 666925 - DNA, 33 bp, Homo sapien
aagacataaaaattccaaagactgtaatagatt

SEQ ID NO: 666926 - DNA, 33 bp, Homo sapien
aagacataaaaattccgaagactgtaatagatt

SEQ ID NO: 666927 - DNA, 33 bp, Homo sapien
aaagttccagatttggaaaaagaattcgttgca

SEQ ID NO: 666928 - DNA, 33 bp, Homo sapien
aaagttccagatttgggaaaagaattcgttgca

SEQ ID NO: 666929 - DNA, 33 bp, Homo sapien
gtttgcctgaattccacgtacttcaaggactac

SEQ ID NO: 666930 - DNA, 33 bp, Homo sapien
gtttgcctgaattccatgtacttcaaggactac

SEQ ID NO: 666931 - DNA, 33 bp, Homo sapien
atgactattgctataaataatgcaggaactttg

SEQ ID NO: 666932 - DNA, 33 bp, Homo sapien
atgactattgctataactaatgcaggaactttg

SEQ ID NO: 666933 - DNA, 33 bp, Homo sapien
atgaggcacccaataaatgggcagctgaaataa

SEQ ID NO: 666934 - DNA, 33 bp, Homo sapien
atgaggcacccaataagtgggcagctgaaataa

SEQ ID NO: 666935 - DNA, 33 bp, Homo sapien
tatgaacaccatcaatcaccaacttgttcagag

SEQ ID NO: 666936 - DNA, 33 bp, Homo sapien
tatgaacaccatcaatgaccaacttgttcagag

SEQ ID NO: 666937 - DNA, 33 bp, Homo sapien
ttcgaagtgtgcataacgtagagactcatttat

SEQ ID NO: 666938 - DNA, 33 bp, Homo sapien
ttcgaagtgtgcataatgtagagactcatttat

SEQ ID NO: 666939 - DNA, 33 bp, Homo sapien
acattgcaaattttcaacagactccagagttcc

SEQ ID NO: 666940 - DNA, 33 bp, Homo sapien
acattgcaaattttcagcagactccagagttcc

SEQ ID NO: 666941 - DNA, 33 bp, Homo sapien
agactccagagttcctaaatagctacatccgac

SEQ ID NO: 666942 - DNA, 33 bp, Homo sapien
agactccagagttcctcaatagctacatccgac

SEQ ID NO: 666943 - DNA, 33 bp, Homo sapien
tttaagaaaactgctggaccaagaattaacact

SEQ ID NO: 666944 - DNA, 33 bp, Homo sapien
tttaagaaaactgctgtaccaagaattaacact

SEQ ID NO: 666945 - DNA, 33 bp, Homo sapien
caaattctgatcccaacaatgagtttaggcttt

SEQ ID NO: 666946 - DNA, 33 bp, Homo sapien
caaattctgatcccaataatgagtttaggcttt

SEQ ID NO: 666947 - DNA, 33 bp, Homo sapien
ttgtctagttatcaataagaattccaccctccc

SEQ ID NO: 666948 - DNA, 33 bp, Homo sapien
ttgtctagttatcaatgagaattccaccctccc

SEQ ID NO: 666949 - DNA, 33 bp, Homo sapien
atcaggagacagaaaaaggatgaccatggggca

SEQ ID NO: 666950 - DNA, 33 bp, Homo sapien
atcaggagacagaaaagggatgaccatggggca

SEQ ID NO: 666951 - DNA, 33 bp, Homo sapien
tctgatagtcatggccacccatgaaggacttgt

SEQ ID NO: 666952 - DNA, 33 bp, Homo sapien
tctgatagtcatggccgcccatgaaggacttgt

SEQ ID NO: 666953 - DNA, 33 bp, Homo sapien
cgagtattccaaaaaaaatctcgcatctgactc

SEQ ID NO: 666954 - DNA, 33 bp, Homo sapien
cgagtattccaaaaaatatctcgcatctgactc

SEQ ID NO: 666955 - DNA, 33 bp, Homo sapien
ccactggcgtggactcgcagggtgatcctttgg

SEQ ID NO: 666956 - DNA, 33 bp, Homo sapien
ccactggcgtggactctcagggtgatcctttgg

SEQ ID NO: 666957 - DNA, 33 bp, Homo sapien
ggagaaactgatgggaaccatatttgaggacta

SEQ ID NO: 666958 - DNA, 33 bp, Homo sapien
ggagaaactgatgggagccatatttgaggacta

SEQ ID NO: 666959 - DNA, 33 bp, Homo sapien
ggtagatcttcaacaaatattccatgaattaac

SEQ ID NO: 666960 - DNA, 33 bp, Homo sapien
ggtagatcttcaacaagtattccatgaattaac

SEQ ID NO: 666961 - DNA, 33 bp, Homo sapien
gctgtgttcccagttacatccaagtgccacatt

SEQ ID NO: 666962 - DNA, 33 bp, Homo sapien
gctgtgttcccagttatatccaagtgccacatt

SEQ ID NO: 666963 - DNA, 33 bp, Homo sapien
tgcgtacaatttccaaaaaaggtttgattcatc

SEQ ID NO: 666964 - DNA, 33 bp, Homo sapien
tgcgtacaatttccaagaaaggtttgattcatc

SEQ ID NO: 666965 - DNA, 33 bp, Homo sapien
ttccctctgtcatccaacaaatgtttttttctg

SEQ ID NO: 666966 - DNA, 33 bp, Homo sapien
ttccctctgtcatccatcaaatgtttttttctg

SEQ ID NO: 666967 - DNA, 33 bp, Homo sapien
gtcaagctacattccacataaaaaagttgtgtg

SEQ ID NO: 666968 - DNA, 33 bp, Homo sapien
gtcaagctacattccagataaaaaagttgtgtg

SEQ ID NO: 666969 - DNA, 33 bp, Homo sapien
aggagctttctgaaatcaagtatctcccttgcc

SEQ ID NO: 666970 - DNA, 33 bp, Homo sapien
aggagctttctgaaatgaagtatctcccttgcc

SEQ ID NO: 666971 - DNA, 33 bp, Homo sapien
atatatcaaatcaaggacagcaggtaggaataa

SEQ ID NO: 666972 - DNA, 33 bp, Homo sapien
atatatcaaatcaagggcagcaggtaggaataa

SEQ ID NO: 666973 - DNA, 33 bp, Homo sapien
gctctaggttggcttgaaactaacagaaaccca

SEQ ID NO: 666974 - DNA, 33 bp, Homo sapien
gctctaggttggcttggaactaacagaaaccca

SEQ ID NO: 666975 - DNA, 33 bp, Homo sapien
gatcattccagctccacgacttgaacagtgcga

SEQ ID NO: 666976 - DNA, 33 bp, Homo sapien
gatcattccagctccatgacttgaacagtgcga

SEQ ID NO: 666977 - DNA, 33 bp, Homo sapien
agtccatgctaatatgaaaggcctgtgttcact

SEQ ID NO: 666978 - DNA, 33 bp, Homo sapien
agtccatgctaatatgtaaggcctgtgttcact

SEQ ID NO: 666979 - DNA, 33 bp, Homo sapien
aaatagttgatgttgccacttgagggagagtac

SEQ ID NO: 666980 - DNA, 33 bp, Homo sapien
aaatagttgatgttgctacttgagggagagtac

SEQ ID NO: 666981 - DNA, 33 bp, Homo sapien
tccatgcaaccttgcaatacaagacttttgtgc

SEQ ID NO: 666982 - DNA, 33 bp, Homo sapien
tccatgcaaccttgcagtacaagacttttgtgc

SEQ ID NO: 666983 - DNA, 33 bp, Homo sapien
catgtgtagttgttgacgttaaatagaacttaa

SEQ ID NO: 666984 - DNA, 33 bp, Homo sapien
catgtgtagttgttgatgttaaatagaacttaa

SEQ ID NO: 666985 - DNA, 33 bp, Homo sapien
gagggagagtaaagaaatagcacattccaggcc

SEQ ID NO: 666986 - DNA, 33 bp, Homo sapien
gagggagagtaaagaattagcacattccaggcc

SEQ ID NO: 666987 - DNA, 33 bp, Homo sapien
atatatcagtcttagacgaatgcttagattcag

SEQ ID NO: 666988 - DNA, 33 bp, Homo sapien
atatatcagtcttagatgaatgcttagattcag

SEQ ID NO: 666989 - DNA, 33 bp, Homo sapien
gcttgccttttatgaaaatcaaagtaacataca

SEQ ID NO: 666990 - DNA, 33 bp, Homo sapien
gcttgccttttatgaagatcaaagtaacataca

SEQ ID NO: 666991 - DNA, 33 bp, Homo sapien
tctgtcttgtttcctcacagaattagatctctt

SEQ ID NO: 666992 - DNA, 33 bp, Homo sapien
tctgtcttgtttcctcgcagaattagatctctt

SEQ ID NO: 666993 - DNA, 33 bp, Homo sapien
ttggtcattaggttgcacccaacgatgaagctg

SEQ ID NO: 666994 - DNA, 33 bp, Homo sapien
ttggtcattaggttgcgcccaacgatgaagctg

SEQ ID NO: 666995 - DNA, 33 bp, Homo sapien
tttttccatctaattacgacctccttcgccact

SEQ ID NO: 666996 - DNA, 33 bp, Homo sapien
tttttccatctaattatgacctccttcgccact

SEQ ID NO: 666997 - DNA, 33 bp, Homo sapien
taattaatttgcttacagccgatttcctgctta

SEQ ID NO: 666998 - DNA, 33 bp, Homo sapien
taattaatttgcttaccgccgatttcctgctta

SEQ ID NO: 666999 - DNA, 33 bp, Homo sapien
ttgcattaacacatcaactttgaaccagaaaat

SEQ ID NO: 667000 - DNA, 33 bp, Homo sapien
ttgcattaacacatcagctttgaaccagaaaat

SEQ ID NO: 667001 - DNA, 33 bp, Homo sapien
tttacttcctcggttcactttaaggttgtagac

SEQ ID NO: 667002 - DNA, 33 bp, Homo sapien
tttacttcctcggttctctttaaggttgtagac

SEQ ID NO: 667003 - DNA, 33 bp, Homo sapien
aagcacaacggctatacagagagggctgaactg

SEQ ID NO: 667004 - DNA, 33 bp, Homo sapien
aagcacaacggctatagagagagggctgaactg

SEQ ID NO: 667005 - DNA, 33 bp, Homo sapien
taaaaagttttaaaaaagtgttctgtgctttga

SEQ ID NO: 667006 - DNA, 33 bp, Homo sapien
taaaaagttttaaaaatgtgttctgtgctttga

SEQ ID NO: 667007 - DNA, 33 bp, Homo sapien
aacagacaaaaaacacaaacacgatgctgaata

SEQ ID NO: 667008 - DNA, 33 bp, Homo sapien
aacagacaaaaaacacgaacacgatgctgaata

SEQ ID NO: 667009 - DNA, 33 bp, Homo sapien
aaaagctcaatattgaaaaggtacccataatcc

SEQ ID NO: 667010 - DNA, 33 bp, Homo sapien
aaaagctcaatattgataaggtacccataatcc

SEQ ID NO: 667011 - DNA, 33 bp, Homo sapien
atttataaactgataacgtccaaacatagtctt

SEQ ID NO: 667012 - DNA, 33 bp, Homo sapien
atttataaactgataatgtccaaacatagtctt

SEQ ID NO: 667013 - DNA, 33 bp, Homo sapien
ttctctacgaagttgaatactctagctatctca

SEQ ID NO: 667014 - DNA, 33 bp, Homo sapien
ttctctacgaagttgactactctagctatctca

SEQ ID NO: 667015 - DNA, 33 bp, Homo sapien
ctaactgaacacacgcaatttttcctgcagctt

SEQ ID NO: 667016 - DNA, 33 bp, Homo sapien
ctaactgaacacacgcgatttttcctgcagctt

SEQ ID NO: 667017 - DNA, 33 bp, Homo sapien
agagacttttaggatcacatttacagtatcatc

SEQ ID NO: 667018 - DNA, 33 bp, Homo sapien
agagacttttaggatcgcatttacagtatcatc

SEQ ID NO: 667019 - DNA, 33 bp, Homo sapien
gaagattttaagtaaaggaaggagtggatgagc

SEQ ID NO: 667020 - DNA, 33 bp, Homo sapien
gaagattttaagtaaatgaaggagtggatgagc

SEQ ID NO: 667021 - DNA, 33 bp, Homo sapien
atgcacagccaggcaaaaacctgttttcttttc

SEQ ID NO: 667022 - DNA, 33 bp, Homo sapien
atgcacagccaggcaacaacctgttttcttttc

SEQ ID NO: 667023 - DNA, 33 bp, Homo sapien
tagcttgattactcacaatggctccatgagtaa

SEQ ID NO: 667024 - DNA, 33 bp, Homo sapien
tagcttgattactcacgatggctccatgagtaa

SEQ ID NO: 667025 - DNA, 33 bp, Homo sapien
ttataatacagagtgaatatctttttctatgcc

SEQ ID NO: 667026 - DNA, 33 bp, Homo sapien
ttataatacagagtgagtatctttttctatgcc

SEQ ID NO: 667027 - DNA, 33 bp, Homo sapien
gtcaagaactattcaaagacgtatgatatggtt

SEQ ID NO: 667028 - DNA, 33 bp, Homo sapien
gtcaagaactattcaaggacgtatgatatggtt

SEQ ID NO: 667029 - DNA, 33 bp, Homo sapien
taatgagataaagcaccggcaagacaattgtgt

SEQ ID NO: 667030 - DNA, 33 bp, Homo sapien
taatgagataaagcactggcaagacaattgtgt

SEQ ID NO: 667031 - DNA, 33 bp, Homo sapien
gcttaaagagaccccaagtaacctcattctgtc

SEQ ID NO: 667032 - DNA, 33 bp, Homo sapien
gcttaaagagaccccaggtaacctcattctgtc

SEQ ID NO: 667033 - DNA, 33 bp, Homo sapien
aggaaattgcctgataaacacatttttagtttt

SEQ ID NO: 667034 - DNA, 33 bp, Homo sapien
aggaaattgcctgatagacacatttttagtttt

SEQ ID NO: 667035 - DNA, 33 bp, Homo sapien
gactacaagtttccaaagttatcaattacaaca

SEQ ID NO: 667036 - DNA, 33 bp, Homo sapien
gactacaagtttccaaggttatcaattacaaca

SEQ ID NO: 667037 - DNA, 33 bp, Homo sapien
ttgatttctctcaggaccgttagcttgaacgat

SEQ ID NO: 667038 - DNA, 33 bp, Homo sapien
ttgatttctctcaggatcgttagcttgaacgat

SEQ ID NO: 667039 - DNA, 33 bp, Homo sapien
gttcaagagatggataagtagctaggaggtaag

SEQ ID NO: 667040 - DNA, 33 bp, Homo sapien
gttcaagagatggataggtagctaggaggtaag

SEQ ID NO: 667041 - DNA, 33 bp, Homo sapien
tcctttgaaaaatctcccaatatggatgttact

SEQ ID NO: 667042 - DNA, 33 bp, Homo sapien
tcctttgaaaaatctctcaatatggatgttact

SEQ ID NO: 667043 - DNA, 33 bp, Homo sapien
tccaaaaatctggatccaatagtcttcacctct

SEQ ID NO: 667044 - DNA, 33 bp, Homo sapien
tccaaaaatctggatctaatagtcttcacctct

SEQ ID NO: 667045 - DNA, 33 bp, Homo sapien
tggtgtatttcgagtgcagaggacttcaggaat

SEQ ID NO: 667046 - DNA, 33 bp, Homo sapien
tggtgtatttcgagtgtagaggacttcaggaat

SEQ ID NO: 667047 - DNA, 33 bp, Homo sapien
ttagactacccaataacggcacagtttgaaaaa

SEQ ID NO: 667048 - DNA, 33 bp, Homo sapien
ttagactacccaataatggcacagtttgaaaaa

SEQ ID NO: 667049 - DNA, 33 bp, Homo sapien
ttttaagtcctttgagaaaagccaaactgcttt

SEQ ID NO: 667050 - DNA, 33 bp, Homo sapien
ttttaagtcctttgaggaaagccaaactgcttt

SEQ ID NO: 667051 - DNA, 33 bp, Homo sapien
cacttttagtggtgccagagaaagaaatgtggc

SEQ ID NO: 667052 - DNA, 33 bp, Homo sapien
cacttttagtggtgccggagaaagaaatgtggc

SEQ ID NO: 667053 - DNA, 33 bp, Homo sapien
gacaataggaaaaaagaacaggatggtggtgac

SEQ ID NO: 667054 - DNA, 33 bp, Homo sapien
gacaataggaaaaaaggacaggatggtggtgac

SEQ ID NO: 667055 - DNA, 33 bp, Homo sapien
ttgctttgcagaaacacacctccctggtgtctc

SEQ ID NO: 667056 - DNA, 33 bp, Homo sapien
ttgctttgcagaaacatacctccctggtgtctc

SEQ ID NO: 667057 - DNA, 33 bp, Homo sapien
aggcttgttgtactacacgaattaaaatatgtc

SEQ ID NO: 667058 - DNA, 33 bp, Homo sapien
aggcttgttgtactacgcgaattaaaatatgtc

SEQ ID NO: 667059 - DNA, 33 bp, Homo sapien
cctttctttctttccacattaatccagctaaga

SEQ ID NO: 667060 - DNA, 33 bp, Homo sapien
cctttctttctttccatattaatccagctaaga

SEQ ID NO: 667061 - DNA, 33 bp, Homo sapien
atgaagatcatcaaaaaactcttgtttcagacc

SEQ ID NO: 667062 - DNA, 33 bp, Homo sapien
atgaagatcatcaaaagactcttgtttcagacc

SEQ ID NO: 667063 - DNA, 33 bp, Homo sapien
gcagggcacaaagctaagaaacaagcggttaaa

SEQ ID NO: 667064 - DNA, 33 bp, Homo sapien
gcagggcacaaagctaggaaacaagcggttaaa

SEQ ID NO: 667065 - DNA, 33 bp, Homo sapien
agctggctgcgcatctaaatgagctgagctgct

SEQ ID NO: 667066 - DNA, 33 bp, Homo sapien
agctggctgcgcatctgaatgagctgagctgct

SEQ ID NO: 667067 - DNA, 33 bp, Homo sapien
tttagtcacagcataacgaaagcatatgcacac

SEQ ID NO: 667068 - DNA, 33 bp, Homo sapien
tttagtcacagcataatgaaagcatatgcacac

SEQ ID NO: 667069 - DNA, 33 bp, Homo sapien
ctgtagctcaacttcactagtagagtaagcccc

SEQ ID NO: 667070 - DNA, 33 bp, Homo sapien
ctgtagctcaacttcattagtagagtaagcccc

SEQ ID NO: 667071 - DNA, 33 bp, Homo sapien
agcccctgcctccgcaaattcacaaattccatc

SEQ ID NO: 667072 - DNA, 33 bp, Homo sapien
agcccctgcctccgcagattcacaaattccatc

SEQ ID NO: 667073 - DNA, 33 bp, Homo sapien
ttcagaagtcaaccttcaactgagaggcaggtg

SEQ ID NO: 667074 - DNA, 33 bp, Homo sapien
ttcagaagtcaacctttaactgagaggcaggtg

SEQ ID NO: 667075 - DNA, 33 bp, Homo sapien
gtatcaccgtgaaaaaggtgggaaactgctatg

SEQ ID NO: 667076 - DNA, 33 bp, Homo sapien
gtatcaccgtgaaaaatgtgggaaactgctatg

SEQ ID NO: 667077 - DNA, 33 bp, Homo sapien
ttggtcttgactcttacgttcagaagtagctcc

SEQ ID NO: 667078 - DNA, 33 bp, Homo sapien
ttggtcttgactcttatgttcagaagtagctcc

SEQ ID NO: 667079 - DNA, 33 bp, Homo sapien
agaaataaatcagaaggcatgttggtttattta

SEQ ID NO: 667080 - DNA, 33 bp, Homo sapien
agaaataaatcagaagtcatgttggtttattta

SEQ ID NO: 667081 - DNA, 33 bp, Homo sapien
actaacaaaaaccctaccatgctctgaaatatg

SEQ ID NO: 667082 - DNA, 33 bp, Homo sapien
actaacaaaaaccctatcatgctctgaaatatg

SEQ ID NO: 667083 - DNA, 33 bp, Homo sapien
acctcattgatcttacaaagaaaaacactggag

SEQ ID NO: 667084 - DNA, 33 bp, Homo sapien
acctcattgatcttacgaagaaaaacactggag

SEQ ID NO: 667085 - DNA, 33 bp, Homo sapien
aaacagaaggctttagaaacagggaagtaatta

SEQ ID NO: 667086 - DNA, 33 bp, Homo sapien
aaacagaaggctttagcaacagggaagtaatta

SEQ ID NO: 667087 - DNA, 33 bp, Homo sapien
tatggtattatgatagcaggcttagattcaata

SEQ ID NO: 667088 - DNA, 33 bp, Homo sapien
tatggtattatgatagtaggcttagattcaata

SEQ ID NO: 667089 - DNA, 33 bp, Homo sapien
tttatttgattggtaacgcatcagatttatttg

SEQ ID NO: 667090 - DNA, 33 bp, Homo sapien
tttatttgattggtaatgcatcagatttatttg

SEQ ID NO: 667091 - DNA, 33 bp, Homo sapien
ctgattgttgcttcaacagaagttacccagcca

SEQ ID NO: 667092 - DNA, 33 bp, Homo sapien
ctgattgttgcttcaatagaagttacccagcca

SEQ ID NO: 667093 - DNA, 33 bp, Homo sapien
ttccctaacttttaaaggcgcgtgacaaattat

SEQ ID NO: 667094 - DNA, 33 bp, Homo sapien
ttccctaacttttaaatgcgcgtgacaaattat

SEQ ID NO: 667095 - DNA, 33 bp, Homo sapien
caaatctcattagctcaatgtactacaggatca

SEQ ID NO: 667096 - DNA, 33 bp, Homo sapien
caaatctcattagctcgatgtactacaggatca

SEQ ID NO: 667097 - DNA, 33 bp, Homo sapien
tgtgggaagtgaaaccacagagaagtggcgact

SEQ ID NO: 667098 - DNA, 33 bp, Homo sapien
tgtgggaagtgaaaccgcagagaagtggcgact

SEQ ID NO: 667099 - DNA, 33 bp, Homo sapien
tttaatatactgaaagaaaaaatcaggataaag

SEQ ID NO: 667100 - DNA, 33 bp, Homo sapien
tttaatatactgaaaggaaaaatcaggataaag

SEQ ID NO: 667101 - DNA, 33 bp, Homo sapien
ggacaggaatgtgtgcccagttatagctagtat

SEQ ID NO: 667102 - DNA, 33 bp, Homo sapien
ggacaggaatgtgtgcgcagttatagctagtat

SEQ ID NO: 667103 - DNA, 33 bp, Homo sapien
aaattatgattaggcaaatataatgagctcgga

SEQ ID NO: 667104 - DNA, 33 bp, Homo sapien
aaattatgattaggcagatataatgagctcgga

SEQ ID NO: 667105 - DNA, 33 bp, Homo sapien
aatgtacaaatgcaatcaattatgtacctatat

SEQ ID NO: 667106 - DNA, 33 bp, Homo sapien
aatgtacaaatgcaatgaattatgtacctatat

SEQ ID NO: 667107 - DNA, 33 bp, Homo sapien
atgtttgccattaactcacaaaatttatcgact

SEQ ID NO: 667108 - DNA, 33 bp, Homo sapien
atgtttgccattaacttacaaaatttatcgact

SEQ ID NO: 667109 - DNA, 33 bp, Homo sapien
gtggcttttctgaccagattccctgcatccagg

SEQ ID NO: 667110 - DNA, 33 bp, Homo sapien
gtggcttttctgaccatattccctgcatccagg

SEQ ID NO: 667111 - DNA, 33 bp, Homo sapien
aactaaattgtaccaacgtagctcctagcatca

SEQ ID NO: 667112 - DNA, 33 bp, Homo sapien
aactaaattgtaccaatgtagctcctagcatca

SEQ ID NO: 667113 - DNA, 33 bp, Homo sapien
cccagtctctgtttaactaggagccatgcaaat

SEQ ID NO: 667114 - DNA, 33 bp, Homo sapien
cccagtctctgtttaagtaggagccatgcaaat

SEQ ID NO: 667115 - DNA, 33 bp, Homo sapien
aatcacaatgactgcaatatgattctccagtta

SEQ ID NO: 667116 - DNA, 33 bp, Homo sapien
aatcacaatgactgcagtatgattctccagtta

SEQ ID NO: 667117 - DNA, 33 bp, Homo sapien
tttgggaagccttgacagaggaggctgaatgtg

SEQ ID NO: 667118 - DNA, 33 bp, Homo sapien
tttgggaagccttgacggaggaggctgaatgtg

SEQ ID NO: 667119 - DNA, 33 bp, Homo sapien
atttaatttgtaaacacaggcttttcttagtct

SEQ ID NO: 667120 - DNA, 33 bp, Homo sapien
atttaatttgtaaacataggcttttcttagtct

SEQ ID NO: 667121 - DNA, 33 bp, Homo sapien
cagaatacaagcaactgaagtaagtagatggca

SEQ ID NO: 667122 - DNA, 33 bp, Homo sapien
cagaatacaagcaacttaagtaagtagatggca

SEQ ID NO: 667123 - DNA, 33 bp, Homo sapien
ttaatactggcaaaataaaagctctctggttgg

SEQ ID NO: 667124 - DNA, 33 bp, Homo sapien
ttaatactggcaaaatgaaagctctctggttgg

SEQ ID NO: 667125 - DNA, 33 bp, Homo sapien
acacagttgtcatagcccttttttcgtgaagtg

SEQ ID NO: 667126 - DNA, 33 bp, Homo sapien
acacagttgtcatagctcttttttcgtgaagtg

SEQ ID NO: 667127 - DNA, 33 bp, Homo sapien
gggaaacagaatggccagagagtactatccttg

SEQ ID NO: 667128 - DNA, 33 bp, Homo sapien
gggaaacagaatggccggagagtactatccttg

SEQ ID NO: 667129 - DNA, 33 bp, Homo sapien
taagaagtttaagtacgaagcaacaatctgttt

SEQ ID NO: 667130 - DNA, 33 bp, Homo sapien
taagaagtttaagtactaagcaacaatctgttt

SEQ ID NO: 667131 - DNA, 33 bp, Homo sapien
ttcactataaaataacaaatggctaatgtacct

SEQ ID NO: 667132 - DNA, 33 bp, Homo sapien
ttcactataaaataacgaatggctaatgtacct

SEQ ID NO: 667133 - DNA, 33 bp, Homo sapien
actgtactaccaacacactctctccaccttcat

SEQ ID NO: 667134 - DNA, 33 bp, Homo sapien
actgtactaccaacacgctctctccaccttcat

SEQ ID NO: 667135 - DNA, 33 bp, Homo sapien
ctttgttgatggtcaaagacccattggcatgaa

SEQ ID NO: 667136 - DNA, 33 bp, Homo sapien
ctttgttgatggtcaacgacccattggcatgaa

SEQ ID NO: 667137 - DNA, 33 bp, Homo sapien
gataactgtggtagaacctttggtcgaagccta

SEQ ID NO: 667138 - DNA, 33 bp, Homo sapien
gataactgtggtagaatctttggtcgaagccta

SEQ ID NO: 667139 - DNA, 33 bp, Homo sapien
cattcagtacattacaaatccagtactccagtg

SEQ ID NO: 667140 - DNA, 33 bp, Homo sapien
cattcagtacattacagatccagtactccagtg

SEQ ID NO: 667141 - DNA, 33 bp, Homo sapien
tgcagtgaataagataaacaaaatcctatgtct

SEQ ID NO: 667142 - DNA, 33 bp, Homo sapien
tgcagtgaataagatagacaaaatcctatgtct

SEQ ID NO: 667143 - DNA, 33 bp, Homo sapien
ttaccaatcatccttcagaacccagtctgaaca

SEQ ID NO: 667144 - DNA, 33 bp, Homo sapien
ttaccaatcatccttcggaacccagtctgaaca

SEQ ID NO: 667145 - DNA, 33 bp, Homo sapien
caaaaaaacatggtcacagaattaggcactttt

SEQ ID NO: 667146 - DNA, 33 bp, Homo sapien
caaaaaaacatggtcatagaattaggcactttt

SEQ ID NO: 667147 - DNA, 33 bp, Homo sapien
ctaaatgaatcaaaaactaactccttgaaagat

SEQ ID NO: 667148 - DNA, 33 bp, Homo sapien
ctaaatgaatcaaaaattaactccttgaaagat

SEQ ID NO: 667149 - DNA, 33 bp, Homo sapien
ctcctgctctcttaaactctgatataactaagt

SEQ ID NO: 667150 - DNA, 33 bp, Homo sapien
ctcctgctctcttaaattctgatataactaagt

SEQ ID NO: 667151 - DNA, 33 bp, Homo sapien
gttgtaagaattttgaatagggtaaggtctaga

SEQ ID NO: 667152 - DNA, 33 bp, Homo sapien
gttgtaagaattttgactagggtaaggtctaga

SEQ ID NO: 667153 - DNA, 33 bp, Homo sapien
aaatacatttacaatcactctgtcctcttgatg

SEQ ID NO: 667154 - DNA, 33 bp, Homo sapien
aaatacatttacaatcgctctgtcctcttgatg

SEQ ID NO: 667155 - DNA, 33 bp, Homo sapien
tcataaactaataacaagcatcccaaatgacca

SEQ ID NO: 667156 - DNA, 33 bp, Homo sapien
tcataaactaataacaggcatcccaaatgacca

SEQ ID NO: 667157 - DNA, 33 bp, Homo sapien
tatatgagtgtattcccacttcccaatatgtac

SEQ ID NO: 667158 - DNA, 33 bp, Homo sapien
tatatgagtgtattcctacttcccaatatgtac

SEQ ID NO: 667159 - DNA, 33 bp, Homo sapien
tagcattacggatataagcaaatatggtaaaaa

SEQ ID NO: 667160 - DNA, 33 bp, Homo sapien
tagcattacggatataggcaaatatggtaaaaa

SEQ ID NO: 667161 - DNA, 33 bp, Homo sapien
gttagataaagttataaaagtagacaaattgaa

SEQ ID NO: 667162 - DNA, 33 bp, Homo sapien
gttagataaagttatacaagtagacaaattgaa

SEQ ID NO: 667163 - DNA, 33 bp, Homo sapien
atagtatcaacaacaaattcaggaaaaaatctt

SEQ ID NO: 667164 - DNA, 33 bp, Homo sapien
atagtatcaacaacaagttcaggaaaaaatctt

SEQ ID NO: 667165 - DNA, 33 bp, Homo sapien
tacaagcgtcactccacaggctcttttctttac

SEQ ID NO: 667166 - DNA, 33 bp, Homo sapien
tacaagcgtcactccataggctcttttctttac

SEQ ID NO: 667167 - DNA, 33 bp, Homo sapien
tgatcctttttgcttacggtcaataatcccatc

SEQ ID NO: 667168 - DNA, 33 bp, Homo sapien
tgatcctttttgcttatggtcaataatcccatc

SEQ ID NO: 667169 - DNA, 33 bp, Homo sapien
ctgggggaagacattaaggaagctacctgtgtc

SEQ ID NO: 667170 - DNA, 33 bp, Homo sapien
ctgggggaagacattagggaagctacctgtgtc

SEQ ID NO: 667171 - DNA, 33 bp, Homo sapien
caatacccaactttcacagaacatacagatctc

SEQ ID NO: 667172 - DNA, 33 bp, Homo sapien
caatacccaactttcatagaacatacagatctc

SEQ ID NO: 667173 - DNA, 33 bp, Homo sapien
tagtcattttgtttccccttcagaagtaagaat

SEQ ID NO: 667174 - DNA, 33 bp, Homo sapien
tagtcattttgtttccgcttcagaagtaagaat

SEQ ID NO: 667175 - DNA, 33 bp, Homo sapien
aaattcgagtagtttacggaagtacaattaagg

SEQ ID NO: 667176 - DNA, 33 bp, Homo sapien
aaattcgagtagtttagggaagtacaattaagg

SEQ ID NO: 667177 - DNA, 33 bp, Homo sapien
ctgaatgggggtgctacctttcttttttcagag

SEQ ID NO: 667178 - DNA, 33 bp, Homo sapien
ctgaatgggggtgctatctttcttttttcagag

SEQ ID NO: 667179 - DNA, 33 bp, Homo sapien
ggcatttgaagaggcacgataaagagccagctt

SEQ ID NO: 667180 - DNA, 33 bp, Homo sapien
ggcatttgaagaggcatgataaagagccagctt

SEQ ID NO: 667181 - DNA, 33 bp, Homo sapien
ctttaatttgaggaaaagttaatcagatgtcaa

SEQ ID NO: 667182 - DNA, 33 bp, Homo sapien
ctttaatttgaggaaaggttaatcagatgtcaa

SEQ ID NO: 667183 - DNA, 33 bp, Homo sapien
tgtcaggcactggcggaactgcagcagtgagga

SEQ ID NO: 667184 - DNA, 33 bp, Homo sapien
tgtcaggcactggcgggactgcagcagtgagga

SEQ ID NO: 667185 - DNA, 33 bp, Homo sapien
aagccaatttgatccaaagctgccaattggctc

SEQ ID NO: 667186 - DNA, 33 bp, Homo sapien
aagccaatttgatccacagctgccaattggctc

SEQ ID NO: 667187 - DNA, 33 bp, Homo sapien
aaaggaactgtggaaactgccagcttcaatcta

SEQ ID NO: 667188 - DNA, 33 bp, Homo sapien
aaaggaactgtggaaagtgccagcttcaatcta

SEQ ID NO: 667189 - DNA, 33 bp, Homo sapien
catatgtaatgatatcaaatgctctattatgaa

SEQ ID NO: 667190 - DNA, 33 bp, Homo sapien
catatgtaatgatatcgaatgctctattatgaa

SEQ ID NO: 667191 - DNA, 33 bp, Homo sapien
gtgtagactatggctacgaaaattctagtgcga

SEQ ID NO: 667192 - DNA, 33 bp, Homo sapien
gtgtagactatggctatgaaaattctagtgcga

SEQ ID NO: 667193 - DNA, 33 bp, Homo sapien
tcccaatacagagcatcatgccatcttataggc

SEQ ID NO: 667194 - DNA, 33 bp, Homo sapien
tcccaatacagagcatgatgccatcttataggc

SEQ ID NO: 667195 - DNA, 33 bp, Homo sapien
aaggtttctttgaacaaatgtgaatttttgcat

SEQ ID NO: 667196 - DNA, 33 bp, Homo sapien
aaggtttctttgaacatatgtgaatttttgcat

SEQ ID NO: 667197 - DNA, 33 bp, Homo sapien
tgaggccacatgggcaatgcatacagttgtgag

SEQ ID NO: 667198 - DNA, 33 bp, Homo sapien
tgaggccacatgggcagtgcatacagttgtgag

SEQ ID NO: 667199 - DNA, 33 bp, Homo sapien
tcttccatgtgttcttaaaaaaggatttttgtt

SEQ ID NO: 667200 - DNA, 33 bp, Homo sapien
tcttccatgtgttctttaaaaaggatttttgtt

SEQ ID NO: 667201 - DNA, 33 bp, Homo sapien
tccctctgttcacagactctccaaaactatctg

SEQ ID NO: 667202 - DNA, 33 bp, Homo sapien
tccctctgttcacagagtctccaaaactatctg

SEQ ID NO: 667203 - DNA, 33 bp, Homo sapien
atagtctatttaattccaattttcacactttct

SEQ ID NO: 667204 - DNA, 33 bp, Homo sapien
atagtctatttaattctaattttcacactttct

SEQ ID NO: 667205 - DNA, 33 bp, Homo sapien
atcatccttgtgttcacagtggacaatataccc

SEQ ID NO: 667206 - DNA, 33 bp, Homo sapien
atcatccttgtgttcatagtggacaatataccc

SEQ ID NO: 667207 - DNA, 33 bp, Homo sapien
ctgaggtttacttgagacaaggagttcaagacc

SEQ ID NO: 667208 - DNA, 33 bp, Homo sapien
ctgaggtttacttgaggcaaggagttcaagacc

SEQ ID NO: 667209 - DNA, 33 bp, Homo sapien
tacattgaaatgtgacccatgtgacaacagtca

SEQ ID NO: 667210 - DNA, 33 bp, Homo sapien
tacattgaaatgtgacgcatgtgacaacagtca

SEQ ID NO: 667211 - DNA, 33 bp, Homo sapien
aagatccaaacgaacacgattagaaataacgaa

SEQ ID NO: 667212 - DNA, 33 bp, Homo sapien
aagatccaaacgaacatgattagaaataacgaa

SEQ ID NO: 667213 - DNA, 33 bp, Homo sapien
gtcaaacaccttgtatcagcccattccttgtcc

SEQ ID NO: 667214 - DNA, 33 bp, Homo sapien
gtcaaacaccttgtatgagcccattccttgtcc

SEQ ID NO: 667215 - DNA, 33 bp, Homo sapien
gggtgctcttttttgagccacatctagctctcc

SEQ ID NO: 667216 - DNA, 33 bp, Homo sapien
gggtgctcttttttgatccacatctagctctcc

SEQ ID NO: 667217 - DNA, 33 bp, Homo sapien
attctaacaggaggtacaaatgctaaaaattaa

SEQ ID NO: 667218 - DNA, 33 bp, Homo sapien
attctaacaggaggtagaaatgctaaaaattaa

SEQ ID NO: 667219 - DNA, 33 bp, Homo sapien
tttatcttgcagtttaagtaccagctaggttac

SEQ ID NO: 667220 - DNA, 33 bp, Homo sapien
tttatcttgcagtttatgtaccagctaggttac

SEQ ID NO: 667221 - DNA, 33 bp, Homo sapien
aattgaggtcaacccaaattatagggtaaaaga

SEQ ID NO: 667222 - DNA, 33 bp, Homo sapien
aattgaggtcaacccagattatagggtaaaaga

SEQ ID NO: 667223 - DNA, 33 bp, Homo sapien
ttttcaggcattatctgacttggcatgtgcaga

SEQ ID NO: 667224 - DNA, 33 bp, Homo sapien
ttttcaggcattatcttacttggcatgtgcaga

SEQ ID NO: 667225 - DNA, 33 bp, Homo sapien
tatggccatttagtggcataaatttccctctta

SEQ ID NO: 667226 - DNA, 33 bp, Homo sapien
tatggccatttagtggtataaatttccctctta

SEQ ID NO: 667227 - DNA, 33 bp, Homo sapien
tctctttttactgacacaggcaatgattgtgat

SEQ ID NO: 667228 - DNA, 33 bp, Homo sapien
tctctttttactgacataggcaatgattgtgat

SEQ ID NO: 667229 - DNA, 33 bp, Homo sapien
gaaacaaagtcagtaacgtgaagagatatctgt

SEQ ID NO: 667230 - DNA, 33 bp, Homo sapien
gaaacaaagtcagtaatgtgaagagatatctgt

SEQ ID NO: 667231 - DNA, 33 bp, Homo sapien
catggatctgttttcacagcaataaattttcag

SEQ ID NO: 667232 - DNA, 33 bp, Homo sapien
catggatctgttttcatagcaataaattttcag

SEQ ID NO: 667233 - DNA, 33 bp, Homo sapien
gtgaactcaaagagaagactgctttcaattgta

SEQ ID NO: 667234 - DNA, 33 bp, Homo sapien
gtgaactcaaagagaatactgctttcaattgta

SEQ ID NO: 667235 - DNA, 33 bp, Homo sapien
aaagatctgtgtcctccatgtgtactgttttcc

SEQ ID NO: 667236 - DNA, 33 bp, Homo sapien
aaagatctgtgtcctcgatgtgtactgttttcc

SEQ ID NO: 667237 - DNA, 33 bp, Homo sapien
tgtctagcatggaatccatcaagttgtaattcc

SEQ ID NO: 667238 - DNA, 33 bp, Homo sapien
tgtctagcatggaatctatcaagttgtaattcc

SEQ ID NO: 667239 - DNA, 33 bp, Homo sapien
agaaaattggcttaaacgatccagtgtaaaaat

SEQ ID NO: 667240 - DNA, 33 bp, Homo sapien
agaaaattggcttaaatgatccagtgtaaaaat

SEQ ID NO: 667241 - DNA, 33 bp, Homo sapien
agagcattttcctatacaaagcatctggccaaa

SEQ ID NO: 667242 - DNA, 33 bp, Homo sapien
agagcattttcctatataaagcatctggccaaa

SEQ ID NO: 667243 - DNA, 33 bp, Homo sapien
gaactccagagttctaaagtcgcgtgatgtaca

SEQ ID NO: 667244 - DNA, 33 bp, Homo sapien
gaactccagagttctacagtcgcgtgatgtaca

SEQ ID NO: 667245 - DNA, 33 bp, Homo sapien
tattacagatgagaagaaagttttaaacaaaca

SEQ ID NO: 667246 - DNA, 33 bp, Homo sapien
tattacagatgagaaggaagttttaaacaaaca

SEQ ID NO: 667247 - DNA, 33 bp, Homo sapien
tatgtcttcctaaaaaccaacaagtctcatgcc

SEQ ID NO: 667248 - DNA, 33 bp, Homo sapien
tatgtcttcctaaaaatcaacaagtctcatgcc

SEQ ID NO: 667249 - DNA, 33 bp, Homo sapien
ggcgttaggcggagtcaaattggtctgagaaga

SEQ ID NO: 667250 - DNA, 33 bp, Homo sapien
ggcgttaggcggagtcgaattggtctgagaaga

SEQ ID NO: 667251 - DNA, 33 bp, Homo sapien
aagtacactattcaggcatatcatgtaggttta

SEQ ID NO: 667252 - DNA, 33 bp, Homo sapien
aagtacactattcaggtatatcatgtaggttta

SEQ ID NO: 667253 - DNA, 33 bp, Homo sapien
actgaggtagttcgcaaacattttactaagtct

SEQ ID NO: 667254 - DNA, 33 bp, Homo sapien
actgaggtagttcgcagacattttactaagtct

SEQ ID NO: 667255 - DNA, 33 bp, Homo sapien
atcactcttttccacagatgcatttcctcatca

SEQ ID NO: 667256 - DNA, 33 bp, Homo sapien
atcactcttttccacatatgcatttcctcatca

SEQ ID NO: 667257 - DNA, 33 bp, Homo sapien
ttacttatttatcgatcaaagattgtctccatt

SEQ ID NO: 667258 - DNA, 33 bp, Homo sapien
ttacttatttatcgattaaagattgtctccatt

SEQ ID NO: 667259 - DNA, 33 bp, Homo sapien
ttaattggatgtgtaacctactcttgtcccaat

SEQ ID NO: 667260 - DNA, 33 bp, Homo sapien
ttaattggatgtgtaatctactcttgtcccaat

SEQ ID NO: 667261 - DNA, 33 bp, Homo sapien
ttaagtaggtgaatgagatcatgtaattgtgag

SEQ ID NO: 667262 - DNA, 33 bp, Homo sapien
ttaagtaggtgaatgatatcatgtaattgtgag

SEQ ID NO: 667263 - DNA, 33 bp, Homo sapien
accatcgaagattatacgaattcgtctgaatct

SEQ ID NO: 667264 - DNA, 33 bp, Homo sapien
accatcgaagattatatgaattcgtctgaatct

SEQ ID NO: 667265 - DNA, 33 bp, Homo sapien
taaacccaagcagtaacagtgtttgtgaaggaa

SEQ ID NO: 667266 - DNA, 33 bp, Homo sapien
taaacccaagcagtaatagtgtttgtgaaggaa

SEQ ID NO: 667267 - DNA, 33 bp, Homo sapien
aagacagagtgaaaccaatctgctttattcttc

SEQ ID NO: 667268 - DNA, 33 bp, Homo sapien
aagacagagtgaaacccatctgctttattcttc

SEQ ID NO: 667269 - DNA, 33 bp, Homo sapien
aaggcagctccgttaaacttctttcacaagagt

SEQ ID NO: 667270 - DNA, 33 bp, Homo sapien
aaggcagctccgttaatcttctttcacaagagt

SEQ ID NO: 667271 - DNA, 33 bp, Homo sapien
ataccattgttgtttacggctacatcttctctc

SEQ ID NO: 667272 - DNA, 33 bp, Homo sapien
ataccattgttgtttatggctacatcttctctc

SEQ ID NO: 667273 - DNA, 33 bp, Homo sapien
gatgtctatgagttaaagcaaactgtaactggc

SEQ ID NO: 667274 - DNA, 33 bp, Homo sapien
gatgtctatgagttaaggcaaactgtaactggc

SEQ ID NO: 667275 - DNA, 33 bp, Homo sapien
accaatacttgaaagacataatgctacatggat

SEQ ID NO: 667276 - DNA, 33 bp, Homo sapien
accaatacttgaaagatataatgctacatggat

SEQ ID NO: 667277 - DNA, 33 bp, Homo sapien
gatatctctaatcataagtgttgtcaaaacaga

SEQ ID NO: 667278 - DNA, 33 bp, Homo sapien
gatatctctaatcataggtgttgtcaaaacaga

SEQ ID NO: 667279 - DNA, 33 bp, Homo sapien
ttgacactgtaggtcacataattctttattggt

SEQ ID NO: 667280 - DNA, 33 bp, Homo sapien
ttgacactgtaggtcagataattctttattggt

SEQ ID NO: 667281 - DNA, 33 bp, Homo sapien
gatgctgctagatatacaacaatgcccagaata

SEQ ID NO: 667282 - DNA, 33 bp, Homo sapien
gatgctgctagatatataacaatgcccagaata

SEQ ID NO: 667283 - DNA, 33 bp, Homo sapien
tggcataatctataaaaaatgagccttcactgg

SEQ ID NO: 667284 - DNA, 33 bp, Homo sapien
tggcataatctataaagaatgagccttcactgg

SEQ ID NO: 667285 - DNA, 33 bp, Homo sapien
catgttggaaattacacctttgggtaagtcttc

SEQ ID NO: 667286 - DNA, 33 bp, Homo sapien
catgttggaaattacatctttgggtaagtcttc

SEQ ID NO: 667287 - DNA, 33 bp, Homo sapien
agtcattcccagatacactgatttgctggataa

SEQ ID NO: 667288 - DNA, 33 bp, Homo sapien
agtcattcccagatacgctgatttgctggataa

SEQ ID NO: 667289 - DNA, 33 bp, Homo sapien
acaagtttattaatcacatgggaactctcctag

SEQ ID NO: 667290 - DNA, 33 bp, Homo sapien
acaagtttattaatcatatgggaactctcctag

SEQ ID NO: 667291 - DNA, 33 bp, Homo sapien
tagccagcaggggtaaaacaggatgaagtgcaa

SEQ ID NO: 667292 - DNA, 33 bp, Homo sapien
tagccagcaggggtaatacaggatgaagtgcaa

SEQ ID NO: 667293 - DNA, 33 bp, Homo sapien
aatgcacatggtgagagattcacttcaagcata

SEQ ID NO: 667294 - DNA, 33 bp, Homo sapien
aatgcacatggtgagatattcacttcaagcata

SEQ ID NO: 667295 - DNA, 33 bp, Homo sapien
aataggggatgataacaattagaaacaataaag

SEQ ID NO: 667296 - DNA, 33 bp, Homo sapien
aataggggatgataacgattagaaacaataaag

SEQ ID NO: 667297 - DNA, 33 bp, Homo sapien
taagagtaatgttgaaactactctgcctgtgct

SEQ ID NO: 667298 - DNA, 33 bp, Homo sapien
taagagtaatgttgaatctactctgcctgtgct

SEQ ID NO: 667299 - DNA, 33 bp, Homo sapien
tcagtgtcatagtcccagaggcagtcataaaac

SEQ ID NO: 667300 - DNA, 33 bp, Homo sapien
tcagtgtcatagtcccggaggcagtcataaaac

SEQ ID NO: 667301 - DNA, 33 bp, Homo sapien
tttggtctacttttaacatgaacttactcattc

SEQ ID NO: 667302 - DNA, 33 bp, Homo sapien
tttggtctacttttaagatgaacttactcattc

SEQ ID NO: 667303 - DNA, 33 bp, Homo sapien
ttagaaatacccatgaccttttgtgttctttcc

SEQ ID NO: 667304 - DNA, 33 bp, Homo sapien
ttagaaatacccatgatcttttgtgttctttcc

SEQ ID NO: 667305 - DNA, 33 bp, Homo sapien
aaaatcatcttcataccatctacaaaagttcaa

SEQ ID NO: 667306 - DNA, 33 bp, Homo sapien
aaaatcatcttcatacgatctacaaaagttcaa

SEQ ID NO: 667307 - DNA, 33 bp, Homo sapien
acagagtgacaaataacggcattttctgaggta

SEQ ID NO: 667308 - DNA, 33 bp, Homo sapien
acagagtgacaaataatggcattttctgaggta

SEQ ID NO: 667309 - DNA, 33 bp, Homo sapien
ctcatattccaatctacgtatgtcctcttattc

SEQ ID NO: 667310 - DNA, 33 bp, Homo sapien
ctcatattccaatctatgtatgtcctcttattc

SEQ ID NO: 667311 - DNA, 33 bp, Homo sapien
aaaagaatggaatgaaaaaactgtgtgctatgt

SEQ ID NO: 667312 - DNA, 33 bp, Homo sapien
aaaagaatggaatgaataaactgtgtgctatgt

SEQ ID NO: 667313 - DNA, 33 bp, Homo sapien
acagtttgaccaaaaagtagtatagaattggag

SEQ ID NO: 667314 - DNA, 33 bp, Homo sapien
acagtttgaccaaaaattagtatagaattggag

SEQ ID NO: 667315 - DNA, 33 bp, Homo sapien
tcctagtatttgcttacccaacaaagtgactgt

SEQ ID NO: 667316 - DNA, 33 bp, Homo sapien
tcctagtatttgcttatccaacaaagtgactgt

SEQ ID NO: 667317 - DNA, 33 bp, Homo sapien
gctgctaggttattctcactgttcctatggaca

SEQ ID NO: 667318 - DNA, 33 bp, Homo sapien
gctgctaggttattcttactgttcctatggaca

SEQ ID NO: 667319 - DNA, 33 bp, Homo sapien
ttccattctaaggaggccccttttgtttagata

SEQ ID NO: 667320 - DNA, 33 bp, Homo sapien
ttccattctaaggaggtcccttttgtttagata

SEQ ID NO: 667321 - DNA, 33 bp, Homo sapien
aaaggtgatttgtggaaaaagaagccctcatta

SEQ ID NO: 667322 - DNA, 33 bp, Homo sapien
aaaggtgatttgtggagaaagaagccctcatta

SEQ ID NO: 667323 - DNA, 33 bp, Homo sapien
ttgtcactgtatatgaacagttctgctgtgttc

SEQ ID NO: 667324 - DNA, 33 bp, Homo sapien
ttgtcactgtatatgagcagttctgctgtgttc

SEQ ID NO: 667325 - DNA, 33 bp, Homo sapien
gctgtgcacaaggagaaagaattctcatcttca

SEQ ID NO: 667326 - DNA, 33 bp, Homo sapien
gctgtgcacaaggagagagaattctcatcttca

SEQ ID NO: 667327 - DNA, 33 bp, Homo sapien
agggctaataagaagcaattgaattaggcaaac

SEQ ID NO: 667328 - DNA, 33 bp, Homo sapien
agggctaataagaagctattgaattaggcaaac

SEQ ID NO: 667329 - DNA, 33 bp, Homo sapien
aagtgaggtggttacaacagtttccaaaatcga

SEQ ID NO: 667330 - DNA, 33 bp, Homo sapien
aagtgaggtggttacagcagtttccaaaatcga

SEQ ID NO: 667331 - DNA, 33 bp, Homo sapien
atattgagacattcaagccaggaagaaaatagg

SEQ ID NO: 667332 - DNA, 33 bp, Homo sapien
atattgagacattcaatccaggaagaaaatagg

SEQ ID NO: 667333 - DNA, 33 bp, Homo sapien
aactgtgtataagaaaagtcagcctgtcatata

SEQ ID NO: 667334 - DNA, 33 bp, Homo sapien
aactgtgtataagaaacgtcagcctgtcatata

SEQ ID NO: 667335 - DNA, 33 bp, Homo sapien
ttatttgtattataccagaatgctaccttactt

SEQ ID NO: 667336 - DNA, 33 bp, Homo sapien
ttatttgtattataccggaatgctaccttactt

SEQ ID NO: 667337 - DNA, 33 bp, Homo sapien
ttcagttattagggtacgtatttgaatcttctg

SEQ ID NO: 667338 - DNA, 33 bp, Homo sapien
ttcagttattagggtatgtatttgaatcttctg

SEQ ID NO: 667339 - DNA, 33 bp, Homo sapien
tgaaatgttccttagacggacaaatctgaggcg

SEQ ID NO: 667340 - DNA, 33 bp, Homo sapien
tgaaatgttccttagatggacaaatctgaggcg

SEQ ID NO: 667341 - DNA, 33 bp, Homo sapien
ctaatacacagccatactaaattgacatagcct

SEQ ID NO: 667342 - DNA, 33 bp, Homo sapien
ctaatacacagccatagtaaattgacatagcct

SEQ ID NO: 667343 - DNA, 33 bp, Homo sapien
tataatgagctcagtacgaactgtgtttttcat

SEQ ID NO: 667344 - DNA, 33 bp, Homo sapien
tataatgagctcagtatgaactgtgtttttcat

SEQ ID NO: 667345 - DNA, 33 bp, Homo sapien
taatttataatcgccagaaaattctttaagttt

SEQ ID NO: 667346 - DNA, 33 bp, Homo sapien
taatttataatcgccataaaattctttaagttt

SEQ ID NO: 667347 - DNA, 33 bp, Homo sapien
tgtggtctgggcaagcaaattgattagaaaaca

SEQ ID NO: 667348 - DNA, 33 bp, Homo sapien
tgtggtctgggcaagcgaattgattagaaaaca

SEQ ID NO: 667349 - DNA, 33 bp, Homo sapien
agaactattatgtatacgagggaattctgtatg

SEQ ID NO: 667350 - DNA, 33 bp, Homo sapien
agaactattatgtatatgagggaattctgtatg

SEQ ID NO: 667351 - DNA, 33 bp, Homo sapien
acatagtagaggaaaaacaagttcccaagagct

SEQ ID NO: 667352 - DNA, 33 bp, Homo sapien
acatagtagaggaaaagcaagttcccaagagct

SEQ ID NO: 667353 - DNA, 33 bp, Homo sapien
acttggaatgctgatcacctcagttataacagc

SEQ ID NO: 667354 - DNA, 33 bp, Homo sapien
acttggaatgctgatctcctcagttataacagc

SEQ ID NO: 667355 - DNA, 33 bp, Homo sapien
tttagatggccctagaagcattgacaattcatg

SEQ ID NO: 667356 - DNA, 33 bp, Homo sapien
tttagatggccctagaggcattgacaattcatg

SEQ ID NO: 667357 - DNA, 33 bp, Homo sapien
agatggataattaacccggtaccaaaagtgtgt

SEQ ID NO: 667358 - DNA, 33 bp, Homo sapien
agatggataattaacctggtaccaaaagtgtgt

SEQ ID NO: 667359 - DNA, 33 bp, Homo sapien
cagctctaggaggaaaaatattcatggcacctc

SEQ ID NO: 667360 - DNA, 33 bp, Homo sapien
cagctctaggaggaaagatattcatggcacctc

SEQ ID NO: 667361 - DNA, 33 bp, Homo sapien
gtatggcagtctcacactccaaagaaatgaaca

SEQ ID NO: 667362 - DNA, 33 bp, Homo sapien
gtatggcagtctcacattccaaagaaatgaaca

SEQ ID NO: 667363 - DNA, 33 bp, Homo sapien
tacacaaacaattggaaatgatgtgcctaaatt

SEQ ID NO: 667364 - DNA, 33 bp, Homo sapien
tacacaaacaattggagatgatgtgcctaaatt

SEQ ID NO: 667365 - DNA, 33 bp, Homo sapien
gtaaaaacttcgaatgaacttcaaatgaagaat

SEQ ID NO: 667366 - DNA, 33 bp, Homo sapien
gtaaaaacttcgaatggacttcaaatgaagaat

SEQ ID NO: 667367 - DNA, 33 bp, Homo sapien
tgaaaataatagcagacgtaaactttttgcttt

SEQ ID NO: 667368 - DNA, 33 bp, Homo sapien
tgaaaataatagcagatgtaaactttttgcttt

SEQ ID NO: 667369 - DNA, 33 bp, Homo sapien
taattatttttgagaggaatcccactaagatat

SEQ ID NO: 667370 - DNA, 33 bp, Homo sapien
taattatttttgagagtaatcccactaagatat

SEQ ID NO: 667371 - DNA, 33 bp, Homo sapien
tatagtccacaatttacgggaatattgaatatc

SEQ ID NO: 667372 - DNA, 33 bp, Homo sapien
tatagtccacaatttatgggaatattgaatatc

SEQ ID NO: 667373 - DNA, 33 bp, Homo sapien
ttgtaagatgcacaaccgatttgataacagctt

SEQ ID NO: 667374 - DNA, 33 bp, Homo sapien
ttgtaagatgcacaactgatttgataacagctt

SEQ ID NO: 667375 - DNA, 33 bp, Homo sapien
ttctttcagttcatacaacaaaataactctaca

SEQ ID NO: 667376 - DNA, 33 bp, Homo sapien
ttctttcagttcatacgacaaaataactctaca

SEQ ID NO: 667377 - DNA, 33 bp, Homo sapien
actaaagaagtcttcacggatgagtggacaaac

SEQ ID NO: 667378 - DNA, 33 bp, Homo sapien
actaaagaagtcttcatggatgagtggacaaac

SEQ ID NO: 667379 - DNA, 33 bp, Homo sapien
agaggctccttgtcacaataggaatcatcggaa

SEQ ID NO: 667380 - DNA, 33 bp, Homo sapien
agaggctccttgtcaccataggaatcatcggaa

SEQ ID NO: 667381 - DNA, 33 bp, Homo sapien
agagaaaaaaacacaccgtatcacttaggaatt

SEQ ID NO: 667382 - DNA, 33 bp, Homo sapien
agagaaaaaaacacactgtatcacttaggaatt

SEQ ID NO: 667383 - DNA, 33 bp, Homo sapien
gctaggaacagagaacagactatagtgactaaa

SEQ ID NO: 667384 - DNA, 33 bp, Homo sapien
gctaggaacagagaactgactatagtgactaaa

SEQ ID NO: 667385 - DNA, 33 bp, Homo sapien
caaagactggacactgcagacccatggatgtca

SEQ ID NO: 667386 - DNA, 33 bp, Homo sapien
caaagactggacactggagacccatggatgtca

SEQ ID NO: 667387 - DNA, 33 bp, Homo sapien
gatatattttgggcaaaaaaagagaaagacatg

SEQ ID NO: 667388 - DNA, 33 bp, Homo sapien
gatatattttgggcaataaaagagaaagacatg

SEQ ID NO: 667389 - DNA, 33 bp, Homo sapien
gatgtaaaagaagaataatccaagcaccctttc

SEQ ID NO: 667390 - DNA, 33 bp, Homo sapien
gatgtaaaagaagaatgatccaagcaccctttc

SEQ ID NO: 667391 - DNA, 33 bp, Homo sapien
tttatcttatcaaaacaaatagtgctctaaaaa

SEQ ID NO: 667392 - DNA, 33 bp, Homo sapien
tttatcttatcaaaacgaatagtgctctaaaaa

SEQ ID NO: 667393 - DNA, 33 bp, Homo sapien
attggctttcttcagacataaccaaggaatatg

SEQ ID NO: 667394 - DNA, 33 bp, Homo sapien
attggctttcttcagatataaccaaggaatatg

SEQ ID NO: 667395 - DNA, 33 bp, Homo sapien
ctctggtgatctctaccacactttgaccacacc

SEQ ID NO: 667396 - DNA, 33 bp, Homo sapien
ctctggtgatctctactacactttgaccacacc

SEQ ID NO: 667397 - DNA, 33 bp, Homo sapien
cctagtggtgtctgaaatgtcctctggtgatct

SEQ ID NO: 667398 - DNA, 33 bp, Homo sapien
cctagtggtgtctgaagtgtcctctggtgatct

SEQ ID NO: 667399 - DNA, 33 bp, Homo sapien
gtaattcaaaacttacgcattttttcaaaacat

SEQ ID NO: 667400 - DNA, 33 bp, Homo sapien
gtaattcaaaacttactcattttttcaaaacat

SEQ ID NO: 667401 - DNA, 33 bp, Homo sapien
aaatagtgtgggggtagacttgttgaagtgtga

SEQ ID NO: 667402 - DNA, 33 bp, Homo sapien
aaatagtgtgggggtatacttgttgaagtgtga

SEQ ID NO: 667403 - DNA, 33 bp, Homo sapien
gaaacttttaagatgcagagagtcatgatctga

SEQ ID NO: 667404 - DNA, 33 bp, Homo sapien
gaaacttttaagatgcggagagtcatgatctga

SEQ ID NO: 667405 - DNA, 33 bp, Homo sapien
ggaattactacataggaaaaagtttcataggag

SEQ ID NO: 667406 - DNA, 33 bp, Homo sapien
ggaattactacataggtaaaagtttcataggag

SEQ ID NO: 667407 - DNA, 33 bp, Homo sapien
gtttctgcatggatgaagcagaaaagactacag

SEQ ID NO: 667408 - DNA, 33 bp, Homo sapien
gtttctgcatggatgacgcagaaaagactacag

SEQ ID NO: 667409 - DNA, 33 bp, Homo sapien
atacttggtatgtatacatctgttgccaataac

SEQ ID NO: 667410 - DNA, 33 bp, Homo sapien
atacttggtatgtatatatctgttgccaataac

SEQ ID NO: 667411 - DNA, 33 bp, Homo sapien
gcttctttcatcatgggaaggaaaatgcccaaa

SEQ ID NO: 667412 - DNA, 33 bp, Homo sapien
gcttctttcatcatggtaaggaaaatgcccaaa

SEQ ID NO: 667413 - DNA, 33 bp, Homo sapien
aagcattagtggtccacaggattaaaaacagat

SEQ ID NO: 667414 - DNA, 33 bp, Homo sapien
aagcattagtggtccataggattaaaaacagat

SEQ ID NO: 667415 - DNA, 33 bp, Homo sapien
agaaagaaagtcagaaaaaaagtcatgaaaggc

SEQ ID NO: 667416 - DNA, 33 bp, Homo sapien
agaaagaaagtcagaagaaaagtcatgaaaggc

SEQ ID NO: 667417 - DNA, 33 bp, Homo sapien
tttgggacctactccaagttaattctggaaaga

SEQ ID NO: 667418 - DNA, 33 bp, Homo sapien
tttgggacctactccacgttaattctggaaaga

SEQ ID NO: 667419 - DNA, 33 bp, Homo sapien
tattcaatacagggaaccacaaaatggtatcaa

SEQ ID NO: 667420 - DNA, 33 bp, Homo sapien
tattcaatacagggaatcacaaaatggtatcaa

SEQ ID NO: 667421 - DNA, 33 bp, Homo sapien
aatttaggcaactgaaatgatttaacaaatact

SEQ ID NO: 667422 - DNA, 33 bp, Homo sapien
aatttaggcaactgaagtgatttaacaaatact

SEQ ID NO: 667423 - DNA, 33 bp, Homo sapien
catagaggcttacacaatctttctgcattcaaa

SEQ ID NO: 667424 - DNA, 33 bp, Homo sapien
catagaggcttacacagtctttctgcattcaaa

SEQ ID NO: 667425 - DNA, 33 bp, Homo sapien
atatttgtaaacaaacacttagtgaaaactcat

SEQ ID NO: 667426 - DNA, 33 bp, Homo sapien
atatttgtaaacaaacgcttagtgaaaactcat

SEQ ID NO: 667427 - DNA, 33 bp, Homo sapien
atccaactattctaatcaagggatttgtgctta

SEQ ID NO: 667428 - DNA, 33 bp, Homo sapien
atccaactattctaatgaagggatttgtgctta

SEQ ID NO: 667429 - DNA, 33 bp, Homo sapien
gtagacagtagacaaaattgttgttcaaagtat

SEQ ID NO: 667430 - DNA, 33 bp, Homo sapien
gtagacagtagacaaagttgttgttcaaagtat

SEQ ID NO: 667431 - DNA, 33 bp, Homo sapien
aagattcagatgaacaatgagtcagaagatagg

SEQ ID NO: 667432 - DNA, 33 bp, Homo sapien
aagattcagatgaacagtgagtcagaagatagg

SEQ ID NO: 667433 - DNA, 33 bp, Homo sapien
caagtcaactcagagcacctgatgaaaatttcc

SEQ ID NO: 667434 - DNA, 33 bp, Homo sapien
caagtcaactcagagctcctgatgaaaatttcc

SEQ ID NO: 667435 - DNA, 33 bp, Homo sapien
tacctttacctacctaagtccaatctaaagttt

SEQ ID NO: 667436 - DNA, 33 bp, Homo sapien
tacctttacctacctaggtccaatctaaagttt

SEQ ID NO: 667437 - DNA, 33 bp, Homo sapien
cctgcatcaagtatccgagtccattaacagttt

SEQ ID NO: 667438 - DNA, 33 bp, Homo sapien
cctgcatcaagtatcctagtccattaacagttt

SEQ ID NO: 667439 - DNA, 33 bp, Homo sapien
aaaatattgttgataccgtaagacaggttcctc

SEQ ID NO: 667440 - DNA, 33 bp, Homo sapien
aaaatattgttgatactgtaagacaggttcctc

SEQ ID NO: 667441 - DNA, 33 bp, Homo sapien
gggaagtgttggtggacagagaatgccctaggc

SEQ ID NO: 667442 - DNA, 33 bp, Homo sapien
gggaagtgttggtggagagagaatgccctaggc

SEQ ID NO: 667443 - DNA, 33 bp, Homo sapien
aactaagaattagctcagaatgtgtcataaaac

SEQ ID NO: 667444 - DNA, 33 bp, Homo sapien
aactaagaattagctctgaatgtgtcataaaac

SEQ ID NO: 667445 - DNA, 33 bp, Homo sapien
aaacagaaacaagccactaataacaaagaagtt

SEQ ID NO: 667446 - DNA, 33 bp, Homo sapien
aaacagaaacaagccagtaataacaaagaagtt

SEQ ID NO: 667447 - DNA, 33 bp, Homo sapien
actcccagaagtcttgaaggtctaaaccagcaa

SEQ ID NO: 667448 - DNA, 33 bp, Homo sapien
actcccagaagtcttgtaggtctaaaccagcaa

SEQ ID NO: 667449 - DNA, 33 bp, Homo sapien
tgtgttctgattttgaaagtttttaatggctgt

SEQ ID NO: 667450 - DNA, 33 bp, Homo sapien
tgtgttctgattttgacagtttttaatggctgt

SEQ ID NO: 667451 - DNA, 33 bp, Homo sapien
gaggctcaactggagaagtactgccaaagatat

SEQ ID NO: 667452 - DNA, 33 bp, Homo sapien
gaggctcaactggagaggtactgccaaagatat

SEQ ID NO: 667453 - DNA, 33 bp, Homo sapien
tgtgcagtggatttccagaaaatgttgtctttt

SEQ ID NO: 667454 - DNA, 33 bp, Homo sapien
tgtgcagtggatttccggaaaatgttgtctttt

SEQ ID NO: 667455 - DNA, 33 bp, Homo sapien
ataaactcacacataccggagatatatatataa

SEQ ID NO: 667456 - DNA, 33 bp, Homo sapien
ataaactcacacatactggagatatatatataa

SEQ ID NO: 667457 - DNA, 33 bp, Homo sapien
atgcctacctcttttacgtgagagagaaataaa

SEQ ID NO: 667458 - DNA, 33 bp, Homo sapien
atgcctacctcttttatgtgagagagaaataaa

SEQ ID NO: 667459 - DNA, 33 bp, Homo sapien
ttccactgtgtatgaacttcaagtcattgtttc

SEQ ID NO: 667460 - DNA, 33 bp, Homo sapien
ttccactgtgtatgaatttcaagtcattgtttc

SEQ ID NO: 667461 - DNA, 33 bp, Homo sapien
atctttctctccacacaataaaattgcccaact

SEQ ID NO: 667462 - DNA, 33 bp, Homo sapien
atctttctctccacaccataaaattgcccaact

SEQ ID NO: 667463 - DNA, 33 bp, Homo sapien
atattaattttttaagacacaaacttgctcaag

SEQ ID NO: 667464 - DNA, 33 bp, Homo sapien
atattaattttttaaggcacaaacttgctcaag

SEQ ID NO: 667465 - DNA, 33 bp, Homo sapien
agcagtgactttggagaacaaattttctgatac

SEQ ID NO: 667466 - DNA, 33 bp, Homo sapien
agcagtgactttggaggacaaattttctgatac

SEQ ID NO: 667467 - DNA, 33 bp, Homo sapien
cactctctgcaaaatgcaatgaaatgcaataaa

SEQ ID NO: 667468 - DNA, 33 bp, Homo sapien
cactctctgcaaaatgtaatgaaatgcaataaa

SEQ ID NO: 667469 - DNA, 33 bp, Homo sapien
atatggagtttcctccccttctcaagaccagat

SEQ ID NO: 667470 - DNA, 33 bp, Homo sapien
atatggagtttcctcctcttctcaagaccagat

SEQ ID NO: 667471 - DNA, 33 bp, Homo sapien
ttgctagggtcatatagcatcaaaatcatatct

SEQ ID NO: 667472 - DNA, 33 bp, Homo sapien
ttgctagggtcatatatcatcaaaatcatatct

SEQ ID NO: 667473 - DNA, 33 bp, Homo sapien
ttgttgccagtacctacacatcagcagcggcag

SEQ ID NO: 667474 - DNA, 33 bp, Homo sapien
ttgttgccagtacctatacatcagcagcggcag

SEQ ID NO: 667475 - DNA, 33 bp, Homo sapien
tatgatgtttctatgacgttttgactcccagct

SEQ ID NO: 667476 - DNA, 33 bp, Homo sapien
tatgatgtttctatgatgttttgactcccagct

SEQ ID NO: 667477 - DNA, 33 bp, Homo sapien
gttagtttactggaccaacagaggtgatttccc

SEQ ID NO: 667478 - DNA, 33 bp, Homo sapien
gttagtttactggaccgacagaggtgatttccc

SEQ ID NO: 667479 - DNA, 33 bp, Homo sapien
ccactgtacccggcccggacaatcgtaacagga

SEQ ID NO: 667480 - DNA, 33 bp, Homo sapien
ccactgtacccggccctgacaatcgtaacagga

SEQ ID NO: 667481 - DNA, 33 bp, Homo sapien
gacaaagcgagcgatcaaatttgtggtgtccta

SEQ ID NO: 667482 - DNA, 33 bp, Homo sapien
gacaaagcgagcgatccaatttgtggtgtccta

SEQ ID NO: 667483 - DNA, 33 bp, Homo sapien
ctttgtctctctaacactgaggctaacagttgc

SEQ ID NO: 667484 - DNA, 33 bp, Homo sapien
ctttgtctctctaacattgaggctaacagttgc

SEQ ID NO: 667485 - DNA, 33 bp, Homo sapien
tattatttgtactcagaaacctcaagttcacta

SEQ ID NO: 667486 - DNA, 33 bp, Homo sapien
tattatttgtactcaggaacctcaagttcacta

SEQ ID NO: 667487 - DNA, 33 bp, Homo sapien
ctcacaccctctaactcaataatgtttagccaa

SEQ ID NO: 667488 - DNA, 33 bp, Homo sapien
ctcacaccctctaacttaataatgtttagccaa

SEQ ID NO: 667489 - DNA, 33 bp, Homo sapien
taaaagcttgcataggcaaacgctggcagctgt

SEQ ID NO: 667490 - DNA, 33 bp, Homo sapien
taaaagcttgcataggtaaacgctggcagctgt

SEQ ID NO: 667491 - DNA, 33 bp, Homo sapien
cctcacaccaaggaaactgaggctgtggacaca

SEQ ID NO: 667492 - DNA, 33 bp, Homo sapien
cctcacaccaaggaaattgaggctgtggacaca

SEQ ID NO: 667493 - DNA, 33 bp, Homo sapien
tggggtattacctcagacaaacactaccgcttc

SEQ ID NO: 667494 - DNA, 33 bp, Homo sapien
tggggtattacctcaggcaaacactaccgcttc

SEQ ID NO: 667495 - DNA, 33 bp, Homo sapien
atccttcggagtgtaactcagaatgcacttctt

SEQ ID NO: 667496 - DNA, 33 bp, Homo sapien
atccttcggagtgtaattcagaatgcacttctt

SEQ ID NO: 667497 - DNA, 33 bp, Homo sapien
ttggtttttacatcagaatcttcttatcatctc

SEQ ID NO: 667498 - DNA, 33 bp, Homo sapien
ttggtttttacatcagtatcttcttatcatctc

SEQ ID NO: 667499 - DNA, 33 bp, Homo sapien
ccaaagaatatgtggaatcactgaattgcaaga

SEQ ID NO: 667500 - DNA, 33 bp, Homo sapien
ccaaagaatatgtggactcactgaattgcaaga

SEQ ID NO: 667501 - DNA, 33 bp, Homo sapien
agacaacatataaatcaaatgcagttatctgtt

SEQ ID NO: 667502 - DNA, 33 bp, Homo sapien
agacaacatataaatcgaatgcagttatctgtt

SEQ ID NO: 667503 - DNA, 33 bp, Homo sapien
aaaaagtgatggccacaattatgctacaaacaa

SEQ ID NO: 667504 - DNA, 33 bp, Homo sapien
aaaaagtgatggccaccattatgctacaaacaa

SEQ ID NO: 667505 - DNA, 33 bp, Homo sapien
atatgctcaccgtaagcagtctctgccatccct

SEQ ID NO: 667506 - DNA, 33 bp, Homo sapien
atatgctcaccgtaagtagtctctgccatccct

SEQ ID NO: 667507 - DNA, 33 bp, Homo sapien
aggaggaggatgcctgaaagctgaggttccaag

SEQ ID NO: 667508 - DNA, 33 bp, Homo sapien
aggaggaggatgcctgcaagctgaggttccaag

SEQ ID NO: 667509 - DNA, 33 bp, Homo sapien
cttctacctttgtttaccatcaacagctatatc

SEQ ID NO: 667510 - DNA, 33 bp, Homo sapien
cttctacctttgtttatcatcaacagctatatc

SEQ ID NO: 667511 - DNA, 33 bp, Homo sapien
tgaatttataattttgcaatttgaatagcgtag

SEQ ID NO: 667512 - DNA, 33 bp, Homo sapien
tgaatttataattttggaatttgaatagcgtag

SEQ ID NO: 667513 - DNA, 33 bp, Homo sapien
aggcatagaatgaaaaaggagcacctcatagaa

SEQ ID NO: 667514 - DNA, 33 bp, Homo sapien
aggcatagaatgaaaagggagcacctcatagaa

SEQ ID NO: 667515 - DNA, 33 bp, Homo sapien
cactcatatgagaaacaagtagcttctaaaata

SEQ ID NO: 667516 - DNA, 33 bp, Homo sapien
cactcatatgagaaacgagtagcttctaaaata

SEQ ID NO: 667517 - DNA, 33 bp, Homo sapien
ttttgtttttaagcatcatctaccttttgatga

SEQ ID NO: 667518 - DNA, 33 bp, Homo sapien
ttttgtttttaagcatgatctaccttttgatga

SEQ ID NO: 667519 - DNA, 33 bp, Homo sapien
atctctgtggctcctacgataagaccttcattt

SEQ ID NO: 667520 - DNA, 33 bp, Homo sapien
atctctgtggctcctatgataagaccttcattt

SEQ ID NO: 667521 - DNA, 33 bp, Homo sapien
caatgaagtaacatccgcatttactgttgtgat

SEQ ID NO: 667522 - DNA, 33 bp, Homo sapien
caatgaagtaacatcctcatttactgttgtgat

SEQ ID NO: 667523 - DNA, 33 bp, Homo sapien
acactcactgacttaacgtctaccactctagat

SEQ ID NO: 667524 - DNA, 33 bp, Homo sapien
acactcactgacttaatgtctaccactctagat

SEQ ID NO: 667525 - DNA, 33 bp, Homo sapien
gttgtgacagcacccaagctcggccacaaattt

SEQ ID NO: 667526 - DNA, 33 bp, Homo sapien
gttgtgacagcacccaggctcggccacaaattt

SEQ ID NO: 667527 - DNA, 33 bp, Homo sapien
tcacctatatgggaaacaaaagagacagggatt

SEQ ID NO: 667528 - DNA, 33 bp, Homo sapien
tcacctatatgggaaagaaaagagacagggatt

SEQ ID NO: 667529 - DNA, 33 bp, Homo sapien
ccctgctgcatgactaagaagttacctattctc

SEQ ID NO: 667530 - DNA, 33 bp, Homo sapien
ccctgctgcatgactaggaagttacctattctc

SEQ ID NO: 667531 - DNA, 33 bp, Homo sapien
ttgctactttccatcacggctcaaaatattaag

SEQ ID NO: 667532 - DNA, 33 bp, Homo sapien
ttgctactttccatcatggctcaaaatattaag

SEQ ID NO: 667533 - DNA, 33 bp, Homo sapien
tctcaaaagctttctcacgtatttgttgattct

SEQ ID NO: 667534 - DNA, 33 bp, Homo sapien
tctcaaaagctttctcgcgtatttgttgattct

SEQ ID NO: 667535 - DNA, 33 bp, Homo sapien
tgtcactaaggagagcaatgccctaacagaaag

SEQ ID NO: 667536 - DNA, 33 bp, Homo sapien
tgtcactaaggagagcgatgccctaacagaaag

SEQ ID NO: 667537 - DNA, 33 bp, Homo sapien
aaaagtaaaattggtacgtcagtcattcatctt

SEQ ID NO: 667538 - DNA, 33 bp, Homo sapien
aaaagtaaaattggtatgtcagtcattcatctt

SEQ ID NO: 667539 - DNA, 33 bp, Homo sapien
gaaagaccacaaaaaaaatctgagcatcaccat

SEQ ID NO: 667540 - DNA, 33 bp, Homo sapien
gaaagaccacaaaaaacatctgagcatcaccat

SEQ ID NO: 667541 - DNA, 33 bp, Homo sapien
caaaccaagattcccaagcaggtagtaaatggc

SEQ ID NO: 667542 - DNA, 33 bp, Homo sapien
caaaccaagattcccaggcaggtagtaaatggc

SEQ ID NO: 667543 - DNA, 33 bp, Homo sapien
taaaatcagttcagaccatgtaagtttggcatg

SEQ ID NO: 667544 - DNA, 33 bp, Homo sapien
taaaatcagttcagactatgtaagtttggcatg

SEQ ID NO: 667545 - DNA, 33 bp, Homo sapien
ttgaaaaattatcaaacggctaatgctcttttt

SEQ ID NO: 667546 - DNA, 33 bp, Homo sapien
ttgaaaaattatcaaatggctaatgctcttttt

SEQ ID NO: 667547 - DNA, 33 bp, Homo sapien
aacgtatgaaaacatcaaatctttacctccatc

SEQ ID NO: 667548 - DNA, 33 bp, Homo sapien
aacgtatgaaaacatcgaatctttacctccatc

SEQ ID NO: 667549 - DNA, 33 bp, Homo sapien
aagtcccgctgaattaactttacactactaaca

SEQ ID NO: 667550 - DNA, 33 bp, Homo sapien
aagtcccgctgaattatctttacactactaaca

SEQ ID NO: 667551 - DNA, 33 bp, Homo sapien
tcattaagcacaacaacgagaccaaaaaaattc

SEQ ID NO: 667552 - DNA, 33 bp, Homo sapien
tcattaagcacaacaatgagaccaaaaaaattc

SEQ ID NO: 667553 - DNA, 33 bp, Homo sapien
cattctggaaaggaataatgtgatggcattttt

SEQ ID NO: 667554 - DNA, 33 bp, Homo sapien
cattctggaaaggaatgatgtgatggcattttt

SEQ ID NO: 667555 - DNA, 33 bp, Homo sapien
tcccttttccttttcccaccatggcctgagtgg

SEQ ID NO: 667556 - DNA, 33 bp, Homo sapien
tcccttttccttttcctaccatggcctgagtgg

SEQ ID NO: 667557 - DNA, 33 bp, Homo sapien
ttttccttgtaaacaccatgagctctcttagac

SEQ ID NO: 667558 - DNA, 33 bp, Homo sapien
ttttccttgtaaacacgatgagctctcttagac

SEQ ID NO: 667559 - DNA, 33 bp, Homo sapien
atgaaaactaaacagccaggagcctgtgaaatc

SEQ ID NO: 667560 - DNA, 33 bp, Homo sapien
atgaaaactaaacagctaggagcctgtgaaatc

SEQ ID NO: 667561 - DNA, 33 bp, Homo sapien
aacattgtcactagccaaattccagctgctata

SEQ ID NO: 667562 - DNA, 33 bp, Homo sapien
aacattgtcactagcctaattccagctgctata

SEQ ID NO: 667563 - DNA, 33 bp, Homo sapien
gtcctggatcatctacaacaatcccatcctgtc

SEQ ID NO: 667564 - DNA, 33 bp, Homo sapien
gtcctggatcatctacgacaatcccatcctgtc

SEQ ID NO: 667565 - DNA, 33 bp, Homo sapien
attgtatgacaatttcaattgccctctaaacaa

SEQ ID NO: 667566 - DNA, 33 bp, Homo sapien
attgtatgacaatttctattgccctctaaacaa

SEQ ID NO: 667567 - DNA, 33 bp, Homo sapien
ttgcaaaaagaatttacgacatgagaactttaa

SEQ ID NO: 667568 - DNA, 33 bp, Homo sapien
ttgcaaaaagaatttatgacatgagaactttaa

SEQ ID NO: 667569 - DNA, 33 bp, Homo sapien
gtttctaagatcataaagtttgggctgatacaa

SEQ ID NO: 667570 - DNA, 33 bp, Homo sapien
gtttctaagatcataacgtttgggctgatacaa

SEQ ID NO: 667571 - DNA, 33 bp, Homo sapien
tcattgtaacagaccaatgaaacctcacatagt

SEQ ID NO: 667572 - DNA, 33 bp, Homo sapien
tcattgtaacagaccactgaaacctcacatagt

SEQ ID NO: 667573 - DNA, 33 bp, Homo sapien
cgtttcccagccaccaactcttaccatttcaat

SEQ ID NO: 667574 - DNA, 33 bp, Homo sapien
cgtttcccagccaccagctcttaccatttcaat

SEQ ID NO: 667575 - DNA, 33 bp, Homo sapien
ttaaataatagacttcacttaaaatacacattg

SEQ ID NO: 667576 - DNA, 33 bp, Homo sapien
ttaaataatagacttcgcttaaaatacacattg

SEQ ID NO: 667577 - DNA, 33 bp, Homo sapien
cacttctagtgaagcaccaaaagtttactctca

SEQ ID NO: 667578 - DNA, 33 bp, Homo sapien
cacttctagtgaagcatcaaaagtttactctca

SEQ ID NO: 667579 - DNA, 33 bp, Homo sapien
acctttcggaaagtgacattattgacaagacag

SEQ ID NO: 667580 - DNA, 33 bp, Homo sapien
acctttcggaaagtgatattattgacaagacag

SEQ ID NO: 667581 - DNA, 33 bp, Homo sapien
actacccagtgtaataaaaaacagcaggaattt

SEQ ID NO: 667582 - DNA, 33 bp, Homo sapien
actacccagtgtaatacaaaacagcaggaattt

SEQ ID NO: 667583 - DNA, 33 bp, Homo sapien
gattagccattctgaaagcagaaaaccaagtaa

SEQ ID NO: 667584 - DNA, 33 bp, Homo sapien
gattagccattctgaaggcagaaaaccaagtaa

SEQ ID NO: 667585 - DNA, 33 bp, Homo sapien
aacagccattcactcgaaagtgccgtggggcag

SEQ ID NO: 667586 - DNA, 33 bp, Homo sapien
aacagccattcactcggaagtgccgtggggcag

SEQ ID NO: 667587 - DNA, 33 bp, Homo sapien
cagaacctaccaacaacgacaacatataaatca

SEQ ID NO: 667588 - DNA, 33 bp, Homo sapien
cagaacctaccaacaatgacaacatataaatca

SEQ ID NO: 667589 - DNA, 33 bp, Homo sapien
tataaaagactcatcaaatcctcaaggtattta

SEQ ID NO: 667590 - DNA, 33 bp, Homo sapien
tataaaagactcatcatatcctcaaggtattta

SEQ ID NO: 667591 - DNA, 33 bp, Homo sapien
tttattcttgaggaaaattagtcccttgatatg

SEQ ID NO: 667592 - DNA, 33 bp, Homo sapien
tttattcttgaggaaagttagtcccttgatatg

SEQ ID NO: 667593 - DNA, 33 bp, Homo sapien
gtaaacatttttcaccggatgcaattcaaacat

SEQ ID NO: 667594 - DNA, 33 bp, Homo sapien
gtaaacatttttcacctgatgcaattcaaacat

SEQ ID NO: 667595 - DNA, 33 bp, Homo sapien
cctagaattgactgacaagtcacaacaatcagc

SEQ ID NO: 667596 - DNA, 33 bp, Homo sapien
cctagaattgactgaccagtcacaacaatcagc

SEQ ID NO: 667597 - DNA, 33 bp, Homo sapien
gtagtttccaacctccccattggattagattat

SEQ ID NO: 667598 - DNA, 33 bp, Homo sapien
gtagtttccaacctcctcattggattagattat

SEQ ID NO: 667599 - DNA, 33 bp, Homo sapien
tagtgttgatgctttcactatagtaccattcca

SEQ ID NO: 667600 - DNA, 33 bp, Homo sapien
tagtgttgatgctttcgctatagtaccattcca

SEQ ID NO: 667601 - DNA, 33 bp, Homo sapien
atgccatcttctccacaaaatcttttcactttg

SEQ ID NO: 667602 - DNA, 33 bp, Homo sapien
atgccatcttctccacgaaatcttttcactttg

SEQ ID NO: 667603 - DNA, 33 bp, Homo sapien
ccatttcttccttaagaaacaagcttcaacaat

SEQ ID NO: 667604 - DNA, 33 bp, Homo sapien
ccatttcttccttaaggaacaagcttcaacaat

SEQ ID NO: 667605 - DNA, 33 bp, Homo sapien
tacactagatttataacgaactcatacaactca

SEQ ID NO: 667606 - DNA, 33 bp, Homo sapien
tacactagatttataatgaactcatacaactca

SEQ ID NO: 667607 - DNA, 33 bp, Homo sapien
tgactcaaaacttataacctagttgtctttttt

SEQ ID NO: 667608 - DNA, 33 bp, Homo sapien
tgactcaaaacttataccctagttgtctttttt

SEQ ID NO: 667609 - DNA, 33 bp, Homo sapien
agacacttagagacctaaggaaggagcaagggg

SEQ ID NO: 667610 - DNA, 33 bp, Homo sapien
agacacttagagacctgaggaaggagcaagggg

SEQ ID NO: 667611 - DNA, 33 bp, Homo sapien
agacagtgtgctaagaaagcagaggaaagaaga

SEQ ID NO: 667612 - DNA, 33 bp, Homo sapien
agacagtgtgctaagacagcagaggaaagaaga

SEQ ID NO: 667613 - DNA, 33 bp, Homo sapien
atgagggaagtgccaagaattcagggctaaagt

SEQ ID NO: 667614 - DNA, 33 bp, Homo sapien
atgagggaagtgccaataattcagggctaaagt

SEQ ID NO: 667615 - DNA, 33 bp, Homo sapien
ctatgacattcactggacagagactgaagatgg

SEQ ID NO: 667616 - DNA, 33 bp, Homo sapien
ctatgacattcactggtcagagactgaagatgg

SEQ ID NO: 667617 - DNA, 33 bp, Homo sapien
ttttgaaaggtaagcacagttttaattgaaaaa

SEQ ID NO: 667618 - DNA, 33 bp, Homo sapien
ttttgaaaggtaagcagagttttaattgaaaaa

SEQ ID NO: 667619 - DNA, 33 bp, Homo sapien
taaatgccaagtgataataaaaaatatctgtgc

SEQ ID NO: 667620 - DNA, 33 bp, Homo sapien
taaatgccaagtgatactaaaaaatatctgtgc

SEQ ID NO: 667621 - DNA, 33 bp, Homo sapien
ataaatgttgtgaaacaccaaaatagctggaag

SEQ ID NO: 667622 - DNA, 33 bp, Homo sapien
ataaatgttgtgaaacgccaaaatagctggaag

SEQ ID NO: 667623 - DNA, 33 bp, Homo sapien
actgagctctttgtgacacctggctttgcagaa

SEQ ID NO: 667624 - DNA, 33 bp, Homo sapien
actgagctctttgtgatacctggctttgcagaa

SEQ ID NO: 667625 - DNA, 33 bp, Homo sapien
tcttttttaaacttaaacccagatgtgatagta

SEQ ID NO: 667626 - DNA, 33 bp, Homo sapien
tcttttttaaacttaatcccagatgtgatagta

SEQ ID NO: 667627 - DNA, 33 bp, Homo sapien
tgaataggcactgaaaaatttgtgcctatctca

SEQ ID NO: 667628 - DNA, 33 bp, Homo sapien
tgaataggcactgaaagatttgtgcctatctca

SEQ ID NO: 667629 - DNA, 33 bp, Homo sapien
ctttacaagcttcttgcagacaggaactagggt

SEQ ID NO: 667630 - DNA, 33 bp, Homo sapien
ctttacaagcttcttggagacaggaactagggt

SEQ ID NO: 667631 - DNA, 33 bp, Homo sapien
cagtggttttccaaccccgactgcatattaaaa

SEQ ID NO: 667632 - DNA, 33 bp, Homo sapien
cagtggttttccaacctcgactgcatattaaaa

SEQ ID NO: 667633 - DNA, 33 bp, Homo sapien
gaggcaatttatgagaactaagatgtctttcta

SEQ ID NO: 667634 - DNA, 33 bp, Homo sapien
gaggcaatttatgagatctaagatgtctttcta

SEQ ID NO: 667635 - DNA, 33 bp, Homo sapien
tattgcaacgtagagcaacattattataaaagg

SEQ ID NO: 667636 - DNA, 33 bp, Homo sapien
tattgcaacgtagagcgacattattataaaagg

SEQ ID NO: 667637 - DNA, 33 bp, Homo sapien
aacagtggggtaaaaagtagataatagatggaa

SEQ ID NO: 667638 - DNA, 33 bp, Homo sapien
aacagtggggtaaaaattagataatagatggaa

SEQ ID NO: 667639 - DNA, 33 bp, Homo sapien
aagccaaactgaataaagattttcctgagattt

SEQ ID NO: 667640 - DNA, 33 bp, Homo sapien
aagccaaactgaataacgattttcctgagattt

SEQ ID NO: 667641 - DNA, 33 bp, Homo sapien
tgtgcacttctgagaacccacgcatttgaatgc

SEQ ID NO: 667642 - DNA, 33 bp, Homo sapien
tgtgcacttctgagaatccacgcatttgaatgc

SEQ ID NO: 667643 - DNA, 33 bp, Homo sapien
cagtgactcaagtaagcctaaagttggtttttc

SEQ ID NO: 667644 - DNA, 33 bp, Homo sapien
cagtgactcaagtaagtctaaagttggtttttc

SEQ ID NO: 667645 - DNA, 33 bp, Homo sapien
cgacagttgaaattaacggctttccatgtatgt

SEQ ID NO: 667646 - DNA, 33 bp, Homo sapien
cgacagttgaaattaatggctttccatgtatgt

SEQ ID NO: 667647 - DNA, 33 bp, Homo sapien
gagagccagataggaaagatttaaatgctattg

SEQ ID NO: 667648 - DNA, 33 bp, Homo sapien
gagagccagataggaatgatttaaatgctattg

SEQ ID NO: 667649 - DNA, 33 bp, Homo sapien
cccactcagtgctagacgacagcttcaactccc

SEQ ID NO: 667650 - DNA, 33 bp, Homo sapien
cccactcagtgctagaggacagcttcaactccc

SEQ ID NO: 667651 - DNA, 33 bp, Homo sapien
cttcatatgtgctcaacacgaacctcattttta

SEQ ID NO: 667652 - DNA, 33 bp, Homo sapien
cttcatatgtgctcaatacgaacctcattttta

SEQ ID NO: 667653 - DNA, 33 bp, Homo sapien
gtcttttgtgtttaaactatgtcttaactaatg

SEQ ID NO: 667654 - DNA, 33 bp, Homo sapien
gtcttttgtgtttaaagtatgtcttaactaatg

SEQ ID NO: 667655 - DNA, 33 bp, Homo sapien
attaagggacttggaagaggagatggaaagaga

SEQ ID NO: 667656 - DNA, 33 bp, Homo sapien
attaagggacttggaataggagatggaaagaga

SEQ ID NO: 667657 - DNA, 33 bp, Homo sapien
ttcttttctggcatgaaagcactgaggtataga

SEQ ID NO: 667658 - DNA, 33 bp, Homo sapien
ttcttttctggcatgagagcactgaggtataga

SEQ ID NO: 667659 - DNA, 33 bp, Homo sapien
acatacaatttcctaaatattaaactgtcagca

SEQ ID NO: 667660 - DNA, 33 bp, Homo sapien
acatacaatttcctaactattaaactgtcagca

SEQ ID NO: 667661 - DNA, 33 bp, Homo sapien
tagtcaaatcaaacacaaacaatttagagaaaa

SEQ ID NO: 667662 - DNA, 33 bp, Homo sapien
tagtcaaatcaaacacgaacaatttagagaaaa

SEQ ID NO: 667663 - DNA, 33 bp, Homo sapien
atctaattctttcaagacccaacctgtgtatct

SEQ ID NO: 667664 - DNA, 33 bp, Homo sapien
atctaattctttcaaggcccaacctgtgtatct

SEQ ID NO: 667665 - DNA, 33 bp, Homo sapien
ggttagaatagaggcaaagcctaagtgatcaga

SEQ ID NO: 667666 - DNA, 33 bp, Homo sapien
ggttagaatagaggcatagcctaagtgatcaga

SEQ ID NO: 667667 - DNA, 33 bp, Homo sapien
tatgaatatgccaaataagtgaatttttggata

SEQ ID NO: 667668 - DNA, 33 bp, Homo sapien
tatgaatatgccaaattagtgaatttttggata

SEQ ID NO: 667669 - DNA, 33 bp, Homo sapien
ctgcccaagaataaaggccatgaagaataatgc

SEQ ID NO: 667670 - DNA, 33 bp, Homo sapien
ctgcccaagaataaagtccatgaagaataatgc

SEQ ID NO: 667671 - DNA, 33 bp, Homo sapien
ctcctgaaggaacaaagcacttgtcattttact

SEQ ID NO: 667672 - DNA, 33 bp, Homo sapien
ctcctgaaggaacaaatcacttgtcattttact

SEQ ID NO: 667673 - DNA, 33 bp, Homo sapien
gacagctctcatccaaaaattatttttcataga

SEQ ID NO: 667674 - DNA, 33 bp, Homo sapien
gacagctctcatccaataattatttttcataga

SEQ ID NO: 667675 - DNA, 33 bp, Homo sapien
ttaatttattcatgcaagaaatgtttattgtac

SEQ ID NO: 667676 - DNA, 33 bp, Homo sapien
ttaatttattcatgcaggaaatgtttattgtac

SEQ ID NO: 667677 - DNA, 33 bp, Homo sapien
tagcacagggcctagcacagagtcagcaacata

SEQ ID NO: 667678 - DNA, 33 bp, Homo sapien
tagcacagggcctagcgcagagtcagcaacata

SEQ ID NO: 667679 - DNA, 33 bp, Homo sapien
gacatggactctaaaacatgtcacttagaatta

SEQ ID NO: 667680 - DNA, 33 bp, Homo sapien
gacatggactctaaaatatgtcacttagaatta

SEQ ID NO: 667681 - DNA, 33 bp, Homo sapien
gcaggaattgaacgaacgtgttaataagccaag

SEQ ID NO: 667682 - DNA, 33 bp, Homo sapien
gcaggaattgaacgaatgtgttaataagccaag

SEQ ID NO: 667683 - DNA, 33 bp, Homo sapien
aaaagttctcttacaggcataagtagcattttt

SEQ ID NO: 667684 - DNA, 33 bp, Homo sapien
aaaagttctcttacagtcataagtagcattttt

SEQ ID NO: 667685 - DNA, 33 bp, Homo sapien
gccacaaactcgagcggccagtgacattgagag

SEQ ID NO: 667686 - DNA, 33 bp, Homo sapien
gccacaaactcgagcgtccagtgacattgagag

SEQ ID NO: 667687 - DNA, 33 bp, Homo sapien
gaccccagtaggttagaaaccagtatccttggt

SEQ ID NO: 667688 - DNA, 33 bp, Homo sapien
gaccccagtaggttaggaaccagtatccttggt

SEQ ID NO: 667689 - DNA, 33 bp, Homo sapien
tagagtgaggccaaaacgcctgtttaagtcata

SEQ ID NO: 667690 - DNA, 33 bp, Homo sapien
tagagtgaggccaaaatgcctgtttaagtcata

SEQ ID NO: 667691 - DNA, 33 bp, Homo sapien
ctaataaatttagaaacgactgcctagaggtca

SEQ ID NO: 667692 - DNA, 33 bp, Homo sapien
ctaataaatttagaaatgactgcctagaggtca

SEQ ID NO: 667693 - DNA, 33 bp, Homo sapien
ctggtgtcatctttgaataaagaatcttggaat

SEQ ID NO: 667694 - DNA, 33 bp, Homo sapien
ctggtgtcatctttgagtaaagaatcttggaat

SEQ ID NO: 667695 - DNA, 33 bp, Homo sapien
tagagatgaggtcggcaaaataaacaaggaact

SEQ ID NO: 667696 - DNA, 33 bp, Homo sapien
tagagatgaggtcggcgaaataaacaaggaact

SEQ ID NO: 667697 - DNA, 33 bp, Homo sapien
ttaatcagcactttaaaaaacaacagactaata

SEQ ID NO: 667698 - DNA, 33 bp, Homo sapien
ttaatcagcactttaagaaacaacagactaata

SEQ ID NO: 667699 - DNA, 33 bp, Homo sapien
tcattagattcagacacacccaaaccaatatac

SEQ ID NO: 667700 - DNA, 33 bp, Homo sapien
tcattagattcagacagacccaaaccaatatac

SEQ ID NO: 667701 - DNA, 33 bp, Homo sapien
actcttaccagttcaacgacttaaatctatact

SEQ ID NO: 667702 - DNA, 33 bp, Homo sapien
actcttaccagttcaatgacttaaatctatact

SEQ ID NO: 667703 - DNA, 33 bp, Homo sapien
ttatttccagtaaaaacaaggcatagaaattcc

SEQ ID NO: 667704 - DNA, 33 bp, Homo sapien
ttatttccagtaaaaagaaggcatagaaattcc

SEQ ID NO: 667705 - DNA, 33 bp, Homo sapien
gctaccttccataggaaaatactgtaacttcta

SEQ ID NO: 667706 - DNA, 33 bp, Homo sapien
gctaccttccataggacaatactgtaacttcta

SEQ ID NO: 667707 - DNA, 33 bp, Homo sapien
tcaaaagaggaacaacagtatgtctattctaaa

SEQ ID NO: 667708 - DNA, 33 bp, Homo sapien
tcaaaagaggaacaacggtatgtctattctaaa

SEQ ID NO: 667709 - DNA, 33 bp, Homo sapien
tttggtatgaccttggaaagaaaaaacatattt

SEQ ID NO: 667710 - DNA, 33 bp, Homo sapien
tttggtatgaccttgggaagaaaaaacatattt

SEQ ID NO: 667711 - DNA, 33 bp, Homo sapien
gtggcttaattataaccataggccatatctttc

SEQ ID NO: 667712 - DNA, 33 bp, Homo sapien
gtggcttaattataacgataggccatatctttc

SEQ ID NO: 667713 - DNA, 33 bp, Homo sapien
aaaagggaaaattcaaactagaataacaaacca

SEQ ID NO: 667714 - DNA, 33 bp, Homo sapien
aaaagggaaaattcaacctagaataacaaacca

SEQ ID NO: 667715 - DNA, 33 bp, Homo sapien
tcatgcttaacgacaccgtattgctttgtacat

SEQ ID NO: 667716 - DNA, 33 bp, Homo sapien
tcatgcttaacgacactgtattgctttgtacat

SEQ ID NO: 667717 - DNA, 33 bp, Homo sapien
aacaagtttttatcacacaaatcttgctgttcc

SEQ ID NO: 667718 - DNA, 33 bp, Homo sapien
aacaagtttttatcactcaaatcttgctgttcc

SEQ ID NO: 667719 - DNA, 33 bp, Homo sapien
tctctttccgtttctcgagctctccttcggtca

SEQ ID NO: 667720 - DNA, 33 bp, Homo sapien
tctctttccgtttctctagctctccttcggtca

SEQ ID NO: 667721 - DNA, 33 bp, Homo sapien
caaagtcagtgctactaaataccacattacagg

SEQ ID NO: 667722 - DNA, 33 bp, Homo sapien
caaagtcagtgctactgaataccacattacagg

SEQ ID NO: 667723 - DNA, 33 bp, Homo sapien
agtacttagcacattacgaatgcagtgttaaat

SEQ ID NO: 667724 - DNA, 33 bp, Homo sapien
agtacttagcacattatgaatgcagtgttaaat

SEQ ID NO: 667725 - DNA, 33 bp, Homo sapien
ccacagtgctgacacaatattatgcagaaagta

SEQ ID NO: 667726 - DNA, 33 bp, Homo sapien
ccacagtgctgacacagtattatgcagaaagta

SEQ ID NO: 667727 - DNA, 33 bp, Homo sapien
agtgcatgacagattacgaaagtgcagaatcaa

SEQ ID NO: 667728 - DNA, 33 bp, Homo sapien
agtgcatgacagattatgaaagtgcagaatcaa

SEQ ID NO: 667729 - DNA, 33 bp, Homo sapien
ttgcactcagtgaaaaagctgttgcatctatgg

SEQ ID NO: 667730 - DNA, 33 bp, Homo sapien
ttgcactcagtgaaaaggctgttgcatctatgg

SEQ ID NO: 667731 - DNA, 33 bp, Homo sapien
tatcatggaacattcaatagtcctttactgtct

SEQ ID NO: 667732 - DNA, 33 bp, Homo sapien
tatcatggaacattcagtagtcctttactgtct

SEQ ID NO: 667733 - DNA, 33 bp, Homo sapien
ggacagaaaattctggaatatccatgtaatatt

SEQ ID NO: 667734 - DNA, 33 bp, Homo sapien
ggacagaaaattctgggatatccatgtaatatt

SEQ ID NO: 667735 - DNA, 33 bp, Homo sapien
ttaagtgagcttgacaataggttcacagaaact

SEQ ID NO: 667736 - DNA, 33 bp, Homo sapien
ttaagtgagcttgacattaggttcacagaaact

SEQ ID NO: 667737 - DNA, 33 bp, Homo sapien
tgttatataagtaaacagcacactcacaggagt

SEQ ID NO: 667738 - DNA, 33 bp, Homo sapien
tgttatataagtaaacggcacactcacaggagt

SEQ ID NO: 667739 - DNA, 33 bp, Homo sapien
agaaacagaaaatcaaatacagtatattctcat

SEQ ID NO: 667740 - DNA, 33 bp, Homo sapien
agaaacagaaaatcaagtacagtatattctcat

SEQ ID NO: 667741 - DNA, 33 bp, Homo sapien
tatctgcagatatttaaaaggagcttaattaat

SEQ ID NO: 667742 - DNA, 33 bp, Homo sapien
tatctgcagatatttagaaggagcttaattaat

SEQ ID NO: 667743 - DNA, 33 bp, Homo sapien
atgggtcttggatctacgcacctctaatagtgt

SEQ ID NO: 667744 - DNA, 33 bp, Homo sapien
atgggtcttggatctatgcacctctaatagtgt

SEQ ID NO: 667745 - DNA, 33 bp, Homo sapien
catcactgaaatccaaataattcctatttccat

SEQ ID NO: 667746 - DNA, 33 bp, Homo sapien
catcactgaaatccaagtaattcctatttccat

SEQ ID NO: 667747 - DNA, 33 bp, Homo sapien
aaacgacagagcagggaagtcttacctgtagga

SEQ ID NO: 667748 - DNA, 33 bp, Homo sapien
aaacgacagagcagggcagtcttacctgtagga

SEQ ID NO: 667749 - DNA, 33 bp, Homo sapien
ataagctagtcacagaaggacaagtactgcatg

SEQ ID NO: 667750 - DNA, 33 bp, Homo sapien
ataagctagtcacagagggacaagtactgcatg

SEQ ID NO: 667751 - DNA, 33 bp, Homo sapien
aatacagaacttgaacaaattatcaactacctt

SEQ ID NO: 667752 - DNA, 33 bp, Homo sapien
aatacagaacttgaaccaattatcaactacctt

SEQ ID NO: 667753 - DNA, 33 bp, Homo sapien
taaaataaaaataaaaagactcaagtgtacatg

SEQ ID NO: 667754 - DNA, 33 bp, Homo sapien
taaaataaaaataaaatgactcaagtgtacatg

SEQ ID NO: 667755 - DNA, 33 bp, Homo sapien
ttattacctcacctaacaagttcaggagtagag

SEQ ID NO: 667756 - DNA, 33 bp, Homo sapien
ttattacctcacctaagaagttcaggagtagag

SEQ ID NO: 667757 - DNA, 33 bp, Homo sapien
catagcacacagtacaactgctaaggaaaccat

SEQ ID NO: 667758 - DNA, 33 bp, Homo sapien
catagcacacagtacagctgctaaggaaaccat

SEQ ID NO: 667759 - DNA, 33 bp, Homo sapien
cagaatgcatttatcaccacagtatttgcattt

SEQ ID NO: 667760 - DNA, 33 bp, Homo sapien
cagaatgcatttatcagcacagtatttgcattt

SEQ ID NO: 667761 - DNA, 33 bp, Homo sapien
acttcagagggacaacagaaacgtatgagcaat

SEQ ID NO: 667762 - DNA, 33 bp, Homo sapien
acttcagagggacaactgaaacgtatgagcaat

SEQ ID NO: 667763 - DNA, 33 bp, Homo sapien
aattatatatgtcaagaaaagtggatccgttaa

SEQ ID NO: 667764 - DNA, 33 bp, Homo sapien
aattatatatgtcaagtaaagtggatccgttaa

SEQ ID NO: 667765 - DNA, 33 bp, Homo sapien
acaaagtcaattgcaaagtaatactaggaattc

SEQ ID NO: 667766 - DNA, 33 bp, Homo sapien
acaaagtcaattgcaaggtaatactaggaattc

SEQ ID NO: 667767 - DNA, 33 bp, Homo sapien
tctaattctcatgaaaattaaccaaaaggatct

SEQ ID NO: 667768 - DNA, 33 bp, Homo sapien
tctaattctcatgaaatttaaccaaaaggatct

SEQ ID NO: 667769 - DNA, 33 bp, Homo sapien
gatgggtcaggcagaccgcatttatatgggagg

SEQ ID NO: 667770 - DNA, 33 bp, Homo sapien
gatgggtcaggcagactgcatttatatgggagg

SEQ ID NO: 667771 - DNA, 33 bp, Homo sapien
cttgggtagatgcttacgaattctttttgtata

SEQ ID NO: 667772 - DNA, 33 bp, Homo sapien
cttgggtagatgcttatgaattctttttgtata

SEQ ID NO: 667773 - DNA, 33 bp, Homo sapien
tagattgttggctctacgaggcaggaaacatat

SEQ ID NO: 667774 - DNA, 33 bp, Homo sapien
tagattgttggctctatgaggcaggaaacatat

SEQ ID NO: 667775 - DNA, 33 bp, Homo sapien
aatttaacatctgcaaagtcaggccctatctgg

SEQ ID NO: 667776 - DNA, 33 bp, Homo sapien
aatttaacatctgcaaggtcaggccctatctgg

SEQ ID NO: 667777 - DNA, 33 bp, Homo sapien
aaacatttccagtgcaggggtatctgtgtagaa

SEQ ID NO: 667778 - DNA, 33 bp, Homo sapien
aaacatttccagtgcatgggtatctgtgtagaa

SEQ ID NO: 667779 - DNA, 33 bp, Homo sapien
ttctttcacagaggaaataagttgttagaaaac

SEQ ID NO: 667780 - DNA, 33 bp, Homo sapien
ttctttcacagaggaagtaagttgttagaaaac

SEQ ID NO: 667781 - DNA, 33 bp, Homo sapien
gagtaatacaaattaacacagtgccaatagaag

SEQ ID NO: 667782 - DNA, 33 bp, Homo sapien
gagtaatacaaattaatacagtgccaatagaag

SEQ ID NO: 667783 - DNA, 33 bp, Homo sapien
tgcctgcaaatcagtcaatatagatgaggtaag

SEQ ID NO: 667784 - DNA, 33 bp, Homo sapien
tgcctgcaaatcagtcgatatagatgaggtaag

SEQ ID NO: 667785 - DNA, 33 bp, Homo sapien
tgataaagttctcaaaagcaaattagtgaaagt

SEQ ID NO: 667786 - DNA, 33 bp, Homo sapien
tgataaagttctcaaaggcaaattagtgaaagt

SEQ ID NO: 667787 - DNA, 33 bp, Homo sapien
taaacggaattataaaagagagacaagagagcc

SEQ ID NO: 667788 - DNA, 33 bp, Homo sapien
taaacggaattataaacgagagacaagagagcc

SEQ ID NO: 667789 - DNA, 33 bp, Homo sapien
atgtcatagattcaaactgggacgccccatcca

SEQ ID NO: 667790 - DNA, 33 bp, Homo sapien
atgtcatagattcaaattgggacgccccatcca

SEQ ID NO: 667791 - DNA, 33 bp, Homo sapien
taaggatttttttgagcatctactatgcacaaa

SEQ ID NO: 667792 - DNA, 33 bp, Homo sapien
taaggatttttttgaggatctactatgcacaaa

SEQ ID NO: 667793 - DNA, 33 bp, Homo sapien
gcttctaagatggtgaggccttgttcctgttct

SEQ ID NO: 667794 - DNA, 33 bp, Homo sapien
gcttctaagatggtgatgccttgttcctgttct

SEQ ID NO: 667795 - DNA, 33 bp, Homo sapien
tctttctgtaagttaaatgaatgatagagaaaa

SEQ ID NO: 667796 - DNA, 33 bp, Homo sapien
tctttctgtaagttaagtgaatgatagagaaaa

SEQ ID NO: 667797 - DNA, 33 bp, Homo sapien
tgatgggatgagcaccaaagcatttgaaaccac

SEQ ID NO: 667798 - DNA, 33 bp, Homo sapien
tgatgggatgagcaccgaagcatttgaaaccac

SEQ ID NO: 667799 - DNA, 33 bp, Homo sapien
gtcaaaaatagcaaccacctctctcctccctct

SEQ ID NO: 667800 - DNA, 33 bp, Homo sapien
gtcaaaaatagcaaccgcctctctcctccctct

SEQ ID NO: 667801 - DNA, 33 bp, Homo sapien
ttgctctcctgctctaagtttattgtgtaataa

SEQ ID NO: 667802 - DNA, 33 bp, Homo sapien
ttgctctcctgctctacgtttattgtgtaataa

SEQ ID NO: 667803 - DNA, 33 bp, Homo sapien
atttcatctaatcaaaactgtttcatcttacac

SEQ ID NO: 667804 - DNA, 33 bp, Homo sapien
atttcatctaatcaaatctgtttcatcttacac

SEQ ID NO: 667805 - DNA, 33 bp, Homo sapien
agacactgctgtgttaagaagttgaatcatgaa

SEQ ID NO: 667806 - DNA, 33 bp, Homo sapien
agacactgctgtgttatgaagttgaatcatgaa

SEQ ID NO: 667807 - DNA, 33 bp, Homo sapien
ttcatggtgattcttcaaattgtcaacctccgc

SEQ ID NO: 667808 - DNA, 33 bp, Homo sapien
ttcatggtgattcttcgaattgtcaacctccgc

SEQ ID NO: 667809 - DNA, 33 bp, Homo sapien
tgcctccttgaggatacgttttcatggtgattc

SEQ ID NO: 667810 - DNA, 33 bp, Homo sapien
tgcctccttgaggatatgttttcatggtgattc

SEQ ID NO: 667811 - DNA, 33 bp, Homo sapien
cttcatgcctggctgcacaaagtaccagcattc

SEQ ID NO: 667812 - DNA, 33 bp, Homo sapien
cttcatgcctggctgcccaaagtaccagcattc

SEQ ID NO: 667813 - DNA, 33 bp, Homo sapien
aagtacatatcagctaactttttaagtcttgca

SEQ ID NO: 667814 - DNA, 33 bp, Homo sapien
aagtacatatcagctagctttttaagtcttgca

SEQ ID NO: 667815 - DNA, 33 bp, Homo sapien
ccatcctgaatttacccaactgttgcctgtaag

SEQ ID NO: 667816 - DNA, 33 bp, Homo sapien
ccatcctgaatttacctaactgttgcctgtaag

SEQ ID NO: 667817 - DNA, 33 bp, Homo sapien
ggttattccatgtgaaagaggctttggcaaggg

SEQ ID NO: 667818 - DNA, 33 bp, Homo sapien
ggttattccatgtgaacgaggctttggcaaggg

SEQ ID NO: 667819 - DNA, 33 bp, Homo sapien
ctgattaaaagcaaaactgattgtatggatatc

SEQ ID NO: 667820 - DNA, 33 bp, Homo sapien
ctgattaaaagcaaaattgattgtatggatatc

SEQ ID NO: 667821 - DNA, 33 bp, Homo sapien
gtattattgcttactacgttcttatcaagctat

SEQ ID NO: 667822 - DNA, 33 bp, Homo sapien
gtattattgcttactatgttcttatcaagctat

SEQ ID NO: 667823 - DNA, 33 bp, Homo sapien
gggcttgaaagtacaaccttgaaaccactgagt

SEQ ID NO: 667824 - DNA, 33 bp, Homo sapien
gggcttgaaagtacaatcttgaaaccactgagt

SEQ ID NO: 667825 - DNA, 33 bp, Homo sapien
tagcatttggacttaacagacacaagtacatat

SEQ ID NO: 667826 - DNA, 33 bp, Homo sapien
tagcatttggacttaatagacacaagtacatat

SEQ ID NO: 667827 - DNA, 33 bp, Homo sapien
aacttcattttctatacgaatgccttttctttc

SEQ ID NO: 667828 - DNA, 33 bp, Homo sapien
aacttcattttctatatgaatgccttttctttc

SEQ ID NO: 667829 - DNA, 33 bp, Homo sapien
gaacattttgtgaaagcaatcatatagtatgta

SEQ ID NO: 667830 - DNA, 33 bp, Homo sapien
gaacattttgtgaaaggaatcatatagtatgta

SEQ ID NO: 667831 - DNA, 33 bp, Homo sapien
tataagtctcctttcactaagctgtgtttgaca

SEQ ID NO: 667832 - DNA, 33 bp, Homo sapien
tataagtctcctttcagtaagctgtgtttgaca

SEQ ID NO: 667833 - DNA, 33 bp, Homo sapien
gtgcagaagataaggagggaaacagatataact

SEQ ID NO: 667834 - DNA, 33 bp, Homo sapien
gtgcagaagataaggatggaaacagatataact

SEQ ID NO: 667835 - DNA, 33 bp, Homo sapien
aggtgcttactaagtcactctcctaaaatctgg

SEQ ID NO: 667836 - DNA, 33 bp, Homo sapien
aggtgcttactaagtctctctcctaaaatctgg

SEQ ID NO: 667837 - DNA, 33 bp, Homo sapien
tggtgatttttggtgacacttgcttgtgaggat

SEQ ID NO: 667838 - DNA, 33 bp, Homo sapien
tggtgatttttggtgatacttgcttgtgaggat

SEQ ID NO: 667839 - DNA, 33 bp, Homo sapien
aaaagcctttagagaagataggtgtagccattt

SEQ ID NO: 667840 - DNA, 33 bp, Homo sapien
aaaagcctttagagaatataggtgtagccattt

SEQ ID NO: 667841 - DNA, 33 bp, Homo sapien
cattgctccttaataccaaaagttgcttccagt

SEQ ID NO: 667842 - DNA, 33 bp, Homo sapien
cattgctccttaatactaaaagttgcttccagt

SEQ ID NO: 667843 - DNA, 33 bp, Homo sapien
caaatccaagtcttgccataattcattttctgg

SEQ ID NO: 667844 - DNA, 33 bp, Homo sapien
caaatccaagtcttgctataattcattttctgg

SEQ ID NO: 667845 - DNA, 33 bp, Homo sapien
tcttctctacctactacgctaagtcatcataaa

SEQ ID NO: 667846 - DNA, 33 bp, Homo sapien
tcttctctacctactatgctaagtcatcataaa

SEQ ID NO: 667847 - DNA, 33 bp, Homo sapien
cactgagtctttcacagacttggtatcaacagg

SEQ ID NO: 667848 - DNA, 33 bp, Homo sapien
cactgagtctttcacatacttggtatcaacagg

SEQ ID NO: 667849 - DNA, 33 bp, Homo sapien
catgctcaaggacagcaaaaatgagggataaga

SEQ ID NO: 667850 - DNA, 33 bp, Homo sapien
catgctcaaggacagcgaaaatgagggataaga

SEQ ID NO: 667851 - DNA, 33 bp, Homo sapien
tttctactgtatctaacgaggcagcttttaagg

SEQ ID NO: 667852 - DNA, 33 bp, Homo sapien
tttctactgtatctaatgaggcagcttttaagg

SEQ ID NO: 667853 - DNA, 33 bp, Homo sapien
aggctgcaatagaaatcatgagcgtggcattga

SEQ ID NO: 667854 - DNA, 33 bp, Homo sapien
aggctgcaatagaaattatgagcgtggcattga

SEQ ID NO: 667855 - DNA, 33 bp, Homo sapien
aaaacaaaactttgaaaggatccacaatgcgta

SEQ ID NO: 667856 - DNA, 33 bp, Homo sapien
aaaacaaaactttgaagggatccacaatgcgta

SEQ ID NO: 667857 - DNA, 33 bp, Homo sapien
agcatagaaaaaaatcaaaagtgtgcatagcgt

SEQ ID NO: 667858 - DNA, 33 bp, Homo sapien
agcatagaaaaaaatcgaaagtgtgcatagcgt

SEQ ID NO: 667859 - DNA, 33 bp, Homo sapien
tgtagcctcctgactaccaaagtttcatgggta

SEQ ID NO: 667860 - DNA, 33 bp, Homo sapien
tgtagcctcctgactatcaaagtttcatgggta

SEQ ID NO: 667861 - DNA, 33 bp, Homo sapien
tgagtttttgtcataactgatcattgaattttg

SEQ ID NO: 667862 - DNA, 33 bp, Homo sapien
tgagtttttgtcataagtgatcattgaattttg

SEQ ID NO: 667863 - DNA, 33 bp, Homo sapien
gctggaggtaagtcacaatgtcaggcagtggca

SEQ ID NO: 667864 - DNA, 33 bp, Homo sapien
gctggaggtaagtcacgatgtcaggcagtggca

SEQ ID NO: 667865 - DNA, 33 bp, Homo sapien
attagcagaatcacacagtacaaaatgctgcaa

SEQ ID NO: 667866 - DNA, 33 bp, Homo sapien
attagcagaatcacacggtacaaaatgctgcaa

SEQ ID NO: 667867 - DNA, 33 bp, Homo sapien
acagaaaagagtggtacaaagtcataaatacta

SEQ ID NO: 667868 - DNA, 33 bp, Homo sapien
acagaaaagagtggtataaagtcataaatacta

SEQ ID NO: 667869 - DNA, 33 bp, Homo sapien
tgacttcttcaaaacaacactaaatgacagatg

SEQ ID NO: 667870 - DNA, 33 bp, Homo sapien
tgacttcttcaaaacagcactaaatgacagatg

SEQ ID NO: 667871 - DNA, 33 bp, Homo sapien
caagtcctgccatcacaggtctctacttctatt

SEQ ID NO: 667872 - DNA, 33 bp, Homo sapien
caagtcctgccatcactggtctctacttctatt

SEQ ID NO: 667873 - DNA, 33 bp, Homo sapien
acaccaggctcacttcacagtagatctgggcct

SEQ ID NO: 667874 - DNA, 33 bp, Homo sapien
acaccaggctcacttcgcagtagatctgggcct

SEQ ID NO: 667875 - DNA, 33 bp, Homo sapien
acttctacaggccagacattaagttcaaagaca

SEQ ID NO: 667876 - DNA, 33 bp, Homo sapien
acttctacaggccagatattaagttcaaagaca

SEQ ID NO: 667877 - DNA, 33 bp, Homo sapien
gagaaaagtcatgcacccctgaatgagtgtttg

SEQ ID NO: 667878 - DNA, 33 bp, Homo sapien
gagaaaagtcatgcacgcctgaatgagtgtttg

SEQ ID NO: 667879 - DNA, 33 bp, Homo sapien
aaaaataaaatccaaaatgaaacctttattaat

SEQ ID NO: 667880 - DNA, 33 bp, Homo sapien
aaaaataaaatccaaattgaaacctttattaat

SEQ ID NO: 667881 - DNA, 33 bp, Homo sapien
atttattattttttgccgagtccttgattaata

SEQ ID NO: 667882 - DNA, 33 bp, Homo sapien
atttattattttttgctgagtccttgattaata

SEQ ID NO: 667883 - DNA, 33 bp, Homo sapien
caatgaaatccaagaaaagatggaaatcaacac

SEQ ID NO: 667884 - DNA, 33 bp, Homo sapien
caatgaaatccaagaagagatggaaatcaacac

SEQ ID NO: 667885 - DNA, 33 bp, Homo sapien
tgaaatccttgagataagtaagctggtcatgcc

SEQ ID NO: 667886 - DNA, 33 bp, Homo sapien
tgaaatccttgagataggtaagctggtcatgcc

SEQ ID NO: 667887 - DNA, 33 bp, Homo sapien
ctaatctacaaagtaacggtcttcaggctttga

SEQ ID NO: 667888 - DNA, 33 bp, Homo sapien
ctaatctacaaagtaatggtcttcaggctttga

SEQ ID NO: 667889 - DNA, 33 bp, Homo sapien
tgtggagaattagagagctgtaaaaacataaaa

SEQ ID NO: 667890 - DNA, 33 bp, Homo sapien
tgtggagaattagagatctgtaaaaacataaaa

SEQ ID NO: 667891 - DNA, 33 bp, Homo sapien
tttatctgtaaatacaaaataaccagtatcatg

SEQ ID NO: 667892 - DNA, 33 bp, Homo sapien
tttatctgtaaatacacaataaccagtatcatg

SEQ ID NO: 667893 - DNA, 33 bp, Homo sapien
aacattttttgtgtccacctttcaattcatatg

SEQ ID NO: 667894 - DNA, 33 bp, Homo sapien
aacattttttgtgtccgcctttcaattcatatg

SEQ ID NO: 667895 - DNA, 33 bp, Homo sapien
agattgctgagaaacaaaaggataatgatgaca

SEQ ID NO: 667896 - DNA, 33 bp, Homo sapien
agattgctgagaaacagaaggataatgatgaca

SEQ ID NO: 667897 - DNA, 33 bp, Homo sapien
aatagatattgtttccacatgaaaagtcttcca

SEQ ID NO: 667898 - DNA, 33 bp, Homo sapien
aatagatattgtttccgcatgaaaagtcttcca

SEQ ID NO: 667899 - DNA, 33 bp, Homo sapien
gtggtgattggattacaatggtagatatgtaaa

SEQ ID NO: 667900 - DNA, 33 bp, Homo sapien
gtggtgattggattacgatggtagatatgtaaa

SEQ ID NO: 667901 - DNA, 33 bp, Homo sapien
taagtcagaaaaactcagaaaactactgaaaat

SEQ ID NO: 667902 - DNA, 33 bp, Homo sapien
taagtcagaaaaactcggaaaactactgaaaat

SEQ ID NO: 667903 - DNA, 33 bp, Homo sapien
atagtctgaagtgtcactgaagagttttaggca

SEQ ID NO: 667904 - DNA, 33 bp, Homo sapien
atagtctgaagtgtcattgaagagttttaggca

SEQ ID NO: 667905 - DNA, 33 bp, Homo sapien
ctataggggtgaatcacggtttgtttggttttt

SEQ ID NO: 667906 - DNA, 33 bp, Homo sapien
ctataggggtgaatcatggtttgtttggttttt

SEQ ID NO: 667907 - DNA, 33 bp, Homo sapien
ctcaagcaataccacaatgaattaacaaatgaa

SEQ ID NO: 667908 - DNA, 33 bp, Homo sapien
ctcaagcaataccacactgaattaacaaatgaa

SEQ ID NO: 667909 - DNA, 33 bp, Homo sapien
taggagtatgatgcaacgaaagccaagggagag

SEQ ID NO: 667910 - DNA, 33 bp, Homo sapien
taggagtatgatgcaatgaaagccaagggagag

SEQ ID NO: 667911 - DNA, 33 bp, Homo sapien
gagacaaaataatagcaaagagtaaattgtgat

SEQ ID NO: 667912 - DNA, 33 bp, Homo sapien
gagacaaaataatagcgaagagtaaattgtgat

SEQ ID NO: 667913 - DNA, 33 bp, Homo sapien
tcactagcagcccaggaactctgaaacatgagc

SEQ ID NO: 667914 - DNA, 33 bp, Homo sapien
tcactagcagcccaggcactctgaaacatgagc

SEQ ID NO: 667915 - DNA, 33 bp, Homo sapien
tatttccttagggtgaatatgttgaagaggcag

SEQ ID NO: 667916 - DNA, 33 bp, Homo sapien
tatttccttagggtgattatgttgaagaggcag

SEQ ID NO: 667917 - DNA, 33 bp, Homo sapien
tggtaattgctatttaggttggcttctgacaca

SEQ ID NO: 667918 - DNA, 33 bp, Homo sapien
tggtaattgctatttatgttggcttctgacaca

SEQ ID NO: 667919 - DNA, 33 bp, Homo sapien
ttcttctggaatatcaatgaatcttgaatgtcc

SEQ ID NO: 667920 - DNA, 33 bp, Homo sapien
ttcttctggaatatcagtgaatcttgaatgtcc

SEQ ID NO: 667921 - DNA, 33 bp, Homo sapien
tcttggcactgctacacgagtacactttcaaca

SEQ ID NO: 667922 - DNA, 33 bp, Homo sapien
tcttggcactgctacatgagtacactttcaaca

SEQ ID NO: 667923 - DNA, 33 bp, Homo sapien
ggcttaagccttgagaactttccactgaagtta

SEQ ID NO: 667924 - DNA, 33 bp, Homo sapien
ggcttaagccttgagatctttccactgaagtta

SEQ ID NO: 667925 - DNA, 33 bp, Homo sapien
ttgtgatgctcccttacgagtgagagaagccag

SEQ ID NO: 667926 - DNA, 33 bp, Homo sapien
ttgtgatgctcccttatgagtgagagaagccag

SEQ ID NO: 667927 - DNA, 33 bp, Homo sapien
aaccccagggattttgcaatatcaaaacaagcc

SEQ ID NO: 667928 - DNA, 33 bp, Homo sapien
aaccccagggattttgtaatatcaaaacaagcc

SEQ ID NO: 667929 - DNA, 33 bp, Homo sapien
gagattggtgctgatactaatgactgtggtaat

SEQ ID NO: 667930 - DNA, 33 bp, Homo sapien
gagattggtgctgatattaatgactgtggtaat

SEQ ID NO: 667931 - DNA, 33 bp, Homo sapien
gacattttaaaattgcacaatatcagaaaatta

SEQ ID NO: 667932 - DNA, 33 bp, Homo sapien
gacattttaaaattgcccaatatcagaaaatta

SEQ ID NO: 667933 - DNA, 33 bp, Homo sapien
ctgctgttcacaataaagataagaaatgggctg

SEQ ID NO: 667934 - DNA, 33 bp, Homo sapien
ctgctgttcacaataatgataagaaatgggctg

SEQ ID NO: 667935 - DNA, 33 bp, Homo sapien
gtgattctgcttagacaaatattcaacacttat

SEQ ID NO: 667936 - DNA, 33 bp, Homo sapien
gtgattctgcttagacgaatattcaacacttat

SEQ ID NO: 667937 - DNA, 33 bp, Homo sapien
ttttttatcagcttctaaatgcagttagttttg

SEQ ID NO: 667938 - DNA, 33 bp, Homo sapien
ttttttatcagcttctgaatgcagttagttttg

SEQ ID NO: 667939 - DNA, 33 bp, Homo sapien
tctcccattccctgcacctacagtagaataatc

SEQ ID NO: 667940 - DNA, 33 bp, Homo sapien
tctcccattccctgcagctacagtagaataatc

SEQ ID NO: 667941 - DNA, 33 bp, Homo sapien
atgacagattaatctcaccattaaaaattaaag

SEQ ID NO: 667942 - DNA, 33 bp, Homo sapien
atgacagattaatctcgccattaaaaattaaag

SEQ ID NO: 667943 - DNA, 33 bp, Homo sapien
tgccagcaataacagaccctggctgacatcaat

SEQ ID NO: 667944 - DNA, 33 bp, Homo sapien
tgccagcaataacagatcctggctgacatcaat

SEQ ID NO: 667945 - DNA, 33 bp, Homo sapien
gattaaacttattcccaaaagtcaaatctgtat

SEQ ID NO: 667946 - DNA, 33 bp, Homo sapien
gattaaacttattcccgaaagtcaaatctgtat

SEQ ID NO: 667947 - DNA, 33 bp, Homo sapien
acattactcctaactacagccttgcataagcct

SEQ ID NO: 667948 - DNA, 33 bp, Homo sapien
acattactcctaactagagccttgcataagcct

SEQ ID NO: 667949 - DNA, 33 bp, Homo sapien
atgggaataagtataacagaggagatacaggat

SEQ ID NO: 667950 - DNA, 33 bp, Homo sapien
atgggaataagtataagagaggagatacaggat

SEQ ID NO: 667951 - DNA, 33 bp, Homo sapien
ccaagatctccacttacgaagtcatgggggttc

SEQ ID NO: 667952 - DNA, 33 bp, Homo sapien
ccaagatctccacttatgaagtcatgggggttc

SEQ ID NO: 667953 - DNA, 33 bp, Homo sapien
tctctgccttttagcaaaaataagcaaatagaa

SEQ ID NO: 667954 - DNA, 33 bp, Homo sapien
tctctgccttttagcacaaataagcaaatagaa

SEQ ID NO: 667955 - DNA, 33 bp, Homo sapien
gcaggttatatcaaggcccgtactacatactga

SEQ ID NO: 667956 - DNA, 33 bp, Homo sapien
gcaggttatatcaaggtccgtactacatactga

SEQ ID NO: 667957 - DNA, 33 bp, Homo sapien
gattaacttctagtcacctcccagatctcagcc

SEQ ID NO: 667958 - DNA, 33 bp, Homo sapien
gattaacttctagtcatctcccagatctcagcc

SEQ ID NO: 667959 - DNA, 33 bp, Homo sapien
tttgctgaattttccacgtagcttgtgaaagtt

SEQ ID NO: 667960 - DNA, 33 bp, Homo sapien
tttgctgaattttccatgtagcttgtgaaagtt

SEQ ID NO: 667961 - DNA, 33 bp, Homo sapien
ttttatttcatttacacggaaacacctacaaag

SEQ ID NO: 667962 - DNA, 33 bp, Homo sapien
ttttatttcatttacatggaaacacctacaaag

SEQ ID NO: 667963 - DNA, 33 bp, Homo sapien
gtcatttttgggctcaaataacactggtagctg

SEQ ID NO: 667964 - DNA, 33 bp, Homo sapien
gtcatttttgggctcagataacactggtagctg

SEQ ID NO: 667965 - DNA, 33 bp, Homo sapien
aaaataaatatacctacaggggtttcatgtatt

SEQ ID NO: 667966 - DNA, 33 bp, Homo sapien
aaaataaatatacctagaggggtttcatgtatt

SEQ ID NO: 667967 - DNA, 33 bp, Homo sapien
atgttttctttcctgccctatgtgattaagaaa

SEQ ID NO: 667968 - DNA, 33 bp, Homo sapien
atgttttctttcctgctctatgtgattaagaaa

SEQ ID NO: 667969 - DNA, 33 bp, Homo sapien
tatttcagctaaaaagcagattgggctagaaat

SEQ ID NO: 667970 - DNA, 33 bp, Homo sapien
tatttcagctaaaaagtagattgggctagaaat

SEQ ID NO: 667971 - DNA, 33 bp, Homo sapien
tcaaatattaacaaacactatcacatggagaga

SEQ ID NO: 667972 - DNA, 33 bp, Homo sapien
tcaaatattaacaaacgctatcacatggagaga

SEQ ID NO: 667973 - DNA, 33 bp, Homo sapien
aattttgtttgaggcaagacttcagcaaatata

SEQ ID NO: 667974 - DNA, 33 bp, Homo sapien
aattttgtttgaggcaggacttcagcaaatata

SEQ ID NO: 667975 - DNA, 33 bp, Homo sapien
tggtttataagatcagaatttgaaaaaaggaga

SEQ ID NO: 667976 - DNA, 33 bp, Homo sapien
tggtttataagatcaggatttgaaaaaaggaga

SEQ ID NO: 667977 - DNA, 33 bp, Homo sapien
atactaacactttgagaacattaatgaattact

SEQ ID NO: 667978 - DNA, 33 bp, Homo sapien
atactaacactttgaggacattaatgaattact

SEQ ID NO: 667979 - DNA, 33 bp, Homo sapien
gcaaaaagataatgaaacaatccagatttaaaa

SEQ ID NO: 667980 - DNA, 33 bp, Homo sapien
gcaaaaagataatgaaccaatccagatttaaaa

SEQ ID NO: 667981 - DNA, 33 bp, Homo sapien
tccaagatcaagatataagttcacttggtttct

SEQ ID NO: 667982 - DNA, 33 bp, Homo sapien
tccaagatcaagatatcagttcacttggtttct

SEQ ID NO: 667983 - DNA, 33 bp, Homo sapien
cttatcttacacaaagaattttggtttattaat

SEQ ID NO: 667984 - DNA, 33 bp, Homo sapien
cttatcttacacaaaggattttggtttattaat

SEQ ID NO: 667985 - DNA, 33 bp, Homo sapien
tatattataaaccccaaaatgcagtcttgtagt

SEQ ID NO: 667986 - DNA, 33 bp, Homo sapien
tatattataaaccccacaatgcagtcttgtagt

SEQ ID NO: 667987 - DNA, 33 bp, Homo sapien
acttcacacacaatctaagaacctacatttacc

SEQ ID NO: 667988 - DNA, 33 bp, Homo sapien
acttcacacacaatctgagaacctacatttacc

SEQ ID NO: 667989 - DNA, 33 bp, Homo sapien
aagttgtcctgtttacagaatttaacataagga

SEQ ID NO: 667990 - DNA, 33 bp, Homo sapien
aagttgtcctgtttacggaatttaacataagga

SEQ ID NO: 667991 - DNA, 33 bp, Homo sapien
cactagttggaacaagaaagcccaagttctacc

SEQ ID NO: 667992 - DNA, 33 bp, Homo sapien
cactagttggaacaaggaagcccaagttctacc

SEQ ID NO: 667993 - DNA, 33 bp, Homo sapien
gttctattttaaagaccaaacacctgtgttggt

SEQ ID NO: 667994 - DNA, 33 bp, Homo sapien
gttctattttaaagactaaacacctgtgttggt

SEQ ID NO: 667995 - DNA, 33 bp, Homo sapien
tacaataagacaaagaggtgattttcagatcct

SEQ ID NO: 667996 - DNA, 33 bp, Homo sapien
tacaataagacaaagatgtgattttcagatcct

SEQ ID NO: 667997 - DNA, 33 bp, Homo sapien
tagtatctttctccccaaccaagttaccaagaa

SEQ ID NO: 667998 - DNA, 33 bp, Homo sapien
tagtatctttctccccgaccaagttaccaagaa

SEQ ID NO: 667999 - DNA, 33 bp, Homo sapien
cattcttgattttgctcaacattcttgggttgt

SEQ ID NO: 668000 - DNA, 33 bp, Homo sapien
cattcttgattttgcttaacattcttgggttgt

SEQ ID NO: 668001 - DNA, 33 bp, Homo sapien
cctgccttgaagtttaggtccagatgtaacaga

SEQ ID NO: 668002 - DNA, 33 bp, Homo sapien
cctgccttgaagtttatgtccagatgtaacaga

SEQ ID NO: 668003 - DNA, 33 bp, Homo sapien
agttctagattttctcaacaatcaaaaacatgt

SEQ ID NO: 668004 - DNA, 33 bp, Homo sapien
agttctagattttctcgacaatcaaaaacatgt

SEQ ID NO: 668005 - DNA, 33 bp, Homo sapien
tttgatattaatcatggaatttcttcctcctaa

SEQ ID NO: 668006 - DNA, 33 bp, Homo sapien
tttgatattaatcatgtaatttcttcctcctaa

SEQ ID NO: 668007 - DNA, 33 bp, Homo sapien
aggttctcttcacccactctaatgtctttgcct

SEQ ID NO: 668008 - DNA, 33 bp, Homo sapien
aggttctcttcacccattctaatgtctttgcct

SEQ ID NO: 668009 - DNA, 33 bp, Homo sapien
acagaagaacacactgaattaggtcattaacaa

SEQ ID NO: 668010 - DNA, 33 bp, Homo sapien
acagaagaacacactgcattaggtcattaacaa

SEQ ID NO: 668011 - DNA, 33 bp, Homo sapien
tttatagatgaagccactgaagatcagaaaatt

SEQ ID NO: 668012 - DNA, 33 bp, Homo sapien
tttatagatgaagccattgaagatcagaaaatt

SEQ ID NO: 668013 - DNA, 33 bp, Homo sapien
aaactcatttgtaccactgaaggaattgttaac

SEQ ID NO: 668014 - DNA, 33 bp, Homo sapien
aaactcatttgtaccattgaaggaattgttaac

SEQ ID NO: 668015 - DNA, 33 bp, Homo sapien
tcatattaggactacactaaaaacttctgcaaa

SEQ ID NO: 668016 - DNA, 33 bp, Homo sapien
tcatattaggactacattaaaaacttctgcaaa

SEQ ID NO: 668017 - DNA, 33 bp, Homo sapien
ggtaaaaagcaaaaaagaatggacaggaaactt

SEQ ID NO: 668018 - DNA, 33 bp, Homo sapien
ggtaaaaagcaaaaaataatggacaggaaactt

SEQ ID NO: 668019 - DNA, 33 bp, Homo sapien
tctataggccaagcaacagttccaaagaacact

SEQ ID NO: 668020 - DNA, 33 bp, Homo sapien
tctataggccaagcaatagttccaaagaacact

SEQ ID NO: 668021 - DNA, 33 bp, Homo sapien
acacaatattgagcaactattgtagccaacatc

SEQ ID NO: 668022 - DNA, 33 bp, Homo sapien
acacaatattgagcaattattgtagccaacatc

SEQ ID NO: 668023 - DNA, 33 bp, Homo sapien
ctgtgataacctctgaaaaaggaaaactagcta

SEQ ID NO: 668024 - DNA, 33 bp, Homo sapien
ctgtgataacctctgagaaaggaaaactagcta

SEQ ID NO: 668025 - DNA, 33 bp, Homo sapien
agtgatttctttaaacaaacgctagcagttctt

SEQ ID NO: 668026 - DNA, 33 bp, Homo sapien
agtgatttctttaaacgaacgctagcagttctt

SEQ ID NO: 668027 - DNA, 33 bp, Homo sapien
tttaatcaaagtgctcactactacatttcacca

SEQ ID NO: 668028 - DNA, 33 bp, Homo sapien
tttaatcaaagtgctcgctactacatttcacca

SEQ ID NO: 668029 - DNA, 33 bp, Homo sapien
attctgtgtgaaaatcaaggatggaggatgcat

SEQ ID NO: 668030 - DNA, 33 bp, Homo sapien
attctgtgtgaaaatccaggatggaggatgcat

SEQ ID NO: 668031 - DNA, 33 bp, Homo sapien
ggctcagcctttctcaggaactaatggcagtat

SEQ ID NO: 668032 - DNA, 33 bp, Homo sapien
ggctcagcctttctcatgaactaatggcagtat

SEQ ID NO: 668033 - DNA, 33 bp, Homo sapien
acagtctactgaggacagggaacactaatcaaa

SEQ ID NO: 668034 - DNA, 33 bp, Homo sapien
acagtctactgaggaccgggaacactaatcaaa

SEQ ID NO: 668035 - DNA, 33 bp, Homo sapien
taatcctgcacttggcaagcactgtcattccag

SEQ ID NO: 668036 - DNA, 33 bp, Homo sapien
taatcctgcacttggcgagcactgtcattccag

SEQ ID NO: 668037 - DNA, 33 bp, Homo sapien
ttaaaaaaccattgcaccataatatcgctcatt

SEQ ID NO: 668038 - DNA, 33 bp, Homo sapien
ttaaaaaaccattgcatcataatatcgctcatt

SEQ ID NO: 668039 - DNA, 33 bp, Homo sapien
tctgagcttatcagaacgtgtgaagttaacaca

SEQ ID NO: 668040 - DNA, 33 bp, Homo sapien
tctgagcttatcagaatgtgtgaagttaacaca

SEQ ID NO: 668041 - DNA, 33 bp, Homo sapien
ttttacggaactctaaactccatgagggagatg

SEQ ID NO: 668042 - DNA, 33 bp, Homo sapien
ttttacggaactctaagctccatgagggagatg

SEQ ID NO: 668043 - DNA, 33 bp, Homo sapien
gaccaaggagagaagaaagaggtgctacatact

SEQ ID NO: 668044 - DNA, 33 bp, Homo sapien
gaccaaggagagaagagagaggtgctacatact

SEQ ID NO: 668045 - DNA, 33 bp, Homo sapien
ggatgatgaataaactcagttgttagaagatga

SEQ ID NO: 668046 - DNA, 33 bp, Homo sapien
ggatgatgaataaactgagttgttagaagatga

SEQ ID NO: 668047 - DNA, 33 bp, Homo sapien
gtacctcactggcacaagtatcagtaaaaatcc

SEQ ID NO: 668048 - DNA, 33 bp, Homo sapien
gtacctcactggcacaggtatcagtaaaaatcc

SEQ ID NO: 668049 - DNA, 33 bp, Homo sapien
aatagaattaccaaaaaagtgctatatgcccaa

SEQ ID NO: 668050 - DNA, 33 bp, Homo sapien
aatagaattaccaaaagagtgctatatgcccaa

SEQ ID NO: 668051 - DNA, 33 bp, Homo sapien
aggaatttgagtgtcaactaaggataagatgat

SEQ ID NO: 668052 - DNA, 33 bp, Homo sapien
aggaatttgagtgtcagctaaggataagatgat

SEQ ID NO: 668053 - DNA, 33 bp, Homo sapien
gaaaagattggaaaggacaatctaagaattggg

SEQ ID NO: 668054 - DNA, 33 bp, Homo sapien
gaaaagattggaaagggcaatctaagaattggg

SEQ ID NO: 668055 - DNA, 33 bp, Homo sapien
acagtgataggagttaaagaaaaactatgagaa

SEQ ID NO: 668056 - DNA, 33 bp, Homo sapien
acagtgataggagttacagaaaaactatgagaa

SEQ ID NO: 668057 - DNA, 33 bp, Homo sapien
acaactatatgttaatcagtttatccatgtttt

SEQ ID NO: 668058 - DNA, 33 bp, Homo sapien
acaactatatgttaatgagtttatccatgtttt

SEQ ID NO: 668059 - DNA, 33 bp, Homo sapien
tttcaccatattagcgaagatagtctcgatctt

SEQ ID NO: 668060 - DNA, 33 bp, Homo sapien
tttcaccatattagcgtagatagtctcgatctt

SEQ ID NO: 668061 - DNA, 33 bp, Homo sapien
gaagaaagccacaaaaacctgagaaaggaagtt

SEQ ID NO: 668062 - DNA, 33 bp, Homo sapien
gaagaaagccacaaaagcctgagaaaggaagtt

SEQ ID NO: 668063 - DNA, 33 bp, Homo sapien
ttcctgaacacaatggaactccatgaaaaggaa

SEQ ID NO: 668064 - DNA, 33 bp, Homo sapien
ttcctgaacacaatgggactccatgaaaaggaa

SEQ ID NO: 668065 - DNA, 33 bp, Homo sapien
gagatgctgtttgggcactagttcttcatcaga

SEQ ID NO: 668066 - DNA, 33 bp, Homo sapien
gagatgctgtttgggcgctagttcttcatcaga

SEQ ID NO: 668067 - DNA, 33 bp, Homo sapien
agattttatgacatgccctcgcttccttccata

SEQ ID NO: 668068 - DNA, 33 bp, Homo sapien
agattttatgacatgctctcgcttccttccata

SEQ ID NO: 668069 - DNA, 33 bp, Homo sapien
ctgtttaactgtaccaacttcttccctctgact

SEQ ID NO: 668070 - DNA, 33 bp, Homo sapien
ctgtttaactgtaccagcttcttccctctgact

SEQ ID NO: 668071 - DNA, 33 bp, Homo sapien
ttagagtttctaaatacgggagaagggttaaca

SEQ ID NO: 668072 - DNA, 33 bp, Homo sapien
ttagagtttctaaatatgggagaagggttaaca

SEQ ID NO: 668073 - DNA, 33 bp, Homo sapien
tattgtgccacaactacctttaaaaataaactc

SEQ ID NO: 668074 - DNA, 33 bp, Homo sapien
tattgtgccacaactatctttaaaaataaactc

SEQ ID NO: 668075 - DNA, 33 bp, Homo sapien
caggtctcaggaaaaagaaatgtgatcaataaa

SEQ ID NO: 668076 - DNA, 33 bp, Homo sapien
caggtctcaggaaaaataaatgtgatcaataaa

SEQ ID NO: 668077 - DNA, 33 bp, Homo sapien
gaagtctgacttaaatcagggtctggatgtagt

SEQ ID NO: 668078 - DNA, 33 bp, Homo sapien
gaagtctgacttaaatgagggtctggatgtagt

SEQ ID NO: 668079 - DNA, 33 bp, Homo sapien
ttggtgctcagctttaacttctctatctctagt

SEQ ID NO: 668080 - DNA, 33 bp, Homo sapien
ttggtgctcagctttatcttctctatctctagt

SEQ ID NO: 668081 - DNA, 33 bp, Homo sapien
atctcattgacatggcacaaaatactgatcctc

SEQ ID NO: 668082 - DNA, 33 bp, Homo sapien
atctcattgacatggcgcaaaatactgatcctc

SEQ ID NO: 668083 - DNA, 33 bp, Homo sapien
aaggctctgcgcaagaagcaggtgcgaccggct

SEQ ID NO: 668084 - DNA, 33 bp, Homo sapien
aaggctctgcgcaagaggcaggtgcgaccggct

SEQ ID NO: 668085 - DNA, 33 bp, Homo sapien
tttcacccaagccaaaaaggtttctgaaatcac

SEQ ID NO: 668086 - DNA, 33 bp, Homo sapien
tttcacccaagccaaagaggtttctgaaatcac

SEQ ID NO: 668087 - DNA, 33 bp, Homo sapien
catatactttttataaacattgcaaagaaaaat

SEQ ID NO: 668088 - DNA, 33 bp, Homo sapien
catatactttttataagcattgcaaagaaaaat

SEQ ID NO: 668089 - DNA, 33 bp, Homo sapien
aaaaaacatacaggctaaaagcagtatatacag

SEQ ID NO: 668090 - DNA, 33 bp, Homo sapien
aaaaaacatacaggctgaaagcagtatatacag

SEQ ID NO: 668091 - DNA, 33 bp, Homo sapien
tctccaacagtagaaagagcctacaatatgcag

SEQ ID NO: 668092 - DNA, 33 bp, Homo sapien
tctccaacagtagaaatagcctacaatatgcag

SEQ ID NO: 668093 - DNA, 33 bp, Homo sapien
taaaaatcttgtcaaaactatcagtaaaaggaa

SEQ ID NO: 668094 - DNA, 33 bp, Homo sapien
taaaaatcttgtcaaagctatcagtaaaaggaa

SEQ ID NO: 668095 - DNA, 33 bp, Homo sapien
tgtaagtgccttacacacaatgaggtaataaat

SEQ ID NO: 668096 - DNA, 33 bp, Homo sapien
tgtaagtgccttacacgcaatgaggtaataaat

SEQ ID NO: 668097 - DNA, 33 bp, Homo sapien
tagaaacaaagcagtcaatttttagcaacacag

SEQ ID NO: 668098 - DNA, 33 bp, Homo sapien
tagaaacaaagcagtctatttttagcaacacag

SEQ ID NO: 668099 - DNA, 33 bp, Homo sapien
cactctctaaccagcacggcctttctttccaac

SEQ ID NO: 668100 - DNA, 33 bp, Homo sapien
cactctctaaccagcatggcctttctttccaac

SEQ ID NO: 668101 - DNA, 33 bp, Homo sapien
ttaccatcaactacaaactctctgtaatcccag

SEQ ID NO: 668102 - DNA, 33 bp, Homo sapien
ttaccatcaactacaacctctctgtaatcccag

SEQ ID NO: 668103 - DNA, 33 bp, Homo sapien
tagagctgagcttaggaattagtgataaaacta

SEQ ID NO: 668104 - DNA, 33 bp, Homo sapien
tagagctgagcttagggattagtgataaaacta

SEQ ID NO: 668105 - DNA, 33 bp, Homo sapien
ctctgtgaaaaatacaaaagtctaccctttata

SEQ ID NO: 668106 - DNA, 33 bp, Homo sapien
ctctgtgaaaaatacagaagtctaccctttata

SEQ ID NO: 668107 - DNA, 33 bp, Homo sapien
gagctagaagcataatcaatgtggttggtgctg

SEQ ID NO: 668108 - DNA, 33 bp, Homo sapien
gagctagaagcataatgaatgtggttggtgctg

SEQ ID NO: 668109 - DNA, 33 bp, Homo sapien
taggctttgaaatcacagagacagggctgcagg

SEQ ID NO: 668110 - DNA, 33 bp, Homo sapien
taggctttgaaatcactgagacagggctgcagg

SEQ ID NO: 668111 - DNA, 33 bp, Homo sapien
tctaaagcaggaactaagttgttataagatgga

SEQ ID NO: 668112 - DNA, 33 bp, Homo sapien
tctaaagcaggaactaggttgttataagatgga

SEQ ID NO: 668113 - DNA, 33 bp, Homo sapien
tactgagcccctgttacgtgttgggcaatgttg

SEQ ID NO: 668114 - DNA, 33 bp, Homo sapien
tactgagcccctgttatgtgttgggcaatgttg

SEQ ID NO: 668115 - DNA, 33 bp, Homo sapien
atgtagaaggtttaaacatgatcaactgttgcc

SEQ ID NO: 668116 - DNA, 33 bp, Homo sapien
atgtagaaggtttaaatatgatcaactgttgcc

SEQ ID NO: 668117 - DNA, 33 bp, Homo sapien
cttctcatgagagagcagaacaacctggcaagc

SEQ ID NO: 668118 - DNA, 33 bp, Homo sapien
cttctcatgagagagcggaacaacctggcaagc

SEQ ID NO: 668119 - DNA, 33 bp, Homo sapien
atgagctgataaaaaaatgacgtgaggctgctt

SEQ ID NO: 668120 - DNA, 33 bp, Homo sapien
atgagctgataaaaaactgacgtgaggctgctt

SEQ ID NO: 668121 - DNA, 33 bp, Homo sapien
aattaattaatttgggcaaaagctctagataaa

SEQ ID NO: 668122 - DNA, 33 bp, Homo sapien
aattaattaatttgggtaaaagctctagataaa

SEQ ID NO: 668123 - DNA, 33 bp, Homo sapien
aaagcagttattgttacctccaatttatgtctt

SEQ ID NO: 668124 - DNA, 33 bp, Homo sapien
aaagcagttattgttatctccaatttatgtctt

SEQ ID NO: 668125 - DNA, 33 bp, Homo sapien
ggcagagacactgcaaaaagtataggatatgga

SEQ ID NO: 668126 - DNA, 33 bp, Homo sapien
ggcagagacactgcaagaagtataggatatgga

SEQ ID NO: 668127 - DNA, 33 bp, Homo sapien
catccatgctccaggaatagctctgtaaaccaa

SEQ ID NO: 668128 - DNA, 33 bp, Homo sapien
catccatgctccaggagtagctctgtaaaccaa

SEQ ID NO: 668129 - DNA, 33 bp, Homo sapien
tatagtcaaatacacaatcaaaatatactctaa

SEQ ID NO: 668130 - DNA, 33 bp, Homo sapien
tatagtcaaatacacagtcaaaatatactctaa

SEQ ID NO: 668131 - DNA, 33 bp, Homo sapien
cctcaaaggccttcaaactacaaattaaggttt

SEQ ID NO: 668132 - DNA, 33 bp, Homo sapien
cctcaaaggccttcaagctacaaattaaggttt

SEQ ID NO: 668133 - DNA, 33 bp, Homo sapien
cgcacagtggccacaactacctgtgggcagtga

SEQ ID NO: 668134 - DNA, 33 bp, Homo sapien
cgcacagtggccacaattacctgtgggcagtga

SEQ ID NO: 668135 - DNA, 33 bp, Homo sapien
atgatgtttgacgaaagtattcttgtcttccat

SEQ ID NO: 668136 - DNA, 33 bp, Homo sapien
atgatgtttgacgaaattattcttgtcttccat

SEQ ID NO: 668137 - DNA, 33 bp, Homo sapien
atgtcttcctattccaacattctatggctattt

SEQ ID NO: 668138 - DNA, 33 bp, Homo sapien
atgtcttcctattccagcattctatggctattt

SEQ ID NO: 668139 - DNA, 33 bp, Homo sapien
gttcataaaggtctataaaactcataaacatgg

SEQ ID NO: 668140 - DNA, 33 bp, Homo sapien
gttcataaaggtctatgaaactcataaacatgg

SEQ ID NO: 668141 - DNA, 33 bp, Homo sapien
tgttgtttacaaatgccagtcttagattggtgc

SEQ ID NO: 668142 - DNA, 33 bp, Homo sapien
tgttgtttacaaatgctagtcttagattggtgc

SEQ ID NO: 668143 - DNA, 33 bp, Homo sapien
gcattgctctactggagactctctgcagccacc

SEQ ID NO: 668144 - DNA, 33 bp, Homo sapien
gcattgctctactggatactctctgcagccacc

SEQ ID NO: 668145 - DNA, 33 bp, Homo sapien
ataatatgggtccaaacggcatatatatatatt

SEQ ID NO: 668146 - DNA, 33 bp, Homo sapien
ataatatgggtccaaagggcatatatatatatt

SEQ ID NO: 668147 - DNA, 33 bp, Homo sapien
ctatgattttctactaccctctaccccatgtat

SEQ ID NO: 668148 - DNA, 33 bp, Homo sapien
ctatgattttctactatcctctaccccatgtat

SEQ ID NO: 668149 - DNA, 33 bp, Homo sapien
ttagaccaggtgtccaaataaatcccaagcaaa

SEQ ID NO: 668150 - DNA, 33 bp, Homo sapien
ttagaccaggtgtccacataaatcccaagcaaa

SEQ ID NO: 668151 - DNA, 33 bp, Homo sapien
acactggttttgagcaaaatatctgctggattc

SEQ ID NO: 668152 - DNA, 33 bp, Homo sapien
acactggttttgagcataatatctgctggattc

SEQ ID NO: 668153 - DNA, 33 bp, Homo sapien
ggaacggatgagatcacgtgaatagcaacaggt

SEQ ID NO: 668154 - DNA, 33 bp, Homo sapien
ggaacggatgagatcatgtgaatagcaacaggt

SEQ ID NO: 668155 - DNA, 33 bp, Homo sapien
gaaagctaattcactaaagggtcaaatgtcaaa

SEQ ID NO: 668156 - DNA, 33 bp, Homo sapien
gaaagctaattcactacagggtcaaatgtcaaa

SEQ ID NO: 668157 - DNA, 33 bp, Homo sapien
aacaaaattgttggcacactagaaaatttatta

SEQ ID NO: 668158 - DNA, 33 bp, Homo sapien
aacaaaattgttggcatactagaaaatttatta

SEQ ID NO: 668159 - DNA, 33 bp, Homo sapien
cttggtctgttttcaacgcggactgaaattagt

SEQ ID NO: 668160 - DNA, 33 bp, Homo sapien
cttggtctgttttcaatgcggactgaaattagt

SEQ ID NO: 668161 - DNA, 33 bp, Homo sapien
gtttgtaattctttcagacattgcacagcccca

SEQ ID NO: 668162 - DNA, 33 bp, Homo sapien
gtttgtaattctttcatacattgcacagcccca

SEQ ID NO: 668163 - DNA, 33 bp, Homo sapien
tatgaaagcccgctctaaattttccatctccaa

SEQ ID NO: 668164 - DNA, 33 bp, Homo sapien
tatgaaagcccgctctgaattttccatctccaa

SEQ ID NO: 668165 - DNA, 33 bp, Homo sapien
tctgacactctgggtaagatgttgattaggctt

SEQ ID NO: 668166 - DNA, 33 bp, Homo sapien
tctgacactctgggtaggatgttgattaggctt

SEQ ID NO: 668167 - DNA, 33 bp, Homo sapien
aatgtgcagtcttttagccctagctagcccaac

SEQ ID NO: 668168 - DNA, 33 bp, Homo sapien
aatgtgcagtcttttatccctagctagcccaac

SEQ ID NO: 668169 - DNA, 33 bp, Homo sapien
aacaattattatgcgacggtaattttctatttc

SEQ ID NO: 668170 - DNA, 33 bp, Homo sapien
aacaattattatgcgatggtaattttctatttc

SEQ ID NO: 668171 - DNA, 33 bp, Homo sapien
acctacagagtgctaaattacagaaattttaca

SEQ ID NO: 668172 - DNA, 33 bp, Homo sapien
acctacagagtgctaagttacagaaattttaca

SEQ ID NO: 668173 - DNA, 33 bp, Homo sapien
aatttcccatttgagacacctttaaaacaatcc

SEQ ID NO: 668174 - DNA, 33 bp, Homo sapien
aatttcccatttgagagacctttaaaacaatcc

SEQ ID NO: 668175 - DNA, 33 bp, Homo sapien
ggtgataatatgaaaaatgattagactgtaaga

SEQ ID NO: 668176 - DNA, 33 bp, Homo sapien
ggtgataatatgaaaagtgattagactgtaaga

SEQ ID NO: 668177 - DNA, 33 bp, Homo sapien
taaaagttgctctggcagatttagtgaatgaat

SEQ ID NO: 668178 - DNA, 33 bp, Homo sapien
taaaagttgctctggccgatttagtgaatgaat

SEQ ID NO: 668179 - DNA, 33 bp, Homo sapien
ttttcccaattttgcacacaccctgtagaatat

SEQ ID NO: 668180 - DNA, 33 bp, Homo sapien
ttttcccaattttgcagacaccctgtagaatat

SEQ ID NO: 668181 - DNA, 33 bp, Homo sapien
aaatgcaagtcaataactagcataagagtacta

SEQ ID NO: 668182 - DNA, 33 bp, Homo sapien
aaatgcaagtcaataattagcataagagtacta

SEQ ID NO: 668183 - DNA, 33 bp, Homo sapien
aaaacataattacctaagtgtaaggcacctcat

SEQ ID NO: 668184 - DNA, 33 bp, Homo sapien
aaaacataattacctatgtgtaaggcacctcat

SEQ ID NO: 668185 - DNA, 33 bp, Homo sapien
gttccacaatacaagcagacctgtggcctttca

SEQ ID NO: 668186 - DNA, 33 bp, Homo sapien
gttccacaatacaagccgacctgtggcctttca

SEQ ID NO: 668187 - DNA, 33 bp, Homo sapien
ccttcagaaatattcaggtgaggagcagagaat

SEQ ID NO: 668188 - DNA, 33 bp, Homo sapien
ccttcagaaatattcatgtgaggagcagagaat

SEQ ID NO: 668189 - DNA, 33 bp, Homo sapien
gtaaagttgcacaaaaagataagattctgtttc

SEQ ID NO: 668190 - DNA, 33 bp, Homo sapien
gtaaagttgcacaaaacgataagattctgtttc

SEQ ID NO: 668191 - DNA, 33 bp, Homo sapien
tcactgattctttacaagctctgattctgccag

SEQ ID NO: 668192 - DNA, 33 bp, Homo sapien
tcactgattctttacacgctctgattctgccag

SEQ ID NO: 668193 - DNA, 33 bp, Homo sapien
attttacctaggaaaagaatttgagaccagaag

SEQ ID NO: 668194 - DNA, 33 bp, Homo sapien
attttacctaggaaaataatttgagaccagaag

SEQ ID NO: 668195 - DNA, 33 bp, Homo sapien
ttattgccaataaatacatgagttataatttac

SEQ ID NO: 668196 - DNA, 33 bp, Homo sapien
ttattgccaataaatagatgagttataatttac

SEQ ID NO: 668197 - DNA, 33 bp, Homo sapien
tggtgaggagttgaaaccagaaaagtagtggtt

SEQ ID NO: 668198 - DNA, 33 bp, Homo sapien
tggtgaggagttgaaatcagaaaagtagtggtt

SEQ ID NO: 668199 - DNA, 33 bp, Homo sapien
attatactgtctacctcacatctctactagaac

SEQ ID NO: 668200 - DNA, 33 bp, Homo sapien
attatactgtctaccttacatctctactagaac

SEQ ID NO: 668201 - DNA, 33 bp, Homo sapien
caatattgtgtttaaacaacagccaataatctc

SEQ ID NO: 668202 - DNA, 33 bp, Homo sapien
caatattgtgtttaaagaacagccaataatctc

SEQ ID NO: 668203 - DNA, 33 bp, Homo sapien
caacagtaccacgagaactttttaacaaaatta

SEQ ID NO: 668204 - DNA, 33 bp, Homo sapien
caacagtaccacgagacctttttaacaaaatta

SEQ ID NO: 668205 - DNA, 33 bp, Homo sapien
agtgtccagcatatggcactttatagttacttg

SEQ ID NO: 668206 - DNA, 33 bp, Homo sapien
agtgtccagcatatggtactttatagttacttg

SEQ ID NO: 668207 - DNA, 33 bp, Homo sapien
aggactgtttttgctaccatttccgtgcctctt

SEQ ID NO: 668208 - DNA, 33 bp, Homo sapien
aggactgtttttgctatcatttccgtgcctctt

SEQ ID NO: 668209 - DNA, 33 bp, Homo sapien
caccaactgggggcagccaagggaatgatggca

SEQ ID NO: 668210 - DNA, 33 bp, Homo sapien
caccaactgggggcagtcaagggaatgatggca

SEQ ID NO: 668211 - DNA, 33 bp, Homo sapien; identical to SEQ ID NO: 668209

SEQ ID NO: 668212 - DNA, 33 bp, Homo sapien; identical to SEQ ID NO: 668210

SEQ ID NO: 668213 - DNA, 33 bp, Homo sapien
aaagtcttttcaggtaacagtttacagacaaat

SEQ ID NO: 668214 - DNA, 33 bp, Homo sapien
aaagtcttttcaggtatcagtttacagacaaat

SEQ ID NO: 668215 - DNA, 33 bp, Homo sapien
ttgctccataaaaacgcactgggaagctacctt

SEQ ID NO: 668216 - DNA, 33 bp, Homo sapien
ttgctccataaaaacgtactgggaagctacctt

SEQ ID NO: 668217 - DNA, 33 bp, Homo sapien
gctaatacaaaaacacacttaaacacacatacc

SEQ ID NO: 668218 - DNA, 33 bp, Homo sapien
gctaatacaaaaacacgcttaaacacacatacc

SEQ ID NO: 668219 - DNA, 33 bp, Homo sapien
tctccttgtaaacccactatgccagagccttca

SEQ ID NO: 668220 - DNA, 33 bp, Homo sapien
tctccttgtaaacccattatgccagagccttca

SEQ ID NO: 668221 - DNA, 33 bp, Homo sapien
tattcattcacctactaaataacatcctggttg

SEQ ID NO: 668222 - DNA, 33 bp, Homo sapien
tattcattcacctactgaataacatcctggttg

SEQ ID NO: 668223 - DNA, 33 bp, Homo sapien
ccctggtgtttaactacaggtgttgaaaagtta

SEQ ID NO: 668224 - DNA, 33 bp, Homo sapien
ccctggtgtttaactataggtgttgaaaagtta

SEQ ID NO: 668225 - DNA, 33 bp, Homo sapien
cgcctagtgatgtcgaggtagattatgtaatat

SEQ ID NO: 668226 - DNA, 33 bp, Homo sapien
cgcctagtgatgtcgatgtagattatgtaatat

SEQ ID NO: 668227 - DNA, 33 bp, Homo sapien
gagccactgctgcatcactcatttgacttacac

SEQ ID NO: 668228 - DNA, 33 bp, Homo sapien
gagccactgctgcatcgctcatttgacttacac

SEQ ID NO: 668229 - DNA, 33 bp, Homo sapien
atcaaggtttcattcacgtcatttgggattgca

SEQ ID NO: 668230 - DNA, 33 bp, Homo sapien
atcaaggtttcattcatgtcatttgggattgca

SEQ ID NO: 668231 - DNA, 33 bp, Homo sapien
agggacattgttaacaatatgtgcgagaagtct

SEQ ID NO: 668232 - DNA, 33 bp, Homo sapien
agggacattgttaacagtatgtgcgagaagtct

SEQ ID NO: 668233 - DNA, 33 bp, Homo sapien
aattaagaaactacaacgtaaactgaatgactt

SEQ ID NO: 668234 - DNA, 33 bp, Homo sapien
aattaagaaactacaatgtaaactgaatgactt

SEQ ID NO: 668235 - DNA, 33 bp, Homo sapien
agctctcagcaagataaattttcaccatcaaaa

SEQ ID NO: 668236 - DNA, 33 bp, Homo sapien
agctctcagcaagatacattttcaccatcaaaa

SEQ ID NO: 668237 - DNA, 33 bp, Homo sapien
tttagaaacatggctcccattctccagagaaga

SEQ ID NO: 668238 - DNA, 33 bp, Homo sapien
tttagaaacatggctctcattctccagagaaga

SEQ ID NO: 668239 - DNA, 33 bp, Homo sapien
atacaccctgggccgcaagggaaccagctgcct

SEQ ID NO: 668240 - DNA, 33 bp, Homo sapien
atacaccctgggccgcgagggaaccagctgcct

SEQ ID NO: 668241 - DNA, 33 bp, Homo sapien
ggacctcatgtccaccagctttaagttcagtat

SEQ ID NO: 668242 - DNA, 33 bp, Homo sapien
ggacctcatgtccaccggctttaagttcagtat

SEQ ID NO: 668243 - DNA, 33 bp, Homo sapien
aaagttaactcaggcactaggatatggaaaagt

SEQ ID NO: 668244 - DNA, 33 bp, Homo sapien
aaagttaactcaggcagtaggatatggaaaagt

SEQ ID NO: 668245 - DNA, 33 bp, Homo sapien
tgtattgttctatttcaaaatgggtcaaatata

SEQ ID NO: 668246 - DNA, 33 bp, Homo sapien
tgtattgttctatttcgaaatgggtcaaatata

SEQ ID NO: 668247 - DNA, 33 bp, Homo sapien
ctttgggagctaaatcacatttgaagaggaagg

SEQ ID NO: 668248 - DNA, 33 bp, Homo sapien
ctttgggagctaaatcccatttgaagaggaagg

SEQ ID NO: 668249 - DNA, 33 bp, Homo sapien
catctacctcagacaactgaaatttaacaaact

SEQ ID NO: 668250 - DNA, 33 bp, Homo sapien
catctacctcagacaattgaaatttaacaaact

SEQ ID NO: 668251 - DNA, 33 bp, Homo sapien
aaaagctcagtctttcaacccttagggtagaca

SEQ ID NO: 668252 - DNA, 33 bp, Homo sapien
aaaagctcagtctttcgacccttagggtagaca

SEQ ID NO: 668253 - DNA, 33 bp, Homo sapien
tttatttagattttcaccatctttttcatagcc

SEQ ID NO: 668254 - DNA, 33 bp, Homo sapien
tttatttagattttcagcatctttttcatagcc

SEQ ID NO: 668255 - DNA, 33 bp, Homo sapien
tctggcaagtcatcagaagaatgttgcaggggc

SEQ ID NO: 668256 - DNA, 33 bp, Homo sapien
tctggcaagtcatcaggagaatgttgcaggggc

SEQ ID NO: 668257 - DNA, 33 bp, Homo sapien
tgcactaaactgcccactctctttgaggacctc

SEQ ID NO: 668258 - DNA, 33 bp, Homo sapien
tgcactaaactgcccattctctttgaggacctc

SEQ ID NO: 668259 - DNA, 33 bp, Homo sapien
acttggcctcatgaaacggaaaagacttctact

SEQ ID NO: 668260 - DNA, 33 bp, Homo sapien
acttggcctcatgaaatggaaaagacttctact

SEQ ID NO: 668261 - DNA, 33 bp, Homo sapien
ctaagtaggtgggctcagagactatttctggaa

SEQ ID NO: 668262 - DNA, 33 bp, Homo sapien
ctaagtaggtgggctcggagactatttctggaa

SEQ ID NO: 668263 - DNA, 33 bp, Homo sapien
tttgcagagctagaaagtcagaagagtagaatt

SEQ ID NO: 668264 - DNA, 33 bp, Homo sapien
tttgcagagctagaaattcagaagagtagaatt

SEQ ID NO: 668265 - DNA, 33 bp, Homo sapien
tgtgggatacagatacacattcattaattcatt

SEQ ID NO: 668266 - DNA, 33 bp, Homo sapien
tgtgggatacagatacgcattcattaattcatt

SEQ ID NO: 668267 - DNA, 33 bp, Homo sapien
caaaagctgatggaaactcatgccgcgatcgtc

SEQ ID NO: 668268 - DNA, 33 bp, Homo sapien
caaaagctgatggaaattcatgccgcgatcgtc

SEQ ID NO: 668269 - DNA, 33 bp, Homo sapien
tgactcaaaatgcatcaaatcagtgaaatattg

SEQ ID NO: 668270 - DNA, 33 bp, Homo sapien
tgactcaaaatgcatcgaatcagtgaaatattg

SEQ ID NO: 668271 - DNA, 33 bp, Homo sapien
gattgctgtgatatgccatgtccaacaggaagt

SEQ ID NO: 668272 - DNA, 33 bp, Homo sapien
gattgctgtgatatgctatgtccaacaggaagt

SEQ ID NO: 668273 - DNA, 33 bp, Homo sapien
gtctcttacttacctacgacctagaaacgcctg

SEQ ID NO: 668274 - DNA, 33 bp, Homo sapien
gtctcttacttacctatgacctagaaacgcctg

SEQ ID NO: 668275 - DNA, 33 bp, Homo sapien
tttaccagactatataaaaatgtgtggcttaca

SEQ ID NO: 668276 - DNA, 33 bp, Homo sapien
tttaccagactatatacaaatgtgtggcttaca

SEQ ID NO: 668277 - DNA, 33 bp, Homo sapien
ttataacggacactccaactttattgctccact

SEQ ID NO: 668278 - DNA, 33 bp, Homo sapien
ttataacggacactccgactttattgctccact

SEQ ID NO: 668279 - DNA, 33 bp, Homo sapien
caccttgcaggatgtagcttggcagagaaatgt

SEQ ID NO: 668280 - DNA, 33 bp, Homo sapien
caccttgcaggatgtatcttggcagagaaatgt

SEQ ID NO: 668281 - DNA, 33 bp, Homo sapien
cagtttacaagagaaaatgggaccacctccacc

SEQ ID NO: 668282 - DNA, 33 bp, Homo sapien
cagtttacaagagaaagtgggaccacctccacc

SEQ ID NO: 668283 - DNA, 33 bp, Homo sapien
aattaggtaaatacagaaaggactgatggctaa

SEQ ID NO: 668284 - DNA, 33 bp, Homo sapien
aattaggtaaatacaggaaggactgatggctaa

SEQ ID NO: 668285 - DNA, 33 bp, Homo sapien
ccagagcatcctatacactttacctataactca

SEQ ID NO: 668286 - DNA, 33 bp, Homo sapien
ccagagcatcctatacgctttacctataactca

SEQ ID NO: 668287 - DNA, 33 bp, Homo sapien
cttaccttgaagtcacaaaactattgatgccta

SEQ ID NO: 668288 - DNA, 33 bp, Homo sapien
cttaccttgaagtcacgaaactattgatgccta

SEQ ID NO: 668289 - DNA, 33 bp, Homo sapien
cttgtttaagatgaaaccctgcaagctctgtga

SEQ ID NO: 668290 - DNA, 33 bp, Homo sapien
cttgtttaagatgaaatcctgcaagctctgtga

SEQ ID NO: 668291 - DNA, 33 bp, Homo sapien
tataactgttctagaagtgtccaacagaggtca

SEQ ID NO: 668292 - DNA, 33 bp, Homo sapien
tataactgttctagaattgtccaacagaggtca

SEQ ID NO: 668293 - DNA, 33 bp, Homo sapien
aaactcttggtcactacaaattagccacgtttt

SEQ ID NO: 668294 - DNA, 33 bp, Homo sapien
aaactcttggtcactataaattagccacgtttt

SEQ ID NO: 668295 - DNA, 33 bp, Homo sapien
gacttggagagtccgcagatgaattttttatag

SEQ ID NO: 668296 - DNA, 33 bp, Homo sapien
gacttggagagtccgcggatgaattttttatag

SEQ ID NO: 668297 - DNA, 33 bp, Homo sapien
attgagaattcatctgcatcaagagaatataag

SEQ ID NO: 668298 - DNA, 33 bp, Homo sapien
attgagaattcatctgtatcaagagaatataag

SEQ ID NO: 668299 - DNA, 33 bp, Homo sapien
tttgcatttgtttatacagagtctgtcattata

SEQ ID NO: 668300 - DNA, 33 bp, Homo sapien
tttgcatttgtttatatagagtctgtcattata

SEQ ID NO: 668301 - DNA, 33 bp, Homo sapien
gattctctctttaaccaagaaatgctctgtttg

SEQ ID NO: 668302 - DNA, 33 bp, Homo sapien
gattctctctttaacccagaaatgctctgtttg

SEQ ID NO: 668303 - DNA, 33 bp, Homo sapien
gacatatacacagatgaacaatattgatgtggg

SEQ ID NO: 668304 - DNA, 33 bp, Homo sapien
gacatatacacagatggacaatattgatgtggg

SEQ ID NO: 668305 - DNA, 33 bp, Homo sapien
atctttatccacaaaaactctttctggaaacac

SEQ ID NO: 668306 - DNA, 33 bp, Homo sapien
atctttatccacaaaatctctttctggaaacac

SEQ ID NO: 668307 - DNA, 33 bp, Homo sapien
ccagtattttgtgacaccactttggaaatgccg

SEQ ID NO: 668308 - DNA, 33 bp, Homo sapien
ccagtattttgtgacatcactttggaaatgccg

SEQ ID NO: 668309 - DNA, 33 bp, Homo sapien
tcacattagaaatgagaatatacgcactcatct

SEQ ID NO: 668310 - DNA, 33 bp, Homo sapien
tcacattagaaatgaggatatacgcactcatct

SEQ ID NO: 668311 - DNA, 33 bp, Homo sapien
ggattaagtgaaagagactcagttagaaaaata

SEQ ID NO: 668312 - DNA, 33 bp, Homo sapien
ggattaagtgaaagagcctcagttagaaaaata

SEQ ID NO: 668313 - DNA, 33 bp, Homo sapien
tttcattaaaattgcacaaaggatcttttaaat

SEQ ID NO: 668314 - DNA, 33 bp, Homo sapien
tttcattaaaattgcagaaaggatcttttaaat

SEQ ID NO: 668315 - DNA, 33 bp, Homo sapien
tccacaccctttctagaacaacctaatgttatc

SEQ ID NO: 668316 - DNA, 33 bp, Homo sapien
tccacaccctttctaggacaacctaatgttatc

SEQ ID NO: 668317 - DNA, 33 bp, Homo sapien
attagcatcccatttcactcttataaatacact

SEQ ID NO: 668318 - DNA, 33 bp, Homo sapien
attagcatcccatttcgctcttataaatacact

SEQ ID NO: 668319 - DNA, 33 bp, Homo sapien
taaacagaaaacctgaccagcagaaaatattta

SEQ ID NO: 668320 - DNA, 33 bp, Homo sapien
taaacagaaaacctgagcagcagaaaatattta

SEQ ID NO: 668321 - DNA, 33 bp, Homo sapien
aatagaaactcgggaccgtagaaatacaaatca

SEQ ID NO: 668322 - DNA, 33 bp, Homo sapien
aatagaaactcgggacggtagaaatacaaatca

SEQ ID NO: 668323 - DNA, 33 bp, Homo sapien
aagtcatctcaatgttcaaagctgggaatgtca

SEQ ID NO: 668324 - DNA, 33 bp, Homo sapien
aagtcatctcaatgttgaaagctgggaatgtca

SEQ ID NO: 668325 - DNA, 33 bp, Homo sapien
aatagcaacaacaacaaaagagctagatttcag

SEQ ID NO: 668326 - DNA, 33 bp, Homo sapien
aatagcaacaacaacagaagagctagatttcag

SEQ ID NO: 668327 - DNA, 33 bp, Homo sapien
agtaacatggccattccattggtaagtgatggt

SEQ ID NO: 668328 - DNA, 33 bp, Homo sapien
agtaacatggccattctattggtaagtgatggt

SEQ ID NO: 668329 - DNA, 33 bp, Homo sapien
tataggaaacaatctacgggattatatatatat

SEQ ID NO: 668330 - DNA, 33 bp, Homo sapien
tataggaaacaatctatgggattatatatatat

SEQ ID NO: 668331 - DNA, 33 bp, Homo sapien
atatcttctaggagtaccaattgcactttaatt

SEQ ID NO: 668332 - DNA, 33 bp, Homo sapien
atatcttctaggagtatcaattgcactttaatt

SEQ ID NO: 668333 - DNA, 33 bp, Homo sapien
cagtaacactaattggaaactcatcaagatttt

SEQ ID NO: 668334 - DNA, 33 bp, Homo sapien
cagtaacactaattgggaactcatcaagatttt

SEQ ID NO: 668335 - DNA, 33 bp, Homo sapien
gtgaagcaatgtctacagcagatcatggccaga

SEQ ID NO: 668336 - DNA, 33 bp, Homo sapien
gtgaagcaatgtctacggcagatcatggccaga

SEQ ID NO: 668337 - DNA, 33 bp, Homo sapien
caggtggaggaggaaaagaagaaacgaaggagg

SEQ ID NO: 668338 - DNA, 33 bp, Homo sapien
caggtggaggaggaaaggaagaaacgaaggagg

SEQ ID NO: 668339 - DNA, 33 bp, Homo sapien
attttagttgatttacagaaattacctcaaaaa

SEQ ID NO: 668340 - DNA, 33 bp, Homo sapien
attttagttgatttacggaaattacctcaaaaa

SEQ ID NO: 668341 - DNA, 33 bp, Homo sapien
agtttttccagacatacgatactatggagaaga

SEQ ID NO: 668342 - DNA, 33 bp, Homo sapien
agtttttccagacatatgatactatggagaaga

SEQ ID NO: 668343 - DNA, 33 bp, Homo sapien
tctctgcataatacacaggtgctatctgaaagt

SEQ ID NO: 668344 - DNA, 33 bp, Homo sapien
tctctgcataatacaccggtgctatctgaaagt

SEQ ID NO: 668345 - DNA, 33 bp, Homo sapien
aggtgttagtgcaccagtcattcaagtagtgca

SEQ ID NO: 668346 - DNA, 33 bp, Homo sapien
aggtgttagtgcaccattcattcaagtagtgca

SEQ ID NO: 668347 - DNA, 33 bp, Homo sapien
attgtctatctgtatcagaaattaatgcttaca

SEQ ID NO: 668348 - DNA, 33 bp, Homo sapien
attgtctatctgtatcggaaattaatgcttaca

SEQ ID NO: 668349 - DNA, 33 bp, Homo sapien
atgttatgtcatttgacgttcaaaactattcca

SEQ ID NO: 668350 - DNA, 33 bp, Homo sapien
atgttatgtcatttgatgttcaaaactattcca

SEQ ID NO: 668351 - DNA, 33 bp, Homo sapien
tgcttcaattttgtcactcttcatgtattttgg

SEQ ID NO: 668352 - DNA, 33 bp, Homo sapien
tgcttcaattttgtcagtcttcatgtattttgg

SEQ ID NO: 668353 - DNA, 33 bp, Homo sapien
ggaatgggggtgagaaagagtatatgtattttg

SEQ ID NO: 668354 - DNA, 33 bp, Homo sapien
ggaatgggggtgagaaggagtatatgtattttg

SEQ ID NO: 668355 - DNA, 33 bp, Homo sapien
tctcaacattgctgtacgcttgaaaatttcata

SEQ ID NO: 668356 - DNA, 33 bp, Homo sapien
tctcaacattgctgtatgcttgaaaatttcata

SEQ ID NO: 668357 - DNA, 33 bp, Homo sapien
gtcttttcatgccctaataacactgtgttttaa

SEQ ID NO: 668358 - DNA, 33 bp, Homo sapien
gtcttttcatgccctagtaacactgtgttttaa

SEQ ID NO: 668359 - DNA, 33 bp, Homo sapien
taaaactccaacacaacgagccatgatcgtgcc

SEQ ID NO: 668360 - DNA, 33 bp, Homo sapien
taaaactccaacacaatgagccatgatcgtgcc

SEQ ID NO: 668361 - DNA, 33 bp, Homo sapien
tggagaggataggcccggccacgctgagcttag

SEQ ID NO: 668362 - DNA, 33 bp, Homo sapien
tggagaggataggccctgccacgctgagcttag

SEQ ID NO: 668363 - DNA, 33 bp, Homo sapien
tgggaaaaaagagccaagtgttcaaatagcatg

SEQ ID NO: 668364 - DNA, 33 bp, Homo sapien
tgggaaaaaagagccaggtgttcaaatagcatg

SEQ ID NO: 668365 - DNA, 33 bp, Homo sapien
gaggtgttactcttcccaagggatatttgcatt

SEQ ID NO: 668366 - DNA, 33 bp, Homo sapien
gaggtgttactcttcctaagggatatttgcatt

SEQ ID NO: 668367 - DNA, 33 bp, Homo sapien
actggaaggagaacatcagagctgaagactatt

SEQ ID NO: 668368 - DNA, 33 bp, Homo sapien
actggaaggagaacatgagagctgaagactatt

SEQ ID NO: 668369 - DNA, 33 bp, Homo sapien
ttgaattcaggaaatacgagtcttccaactttg

SEQ ID NO: 668370 - DNA, 33 bp, Homo sapien
ttgaattcaggaaatatgagtcttccaactttg

SEQ ID NO: 668371 - DNA, 33 bp, Homo sapien
agaatacatttacttcaatacagaaagtggaca

SEQ ID NO: 668372 - DNA, 33 bp, Homo sapien
agaatacatttacttcgatacagaaagtggaca

SEQ ID NO: 668373 - DNA, 33 bp, Homo sapien
gccctgtctacctttccaattccacgttcctgt

SEQ ID NO: 668374 - DNA, 33 bp, Homo sapien
gccctgtctacctttcgaattccacgttcctgt

SEQ ID NO: 668375 - DNA, 33 bp, Homo sapien
attattatgtgagggccgaaaaagatgcaatct

SEQ ID NO: 668376 - DNA, 33 bp, Homo sapien
attattatgtgagggctgaaaaagatgcaatct

SEQ ID NO: 668377 - DNA, 33 bp, Homo sapien
cgtttactcagcccaccgtgctcaacccttcac

SEQ ID NO: 668378 - DNA, 33 bp, Homo sapien
cgtttactcagcccacggtgctcaacccttcac

SEQ ID NO: 668379 - DNA, 33 bp, Homo sapien
attcagtcacaagttaaggtctcaaggacataa

SEQ ID NO: 668380 - DNA, 33 bp, Homo sapien
attcagtcacaagttacggtctcaaggacataa

SEQ ID NO: 668381 - DNA, 33 bp, Homo sapien
gcccctctgaagtgtcacacacatcttgctgta

SEQ ID NO: 668382 - DNA, 33 bp, Homo sapien
gcccctctgaagtgtcgcacacatcttgctgta

SEQ ID NO: 668383 - DNA, 33 bp, Homo sapien
gataaaactagatacacatacaaagttggagga

SEQ ID NO: 668384 - DNA, 33 bp, Homo sapien
gataaaactagatacatatacaaagttggagga

SEQ ID NO: 668385 - DNA, 33 bp, Homo sapien
cttccatgttaagtacaggcaccaagtggcatc

SEQ ID NO: 668386 - DNA, 33 bp, Homo sapien
cttccatgttaagtacgggcaccaagtggcatc

SEQ ID NO: 668387 - DNA, 33 bp, Homo sapien
gcccacctccaacttcccgatggcccaagcatc

SEQ ID NO: 668388 - DNA, 33 bp, Homo sapien
gcccacctccaacttctcgatggcccaagcatc

SEQ ID NO: 668389 - DNA, 33 bp, Homo sapien
tcattctgaaacctacactatgctctctaattt

SEQ ID NO: 668390 - DNA, 33 bp, Homo sapien
tcattctgaaacctaccctatgctctctaattt

SEQ ID NO: 668391 - DNA, 33 bp, Homo sapien
tctgtaggtttgagaaacacttgaagggaagca

SEQ ID NO: 668392 - DNA, 33 bp, Homo sapien
tctgtaggtttgagaaccacttgaagggaagca

SEQ ID NO: 668393 - DNA, 33 bp, Homo sapien
tgtcctgcagtacctcagaacttgatgatgtct

SEQ ID NO: 668394 - DNA, 33 bp, Homo sapien
tgtcctgcagtacctcggaacttgatgatgtct

SEQ ID NO: 668395 - DNA, 33 bp, Homo sapien
actcagctctgcctgacatgatctatagtcttc

SEQ ID NO: 668396 - DNA, 33 bp, Homo sapien
actcagctctgcctgatatgatctatagtcttc

SEQ ID NO: 668397 - DNA, 33 bp, Homo sapien
tttcagaacctcaaaccgctaccttccctacca

SEQ ID NO: 668398 - DNA, 33 bp, Homo sapien
tttcagaacctcaaactgctaccttccctacca

SEQ ID NO: 668399 - DNA, 33 bp, Homo sapien
ctctgaaagtttgctgaaaaatcacagacaaga

SEQ ID NO: 668400 - DNA, 33 bp, Homo sapien
ctctgaaagtttgctgcaaaatcacagacaaga

SEQ ID NO: 668401 - DNA, 33 bp, Homo sapien
cagcattgcagaggagaaagagattaactgaca

SEQ ID NO: 668402 - DNA, 33 bp, Homo sapien
cagcattgcagaggaggaagagattaactgaca

SEQ ID NO: 668403 - DNA, 33 bp, Homo sapien
caatattcccttgcccagaaagtttcaagtccc

SEQ ID NO: 668404 - DNA, 33 bp, Homo sapien
caatattcccttgcccggaaagtttcaagtccc

SEQ ID NO: 668405 - DNA, 33 bp, Homo sapien
actgaaaaaaaaatgcacatcttccagatcctc

SEQ ID NO: 668406 - DNA, 33 bp, Homo sapien
actgaaaaaaaaatgctcatcttccagatcctc

SEQ ID NO: 668407 - DNA, 33 bp, Homo sapien
tgtaaatcatctaggaagggagctatctgagtc

SEQ ID NO: 668408 - DNA, 33 bp, Homo sapien
tgtaaatcatctaggaggggagctatctgagtc

SEQ ID NO: 668409 - DNA, 33 bp, Homo sapien
ccagcaccttagagacagaagagaaacctcctc

SEQ ID NO: 668410 - DNA, 33 bp, Homo sapien
ccagcaccttagagacggaagagaaacctcctc

SEQ ID NO: 668411 - DNA, 33 bp, Homo sapien
cacaatcttattctatcagggaatcttgcatga

SEQ ID NO: 668412 - DNA, 33 bp, Homo sapien
cacaatcttattctattagggaatcttgcatga

SEQ ID NO: 668413 - DNA, 33 bp, Homo sapien
acacgacgcttctggcaacatttcatttcatct

SEQ ID NO: 668414 - DNA, 33 bp, Homo sapien
acacgacgcttctggccacatttcatttcatct

SEQ ID NO: 668415 - DNA, 33 bp, Homo sapien
gagggaggcagccaaaagtgaatagcacaagat

SEQ ID NO: 668416 - DNA, 33 bp, Homo sapien
gagggaggcagccaaaggtgaatagcacaagat

SEQ ID NO: 668417 - DNA, 33 bp, Homo sapien
tcatttctggaatctacgaagtgggggtaacat

SEQ ID NO: 668418 - DNA, 33 bp, Homo sapien
tcatttctggaatctatgaagtgggggtaacat

SEQ ID NO: 668419 - DNA, 33 bp, Homo sapien
agcagcatttggctccagatcctgtagttaacc

SEQ ID NO: 668420 - DNA, 33 bp, Homo sapien
agcagcatttggctcccgatcctgtagttaacc

SEQ ID NO: 668421 - DNA, 33 bp, Homo sapien
agacccagttctgccaacaagtagctacatttc

SEQ ID NO: 668422 - DNA, 33 bp, Homo sapien
agacccagttctgccagcaagtagctacatttc

SEQ ID NO: 668423 - DNA, 33 bp, Homo sapien
attgacggtccagaaaagtagaagctggagtga

SEQ ID NO: 668424 - DNA, 33 bp, Homo sapien
attgacggtccagaaaggtagaagctggagtga

SEQ ID NO: 668425 - DNA, 33 bp, Homo sapien
tatgggatcagctttacgtaggagatacagagc

SEQ ID NO: 668426 - DNA, 33 bp, Homo sapien
tatgggatcagctttatgtaggagatacagagc

SEQ ID NO: 668427 - DNA, 33 bp, Homo sapien
cctgttacttttaagcaagcggtttaagccata

SEQ ID NO: 668428 - DNA, 33 bp, Homo sapien
cctgttacttttaagctagcggtttaagccata

SEQ ID NO: 668429 - DNA, 33 bp, Homo sapien
gttactctagcaatcaaatgagttatagagtta

SEQ ID NO: 668430 - DNA, 33 bp, Homo sapien
gttactctagcaatcacatgagttatagagtta

SEQ ID NO: 668431 - DNA, 33 bp, Homo sapien
ctgcactgtcctcatcagaaacttccccttcct

SEQ ID NO: 668432 - DNA, 33 bp, Homo sapien
ctgcactgtcctcatcggaaacttccccttcct

SEQ ID NO: 668433 - DNA, 33 bp, Homo sapien
gaacagtgcaattcaacagtcagaccaacctga

SEQ ID NO: 668434 - DNA, 33 bp, Homo sapien
gaacagtgcaattcaagagtcagaccaacctga

SEQ ID NO: 668435 - DNA, 33 bp, Homo sapien
taagggattaaatagaaggctacatggtgtttt

SEQ ID NO: 668436 - DNA, 33 bp, Homo sapien
taagggattaaatagatggctacatggtgtttt

SEQ ID NO: 668437 - DNA, 33 bp, Homo sapien
tttaatcccttagcacggacctcctccaggcca

SEQ ID NO: 668438 - DNA, 33 bp, Homo sapien
tttaatcccttagcactgacctcctccaggcca

SEQ ID NO: 668439 - DNA, 33 bp, Homo sapien
cattgcaaaagtaagacaaatagcaacatcatg

SEQ ID NO: 668440 - DNA, 33 bp, Homo sapien
cattgcaaaagtaagagaaatagcaacatcatg

SEQ ID NO: 668441 - DNA, 33 bp, Homo sapien
ctgaatatcagagagagaaatttccactagctc

SEQ ID NO: 668442 - DNA, 33 bp, Homo sapien
ctgaatatcagagagataaatttccactagctc

SEQ ID NO: 668443 - DNA, 33 bp, Homo sapien
tcaaattaggtgacccaacttttccactcagat

SEQ ID NO: 668444 - DNA, 33 bp, Homo sapien
tcaaattaggtgacccgacttttccactcagat

SEQ ID NO: 668445 - DNA, 33 bp, Homo sapien
aaccttttgtatctaaactcagcttctaattct

SEQ ID NO: 668446 - DNA, 33 bp, Homo sapien
aaccttttgtatctaacctcagcttctaattct

SEQ ID NO: 668447 - DNA, 33 bp, Homo sapien
atgctccccaaagtaaaaaagatcaagtgatgc

SEQ ID NO: 668448 - DNA, 33 bp, Homo sapien
atgctccccaaagtaacaaagatcaagtgatgc

SEQ ID NO: 668449 - DNA, 33 bp, Homo sapien
caaagtaaatttcaacaaacgaattcataacat

SEQ ID NO: 668450 - DNA, 33 bp, Homo sapien
caaagtaaatttcaacgaacgaattcataacat

SEQ ID NO: 668451 - DNA, 33 bp, Homo sapien
ggtactgaaatggagactatcatggctctgcaa

SEQ ID NO: 668452 - DNA, 33 bp, Homo sapien
ggtactgaaatggagattatcatggctctgcaa

SEQ ID NO: 668453 - DNA, 33 bp, Homo sapien
ttaaatatataccctcacttttcaaataggccc

SEQ ID NO: 668454 - DNA, 33 bp, Homo sapien
ttaaatatataccctcgcttttcaaataggccc

SEQ ID NO: 668455 - DNA, 33 bp, Homo sapien
acataattttttaaggcagttttgacagcatat

SEQ ID NO: 668456 - DNA, 33 bp, Homo sapien
acataattttttaaggtagttttgacagcatat

SEQ ID NO: 668457 - DNA, 33 bp, Homo sapien
aacccagcatagccaaccctagaatcggacatc

SEQ ID NO: 668458 - DNA, 33 bp, Homo sapien
aacccagcatagccaatcctagaatcggacatc

SEQ ID NO: 668459 - DNA, 33 bp, Homo sapien
atttcaacccttcggtaaagactccctgagcac

SEQ ID NO: 668460 - DNA, 33 bp, Homo sapien
atttcaacccttcggtcaagactccctgagcac

SEQ ID NO: 668461 - DNA, 33 bp, Homo sapien
tctaaataacaagccaggtactcattaaaatta

SEQ ID NO: 668462 - DNA, 33 bp, Homo sapien
tctaaataacaagccatgtactcattaaaatta

SEQ ID NO: 668463 - DNA, 33 bp, Homo sapien
agaaaggacaactgtgaagagattacaacaaat

SEQ ID NO: 668464 - DNA, 33 bp, Homo sapien
agaaaggacaactgtggagagattacaacaaat

SEQ ID NO: 668465 - DNA, 33 bp, Homo sapien
gacaaaggaagaatacaatggatgaagaatgaa

SEQ ID NO: 668466 - DNA, 33 bp, Homo sapien
gacaaaggaagaatacgatggatgaagaatgaa

SEQ ID NO: 668467 - DNA, 33 bp, Homo sapien
taaggaaggtataataccattgaaattaagatt

SEQ ID NO: 668468 - DNA, 33 bp, Homo sapien
taaggaaggtataatatcattgaaattaagatt

SEQ ID NO: 668469 - DNA, 33 bp, Homo sapien
atgaaatggctcacacaatgtatagtcttcgtt

SEQ ID NO: 668470 - DNA, 33 bp, Homo sapien
atgaaatggctcacacgatgtatagtcttcgtt

SEQ ID NO: 668471 - DNA, 33 bp, Homo sapien
agacgcatatgaataacctgaaatgacagacaa

SEQ ID NO: 668472 - DNA, 33 bp, Homo sapien
agacgcatatgaataatctgaaatgacagacaa

SEQ ID NO: 668473 - DNA, 33 bp, Homo sapien
aaggaaaaccctcaacactttgaatatgcactt

SEQ ID NO: 668474 - DNA, 33 bp, Homo sapien
aaggaaaaccctcaacgctttgaatatgcactt

SEQ ID NO: 668475 - DNA, 33 bp, Homo sapien
ccatccaatgcttgctaaataaatgctgagaat

SEQ ID NO: 668476 - DNA, 33 bp, Homo sapien
ccatccaatgcttgctgaataaatgctgagaat

SEQ ID NO: 668477 - DNA, 33 bp, Homo sapien
tctccagggcctagaacggaccagaagagtagt

SEQ ID NO: 668478 - DNA, 33 bp, Homo sapien
tctccagggcctagaatggaccagaagagtagt

SEQ ID NO: 668479 - DNA, 33 bp, Homo sapien
agtgctttaagcaggacgagctacataatctgc

SEQ ID NO: 668480 - DNA, 33 bp, Homo sapien
agtgctttaagcaggatgagctacataatctgc

SEQ ID NO: 668481 - DNA, 33 bp, Homo sapien
cctgggagaggaaagtaaaaaacatggagaaaa

SEQ ID NO: 668482 - DNA, 33 bp, Homo sapien
cctgggagaggaaagttaaaaacatggagaaaa

SEQ ID NO: 668483 - DNA, 33 bp, Homo sapien
caccttcagcccatcactgaacctttcccagcc

SEQ ID NO: 668484 - DNA, 33 bp, Homo sapien
caccttcagcccatcattgaacctttcccagcc

SEQ ID NO: 668485 - DNA, 33 bp, Homo sapien
ttttagagagtggttaaactataaggttcatgt

SEQ ID NO: 668486 - DNA, 33 bp, Homo sapien
ttttagagagtggttatactataaggttcatgt

SEQ ID NO: 668487 - DNA, 33 bp, Homo sapien
aaggtgataactctacaagtctgaaaaaaacac

SEQ ID NO: 668488 - DNA, 33 bp, Homo sapien
aaggtgataactctacgagtctgaaaaaaacac

SEQ ID NO: 668489 - DNA, 33 bp, Homo sapien
aatagcctgtctttaagctcactaatcctttct

SEQ ID NO: 668490 - DNA, 33 bp, Homo sapien
aatagcctgtctttaatctcactaatcctttct

SEQ ID NO: 668491 - DNA, 33 bp, Homo sapien
ggcttcaggacacttacgaaatttttgcaaaca

SEQ ID NO: 668492 - DNA, 33 bp, Homo sapien
ggcttcaggacacttatgaaatttttgcaaaca

SEQ ID NO: 668493 - DNA, 33 bp, Homo sapien
gcagggagtaaaactacgacactaaacaataaa

SEQ ID NO: 668494 - DNA, 33 bp, Homo sapien
gcagggagtaaaactaggacactaaacaataaa

SEQ ID NO: 668495 - DNA, 33 bp, Homo sapien
ttttctgggtttcctaaggcaaaattctgagta

SEQ ID NO: 668496 - DNA, 33 bp, Homo sapien
ttttctgggtttcctatggcaaaattctgagta

SEQ ID NO: 668497 - DNA, 33 bp, Homo sapien
attgacgatattatacacctaacagcggctcag

SEQ ID NO: 668498 - DNA, 33 bp, Homo sapien
attgacgatattatacgcctaacagcggctcag

SEQ ID NO: 668499 - DNA, 33 bp, Homo sapien
ggagctctacagactgaaaggacttgaaagatg

SEQ ID NO: 668500 - DNA, 33 bp, Homo sapien
ggagctctacagactgcaaggacttgaaagatg

SEQ ID NO: 668501 - DNA, 33 bp, Homo sapien
atgttcaagaagcccaagagaaatctgacattt

SEQ ID NO: 668502 - DNA, 33 bp, Homo sapien
atgttcaagaagcccacgagaaatctgacattt

SEQ ID NO: 668503 - DNA, 33 bp, Homo sapien
taacttcgatataaaaaccttttgagagcaata

SEQ ID NO: 668504 - DNA, 33 bp, Homo sapien
taacttcgatataaaagccttttgagagcaata

SEQ ID NO: 668505 - DNA, 33 bp, Homo sapien
cactataacatttatgaaaagtgacctcaaact

SEQ ID NO: 668506 - DNA, 33 bp, Homo sapien
cactataacatttatggaaagtgacctcaaact

SEQ ID NO: 668507 - DNA, 33 bp, Homo sapien
cttgaggtagtattgacagatttactgctagaa

SEQ ID NO: 668508 - DNA, 33 bp, Homo sapien
cttgaggtagtattgatagatttactgctagaa

SEQ ID NO: 668509 - DNA, 33 bp, Homo sapien
acattgacataaagagactacgtggttcgagaa

SEQ ID NO: 668510 - DNA, 33 bp, Homo sapien
acattgacataaagaggctacgtggttcgagaa

SEQ ID NO: 668511 - DNA, 33 bp, Homo sapien
tgctatcttctggtgaataaggtaagcaatgtg

SEQ ID NO: 668512 - DNA, 33 bp, Homo sapien
tgctatcttctggtgagtaaggtaagcaatgtg

SEQ ID NO: 668513 - DNA, 33 bp, Homo sapien
tacaggattggagaggaacctcagaattttcag

SEQ ID NO: 668514 - DNA, 33 bp, Homo sapien
tacaggattggagagggacctcagaattttcag

SEQ ID NO: 668515 - DNA, 33 bp, Homo sapien
cttacttgacatagtcactctctactgccttct

SEQ ID NO: 668516 - DNA, 33 bp, Homo sapien
cttacttgacatagtccctctctactgccttct

SEQ ID NO: 668517 - DNA, 33 bp, Homo sapien
attttgaatgttacaaaaagttgctagagcata

SEQ ID NO: 668518 - DNA, 33 bp, Homo sapien
attttgaatgttacaataagttgctagagcata

SEQ ID NO: 668519 - DNA, 33 bp, Homo sapien
gctagaaagttgctaaccaaacaccattttgaa

SEQ ID NO: 668520 - DNA, 33 bp, Homo sapien
gctagaaagttgctaatcaaacaccattttgaa

SEQ ID NO: 668521 - DNA, 33 bp, Homo sapien
tgataatggacaaccacgtgacaaagtactgta

SEQ ID NO: 668522 - DNA, 33 bp, Homo sapien
tgataatggacaaccatgtgacaaagtactgta

SEQ ID NO: 668523 - DNA, 33 bp, Homo sapien
tatttccatctacatacactttttccacctgaa

SEQ ID NO: 668524 - DNA, 33 bp, Homo sapien
tatttccatctacatatactttttccacctgaa

SEQ ID NO: 668525 - DNA, 33 bp, Homo sapien
aaaaggaaacaaagtacagaagttaaatcccat

SEQ ID NO: 668526 - DNA, 33 bp, Homo sapien
aaaaggaaacaaagtatagaagttaaatcccat

SEQ ID NO: 668527 - DNA, 33 bp, Homo sapien
agatctattaatcaggaatgaaattttatttgg

SEQ ID NO: 668528 - DNA, 33 bp, Homo sapien
agatctattaatcaggtatgaaattttatttgg

SEQ ID NO: 668529 - DNA, 33 bp, Homo sapien
ggctatgttgttagcacatttttaagttgtttc

SEQ ID NO: 668530 - DNA, 33 bp, Homo sapien
ggctatgttgttagcatatttttaagttgtttc

SEQ ID NO: 668531 - DNA, 33 bp, Homo sapien
agtgccttaaagtaacacaaatttactatctta

SEQ ID NO: 668532 - DNA, 33 bp, Homo sapien
agtgccttaaagtaacgcaaatttactatctta

SEQ ID NO: 668533 - DNA, 33 bp, Homo sapien
aaaatatgaaatgaccactagcaaacactagct

SEQ ID NO: 668534 - DNA, 33 bp, Homo sapien
aaaatatgaaatgaccgctagcaaacactagct

SEQ ID NO: 668535 - DNA, 33 bp, Homo sapien
aggaatgacagaaccaagactcaagaattaaac

SEQ ID NO: 668536 - DNA, 33 bp, Homo sapien
aggaatgacagaaccaggactcaagaattaaac

SEQ ID NO: 668537 - DNA, 33 bp, Homo sapien
tttggtttggctttgacattatctattttaata

SEQ ID NO: 668538 - DNA, 33 bp, Homo sapien
tttggtttggctttgatattatctattttaata

SEQ ID NO: 668539 - DNA, 33 bp, Homo sapien
tctatgcctggagaaacgtcaacatctggagaa

SEQ ID NO: 668540 - DNA, 33 bp, Homo sapien
tctatgcctggagaaatgtcaacatctggagaa

SEQ ID NO: 668541 - DNA, 33 bp, Homo sapien
cataccagcagatgaacaaacacactagtctac

SEQ ID NO: 668542 - DNA, 33 bp, Homo sapien
cataccagcagatgaataaacacactagtctac

SEQ ID NO: 668543 - DNA, 33 bp, Homo sapien
aaatctactgcagataaacactgctgagtgctt

SEQ ID NO: 668544 - DNA, 33 bp, Homo sapien
aaatctactgcagatagacactgctgagtgctt

SEQ ID NO: 668545 - DNA, 33 bp, Homo sapien
gtcttcaccttcaagcaaaagaaaacacctgag

SEQ ID NO: 668546 - DNA, 33 bp, Homo sapien
gtcttcaccttcaagctaaagaaaacacctgag

SEQ ID NO: 668547 - DNA, 33 bp, Homo sapien
tgatgctgcgtggctactaaaattgtaaatgca

SEQ ID NO: 668548 - DNA, 33 bp, Homo sapien
tgatgctgcgtggctattaaaattgtaaatgca

SEQ ID NO: 668549 - DNA, 33 bp, Homo sapien
caaaggcaagttcaaaatggctgtggaaatatt

SEQ ID NO: 668550 - DNA, 33 bp, Homo sapien
caaaggcaagttcaaagtggctgtggaaatatt

SEQ ID NO: 668551 - DNA, 33 bp, Homo sapien
tctttccaaaatcttccacatatctccctatgt

SEQ ID NO: 668552 - DNA, 33 bp, Homo sapien
tctttccaaaatcttctacatatctccctatgt

SEQ ID NO: 668553 - DNA, 33 bp, Homo sapien
tgtgcctctttggtcagctaccttcctccagcc

SEQ ID NO: 668554 - DNA, 33 bp, Homo sapien
tgtgcctctttggtcatctaccttcctccagcc

SEQ ID NO: 668555 - DNA, 33 bp, Homo sapien
ggaatccttcattgtgaaaaggaaaatttgaca

SEQ ID NO: 668556 - DNA, 33 bp, Homo sapien
ggaatccttcattgtggaaaggaaaatttgaca

SEQ ID NO: 668557 - DNA, 33 bp, Homo sapien
atcaggaggttactaaccaggtccttctgactc

SEQ ID NO: 668558 - DNA, 33 bp, Homo sapien
atcaggaggttactaatcaggtccttctgactc

SEQ ID NO: 668559 - DNA, 33 bp, Homo sapien
ctgcttctcaccaaaaagaagctgagtaataca

SEQ ID NO: 668560 - DNA, 33 bp, Homo sapien
ctgcttctcaccaaaaggaagctgagtaataca

SEQ ID NO: 668561 - DNA, 33 bp, Homo sapien
ctgatagattttctccacctgagagccaagctg

SEQ ID NO: 668562 - DNA, 33 bp, Homo sapien
ctgatagattttctccgcctgagagccaagctg

SEQ ID NO: 668563 - DNA, 33 bp, Homo sapien
tgcacaggctggttaacggtaaggagactggaa

SEQ ID NO: 668564 - DNA, 33 bp, Homo sapien
tgcacaggctggttaatggtaaggagactggaa

SEQ ID NO: 668565 - DNA, 33 bp, Homo sapien
atttgtctaggatcacagcactggtacgtgatg

SEQ ID NO: 668566 - DNA, 33 bp, Homo sapien
atttgtctaggatcaccgcactggtacgtgatg

SEQ ID NO: 668567 - DNA, 33 bp, Homo sapien
caaggcgtttggtccacgttaatcagaaaagat

SEQ ID NO: 668568 - DNA, 33 bp, Homo sapien
caaggcgtttggtccatgttaatcagaaaagat

SEQ ID NO: 668569 - DNA, 33 bp, Homo sapien
acacagaagccacatacagaagctcacgcagct

SEQ ID NO: 668570 - DNA, 33 bp, Homo sapien
acacagaagccacatatagaagctcacgcagct

SEQ ID NO: 668571 - DNA, 33 bp, Homo sapien
gacagggagcagttgcaattttaaataacatag

SEQ ID NO: 668572 - DNA, 33 bp, Homo sapien
gacagggagcagttgccattttaaataacatag

SEQ ID NO: 668573 - DNA, 33 bp, Homo sapien
aatgtacgtgtgaaaacgaaagccagaatgcag

SEQ ID NO: 668574 - DNA, 33 bp, Homo sapien
aatgtacgtgtgaaaatgaaagccagaatgcag

SEQ ID NO: 668575 - DNA, 33 bp, Homo sapien
aaaagccttcgcagaacgttacatgaaaagctc

SEQ ID NO: 668576 - DNA, 33 bp, Homo sapien
aaaagccttcgcagaatgttacatgaaaagctc

SEQ ID NO: 668577 - DNA, 33 bp, Homo sapien
tgtccgatcccatgagaactctatcacgagaca

SEQ ID NO: 668578 - DNA, 33 bp, Homo sapien
tgtccgatcccatgaggactctatcacgagaca

SEQ ID NO: 668579 - DNA, 33 bp, Homo sapien
agtcacagagtagacaagacaaggggataaaac

SEQ ID NO: 668580 - DNA, 33 bp, Homo sapien
agtcacagagtagacaggacaaggggataaaac

SEQ ID NO: 668581 - DNA, 33 bp, Homo sapien
tgtgtctgtattgtaacctccttttcttcaaag

SEQ ID NO: 668582 - DNA, 33 bp, Homo sapien
tgtgtctgtattgtaatctccttttcttcaaag

SEQ ID NO: 668583 - DNA, 33 bp, Homo sapien
ggggaagtctagcagacgaaacaacacgagaca

SEQ ID NO: 668584 - DNA, 33 bp, Homo sapien
ggggaagtctagcagaggaaacaacacgagaca

SEQ ID NO: 668585 - DNA, 33 bp, Homo sapien
ttttcaaattcctgtccattgaacatcaagctt

SEQ ID NO: 668586 - DNA, 33 bp, Homo sapien
ttttcaaattcctgtctattgaacatcaagctt

SEQ ID NO: 668587 - DNA, 33 bp, Homo sapien
tgcctcccaaatacaactagtttaacattttca

SEQ ID NO: 668588 - DNA, 33 bp, Homo sapien
tgcctcccaaatacaattagtttaacattttca

SEQ ID NO: 668589 - DNA, 33 bp, Homo sapien
aagttgctcatgataaacattttgaataatact

SEQ ID NO: 668590 - DNA, 33 bp, Homo sapien
aagttgctcatgataagcattttgaataatact

SEQ ID NO: 668591 - DNA, 33 bp, Homo sapien
atgatgagtgagggaacagggattttaaaccca

SEQ ID NO: 668592 - DNA, 33 bp, Homo sapien
atgatgagtgagggaatagggattttaaaccca

SEQ ID NO: 668593 - DNA, 33 bp, Homo sapien
aaagaacaaggagagcaaggcctgaaacctctc

SEQ ID NO: 668594 - DNA, 33 bp, Homo sapien
aaagaacaaggagagccaggcctgaaacctctc

SEQ ID NO: 668595 - DNA, 33 bp, Homo sapien
tatcacaccactaataccaaaacttgtcaaaga

SEQ ID NO: 668596 - DNA, 33 bp, Homo sapien
tatcacaccactaatatcaaaacttgtcaaaga

SEQ ID NO: 668597 - DNA, 33 bp, Homo sapien
gcacaagccttaggaaactggtagttctgccaa

SEQ ID NO: 668598 - DNA, 33 bp, Homo sapien
gcacaagccttaggaatctggtagttctgccaa

SEQ ID NO: 668599 - DNA, 33 bp, Homo sapien
cattagagagattaaccgagaagagagaagatc

SEQ ID NO: 668600 - DNA, 33 bp, Homo sapien
cattagagagattaactgagaagagagaagatc

SEQ ID NO: 668601 - DNA, 33 bp, Homo sapien
aggaagtaagaaacaacacgaatggagtgatag

SEQ ID NO: 668602 - DNA, 33 bp, Homo sapien
aggaagtaagaaacaatacgaatggagtgatag

SEQ ID NO: 668603 - DNA, 33 bp, Homo sapien
ttcaagtttaaaagtacctctagcttgtgaagc

SEQ ID NO: 668604 - DNA, 33 bp, Homo sapien
ttcaagtttaaaagtatctctagcttgtgaagc

SEQ ID NO: 668605 - DNA, 33 bp, Homo sapien
acatacacactaatgaagtcatttacaacttaa

SEQ ID NO: 668606 - DNA, 33 bp, Homo sapien
acatacacactaatgaggtcatttacaacttaa

SEQ ID NO: 668607 - DNA, 33 bp, Homo sapien
actggagatatagaaacggttatatgagttgat

SEQ ID NO: 668608 - DNA, 33 bp, Homo sapien
actggagatatagaaatggttatatgagttgat

SEQ ID NO: 668609 - DNA, 33 bp, Homo sapien
ggcatcggcaattcaccgctgtctttcctactc

SEQ ID NO: 668610 - DNA, 33 bp, Homo sapien
ggcatcggcaattcacggctgtctttcctactc

SEQ ID NO: 668611 - DNA, 33 bp, Homo sapien
gggatggagaaaaataactaacctgaaggtctt

SEQ ID NO: 668612 - DNA, 33 bp, Homo sapien
gggatggagaaaaatatctaacctgaaggtctt

SEQ ID NO: 668613 - DNA, 33 bp, Homo sapien
tgaaccagactctggaagagcttcccacataaa

SEQ ID NO: 668614 - DNA, 33 bp, Homo sapien
tgaaccagactctggaggagcttcccacataaa

SEQ ID NO: 668615 - DNA, 33 bp, Homo sapien
tagaggcctttacaagcagttgctgcacagtgc

SEQ ID NO: 668616 - DNA, 33 bp, Homo sapien
tagaggcctttacaagtagttgctgcacagtgc

SEQ ID NO: 668617 - DNA, 33 bp, Homo sapien
gtgagaaaaaaagagacgtgaagacagaactgg

SEQ ID NO: 668618 - DNA, 33 bp, Homo sapien
gtgagaaaaaaagagatgtgaagacagaactgg

SEQ ID NO: 668619 - DNA, 33 bp, Homo sapien
ttgaatccagcaaatacgtcagtgaattgataa

SEQ ID NO: 668620 - DNA, 33 bp, Homo sapien
ttgaatccagcaaatatgtcagtgaattgataa

SEQ ID NO: 668621 - DNA, 33 bp, Homo sapien
gcaggagtttactaatgaattggcagataagag

SEQ ID NO: 668622 - DNA, 33 bp, Homo sapien
gcaggagtttactaattaattggcagataagag

SEQ ID NO: 668623 - DNA, 33 bp, Homo sapien
ctcccaacttccctataaggttagtgctattat

SEQ ID NO: 668624 - DNA, 33 bp, Homo sapien
ctcccaacttccctatgaggttagtgctattat

SEQ ID NO: 668625 - DNA, 33 bp, Homo sapien
aagctgagatctaaacccaattttgtctgactc

SEQ ID NO: 668626 - DNA, 33 bp, Homo sapien
aagctgagatctaaacgcaattttgtctgactc

SEQ ID NO: 668627 - DNA, 33 bp, Homo sapien
tcatcatttccctaagacaatgcctgacccagg

SEQ ID NO: 668628 - DNA, 33 bp, Homo sapien
tcatcatttccctaaggcaatgcctgacccagg

SEQ ID NO: 668629 - DNA, 33 bp, Homo sapien
gggagtctaatactttcaggaagaaacaacaac

SEQ ID NO: 668630 - DNA, 33 bp, Homo sapien
gggagtctaatactttgaggaagaaacaacaac

SEQ ID NO: 668631 - DNA, 33 bp, Homo sapien
acccaaatctagacgacgagttaagttcttctg

SEQ ID NO: 668632 - DNA, 33 bp, Homo sapien
acccaaatctagacgatgagttaagttcttctg

SEQ ID NO: 668633 - DNA, 33 bp, Homo sapien
gtttattaaactctccaatcctaaagatgctgg

SEQ ID NO: 668634 - DNA, 33 bp, Homo sapien
gtttattaaactctccgatcctaaagatgctgg

SEQ ID NO: 668635 - DNA, 33 bp, Homo sapien
catggcaagaatgttaagagggaggtacgcagc

SEQ ID NO: 668636 - DNA, 33 bp, Homo sapien
catggcaagaatgttacgagggaggtacgcagc

SEQ ID NO: 668637 - DNA, 33 bp, Homo sapien
taaatgtattacttggaagttgcattttaattt

SEQ ID NO: 668638 - DNA, 33 bp, Homo sapien
taaatgtattacttgggagttgcattttaattt

SEQ ID NO: 668639 - DNA, 33 bp, Homo sapien
gaagttaaggaacacacgcttagttatgcagct

SEQ ID NO: 668640 - DNA, 33 bp, Homo sapien
gaagttaaggaacacatgcttagttatgcagct

SEQ ID NO: 668641 - DNA, 33 bp, Homo sapien
gcccactgcctgtacacataggaactcggtaaa

SEQ ID NO: 668642 - DNA, 33 bp, Homo sapien
gcccactgcctgtacatataggaactcggtaaa

SEQ ID NO: 668643 - DNA, 33 bp, Homo sapien
ctcacgtcaacgtcagaaaattatgttaattaa

SEQ ID NO: 668644 - DNA, 33 bp, Homo sapien
ctcacgtcaacgtcagcaaattatgttaattaa

SEQ ID NO: 668645 - DNA, 33 bp, Homo sapien
gcagcaacagtcaaccaatctgagatgataaac

SEQ ID NO: 668646 - DNA, 33 bp, Homo sapien
gcagcaacagtcaaccgatctgagatgataaac

SEQ ID NO: 668647 - DNA, 33 bp, Homo sapien
tgagggacttagatccaagctggggaaaggaaa

SEQ ID NO: 668648 - DNA, 33 bp, Homo sapien
tgagggacttagatccgagctggggaaaggaaa

SEQ ID NO: 668649 - DNA, 33 bp, Homo sapien
tgatttaacgttgaataaatgacacaccactgg

SEQ ID NO: 668650 - DNA, 33 bp, Homo sapien
tgatttaacgttgaatgaatgacacaccactgg

SEQ ID NO: 668651 - DNA, 33 bp, Homo sapien
tctacaaaagagaaaacggaatgtcccccagtg

SEQ ID NO: 668652 - DNA, 33 bp, Homo sapien
tctacaaaagagaaaatggaatgtcccccagtg

SEQ ID NO: 668653 - DNA, 33 bp, Homo sapien
tactggggccctattacgtctgcaagctctgtt

SEQ ID NO: 668654 - DNA, 33 bp, Homo sapien
tactggggccctattatgtctgcaagctctgtt

SEQ ID NO: 668655 - DNA, 33 bp, Homo sapien
gcaacaatttttttccagacatactctaaaggt

SEQ ID NO: 668656 - DNA, 33 bp, Homo sapien
gcaacaatttttttccggacatactctaaaggt

SEQ ID NO: 668657 - DNA, 33 bp, Homo sapien
cctttcctacacctcacaattctagatatgggg

SEQ ID NO: 668658 - DNA, 33 bp, Homo sapien
cctttcctacacctcataattctagatatgggg

SEQ ID NO: 668659 - DNA, 33 bp, Homo sapien
tagctatcaaaagtaaatatcagtcattgtata

SEQ ID NO: 668660 - DNA, 33 bp, Homo sapien
tagctatcaaaagtaagtatcagtcattgtata

SEQ ID NO: 668661 - DNA, 33 bp, Homo sapien
cccctggaaaagatgaaacctgggtaaaactgg

SEQ ID NO: 668662 - DNA, 33 bp, Homo sapien
cccctggaaaagatgagacctgggtaaaactgg

SEQ ID NO: 668663 - DNA, 33 bp, Homo sapien
caatagggccacacaactcatctgtaaagttcc

SEQ ID NO: 668664 - DNA, 33 bp, Homo sapien
caatagggccacacaattcatctgtaaagttcc

SEQ ID NO: 668665 - DNA, 33 bp, Homo sapien
cataagcagtgatttccctgtgattagctcatt

SEQ ID NO: 668666 - DNA, 33 bp, Homo sapien
cataagcagtgatttcgctgtgattagctcatt

SEQ ID NO: 668667 - DNA, 33 bp, Homo sapien
agagatcaagagcaaacagaaagtgatgcaggg

SEQ ID NO: 668668 - DNA, 33 bp, Homo sapien
agagatcaagagcaaatagaaagtgatgcaggg

SEQ ID NO: 668669 - DNA, 33 bp, Homo sapien
tatttttctacttacactggtgaatacagatct

SEQ ID NO: 668670 - DNA, 33 bp, Homo sapien
tatttttctacttacattggtgaatacagatct

SEQ ID NO: 668671 - DNA, 33 bp, Homo sapien
attaaatggtaaagaaaattcaccgcgtatttg

SEQ ID NO: 668672 - DNA, 33 bp, Homo sapien
attaaatggtaaagaatattcaccgcgtatttg

SEQ ID NO: 668673 - DNA, 33 bp, Homo sapien
accagactgggagaagaaacactgtccttgcta

SEQ ID NO: 668674 - DNA, 33 bp, Homo sapien
accagactgggagaaggaacactgtccttgcta

SEQ ID NO: 668675 - DNA, 33 bp, Homo sapien
taatattctaacaccacgtttcccaacactctg

SEQ ID NO: 668676 - DNA, 33 bp, Homo sapien
taatattctaacaccatgtttcccaacactctg

SEQ ID NO: 668677 - DNA, 33 bp, Homo sapien
gttcaaactctctgcaacatctgttcaccagct

SEQ ID NO: 668678 - DNA, 33 bp, Homo sapien
gttcaaactctctgcagcatctgttcaccagct

SEQ ID NO: 668679 - DNA, 33 bp, Homo sapien
agacatatcatttttgcacaaactacataccat

SEQ ID NO: 668680 - DNA, 33 bp, Homo sapien
agacatatcatttttggacaaactacataccat

SEQ ID NO: 668681 - DNA, 33 bp, Homo sapien
tagctgagatcagaagcctctggtagagactgt

SEQ ID NO: 668682 - DNA, 33 bp, Homo sapien
tagctgagatcagaaggctctggtagagactgt

SEQ ID NO: 668683 - DNA, 33 bp, Homo sapien
tctcacgttgaaaaagcctgccctataggttgt

SEQ ID NO: 668684 - DNA, 33 bp, Homo sapien
tctcacgttgaaaaaggctgccctataggttgt

SEQ ID NO: 668685 - DNA, 33 bp, Homo sapien
tcagcttggcaatttaagacaggttccaatttg

SEQ ID NO: 668686 - DNA, 33 bp, Homo sapien
tcagcttggcaatttatgacaggttccaatttg

SEQ ID NO: 668687 - DNA, 33 bp, Homo sapien
atagactgtgagccaaactgttatagtttccca

SEQ ID NO: 668688 - DNA, 33 bp, Homo sapien
atagactgtgagccaagctgttatagtttccca

SEQ ID NO: 668689 - DNA, 33 bp, Homo sapien
gacaggacatggcaaaattattcagaggaaggt

SEQ ID NO: 668690 - DNA, 33 bp, Homo sapien
gacaggacatggcaaagttattcagaggaaggt

SEQ ID NO: 668691 - DNA, 33 bp, Homo sapien
gcatcactaaggcagacggagatgagccaggac

SEQ ID NO: 668692 - DNA, 33 bp, Homo sapien
gcatcactaaggcagagggagatgagccaggac

SEQ ID NO: 668693 - DNA, 33 bp, Homo sapien
gaactatcgtaactccaaaatacccatagagtt

SEQ ID NO: 668694 - DNA, 33 bp, Homo sapien
gaactatcgtaactccgaaatacccatagagtt

SEQ ID NO: 668695 - DNA, 33 bp, Homo sapien
ctgacttcgttacctaaccccaccattctcagg

SEQ ID NO: 668696 - DNA, 33 bp, Homo sapien
ctgacttcgttacctacccccaccattctcagg

SEQ ID NO: 668697 - DNA, 33 bp, Homo sapien
attaatcaccatcaaacgcaagtaaaaaatgca

SEQ ID NO: 668698 - DNA, 33 bp, Homo sapien
attaatcaccatcaaatgcaagtaaaaaatgca

SEQ ID NO: 668699 - DNA, 33 bp, Homo sapien
tttaatcaatcccagacgtttaaccctcaaaac

SEQ ID NO: 668700 - DNA, 33 bp, Homo sapien
tttaatcaatcccagatgtttaaccctcaaaac

SEQ ID NO: 668701 - DNA, 33 bp, Homo sapien
tatttcttgctggatacgcaatttagagggatg

SEQ ID NO: 668702 - DNA, 33 bp, Homo sapien
tatttcttgctggatatgcaatttagagggatg

SEQ ID NO: 668703 - DNA, 33 bp, Homo sapien
ctttactgaaagccaccgtacatactattggaa

SEQ ID NO: 668704 - DNA, 33 bp, Homo sapien
ctttactgaaagccactgtacatactattggaa

SEQ ID NO: 668705 - DNA, 33 bp, Homo sapien
tcaagtctaaaaactacgataaagctgtcatga

SEQ ID NO: 668706 - DNA, 33 bp, Homo sapien
tcaagtctaaaaactatgataaagctgtcatga

SEQ ID NO: 668707 - DNA, 33 bp, Homo sapien
aaaaggaggaaactcacgcaaggaaaatgcact

SEQ ID NO: 668708 - DNA, 33 bp, Homo sapien
aaaaggaggaaactcatgcaaggaaaatgcact

SEQ ID NO: 668709 - DNA, 33 bp, Homo sapien
cacagaagaaaagtcactcaaatctgccaaaac

SEQ ID NO: 668710 - DNA, 33 bp, Homo sapien
cacagaagaaaagtcagtcaaatctgccaaaac

SEQ ID NO: 668711 - DNA, 33 bp, Homo sapien
gctacctgtatcactcactgtcaggccaaatga

SEQ ID NO: 668712 - DNA, 33 bp, Homo sapien
gctacctgtatcactcgctgtcaggccaaatga

SEQ ID NO: 668713 - DNA, 33 bp, Homo sapien
aatcaaagctcgggcaatgaaaatccacatttc

SEQ ID NO: 668714 - DNA, 33 bp, Homo sapien
aatcaaagctcgggcattgaaaatccacatttc

SEQ ID NO: 668715 - DNA, 33 bp, Homo sapien
cagtgtcttgagttaaatatggacagagtgtac

SEQ ID NO: 668716 - DNA, 33 bp, Homo sapien
cagtgtcttgagttaagtatggacagagtgtac

SEQ ID NO: 668717 - DNA, 33 bp, Homo sapien
tgaaaataagccaaacacactttaactgataaa

SEQ ID NO: 668718 - DNA, 33 bp, Homo sapien
tgaaaataagccaaacgcactttaactgataaa

SEQ ID NO: 668719 - DNA, 33 bp, Homo sapien
ccatttagtaacagtcacttcacttctcaggcc

SEQ ID NO: 668720 - DNA, 33 bp, Homo sapien
ccatttagtaacagtcgcttcacttctcaggcc

SEQ ID NO: 668721 - DNA, 33 bp, Homo sapien
ttcaagtatctgaggccagtgatccctcctctg

SEQ ID NO: 668722 - DNA, 33 bp, Homo sapien
ttcaagtatctgaggctagtgatccctcctctg

SEQ ID NO: 668723 - DNA, 33 bp, Homo sapien
cattaagaattgactgaaacatttctacactgc

SEQ ID NO: 668724 - DNA, 33 bp, Homo sapien
cattaagaattgactggaacatttctacactgc

SEQ ID NO: 668725 - DNA, 33 bp, Homo sapien
ttcattatgcttctgaacttggaaaatgactca

SEQ ID NO: 668726 - DNA, 33 bp, Homo sapien
ttcattatgcttctgagcttggaaaatgactca

SEQ ID NO: 668727 - DNA, 33 bp, Homo sapien
aacaatggagattcgccacttgttgataaggtc

SEQ ID NO: 668728 - DNA, 33 bp, Homo sapien
aacaatggagattcgctacttgttgataaggtc

SEQ ID NO: 668729 - DNA, 33 bp, Homo sapien
aataaatatttattgaatagctggatgaatgac

SEQ ID NO: 668730 - DNA, 33 bp, Homo sapien
aataaatatttattgactagctggatgaatgac

SEQ ID NO: 668731 - DNA, 33 bp, Homo sapien
ctgtgtcagggtaatcaaaaattctcagacagc

SEQ ID NO: 668732 - DNA, 33 bp, Homo sapien
ctgtgtcagggtaatcgaaaattctcagacagc

SEQ ID NO: 668733 - DNA, 33 bp, Homo sapien
aaatatgaggtctgcaatcagaaggtgagggcg

SEQ ID NO: 668734 - DNA, 33 bp, Homo sapien
aaatatgaggtctgcagtcagaaggtgagggcg

SEQ ID NO: 668735 - DNA, 33 bp, Homo sapien
ctccagtatctcctgaaaataaggcattcttct

SEQ ID NO: 668736 - DNA, 33 bp, Homo sapien
ctccagtatctcctgagaataaggcattcttct

SEQ ID NO: 668737 - DNA, 33 bp, Homo sapien
tctagtgagaagggcacgtatgaagaaaactgt

SEQ ID NO: 668738 - DNA, 33 bp, Homo sapien
tctagtgagaagggcatgtatgaagaaaactgt

SEQ ID NO: 668739 - DNA, 33 bp, Homo sapien
agtgagtgctaaaaaaaagtggaatgaaagctg

SEQ ID NO: 668740 - DNA, 33 bp, Homo sapien
agtgagtgctaaaaaagagtggaatgaaagctg

SEQ ID NO: 668741 - DNA, 33 bp, Homo sapien
ctgtctgaccaataaggatgacatttacacaat

SEQ ID NO: 668742 - DNA, 33 bp, Homo sapien
ctgtctgaccaataagtatgacatttacacaat

SEQ ID NO: 668743 - DNA, 33 bp, Homo sapien
cacaatttttacttcaagtcagctgtttgtgat

SEQ ID NO: 668744 - DNA, 33 bp, Homo sapien
cacaatttttacttcaggtcagctgtttgtgat

SEQ ID NO: 668745 - DNA, 33 bp, Homo sapien
gtccactggatttggccatatgtagggagacca

SEQ ID NO: 668746 - DNA, 33 bp, Homo sapien
gtccactggatttggctatatgtagggagacca

SEQ ID NO: 668747 - DNA, 33 bp, Homo sapien
ccaaataataagcaaacttgtcaccaccgattt

SEQ ID NO: 668748 - DNA, 33 bp, Homo sapien
ccaaataataagcaaatttgtcaccaccgattt

SEQ ID NO: 668749 - DNA, 33 bp, Homo sapien
aagctcaactgttacacagagaaaggaaagtca

SEQ ID NO: 668750 - DNA, 33 bp, Homo sapien
aagctcaactgttacagagagaaaggaaagtca

SEQ ID NO: 668751 - DNA, 33 bp, Homo sapien
taacaaaatcaataaactctgatcaagagacca

SEQ ID NO: 668752 - DNA, 33 bp, Homo sapien
taacaaaatcaataaagtctgatcaagagacca

SEQ ID NO: 668753 - DNA, 33 bp, Homo sapien
ttatttattgagtcccaatccatgttcaacacc

SEQ ID NO: 668754 - DNA, 33 bp, Homo sapien
ttatttattgagtccctatccatgttcaacacc

SEQ ID NO: 668755 - DNA, 33 bp, Homo sapien
caaaataactcaaaaaaatcacaataaaacata

SEQ ID NO: 668756 - DNA, 33 bp, Homo sapien
caaaataactcaaaaacatcacaataaaacata

SEQ ID NO: 668757 - DNA, 33 bp, Homo sapien
agcctgaggtgcttaccatagaacctgacaaat

SEQ ID NO: 668758 - DNA, 33 bp, Homo sapien
agcctgaggtgcttactatagaacctgacaaat

SEQ ID NO: 668759 - DNA, 33 bp, Homo sapien
taaccaagtgtcactaacaagtatgtccagagt

SEQ ID NO: 668760 - DNA, 33 bp, Homo sapien
taaccaagtgtcactagcaagtatgtccagagt

SEQ ID NO: 668761 - DNA, 33 bp, Homo sapien
tatgtggaaagcaaaaaggccttaagccccgag

SEQ ID NO: 668762 - DNA, 33 bp, Homo sapien
tatgtggaaagcaaaacggccttaagccccgag

SEQ ID NO: 668763 - DNA, 33 bp, Homo sapien
tttataagctaatcaacgattggaagtgctttg

SEQ ID NO: 668764 - DNA, 33 bp, Homo sapien
tttataagctaatcaatgattggaagtgctttg

SEQ ID NO: 668765 - DNA, 33 bp, Homo sapien
ttttcactaggcaagtcaatttacccagcatat

SEQ ID NO: 668766 - DNA, 33 bp, Homo sapien
ttttcactaggcaagttaatttacccagcatat

SEQ ID NO: 668767 - DNA, 33 bp, Homo sapien
atacacgggtaaaaaaatgcaagagattgctct

SEQ ID NO: 668768 - DNA, 33 bp, Homo sapien
atacacgggtaaaaaattgcaagagattgctct

SEQ ID NO: 668769 - DNA, 33 bp, Homo sapien
ctggtcaaggaaaacaatgattcctgtgtctta

SEQ ID NO: 668770 - DNA, 33 bp, Homo sapien
ctggtcaaggaaaacagtgattcctgtgtctta

SEQ ID NO: 668771 - DNA, 33 bp, Homo sapien
tagtttaatagttgtgaatctgctggttttcat

SEQ ID NO: 668772 - DNA, 33 bp, Homo sapien
tagtttaatagttgtggatctgctggttttcat

SEQ ID NO: 668773 - DNA, 33 bp, Homo sapien
acttctgctactcagacgttaagattgtccaat

SEQ ID NO: 668774 - DNA, 33 bp, Homo sapien
acttctgctactcagatgttaagattgtccaat

SEQ ID NO: 668775 - DNA, 33 bp, Homo sapien
cttgtgagggcttcccaatacacagatggccat

SEQ ID NO: 668776 - DNA, 33 bp, Homo sapien
cttgtgagggcttcccgatacacagatggccat

SEQ ID NO: 668777 - DNA, 33 bp, Homo sapien
tgtgaagccctagcaccgtgactggtacagggt

SEQ ID NO: 668778 - DNA, 33 bp, Homo sapien
tgtgaagccctagcactgtgactggtacagggt

SEQ ID NO: 668779 - DNA, 33 bp, Homo sapien
caaaaatcatagtgcagattatcacagtttgtc

SEQ ID NO: 668780 - DNA, 33 bp, Homo sapien
caaaaatcatagtgcatattatcacagtttgtc

SEQ ID NO: 668781 - DNA, 33 bp, Homo sapien
ttggtgtctcctttcaccacgttgacttcccac

SEQ ID NO: 668782 - DNA, 33 bp, Homo sapien
ttggtgtctcctttcatcacgttgacttcccac

SEQ ID NO: 668783 - DNA, 33 bp, Homo sapien
tattggacaagaccaaatatggaaagtgtggga

SEQ ID NO: 668784 - DNA, 33 bp, Homo sapien
tattggacaagaccaagtatggaaagtgtggga

SEQ ID NO: 668785 - DNA, 33 bp, Homo sapien
aaaacatggcaagatagcccccttctgtgtttg

SEQ ID NO: 668786 - DNA, 33 bp, Homo sapien
aaaacatggcaagatatcccccttctgtgtttg

SEQ ID NO: 668787 - DNA, 33 bp, Homo sapien
gttaacatcgtaccaaatccaatatggagtaaa

SEQ ID NO: 668788 - DNA, 33 bp, Homo sapien
gttaacatcgtaccaagtccaatatggagtaaa

SEQ ID NO: 668789 - DNA, 33 bp, Homo sapien
gccattcgctgaagctcacaaacactatgccac

SEQ ID NO: 668790 - DNA, 33 bp, Homo sapien
gccattcgctgaagctgacaaacactatgccac

SEQ ID NO: 668791 - DNA, 33 bp, Homo sapien
tgtgttagggatattcggaactaattagagttc

SEQ ID NO: 668792 - DNA, 33 bp, Homo sapien
tgtgttagggatattctgaactaattagagttc

SEQ ID NO: 668793 - DNA, 33 bp, Homo sapien
atttgaatttagaccactgatagtttaggcaga

SEQ ID NO: 668794 - DNA, 33 bp, Homo sapien
atttgaatttagaccattgatagtttaggcaga

SEQ ID NO: 668795 - DNA, 33 bp, Homo sapien
ttgatggttcccaagcgaggacagtgtaggctg

SEQ ID NO: 668796 - DNA, 33 bp, Homo sapien
ttgatggttcccaagctaggacagtgtaggctg

SEQ ID NO: 668797 - DNA, 33 bp, Homo sapien
gggtctagtgaagaaacgacaggattgatttct

SEQ ID NO: 668798 - DNA, 33 bp, Homo sapien
gggtctagtgaagaaatgacaggattgatttct

SEQ ID NO: 668799 - DNA, 33 bp, Homo sapien
aacacatttcagcatacgtaggtctctaattaa

SEQ ID NO: 668800 - DNA, 33 bp, Homo sapien
aacacatttcagcatatgtaggtctctaattaa

SEQ ID NO: 668801 - DNA, 33 bp, Homo sapien
ttcctttcaggttaaaagacaaagaagtttgaa

SEQ ID NO: 668802 - DNA, 33 bp, Homo sapien
ttcctttcaggttaaatgacaaagaagtttgaa

SEQ ID NO: 668803 - DNA, 33 bp, Homo sapien
aaaggagcagtgccaacagatccagagctgaca

SEQ ID NO: 668804 - DNA, 33 bp, Homo sapien
aaaggagcagtgccaatagatccagagctgaca

SEQ ID NO: 668805 - DNA, 33 bp, Homo sapien
ttcaacaattcccacagtactttattgtgtagt

SEQ ID NO: 668806 - DNA, 33 bp, Homo sapien
ttcaacaattcccacattactttattgtgtagt

SEQ ID NO: 668807 - DNA, 33 bp, Homo sapien
tctaatatggtactcactagacaaattcatggg

SEQ ID NO: 668808 - DNA, 33 bp, Homo sapien
tctaatatggtactcagtagacaaattcatggg

SEQ ID NO: 668809 - DNA, 33 bp, Homo sapien
cttcacactttacaaaattattgcacatttatt

SEQ ID NO: 668810 - DNA, 33 bp, Homo sapien
cttcacactttacaaagttattgcacatttatt

SEQ ID NO: 668811 - DNA, 33 bp, Homo sapien
caggttagccctgaaacttatttgggttcccat

SEQ ID NO: 668812 - DNA, 33 bp, Homo sapien
caggttagccctgaaatttatttgggttcccat

SEQ ID NO: 668813 - DNA, 33 bp, Homo sapien
ctccctgggattgggacgatgcggctgagaccg

SEQ ID NO: 668814 - DNA, 33 bp, Homo sapien
ctccctgggattgggatgatgcggctgagaccg

SEQ ID NO: 668815 - DNA, 33 bp, Homo sapien
ggagcatgttaacctacagccaaaatgatagag

SEQ ID NO: 668816 - DNA, 33 bp, Homo sapien
ggagcatgttaacctatagccaaaatgatagag

SEQ ID NO: 668817 - DNA, 33 bp, Homo sapien
ccatggctgatgcctcaaatgcaatgcagcaag

SEQ ID NO: 668818 - DNA, 33 bp, Homo sapien
ccatggctgatgcctcgaatgcaatgcagcaag

SEQ ID NO: 668819 - DNA, 33 bp, Homo sapien
tcacattaagatgaaaagtgctctaatgccacc

SEQ ID NO: 668820 - DNA, 33 bp, Homo sapien
tcacattaagatgaaaggtgctctaatgccacc

SEQ ID NO: 668821 - DNA, 33 bp, Homo sapien
agacttcaactcatgcactatttctttcttttt

SEQ ID NO: 668822 - DNA, 33 bp, Homo sapien
agacttcaactcatgcgctatttctttcttttt

SEQ ID NO: 668823 - DNA, 33 bp, Homo sapien
aacagagagtatctacgatgtgcaagatattac

SEQ ID NO: 668824 - DNA, 33 bp, Homo sapien
aacagagagtatctactatgtgcaagatattac

SEQ ID NO: 668825 - DNA, 33 bp, Homo sapien
ggtaggatcaaaggtcaaaaccctggatatgag

SEQ ID NO: 668826 - DNA, 33 bp, Homo sapien
ggtaggatcaaaggtcgaaaccctggatatgag

SEQ ID NO: 668827 - DNA, 33 bp, Homo sapien
agcaattctgtgagaaaggaaggtgaatatagc

SEQ ID NO: 668828 - DNA, 33 bp, Homo sapien
agcaattctgtgagaacggaaggtgaatatagc

SEQ ID NO: 668829 - DNA, 33 bp, Homo sapien
taaagtcttaaggtgggagatgtttgtgagcat

SEQ ID NO: 668830 - DNA, 33 bp, Homo sapien
taaagtcttaaggtggtagatgtttgtgagcat

SEQ ID NO: 668831 - DNA, 33 bp, Homo sapien
tttgtgagcatctcgacaggaaaaagaagtgaa

SEQ ID NO: 668832 - DNA, 33 bp, Homo sapien
tttgtgagcatctcgataggaaaaagaagtgaa

SEQ ID NO: 668833 - DNA, 33 bp, Homo sapien
aacatttcctaaaaacagaccattattagcaaa

SEQ ID NO: 668834 - DNA, 33 bp, Homo sapien
aacatttcctaaaaactgaccattattagcaaa

SEQ ID NO: 668835 - DNA, 33 bp, Homo sapien
tataggtttaaaaacaacagtacttcagttgcc

SEQ ID NO: 668836 - DNA, 33 bp, Homo sapien
tataggtttaaaaacagcagtacttcagttgcc

SEQ ID NO: 668837 - DNA, 33 bp, Homo sapien
aaataaataagcagtcgcattactgcaatccag

SEQ ID NO: 668838 - DNA, 33 bp, Homo sapien
aaataaataagcagtctcattactgcaatccag

SEQ ID NO: 668839 - DNA, 33 bp, Homo sapien
tacttggaatattgaacagctatttgtttaaaa

SEQ ID NO: 668840 - DNA, 33 bp, Homo sapien
tacttggaatattgaagagctatttgtttaaaa

SEQ ID NO: 668841 - DNA, 33 bp, Homo sapien
ggccaatattaaacacgcttctagaatctggct

SEQ ID NO: 668842 - DNA, 33 bp, Homo sapien
ggccaatattaaacactcttctagaatctggct

SEQ ID NO: 668843 - DNA, 33 bp, Homo sapien
atacatagttttctgaagtttaataactacact

SEQ ID NO: 668844 - DNA, 33 bp, Homo sapien
atacatagttttctgaggtttaataactacact

SEQ ID NO: 668845 - DNA, 33 bp, Homo sapien
tcatcaccttgtaacacatttgaagggatataa

SEQ ID NO: 668846 - DNA, 33 bp, Homo sapien
tcatcaccttgtaacatatttgaagggatataa

SEQ ID NO: 668847 - DNA, 33 bp, Homo sapien
ctcctcaatttgttaaagaatcttctaccaagt

SEQ ID NO: 668848 - DNA, 33 bp, Homo sapien
ctcctcaatttgttaaggaatcttctaccaagt

SEQ ID NO: 668849 - DNA, 33 bp, Homo sapien
cactttcattcaatccagataatcaaaccaaaa

SEQ ID NO: 668850 - DNA, 33 bp, Homo sapien
cactttcattcaatccggataatcaaaccaaaa

SEQ ID NO: 668851 - DNA, 33 bp, Homo sapien
atctattcctaatctacatgactccaagagtaa

SEQ ID NO: 668852 - DNA, 33 bp, Homo sapien
atctattcctaatctatatgactccaagagtaa

SEQ ID NO: 668853 - DNA, 33 bp, Homo sapien
tcttagtagcctttcacagagttttctgctata

SEQ ID NO: 668854 - DNA, 33 bp, Homo sapien
tcttagtagcctttcatagagttttctgctata

SEQ ID NO: 668855 - DNA, 33 bp, Homo sapien
aagaagttcatgttgaagaaattaagacctcct

SEQ ID NO: 668856 - DNA, 33 bp, Homo sapien
aagaagttcatgttgaggaaattaagacctcct

SEQ ID NO: 668857 - DNA, 33 bp, Homo sapien
gaaagccacaggaggggaaaaaaatgtctcaga

SEQ ID NO: 668858 - DNA, 33 bp, Homo sapien
gaaagccacaggagggtaaaaaaatgtctcaga

SEQ ID NO: 668859 - DNA, 33 bp, Homo sapien
ctagaacagtggttacaaaatgcaggtcagcag

SEQ ID NO: 668860 - DNA, 33 bp, Homo sapien
ctagaacagtggttacgaaatgcaggtcagcag

SEQ ID NO: 668861 - DNA, 33 bp, Homo sapien
cactattacacatagccaatagatgccgcttta

SEQ ID NO: 668862 - DNA, 33 bp, Homo sapien
cactattacacatagcgaatagatgccgcttta

SEQ ID NO: 668863 - DNA, 33 bp, Homo sapien
tcaggaaaagacaggtaaaaagagagacagaaa

SEQ ID NO: 668864 - DNA, 33 bp, Homo sapien
tcaggaaaagacaggtgaaaagagagacagaaa

SEQ ID NO: 668865 - DNA, 33 bp, Homo sapien
aggaaagcaaatgcaaaaggacagtagccttca

SEQ ID NO: 668866 - DNA, 33 bp, Homo sapien
aggaaagcaaatgcaagaggacagtagccttca

SEQ ID NO: 668867 - DNA, 33 bp, Homo sapien
catcacagtttcttcaaaagacatttgataaaa

SEQ ID NO: 668868 - DNA, 33 bp, Homo sapien
catcacagtttcttcagaagacatttgataaaa

SEQ ID NO: 668869 - DNA, 33 bp, Homo sapien
agccttctaaaatccaaggaaacattgagagct

SEQ ID NO: 668870 - DNA, 33 bp, Homo sapien
agccttctaaaatccagggaaacattgagagct

SEQ ID NO: 668871 - DNA, 33 bp, Homo sapien
gtttgcaggttctaccaccaaaacatctcaaat

SEQ ID NO: 668872 - DNA, 33 bp, Homo sapien
gtttgcaggttctaccgccaaaacatctcaaat

SEQ ID NO: 668873 - DNA, 33 bp, Homo sapien
gagctagataatgcaaatcctgtagaacattgg

SEQ ID NO: 668874 - DNA, 33 bp, Homo sapien
gagctagataatgcaagtcctgtagaacattgg

SEQ ID NO: 668875 - DNA, 33 bp, Homo sapien
ccacaatttatcagacaaaaaagctttcataca

SEQ ID NO: 668876 - DNA, 33 bp, Homo sapien
ccacaatttatcagacgaaaaagctttcataca

SEQ ID NO: 668877 - DNA, 33 bp, Homo sapien
accatcgtttcttcctaaaatgcttattcatgt

SEQ ID NO: 668878 - DNA, 33 bp, Homo sapien
accatcgtttcttcctgaaatgcttattcatgt

SEQ ID NO: 668879 - DNA, 33 bp, Homo sapien
ccagaggtggagtgcaaaaatgaacacagtgac

SEQ ID NO: 668880 - DNA, 33 bp, Homo sapien
ccagaggtggagtgcagaaatgaacacagtgac

SEQ ID NO: 668881 - DNA, 33 bp, Homo sapien
agaaatactctttgccagcctaacatggactca

SEQ ID NO: 668882 - DNA, 33 bp, Homo sapien
agaaatactctttgccggcctaacatggactca

SEQ ID NO: 668883 - DNA, 33 bp, Homo sapien
aaatgcccagcaacacagatgtacgtaaatgcc

SEQ ID NO: 668884 - DNA, 33 bp, Homo sapien
aaatgcccagcaacacggatgtacgtaaatgcc

SEQ ID NO: 668885 - DNA, 33 bp, Homo sapien
agctgcttctgattgtaaactagctgtgatcag

SEQ ID NO: 668886 - DNA, 33 bp, Homo sapien
agctgcttctgattgtgaactagctgtgatcag

SEQ ID NO: 668887 - DNA, 33 bp, Homo sapien
caatcttgagtttgcacattgaaattccaacac

SEQ ID NO: 668888 - DNA, 33 bp, Homo sapien
caatcttgagtttgcatattgaaattccaacac

SEQ ID NO: 668889 - DNA, 33 bp, Homo sapien
tgcaagacatcacagagaatttgttggcttaat

SEQ ID NO: 668890 - DNA, 33 bp, Homo sapien
tgcaagacatcacagataatttgttggcttaat

SEQ ID NO: 668891 - DNA, 33 bp, Homo sapien
aatggattatacagaaagatgatgcaattaaaa

SEQ ID NO: 668892 - DNA, 33 bp, Homo sapien
aatggattatacagaacgatgatgcaattaaaa

SEQ ID NO: 668893 - DNA, 33 bp, Homo sapien
ggagaaaaaaagtcaaagagattgtgacagcat

SEQ ID NO: 668894 - DNA, 33 bp, Homo sapien
ggagaaaaaaagtcaaggagattgtgacagcat

SEQ ID NO: 668895 - DNA, 33 bp, Homo sapien
gtaccgacacacctgaactagatgcttccacca

SEQ ID NO: 668896 - DNA, 33 bp, Homo sapien
gtaccgacacacctgagctagatgcttccacca

SEQ ID NO: 668897 - DNA, 33 bp, Homo sapien
attgtagtagccccaacgtgtggaagttgtttc

SEQ ID NO: 668898 - DNA, 33 bp, Homo sapien
attgtagtagccccaaggtgtggaagttgtttc

SEQ ID NO: 668899 - DNA, 33 bp, Homo sapien
tcaaccaagtggtcaactataacatgcttatga

SEQ ID NO: 668900 - DNA, 33 bp, Homo sapien
tcaaccaagtggtcaagtataacatgcttatga

SEQ ID NO: 668901 - DNA, 33 bp, Homo sapien
actgcaaatagcaccacgtagtttcttaagtgt

SEQ ID NO: 668902 - DNA, 33 bp, Homo sapien
actgcaaatagcaccatgtagtttcttaagtgt

SEQ ID NO: 668903 - DNA, 33 bp, Homo sapien
ttaatgccaaaatgagcagtagtagaaaaagga

SEQ ID NO: 668904 - DNA, 33 bp, Homo sapien
ttaatgccaaaatgagtagtagtagaaaaagga

SEQ ID NO: 668905 - DNA, 33 bp, Homo sapien
gagagaattggaggaaataagtgtacctggctg

SEQ ID NO: 668906 - DNA, 33 bp, Homo sapien
gagagaattggaggaattaagtgtacctggctg

SEQ ID NO: 668907 - DNA, 33 bp, Homo sapien
aaatggcaacagtgtaactcttgctgatacctc

SEQ ID NO: 668908 - DNA, 33 bp, Homo sapien
aaatggcaacagtgtagctcttgctgatacctc

SEQ ID NO: 668909 - DNA, 33 bp, Homo sapien
ctttgttaaaaagaagcatggcagctctgcaca

SEQ ID NO: 668910 - DNA, 33 bp, Homo sapien
ctttgttaaaaagaagtatggcagctctgcaca

SEQ ID NO: 668911 - DNA, 33 bp, Homo sapien
ttggaacacaccttgaagagcaatgctttattt

SEQ ID NO: 668912 - DNA, 33 bp, Homo sapien
ttggaacacaccttgaggagcaatgctttattt

SEQ ID NO: 668913 - DNA, 33 bp, Homo sapien
tatttttgttacagccacccggatggactaagg

SEQ ID NO: 668914 - DNA, 33 bp, Homo sapien
tatttttgttacagccgcccggatggactaagg

SEQ ID NO: 668915 - DNA, 33 bp, Homo sapien
gtcagcacctgagtaacgggatcatttgtaccc

SEQ ID NO: 668916 - DNA, 33 bp, Homo sapien
gtcagcacctgagtaatgggatcatttgtaccc

SEQ ID NO: 668917 - DNA, 33 bp, Homo sapien
ttaattgagtttcatgcaaggtccatatgtcat

SEQ ID NO: 668918 - DNA, 33 bp, Homo sapien
ttaattgagtttcatggaaggtccatatgtcat

SEQ ID NO: 668919 - DNA, 33 bp, Homo sapien
aaacaaacactattcacagtcaggaatgttaga

SEQ ID NO: 668920 - DNA, 33 bp, Homo sapien
aaacaaacactattcagagtcaggaatgttaga

SEQ ID NO: 668921 - DNA, 33 bp, Homo sapien
agtccctcatggaccccagagacaagaagaaag

SEQ ID NO: 668922 - DNA, 33 bp, Homo sapien
agtccctcatggaccctagagacaagaagaaag

SEQ ID NO: 668923 - DNA, 33 bp, Homo sapien; identical to SEQ ID NO: 668921

SEQ ID NO: 668924 - DNA, 33 bp, Homo sapien; identical to SEQ ID NO: 668922

SEQ ID NO: 668925 - DNA, 33 bp, Homo sapien
accagaattacagctacctcaaaggagagaaag

SEQ ID NO: 668926 - DNA, 33 bp, Homo sapien
accagaattacagctatctcaaaggagagaaag

SEQ ID NO: 668927 - DNA, 33 bp, Homo sapien
gttttaatgttaagataaaaaaacgcagcagaa

SEQ ID NO: 668928 - DNA, 33 bp, Homo sapien
gttttaatgttaagattaaaaaacgcagcagaa

SEQ ID NO: 668929 - DNA, 33 bp, Homo sapien
atcagatgctagaataagtatggatatataatt

SEQ ID NO: 668930 - DNA, 33 bp, Homo sapien
atcagatgctagaataggtatggatatataatt

SEQ ID NO: 668931 - DNA, 33 bp, Homo sapien
tggtctatattggcaacttcaaaatttaattct

SEQ ID NO: 668932 - DNA, 33 bp, Homo sapien
tggtctatattggcaatttcaaaatttaattct

SEQ ID NO: 668933 - DNA, 33 bp, Homo sapien
agacaaaggcattcagactagcatgtggcgttt

SEQ ID NO: 668934 - DNA, 33 bp, Homo sapien
agacaaaggcattcagtctagcatgtggcgttt

SEQ ID NO: 668935 - DNA, 33 bp, Homo sapien
tcaagacaagttaggacagtaatgtcaaaagct

SEQ ID NO: 668936 - DNA, 33 bp, Homo sapien
tcaagacaagttaggatagtaatgtcaaaagct

SEQ ID NO: 668937 - DNA, 33 bp, Homo sapien
ggccagcttggtcacgaacacactgggactggt

SEQ ID NO: 668938 - DNA, 33 bp, Homo sapien
ggccagcttggtcacggacacactgggactggt

SEQ ID NO: 668939 - DNA, 33 bp, Homo sapien
tgtaggtactcagaaagtattagtttcctctct

SEQ ID NO: 668940 - DNA, 33 bp, Homo sapien
tgtaggtactcagaaattattagtttcctctct

SEQ ID NO: 668941 - DNA, 33 bp, Homo sapien
gctaacatcttaaagcaccatgtcttattaatt

SEQ ID NO: 668942 - DNA, 33 bp, Homo sapien
gctaacatcttaaagctccatgtcttattaatt

SEQ ID NO: 668943 - DNA, 33 bp, Homo sapien
cagacacatagtcagcactcaatatttgctgta

SEQ ID NO: 668944 - DNA, 33 bp, Homo sapien
cagacacatagtcagctctcaatatttgctgta

SEQ ID NO: 668945 - DNA, 33 bp, Homo sapien
ctagcaaaaagtcctacgtgagtcagagttggt

SEQ ID NO: 668946 - DNA, 33 bp, Homo sapien
ctagcaaaaagtcctatgtgagtcagagttggt

SEQ ID NO: 668947 - DNA, 33 bp, Homo sapien
ataaaacaatcttaggacattgataaagagaaa

SEQ ID NO: 668948 - DNA, 33 bp, Homo sapien
ataaaacaatcttaggccattgataaagagaaa

SEQ ID NO: 668949 - DNA, 33 bp, Homo sapien
gtggttgatacacagaagttcactgtattgtag

SEQ ID NO: 668950 - DNA, 33 bp, Homo sapien
gtggttgatacacagatgttcactgtattgtag

SEQ ID NO: 668951 - DNA, 33 bp, Homo sapien
aggatccctgatcaataagcatacttttgctgc

SEQ ID NO: 668952 - DNA, 33 bp, Homo sapien
aggatccctgatcaatgagcatacttttgctgc

SEQ ID NO: 668953 - DNA, 33 bp, Homo sapien
ttatgtggattaagataataaagtgatctttat

SEQ ID NO: 668954 - DNA, 33 bp, Homo sapien
ttatgtggattaagatgataaagtgatctttat

SEQ ID NO: 668955 - DNA, 33 bp, Homo sapien
caataaacattaactaaatatgcagagtcacaa

SEQ ID NO: 668956 - DNA, 33 bp, Homo sapien
caataaacattaactacatatgcagagtcacaa

SEQ ID NO: 668957 - DNA, 33 bp, Homo sapien
caggaaataagctgagaatccacctccatgtat

SEQ ID NO: 668958 - DNA, 33 bp, Homo sapien
caggaaataagctgagtatccacctccatgtat

SEQ ID NO: 668959 - DNA, 33 bp, Homo sapien
taaatccaaagcatgaagcctttctgagtgtgg

SEQ ID NO: 668960 - DNA, 33 bp, Homo sapien
taaatccaaagcatgaggcctttctgagtgtgg

SEQ ID NO: 668961 - DNA, 33 bp, Homo sapien
ccagtttgaatgaaaaacatcactgaaataatc

SEQ ID NO: 668962 - DNA, 33 bp, Homo sapien
ccagtttgaatgaaaaccatcactgaaataatc

SEQ ID NO: 668963 - DNA, 33 bp, Homo sapien
gagtccctggagattacaactgctaagtctgtg

SEQ ID NO: 668964 - DNA, 33 bp, Homo sapien
gagtccctggagattataactgctaagtctgtg

SEQ ID NO: 668965 - DNA, 33 bp, Homo sapien
attacagtctttattccatttcatgtgaacatt

SEQ ID NO: 668966 - DNA, 33 bp, Homo sapien
attacagtctttattctatttcatgtgaacatt

SEQ ID NO: 668967 - DNA, 33 bp, Homo sapien
gagaccaggactgatacagggaagagtgagcag

SEQ ID NO: 668968 - DNA, 33 bp, Homo sapien
gagaccaggactgatatagggaagagtgagcag

SEQ ID NO: 668969 - DNA, 33 bp, Homo sapien
gacctgaggtactctaacggattttgccagaaa

SEQ ID NO: 668970 - DNA, 33 bp, Homo sapien
gacctgaggtactctaccggattttgccagaaa

SEQ ID NO: 668971 - DNA, 33 bp, Homo sapien
aagcccatctaccttacggagtctaagacagac

SEQ ID NO: 668972 - DNA, 33 bp, Homo sapien
aagcccatctaccttatggagtctaagacagac

SEQ ID NO: 668973 - DNA, 33 bp, Homo sapien
ttgatgacattaacaacgattggctcaggtaac

SEQ ID NO: 668974 - DNA, 33 bp, Homo sapien
ttgatgacattaacaatgattggctcaggtaac

SEQ ID NO: 668975 - DNA, 33 bp, Homo sapien
gaattgtctaaagataagaggagattcaatttg

SEQ ID NO: 668976 - DNA, 33 bp, Homo sapien
gaattgtctaaagataggaggagattcaatttg

SEQ ID NO: 668977 - DNA, 33 bp, Homo sapien
gagggcaggcaggctacgcaaagttttcagaaa

SEQ ID NO: 668978 - DNA, 33 bp, Homo sapien
gagggcaggcaggctatgcaaagttttcagaaa

SEQ ID NO: 668979 - DNA, 33 bp, Homo sapien
ttgtctgtaggacagcaaacacccctgctgcca

SEQ ID NO: 668980 - DNA, 33 bp, Homo sapien
ttgtctgtaggacagcgaacacccctgctgcca

SEQ ID NO: 668981 - DNA, 33 bp, Homo sapien
acagcaactctgaacactatccaagcaaaacgt

SEQ ID NO: 668982 - DNA, 33 bp, Homo sapien
acagcaactctgaacattatccaagcaaaacgt

SEQ ID NO: 668983 - DNA, 33 bp, Homo sapien
gcatcccaagggacaaattaaagagacatcctt

SEQ ID NO: 668984 - DNA, 33 bp, Homo sapien
gcatcccaagggacaagttaaagagacatcctt

SEQ ID NO: 668985 - DNA, 33 bp, Homo sapien
aaaactgagacgcttaaaacagtcaacatgtgt

SEQ ID NO: 668986 - DNA, 33 bp, Homo sapien
aaaactgagacgcttacaacagtcaacatgtgt

SEQ ID NO: 668987 - DNA, 33 bp, Homo sapien
cccagtgcagtgccgaaaatgaacttgtagacc

SEQ ID NO: 668988 - DNA, 33 bp, Homo sapien
cccagtgcagtgccgagaatgaacttgtagacc

SEQ ID NO: 668989 - DNA, 33 bp, Homo sapien
cagcttatgtagagaacgcagcttatgtaagtc

SEQ ID NO: 668990 - DNA, 33 bp, Homo sapien
cagcttatgtagagaatgcagcttatgtaagtc

SEQ ID NO: 668991 - DNA, 33 bp, Homo sapien
gaattctggtgttggaagcgaaagaagataacg

SEQ ID NO: 668992 - DNA, 33 bp, Homo sapien
gaattctggtgttggaggcgaaagaagataacg

SEQ ID NO: 668993 - DNA, 33 bp, Homo sapien
tcccatttttaaaacaacaaagaaatgctataa

SEQ ID NO: 668994 - DNA, 33 bp, Homo sapien
tcccatttttaaaacagcaaagaaatgctataa

SEQ ID NO: 668995 - DNA, 33 bp, Homo sapien
attttctcaataggtacattttcttgcctctta

SEQ ID NO: 668996 - DNA, 33 bp, Homo sapien
attttctcaataggtagattttcttgcctctta

SEQ ID NO: 668997 - DNA, 33 bp, Homo sapien
atgctgaatgaatgcaagtacaaaattacatag

SEQ ID NO: 668998 - DNA, 33 bp, Homo sapien
atgctgaatgaatgcaggtacaaaattacatag

SEQ ID NO: 668999 - DNA, 33 bp, Homo sapien
actgcaacttactctcaagcagagcagaaaaga

SEQ ID NO: 669000 - DNA, 33 bp, Homo sapien
actgcaacttactctcgagcagagcagaaaaga

SEQ ID NO: 669001 - DNA, 33 bp, Homo sapien
caatcctttctttgaacagtaggtaaaatgatc

SEQ ID NO: 669002 - DNA, 33 bp, Homo sapien
caatcctttctttgaagagtaggtaaaatgatc

SEQ ID NO: 669003 - DNA, 33 bp, Homo sapien
gcagctccaacctcgacggactgcgtggtgacc

SEQ ID NO: 669004 - DNA, 33 bp, Homo sapien
gcagctccaacctcgatggactgcgtggtgacc

SEQ ID NO: 669005 - DNA, 33 bp, Homo sapien
atctcaggacctcaccaagataatggcagacat

SEQ ID NO: 669006 - DNA, 33 bp, Homo sapien
atctcaggacctcaccgagataatggcagacat

SEQ ID NO: 669007 - DNA, 33 bp, Homo sapien
gactctcaaaaacaacacagttaaggcaggtgt

SEQ ID NO: 669008 - DNA, 33 bp, Homo sapien
gactctcaaaaacaacccagttaaggcaggtgt

SEQ ID NO: 669009 - DNA, 33 bp, Homo sapien
ctgtgtggcaaccacacatttccctggaacatt

SEQ ID NO: 669010 - DNA, 33 bp, Homo sapien
ctgtgtggcaaccacatatttccctggaacatt

SEQ ID NO: 669011 - DNA, 33 bp, Homo sapien
tcaaatcaatcaactcgatgatctaaacagaga

SEQ ID NO: 669012 - DNA, 33 bp, Homo sapien
tcaaatcaatcaactctatgatctaaacagaga

SEQ ID NO: 669013 - DNA, 33 bp, Homo sapien
aatgcatcctctgataagtcactcctgatgtct

SEQ ID NO: 669014 - DNA, 33 bp, Homo sapien
aatgcatcctctgataggtcactcctgatgtct

SEQ ID NO: 669015 - DNA, 33 bp, Homo sapien
attctgctaacatactaagaggtgtgaatcagt

SEQ ID NO: 669016 - DNA, 33 bp, Homo sapien
attctgctaacatactgagaggtgtgaatcagt

SEQ ID NO: 669017 - DNA, 33 bp, Homo sapien
gaattttcactgaggtcaaatagctactaaaca

SEQ ID NO: 669018 - DNA, 33 bp, Homo sapien
gaattttcactgaggttaaatagctactaaaca

SEQ ID NO: 669019 - DNA, 33 bp, Homo sapien
catcatttcttttgaacttatagcgtatgaccc

SEQ ID NO: 669020 - DNA, 33 bp, Homo sapien
catcatttcttttgaatttatagcgtatgaccc

SEQ ID NO: 669021 - DNA, 33 bp, Homo sapien
gattggttgtctccaccgattccttccttcagc

SEQ ID NO: 669022 - DNA, 33 bp, Homo sapien
gattggttgtctccactgattccttccttcagc

SEQ ID NO: 669023 - DNA, 33 bp, Homo sapien
gccaaagccatggacaatcctaaagattagatt

SEQ ID NO: 669024 - DNA, 33 bp, Homo sapien
gccaaagccatggacattcctaaagattagatt

SEQ ID NO: 669025 - DNA, 33 bp, Homo sapien
ttccccagctcactccacttgtggctttggaca

SEQ ID NO: 669026 - DNA, 33 bp, Homo sapien
ttccccagctcactccgcttgtggctttggaca

SEQ ID NO: 669027 - DNA, 33 bp, Homo sapien
tgtgttgttaatactacctcaaatgatttaatc

SEQ ID NO: 669028 - DNA, 33 bp, Homo sapien
tgtgttgttaatactatctcaaatgatttaatc

SEQ ID NO: 669029 - DNA, 33 bp, Homo sapien
aatggttatttggtcaacaattctcaaagtatg

SEQ ID NO: 669030 - DNA, 33 bp, Homo sapien
aatggttatttggtcagcaattctcaaagtatg

SEQ ID NO: 669031 - DNA, 33 bp, Homo sapien
gaacactgtggaggcacaacacaataatctcag

SEQ ID NO: 669032 - DNA, 33 bp, Homo sapien
gaacactgtggaggcagaacacaataatctcag

SEQ ID NO: 669033 - DNA, 33 bp, Homo sapien
ttgattcaggataaacccagtcaaactcagaat

SEQ ID NO: 669034 - DNA, 33 bp, Homo sapien
ttgattcaggataaactcagtcaaactcagaat

SEQ ID NO: 669035 - DNA, 33 bp, Homo sapien
gagcattttcagatgacaccttcaaagtcaacc

SEQ ID NO: 669036 - DNA, 33 bp, Homo sapien
gagcattttcagatgagaccttcaaagtcaacc

SEQ ID NO: 669037 - DNA, 33 bp, Homo sapien
caaagagctaagatagcatttgcacatcaatag

SEQ ID NO: 669038 - DNA, 33 bp, Homo sapien
caaagagctaagatagtatttgcacatcaatag

SEQ ID NO: 669039 - DNA, 33 bp, Homo sapien
gaaggatttgttccaaaggatctatactctggt

SEQ ID NO: 669040 - DNA, 33 bp, Homo sapien
gaaggatttgttccaagggatctatactctggt

SEQ ID NO: 669041 - DNA, 33 bp, Homo sapien
gaagaaagtagcatgactacacagtaggtatca

SEQ ID NO: 669042 - DNA, 33 bp, Homo sapien
gaagaaagtagcatgagtacacagtaggtatca

SEQ ID NO: 669043 - DNA, 33 bp, Homo sapien
gatctgacatagaggactaactactttattttt

SEQ ID NO: 669044 - DNA, 33 bp, Homo sapien
gatctgacatagaggattaactactttattttt

SEQ ID NO: 669045 - DNA, 33 bp, Homo sapien
tctcaaggcagatccaaatgtttcacttgaaga

SEQ ID NO: 669046 - DNA, 33 bp, Homo sapien
tctcaaggcagatccagatgtttcacttgaaga

SEQ ID NO: 669047 - DNA, 33 bp, Homo sapien
taggcttactaacaacaaaggatgaaggacttc

SEQ ID NO: 669048 - DNA, 33 bp, Homo sapien
taggcttactaacaacgaaggatgaaggacttc

SEQ ID NO: 669049 - DNA, 33 bp, Homo sapien
catagaggatattcaaacattttctcactttcc

SEQ ID NO: 669050 - DNA, 33 bp, Homo sapien
catagaggatattcaatcattttctcactttcc

SEQ ID NO: 669051 - DNA, 33 bp, Homo sapien
ggcataaaatgcattccaggaactgtaactcat

SEQ ID NO: 669052 - DNA, 33 bp, Homo sapien
ggcataaaatgcattctaggaactgtaactcat

SEQ ID NO: 669053 - DNA, 33 bp, Homo sapien
tccttccagactgtcacgagaacaagcagaaac

SEQ ID NO: 669054 - DNA, 33 bp, Homo sapien
tccttccagactgtcatgagaacaagcagaaac

SEQ ID NO: 669055 - DNA, 33 bp, Homo sapien
cccacctttctttacccagctagtcattgttgg

SEQ ID NO: 669056 - DNA, 33 bp, Homo sapien
cccacctttctttacctagctagtcattgttgg

SEQ ID NO: 669057 - DNA, 33 bp, Homo sapien
tgttgtgtcacagaaactgaagaagaagaatgc

SEQ ID NO: 669058 - DNA, 33 bp, Homo sapien
tgttgtgtcacagaaattgaagaagaagaatgc

SEQ ID NO: 669059 - DNA, 33 bp, Homo sapien
ttctctgtggctgctaaaaagtaccagtatgtc

SEQ ID NO: 669060 - DNA, 33 bp, Homo sapien
ttctctgtggctgctagaaagtaccagtatgtc

SEQ ID NO: 669061 - DNA, 33 bp, Homo sapien
tgttcataccacagagacataaaataggaagat

SEQ ID NO: 669062 - DNA, 33 bp, Homo sapien
tgttcataccacagaggcataaaataggaagat

SEQ ID NO: 669063 - DNA, 33 bp, Homo sapien
actctttttctaaaaccggagaaatgctcactt

SEQ ID NO: 669064 - DNA, 33 bp, Homo sapien
actctttttctaaaactggagaaatgctcactt

SEQ ID NO: 669065 - DNA, 33 bp, Homo sapien
cacacagtgcacataaagcaatcctatgttttg

SEQ ID NO: 669066 - DNA, 33 bp, Homo sapien
cacacagtgcacataaggcaatcctatgttttg

SEQ ID NO: 669067 - DNA, 33 bp, Homo sapien
ccacaactgctttgaaagacataggattaattt

SEQ ID NO: 669068 - DNA, 33 bp, Homo sapien
ccacaactgctttgaaggacataggattaattt

SEQ ID NO: 669069 - DNA, 33 bp, Homo sapien
gagggatttaatacgacgaagaaagaaataggc

SEQ ID NO: 669070 - DNA, 33 bp, Homo sapien
gagggatttaatacgatgaagaaagaaataggc

SEQ ID NO: 669071 - DNA, 33 bp, Homo sapien
aaaagggacattagtgaagagacgggaaataac

SEQ ID NO: 669072 - DNA, 33 bp, Homo sapien
aaaagggacattagtggagagacgggaaataac

SEQ ID NO: 669073 - DNA, 33 bp, Homo sapien
tgataatgaggtacccaggccctgatcagacat

SEQ ID NO: 669074 - DNA, 33 bp, Homo sapien
tgataatgaggtacccgggccctgatcagacat

SEQ ID NO: 669075 - DNA, 33 bp, Homo sapien
tttcaggattctaaaaataaaagctgatagtgg

SEQ ID NO: 669076 - DNA, 33 bp, Homo sapien
tttcaggattctaaaattaaaagctgatagtgg

SEQ ID NO: 669077 - DNA, 33 bp, Homo sapien
agtcatgcacacttaacactatttcaaaatata

SEQ ID NO: 669078 - DNA, 33 bp, Homo sapien
agtcatgcacacttaatactatttcaaaatata

SEQ ID NO: 669079 - DNA, 33 bp, Homo sapien
agggttcttataaagagaaactcagcacaaatc

SEQ ID NO: 669080 - DNA, 33 bp, Homo sapien
agggttcttataaagataaactcagcacaaatc

SEQ ID NO: 669081 - DNA, 33 bp, Homo sapien
gagggcatcacagataccaagaaagtgtccaag

SEQ ID NO: 669082 - DNA, 33 bp, Homo sapien
gagggcatcacagatatcaagaaagtgtccaag

SEQ ID NO: 669083 - DNA, 33 bp, Homo sapien
gaacaatttgcacaaaggccttgaaacaaaaaa

SEQ ID NO: 669084 - DNA, 33 bp, Homo sapien
gaacaatttgcacaaatgccttgaaacaaaaaa

SEQ ID NO: 669085 - DNA, 33 bp, Homo sapien
gctagattactgttaaaatgggtgagtaacttt

SEQ ID NO: 669086 - DNA, 33 bp, Homo sapien
gctagattactgttaagatgggtgagtaacttt

SEQ ID NO: 669087 - DNA, 33 bp, Homo sapien
gtactcagaaggcaaaaaagaaaaacatattta

SEQ ID NO: 669088 - DNA, 33 bp, Homo sapien
gtactcagaaggcaaagaagaaaaacatattta

SEQ ID NO: 669089 - DNA, 33 bp, Homo sapien
tatcttgctgcataacccaattttggcagttaa

SEQ ID NO: 669090 - DNA, 33 bp, Homo sapien
tatcttgctgcataactcaattttggcagttaa

SEQ ID NO: 669091 - DNA, 33 bp, Homo sapien
cctctctgtggctcaactgggaacactaataag

SEQ ID NO: 669092 - DNA, 33 bp, Homo sapien
cctctctgtggctcaattgggaacactaataag

SEQ ID NO: 669093 - DNA, 33 bp, Homo sapien
agaataattgcttaacagatgtgggggttccat

SEQ ID NO: 669094 - DNA, 33 bp, Homo sapien
agaataattgcttaacggatgtgggggttccat

SEQ ID NO: 669095 - DNA, 33 bp, Homo sapien
gcacctagaggagcaacagtttgggtaaaggca

SEQ ID NO: 669096 - DNA, 33 bp, Homo sapien
gcacctagaggagcaagagtttgggtaaaggca

SEQ ID NO: 669097 - DNA, 33 bp, Homo sapien
tatattggtattcagacgacttagacaagaata

SEQ ID NO: 669098 - DNA, 33 bp, Homo sapien
tatattggtattcagaggacttagacaagaata

SEQ ID NO: 669099 - DNA, 33 bp, Homo sapien
caagagtgttcactgaactagcggtaagcagtg

SEQ ID NO: 669100 - DNA, 33 bp, Homo sapien
caagagtgttcactgacctagcggtaagcagtg

SEQ ID NO: 669101 - DNA, 33 bp, Homo sapien
cccatcatgattaaaaagtgaagcatcttggaa

SEQ ID NO: 669102 - DNA, 33 bp, Homo sapien
cccatcatgattaaaaggtgaagcatcttggaa

SEQ ID NO: 669103 - DNA, 33 bp, Homo sapien
aatagagatgtccataccatcaatgtgcagtct

SEQ ID NO: 669104 - DNA, 33 bp, Homo sapien
aatagagatgtccatatcatcaatgtgcagtct

SEQ ID NO: 669105 - DNA, 33 bp, Homo sapien
aggaagtggtgaccaacgagatgaagtaacctg

SEQ ID NO: 669106 - DNA, 33 bp, Homo sapien
aggaagtggtgaccaatgagatgaagtaacctg

SEQ ID NO: 669107 - DNA, 33 bp, Homo sapien
ggcagtgttctgatgtcaactcattagagcagt

SEQ ID NO: 669108 - DNA, 33 bp, Homo sapien
ggcagtgttctgatgttaactcattagagcagt

SEQ ID NO: 669109 - DNA, 33 bp, Homo sapien
attttaaatctttttcacacaatttgagaaaga

SEQ ID NO: 669110 - DNA, 33 bp, Homo sapien
attttaaatctttttcgcacaatttgagaaaga

SEQ ID NO: 669111 - DNA, 33 bp, Homo sapien
ttgttgagcaatcttaggataacaagcaaaatt

SEQ ID NO: 669112 - DNA, 33 bp, Homo sapien
ttgttgagcaatcttatgataacaagcaaaatt

SEQ ID NO: 669113 - DNA, 33 bp, Homo sapien
caaagcaaagtttttaaaagtacatctagggat

SEQ ID NO: 669114 - DNA, 33 bp, Homo sapien
caaagcaaagtttttagaagtacatctagggat

SEQ ID NO: 669115 - DNA, 33 bp, Homo sapien
ccctctcttttagtacacactgtttaagatact

SEQ ID NO: 669116 - DNA, 33 bp, Homo sapien
ccctctcttttagtacgcactgtttaagatact

SEQ ID NO: 669117 - DNA, 33 bp, Homo sapien
agaattccatttatcccacattccatgcaatga

SEQ ID NO: 669118 - DNA, 33 bp, Homo sapien
agaattccatttatcctacattccatgcaatga

SEQ ID NO: 669119 - DNA, 33 bp, Homo sapien
gctaaactccttacccaacaactggaaaatacc

SEQ ID NO: 669120 - DNA, 33 bp, Homo sapien
gctaaactccttacccgacaactggaaaatacc

SEQ ID NO: 669121 - DNA, 33 bp, Homo sapien
aactattctaatgccaagtaaatctctcctgct

SEQ ID NO: 669122 - DNA, 33 bp, Homo sapien
aactattctaatgccacgtaaatctctcctgct

SEQ ID NO: 669123 - DNA, 33 bp, Homo sapien
gaaaagcaaatgcaaccagaaaaccatcagatg

SEQ ID NO: 669124 - DNA, 33 bp, Homo sapien
gaaaagcaaatgcaacgagaaaaccatcagatg

SEQ ID NO: 669125 - DNA, 33 bp, Homo sapien
gctaattccagctcaaatcctgctgctctttta

SEQ ID NO: 669126 - DNA, 33 bp, Homo sapien
gctaattccagctcaactcctgctgctctttta

SEQ ID NO: 669127 - DNA, 33 bp, Homo sapien
aactgtttgtcctttcaccagctctttagtttc

SEQ ID NO: 669128 - DNA, 33 bp, Homo sapien
aactgtttgtcctttcgccagctctttagtttc

SEQ ID NO: 669129 - DNA, 33 bp, Homo sapien
actacagaccaatagcccgcatctgtgaagaat

SEQ ID NO: 669130 - DNA, 33 bp, Homo sapien
actacagaccaatagctcgcatctgtgaagaat

SEQ ID NO: 669131 - DNA, 33 bp, Homo sapien
atccattacatgaatgaatttgcttacgatgag

SEQ ID NO: 669132 - DNA, 33 bp, Homo sapien
atccattacatgaatggatttgcttacgatgag

SEQ ID NO: 669133 - DNA, 33 bp, Homo sapien
cacaagcactatatgactattaaacatggcttt

SEQ ID NO: 669134 - DNA, 33 bp, Homo sapien
cacaagcactatatgattattaaacatggcttt

SEQ ID NO: 669135 - DNA, 33 bp, Homo sapien
tacaactcttctctgccgaatgtaatatagatg

SEQ ID NO: 669136 - DNA, 33 bp, Homo sapien
tacaactcttctctgctgaatgtaatatagatg

SEQ ID NO: 669137 - DNA, 33 bp, Homo sapien
acctataaatgtcaggcaggctcctttgctcag

SEQ ID NO: 669138 - DNA, 33 bp, Homo sapien
acctataaatgtcaggtaggctcctttgctcag

SEQ ID NO: 669139 - DNA, 33 bp, Homo sapien
gaaatcccaggacaaagttgtatgtcatagaac

SEQ ID NO: 669140 - DNA, 33 bp, Homo sapien
gaaatcccaggacaaatttgtatgtcatagaac

SEQ ID NO: 669141 - DNA, 33 bp, Homo sapien
aggatagaacattttacatagcagctgaatatt

SEQ ID NO: 669142 - DNA, 33 bp, Homo sapien
aggatagaacattttatatagcagctgaatatt

SEQ ID NO: 669143 - DNA, 33 bp, Homo sapien
tcatggcctgataaagacatcattccctttatt

SEQ ID NO: 669144 - DNA, 33 bp, Homo sapien
tcatggcctgataaagtcatcattccctttatt

SEQ ID NO: 669145 - DNA, 33 bp, Homo sapien
caatttgtaaagcccaagttagattatagaact

SEQ ID NO: 669146 - DNA, 33 bp, Homo sapien
caatttgtaaagcccacgttagattatagaact

SEQ ID NO: 669147 - DNA, 33 bp, Homo sapien
acacccgatccgactaagcgctgcaggagtcca

SEQ ID NO: 669148 - DNA, 33 bp, Homo sapien
acacccgatccgactaggcgctgcaggagtcca

SEQ ID NO: 669149 - DNA, 33 bp, Homo sapien
tacgcactttattctccctaaaacacccataac

SEQ ID NO: 669150 - DNA, 33 bp, Homo sapien
tacgcactttattctctctaaaacacccataac

SEQ ID NO: 669151 - DNA, 33 bp, Homo sapien
gaactgtgagtccaataaacatctttcttttgg

SEQ ID NO: 669152 - DNA, 33 bp, Homo sapien
gaactgtgagtccaattaacatctttcttttgg

SEQ ID NO: 669153 - DNA, 33 bp, Homo sapien
aaagtctactttcacaatgtaatcttagcaccg

SEQ ID NO: 669154 - DNA, 33 bp, Homo sapien
aaagtctactttcacagtgtaatcttagcaccg

SEQ ID NO: 669155 - DNA, 33 bp, Homo sapien
catttggatttctacacgttccccacaggatcc

SEQ ID NO: 669156 - DNA, 33 bp, Homo sapien
catttggatttctacatgttccccacaggatcc

SEQ ID NO: 669157 - DNA, 33 bp, Homo sapien
acatgctagacttacccacttctctgcctaact

SEQ ID NO: 669158 - DNA, 33 bp, Homo sapien
acatgctagacttacctacttctctgcctaact

SEQ ID NO: 669159 - DNA, 33 bp, Homo sapien
agtccttttctctttcacttcccaaaatatcaa

SEQ ID NO: 669160 - DNA, 33 bp, Homo sapien
agtccttttctctttcgcttcccaaaatatcaa

SEQ ID NO: 669161 - DNA, 33 bp, Homo sapien
ataaagttttctgggtaaagatcatgtttggaa

SEQ ID NO: 669162 - DNA, 33 bp, Homo sapien
ataaagttttctgggtgaagatcatgtttggaa

SEQ ID NO: 669163 - DNA, 33 bp, Homo sapien
tcatccaaggagaacacagtagaagcagaaaat

SEQ ID NO: 669164 - DNA, 33 bp, Homo sapien
tcatccaaggagaacagagtagaagcagaaaat

SEQ ID NO: 669165 - DNA, 33 bp, Homo sapien
atgcctagtacatagaatatacagaagtccttg

SEQ ID NO: 669166 - DNA, 33 bp, Homo sapien
atgcctagtacatagagtatacagaagtccttg

SEQ ID NO: 669167 - DNA, 33 bp, Homo sapien
tattaagtgccagataccatgtcaaagtctagg

SEQ ID NO: 669168 - DNA, 33 bp, Homo sapien
tattaagtgccagatatcatgtcaaagtctagg

SEQ ID NO: 669169 - DNA, 33 bp, Homo sapien
cattgactgatatgcaaatttttcttgccaaac

SEQ ID NO: 669170 - DNA, 33 bp, Homo sapien
cattgactgatatgcagatttttcttgccaaac

SEQ ID NO: 669171 - DNA, 33 bp, Homo sapien
tacagaaaataaaaacagacttctacctcacat

SEQ ID NO: 669172 - DNA, 33 bp, Homo sapien
tacagaaaataaaaacggacttctacctcacat

SEQ ID NO: 669173 - DNA, 33 bp, Homo sapien
gtctctgttatacctacatagaaaatttgaatt

SEQ ID NO: 669174 - DNA, 33 bp, Homo sapien
gtctctgttatacctagatagaaaatttgaatt

SEQ ID NO: 669175 - DNA, 33 bp, Homo sapien
tacaggagttacgtggaaatgcaagggaacaga

SEQ ID NO: 669176 - DNA, 33 bp, Homo sapien
tacaggagttacgtggtaatgcaagggaacaga

SEQ ID NO: 669177 - DNA, 33 bp, Homo sapien
tgctatttctattttacctgacattcatgaaaa

SEQ ID NO: 669178 - DNA, 33 bp, Homo sapien
tgctatttctattttatctgacattcatgaaaa

SEQ ID NO: 669179 - DNA, 33 bp, Homo sapien
atgtgtgtggagtctccagttttcatgaccaaa

SEQ ID NO: 669180 - DNA, 33 bp, Homo sapien
atgtgtgtggagtctctagttttcatgaccaaa

SEQ ID NO: 669181 - DNA, 33 bp, Homo sapien
tccatgtgtggtcagaacattctatctaaaata

SEQ ID NO: 669182 - DNA, 33 bp, Homo sapien
tccatgtgtggtcagagcattctatctaaaata

SEQ ID NO: 669183 - DNA, 33 bp, Homo sapien
ctccaagaactccagaagccttttctgtttaaa

SEQ ID NO: 669184 - DNA, 33 bp, Homo sapien
ctccaagaactccagaggccttttctgtttaaa

SEQ ID NO: 669185 - DNA, 33 bp, Homo sapien
ctgacataaacaagaaagtccccaaatgacaca

SEQ ID NO: 669186 - DNA, 33 bp, Homo sapien
ctgacataaacaagaaggtccccaaatgacaca

SEQ ID NO: 669187 - DNA, 33 bp, Homo sapien
tagaagaaataagatacgatgttcaatagatca

SEQ ID NO: 669188 - DNA, 33 bp, Homo sapien
tagaagaaataagatatgatgttcaatagatca

SEQ ID NO: 669189 - DNA, 33 bp, Homo sapien
aactggataaacacacacagaagaatgtaaatt

SEQ ID NO: 669190 - DNA, 33 bp, Homo sapien
aactggataaacacacccagaagaatgtaaatt

SEQ ID NO: 669191 - DNA, 33 bp, Homo sapien
acgatggggaagttcaatctgttcaataaatgg

SEQ ID NO: 669192 - DNA, 33 bp, Homo sapien
acgatggggaagttcagtctgttcaataaatgg

SEQ ID NO: 669193 - DNA, 33 bp, Homo sapien
gcctgcatgtaagtgcaaaaccttaatactctt

SEQ ID NO: 669194 - DNA, 33 bp, Homo sapien
gcctgcatgtaagtgcgaaaccttaatactctt

SEQ ID NO: 669195 - DNA, 33 bp, Homo sapien
atgtcttatcaaaatacgccttactcattaaaa

SEQ ID NO: 669196 - DNA, 33 bp, Homo sapien
atgtcttatcaaaatatgccttactcattaaaa

SEQ ID NO: 669197 - DNA, 33 bp, Homo sapien
ccataactgttaaatacacagagcagagtgact

SEQ ID NO: 669198 - DNA, 33 bp, Homo sapien
ccataactgttaaatatacagagcagagtgact

SEQ ID NO: 669199 - DNA, 33 bp, Homo sapien
agaggcctgaatcacactccctgttgctgcctt

SEQ ID NO: 669200 - DNA, 33 bp, Homo sapien
agaggcctgaatcacattccctgttgctgcctt

SEQ ID NO: 669201 - DNA, 33 bp, Homo sapien
gggtggtattccctaaccaagtagtaacatcat

SEQ ID NO: 669202 - DNA, 33 bp, Homo sapien
gggtggtattccctaatcaagtagtaacatcat

SEQ ID NO: 669203 - DNA, 33 bp, Homo sapien
gaatcatgtctttttcacaagttgaacacaacc

SEQ ID NO: 669204 - DNA, 33 bp, Homo sapien
gaatcatgtctttttcgcaagttgaacacaacc

SEQ ID NO: 669205 - DNA, 33 bp, Homo sapien
gcatttttaaagtgcaagtggctgatgcagagt

SEQ ID NO: 669206 - DNA, 33 bp, Homo sapien
gcatttttaaagtgcaggtggctgatgcagagt

SEQ ID NO: 669207 - DNA, 33 bp, Homo sapien
atatttttgaatgaaaacagtaatggccatttc

SEQ ID NO: 669208 - DNA, 33 bp, Homo sapien
atatttttgaatgaaagcagtaatggccatttc

SEQ ID NO: 669209 - DNA, 33 bp, Homo sapien
atttcagtggatgccaacaggaaaaatgataat

SEQ ID NO: 669210 - DNA, 33 bp, Homo sapien
atttcagtggatgccagcaggaaaaatgataat

SEQ ID NO: 669211 - DNA, 33 bp, Homo sapien
tatagtagtatcaccccgagtaccaagacagaa

SEQ ID NO: 669212 - DNA, 33 bp, Homo sapien
tatagtagtatcaccctgagtaccaagacagaa

SEQ ID NO: 669213 - DNA, 33 bp, Homo sapien
actactatagaagaaactggtaaaatccattca

SEQ ID NO: 669214 - DNA, 33 bp, Homo sapien
actactatagaagaaattggtaaaatccattca

SEQ ID NO: 669215 - DNA, 33 bp, Homo sapien
gcatattttgaaaagaaaagctctaaatcccct

SEQ ID NO: 669216 - DNA, 33 bp, Homo sapien
gcatattttgaaaagagaagctctaaatcccct

SEQ ID NO: 669217 - DNA, 33 bp, Homo sapien
tgattatgaaatagcacgggatgaatgaattcc

SEQ ID NO: 669218 - DNA, 33 bp, Homo sapien
tgattatgaaatagcatgggatgaatgaattcc

SEQ ID NO: 669219 - DNA, 33 bp, Homo sapien
actatggctaaattcaggttcttgggctttccc

SEQ ID NO: 669220 - DNA, 33 bp, Homo sapien
actatggctaaattcatgttcttgggctttccc

SEQ ID NO: 669221 - DNA, 33 bp, Homo sapien
tcacattcattaggcaacttaaacccatctgca

SEQ ID NO: 669222 - DNA, 33 bp, Homo sapien
tcacattcattaggcaccttaaacccatctgca

SEQ ID NO: 669223 - DNA, 33 bp, Homo sapien
tttttttttttaatgactaatgcctgcatcaat

SEQ ID NO: 669224 - DNA, 33 bp, Homo sapien
tttttttttttaatgattaatgcctgcatcaat

SEQ ID NO: 669225 - DNA, 33 bp, Homo sapien
tttgaattgcaagttcgccatctagtggtcagt

SEQ ID NO: 669226 - DNA, 33 bp, Homo sapien
tttgaattgcaagttctccatctagtggtcagt

SEQ ID NO: 669227 - DNA, 33 bp, Homo sapien
tgagacttgatgatgtaaagcccttgtgctcag

SEQ ID NO: 669228 - DNA, 33 bp, Homo sapien
tgagacttgatgatgtgaagcccttgtgctcag

SEQ ID NO: 669229 - DNA, 33 bp, Homo sapien
tctccgctatgataacagcagtaaatcctcttt

SEQ ID NO: 669230 - DNA, 33 bp, Homo sapien
tctccgctatgataactgcagtaaatcctcttt

SEQ ID NO: 669231 - DNA, 33 bp, Homo sapien
tgaaggctttcgtctccaaataattaatttgcc

SEQ ID NO: 669232 - DNA, 33 bp, Homo sapien
tgaaggctttcgtctctaaataattaatttgcc

SEQ ID NO: 669233 - DNA, 33 bp, Homo sapien
taatttgcctttatgcaagcgtatttgcctctt

SEQ ID NO: 669234 - DNA, 33 bp, Homo sapien
taatttgcctttatgcgagcgtatttgcctctt

SEQ ID NO: 669235 - DNA, 33 bp, Homo sapien
gggcaagtttcttgtacgtgaaatagaggtaat

SEQ ID NO: 669236 - DNA, 33 bp, Homo sapien
gggcaagtttcttgtatgtgaaatagaggtaat

SEQ ID NO: 669237 - DNA, 33 bp, Homo sapien
ctgatttgaaagggaacgaggtaatatctgaaa

SEQ ID NO: 669238 - DNA, 33 bp, Homo sapien
ctgatttgaaagggaatgaggtaatatctgaaa

SEQ ID NO: 669239 - DNA, 33 bp, Homo sapien
actgactccttcacaccaactcctctggtctaa

SEQ ID NO: 669240 - DNA, 33 bp, Homo sapien
actgactccttcacacgaactcctctggtctaa

SEQ ID NO: 669241 - DNA, 33 bp, Homo sapien
agtgatagaaagttaccgctctgtatcatcatt

SEQ ID NO: 669242 - DNA, 33 bp, Homo sapien
agtgatagaaagttactgctctgtatcatcatt

SEQ ID NO: 669243 - DNA, 33 bp, Homo sapien
gggtcctggattcaaactccagcctggtgccag

SEQ ID NO: 669244 - DNA, 33 bp, Homo sapien
gggtcctggattcaaattccagcctggtgccag

SEQ ID NO: 669245 - DNA, 33 bp, Homo sapien
atgcatgaagtggtcaaatatctgaaacatacc

SEQ ID NO: 669246 - DNA, 33 bp, Homo sapien
atgcatgaagtggtcagatatctgaaacatacc

SEQ ID NO: 669247 - DNA, 33 bp, Homo sapien
aaactcttaagcaccaaatgacattatcaagac

SEQ ID NO: 669248 - DNA, 33 bp, Homo sapien
aaactcttaagcaccacatgacattatcaagac

SEQ ID NO: 669249 - DNA, 33 bp, Homo sapien
aggaccagactctgacggagttatatgtggaag

SEQ ID NO: 669250 - DNA, 33 bp, Homo sapien
aggaccagactctgactgagttatatgtggaag

SEQ ID NO: 669251 - DNA, 33 bp, Homo sapien
cttgatgttctctcaactcatgtaaaccagcag

SEQ ID NO: 669252 - DNA, 33 bp, Homo sapien
cttgatgttctctcaattcatgtaaaccagcag

SEQ ID NO: 669253 - DNA, 33 bp, Homo sapien
taattgtctgacatggaatctaacctgccttca

SEQ ID NO: 669254 - DNA, 33 bp, Homo sapien
taattgtctgacatgggatctaacctgccttca

SEQ ID NO: 669255 - DNA, 33 bp, Homo sapien
tagagctgggtttcaaagtcttcaacactgcat

SEQ ID NO: 669256 - DNA, 33 bp, Homo sapien
tagagctgggtttcaaggtcttcaacactgcat

SEQ ID NO: 669257 - DNA, 33 bp, Homo sapien
gtatctaccattcttaataacacaggcagagca

SEQ ID NO: 669258 - DNA, 33 bp, Homo sapien
gtatctaccattcttagtaacacaggcagagca

SEQ ID NO: 669259 - DNA, 33 bp, Homo sapien
tatttcacaaattccacgtgctctgcctgtgtt

SEQ ID NO: 669260 - DNA, 33 bp, Homo sapien
tatttcacaaattccaggtgctctgcctgtgtt

SEQ ID NO: 669261 - DNA, 33 bp, Homo sapien
tcttccattgaacaaacacatgaagaagactca

SEQ ID NO: 669262 - DNA, 33 bp, Homo sapien
tcttccattgaacaaatacatgaagaagactca

SEQ ID NO: 669263 - DNA, 33 bp, Homo sapien
gtcagtcaaatttttaaaaaacagctaaagctt

SEQ ID NO: 669264 - DNA, 33 bp, Homo sapien
gtcagtcaaatttttagaaaacagctaaagctt

SEQ ID NO: 669265 - DNA, 33 bp, Homo sapien
gaatgcaaaagaataacgtgtgtaagttatgag

SEQ ID NO: 669266 - DNA, 33 bp, Homo sapien
gaatgcaaaagaataatgtgtgtaagttatgag

SEQ ID NO: 669267 - DNA, 33 bp, Homo sapien
tggttcagcatagaacagattcatcctggagga

SEQ ID NO: 669268 - DNA, 33 bp, Homo sapien
tggttcagcatagaacggattcatcctggagga

SEQ ID NO: 669269 - DNA, 33 bp, Homo sapien
acctgcagaacctagaacacagtaagatcaacc

SEQ ID NO: 669270 - DNA, 33 bp, Homo sapien
acctgcagaacctagagcacagtaagatcaacc

SEQ ID NO: 669271 - DNA, 33 bp, Homo sapien
caggccaagctgagtaaagggaaactcaattgt

SEQ ID NO: 669272 - DNA, 33 bp, Homo sapien
caggccaagctgagtacagggaaactcaattgt

SEQ ID NO: 669273 - DNA, 33 bp, Homo sapien
atttgatttgccttaacctggctgatgtgggga

SEQ ID NO: 669274 - DNA, 33 bp, Homo sapien
atttgatttgccttaatctggctgatgtgggga

SEQ ID NO: 669275 - DNA, 33 bp, Homo sapien
ttggaaagggttcttgaataatgagaacagatt

SEQ ID NO: 669276 - DNA, 33 bp, Homo sapien
ttggaaagggttcttgcataatgagaacagatt

SEQ ID NO: 669277 - DNA, 33 bp, Homo sapien
gttttttgcattttaacgaacaggctttccaag

SEQ ID NO: 669278 - DNA, 33 bp, Homo sapien
gttttttgcattttaatgaacaggctttccaag

SEQ ID NO: 669279 - DNA, 33 bp, Homo sapien
gatatggtgttacccaactgaaagaaaagctaa

SEQ ID NO: 669280 - DNA, 33 bp, Homo sapien
gatatggtgttacccagctgaaagaaaagctaa

SEQ ID NO: 669281 - DNA, 33 bp, Homo sapien
gaactcaaaatttacactccttgcacctgaatc

SEQ ID NO: 669282 - DNA, 33 bp, Homo sapien
gaactcaaaatttacattccttgcacctgaatc

SEQ ID NO: 669283 - DNA, 33 bp, Homo sapien
tgctcttcccttggccacttgaagagactgcct

SEQ ID NO: 669284 - DNA, 33 bp, Homo sapien
tgctcttcccttggccgcttgaagagactgcct

SEQ ID NO: 669285 - DNA, 33 bp, Homo sapien
taatctttagaagcccaattacaaaatgaattt

SEQ ID NO: 669286 - DNA, 33 bp, Homo sapien
taatctttagaagcccgattacaaaatgaattt

SEQ ID NO: 669287 - DNA, 33 bp, Homo sapien
gctaccccttgtggtgcacatggcaagaaaatc

SEQ ID NO: 669288 - DNA, 33 bp, Homo sapien
gctaccccttgtggtgtacatggcaagaaaatc

SEQ ID NO: 669289 - DNA, 33 bp, Homo sapien
aacctcgcctgatgcacaacagtgaatttggtg

SEQ ID NO: 669290 - DNA, 33 bp, Homo sapien
aacctcgcctgatgcagaacagtgaatttggtg

SEQ ID NO: 669291 - DNA, 33 bp, Homo sapien
ggcttaatcctttatacagttagcaccaatgaa

SEQ ID NO: 669292 - DNA, 33 bp, Homo sapien
ggcttaatcctttatatagttagcaccaatgaa

SEQ ID NO: 669293 - DNA, 33 bp, Homo sapien
attatagcataagtgaatcacaaagtattctgg

SEQ ID NO: 669294 - DNA, 33 bp, Homo sapien
attatagcataagtgagtcacaaagtattctgg

SEQ ID NO: 669295 - DNA, 33 bp, Homo sapien
tttgggagtgaatagaaggttgattgggagcag

SEQ ID NO: 669296 - DNA, 33 bp, Homo sapien
tttgggagtgaatagagggttgattgggagcag

SEQ ID NO: 669297 - DNA, 33 bp, Homo sapien
aatgttatcctttccacctgtagccaatatgaa

SEQ ID NO: 669298 - DNA, 33 bp, Homo sapien
aatgttatcctttccatctgtagccaatatgaa

SEQ ID NO: 669299 - DNA, 33 bp, Homo sapien
actaaagcctataacagactgtctaatagaaat

SEQ ID NO: 669300 - DNA, 33 bp, Homo sapien
actaaagcctataacatactgtctaatagaaat

SEQ ID NO: 669301 - DNA, 33 bp, Homo sapien
ggcccttcaagtgtcaagcttccttgtttccag

SEQ ID NO: 669302 - DNA, 33 bp, Homo sapien
ggcccttcaagtgtcaggcttccttgtttccag

SEQ ID NO: 669303 - DNA, 33 bp, Homo sapien
agcatcagtgataccccaagcagcgtcctgctg

SEQ ID NO: 669304 - DNA, 33 bp, Homo sapien
agcatcagtgataccctaagcagcgtcctgctg

SEQ ID NO: 669305 - DNA, 33 bp, Homo sapien
caggaaagttttgccccatcctgatattatcaa

SEQ ID NO: 669306 - DNA, 33 bp, Homo sapien
caggaaagttttgccctatcctgatattatcaa

SEQ ID NO: 669307 - DNA, 33 bp, Homo sapien
agtttggtaacaaagcaatttaatttgcctcac

SEQ ID NO: 669308 - DNA, 33 bp, Homo sapien
agtttggtaacaaagcgatttaatttgcctcac

SEQ ID NO: 669309 - DNA, 33 bp, Homo sapien
tgaatttgggaggaaaattaataagaacactga

SEQ ID NO: 669310 - DNA, 33 bp, Homo sapien
tgaatttgggaggaaagttaataagaacactga

SEQ ID NO: 669311 - DNA, 33 bp, Homo sapien
acttgaactgattagcacaaaatctgaagaaag

SEQ ID NO: 669312 - DNA, 33 bp, Homo sapien
acttgaactgattagcgcaaaatctgaagaaag

SEQ ID NO: 669313 - DNA, 33 bp, Homo sapien
agaaagatatgtatgaactgtgtttttaaacta

SEQ ID NO: 669314 - DNA, 33 bp, Homo sapien
agaaagatatgtatgacctgtgtttttaaacta

SEQ ID NO: 669315 - DNA, 33 bp, Homo sapien
acctaaagactcaacaaaagactattagagcta

SEQ ID NO: 669316 - DNA, 33 bp, Homo sapien
acctaaagactcaacagaagactattagagcta

SEQ ID NO: 669317 - DNA, 33 bp, Homo sapien
cactagagttagcctacaccttcttgccttaag

SEQ ID NO: 669318 - DNA, 33 bp, Homo sapien
cactagagttagcctataccttcttgccttaag

SEQ ID NO: 669319 - DNA, 33 bp, Homo sapien
ttgatagccagttgaaaccaacgggtaagaaat

SEQ ID NO: 669320 - DNA, 33 bp, Homo sapien
ttgatagccagttgaacccaacgggtaagaaat

SEQ ID NO: 669321 - DNA, 33 bp, Homo sapien
tatggaaaacggtaccacgctaatatatgtctg

SEQ ID NO: 669322 - DNA, 33 bp, Homo sapien
tatggaaaacggtaccgcgctaatatatgtctg

SEQ ID NO: 669323 - DNA, 33 bp, Homo sapien
aaagcacaatatagaacgactggtgatttaagc

SEQ ID NO: 669324 - DNA, 33 bp, Homo sapien
aaagcacaatatagaatgactggtgatttaagc

SEQ ID NO: 669325 - DNA, 33 bp, Homo sapien
gagtaacccatttcaaagcctgcacaagttaag

SEQ ID NO: 669326 - DNA, 33 bp, Homo sapien
gagtaacccatttcaacgcctgcacaagttaag

SEQ ID NO: 669327 - DNA, 33 bp, Homo sapien
tgtaattcactcattcaataaaatttgtggaaa

SEQ ID NO: 669328 - DNA, 33 bp, Homo sapien
tgtaattcactcattccataaaatttgtggaaa

SEQ ID NO: 669329 - DNA, 33 bp, Homo sapien
taatttgtttatggtaaaatgctatcctaatta

SEQ ID NO: 669330 - DNA, 33 bp, Homo sapien
taatttgtttatggtagaatgctatcctaatta

SEQ ID NO: 669331 - DNA, 33 bp, Homo sapien
ggagtgtgaacatgaacgaatctccccttctgt

SEQ ID NO: 669332 - DNA, 33 bp, Homo sapien
ggagtgtgaacatgaatgaatctccccttctgt

SEQ ID NO: 669333 - DNA, 33 bp, Homo sapien
agggcaggctttctgccgactccggagatcaca

SEQ ID NO: 669334 - DNA, 33 bp, Homo sapien
agggcaggctttctgctgactccggagatcaca

SEQ ID NO: 669335 - DNA, 33 bp, Homo sapien
tcatattcttgccaaactgtgagcttctaaaaa

SEQ ID NO: 669336 - DNA, 33 bp, Homo sapien
tcatattcttgccaaagtgtgagcttctaaaaa

SEQ ID NO: 669337 - DNA, 33 bp, Homo sapien
gttttaatttaattgacgtaggccttggggatc

SEQ ID NO: 669338 - DNA, 33 bp, Homo sapien
gttttaatttaattgatgtaggccttggggatc

SEQ ID NO: 669339 - DNA, 33 bp, Homo sapien
taaaggtggaaataaactattcaggctataaat

SEQ ID NO: 669340 - DNA, 33 bp, Homo sapien
taaaggtggaaataaagtattcaggctataaat

SEQ ID NO: 669341 - DNA, 33 bp, Homo sapien
cagaatatgcttccacacattctggtttctaga

SEQ ID NO: 669342 - DNA, 33 bp, Homo sapien
cagaatatgcttccactcattctggtttctaga

SEQ ID NO: 669343 - DNA, 33 bp, Homo sapien
attcgaaccatatcaaccactttgttaatcact

SEQ ID NO: 669344 - DNA, 33 bp, Homo sapien
attcgaaccatatcaatcactttgttaatcact

SEQ ID NO: 669345 - DNA, 33 bp, Homo sapien
tagaaagaatataggaagcagagtaatacaccc

SEQ ID NO: 669346 - DNA, 33 bp, Homo sapien
tagaaagaatataggaggcagagtaatacaccc

SEQ ID NO: 669347 - DNA, 33 bp, Homo sapien
aaggtgtcgatgtaaacggattggctgtttata

SEQ ID NO: 669348 - DNA, 33 bp, Homo sapien
aaggtgtcgatgtaaatggattggctgtttata

SEQ ID NO: 669349 - DNA, 33 bp, Homo sapien
atgtaaagcaaatgagcacattatattttacca

SEQ ID NO: 669350 - DNA, 33 bp, Homo sapien
atgtaaagcaaatgagtacattatattttacca

SEQ ID NO: 669351 - DNA, 33 bp, Homo sapien
agaatgataaataaaacacaaccccaatccgca

SEQ ID NO: 669352 - DNA, 33 bp, Homo sapien
agaatgataaataaaatacaaccccaatccgca

SEQ ID NO: 669353 - DNA, 33 bp, Homo sapien
tcaagttttgcctaatgatggacatccacaggg

SEQ ID NO: 669354 - DNA, 33 bp, Homo sapien
tcaagttttgcctaattatggacatccacaggg

SEQ ID NO: 669355 - DNA, 33 bp, Homo sapien
aaatatgaaatcaagactcagattgagatgaga

SEQ ID NO: 669356 - DNA, 33 bp, Homo sapien
aaatatgaaatcaagagtcagattgagatgaga

SEQ ID NO: 669357 - DNA, 33 bp, Homo sapien
tgatcctgcctaagtcaaaatgagttgaaaact

SEQ ID NO: 669358 - DNA, 33 bp, Homo sapien
tgatcctgcctaagtccaaatgagttgaaaact

SEQ ID NO: 669359 - DNA, 33 bp, Homo sapien
acttataatgtcgatacgtcgatattttaaggg

SEQ ID NO: 669360 - DNA, 33 bp, Homo sapien
acttataatgtcgatatgtcgatattttaaggg

SEQ ID NO: 669361 - DNA, 33 bp, Homo sapien
acacaagggaaattgacggcagagggaaatggg

SEQ ID NO: 669362 - DNA, 33 bp, Homo sapien
acacaagggaaattgatggcagagggaaatggg

SEQ ID NO: 669363 - DNA, 33 bp, Homo sapien
ctccacaggggagaccagccaaagttccatcca

SEQ ID NO: 669364 - DNA, 33 bp, Homo sapien
ctccacaggggagaccggccaaagttccatcca

SEQ ID NO: 669365 - DNA, 33 bp, Homo sapien
cagcagcctctgacccacagcaattcaggaatc

SEQ ID NO: 669366 - DNA, 33 bp, Homo sapien
cagcagcctctgacccgcagcaattcaggaatc

SEQ ID NO: 669367 - DNA, 33 bp, Homo sapien
ttgtcgcgctcctttaaaatttaaaatatgtgt

SEQ ID NO: 669368 - DNA, 33 bp, Homo sapien
ttgtcgcgctcctttacaatttaaaatatgtgt

SEQ ID NO: 669369 - DNA, 33 bp, Homo sapien
gctcaatatttggatcacctggccccagtcaga

SEQ ID NO: 669370 - DNA, 33 bp, Homo sapien
gctcaatatttggatcgcctggccccagtcaga

SEQ ID NO: 669371 - DNA, 33 bp, Homo sapien
tagaatggtatctgacaaacaagtgagcattca

SEQ ID NO: 669372 - DNA, 33 bp, Homo sapien
tagaatggtatctgaccaacaagtgagcattca

SEQ ID NO: 669373 - DNA, 33 bp, Homo sapien
gatattttaacctgaacgtgcttataaaacttt

SEQ ID NO: 669374 - DNA, 33 bp, Homo sapien
gatattttaacctgaaggtgcttataaaacttt

SEQ ID NO: 669375 - DNA, 33 bp, Homo sapien
tgctataggtccagaaaaattaatacagtttga

SEQ ID NO: 669376 - DNA, 33 bp, Homo sapien
tgctataggtccagaacaattaatacagtttga

SEQ ID NO: 669377 - DNA, 33 bp, Homo sapien
ccttgaaagaagcttcaatgtcctaaatcttgc

SEQ ID NO: 669378 - DNA, 33 bp, Homo sapien
ccttgaaagaagcttcgatgtcctaaatcttgc

SEQ ID NO: 669379 - DNA, 33 bp, Homo sapien
ccattgtagaaagcaaagtggtaatttctaaaa

SEQ ID NO: 669380 - DNA, 33 bp, Homo sapien
ccattgtagaaagcaatgtggtaatttctaaaa

SEQ ID NO: 669381 - DNA, 33 bp, Homo sapien
tttttattttgagggcaaagacccaggtggcat

SEQ ID NO: 669382 - DNA, 33 bp, Homo sapien
tttttattttgagggcgaagacccaggtggcat

SEQ ID NO: 669383 - DNA, 33 bp, Homo sapien
aggaaattagtctgccacagctttatggatgct

SEQ ID NO: 669384 - DNA, 33 bp, Homo sapien
aggaaattagtctgccgcagctttatggatgct

SEQ ID NO: 669385 - DNA, 33 bp, Homo sapien
ataagagatatggaaacgataagaacattcatg

SEQ ID NO: 669386 - DNA, 33 bp, Homo sapien
ataagagatatggaaaggataagaacattcatg

SEQ ID NO: 669387 - DNA, 33 bp, Homo sapien
tcatttattttggccaatatcttccatttgtaa

SEQ ID NO: 669388 - DNA, 33 bp, Homo sapien
tcatttattttggccagtatcttccatttgtaa

SEQ ID NO: 669389 - DNA, 33 bp, Homo sapien
tagtactttagggaaacgtgccactaactctaa

SEQ ID NO: 669390 - DNA, 33 bp, Homo sapien
tagtactttagggaaatgtgccactaactctaa

SEQ ID NO: 669391 - DNA, 33 bp, Homo sapien
gttaaagggagagttacgatagttccactgaac

SEQ ID NO: 669392 - DNA, 33 bp, Homo sapien
gttaaagggagagttatgatagttccactgaac

SEQ ID NO: 669393 - DNA, 33 bp, Homo sapien
aaagatgacttatgaagtactcacactgccact

SEQ ID NO: 669394 - DNA, 33 bp, Homo sapien
aaagatgacttatgaattactcacactgccact

SEQ ID NO: 669395 - DNA, 33 bp, Homo sapien
ctgcgcctggcctgatcagattgttttttaaat

SEQ ID NO: 669396 - DNA, 33 bp, Homo sapien
ctgcgcctggcctgattagattgttttttaaat

SEQ ID NO: 669397 - DNA, 33 bp, Homo sapien
aaaatcctctctatgtgacagtagtttaaaagg

SEQ ID NO: 669398 - DNA, 33 bp, Homo sapien
aaaatcctctctatgttacagtagtttaaaagg

SEQ ID NO: 669399 - DNA, 33 bp, Homo sapien
attgtatttccgctcaaataataaaatagaata

SEQ ID NO: 669400 - DNA, 33 bp, Homo sapien
attgtatttccgctcagataataaaatagaata

SEQ ID NO: 669401 - DNA, 33 bp, Homo sapien
tagagtcctacaagctaacaattttcaatctat

SEQ ID NO: 669402 - DNA, 33 bp, Homo sapien
tagagtcctacaagctgacaattttcaatctat

SEQ ID NO: 669403 - DNA, 33 bp, Homo sapien
aaccaaaagcacatatgaaagtctccaacttga

SEQ ID NO: 669404 - DNA, 33 bp, Homo sapien
aaccaaaagcacatattaaagtctccaacttga

SEQ ID NO: 669405 - DNA, 33 bp, Homo sapien
agaatggaccttcagacgaggtgtgaatgaatt

SEQ ID NO: 669406 - DNA, 33 bp, Homo sapien
agaatggaccttcagatgaggtgtgaatgaatt

SEQ ID NO: 669407 - DNA, 33 bp, Homo sapien
acaaatgtataaagtacctgaggcaatccagtt

SEQ ID NO: 669408 - DNA, 33 bp, Homo sapien
acaaatgtataaagtagctgaggcaatccagtt

SEQ ID NO: 669409 - DNA, 33 bp, Homo sapien
ttggatgttcataatacagacttggcttagatg

SEQ ID NO: 669410 - DNA, 33 bp, Homo sapien
ttggatgttcataatatagacttggcttagatg

SEQ ID NO: 669411 - DNA, 33 bp, Homo sapien
acactttcccaggtgacagatatttctcttatg

SEQ ID NO: 669412 - DNA, 33 bp, Homo sapien
acactttcccaggtgatagatatttctcttatg

SEQ ID NO: 669413 - DNA, 33 bp, Homo sapien
gtaagctctgcaagggcagtttcttttactaat

SEQ ID NO: 669414 - DNA, 33 bp, Homo sapien
gtaagctctgcaagggtagtttcttttactaat

SEQ ID NO: 669415 - DNA, 33 bp, Homo sapien
atgtatggatttttatcaacaataagaccaaac

SEQ ID NO: 669416 - DNA, 33 bp, Homo sapien
atgtatggatttttatgaacaataagaccaaac

SEQ ID NO: 669417 - DNA, 33 bp, Homo sapien
ttccttaaatagtaaaatccatatgcacaaatt

SEQ ID NO: 669418 - DNA, 33 bp, Homo sapien
ttccttaaatagtaaagtccatatgcacaaatt

SEQ ID NO: 669419 - DNA, 33 bp, Homo sapien
cctagaatttgttgcacggtcttgacttacata

SEQ ID NO: 669420 - DNA, 33 bp, Homo sapien
cctagaatttgttgcatggtcttgacttacata

SEQ ID NO: 669421 - DNA, 33 bp, Homo sapien
atgctttggctgtaacaaaacctaactaagagt

SEQ ID NO: 669422 - DNA, 33 bp, Homo sapien
atgctttggctgtaacgaaacctaactaagagt

SEQ ID NO: 669423 - DNA, 33 bp, Homo sapien
aatacagaaaaaagtgaaagttacataggattt

SEQ ID NO: 669424 - DNA, 33 bp, Homo sapien
aatacagaaaaaagtgcaagttacataggattt

SEQ ID NO: 669425 - DNA, 33 bp, Homo sapien
aatataaattagtaacaagtactgctcttctcc

SEQ ID NO: 669426 - DNA, 33 bp, Homo sapien
aatataaattagtaacgagtactgctcttctcc

SEQ ID NO: 669427 - DNA, 33 bp, Homo sapien
cagtgtgtttatatagcatacagcatgtattct

SEQ ID NO: 669428 - DNA, 33 bp, Homo sapien
cagtgtgtttatatagtatacagcatgtattct

SEQ ID NO: 669429 - DNA, 33 bp, Homo sapien
ttgtcaaagctgatcacaagatttaggtcattc

SEQ ID NO: 669430 - DNA, 33 bp, Homo sapien
ttgtcaaagctgatcataagatttaggtcattc

SEQ ID NO: 669431 - DNA, 33 bp, Homo sapien
ttctaggtaaatcactcaagatggctcatagtt

SEQ ID NO: 669432 - DNA, 33 bp, Homo sapien
ttctaggtaaatcactgaagatggctcatagtt

SEQ ID NO: 669433 - DNA, 33 bp, Homo sapien
gatcacttgaggcaaacagcttgagaccagccc

SEQ ID NO: 669434 - DNA, 33 bp, Homo sapien
gatcacttgaggcaaagagcttgagaccagccc

SEQ ID NO: 669435 - DNA, 33 bp, Homo sapien
atagaaatatagtgcacggtaattgtaatgcac

SEQ ID NO: 669436 - DNA, 33 bp, Homo sapien
atagaaatatagtgcatggtaattgtaatgcac

SEQ ID NO: 669437 - DNA, 33 bp, Homo sapien
gtttgtgtctttccagcagttggttcatgttac

SEQ ID NO: 669438 - DNA, 33 bp, Homo sapien
gtttgtgtctttccaggagttggttcatgttac

SEQ ID NO: 669439 - DNA, 33 bp, Homo sapien
atgtttgctaactgtacctttgtgaaatgtata

SEQ ID NO: 669440 - DNA, 33 bp, Homo sapien
atgtttgctaactgtatctttgtgaaatgtata

SEQ ID NO: 669441 - DNA, 33 bp, Homo sapien
agaaatttaggtctcaagaacttttatgaactt

SEQ ID NO: 669442 - DNA, 33 bp, Homo sapien
agaaatttaggtctcaggaacttttatgaactt

SEQ ID NO: 669443 - DNA, 33 bp, Homo sapien
gcttgcttctctgaaccgattttctcctatctt

SEQ ID NO: 669444 - DNA, 33 bp, Homo sapien
gcttgcttctctgaactgattttctcctatctt

SEQ ID NO: 669445 - DNA, 33 bp, Homo sapien
taaacagaacaacaacagaaggaagagaaaata

SEQ ID NO: 669446 - DNA, 33 bp, Homo sapien
taaacagaacaacaacggaaggaagagaaaata

SEQ ID NO: 669447 - DNA, 33 bp, Homo sapien
gcctggattggacagtaactattttatatacca

SEQ ID NO: 669448 - DNA, 33 bp, Homo sapien
gcctggattggacagttactattttatatacca

SEQ ID NO: 669449 - DNA, 33 bp, Homo sapien
ggaaattgccatcatcagaaagaatagtatttt

SEQ ID NO: 669450 - DNA, 33 bp, Homo sapien
ggaaattgccatcatcggaaagaatagtatttt

SEQ ID NO: 669451 - DNA, 33 bp, Homo sapien
tttttaatgctgctctaaagttgtagaaagttg

SEQ ID NO: 669452 - DNA, 33 bp, Homo sapien
tttttaatgctgctctgaagttgtagaaagttg

SEQ ID NO: 669453 - DNA, 33 bp, Homo sapien
gatgactctgtccttacgaagtgtaatttaata

SEQ ID NO: 669454 - DNA, 33 bp, Homo sapien
gatgactctgtccttatgaagtgtaatttaata

SEQ ID NO: 669455 - DNA, 33 bp, Homo sapien
aaagattggatggataacagcaggacagcaact

SEQ ID NO: 669456 - DNA, 33 bp, Homo sapien
aaagattggatggataccagcaggacagcaact

SEQ ID NO: 669457 - DNA, 33 bp, Homo sapien
tttactgctattcacaacaataattcccaacct

SEQ ID NO: 669458 - DNA, 33 bp, Homo sapien
tttactgctattcacagcaataattcccaacct

SEQ ID NO: 669459 - DNA, 33 bp, Homo sapien
gagtaggggacttccaactcatacaatcatctt

SEQ ID NO: 669460 - DNA, 33 bp, Homo sapien
gagtaggggacttccagctcatacaatcatctt

SEQ ID NO: 669461 - DNA, 33 bp, Homo sapien
ttgtctgcttttttagcatggctccttaggggt

SEQ ID NO: 669462 - DNA, 33 bp, Homo sapien
ttgtctgcttttttagtatggctccttaggggt

SEQ ID NO: 669463 - DNA, 33 bp, Homo sapien
atttactatttactaaaatgtctacattgtgcc

SEQ ID NO: 669464 - DNA, 33 bp, Homo sapien
atttactatttactaagatgtctacattgtgcc

SEQ ID NO: 669465 - DNA, 33 bp, Homo sapien
caggctcagccaaagcagaacagaggatgaaga

SEQ ID NO: 669466 - DNA, 33 bp, Homo sapien
caggctcagccaaagcggaacagaggatgaaga

SEQ ID NO: 669467 - DNA, 33 bp, Homo sapien
ggaaagggaacccaagaagagcttagtggacca

SEQ ID NO: 669468 - DNA, 33 bp, Homo sapien
ggaaagggaacccaagtagagcttagtggacca

SEQ ID NO: 669469 - DNA, 33 bp, Homo sapien
gagacaacggagatgaaccctatgactactgta

SEQ ID NO: 669470 - DNA, 33 bp, Homo sapien
gagacaacggagatgagccctatgactactgta

SEQ ID NO: 669471 - DNA, 33 bp, Homo sapien
atagattgcgataggaaggagaaacgtctgggt

SEQ ID NO: 669472 - DNA, 33 bp, Homo sapien
atagattgcgataggacggagaaacgtctgggt

SEQ ID NO: 669473 - DNA, 33 bp, Homo sapien
ctaaaacctcacgttacagctaaggaataagga

SEQ ID NO: 669474 - DNA, 33 bp, Homo sapien
ctaaaacctcacgttatagctaaggaataagga

SEQ ID NO: 669475 - DNA, 33 bp, Homo sapien
catcgcagaaaaaaaaggagcaaatttagagat

SEQ ID NO: 669476 - DNA, 33 bp, Homo sapien
catcgcagaaaaaaaatgagcaaatttagagat

SEQ ID NO: 669477 - DNA, 33 bp, Homo sapien
actataagtacctcccaatggaattagctttag

SEQ ID NO: 669478 - DNA, 33 bp, Homo sapien
actataagtacctcccgatggaattagctttag

SEQ ID NO: 669479 - DNA, 33 bp, Homo sapien
ataacacatcttgtgaccccaaatcttaatcat

SEQ ID NO: 669480 - DNA, 33 bp, Homo sapien
ataacacatcttgtgatcccaaatcttaatcat

SEQ ID NO: 669481 - DNA, 33 bp, Homo sapien
cttaaacaccgtggcccattatgcttttttaac

SEQ ID NO: 669482 - DNA, 33 bp, Homo sapien
cttaaacaccgtggcctattatgcttttttaac

SEQ ID NO: 669483 - DNA, 33 bp, Homo sapien
tagtgattagtggttccatttaatgtaattcta

SEQ ID NO: 669484 - DNA, 33 bp, Homo sapien
tagtgattagtggttctatttaatgtaattcta

SEQ ID NO: 669485 - DNA, 33 bp, Homo sapien
gatgactatacaaacacggaaaaagttctagga

SEQ ID NO: 669486 - DNA, 33 bp, Homo sapien
gatgactatacaaacatggaaaaagttctagga

SEQ ID NO: 669487 - DNA, 33 bp, Homo sapien
gatttataggagatcaaaatagcaatattaaca

SEQ ID NO: 669488 - DNA, 33 bp, Homo sapien
gatttataggagatcagaatagcaatattaaca

SEQ ID NO: 669489 - DNA, 33 bp, Homo sapien
gattttctgatttccactgataaaaggccaaag

SEQ ID NO: 669490 - DNA, 33 bp, Homo sapien
gattttctgatttccattgataaaaggccaaag

SEQ ID NO: 669491 - DNA, 33 bp, Homo sapien
atcatctagtgggtgaaaaactctgtaaaacta

SEQ ID NO: 669492 - DNA, 33 bp, Homo sapien
atcatctagtgggtgagaaactctgtaaaacta

SEQ ID NO: 669493 - DNA, 33 bp, Homo sapien
cttctaagaactgtagccaatttgaaggctatg

SEQ ID NO: 669494 - DNA, 33 bp, Homo sapien
cttctaagaactgtaggcaatttgaaggctatg

SEQ ID NO: 669495 - DNA, 33 bp, Homo sapien
ggccaataatcttatgaagaaaatgctgaatat

SEQ ID NO: 669496 - DNA, 33 bp, Homo sapien
ggccaataatcttatgtagaaaatgctgaatat

SEQ ID NO: 669497 - DNA, 33 bp, Homo sapien
tacgtattaccaaaaaataggatcaagtgaaac

SEQ ID NO: 669498 - DNA, 33 bp, Homo sapien
tacgtattaccaaaaattaggatcaagtgaaac

SEQ ID NO: 669499 - DNA, 33 bp, Homo sapien
aacattagtcagtataaagttatgagttctaat

SEQ ID NO: 669500 - DNA, 33 bp, Homo sapien
aacattagtcagtatatagttatgagttctaat

SEQ ID NO: 669501 - DNA, 33 bp, Homo sapien
aatgaaatgttggaccacttgaattttttctct

SEQ ID NO: 669502 - DNA, 33 bp, Homo sapien
aatgaaatgttggacctcttgaattttttctct

SEQ ID NO: 669503 - DNA, 33 bp, Homo sapien
aaactatcaaaagttcaaaggaaatcaacaaaa

SEQ ID NO: 669504 - DNA, 33 bp, Homo sapien
aaactatcaaaagttcgaaggaaatcaacaaaa

SEQ ID NO: 669505 - DNA, 33 bp, Homo sapien
actactgtatattcaccaagataaatgccacct

SEQ ID NO: 669506 - DNA, 33 bp, Homo sapien
actactgtatattcacgaagataaatgccacct

SEQ ID NO: 669507 - DNA, 33 bp, Homo sapien
gggaaaatggtgcataccgattaagtgacctgt

SEQ ID NO: 669508 - DNA, 33 bp, Homo sapien
gggaaaatggtgcatagcgattaagtgacctgt

SEQ ID NO: 669509 - DNA, 33 bp, Homo sapien
gcaggatgaaagcggggaatcatttttcaaaat

SEQ ID NO: 669510 - DNA, 33 bp, Homo sapien
gcaggatgaaagcgggtaatcatttttcaaaat

SEQ ID NO: 669511 - DNA, 33 bp, Homo sapien
atcatagtttaaaaaaattcctggtctgataat

SEQ ID NO: 669512 - DNA, 33 bp, Homo sapien
atcatagtttaaaaaatttcctggtctgataat

SEQ ID NO: 669513 - DNA, 33 bp, Homo sapien
agcaatatttgaagaaatgaagactaagaatta

SEQ ID NO: 669514 - DNA, 33 bp, Homo sapien
agcaatatttgaagaagtgaagactaagaatta

SEQ ID NO: 669515 - DNA, 33 bp, Homo sapien
tggtcacagtagaaatgaaagtctcctcaagat

SEQ ID NO: 669516 - DNA, 33 bp, Homo sapien
tggtcacagtagaaattaaagtctcctcaagat

SEQ ID NO: 669517 - DNA, 33 bp, Homo sapien
tttctacttggacttacgagcagaagacagaat

SEQ ID NO: 669518 - DNA, 33 bp, Homo sapien
tttctacttggacttatgagcagaagacagaat

SEQ ID NO: 669519 - DNA, 33 bp, Homo sapien
aatgtaaatatgcagaagaatgctaaaatagaa

SEQ ID NO: 669520 - DNA, 33 bp, Homo sapien
aatgtaaatatgcagaggaatgctaaaatagaa

SEQ ID NO: 669521 - DNA, 33 bp, Homo sapien
cgatcttgattgacgcaagtggcacccttttgc

SEQ ID NO: 669522 - DNA, 33 bp, Homo sapien
cgatcttgattgacgcgagtggcacccttttgc

SEQ ID NO: 669523 - DNA, 33 bp, Homo sapien
cttttgtttaatgtgcagaaggaatattgaatc

SEQ ID NO: 669524 - DNA, 33 bp, Homo sapien
cttttgtttaatgtgcggaaggaatattgaatc

SEQ ID NO: 669525 - DNA, 33 bp, Homo sapien
gttcctttggtaaggcagaggtaagattttagg

SEQ ID NO: 669526 - DNA, 33 bp, Homo sapien
gttcctttggtaaggcggaggtaagattttagg

SEQ ID NO: 669527 - DNA, 33 bp, Homo sapien
aaggcactctaagttaagagatatgttctcaat

SEQ ID NO: 669528 - DNA, 33 bp, Homo sapien
aaggcactctaagttaggagatatgttctcaat

SEQ ID NO: 669529 - DNA, 33 bp, Homo sapien
tactaattctaaatacacctttacagtggctca

SEQ ID NO: 669530 - DNA, 33 bp, Homo sapien
tactaattctaaatacgcctttacagtggctca

SEQ ID NO: 669531 - DNA, 33 bp, Homo sapien
gtccttatgaaacttacattctcacatggagag

SEQ ID NO: 669532 - DNA, 33 bp, Homo sapien
gtccttatgaaacttatattctcacatggagag

SEQ ID NO: 669533 - DNA, 33 bp, Homo sapien
cttccttattaactcactagccagaaagtatac

SEQ ID NO: 669534 - DNA, 33 bp, Homo sapien
cttccttattaactcagtagccagaaagtatac

SEQ ID NO: 669535 - DNA, 33 bp, Homo sapien
ggatcataggctgataactgttctcaaagggct

SEQ ID NO: 669536 - DNA, 33 bp, Homo sapien
ggatcataggctgatagctgttctcaaagggct

SEQ ID NO: 669537 - DNA, 33 bp, Homo sapien
cctttttctccttagacgccatgtaatcccgcg

SEQ ID NO: 669538 - DNA, 33 bp, Homo sapien
cctttttctccttagatgccatgtaatcccgcg

SEQ ID NO: 669539 - DNA, 33 bp, Homo sapien
caaaagctaaatgttgcattataactcaagact

SEQ ID NO: 669540 - DNA, 33 bp, Homo sapien
caaaagctaaatgttggattataactcaagact

SEQ ID NO: 669541 - DNA, 33 bp, Homo sapien
gacttgggcatccgtgcattttggtatctgagg

SEQ ID NO: 669542 - DNA, 33 bp, Homo sapien
gacttgggcatccgtggattttggtatctgagg

SEQ ID NO: 669543 - DNA, 33 bp, Homo sapien
agaggacataagtatcaccttaaatttgctgtt

SEQ ID NO: 669544 - DNA, 33 bp, Homo sapien
agaggacataagtatcgccttaaatttgctgtt

SEQ ID NO: 669545 - DNA, 33 bp, Homo sapien
agctgaggaagaagacagactgaaggagcttgc

SEQ ID NO: 669546 - DNA, 33 bp, Homo sapien
agctgaggaagaagactgactgaaggagcttgc

SEQ ID NO: 669547 - DNA, 33 bp, Homo sapien
gaccacataccagagacagtgctttgtataagt

SEQ ID NO: 669548 - DNA, 33 bp, Homo sapien
gaccacataccagagagagtgctttgtataagt

SEQ ID NO: 669549 - DNA, 33 bp, Homo sapien
acattcttgttttgaaggggtgccttgtgtctc

SEQ ID NO: 669550 - DNA, 33 bp, Homo sapien
acattcttgttttgaatgggtgccttgtgtctc

SEQ ID NO: 669551 - DNA, 33 bp, Homo sapien
ttttctgatggagaccaaagtctgtgggaatag

SEQ ID NO: 669552 - DNA, 33 bp, Homo sapien
ttttctgatggagaccgaagtctgtgggaatag

SEQ ID NO: 669553 - DNA, 33 bp, Homo sapien
gtaaaatgtacagaaacgatgtgaataaaagag

SEQ ID NO: 669554 - DNA, 33 bp, Homo sapien
gtaaaatgtacagaaatgatgtgaataaaagag

SEQ ID NO: 669555 - DNA, 33 bp, Homo sapien
aaacttaataggaatagagcaacacattgagat

SEQ ID NO: 669556 - DNA, 33 bp, Homo sapien
aaacttaataggaatatagcaacacattgagat

SEQ ID NO: 669557 - DNA, 33 bp, Homo sapien
gtggctttaaatactacatggtgacaactacag

SEQ ID NO: 669558 - DNA, 33 bp, Homo sapien
gtggctttaaatactatatggtgacaactacag

SEQ ID NO: 669559 - DNA, 33 bp, Homo sapien
tacatacagagggaaaaattgaagacctgggaa

SEQ ID NO: 669560 - DNA, 33 bp, Homo sapien
tacatacagagggaaagattgaagacctgggaa

SEQ ID NO: 669561 - DNA, 33 bp, Homo sapien
agaaacccagaccaaccatcaatgtaacttgta

SEQ ID NO: 669562 - DNA, 33 bp, Homo sapien
agaaacccagaccaactatcaatgtaacttgta

SEQ ID NO: 669563 - DNA, 33 bp, Homo sapien
gactattctcttcaaacgcctgagagtatcatc

SEQ ID NO: 669564 - DNA, 33 bp, Homo sapien
gactattctcttcaaatgcctgagagtatcatc

SEQ ID NO: 669565 - DNA, 33 bp, Homo sapien
taacgttgtcacaacccgcactaacacaacagg

SEQ ID NO: 669566 - DNA, 33 bp, Homo sapien
taacgttgtcacaaccggcactaacacaacagg

SEQ ID NO: 669567 - DNA, 33 bp, Homo sapien
gagctctcaaagaatacgctgaacaaccctctg

SEQ ID NO: 669568 - DNA, 33 bp, Homo sapien
gagctctcaaagaatatgctgaacaaccctctg

SEQ ID NO: 669569 - DNA, 33 bp, Homo sapien
tctgccaataccaaccacagattgtctaccatc

SEQ ID NO: 669570 - DNA, 33 bp, Homo sapien
tctgccaataccaaccgcagattgtctaccatc

SEQ ID NO: 669571 - DNA, 33 bp, Homo sapien
cctcagttgtagcaacaagaaatgttccagaag

SEQ ID NO: 669572 - DNA, 33 bp, Homo sapien
cctcagttgtagcaacgagaaatgttccagaag

SEQ ID NO: 669573 - DNA, 33 bp, Homo sapien
gtccctatacttggtacgaaaaagctcaataat

SEQ ID NO: 669574 - DNA, 33 bp, Homo sapien
gtccctatacttggtatgaaaaagctcaataat

SEQ ID NO: 669575 - DNA, 33 bp, Homo sapien
gcaactttttggaaagcaaattggcaacaccta

SEQ ID NO: 669576 - DNA, 33 bp, Homo sapien
gcaactttttggaaaggaaattggcaacaccta

SEQ ID NO: 669577 - DNA, 33 bp, Homo sapien
gccactaggttaatcaacataagttctcagggc

SEQ ID NO: 669578 - DNA, 33 bp, Homo sapien
gccactaggttaatcagcataagttctcagggc

SEQ ID NO: 669579 - DNA, 33 bp, Homo sapien
gcttttttgattcttgaatgctgttttagagtc

SEQ ID NO: 669580 - DNA, 33 bp, Homo sapien
gcttttttgattcttggatgctgttttagagtc

SEQ ID NO: 669581 - DNA, 33 bp, Homo sapien
gaaatcatgatgatacgcggtatggcatgtaat

SEQ ID NO: 669582 - DNA, 33 bp, Homo sapien
gaaatcatgatgatactcggtatggcatgtaat

SEQ ID NO: 669583 - DNA, 33 bp, Homo sapien
ttggggagactgtgccaacccagcatagctttt

SEQ ID NO: 669584 - DNA, 33 bp, Homo sapien
ttggggagactgtgccgacccagcatagctttt

SEQ ID NO: 669585 - DNA, 33 bp, Homo sapien
tccatatccttacaccaaggccacctcagtatt

SEQ ID NO: 669586 - DNA, 33 bp, Homo sapien
tccatatccttacaccgaggccacctcagtatt

SEQ ID NO: 669587 - DNA, 33 bp, Homo sapien
caaaaaagtgatagacacatgaggtgatggata

SEQ ID NO: 669588 - DNA, 33 bp, Homo sapien
caaaaaagtgatagacgcatgaggtgatggata

SEQ ID NO: 669589 - DNA, 33 bp, Homo sapien
agactgaatgaagaaacgaggactacatcagta

SEQ ID NO: 669590 - DNA, 33 bp, Homo sapien
agactgaatgaagaaatgaggactacatcagta

SEQ ID NO: 669591 - DNA, 33 bp, Homo sapien
taagcacaatattgaactataaaagacatcttg

SEQ ID NO: 669592 - DNA, 33 bp, Homo sapien
taagcacaatattgaagtataaaagacatcttg

SEQ ID NO: 669593 - DNA, 33 bp, Homo sapien
tccagcccagtagagcccagatttcacagggta

SEQ ID NO: 669594 - DNA, 33 bp, Homo sapien
tccagcccagtagagctcagatttcacagggta

SEQ ID NO: 669595 - DNA, 33 bp, Homo sapien
ccttccctctaacactcacctcataggcatgac

SEQ ID NO: 669596 - DNA, 33 bp, Homo sapien
ccttccctctaacacttacctcataggcatgac

SEQ ID NO: 669597 - DNA, 33 bp, Homo sapien
actgcttaaagggtcacctttctaaaattcaaa

SEQ ID NO: 669598 - DNA, 33 bp, Homo sapien
actgcttaaagggtcatctttctaaaattcaaa

SEQ ID NO: 669599 - DNA, 33 bp, Homo sapien
caaaaaagtggacaacaggcatgaatagacatt

SEQ ID NO: 669600 - DNA, 33 bp, Homo sapien
caaaaaagtggacaacgggcatgaatagacatt

SEQ ID NO: 669601 - DNA, 33 bp, Homo sapien
tacgaccccaatcacaagttcattttcctaaaa

SEQ ID NO: 669602 - DNA, 33 bp, Homo sapien
tacgaccccaatcacaggttcattttcctaaaa

SEQ ID NO: 669603 - DNA, 33 bp, Homo sapien
agtaagaaattatagcacaaattgttttttaga

SEQ ID NO: 669604 - DNA, 33 bp, Homo sapien
agtaagaaattatagcgcaaattgttttttaga

SEQ ID NO: 669605 - DNA, 33 bp, Homo sapien
gttaactaccttatccaattcatagaaatttct

SEQ ID NO: 669606 - DNA, 33 bp, Homo sapien
gttaactaccttatccgattcatagaaatttct

SEQ ID NO: 669607 - DNA, 33 bp, Homo sapien
gtataaagaaatgttacacagtgattgttctgt

SEQ ID NO: 669608 - DNA, 33 bp, Homo sapien
gtataaagaaatgttatacagtgattgttctgt

SEQ ID NO: 669609 - DNA, 33 bp, Homo sapien
tgtgggaaggaaaagacgcgaaggagacacaag

SEQ ID NO: 669610 - DNA, 33 bp, Homo sapien
tgtgggaaggaaaagatgcgaaggagacacaag

SEQ ID NO: 669611 - DNA, 33 bp, Homo sapien
atggcgcatattgaaacgaaaaggatatagaaa

SEQ ID NO: 669612 - DNA, 33 bp, Homo sapien
atggcgcatattgaaatgaaaaggatatagaaa

SEQ ID NO: 669613 - DNA, 33 bp, Homo sapien
aaggatatttggacacacttaatatcttttgga

SEQ ID NO: 669614 - DNA, 33 bp, Homo sapien
aaggatatttggacacgcttaatatcttttgga

SEQ ID NO: 669615 - DNA, 33 bp, Homo sapien
aaactatcaaggtcacaactaaaggaagaacct

SEQ ID NO: 669616 - DNA, 33 bp, Homo sapien
aaactatcaaggtcaccactaaaggaagaacct

SEQ ID NO: 669617 - DNA, 33 bp, Homo sapien
tcaagagattttggagccacacagatctgaaaa

SEQ ID NO: 669618 - DNA, 33 bp, Homo sapien
tcaagagattttggaggcacacagatctgaaaa

SEQ ID NO: 669619 - DNA, 33 bp, Homo sapien
agttcaggtttcatggccacctgatgtcccatg

SEQ ID NO: 669620 - DNA, 33 bp, Homo sapien
agttcaggtttcatggtcacctgatgtcccatg

SEQ ID NO: 669621 - DNA, 33 bp, Homo sapien
gatgaagtggtagagaagcttgtaactatattg

SEQ ID NO: 669622 - DNA, 33 bp, Homo sapien
gatgaagtggtagagaggcttgtaactatattg

SEQ ID NO: 669623 - DNA, 33 bp, Homo sapien
tacattgacaacattacgctgatgggctctaat

SEQ ID NO: 669624 - DNA, 33 bp, Homo sapien
tacattgacaacattatgctgatgggctctaat

SEQ ID NO: 669625 - DNA, 33 bp, Homo sapien
accttgattgtctttacgctacattgacaacat

SEQ ID NO: 669626 - DNA, 33 bp, Homo sapien
accttgattgtctttatgctacattgacaacat

SEQ ID NO: 669627 - DNA, 33 bp, Homo sapien
gcagtcttaggtagtgacaactgcagctactga

SEQ ID NO: 669628 - DNA, 33 bp, Homo sapien
gcagtcttaggtagtggcaactgcagctactga

SEQ ID NO: 669629 - DNA, 33 bp, Homo sapien
agacattcatggattacagagaatgactgtgga

SEQ ID NO: 669630 - DNA, 33 bp, Homo sapien
agacattcatggattatagagaatgactgtgga

SEQ ID NO: 669631 - DNA, 33 bp, Homo sapien
ggcaactcgaggaaaacgatttgcagctagagc

SEQ ID NO: 669632 - DNA, 33 bp, Homo sapien
ggcaactcgaggaaaaggatttgcagctagagc

SEQ ID NO: 669633 - DNA, 33 bp, Homo sapien
taattttaaagtcatacgttttcctcattctct

SEQ ID NO: 669634 - DNA, 33 bp, Homo sapien
taattttaaagtcatatgttttcctcattctct

SEQ ID NO: 669635 - DNA, 33 bp, Homo sapien
gttatactatacactacaggcagagattatata

SEQ ID NO: 669636 - DNA, 33 bp, Homo sapien
gttatactatacactataggcagagattatata

SEQ ID NO: 669637 - DNA, 33 bp, Homo sapien
tctggcttccaactagcccagtttgtgcaaagg

SEQ ID NO: 669638 - DNA, 33 bp, Homo sapien
tctggcttccaactagtccagtttgtgcaaagg

SEQ ID NO: 669639 - DNA, 33 bp, Homo sapien
agtggttaacttgccaatgaggtcacagagatt

SEQ ID NO: 669640 - DNA, 33 bp, Homo sapien
agtggttaacttgccagtgaggtcacagagatt

SEQ ID NO: 669641 - DNA, 33 bp, Homo sapien
tcaaaatgtcacataaacctccctaatatttta

SEQ ID NO: 669642 - DNA, 33 bp, Homo sapien
tcaaaatgtcacataaccctccctaatatttta

SEQ ID NO: 669643 - DNA, 33 bp, Homo sapien
tttgtgccatcagagacagttgctatttaaagg

SEQ ID NO: 669644 - DNA, 33 bp, Homo sapien
tttgtgccatcagagatagttgctatttaaagg

SEQ ID NO: 669645 - DNA, 33 bp, Homo sapien
ataaatttactgcctacggggtattctctgcct

SEQ ID NO: 669646 - DNA, 33 bp, Homo sapien
ataaatttactgcctatggggtattctctgcct

SEQ ID NO: 669647 - DNA, 33 bp, Homo sapien
tactatagagctgtaccaatagccaaaggctct

SEQ ID NO: 669648 - DNA, 33 bp, Homo sapien
tactatagagctgtactaatagccaaaggctct

SEQ ID NO: 669649 - DNA, 33 bp, Homo sapien
aggtaagggagttcagaacaaggccattcatga

SEQ ID NO: 669650 - DNA, 33 bp, Homo sapien
aggtaagggagttcaggacaaggccattcatga

SEQ ID NO: 669651 - DNA, 33 bp, Homo sapien
gaggccttcaaccctaataactgctttatcatc

SEQ ID NO: 669652 - DNA, 33 bp, Homo sapien
gaggccttcaaccctagtaactgctttatcatc

SEQ ID NO: 669653 - DNA, 33 bp, Homo sapien
taaggacgtgaatagacaattgcaaatagagga

SEQ ID NO: 669654 - DNA, 33 bp, Homo sapien
taaggacgtgaatagataattgcaaatagagga

SEQ ID NO: 669655 - DNA, 33 bp, Homo sapien; identical to SEQ ID NO: 669653

SEQ ID NO: 669656 - DNA, 33 bp, Homo sapien; identical to SEQ ID NO: 669654

SEQ ID NO: 669657 - DNA, 33 bp, Homo sapien
ctgtttcctttttctgcataggtagttgaagtt

SEQ ID NO: 669658 - DNA, 33 bp, Homo sapien
ctgtttcctttttctgtataggtagttgaagtt

SEQ ID NO: 669659 - DNA, 33 bp, Homo sapien
catctaacactcttcaaacttacaatttcttgg

SEQ ID NO: 669660 - DNA, 33 bp, Homo sapien
catctaacactcttcacacttacaatttcttgg

SEQ ID NO: 669661 - DNA, 33 bp, Homo sapien
ttggtccaagtgagacaactctcatgctatatt

SEQ ID NO: 669662 - DNA, 33 bp, Homo sapien
ttggtccaagtgagaccactctcatgctatatt

SEQ ID NO: 669663 - DNA, 33 bp, Homo sapien
tcttgggaatctatccaaagaaatcctcatgca

SEQ ID NO: 669664 - DNA, 33 bp, Homo sapien
tcttgggaatctatccgaagaaatcctcatgca

SEQ ID NO: 669665 - DNA, 33 bp, Homo sapien
gaaagtaccaagttcaaatctgtcactacttat

SEQ ID NO: 669666 - DNA, 33 bp, Homo sapien
gaaagtaccaagttcatatctgtcactacttat

SEQ ID NO: 669667 - DNA, 33 bp, Homo sapien
aaatttgcaaacgaaaaaacttgagatattgga

SEQ ID NO: 669668 - DNA, 33 bp, Homo sapien
aaatttgcaaacgaaagaacttgagatattgga

SEQ ID NO: 669669 - DNA, 33 bp, Homo sapien
catcacagcacacatacgttttcacacaccagc

SEQ ID NO: 669670 - DNA, 33 bp, Homo sapien
catcacagcacacataggttttcacacaccagc

SEQ ID NO: 669671 - DNA, 33 bp, Homo sapien
agtcaatttttatggacatcaggcaaacagtat

SEQ ID NO: 669672 - DNA, 33 bp, Homo sapien
agtcaatttttatggagatcaggcaaacagtat

SEQ ID NO: 669673 - DNA, 33 bp, Homo sapien
tctttctagatgtaatcaaatgaaggtctcaat

SEQ ID NO: 669674 - DNA, 33 bp, Homo sapien
tctttctagatgtaattaaatgaaggtctcaat

SEQ ID NO: 669675 - DNA, 33 bp, Homo sapien
caggcaactcatacgcactttaaagttggaaaa

SEQ ID NO: 669676 - DNA, 33 bp, Homo sapien
caggcaactcatacgctctttaaagttggaaaa

SEQ ID NO: 669677 - DNA, 33 bp, Homo sapien
gctaaggagtatgtaaaaacgcacctgccaaag

SEQ ID NO: 669678 - DNA, 33 bp, Homo sapien
gctaaggagtatgtaacaacgcacctgccaaag

SEQ ID NO: 669679 - DNA, 33 bp, Homo sapien
taccttatgtcatatggaactagaattcatcca

SEQ ID NO: 669680 - DNA, 33 bp, Homo sapien
taccttatgtcatatgtaactagaattcatcca

SEQ ID NO: 669681 - DNA, 33 bp, Homo sapien
gtccttagacagtacaactagcaggacacatcc

SEQ ID NO: 669682 - DNA, 33 bp, Homo sapien
gtccttagacagtacagctagcaggacacatcc

SEQ ID NO: 669683 - DNA, 33 bp, Homo sapien
ggtataactgtcagggaaagagacccagaaatc

SEQ ID NO: 669684 - DNA, 33 bp, Homo sapien
ggtataactgtcaggggaagagacccagaaatc

SEQ ID NO: 669685 - DNA, 33 bp, Homo sapien
agataaagtgaagacaaataataggtgattaat

SEQ ID NO: 669686 - DNA, 33 bp, Homo sapien
agataaagtgaagacacataataggtgattaat

SEQ ID NO: 669687 - DNA, 33 bp, Homo sapien
ccatccctgtgctgacaattaaccttaaagaag

SEQ ID NO: 669688 - DNA, 33 bp, Homo sapien
ccatccctgtgctgacgattaaccttaaagaag

SEQ ID NO: 669689 - DNA, 33 bp, Homo sapien
tgtaagtgctaggaaacaaaattaggcaagata

SEQ ID NO: 669690 - DNA, 33 bp, Homo sapien
tgtaagtgctaggaaataaaattaggcaagata

SEQ ID NO: 669691 - DNA, 33 bp, Homo sapien
actcccatggcctttacgccccagtgccaacat

SEQ ID NO: 669692 - DNA, 33 bp, Homo sapien
actcccatggcctttatgccccagtgccaacat

SEQ ID NO: 669693 - DNA, 33 bp, Homo sapien
ccatctacataccaataattctcaaatgtctgt

SEQ ID NO: 669694 - DNA, 33 bp, Homo sapien
ccatctacataccaatgattctcaaatgtctgt

SEQ ID NO: 669695 - DNA, 33 bp, Homo sapien
aaaacatcattctcagaaaaatagcacaggaac

SEQ ID NO: 669696 - DNA, 33 bp, Homo sapien
aaaacatcattctcagcaaaatagcacaggaac

SEQ ID NO: 669697 - DNA, 33 bp, Homo sapien; identical to SEQ ID NO: 669695

SEQ ID NO: 669698 - DNA, 33 bp, Homo sapien; identical to SEQ ID NO: 669696

SEQ ID NO: 669699 - DNA, 33 bp, Homo sapien
tacagattatgctataactagagtgagcacata

SEQ ID NO: 669700 - DNA, 33 bp, Homo sapien
tacagattatgctatacctagagtgagcacata

SEQ ID NO: 669701 - DNA, 33 bp, Homo sapien
gaaagaaaatggttcacatacttcgacagaaaa

SEQ ID NO: 669702 - DNA, 33 bp, Homo sapien
gaaagaaaatggttcagatacttcgacagaaaa

SEQ ID NO: 669703 - DNA, 33 bp, Homo sapien
aacaactatgatgcctcaattttatttttgctt

SEQ ID NO: 669704 - DNA, 33 bp, Homo sapien
aacaactatgatgcctgaattttatttttgctt

SEQ ID NO: 669705 - DNA, 33 bp, Homo sapien
atgcatcacaacaaaactgcttataaagtggcc

SEQ ID NO: 669706 - DNA, 33 bp, Homo sapien
atgcatcacaacaaaattgcttataaagtggcc

SEQ ID NO: 669707 - DNA, 33 bp, Homo sapien
ctatctgagaatggcaaatatgcagcggtgtgg

SEQ ID NO: 669708 - DNA, 33 bp, Homo sapien
ctatctgagaatggcagatatgcagcggtgtgg

SEQ ID NO: 669709 - DNA, 33 bp, Homo sapien
tgcattcagctctgtaacattcaacttctttaa

SEQ ID NO: 669710 - DNA, 33 bp, Homo sapien
tgcattcagctctgtatcattcaacttctttaa

SEQ ID NO: 669711 - DNA, 33 bp, Homo sapien
taattttagtgtattacgaatggctctcatgat

SEQ ID NO: 669712 - DNA, 33 bp, Homo sapien
taattttagtgtattatgaatggctctcatgat

SEQ ID NO: 669713 - DNA, 33 bp, Homo sapien
gagcctgaaatggacacgagcctacctctgccc

SEQ ID NO: 669714 - DNA, 33 bp, Homo sapien
gagcctgaaatggacatgagcctacctctgccc

SEQ ID NO: 669715 - DNA, 33 bp, Homo sapien
gcttgtatagtcatagaaaaattctcaaagcat

SEQ ID NO: 669716 - DNA, 33 bp, Homo sapien
gcttgtatagtcatagtaaaattctcaaagcat

SEQ ID NO: 669717 - DNA, 33 bp, Homo sapien
gaaaccagacaactgaacaattttgtcgattcc

SEQ ID NO: 669718 - DNA, 33 bp, Homo sapien
gaaaccagacaactgatcaattttgtcgattcc

SEQ ID NO: 669719 - DNA, 33 bp, Homo sapien
tgcatttcatccaggaacattctttctaatcaa

SEQ ID NO: 669720 - DNA, 33 bp, Homo sapien
tgcatttcatccaggagcattctttctaatcaa

SEQ ID NO: 669721 - DNA, 33 bp, Homo sapien
ctaattactgagaagtcaaccattcaacccgga

SEQ ID NO: 669722 - DNA, 33 bp, Homo sapien
ctaattactgagaagtgaaccattcaacccgga

SEQ ID NO: 669723 - DNA, 33 bp, Homo sapien
tgttttttaagcataacggatctcaacttgatg

SEQ ID NO: 669724 - DNA, 33 bp, Homo sapien
tgttttttaagcataatggatctcaacttgatg

SEQ ID NO: 669725 - DNA, 33 bp, Homo sapien
ctcactgattcattaaacataaggactgccctg

SEQ ID NO: 669726 - DNA, 33 bp, Homo sapien
ctcactgattcattaagcataaggactgccctg

SEQ ID NO: 669727 - DNA, 33 bp, Homo sapien
acctatgtcactgataagtgtgagatacaaaag

SEQ ID NO: 669728 - DNA, 33 bp, Homo sapien
acctatgtcactgataggtgtgagatacaaaag

SEQ ID NO: 669729 - DNA, 33 bp, Homo sapien
tgttatgaaactaaagacatagaaggtttagta

SEQ ID NO: 669730 - DNA, 33 bp, Homo sapien
tgttatgaaactaaagtcatagaaggtttagta

SEQ ID NO: 669731 - DNA, 33 bp, Homo sapien
tttatatttacagacccacacagaagctgaggt

SEQ ID NO: 669732 - DNA, 33 bp, Homo sapien
tttatatttacagacctacacagaagctgaggt

SEQ ID NO: 669733 - DNA, 33 bp, Homo sapien
tacaatactgaaggaaggttcgctcatagctct

SEQ ID NO: 669734 - DNA, 33 bp, Homo sapien
tacaatactgaaggaatgttcgctcatagctct

SEQ ID NO: 669735 - DNA, 33 bp, Homo sapien
atattgaaccctgcaaaaatctggttcttagaa

SEQ ID NO: 669736 - DNA, 33 bp, Homo sapien
atattgaaccctgcaacaatctggttcttagaa

SEQ ID NO: 669737 - DNA, 33 bp, Homo sapien
ccccccactaaacttaaatgctgaaatcctaac

SEQ ID NO: 669738 - DNA, 33 bp, Homo sapien
ccccccactaaacttatatgctgaaatcctaac

SEQ ID NO: 669739 - DNA, 33 bp, Homo sapien
accaaaagctcctgcactaaatccatgtggaga

SEQ ID NO: 669740 - DNA, 33 bp, Homo sapien
accaaaagctcctgcagtaaatccatgtggaga

SEQ ID NO: 669741 - DNA, 33 bp, Homo sapien
gcaatggttactatgaataaataccaaaaatgt

SEQ ID NO: 669742 - DNA, 33 bp, Homo sapien
gcaatggttactatgagtaaataccaaaaatgt

SEQ ID NO: 669743 - DNA, 33 bp, Homo sapien
agcatttctctaaaaactgacataaccaaactt

SEQ ID NO: 669744 - DNA, 33 bp, Homo sapien
agcatttctctaaaaagtgacataaccaaactt

SEQ ID NO: 669745 - DNA, 33 bp, Homo sapien
ctcttgctgtagttagcatccttgaaaactttg

SEQ ID NO: 669746 - DNA, 33 bp, Homo sapien
ctcttgctgtagttagtatccttgaaaactttg

SEQ ID NO: 669747 - DNA, 33 bp, Homo sapien
aggaagtgctggcctccgaagcacagggccggc

SEQ ID NO: 669748 - DNA, 33 bp, Homo sapien
aggaagtgctggcctctgaagcacagggccggc

SEQ ID NO: 669749 - DNA, 33 bp, Homo sapien
ccttgcctgtatgtaaccatgtgcctaattttg

SEQ ID NO: 669750 - DNA, 33 bp, Homo sapien
ccttgcctgtatgtaatcatgtgcctaattttg

SEQ ID NO: 669751 - DNA, 33 bp, Homo sapien
atcattcgttagggaaatacatacaccaactaa

SEQ ID NO: 669752 - DNA, 33 bp, Homo sapien
atcattcgttagggaagtacatacaccaactaa

SEQ ID NO: 669753 - DNA, 33 bp, Homo sapien
tgtgtccttccattaccagagaagaatgcattc

SEQ ID NO: 669754 - DNA, 33 bp, Homo sapien
tgtgtccttccattacgagagaagaatgcattc

SEQ ID NO: 669755 - DNA, 33 bp, Homo sapien
tctttctttagggatacggctcccaaaattggt

SEQ ID NO: 669756 - DNA, 33 bp, Homo sapien
tctttctttagggatatggctcccaaaattggt

SEQ ID NO: 669757 - DNA, 33 bp, Homo sapien
tattgtttaatggtcaatcacatggactagaat

SEQ ID NO: 669758 - DNA, 33 bp, Homo sapien
tattgtttaatggtcagtcacatggactagaat

SEQ ID NO: 669759 - DNA, 33 bp, Homo sapien
gggacttgcagaattaacgggaagcctggagac

SEQ ID NO: 669760 - DNA, 33 bp, Homo sapien
gggacttgcagaattagcgggaagcctggagac

SEQ ID NO: 669761 - DNA, 33 bp, Homo sapien
agccaagagatcatcaggaggccaaacagctgg

SEQ ID NO: 669762 - DNA, 33 bp, Homo sapien
agccaagagatcatcatgaggccaaacagctgg

SEQ ID NO: 669763 - DNA, 33 bp, Homo sapien
gattctcattagtcggcaacttaattcaagctt

SEQ ID NO: 669764 - DNA, 33 bp, Homo sapien
gattctcattagtcggtaacttaattcaagctt

SEQ ID NO: 669765 - DNA, 33 bp, Homo sapien
ttttaccaacttaataactcaattatctctcct

SEQ ID NO: 669766 - DNA, 33 bp, Homo sapien
ttttaccaacttaatagctcaattatctctcct

SEQ ID NO: 669767 - DNA, 33 bp, Homo sapien
ctttgttcaagttacaactgggtaaatgctgta

SEQ ID NO: 669768 - DNA, 33 bp, Homo sapien
ctttgttcaagttacatctgggtaaatgctgta

SEQ ID NO: 669769 - DNA, 33 bp, Homo sapien
agtcaactccttggaacctttcttgacccccct

SEQ ID NO: 669770 - DNA, 33 bp, Homo sapien
agtcaactccttggaatctttcttgacccccct

SEQ ID NO: 669771 - DNA, 33 bp, Homo sapien
gaaactgagatctaaacggaaggagttgctttc

SEQ ID NO: 669772 - DNA, 33 bp, Homo sapien
gaaactgagatctaaatggaaggagttgctttc

SEQ ID NO: 669773 - DNA, 33 bp, Homo sapien
gctcaagatggttaaaaattttgtctggactga

SEQ ID NO: 669774 - DNA, 33 bp, Homo sapien
gctcaagatggttaaacattttgtctggactga

SEQ ID NO: 669775 - DNA, 33 bp, Homo sapien
aaattaatggtatatacgtgggtttccatctgc

SEQ ID NO: 669776 - DNA, 33 bp, Homo sapien
aaattaatggtatatatgtgggtttccatctgc

SEQ ID NO: 669777 - DNA, 33 bp, Homo sapien
atgcaacaaagacagacctaatgttttcataaa

SEQ ID NO: 669778 - DNA, 33 bp, Homo sapien
atgcaacaaagacagagctaatgttttcataaa

SEQ ID NO: 669779 - DNA, 33 bp, Homo sapien
tctatgactctaagcacactttatcatgagata

SEQ ID NO: 669780 - DNA, 33 bp, Homo sapien
tctatgactctaagcatactttatcatgagata

SEQ ID NO: 669781 - DNA, 33 bp, Homo sapien
ccttggcgattcctacaacatgaccttcaaaga

SEQ ID NO: 669782 - DNA, 33 bp, Homo sapien
ccttggcgattcctaccacatgaccttcaaaga

SEQ ID NO: 669783 - DNA, 33 bp, Homo sapien
cctactttgtattacaggatggacctaactagg

SEQ ID NO: 669784 - DNA, 33 bp, Homo sapien
cctactttgtattacatgatggacctaactagg

SEQ ID NO: 669785 - DNA, 33 bp, Homo sapien
ggactggctgcctggacgtgtacttgttcttta

SEQ ID NO: 669786 - DNA, 33 bp, Homo sapien
ggactggctgcctggatgtgtacttgttcttta

SEQ ID NO: 669787 - DNA, 33 bp, Homo sapien
ctcatctgtaaaatgaataagtcggctcaattc

SEQ ID NO: 669788 - DNA, 33 bp, Homo sapien
ctcatctgtaaaatgagtaagtcggctcaattc

SEQ ID NO: 669789 - DNA, 33 bp, Homo sapien
tctgtttgtgggacacgggaagataggcctggc

SEQ ID NO: 669790 - DNA, 33 bp, Homo sapien
tctgtttgtgggacactggaagataggcctggc

SEQ ID NO: 669791 - DNA, 33 bp, Homo sapien
aagtaggtaatattaacgcagtttaagttttaa

SEQ ID NO: 669792 - DNA, 33 bp, Homo sapien
aagtaggtaatattaatgcagtttaagttttaa

SEQ ID NO: 669793 - DNA, 33 bp, Homo sapien
ttctaccttagtagaagtaagtaccagggaggc

SEQ ID NO: 669794 - DNA, 33 bp, Homo sapien
ttctaccttagtagaattaagtaccagggaggc

SEQ ID NO: 669795 - DNA, 33 bp, Homo sapien
ttcacgagcagtaggaaacacagaagcgtcagt

SEQ ID NO: 669796 - DNA, 33 bp, Homo sapien
ttcacgagcagtaggagacacagaagcgtcagt

SEQ ID NO: 669797 - DNA, 33 bp, Homo sapien
aaggggaactgggaacaatgttctgactgtcta

SEQ ID NO: 669798 - DNA, 33 bp, Homo sapien
aaggggaactgggaaccatgttctgactgtcta

SEQ ID NO: 669799 - DNA, 33 bp, Homo sapien
gtggtattctcccaaactcataacctaagtcta

SEQ ID NO: 669800 - DNA, 33 bp, Homo sapien
gtggtattctcccaaattcataacctaagtcta

SEQ ID NO: 669801 - DNA, 33 bp, Homo sapien
ataactgaggaagaaacctaaaatgtggtgcct

SEQ ID NO: 669802 - DNA, 33 bp, Homo sapien
ataactgaggaagaaatctaaaatgtggtgcct

SEQ ID NO: 669803 - DNA, 33 bp, Homo sapien
accatgatttcagagacattgcttgggatcaaa

SEQ ID NO: 669804 - DNA, 33 bp, Homo sapien
accatgatttcagagatattgcttgggatcaaa

SEQ ID NO: 669805 - DNA, 33 bp, Homo sapien
ccttcacaattttcatcaaagctgtgtaccacc

SEQ ID NO: 669806 - DNA, 33 bp, Homo sapien
ccttcacaattttcatgaaagctgtgtaccacc

SEQ ID NO: 669807 - DNA, 33 bp, Homo sapien
ggtgtagcataggattaaacgataacaacttaa

SEQ ID NO: 669808 - DNA, 33 bp, Homo sapien
ggtgtagcataggattgaacgataacaacttaa

SEQ ID NO: 669809 - DNA, 33 bp, Homo sapien
aaatgggtaatttagacgctaacaacaaaatca

SEQ ID NO: 669810 - DNA, 33 bp, Homo sapien
aaatgggtaatttagatgctaacaacaaaatca

SEQ ID NO: 669811 - DNA, 33 bp, Homo sapien
atcttttcttagagtaccattcagccctttgat

SEQ ID NO: 669812 - DNA, 33 bp, Homo sapien
atcttttcttagagtagcattcagccctttgat

SEQ ID NO: 669813 - DNA, 33 bp, Homo sapien
ataagagagtgctacaagatgatatggttgcta

SEQ ID NO: 669814 - DNA, 33 bp, Homo sapien
ataagagagtgctacaggatgatatggttgcta

SEQ ID NO: 669815 - DNA, 33 bp, Homo sapien
tctggatatattttaaagtagattcagcatgat

SEQ ID NO: 669816 - DNA, 33 bp, Homo sapien
tctggatatattttaaggtagattcagcatgat

SEQ ID NO: 669817 - DNA, 33 bp, Homo sapien
aggatgacttctggccaagcaaattcatagaga

SEQ ID NO: 669818 - DNA, 33 bp, Homo sapien
aggatgacttctggccgagcaaattcatagaga

SEQ ID NO: 669819 - DNA, 33 bp, Homo sapien
ctggtcctagacataagcaattaacaatttaaa

SEQ ID NO: 669820 - DNA, 33 bp, Homo sapien
ctggtcctagacataatcaattaacaatttaaa

SEQ ID NO: 669821 - DNA, 33 bp, Homo sapien
atatcacgaagaagcaagcagaagcacagtaag

SEQ ID NO: 669822 - DNA, 33 bp, Homo sapien
atatcacgaagaagcaggcagaagcacagtaag

SEQ ID NO: 669823 - DNA, 33 bp, Homo sapien
attggtggtatatagcaaagcaattgtttctta

SEQ ID NO: 669824 - DNA, 33 bp, Homo sapien
attggtggtatatagcgaagcaattgtttctta

SEQ ID NO: 669825 - DNA, 33 bp, Homo sapien
tgcataggtaaatagacggatagtgataggacc

SEQ ID NO: 669826 - DNA, 33 bp, Homo sapien
tgcataggtaaatagatggatagtgataggacc

SEQ ID NO: 669827 - DNA, 33 bp, Homo sapien
aggaccatttgaggaaagtctaaaatttctgcc

SEQ ID NO: 669828 - DNA, 33 bp, Homo sapien
aggaccatttgaggaaggtctaaaatttctgcc

SEQ ID NO: 669829 - DNA, 33 bp, Homo sapien
taaaccaagagttaggaacaggctagacaatga

SEQ ID NO: 669830 - DNA, 33 bp, Homo sapien
taaaccaagagttaggtacaggctagacaatga

SEQ ID NO: 669831 - DNA, 33 bp, Homo sapien
atggtgttttggtttacaaaagctggcagaaat

SEQ ID NO: 669832 - DNA, 33 bp, Homo sapien
atggtgttttggtttagaaaagctggcagaaat

SEQ ID NO: 669833 - DNA, 33 bp, Homo sapien
tggatttataaagttacaggtcacttattctca

SEQ ID NO: 669834 - DNA, 33 bp, Homo sapien
tggatttataaagttagaggtcacttattctca

SEQ ID NO: 669835 - DNA, 33 bp, Homo sapien
tgcccaaatgcccaataagtgttgaaaagacaa

SEQ ID NO: 669836 - DNA, 33 bp, Homo sapien
tgcccaaatgcccaatgagtgttgaaaagacaa

SEQ ID NO: 669837 - DNA, 33 bp, Homo sapien
catttatgaggtccaacagtgtaaaataaatac

SEQ ID NO: 669838 - DNA, 33 bp, Homo sapien
catttatgaggtccaagagtgtaaaataaatac

SEQ ID NO: 669839 - DNA, 33 bp, Homo sapien
tagaaccagagcagaacgtagcctcaggaagaa

SEQ ID NO: 669840 - DNA, 33 bp, Homo sapien
tagaaccagagcagaatgtagcctcaggaagaa

SEQ ID NO: 669841 - DNA, 33 bp, Homo sapien
aatctcagatcatttaactacatcaaacatctc

SEQ ID NO: 669842 - DNA, 33 bp, Homo sapien
aatctcagatcatttacctacatcaaacatctc

SEQ ID NO: 669843 - DNA, 33 bp, Homo sapien
gacaacagagagctaacgaaccatcttcagaac

SEQ ID NO: 669844 - DNA, 33 bp, Homo sapien
gacaacagagagctaatgaaccatcttcagaac

SEQ ID NO: 669845 - DNA, 33 bp, Homo sapien
tttgccaaactcttacacactcatgaacttatt

SEQ ID NO: 669846 - DNA, 33 bp, Homo sapien
tttgccaaactcttacgcactcatgaacttatt

SEQ ID NO: 669847 - DNA, 33 bp, Homo sapien
caggcaatagaacttacggatgaaatgctgttc

SEQ ID NO: 669848 - DNA, 33 bp, Homo sapien
caggcaatagaacttatggatgaaatgctgttc

SEQ ID NO: 669849 - DNA, 33 bp, Homo sapien
ttgtgacaaaatcttaacttattacagtgaatt

SEQ ID NO: 669850 - DNA, 33 bp, Homo sapien
ttgtgacaaaatcttagcttattacagtgaatt

SEQ ID NO: 669851 - DNA, 33 bp, Homo sapien
tgatgagcattacaacggccaataaaagagcag

SEQ ID NO: 669852 - DNA, 33 bp, Homo sapien
tgatgagcattacaactgccaataaaagagcag

SEQ ID NO: 669853 - DNA, 33 bp, Homo sapien
tttctctacgtgtttaccaatacttgttattat

SEQ ID NO: 669854 - DNA, 33 bp, Homo sapien
tttctctacgtgtttatcaatacttgttattat

SEQ ID NO: 669855 - DNA, 33 bp, Homo sapien
gtttatactgtactccaattagttgaaaattat

SEQ ID NO: 669856 - DNA, 33 bp, Homo sapien
gtttatactgtactccgattagttgaaaattat

SEQ ID NO: 669857 - DNA, 33 bp, Homo sapien
attgcttagataattacggccagagttgagttt

SEQ ID NO: 669858 - DNA, 33 bp, Homo sapien
attgcttagataattatggccagagttgagttt

SEQ ID NO: 669859 - DNA, 33 bp, Homo sapien
atgagctgtaggaaccaaaagagtcactttgct

SEQ ID NO: 669860 - DNA, 33 bp, Homo sapien
atgagctgtaggaaccgaaagagtcactttgct

SEQ ID NO: 669861 - DNA, 33 bp, Homo sapien
acactctcacaaataacgttttagaaagcccag

SEQ ID NO: 669862 - DNA, 33 bp, Homo sapien
acactctcacaaataatgttttagaaagcccag

SEQ ID NO: 669863 - DNA, 33 bp, Homo sapien
agatgtgtctatgccacgcctgctgctttatat

SEQ ID NO: 669864 - DNA, 33 bp, Homo sapien
agatgtgtctatgccatgcctgctgctttatat

SEQ ID NO: 669865 - DNA, 33 bp, Homo sapien
gagagaggccactgaacgggtgtctggcacatt

SEQ ID NO: 669866 - DNA, 33 bp, Homo sapien
gagagaggccactgaatgggtgtctggcacatt

SEQ ID NO: 669867 - DNA, 33 bp, Homo sapien
taattcaggtgcaagacgtgaaatgaacctggc

SEQ ID NO: 669868 - DNA, 33 bp, Homo sapien
taattcaggtgcaagatgtgaaatgaacctggc

SEQ ID NO: 669869 - DNA, 33 bp, Homo sapien
acatgggtttaaaatcacagttcatataaggtt

SEQ ID NO: 669870 - DNA, 33 bp, Homo sapien
acatgggtttaaaatcccagttcatataaggtt

SEQ ID NO: 669871 - DNA, 33 bp, Homo sapien
gagttttgttgtttagccaattgtttcttagtg

SEQ ID NO: 669872 - DNA, 33 bp, Homo sapien
gagttttgttgtttagtcaattgtttcttagtg

SEQ ID NO: 669873 - DNA, 33 bp, Homo sapien
aaactcagaggcaacaccttctaggaacactgc

SEQ ID NO: 669874 - DNA, 33 bp, Homo sapien
aaactcagaggcaacatcttctaggaacactgc

SEQ ID NO: 669875 - DNA, 33 bp, Homo sapien
tagatcctaaaaattaaaagttccctgctttct

SEQ ID NO: 669876 - DNA, 33 bp, Homo sapien
tagatcctaaaaattagaagttccctgctttct

SEQ ID NO: 669877 - DNA, 33 bp, Homo sapien
gatttcatagatccaccgtagcaaatcctgtga

SEQ ID NO: 669878 - DNA, 33 bp, Homo sapien
gatttcatagatccactgtagcaaatcctgtga

SEQ ID NO: 669879 - DNA, 33 bp, Homo sapien
gcggatccttctctggccagtgattcccttcat

SEQ ID NO: 669880 - DNA, 33 bp, Homo sapien
gcggatccttctctggtcagtgattcccttcat

SEQ ID NO: 669881 - DNA, 33 bp, Homo sapien
agaggtggagtctagaagcaataggccttattg

SEQ ID NO: 669882 - DNA, 33 bp, Homo sapien
agaggtggagtctagaggcaataggccttattg

SEQ ID NO: 669883 - DNA, 33 bp, Homo sapien
aatcattgccttatgacacttactgttcctacc

SEQ ID NO: 669884 - DNA, 33 bp, Homo sapien
aatcattgccttatgatacttactgttcctacc

SEQ ID NO: 669885 - DNA, 33 bp, Homo sapien
cagagctaaacagccaccattgtggttaagaag

SEQ ID NO: 669886 - DNA, 33 bp, Homo sapien
cagagctaaacagccatcattgtggttaagaag

SEQ ID NO: 669887 - DNA, 33 bp, Homo sapien
cacagcctgtgtttcaataagccctgatgcatg

SEQ ID NO: 669888 - DNA, 33 bp, Homo sapien
cacagcctgtgtttcagtaagccctgatgcatg

SEQ ID NO: 669889 - DNA, 33 bp, Homo sapien
ttccaggtaacatatgacacttgaaattacagc

SEQ ID NO: 669890 - DNA, 33 bp, Homo sapien
ttccaggtaacatatggcacttgaaattacagc

SEQ ID NO: 669891 - DNA, 33 bp, Homo sapien
tcatctgtcctcagaaagaaccaaacaacacaa

SEQ ID NO: 669892 - DNA, 33 bp, Homo sapien
tcatctgtcctcagaacgaaccaaacaacacaa

SEQ ID NO: 669893 - DNA, 33 bp, Homo sapien
gtctgctcttgaggacacacataaaattttgac

SEQ ID NO: 669894 - DNA, 33 bp, Homo sapien
gtctgctcttgaggacgcacataaaattttgac

SEQ ID NO: 669895 - DNA, 33 bp, Homo sapien
atggtaaacatgggccagaagctgttaccaccc

SEQ ID NO: 669896 - DNA, 33 bp, Homo sapien
atggtaaacatgggccggaagctgttaccaccc

SEQ ID NO: 669897 - DNA, 33 bp, Homo sapien
gccccctcattttaccagcaagaacaactgaca

SEQ ID NO: 669898 - DNA, 33 bp, Homo sapien
gccccctcattttaccggcaagaacaactgaca

SEQ ID NO: 669899 - DNA, 33 bp, Homo sapien
ttctaatttgggtgaaagacagtactatttaca

SEQ ID NO: 669900 - DNA, 33 bp, Homo sapien
ttctaatttgggtgaatgacagtactatttaca

SEQ ID NO: 669901 - DNA, 33 bp, Homo sapien
ttcatcatagttgaacactttgcacaaattttc

SEQ ID NO: 669902 - DNA, 33 bp, Homo sapien
ttcatcatagttgaacgctttgcacaaattttc

SEQ ID NO: 669903 - DNA, 33 bp, Homo sapien
tttccccaactctatacggaaaacaatgtttct

SEQ ID NO: 669904 - DNA, 33 bp, Homo sapien
tttccccaactctatatggaaaacaatgtttct

SEQ ID NO: 669905 - DNA, 33 bp, Homo sapien
tatttcccaagaattacagggtcagttcacttg

SEQ ID NO: 669906 - DNA, 33 bp, Homo sapien
tatttcccaagaattatagggtcagttcacttg

SEQ ID NO: 669907 - DNA, 33 bp, Homo sapien
ggttttagagggtataaaccttgcacacaaggg

SEQ ID NO: 669908 - DNA, 33 bp, Homo sapien
ggttttagagggtatacaccttgcacacaaggg

SEQ ID NO: 669909 - DNA, 33 bp, Homo sapien
ggtctattttgtttaaactctacaacagccttg

SEQ ID NO: 669910 - DNA, 33 bp, Homo sapien
ggtctattttgtttaatctctacaacagccttg

SEQ ID NO: 669911 - DNA, 33 bp, Homo sapien
tgaccagaattccaacaaaggtcatttgattct

SEQ ID NO: 669912 - DNA, 33 bp, Homo sapien
tgaccagaattccaacgaaggtcatttgattct

SEQ ID NO: 669913 - DNA, 33 bp, Homo sapien
ttacaagcatagattaaagaacgaatgtctgat

SEQ ID NO: 669914 - DNA, 33 bp, Homo sapien
ttacaagcatagattacagaacgaatgtctgat

SEQ ID NO: 669915 - DNA, 33 bp, Homo sapien
tcacttctcccacttacggactctgtgatcagt

SEQ ID NO: 669916 - DNA, 33 bp, Homo sapien
tcacttctcccacttatggactctgtgatcagt

SEQ ID NO: 669917 - DNA, 33 bp, Homo sapien
tccagcgggaagaaaacgtcaatgtagttgttt

SEQ ID NO: 669918 - DNA, 33 bp, Homo sapien
tccagcgggaagaaaaggtcaatgtagttgttt

SEQ ID NO: 669919 - DNA, 33 bp, Homo sapien
ggctcccagaaatctacaactctccaggcacac

SEQ ID NO: 669920 - DNA, 33 bp, Homo sapien
ggctcccagaaatctataactctccaggcacac

SEQ ID NO: 669921 - DNA, 33 bp, Homo sapien
agaaccagaaagtagaccaccatttgagggaag

SEQ ID NO: 669922 - DNA, 33 bp, Homo sapien
agaaccagaaagtagatcaccatttgagggaag

SEQ ID NO: 669923 - DNA, 33 bp, Homo sapien
ttgtcctacaaagccactatcgctaatattctg

SEQ ID NO: 669924 - DNA, 33 bp, Homo sapien
ttgtcctacaaagccattatcgctaatattctg

SEQ ID NO: 669925 - DNA, 33 bp, Homo sapien
ctcgttccagtgcaataaagatagattgaagat

SEQ ID NO: 669926 - DNA, 33 bp, Homo sapien
ctcgttccagtgcaatgaagatagattgaagat

SEQ ID NO: 669927 - DNA, 33 bp, Homo sapien
ctagttcatttttcccaactctctatcagattt

SEQ ID NO: 669928 - DNA, 33 bp, Homo sapien
ctagttcatttttccctactctctatcagattt

SEQ ID NO: 669929 - DNA, 33 bp, Homo sapien
gacatatgcaggccaacacactcagggagtaag

SEQ ID NO: 669930 - DNA, 33 bp, Homo sapien
gacatatgcaggccaatacactcagggagtaag

SEQ ID NO: 669931 - DNA, 33 bp, Homo sapien
ctggaatatttaatctcactggtcctcagtctc

SEQ ID NO: 669932 - DNA, 33 bp, Homo sapien
ctggaatatttaatcttactggtcctcagtctc

SEQ ID NO: 669933 - DNA, 33 bp, Homo sapien
ataagtcaggccagaaatgataagaacctacat

SEQ ID NO: 669934 - DNA, 33 bp, Homo sapien
ataagtcaggccagaagtgataagaacctacat

SEQ ID NO: 669935 - DNA, 33 bp, Homo sapien
aggtatgacaggattacgtgaaaattctccttc

SEQ ID NO: 669936 - DNA, 33 bp, Homo sapien
aggtatgacaggattatgtgaaaattctccttc

SEQ ID NO: 669937 - DNA, 33 bp, Homo sapien
tgacaggcaccaatggcccactcaaagaatttg

SEQ ID NO: 669938 - DNA, 33 bp, Homo sapien
tgacaggcaccaatggtccactcaaagaatttg

SEQ ID NO: 669939 - DNA, 33 bp, Homo sapien
gtgcctggtacatgataagcaatcaatcagcat

SEQ ID NO: 669940 - DNA, 33 bp, Homo sapien
gtgcctggtacatgatgagcaatcaatcagcat

SEQ ID NO: 669941 - DNA, 33 bp, Homo sapien
caggcctgttcattacactctgtgcaccagctc

SEQ ID NO: 669942 - DNA, 33 bp, Homo sapien
caggcctgttcattacgctctgtgcaccagctc

SEQ ID NO: 669943 - DNA, 33 bp, Homo sapien
attaacctacattaaaaatctgaacttgcatgg

SEQ ID NO: 669944 - DNA, 33 bp, Homo sapien
attaacctacattaaacatctgaacttgcatgg

SEQ ID NO: 669945 - DNA, 33 bp, Homo sapien
atgtactcaacctcctaaaccaccaagtctagc

SEQ ID NO: 669946 - DNA, 33 bp, Homo sapien
atgtactcaacctccttaaccaccaagtctagc

SEQ ID NO: 669947 - DNA, 33 bp, Homo sapien
acccaatagtatgtcactgaaacaaaacaatac

SEQ ID NO: 669948 - DNA, 33 bp, Homo sapien
acccaatagtatgtcattgaaacaaaacaatac

SEQ ID NO: 669949 - DNA, 33 bp, Homo sapien
atgggtatgtctcttaacagtccaactatctta

SEQ ID NO: 669950 - DNA, 33 bp, Homo sapien
atgggtatgtctcttagcagtccaactatctta

SEQ ID NO: 669951 - DNA, 33 bp, Homo sapien
tgagttagtgctatcacaatccacaatatattg

SEQ ID NO: 669952 - DNA, 33 bp, Homo sapien
tgagttagtgctatcataatccacaatatattg

SEQ ID NO: 669953 - DNA, 33 bp, Homo sapien
gacaagatgccgagaccaatgaaccctgatgtc

SEQ ID NO: 669954 - DNA, 33 bp, Homo sapien
gacaagatgccgagacgaatgaaccctgatgtc

SEQ ID NO: 669955 - DNA, 33 bp, Homo sapien
cctgtaaccttagggacctatagtcatattcta

SEQ ID NO: 669956 - DNA, 33 bp, Homo sapien
cctgtaaccttagggatctatagtcatattcta

SEQ ID NO: 669957 - DNA, 33 bp, Homo sapien
aaatggttttaaatcacggtgctaggtctgagg

SEQ ID NO: 669958 - DNA, 33 bp, Homo sapien
aaatggttttaaatcatggtgctaggtctgagg

SEQ ID NO: 669959 - DNA, 33 bp, Homo sapien
ttgttggcctttattaccagttgtattcactta

SEQ ID NO: 669960 - DNA, 33 bp, Homo sapien
ttgttggcctttattatcagttgtattcactta

SEQ ID NO: 669961 - DNA, 33 bp, Homo sapien
tcctctctcactaatactaccctgttttatagt

SEQ ID NO: 669962 - DNA, 33 bp, Homo sapien
tcctctctcactaatattaccctgttttatagt

SEQ ID NO: 669963 - DNA, 33 bp, Homo sapien
ctccctgtttctgctccaattcttctgctaaac

SEQ ID NO: 669964 - DNA, 33 bp, Homo sapien
ctccctgtttctgctctaattcttctgctaaac

SEQ ID NO: 669965 - DNA, 33 bp, Homo sapien
gacacagtggtggtccaaagaaagtgttcactt

SEQ ID NO: 669966 - DNA, 33 bp, Homo sapien
gacacagtggtggtccgaagaaagtgttcactt

SEQ ID NO: 669967 - DNA, 33 bp, Homo sapien
tcattatatcaaatacaagtgactcaaatttag

SEQ ID NO: 669968 - DNA, 33 bp, Homo sapien
tcattatatcaaatacgagtgactcaaatttag

SEQ ID NO: 669969 - DNA, 33 bp, Homo sapien
gttgtgagtcaggctaagagccccagttccttg

SEQ ID NO: 669970 - DNA, 33 bp, Homo sapien
gttgtgagtcaggctaggagccccagttccttg

SEQ ID NO: 669971 - DNA, 33 bp, Homo sapien
aaacacttgtatgagtaaacgaaagacccaact

SEQ ID NO: 669972 - DNA, 33 bp, Homo sapien
aaacacttgtatgagtgaacgaaagacccaact

SEQ ID NO: 669973 - DNA, 33 bp, Homo sapien
cccatcggcaatgtataaggcttacggtttttt

SEQ ID NO: 669974 - DNA, 33 bp, Homo sapien
cccatcggcaatgtatgaggcttacggtttttt

SEQ ID NO: 669975 - DNA, 33 bp, Homo sapien
caccagttttactccaataatggtctcaaaacc

SEQ ID NO: 669976 - DNA, 33 bp, Homo sapien
caccagttttactccagtaatggtctcaaaacc

SEQ ID NO: 669977 - DNA, 33 bp, Homo sapien
ctgaaaactgaagacaatgggatatattacata

SEQ ID NO: 669978 - DNA, 33 bp, Homo sapien
ctgaaaactgaagacactgggatatattacata

SEQ ID NO: 669979 - DNA, 33 bp, Homo sapien
catcagtgactacaaacatcaagctaaggactt

SEQ ID NO: 669980 - DNA, 33 bp, Homo sapien
catcagtgactacaaatatcaagctaaggactt

SEQ ID NO: 669981 - DNA, 33 bp, Homo sapien
gagcttttaagcaaaacggacccttcgacctaa

SEQ ID NO: 669982 - DNA, 33 bp, Homo sapien
gagcttttaagcaaaatggacccttcgacctaa

SEQ ID NO: 669983 - DNA, 33 bp, Homo sapien
cccactccagaaccacggaatcagaaattgcat

SEQ ID NO: 669984 - DNA, 33 bp, Homo sapien
cccactccagaaccactgaatcagaaattgcat

SEQ ID NO: 669985 - DNA, 33 bp, Homo sapien
acattactatacgtaaagatctatcacgacaga

SEQ ID NO: 669986 - DNA, 33 bp, Homo sapien
acattactatacgtaaggatctatcacgacaga

SEQ ID NO: 669987 - DNA, 33 bp, Homo sapien
gggacagttgtaggcccggacaagattcagttg

SEQ ID NO: 669988 - DNA, 33 bp, Homo sapien
gggacagttgtaggcctggacaagattcagttg

SEQ ID NO: 669989 - DNA, 33 bp, Homo sapien
tttacccagcattacacattgagatgaggtcta

SEQ ID NO: 669990 - DNA, 33 bp, Homo sapien
tttacccagcattacatattgagatgaggtcta

SEQ ID NO: 669991 - DNA, 33 bp, Homo sapien
gaaatatacaatcaggacctacatttttttaaa

SEQ ID NO: 669992 - DNA, 33 bp, Homo sapien
gaaatatacaatcagggcctacatttttttaaa

SEQ ID NO: 669993 - DNA, 33 bp, Homo sapien
ggttcacaggtcataagagagcttgtttttggt

SEQ ID NO: 669994 - DNA, 33 bp, Homo sapien
ggttcacaggtcataatagagcttgtttttggt

SEQ ID NO: 669995 - DNA, 33 bp, Homo sapien
ccctaattgtgtcctacgggttaatgaggttcc

SEQ ID NO: 669996 - DNA, 33 bp, Homo sapien
ccctaattgtgtcctatgggttaatgaggttcc

SEQ ID NO: 669997 - DNA, 33 bp, Homo sapien
tgttgctgttgataccaccctggagtccaagag

SEQ ID NO: 669998 - DNA, 33 bp, Homo sapien
tgttgctgttgatacctccctggagtccaagag

SEQ ID NO: 669999 - DNA, 33 bp, Homo sapien
actttcaggttttttcactgtgtctgaaggttc

SEQ ID NO: 670000 - DNA, 33 bp, Homo sapien
actttcaggttttttctctgtgtctgaaggttc

SEQ ID NO: 670001 - DNA, 33 bp, Homo sapien
ggagacagagaaaacacgagtgatcacttctga

SEQ ID NO: 670002 - DNA, 33 bp, Homo sapien
ggagacagagaaaacatgagtgatcacttctga

SEQ ID NO: 670003 - DNA, 33 bp, Homo sapien
cctctcagtccgctaaatgtgaacttccccagc

SEQ ID NO: 670004 - DNA, 33 bp, Homo sapien
cctctcagtccgctaagtgtgaacttccccagc

SEQ ID NO: 670005 - DNA, 33 bp, Homo sapien
attttctgagatgttacagagtaaaatggggcc

SEQ ID NO: 670006 - DNA, 33 bp, Homo sapien
attttctgagatgttagagagtaaaatggggcc

SEQ ID NO: 670007 - DNA, 33 bp, Homo sapien
atctccttcaataaaccgggggaattgatatag

SEQ ID NO: 670008 - DNA, 33 bp, Homo sapien
atctccttcaataaactgggggaattgatatag

SEQ ID NO: 670009 - DNA, 33 bp, Homo sapien
tctggaccccgacataaatcatcactttgacct

SEQ ID NO: 670010 - DNA, 33 bp, Homo sapien
tctggaccccgacatacatcatcactttgacct

SEQ ID NO: 670011 - DNA, 33 bp, Homo sapien
tgataaaatgttagtccacccttttgtcagaca

SEQ ID NO: 670012 - DNA, 33 bp, Homo sapien
tgataaaatgttagtctacccttttgtcagaca

SEQ ID NO: 670013 - DNA, 33 bp, Homo sapien
caagccattttatccagatttcttgataagcaa

SEQ ID NO: 670014 - DNA, 33 bp, Homo sapien
caagccattttatccatatttcttgataagcaa

SEQ ID NO: 670015 - DNA, 33 bp, Homo sapien
aggaagctgggagtgccgcgaatcagtgtaggg

SEQ ID NO: 670016 - DNA, 33 bp, Homo sapien
aggaagctgggagtgctgcgaatcagtgtaggg

SEQ ID NO: 670017 - DNA, 33 bp, Homo sapien
acagcctaaggtgcaactggttgtgggaatggg

SEQ ID NO: 670018 - DNA, 33 bp, Homo sapien
acagcctaaggtgcaattggttgtgggaatggg

SEQ ID NO: 670019 - DNA, 33 bp, Homo sapien
tagcattataatcaagacttccccatatctacc

SEQ ID NO: 670020 - DNA, 33 bp, Homo sapien
tagcattataatcaaggcttccccatatctacc

SEQ ID NO: 670021 - DNA, 33 bp, Homo sapien
ctacttcaaagactcaatctacttctttagagg

SEQ ID NO: 670022 - DNA, 33 bp, Homo sapien
ctacttcaaagactcagtctacttctttagagg

SEQ ID NO: 670023 - DNA, 33 bp, Homo sapien
ctattatgcaactatcaaaaagattgaggcaga

SEQ ID NO: 670024 - DNA, 33 bp, Homo sapien
ctattatgcaactatccaaaagattgaggcaga

SEQ ID NO: 670025 - DNA, 33 bp, Homo sapien
actttacaaactatcaaacttttagctttgcaa

SEQ ID NO: 670026 - DNA, 33 bp, Homo sapien
actttacaaactatcagacttttagctttgcaa

SEQ ID NO: 670027 - DNA, 33 bp, Homo sapien
gacttttgcatttacacagtgacattagctctt

SEQ ID NO: 670028 - DNA, 33 bp, Homo sapien
gacttttgcatttacatagtgacattagctctt

SEQ ID NO: 670029 - DNA, 33 bp, Homo sapien
ccaagtagcagaaagaagctagaaattaggtct

SEQ ID NO: 670030 - DNA, 33 bp, Homo sapien
ccaagtagcagaaagaggctagaaattaggtct

SEQ ID NO: 670031 - DNA, 33 bp, Homo sapien
actattacatccacataatacctctgatcaagt

SEQ ID NO: 670032 - DNA, 33 bp, Homo sapien
actattacatccacatgatacctctgatcaagt

SEQ ID NO: 670033 - DNA, 33 bp, Homo sapien
tttaagtgttaaaatacacattgtgggaaaatt

SEQ ID NO: 670034 - DNA, 33 bp, Homo sapien
tttaagtgttaaaatatacattgtgggaaaatt

SEQ ID NO: 670035 - DNA, 33 bp, Homo sapien
atactagaatctacctaaaaggatcagagaaag

SEQ ID NO: 670036 - DNA, 33 bp, Homo sapien
atactagaatctacctcaaaggatcagagaaag

SEQ ID NO: 670037 - DNA, 33 bp, Homo sapien
acagagctcagggcaagactttacttacattta

SEQ ID NO: 670038 - DNA, 33 bp, Homo sapien
acagagctcagggcaatactttacttacattta

SEQ ID NO: 670039 - DNA, 33 bp, Homo sapien
aattcagtcttataacaggcctctgaagtgggg

SEQ ID NO: 670040 - DNA, 33 bp, Homo sapien
aattcagtcttataactggcctctgaagtgggg

SEQ ID NO: 670041 - DNA, 33 bp, Homo sapien
ctctaattcaactcaactcttacactagctatc

SEQ ID NO: 670042 - DNA, 33 bp, Homo sapien
ctctaattcaactcaattcttacactagctatc

SEQ ID NO: 670043 - DNA, 33 bp, Homo sapien
ttcctggagccatatccaacttagaaagatgaa

SEQ ID NO: 670044 - DNA, 33 bp, Homo sapien
ttcctggagccatatctaacttagaaagatgaa

SEQ ID NO: 670045 - DNA, 33 bp, Homo sapien
ggtgtctgtggaacccaagtggaacctctgctc

SEQ ID NO: 670046 - DNA, 33 bp, Homo sapien
ggtgtctgtggaacccgagtggaacctctgctc

SEQ ID NO: 670047 - DNA, 33 bp, Homo sapien
aattgctgtggttttccagaagaatatgaagat

SEQ ID NO: 670048 - DNA, 33 bp, Homo sapien
aattgctgtggttttctagaagaatatgaagat

SEQ ID NO: 670049 - DNA, 33 bp, Homo sapien
tggctgtggagtttgcacaggaagaggtttgga

SEQ ID NO: 670050 - DNA, 33 bp, Homo sapien
tggctgtggagtttgcgcaggaagaggtttgga

SEQ ID NO: 670051 - DNA, 33 bp, Homo sapien
gaacacaggtaccccacgtggcacaagcagcct

SEQ ID NO: 670052 - DNA, 33 bp, Homo sapien
gaacacaggtaccccatgtggcacaagcagcct

SEQ ID NO: 670053 - DNA, 33 bp, Homo sapien
aaacatttaaacatcccaagtggtcaattcaat

SEQ ID NO: 670054 - DNA, 33 bp, Homo sapien
aaacatttaaacatcctaagtggtcaattcaat

SEQ ID NO: 670055 - DNA, 33 bp, Homo sapien
acgtcctcctctcgccacaagcacatgggagaa

SEQ ID NO: 670056 - DNA, 33 bp, Homo sapien
acgtcctcctctcgccgcaagcacatgggagaa

SEQ ID NO: 670057 - DNA, 33 bp, Homo sapien
acagtgtcactttgagaacttaaacagaaactc

SEQ ID NO: 670058 - DNA, 33 bp, Homo sapien
acagtgtcactttgaggacttaaacagaaactc

SEQ ID NO: 670059 - DNA, 33 bp, Homo sapien
gtcaacggtaaactcacgtcccagtttgaaaca

SEQ ID NO: 670060 - DNA, 33 bp, Homo sapien
gtcaacggtaaactcatgtcccagtttgaaaca

SEQ ID NO: 670061 - DNA, 33 bp, Homo sapien
tgccactgtgctgcaacctggaggacaaaaccc

SEQ ID NO: 670062 - DNA, 33 bp, Homo sapien
tgccactgtgctgcaatctggaggacaaaaccc

SEQ ID NO: 670063 - DNA, 33 bp, Homo sapien
tctgttgttcaggcacaatttttctattagaga

SEQ ID NO: 670064 - DNA, 33 bp, Homo sapien
tctgttgttcaggcaccatttttctattagaga

SEQ ID NO: 670065 - DNA, 33 bp, Homo sapien
ttgtgaactatgcaggaactttaagtcataatc

SEQ ID NO: 670066 - DNA, 33 bp, Homo sapien
ttgtgaactatgcagggactttaagtcataatc

SEQ ID NO: 670067 - DNA, 33 bp, Homo sapien
cacacaccaaacaaaacggctaaaggctgttgt

SEQ ID NO: 670068 - DNA, 33 bp, Homo sapien
cacacaccaaacaaaatggctaaaggctgttgt

SEQ ID NO: 670069 - DNA, 33 bp, Homo sapien
cttgtgtgagtctcacagaatccgaggccctgg

SEQ ID NO: 670070 - DNA, 33 bp, Homo sapien
cttgtgtgagtctcacggaatccgaggccctgg

SEQ ID NO: 670071 - DNA, 33 bp, Homo sapien
taagttggcaaaaccaagaagttaaggccaggt

SEQ ID NO: 670072 - DNA, 33 bp, Homo sapien
taagttggcaaaaccatgaagttaaggccaggt

SEQ ID NO: 670073 - DNA, 33 bp, Homo sapien
tacacagttggagttacgaacctggctgtactt

SEQ ID NO: 670074 - DNA, 33 bp, Homo sapien
tacacagttggagttatgaacctggctgtactt

SEQ ID NO: 670075 - DNA, 33 bp, Homo sapien
cagtaggccttctgtaaccaacattattaacct

SEQ ID NO: 670076 - DNA, 33 bp, Homo sapien
cagtaggccttctgtagccaacattattaacct

SEQ ID NO: 670077 - DNA, 33 bp, Homo sapien
tagggtggtaaaataccggaggcaaggacacgg

SEQ ID NO: 670078 - DNA, 33 bp, Homo sapien
tagggtggtaaaatacgggaggcaaggacacgg

SEQ ID NO: 670079 - DNA, 33 bp, Homo sapien
ccattagtcttcctcaatagacctaaccctatg

SEQ ID NO: 670080 - DNA, 33 bp, Homo sapien
ccattagtcttcctcagtagacctaaccctatg

SEQ ID NO: 670081 - DNA, 33 bp, Homo sapien
ccaggtcaggaagccaagtgaatgaaaaggctg

SEQ ID NO: 670082 - DNA, 33 bp, Homo sapien
ccaggtcaggaagccacgtgaatgaaaaggctg

SEQ ID NO: 670083 - DNA, 33 bp, Homo sapien
tagttccttaattagtaaatgttggagcctatg

SEQ ID NO: 670084 - DNA, 33 bp, Homo sapien
tagttccttaattagtcaatgttggagcctatg

SEQ ID NO: 670085 - DNA, 33 bp, Homo sapien
tcaattcttccatcacggtgagaaaaccagtag

SEQ ID NO: 670086 - DNA, 33 bp, Homo sapien
tcaattcttccatcactgtgagaaaaccagtag

SEQ ID NO: 670087 - DNA, 33 bp, Homo sapien
ctgcttgtcattctgcaatttcagtgagagatt

SEQ ID NO: 670088 - DNA, 33 bp, Homo sapien
ctgcttgtcattctgctatttcagtgagagatt

SEQ ID NO: 670089 - DNA, 33 bp, Homo sapien
agcagttagtacacatcatacattgacaacggg

SEQ ID NO: 670090 - DNA, 33 bp, Homo sapien
agcagttagtacacatgatacattgacaacggg

SEQ ID NO: 670091 - DNA, 33 bp, Homo sapien
ttcctcctagttgaaacatcctcatgaaaaacc

SEQ ID NO: 670092 - DNA, 33 bp, Homo sapien
ttcctcctagttgaaatatcctcatgaaaaacc

SEQ ID NO: 670093 - DNA, 33 bp, Homo sapien
tgagaagcaggattgacaaggagagtgagagag

SEQ ID NO: 670094 - DNA, 33 bp, Homo sapien
tgagaagcaggattgataaggagagtgagagag

SEQ ID NO: 670095 - DNA, 33 bp, Homo sapien
tgcctcgcctgagttgaaaaccagctctgcatg

SEQ ID NO: 670096 - DNA, 33 bp, Homo sapien
tgcctcgcctgagttggaaaccagctctgcatg

SEQ ID NO: 670097 - DNA, 33 bp, Homo sapien
tctatcaagggtaatacagtaatttcagctccc

SEQ ID NO: 670098 - DNA, 33 bp, Homo sapien
tctatcaagggtaatagagtaatttcagctccc

SEQ ID NO: 670099 - DNA, 33 bp, Homo sapien
tgcctaactgcgactacaataaaagccattgaa

SEQ ID NO: 670100 - DNA, 33 bp, Homo sapien
tgcctaactgcgactataataaaagccattgaa

SEQ ID NO: 670101 - DNA, 33 bp, Homo sapien
gggtcagaggaatcacagacagggattctaatg

SEQ ID NO: 670102 - DNA, 33 bp, Homo sapien
gggtcagaggaatcacggacagggattctaatg

SEQ ID NO: 670103 - DNA, 33 bp, Homo sapien
aggacaggttattcataaagatggaaactcaaa

SEQ ID NO: 670104 - DNA, 33 bp, Homo sapien
aggacaggttattcatgaagatggaaactcaaa

SEQ ID NO: 670105 - DNA, 33 bp, Homo sapien
ttattttgcacattaaccagttcttgtcatgac

SEQ ID NO: 670106 - DNA, 33 bp, Homo sapien
ttattttgcacattaagcagttcttgtcatgac

SEQ ID NO: 670107 - DNA, 33 bp, Homo sapien
cctcttgctggctacaatatcagaattcagagt

SEQ ID NO: 670108 - DNA, 33 bp, Homo sapien
cctcttgctggctacagtatcagaattcagagt

SEQ ID NO: 670109 - DNA, 33 bp, Homo sapien
gctctcaatgcaagccccttagaaatctgcact

SEQ ID NO: 670110 - DNA, 33 bp, Homo sapien
gctctcaatgcaagcctcttagaaatctgcact

SEQ ID NO: 670111 - DNA, 33 bp, Homo sapien
aactattgatactacaaggcttggtacctgggt

SEQ ID NO: 670112 - DNA, 33 bp, Homo sapien
aactattgatactacagggcttggtacctgggt

SEQ ID NO: 670113 - DNA, 33 bp, Homo sapien
ctcatctggaaaatgaaataataatggtgctcc

SEQ ID NO: 670114 - DNA, 33 bp, Homo sapien
ctcatctggaaaatgagataataatggtgctcc

SEQ ID NO: 670115 - DNA, 33 bp, Homo sapien
tgaaaatttggagggcaataactatgcaccagt

SEQ ID NO: 670116 - DNA, 33 bp, Homo sapien
tgaaaatttggagggcgataactatgcaccagt

SEQ ID NO: 670117 - DNA, 33 bp, Homo sapien
ggggttcaaacaggcacaacaaggcttgcttgg

SEQ ID NO: 670118 - DNA, 33 bp, Homo sapien
ggggttcaaacaggcataacaaggcttgcttgg

SEQ ID NO: 670119 - DNA, 33 bp, Homo sapien
aatagaagacgataataaacagaggcaatagtc

SEQ ID NO: 670120 - DNA, 33 bp, Homo sapien
aatagaagacgataatgaacagaggcaatagtc

SEQ ID NO: 670121 - DNA, 33 bp, Homo sapien
taattactttcatttcacaagcatgtcatttaa

SEQ ID NO: 670122 - DNA, 33 bp, Homo sapien
taattactttcatttcccaagcatgtcatttaa

SEQ ID NO: 670123 - DNA, 33 bp, Homo sapien
tggcaatgaaagcaaaaagggattcaagaccat

SEQ ID NO: 670124 - DNA, 33 bp, Homo sapien
tggcaatgaaagcaaagagggattcaagaccat

SEQ ID NO: 670125 - DNA, 33 bp, Homo sapien
cttgtaacctccttagacatttcacggatgtgt

SEQ ID NO: 670126 - DNA, 33 bp, Homo sapien
cttgtaacctccttaggcatttcacggatgtgt

SEQ ID NO: 670127 - DNA, 33 bp, Homo sapien
aatgcagtgtcaaccaatatgtgtacaatggca

SEQ ID NO: 670128 - DNA, 33 bp, Homo sapien
aatgcagtgtcaaccagtatgtgtacaatggca

SEQ ID NO: 670129 - DNA, 33 bp, Homo sapien
aactgtgacatctttaagcaaaatagtcaatgg

SEQ ID NO: 670130 - DNA, 33 bp, Homo sapien
aactgtgacatctttaggcaaaatagtcaatgg

SEQ ID NO: 670131 - DNA, 33 bp, Homo sapien
aagttgaaggcgtttaggcttgagatgaaactg

SEQ ID NO: 670132 - DNA, 33 bp, Homo sapien
aagttgaaggcgtttatgcttgagatgaaactg

SEQ ID NO: 670133 - DNA, 33 bp, Homo sapien
gcaccacctgctgataaataaaagcaacaatgt

SEQ ID NO: 670134 - DNA, 33 bp, Homo sapien
gcaccacctgctgatagataaaagcaacaatgt

SEQ ID NO: 670135 - DNA, 33 bp, Homo sapien
gttttataatttgaccacagctttcttattggt

SEQ ID NO: 670136 - DNA, 33 bp, Homo sapien
gttttataatttgaccgcagctttcttattggt

SEQ ID NO: 670137 - DNA, 33 bp, Homo sapien
ttccaggcacggactcaaaggcttagccacagc

SEQ ID NO: 670138 - DNA, 33 bp, Homo sapien
ttccaggcacggactctaaggcttagccacagc

SEQ ID NO: 670139 - DNA, 33 bp, Homo sapien
gttccttgttacagatcaaattccctactctga

SEQ ID NO: 670140 - DNA, 33 bp, Homo sapien
gttccttgttacagatgaaattccctactctga

SEQ ID NO: 670141 - DNA, 33 bp, Homo sapien
actactaaaagattaaactgtgaagccaaatgc

SEQ ID NO: 670142 - DNA, 33 bp, Homo sapien
actactaaaagattaacctgtgaagccaaatgc

SEQ ID NO: 670143 - DNA, 33 bp, Homo sapien
tcaactggcaagctaaatggaatgccttaaaga

SEQ ID NO: 670144 - DNA, 33 bp, Homo sapien
tcaactggcaagctaagtggaatgccttaaaga

SEQ ID NO: 670145 - DNA, 33 bp, Homo sapien
cagtcattctgaattacagtgatgagaatttaa

SEQ ID NO: 670146 - DNA, 33 bp, Homo sapien
cagtcattctgaattatagtgatgagaatttaa

SEQ ID NO: 670147 - DNA, 33 bp, Homo sapien
ttttgtggactgtgatgaacatactctataaaa

SEQ ID NO: 670148 - DNA, 33 bp, Homo sapien
ttttgtggactgtgattaacatactctataaaa

SEQ ID NO: 670149 - DNA, 33 bp, Homo sapien
catgaataaattttcccaggatgtaggggatat

SEQ ID NO: 670150 - DNA, 33 bp, Homo sapien
catgaataaattttcctaggatgtaggggatat

SEQ ID NO: 670151 - DNA, 33 bp, Homo sapien
ccttgaaaaatgaccccgaatgccagtgagaca

SEQ ID NO: 670152 - DNA, 33 bp, Homo sapien
ccttgaaaaatgaccctgaatgccagtgagaca

SEQ ID NO: 670153 - DNA, 33 bp, Homo sapien
tgcatgcttaactaagaaactgccaaactgttt

SEQ ID NO: 670154 - DNA, 33 bp, Homo sapien
tgcatgcttaactaaggaactgccaaactgttt

SEQ ID NO: 670155 - DNA, 33 bp, Homo sapien
tctctaactacttctcacacataccactctgct

SEQ ID NO: 670156 - DNA, 33 bp, Homo sapien
tctctaactacttctcgcacataccactctgct

SEQ ID NO: 670157 - DNA, 33 bp, Homo sapien
gtgaaggaatgcaagaaccattttggagaactt

SEQ ID NO: 670158 - DNA, 33 bp, Homo sapien
gtgaaggaatgcaagagccattttggagaactt

SEQ ID NO: 670159 - DNA, 33 bp, Homo sapien
aaaaaactcctgactacaggggcctcaatttta

SEQ ID NO: 670160 - DNA, 33 bp, Homo sapien
aaaaaactcctgactataggggcctcaatttta

SEQ ID NO: 670161 - DNA, 33 bp, Homo sapien
atgttaggagactttcacagttatctagttgag

SEQ ID NO: 670162 - DNA, 33 bp, Homo sapien
atgttaggagactttcgcagttatctagttgag

SEQ ID NO: 670163 - DNA, 33 bp, Homo sapien
acatacttagtgactacgaaaaataagggcatc

SEQ ID NO: 670164 - DNA, 33 bp, Homo sapien
acatacttagtgactatgaaaaataagggcatc

SEQ ID NO: 670165 - DNA, 33 bp, Homo sapien
ataaactgttagatcaaaatatgctacaattac

SEQ ID NO: 670166 - DNA, 33 bp, Homo sapien
ataaactgttagatcataatatgctacaattac

SEQ ID NO: 670167 - DNA, 33 bp, Homo sapien
ccatcacagaagtcacaataggtgctacgattt

SEQ ID NO: 670168 - DNA, 33 bp, Homo sapien
ccatcacagaagtcacgataggtgctacgattt

SEQ ID NO: 670169 - DNA, 33 bp, Homo sapien
catgcatgttatttcccccataagatgccacaa

SEQ ID NO: 670170 - DNA, 33 bp, Homo sapien
catgcatgttatttcctccataagatgccacaa

SEQ ID NO: 670171 - DNA, 33 bp, Homo sapien
ttccatttaattaaaaaccatggagtccctatg

SEQ ID NO: 670172 - DNA, 33 bp, Homo sapien
ttccatttaattaaaagccatggagtccctatg

SEQ ID NO: 670173 - DNA, 33 bp, Homo sapien
gactatgagcatcatcaaaagtttggaaaatac

SEQ ID NO: 670174 - DNA, 33 bp, Homo sapien
gactatgagcatcatctaaagtttggaaaatac

SEQ ID NO: 670175 - DNA, 33 bp, Homo sapien
tattgcaacctcaagaagagtcattcacctgag

SEQ ID NO: 670176 - DNA, 33 bp, Homo sapien
tattgcaacctcaagacgagtcattcacctgag

SEQ ID NO: 670177 - DNA, 33 bp, Homo sapien
atctctgatcctgtcaacttcctctgcacttcc

SEQ ID NO: 670178 - DNA, 33 bp, Homo sapien
atctctgatcctgtcaccttcctctgcacttcc

SEQ ID NO: 670179 - DNA, 33 bp, Homo sapien
tacaggggaagaagcgcatagatggacgttttt

SEQ ID NO: 670180 - DNA, 33 bp, Homo sapien
tacaggggaagaagcgtatagatggacgttttt

SEQ ID NO: 670181 - DNA, 33 bp, Homo sapien
ctgagtaccaatgataactgctgcagtgacgaa

SEQ ID NO: 670182 - DNA, 33 bp, Homo sapien
ctgagtaccaatgatatctgctgcagtgacgaa

SEQ ID NO: 670183 - DNA, 33 bp, Homo sapien
gaagacattccttgtgcaacctcttggcaccat

SEQ ID NO: 670184 - DNA, 33 bp, Homo sapien
gaagacattccttgtgtaacctcttggcaccat

SEQ ID NO: 670185 - DNA, 33 bp, Homo sapien
ggagaaacacagagaacgaggaaaccagaagac

SEQ ID NO: 670186 - DNA, 33 bp, Homo sapien
ggagaaacacagagaatgaggaaaccagaagac

SEQ ID NO: 670187 - DNA, 33 bp, Homo sapien
gctccctgtactgtccactcaattttgccgtga

SEQ ID NO: 670188 - DNA, 33 bp, Homo sapien
gctccctgtactgtccgctcaattttgccgtga

SEQ ID NO: 670189 - DNA, 33 bp, Homo sapien
atacatgacaatagaactgagcaattaggtttt

SEQ ID NO: 670190 - DNA, 33 bp, Homo sapien
atacatgacaatagaattgagcaattaggtttt

SEQ ID NO: 670191 - DNA, 33 bp, Homo sapien
ctacaagaagccattgaaaaatttaaccagtgg

SEQ ID NO: 670192 - DNA, 33 bp, Homo sapien
ctacaagaagccattggaaaatttaaccagtgg

SEQ ID NO: 670193 - DNA, 33 bp, Homo sapien
aggtggtggggatctgaaaatagccttgtttgc

SEQ ID NO: 670194 - DNA, 33 bp, Homo sapien
aggtggtggggatctgcaaatagccttgtttgc

SEQ ID NO: 670195 - DNA, 33 bp, Homo sapien
attctattaagtcttgcagcctttaaacacagg

SEQ ID NO: 670196 - DNA, 33 bp, Homo sapien
attctattaagtcttggagcctttaaacacagg

SEQ ID NO: 670197 - DNA, 33 bp, Homo sapien
ctatacctctgctgcaagtactacaggatcagg

SEQ ID NO: 670198 - DNA, 33 bp, Homo sapien
ctatacctctgctgcaggtactacaggatcagg

SEQ ID NO: 670199 - DNA, 33 bp, Homo sapien
acaaaagtcagacaaacggagacaaatggaggt

SEQ ID NO: 670200 - DNA, 33 bp, Homo sapien
acaaaagtcagacaaatggagacaaatggaggt

SEQ ID NO: 670201 - DNA, 33 bp, Homo sapien
ggttcttaactggagacgggaatgtaagtgttg

SEQ ID NO: 670202 - DNA, 33 bp, Homo sapien
ggttcttaactggagatgggaatgtaagtgttg

SEQ ID NO: 670203 - DNA, 33 bp, Homo sapien
tataaatacagggacaatggcttagtaaggatg

SEQ ID NO: 670204 - DNA, 33 bp, Homo sapien
tataaatacagggacagtggcttagtaaggatg

SEQ ID NO: 670205 - DNA, 33 bp, Homo sapien
ttaaaatgttgaatgacaaaaaacctgtactag

SEQ ID NO: 670206 - DNA, 33 bp, Homo sapien
ttaaaatgttgaatgagaaaaaacctgtactag

SEQ ID NO: 670207 - DNA, 33 bp, Homo sapien
ggtatatattcaaaagaaaacaattgttctacc

SEQ ID NO: 670208 - DNA, 33 bp, Homo sapien
ggtatatattcaaaaggaaacaattgttctacc

SEQ ID NO: 670209 - DNA, 33 bp, Homo sapien
agggagaggtggatcacatcaaaagaatcagtg

SEQ ID NO: 670210 - DNA, 33 bp, Homo sapien
agggagaggtggatcatatcaaaagaatcagtg

SEQ ID NO: 670211 - DNA, 33 bp, Homo sapien
gaaatctgcattacaaaacccactacccttgtt

SEQ ID NO: 670212 - DNA, 33 bp, Homo sapien
gaaatctgcattacaacacccactacccttgtt

SEQ ID NO: 670213 - DNA, 33 bp, Homo sapien
ctttgaaaaagttccaatcttcctggaggataa

SEQ ID NO: 670214 - DNA, 33 bp, Homo sapien
ctttgaaaaagttccagtcttcctggaggataa

SEQ ID NO: 670215 - DNA, 33 bp, Homo sapien
tgctaataacagaacccggactacagtaaattt

SEQ ID NO: 670216 - DNA, 33 bp, Homo sapien
tgctaataacagaacctggactacagtaaattt

SEQ ID NO: 670217 - DNA, 33 bp, Homo sapien
tcaaatggccctttagcaggtcaaaatcctcag

SEQ ID NO: 670218 - DNA, 33 bp, Homo sapien
tcaaatggccctttagtaggtcaaaatcctcag

SEQ ID NO: 670219 - DNA, 33 bp, Homo sapien
ctctccctctagcaaacgagattctgggtcctt

SEQ ID NO: 670220 - DNA, 33 bp, Homo sapien
ctctccctctagcaaatgagattctgggtcctt

SEQ ID NO: 670221 - DNA, 33 bp, Homo sapien
tattaattatccaagacagtgctaagcaatagt

SEQ ID NO: 670222 - DNA, 33 bp, Homo sapien
tattaattatccaagatagtgctaagcaatagt

SEQ ID NO: 670223 - DNA, 33 bp, Homo sapien
gagatgattgaaaatacatcctagcactaactt

SEQ ID NO: 670224 - DNA, 33 bp, Homo sapien
gagatgattgaaaatatatcctagcactaactt

SEQ ID NO: 670225 - DNA, 33 bp, Homo sapien
ggatgggagaactgggaagcatctaaatgctac

SEQ ID NO: 670226 - DNA, 33 bp, Homo sapien
ggatgggagaactggggagcatctaaatgctac

SEQ ID NO: 670227 - DNA, 33 bp, Homo sapien
agctcaaaagattaaactgcatcattattacat

SEQ ID NO: 670228 - DNA, 33 bp, Homo sapien
agctcaaaagattaaattgcatcattattacat

SEQ ID NO: 670229 - DNA, 33 bp, Homo sapien
gcccactcatcacaagacgctgactttctcaaa

SEQ ID NO: 670230 - DNA, 33 bp, Homo sapien
gcccactcatcacaaggcgctgactttctcaaa

SEQ ID NO: 670231 - DNA, 33 bp, Homo sapien
ccctacagagtttgtaactgacattataaacag

SEQ ID NO: 670232 - DNA, 33 bp, Homo sapien
ccctacagagtttgtagctgacattataaacag

SEQ ID NO: 670233 - DNA, 33 bp, Homo sapien
ggagatgtgtgctgaaagaagtaaaacctaagt

SEQ ID NO: 670234 - DNA, 33 bp, Homo sapien
ggagatgtgtgctgaacgaagtaaaacctaagt

SEQ ID NO: 670235 - DNA, 33 bp, Homo sapien
ttagcaattcctaaaaagcaatgtaacacagta

SEQ ID NO: 670236 - DNA, 33 bp, Homo sapien
ttagcaattcctaaaacgcaatgtaacacagta

SEQ ID NO: 670237 - DNA, 33 bp, Homo sapien
attctcagggtgctcaaagaagccatcagaaaa

SEQ ID NO: 670238 - DNA, 33 bp, Homo sapien
attctcagggtgctcagagaagccatcagaaaa

SEQ ID NO: 670239 - DNA, 33 bp, Homo sapien
cttgtattatttcttacatccactgcaaaagaa

SEQ ID NO: 670240 - DNA, 33 bp, Homo sapien
cttgtattatttcttagatccactgcaaaagaa

SEQ ID NO: 670241 - DNA, 33 bp, Homo sapien
tcataatgtgaaagccaaacatttactaacagt

SEQ ID NO: 670242 - DNA, 33 bp, Homo sapien
tcataatgtgaaagccgaacatttactaacagt

SEQ ID NO: 670243 - DNA, 33 bp, Homo sapien
tgtgacataacttacaatgacaaaaatatacca

SEQ ID NO: 670244 - DNA, 33 bp, Homo sapien
tgtgacataacttacagtgacaaaaatatacca

SEQ ID NO: 670245 - DNA, 33 bp, Homo sapien
gtttcccttccccaaacgatcatgcaaaataaa

SEQ ID NO: 670246 - DNA, 33 bp, Homo sapien
gtttcccttccccaaaggatcatgcaaaataaa

SEQ ID NO: 670247 - DNA, 33 bp, Homo sapien
atctcatcatggaatcagagaagattaatacta

SEQ ID NO: 670248 - DNA, 33 bp, Homo sapien
atctcatcatggaatcggagaagattaatacta

SEQ ID NO: 670249 - DNA, 33 bp, Homo sapien
gatcatatttacacgtgaagtacatttccccag

SEQ ID NO: 670250 - DNA, 33 bp, Homo sapien
gatcatatttacacgttaagtacatttccccag

SEQ ID NO: 670251 - DNA, 33 bp, Homo sapien
acacccttggatgagacagatttttgaaataca

SEQ ID NO: 670252 - DNA, 33 bp, Homo sapien
acacccttggatgagatagatttttgaaataca

SEQ ID NO: 670253 - DNA, 33 bp, Homo sapien
tttatgttcgtattcaagaaaggctgactctgg

SEQ ID NO: 670254 - DNA, 33 bp, Homo sapien
tttatgttcgtattcaggaaaggctgactctgg

SEQ ID NO: 670255 - DNA, 33 bp, Homo sapien
tcatttgctggtgtgcacaaaacttagaaaata

SEQ ID NO: 670256 - DNA, 33 bp, Homo sapien
tcatttgctggtgtgcgcaaaacttagaaaata

SEQ ID NO: 670257 - DNA, 33 bp, Homo sapien
tttattgcttttgccaagataaaagtgaaattt

SEQ ID NO: 670258 - DNA, 33 bp, Homo sapien
tttattgcttttgccaggataaaagtgaaattt

SEQ ID NO: 670259 - DNA, 33 bp, Homo sapien
gcaaatatggcctaagaaaatgcagttaaaatg

SEQ ID NO: 670260 - DNA, 33 bp, Homo sapien
gcaaatatggcctaaggaaatgcagttaaaatg

SEQ ID NO: 670261 - DNA, 33 bp, Homo sapien
gaaatttttcaacatcaaactaaggctatcttg

SEQ ID NO: 670262 - DNA, 33 bp, Homo sapien
gaaatttttcaacatcgaactaaggctatcttg

SEQ ID NO: 670263 - DNA, 33 bp, Homo sapien
cttgggttttcctccactgaagatacatatcta

SEQ ID NO: 670264 - DNA, 33 bp, Homo sapien
cttgggttttcctccattgaagatacatatcta

SEQ ID NO: 670265 - DNA, 33 bp, Homo sapien
aaaacccaaaaagtaccagtcagggaagctcaa

SEQ ID NO: 670266 - DNA, 33 bp, Homo sapien
aaaacccaaaaagtactagtcagggaagctcaa

SEQ ID NO: 670267 - DNA, 33 bp, Homo sapien
cacaatgattcaaataagccaatttacagaata

SEQ ID NO: 670268 - DNA, 33 bp, Homo sapien
cacaatgattcaaatacgccaatttacagaata

SEQ ID NO: 670269 - DNA, 33 bp, Homo sapien
ccatctggtttctacacacatgaatctgtttca

SEQ ID NO: 670270 - DNA, 33 bp, Homo sapien
ccatctggtttctacatacatgaatctgtttca

SEQ ID NO: 670271 - DNA, 33 bp, Homo sapien
tagtcttaaaattgcaagagaaaacataacacc

SEQ ID NO: 670272 - DNA, 33 bp, Homo sapien
tagtcttaaaattgcatgagaaaacataacacc

SEQ ID NO: 670273 - DNA, 33 bp, Homo sapien
agtggactctggtctaatacttacagtgataga

SEQ ID NO: 670274 - DNA, 33 bp, Homo sapien
agtggactctggtctagtacttacagtgataga

SEQ ID NO: 670275 - DNA, 33 bp, Homo sapien
tgccaattgctcttaaaggcattatagtgtaat

SEQ ID NO: 670276 - DNA, 33 bp, Homo sapien
tgccaattgctcttaagggcattatagtgtaat

SEQ ID NO: 670277 - DNA, 33 bp, Homo sapien
tactgtgatgtcatcaactaaggatttgctagc

SEQ ID NO: 670278 - DNA, 33 bp, Homo sapien
tactgtgatgtcatcagctaaggatttgctagc

SEQ ID NO: 670279 - DNA, 33 bp, Homo sapien
gatgacatcacagtaacctgagacagagaggtg

SEQ ID NO: 670280 - DNA, 33 bp, Homo sapien
gatgacatcacagtaatctgagacagagaggtg

SEQ ID NO: 670281 - DNA, 33 bp, Homo sapien
taaaagctatccaaggaagattcaagatttcat

SEQ ID NO: 670282 - DNA, 33 bp, Homo sapien
taaaagctatccaagggagattcaagatttcat

SEQ ID NO: 670283 - DNA, 33 bp, Homo sapien
ttaattaggatcacaaatctactagaactctgg

SEQ ID NO: 670284 - DNA, 33 bp, Homo sapien
ttaattaggatcacaattctactagaactctgg

SEQ ID NO: 670285 - DNA, 33 bp, Homo sapien
acaatgatgctgcttcaatggcacctggtacct

SEQ ID NO: 670286 - DNA, 33 bp, Homo sapien
acaatgatgctgcttcgatggcacctggtacct

SEQ ID NO: 670287 - DNA, 33 bp, Homo sapien
ctcctcagaggtcaccaatgttattttacttta

SEQ ID NO: 670288 - DNA, 33 bp, Homo sapien
ctcctcagaggtcaccgatgttattttacttta

SEQ ID NO: 670289 - DNA, 33 bp, Homo sapien
gacagtcttgttcttacctgtttcattcatcaa

SEQ ID NO: 670290 - DNA, 33 bp, Homo sapien
gacagtcttgttcttatctgtttcattcatcaa

SEQ ID NO: 670291 - DNA, 33 bp, Homo sapien
caggcctctgaaaaaacaaacaactcaaatagg

SEQ ID NO: 670292 - DNA, 33 bp, Homo sapien
caggcctctgaaaaaagaaacaactcaaatagg

SEQ ID NO: 670293 - DNA, 33 bp, Homo sapien
caattgctctgacctcaccaaaccacaggcaca

SEQ ID NO: 670294 - DNA, 33 bp, Homo sapien
caattgctctgacctccccaaaccacaggcaca

SEQ ID NO: 670295 - DNA, 33 bp, Homo sapien
tgattataatgagtcacgtagctttgttgtttt

SEQ ID NO: 670296 - DNA, 33 bp, Homo sapien
tgattataatgagtcaggtagctttgttgtttt

SEQ ID NO: 670297 - DNA, 33 bp, Homo sapien
tttcttttctactgtcccttaggtaacagcttc

SEQ ID NO: 670298 - DNA, 33 bp, Homo sapien
tttcttttctactgtctcttaggtaacagcttc

SEQ ID NO: 670299 - DNA, 33 bp, Homo sapien
ccaagaacacatgtaacaacattcacctttatt

SEQ ID NO: 670300 - DNA, 33 bp, Homo sapien
ccaagaacacatgtaagaacattcacctttatt

SEQ ID NO: 670301 - DNA, 33 bp, Homo sapien
agcagggataaagatactaagaggtcttcctgt

SEQ ID NO: 670302 - DNA, 33 bp, Homo sapien
agcagggataaagatattaagaggtcttcctgt

SEQ ID NO: 670303 - DNA, 33 bp, Homo sapien
atctggatcccctaagaccttctattagagtgt

SEQ ID NO: 670304 - DNA, 33 bp, Homo sapien
atctggatcccctaagcccttctattagagtgt

SEQ ID NO: 670305 - DNA, 33 bp, Homo sapien
tcatgtagaaattgatgaagaagcgataattat

SEQ ID NO: 670306 - DNA, 33 bp, Homo sapien
tcatgtagaaattgattaagaagcgataattat

SEQ ID NO: 670307 - DNA, 33 bp, Homo sapien
aaatcagattttcttcaacctctgacatcaggg

SEQ ID NO: 670308 - DNA, 33 bp, Homo sapien
aaatcagattttcttcgacctctgacatcaggg

SEQ ID NO: 670309 - DNA, 33 bp, Homo sapien
gagaccatacaccgcactcctaaaaatcaagtc

SEQ ID NO: 670310 - DNA, 33 bp, Homo sapien
gagaccatacaccgcattcctaaaaatcaagtc

SEQ ID NO: 670311 - DNA, 33 bp, Homo sapien
gactgctgtgttgataagaaagctgataaatag

SEQ ID NO: 670312 - DNA, 33 bp, Homo sapien
gactgctgtgttgatatgaaagctgataaatag

SEQ ID NO: 670313 - DNA, 33 bp, Homo sapien
aaatcataacatagagcaacttttgaacaacaa

SEQ ID NO: 670314 - DNA, 33 bp, Homo sapien
aaatcataacatagaggaacttttgaacaacaa

SEQ ID NO: 670315 - DNA, 33 bp, Homo sapien
ggctatagtggtgaaagagagtttgctatctaa

SEQ ID NO: 670316 - DNA, 33 bp, Homo sapien
ggctatagtggtgaaatagagtttgctatctaa

SEQ ID NO: 670317 - DNA, 33 bp, Homo sapien
attgtagagaaaacatcatacagccattaaaac

SEQ ID NO: 670318 - DNA, 33 bp, Homo sapien
attgtagagaaaacatgatacagccattaaaac

SEQ ID NO: 670319 - DNA, 33 bp, Homo sapien
ctgaagatgtagtttcaattctgatctgttgct

SEQ ID NO: 670320 - DNA, 33 bp, Homo sapien
ctgaagatgtagtttcgattctgatctgttgct

SEQ ID NO: 670321 - DNA, 33 bp, Homo sapien
caatttctacacagtcaatttagaattccctag

SEQ ID NO: 670322 - DNA, 33 bp, Homo sapien
caatttctacacagtcgatttagaattccctag

SEQ ID NO: 670323 - DNA, 33 bp, Homo sapien
tttgcttcaggctctacatttgaggaacccaga

SEQ ID NO: 670324 - DNA, 33 bp, Homo sapien
tttgcttcaggctctatatttgaggaacccaga

SEQ ID NO: 670325 - DNA, 33 bp, Homo sapien
ttatagatggttgttacgcaagaaatgaccata

SEQ ID NO: 670326 - DNA, 33 bp, Homo sapien
ttatagatggttgttatgcaagaaatgaccata

SEQ ID NO: 670327 - DNA, 33 bp, Homo sapien
gttttgtttgatgtaacggctcaacaggacagg

SEQ ID NO: 670328 - DNA, 33 bp, Homo sapien
gttttgtttgatgtaatggctcaacaggacagg

SEQ ID NO: 670329 - DNA, 33 bp, Homo sapien
ttactttgggaatgagaaattgaggaaggagac

SEQ ID NO: 670330 - DNA, 33 bp, Homo sapien
ttactttgggaatgaggaattgaggaaggagac

SEQ ID NO: 670331 - DNA, 33 bp, Homo sapien
ttctgatagtaatgaacgatatgctctgtgttt

SEQ ID NO: 670332 - DNA, 33 bp, Homo sapien
ttctgatagtaatgaaggatatgctctgtgttt

SEQ ID NO: 670333 - DNA, 33 bp, Homo sapien
gtaaaacagaggacacaaacaccattatctcta

SEQ ID NO: 670334 - DNA, 33 bp, Homo sapien
gtaaaacagaggacacgaacaccattatctcta

SEQ ID NO: 670335 - DNA, 33 bp, Homo sapien
tgagttagggattcaacggcctagtgttataaa

SEQ ID NO: 670336 - DNA, 33 bp, Homo sapien
tgagttagggattcaatggcctagtgttataaa

SEQ ID NO: 670337 - DNA, 33 bp, Homo sapien
tgctccctaattcatacagttgttgacatgcct

SEQ ID NO: 670338 - DNA, 33 bp, Homo sapien
tgctccctaattcatatagttgttgacatgcct

SEQ ID NO: 670339 - DNA, 33 bp, Homo sapien
tttcagccgtaataaccgccacattaagcgttg

SEQ ID NO: 670340 - DNA, 33 bp, Homo sapien
tttcagccgtaataactgccacattaagcgttg

SEQ ID NO: 670341 - DNA, 33 bp, Homo sapien
aaaaccttcaagtttcaagtacctagctgaata

SEQ ID NO: 670342 - DNA, 33 bp, Homo sapien
aaaaccttcaagtttcgagtacctagctgaata

SEQ ID NO: 670343 - DNA, 33 bp, Homo sapien
taaagtaatagaattaacaaggcttaccgggtg

SEQ ID NO: 670344 - DNA, 33 bp, Homo sapien
taaagtaatagaattagcaaggcttaccgggtg

SEQ ID NO: 670345 - DNA, 33 bp, Homo sapien
tatttgttcttcataaccatgctccaagccttc

SEQ ID NO: 670346 - DNA, 33 bp, Homo sapien
tatttgttcttcataagcatgctccaagccttc

SEQ ID NO: 670347 - DNA, 33 bp, Homo sapien
gaaaaagaaatagttacgctcagcttttgaatt

SEQ ID NO: 670348 - DNA, 33 bp, Homo sapien
gaaaaagaaatagttatgctcagcttttgaatt

SEQ ID NO: 670349 - DNA, 33 bp, Homo sapien
atcatcagagtcatatcaatgtgtgtggctggg

SEQ ID NO: 670350 - DNA, 33 bp, Homo sapien
atcatcagagtcatattaatgtgtgtggctggg

SEQ ID NO: 670351 - DNA, 33 bp, Homo sapien
ataaaggtacattacaatggtcattatgaggac

SEQ ID NO: 670352 - DNA, 33 bp, Homo sapien
ataaaggtacattacagtggtcattatgaggac

SEQ ID NO: 670353 - DNA, 33 bp, Homo sapien
ggacaactgtgtagctaaacagccacactctaa

SEQ ID NO: 670354 - DNA, 33 bp, Homo sapien
ggacaactgtgtagcttaacagccacactctaa

SEQ ID NO: 670355 - DNA, 33 bp, Homo sapien
tttccttcctcattaacgtcatattctataaca

SEQ ID NO: 670356 - DNA, 33 bp, Homo sapien
tttccttcctcattaaggtcatattctataaca

SEQ ID NO: 670357 - DNA, 33 bp, Homo sapien
catgaagatggtaaaaccaatcactgtttctta

SEQ ID NO: 670358 - DNA, 33 bp, Homo sapien
catgaagatggtaaaagcaatcactgtttctta

SEQ ID NO: 670359 - DNA, 33 bp, Homo sapien
tctttgactgcactgagaattgctaatgatttc

SEQ ID NO: 670360 - DNA, 33 bp, Homo sapien
tctttgactgcactgataattgctaatgatttc

SEQ ID NO: 670361 - DNA, 33 bp, Homo sapien
gcatccccaaagttggaagcattaggcaaaaat

SEQ ID NO: 670362 - DNA, 33 bp, Homo sapien
gcatccccaaagttggcagcattaggcaaaaat

SEQ ID NO: 670363 - DNA, 33 bp, Homo sapien
ccagaaatgtaagaaagaatttttgcctaatgc

SEQ ID NO: 670364 - DNA, 33 bp, Homo sapien
ccagaaatgtaagaaataatttttgcctaatgc

SEQ ID NO: 670365 - DNA, 33 bp, Homo sapien
cctagtgagcttataactcagtaacaccctttt

SEQ ID NO: 670366 - DNA, 33 bp, Homo sapien
cctagtgagcttataattcagtaacaccctttt

SEQ ID NO: 670367 - DNA, 33 bp, Homo sapien
tatttccatcgccctgaattagcagctgttaat

SEQ ID NO: 670368 - DNA, 33 bp, Homo sapien
tatttccatcgccctggattagcagctgttaat

SEQ ID NO: 670369 - DNA, 33 bp, Homo sapien
atcctagatgtttagcacgtattatttcatgta

SEQ ID NO: 670370 - DNA, 33 bp, Homo sapien
atcctagatgtttagcgcgtattatttcatgta

SEQ ID NO: 670371 - DNA, 33 bp, Homo sapien
tataacttatcagagcagaaaaccatgagctga

SEQ ID NO: 670372 - DNA, 33 bp, Homo sapien
tataacttatcagagccgaaaaccatgagctga

SEQ ID NO: 670373 - DNA, 33 bp, Homo sapien
taagtgactactctgcgcattgataaagtcggg

SEQ ID NO: 670374 - DNA, 33 bp, Homo sapien
taagtgactactctgctcattgataaagtcggg

SEQ ID NO: 670375 - DNA, 33 bp, Homo sapien
gatctaatatgcaaaacgtttatatggttcaaa

SEQ ID NO: 670376 - DNA, 33 bp, Homo sapien
gatctaatatgcaaaatgtttatatggttcaaa

SEQ ID NO: 670377 - DNA, 33 bp, Homo sapien
aacggccgccaaatcaataacaacattgtgagt

SEQ ID NO: 670378 - DNA, 33 bp, Homo sapien
aacggccgccaaatcagtaacaacattgtgagt

SEQ ID NO: 670379 - DNA, 33 bp, Homo sapien
tccttttaaaagatgcaccaccctaaccctcag

SEQ ID NO: 670380 - DNA, 33 bp, Homo sapien
tccttttaaaagatgcgccaccctaaccctcag

SEQ ID NO: 670381 - DNA, 33 bp, Homo sapien
aacagcaattggaagtaactcattgtgctaagc

SEQ ID NO: 670382 - DNA, 33 bp, Homo sapien
aacagcaattggaagtgactcattgtgctaagc

SEQ ID NO: 670383 - DNA, 33 bp, Homo sapien
ccatttcttaatttcccaggcatatctgagact

SEQ ID NO: 670384 - DNA, 33 bp, Homo sapien
ccatttcttaatttcctaggcatatctgagact

SEQ ID NO: 670385 - DNA, 33 bp, Homo sapien
cagctggcagagatcaaaggaataagcagggtc

SEQ ID NO: 670386 - DNA, 33 bp, Homo sapien
cagctggcagagatcacaggaataagcagggtc

SEQ ID NO: 670387 - DNA, 33 bp, Homo sapien
ataactctttagcataccagctgaaaacttttc

SEQ ID NO: 670388 - DNA, 33 bp, Homo sapien
ataactctttagcatagcagctgaaaacttttc

SEQ ID NO: 670389 - DNA, 33 bp, Homo sapien
gtacctcttgccccaaacagactatcaatttgc

SEQ ID NO: 670390 - DNA, 33 bp, Homo sapien
gtacctcttgccccaaccagactatcaatttgc

SEQ ID NO: 670391 - DNA, 33 bp, Homo sapien
ggacaatgttgttctacattaggggttctcaga

SEQ ID NO: 670392 - DNA, 33 bp, Homo sapien
ggacaatgttgttctatattaggggttctcaga

SEQ ID NO: 670393 - DNA, 33 bp, Homo sapien
agctgtagtcttttaacgtagtgacaccatact

SEQ ID NO: 670394 - DNA, 33 bp, Homo sapien
agctgtagtcttttaatgtagtgacaccatact

SEQ ID NO: 670395 - DNA, 33 bp, Homo sapien
cccagagatgataaacagctaagagtttcaaac

SEQ ID NO: 670396 - DNA, 33 bp, Homo sapien
cccagagatgataaacggctaagagtttcaaac

SEQ ID NO: 670397 - DNA, 33 bp, Homo sapien
ttttatatctgcctgaagggaaatgatactcta

SEQ ID NO: 670398 - DNA, 33 bp, Homo sapien
ttttatatctgcctgaggggaaatgatactcta

SEQ ID NO: 670399 - DNA, 33 bp, Homo sapien
acagctggaaggttccagagacatgtgtcccat

SEQ ID NO: 670400 - DNA, 33 bp, Homo sapien
acagctggaaggttccggagacatgtgtcccat

SEQ ID NO: 670401 - DNA, 33 bp, Homo sapien
gagcctggctgacaacaagttttttagcgaaaa

SEQ ID NO: 670402 - DNA, 33 bp, Homo sapien
gagcctggctgacaacgagttttttagcgaaaa

SEQ ID NO: 670403 - DNA, 33 bp, Homo sapien
ttttgcaaacatttcacactgtgggaaatgttg

SEQ ID NO: 670404 - DNA, 33 bp, Homo sapien
ttttgcaaacatttcatactgtgggaaatgttg

SEQ ID NO: 670405 - DNA, 33 bp, Homo sapien
taaggaatcagcaaaaataccagagtttttaat

SEQ ID NO: 670406 - DNA, 33 bp, Homo sapien
taaggaatcagcaaaagtaccagagtttttaat

SEQ ID NO: 670407 - DNA, 33 bp, Homo sapien
atataaccacttaaaactggaatcatatcgtgt

SEQ ID NO: 670408 - DNA, 33 bp, Homo sapien
atataaccacttaaaattggaatcatatcgtgt

SEQ ID NO: 670409 - DNA, 33 bp, Homo sapien
ttttcaaagacacccaaaaactgtcaccaagag

SEQ ID NO: 670410 - DNA, 33 bp, Homo sapien
ttttcaaagacacccacaaactgtcaccaagag

SEQ ID NO: 670411 - DNA, 33 bp, Homo sapien
agacccatgaatcggagtaagtttgaagcattg

SEQ ID NO: 670412 - DNA, 33 bp, Homo sapien
agacccatgaatcggattaagtttgaagcattg

SEQ ID NO: 670413 - DNA, 33 bp, Homo sapien
aaactggatcccagagaagtgaagtcacttgtc

SEQ ID NO: 670414 - DNA, 33 bp, Homo sapien
aaactggatcccagaggagtgaagtcacttgtc

SEQ ID NO: 670415 - DNA, 33 bp, Homo sapien
cagagctgagaaccaacggtctagtacttgagg

SEQ ID NO: 670416 - DNA, 33 bp, Homo sapien
cagagctgagaaccaatggtctagtacttgagg

SEQ ID NO: 670417 - DNA, 33 bp, Homo sapien
aaggaataatgggtaaagagaatacaggagagg

SEQ ID NO: 670418 - DNA, 33 bp, Homo sapien
aaggaataatgggtaaggagaatacaggagagg

SEQ ID NO: 670419 - DNA, 33 bp, Homo sapien
gtccctcaattagagacgtttgaatcctgctct

SEQ ID NO: 670420 - DNA, 33 bp, Homo sapien
gtccctcaattagagatgtttgaatcctgctct

SEQ ID NO: 670421 - DNA, 33 bp, Homo sapien
tctttctctctagctcaccttggaaaaattttt

SEQ ID NO: 670422 - DNA, 33 bp, Homo sapien
tctttctctctagctcgccttggaaaaattttt

SEQ ID NO: 670423 - DNA, 33 bp, Homo sapien
aaccaaacatagaatcactttaaaatttcatga

SEQ ID NO: 670424 - DNA, 33 bp, Homo sapien
aaccaaacatagaatctctttaaaatttcatga

SEQ ID NO: 670425 - DNA, 33 bp, Homo sapien
tttgagataaggtccaagggatcattatgagtc

SEQ ID NO: 670426 - DNA, 33 bp, Homo sapien
tttgagataaggtccatgggatcattatgagtc

SEQ ID NO: 670427 - DNA, 33 bp, Homo sapien
ctctccttcttttccacatatcgaaagtcatct

SEQ ID NO: 670428 - DNA, 33 bp, Homo sapien
ctctccttcttttccatatatcgaaagtcatct

SEQ ID NO: 670429 - DNA, 33 bp, Homo sapien
tagatttacagaaaaaccaagaagacaatacag

SEQ ID NO: 670430 - DNA, 33 bp, Homo sapien
tagatttacagaaaaatcaagaagacaatacag

SEQ ID NO: 670431 - DNA, 33 bp, Homo sapien
ttgctgcctaaagcgacaatgtgctttgactta

SEQ ID NO: 670432 - DNA, 33 bp, Homo sapien
ttgctgcctaaagcgataatgtgctttgactta

SEQ ID NO: 670433 - DNA, 33 bp, Homo sapien
actaacagttcagtcaagttgttgttgatacag

SEQ ID NO: 670434 - DNA, 33 bp, Homo sapien
actaacagttcagtcaggttgttgttgatacag

SEQ ID NO: 670435 - DNA, 33 bp, Homo sapien
cactgctataagcttaacattgttttaggcact

SEQ ID NO: 670436 - DNA, 33 bp, Homo sapien
cactgctataagcttagcattgttttaggcact

SEQ ID NO: 670437 - DNA, 33 bp, Homo sapien
agtaacaacgccagaaaaattttgagaccaaag

SEQ ID NO: 670438 - DNA, 33 bp, Homo sapien
agtaacaacgccagaataattttgagaccaaag

SEQ ID NO: 670439 - DNA, 33 bp, Homo sapien
tatcttttggcttctcccgacacaccttgcaat

SEQ ID NO: 670440 - DNA, 33 bp, Homo sapien
tatcttttggcttctcgcgacacaccttgcaat

SEQ ID NO: 670441 - DNA, 33 bp, Homo sapien
tacccaatctttcatgcatttgctgagagtaat

SEQ ID NO: 670442 - DNA, 33 bp, Homo sapien
tacccaatctttcatgtatttgctgagagtaat

SEQ ID NO: 670443 - DNA, 33 bp, Homo sapien
ggaagacaatgtttccacagacagggaggtggg

SEQ ID NO: 670444 - DNA, 33 bp, Homo sapien
ggaagacaatgtttccgcagacagggaggtggg

SEQ ID NO: 670445 - DNA, 33 bp, Homo sapien
agcaggatctgatagtaaccctgaagctggaag

SEQ ID NO: 670446 - DNA, 33 bp, Homo sapien
agcaggatctgatagtgaccctgaagctggaag

SEQ ID NO: 670447 - DNA, 33 bp, Homo sapien
aaggaaccttggagcacagcttccgttctttga

SEQ ID NO: 670448 - DNA, 33 bp, Homo sapien
aaggaaccttggagcatagcttccgttctttga

SEQ ID NO: 670449 - DNA, 33 bp, Homo sapien
tgagggatgaacaaacaaagaaatggtaagccc

SEQ ID NO: 670450 - DNA, 33 bp, Homo sapien
tgagggatgaacaaacgaagaaatggtaagccc

SEQ ID NO: 670451 - DNA, 33 bp, Homo sapien
aatagctgaaacaaaacgagcactcaggatgaa

SEQ ID NO: 670452 - DNA, 33 bp, Homo sapien
aatagctgaaacaaaatgagcactcaggatgaa

SEQ ID NO: 670453 - DNA, 33 bp, Homo sapien
tcctcctacaagtgaccgatctcatacattaaa

SEQ ID NO: 670454 - DNA, 33 bp, Homo sapien
tcctcctacaagtgactgatctcatacattaaa

SEQ ID NO: 670455 - DNA, 33 bp, Homo sapien
ggacttttgcaaaacaactagtatccttagatc

SEQ ID NO: 670456 - DNA, 33 bp, Homo sapien
ggacttttgcaaaacagctagtatccttagatc

SEQ ID NO: 670457 - DNA, 33 bp, Homo sapien
aaaatcaagtcagactcaaaatacaaaatacgt

SEQ ID NO: 670458 - DNA, 33 bp, Homo sapien
aaaatcaagtcagactgaaaatacaaaatacgt

SEQ ID NO: 670459 - DNA, 33 bp, Homo sapien
tcatagaagctgtgtacgttaaagctaatatca

SEQ ID NO: 670460 - DNA, 33 bp, Homo sapien
tcatagaagctgtgtatgttaaagctaatatca

SEQ ID NO: 670461 - DNA, 33 bp, Homo sapien
gatgagctgcctagagacctataaccccgttcc

SEQ ID NO: 670462 - DNA, 33 bp, Homo sapien
gatgagctgcctagaggcctataaccccgttcc

SEQ ID NO: 670463 - DNA, 33 bp, Homo sapien
gaggagtagcctcaacagactctgccagatgac

SEQ ID NO: 670464 - DNA, 33 bp, Homo sapien
gaggagtagcctcaacggactctgccagatgac

SEQ ID NO: 670465 - DNA, 33 bp, Homo sapien
ttataattgccaagtgaatactgttttactctg

SEQ ID NO: 670466 - DNA, 33 bp, Homo sapien
ttataattgccaagtggatactgttttactctg

SEQ ID NO: 670467 - DNA, 33 bp, Homo sapien
aatcaaagttagacaacgactttcagccttaat

SEQ ID NO: 670468 - DNA, 33 bp, Homo sapien
aatcaaagttagacaatgactttcagccttaat

SEQ ID NO: 670469 - DNA, 33 bp, Homo sapien
gacttgtaggattaagcccatcttccttgagtg

SEQ ID NO: 670470 - DNA, 33 bp, Homo sapien
gacttgtaggattaagtccatcttccttgagtg

SEQ ID NO: 670471 - DNA, 33 bp, Homo sapien
acagcaatccattgtcaccaagcacacactatg

SEQ ID NO: 670472 - DNA, 33 bp, Homo sapien
acagcaatccattgtcgccaagcacacactatg

SEQ ID NO: 670473 - DNA, 33 bp, Homo sapien
tattgggtctaacataaaattagaaaatgttga

SEQ ID NO: 670474 - DNA, 33 bp, Homo sapien
tattgggtctaacatacaattagaaaatgttga

SEQ ID NO: 670475 - DNA, 33 bp, Homo sapien
attaaagttagcctggcattttttcattgtctt

SEQ ID NO: 670476 - DNA, 33 bp, Homo sapien
attaaagttagcctggtattttttcattgtctt

SEQ ID NO: 670477 - DNA, 33 bp, Homo sapien
actctgccacattgccaggaatctatatatcac

SEQ ID NO: 670478 - DNA, 33 bp, Homo sapien
actctgccacattgccgggaatctatatatcac

SEQ ID NO: 670479 - DNA, 33 bp, Homo sapien
aacataatatgtgtaaaattcctggcatcattg

SEQ ID NO: 670480 - DNA, 33 bp, Homo sapien
aacataatatgtgtaagattcctggcatcattg

SEQ ID NO: 670481 - DNA, 33 bp, Homo sapien
cacgtaggcgggaaacacattctacccttcctt

SEQ ID NO: 670482 - DNA, 33 bp, Homo sapien
cacgtaggcgggaaacgcattctacccttcctt

SEQ ID NO: 670483 - DNA, 33 bp, Homo sapien
ttatatagcaacatgaaatttgaaggagacaaa

SEQ ID NO: 670484 - DNA, 33 bp, Homo sapien
ttatatagcaacatgagatttgaaggagacaaa

SEQ ID NO: 670485 - DNA, 33 bp, Homo sapien
tatagaagatttgggacgttatgctgaggattc

SEQ ID NO: 670486 - DNA, 33 bp, Homo sapien
tatagaagatttgggatgttatgctgaggattc

SEQ ID NO: 670487 - DNA, 33 bp, Homo sapien
gaactcaagcaagagacacattctgtgccccaa

SEQ ID NO: 670488 - DNA, 33 bp, Homo sapien
gaactcaagcaagagatacattctgtgccccaa

SEQ ID NO: 670489 - DNA, 33 bp, Homo sapien
atgctttttgttacaaaccacgagatttttaga

SEQ ID NO: 670490 - DNA, 33 bp, Homo sapien
atgctttttgttacaagccacgagatttttaga

SEQ ID NO: 670491 - DNA, 33 bp, Homo sapien
caagataattaggaaacgaaggatagacctagc

SEQ ID NO: 670492 - DNA, 33 bp, Homo sapien
caagataattaggaaatgaaggatagacctagc

SEQ ID NO: 670493 - DNA, 33 bp, Homo sapien
tattttagtagatataggtctggactggaatct

SEQ ID NO: 670494 - DNA, 33 bp, Homo sapien
tattttagtagatatatgtctggactggaatct

SEQ ID NO: 670495 - DNA, 33 bp, Homo sapien
caatttgcagtgagaaatataactgcatgggct

SEQ ID NO: 670496 - DNA, 33 bp, Homo sapien
caatttgcagtgagaagtataactgcatgggct

SEQ ID NO: 670497 - DNA, 33 bp, Homo sapien
caggatacagaatctaacagatgagtgggcttt

SEQ ID NO: 670498 - DNA, 33 bp, Homo sapien
caggatacagaatctaccagatgagtgggcttt

SEQ ID NO: 670499 - DNA, 33 bp, Homo sapien
aaaataagtaagcaaacctcttcacctttttgg

SEQ ID NO: 670500 - DNA, 33 bp, Homo sapien
aaaataagtaagcaaagctcttcacctttttgg

SEQ ID NO: 670501 - DNA, 33 bp, Homo sapien
ctaatcctaactacaaatagcactcagaaaatc

SEQ ID NO: 670502 - DNA, 33 bp, Homo sapien
ctaatcctaactacaagtagcactcagaaaatc

SEQ ID NO: 670503 - DNA, 33 bp, Homo sapien
tagaataaagccaagactatattcattatgtat

SEQ ID NO: 670504 - DNA, 33 bp, Homo sapien
tagaataaagccaagagtatattcattatgtat

SEQ ID NO: 670505 - DNA, 33 bp, Homo sapien
aaaatattgcccttagaactctgtgtggtttat

SEQ ID NO: 670506 - DNA, 33 bp, Homo sapien
aaaatattgcccttaggactctgtgtggtttat

SEQ ID NO: 670507 - DNA, 33 bp, Homo sapien
gtttaaaatttctcaactggctgtttataaagt

SEQ ID NO: 670508 - DNA, 33 bp, Homo sapien
gtttaaaatttctcaattggctgtttataaagt

SEQ ID NO: 670509 - DNA, 33 bp, Homo sapien
gaaaagagctataaagccactcataactacaaa

SEQ ID NO: 670510 - DNA, 33 bp, Homo sapien
gaaaagagctataaaggcactcataactacaaa

SEQ ID NO: 670511 - DNA, 33 bp, Homo sapien
cagcaaatcactaaatcaatgccaatggccacc

SEQ ID NO: 670512 - DNA, 33 bp, Homo sapien
cagcaaatcactaaatgaatgccaatggccacc

SEQ ID NO: 670513 - DNA, 33 bp, Homo sapien
gaactaacagtggtaaagctttgagccattatt

SEQ ID NO: 670514 - DNA, 33 bp, Homo sapien
gaactaacagtggtaacgctttgagccattatt

SEQ ID NO: 670515 - DNA, 33 bp, Homo sapien
ggctgtaatccggaaaagttaagagggatttcc

SEQ ID NO: 670516 - DNA, 33 bp, Homo sapien
ggctgtaatccggaaaggttaagagggatttcc

SEQ ID NO: 670517 - DNA, 33 bp, Homo sapien
atcaccttacagatgacggcttgatgacatgga

SEQ ID NO: 670518 - DNA, 33 bp, Homo sapien
atcaccttacagatgatggcttgatgacatgga

SEQ ID NO: 670519 - DNA, 33 bp, Homo sapien
atgctgactatggatgaaggcacttgatttctc

SEQ ID NO: 670520 - DNA, 33 bp, Homo sapien
atgctgactatggatgcaggcacttgatttctc

SEQ ID NO: 670521 - DNA, 33 bp, Homo sapien
ggacaggagactgaagaagcaagagtccaggaa

SEQ ID NO: 670522 - DNA, 33 bp, Homo sapien
ggacaggagactgaaggagcaagagtccaggaa

SEQ ID NO: 670523 - DNA, 33 bp, Homo sapien
aatttttttggaagcacggtcaagctaggcctc

SEQ ID NO: 670524 - DNA, 33 bp, Homo sapien
aatttttttggaagcatggtcaagctaggcctc

SEQ ID NO: 670525 - DNA, 33 bp, Homo sapien
gagaataagcctgctaactcctgtctgaggtgg

SEQ ID NO: 670526 - DNA, 33 bp, Homo sapien
gagaataagcctgctacctcctgtctgaggtgg

SEQ ID NO: 670527 - DNA, 33 bp, Homo sapien
aaaggaatgcttaaaacatggaaaagagtttca

SEQ ID NO: 670528 - DNA, 33 bp, Homo sapien
aaaggaatgcttaaaatatggaaaagagtttca

SEQ ID NO: 670529 - DNA, 33 bp, Homo sapien
aagtttctctgaaatacgcagagtgataaaaca

SEQ ID NO: 670530 - DNA, 33 bp, Homo sapien
aagtttctctgaaatatgcagagtgataaaaca

SEQ ID NO: 670531 - DNA, 33 bp, Homo sapien
ttatattgtctctaaaaatatgatatcttggct

SEQ ID NO: 670532 - DNA, 33 bp, Homo sapien
ttatattgtctctaaacatatgatatcttggct

SEQ ID NO: 670533 - DNA, 33 bp, Homo sapien
ggacacaagaaaaaacagcctcactgtaatgca

SEQ ID NO: 670534 - DNA, 33 bp, Homo sapien
ggacacaagaaaaaacggcctcactgtaatgca

SEQ ID NO: 670535 - DNA, 33 bp, Homo sapien
tgacctaatgagataacgaaagtgagcatattt

SEQ ID NO: 670536 - DNA, 33 bp, Homo sapien
tgacctaatgagataaggaaagtgagcatattt

SEQ ID NO: 670537 - DNA, 33 bp, Homo sapien
agaacaaaaagcagaccgatcatttcaaagtca

SEQ ID NO: 670538 - DNA, 33 bp, Homo sapien
agaacaaaaagcagactgatcatttcaaagtca

SEQ ID NO: 670539 - DNA, 33 bp, Homo sapien
agggtgtggaagttacaagagcgacgggggagc

SEQ ID NO: 670540 - DNA, 33 bp, Homo sapien
agggtgtggaagttacgagagcgacgggggagc

SEQ ID NO: 670541 - DNA, 33 bp, Homo sapien
aaattataggttcctcccatcggtttctaattt

SEQ ID NO: 670542 - DNA, 33 bp, Homo sapien
aaattataggttcctctcatcggtttctaattt

SEQ ID NO: 670543 - DNA, 33 bp, Homo sapien
ctgaggaaacaccttgcaatttggtctgggata

SEQ ID NO: 670544 - DNA, 33 bp, Homo sapien
ctgaggaaacaccttgtaatttggtctgggata

SEQ ID NO: 670545 - DNA, 33 bp, Homo sapien
gaaacttgttcataccacaaagcctttatagtt

SEQ ID NO: 670546 - DNA, 33 bp, Homo sapien
gaaacttgttcataccgcaaagcctttatagtt

SEQ ID NO: 670547 - DNA, 33 bp, Homo sapien
ctctttttccaagcaactgtctagaactgatga

SEQ ID NO: 670548 - DNA, 33 bp, Homo sapien
ctctttttccaagcaattgtctagaactgatga

SEQ ID NO: 670549 - DNA, 33 bp, Homo sapien
tctcaaatatgtaccactaatagttcttagaaa

SEQ ID NO: 670550 - DNA, 33 bp, Homo sapien
tctcaaatatgtaccagtaatagttcttagaaa

SEQ ID NO: 670551 - DNA, 33 bp, Homo sapien
cagaaaaccaactatcgctgtaagtgggagttg

SEQ ID NO: 670552 - DNA, 33 bp, Homo sapien
cagaaaaccaactatctctgtaagtgggagttg

SEQ ID NO: 670553 - DNA, 33 bp, Homo sapien
gtcccttgtgtcctaaaaccatcttgttcttct

SEQ ID NO: 670554 - DNA, 33 bp, Homo sapien
gtcccttgtgtcctaagaccatcttgttcttct

SEQ ID NO: 670555 - DNA, 33 bp, Homo sapien
ctgctagtatacaaaacgggatgctgttatgaa

SEQ ID NO: 670556 - DNA, 33 bp, Homo sapien
ctgctagtatacaaaatgggatgctgttatgaa

SEQ ID NO: 670557 - DNA, 33 bp, Homo sapien
ctaggggtttggagtcatgcaaccaattcacta

SEQ ID NO: 670558 - DNA, 33 bp, Homo sapien
ctaggggtttggagtcgtgcaaccaattcacta

SEQ ID NO: 670559 - DNA, 33 bp, Homo sapien
tcatagtgtgcttatccactcactattttgttt

SEQ ID NO: 670560 - DNA, 33 bp, Homo sapien
tcatagtgtgcttatctactcactattttgttt

SEQ ID NO: 670561 - DNA, 33 bp, Homo sapien
ctattgttatttgctacgaaactgttgtgacta

SEQ ID NO: 670562 - DNA, 33 bp, Homo sapien
ctattgttatttgctatgaaactgttgtgacta

SEQ ID NO: 670563 - DNA, 33 bp, Homo sapien
aacctgattttgccaacggaatgacacagaagc

SEQ ID NO: 670564 - DNA, 33 bp, Homo sapien
aacctgattttgccaatggaatgacacagaagc

SEQ ID NO: 670565 - DNA, 33 bp, Homo sapien
acacaagctggtaataccaacagctgatgaagc

SEQ ID NO: 670566 - DNA, 33 bp, Homo sapien
acacaagctggtaatatcaacagctgatgaagc

SEQ ID NO: 670567 - DNA, 33 bp, Homo sapien
tggagagactcaagacaatttgtgtgacaaggg

SEQ ID NO: 670568 - DNA, 33 bp, Homo sapien
tggagagactcaagacgatttgtgtgacaaggg

SEQ ID NO: 670569 - DNA, 33 bp, Homo sapien
tgatggagagaaaaggaacaagtaaagaggcca

SEQ ID NO: 670570 - DNA, 33 bp, Homo sapien
tgatggagagaaaagggacaagtaaagaggcca

SEQ ID NO: 670571 - DNA, 33 bp, Homo sapien
tctagtgtctaaacaacggttggttctcaatag

SEQ ID NO: 670572 - DNA, 33 bp, Homo sapien
tctagtgtctaaacaatggttggttctcaatag

SEQ ID NO: 670573 - DNA, 33 bp, Homo sapien
tattttgttcacataaccacaaatacagagcaa

SEQ ID NO: 670574 - DNA, 33 bp, Homo sapien
tattttgttcacataagcacaaatacagagcaa

SEQ ID NO: 670575 - DNA, 33 bp, Homo sapien
ttcctcaggagtgacaaattaggacgacttatg

SEQ ID NO: 670576 - DNA, 33 bp, Homo sapien
ttcctcaggagtgacagattaggacgacttatg

SEQ ID NO: 670577 - DNA, 33 bp, Homo sapien
aaacaacatttgactaacaataatttaagccac

SEQ ID NO: 670578 - DNA, 33 bp, Homo sapien
aaacaacatttgactagcaataatttaagccac

SEQ ID NO: 670579 - DNA, 33 bp, Homo sapien
cagaaggagcaatatcaccaacactgcagacag

SEQ ID NO: 670580 - DNA, 33 bp, Homo sapien
cagaaggagcaatatcgccaacactgcagacag

SEQ ID NO: 670581 - DNA, 33 bp, Homo sapien
gccaggtaattaaatacgtgaagtggattagtg

SEQ ID NO: 670582 - DNA, 33 bp, Homo sapien
gccaggtaattaaatatgtgaagtggattagtg

SEQ ID NO: 670583 - DNA, 33 bp, Homo sapien
aggctgaaaagatagacacctatgttacacaat

SEQ ID NO: 670584 - DNA, 33 bp, Homo sapien
aggctgaaaagatagagacctatgttacacaat

SEQ ID NO: 670585 - DNA, 33 bp, Homo sapien
ctaatacagaaattggaaccagaaatgttatcg

SEQ ID NO: 670586 - DNA, 33 bp, Homo sapien
ctaatacagaaattggtaccagaaatgttatcg

SEQ ID NO: 670587 - DNA, 33 bp, Homo sapien
ggtatttctgattgtgaagtacttttgttcaca

SEQ ID NO: 670588 - DNA, 33 bp, Homo sapien
ggtatttctgattgtggagtacttttgttcaca

SEQ ID NO: 670589 - DNA, 33 bp, Homo sapien
tccagaacctaaccacacctcattgggctcttt

SEQ ID NO: 670590 - DNA, 33 bp, Homo sapien
tccagaacctaaccactcctcattgggctcttt

SEQ ID NO: 670591 - DNA, 33 bp, Homo sapien
aacttttcctcaaacagttcctgctaatgcaga

SEQ ID NO: 670592 - DNA, 33 bp, Homo sapien
aacttttcctcaaacatttcctgctaatgcaga

SEQ ID NO: 670593 - DNA, 33 bp, Homo sapien
agtaggggaaagactacgctcaaggtagagaaa

SEQ ID NO: 670594 - DNA, 33 bp, Homo sapien
agtaggggaaagactatgctcaaggtagagaaa

SEQ ID NO: 670595 - DNA, 33 bp, Homo sapien
ttatttccacaagtcacctgtgtattctgagat

SEQ ID NO: 670596 - DNA, 33 bp, Homo sapien
ttatttccacaagtcatctgtgtattctgagat

SEQ ID NO: 670597 - DNA, 33 bp, Homo sapien
caacacctactctgaaagaagcatccttagacc

SEQ ID NO: 670598 - DNA, 33 bp, Homo sapien
caacacctactctgaaggaagcatccttagacc

SEQ ID NO: 670599 - DNA, 33 bp, Homo sapien
ttaaagaaatgggaagaatcaaactcagaagga

SEQ ID NO: 670600 - DNA, 33 bp, Homo sapien
ttaaagaaatgggaaggatcaaactcagaagga

SEQ ID NO: 670601 - DNA, 33 bp, Homo sapien
tgacagttaacaatgaataataagtctgtgaat

SEQ ID NO: 670602 - DNA, 33 bp, Homo sapien
tgacagttaacaatgagtaataagtctgtgaat

SEQ ID NO: 670603 - DNA, 33 bp, Homo sapien
atacagaatctcagaccacatccaagaatgagt

SEQ ID NO: 670604 - DNA, 33 bp, Homo sapien
atacagaatctcagacgacatccaagaatgagt

SEQ ID NO: 670605 - DNA, 33 bp, Homo sapien
tgggcagtctaaacaaaagctaaatctcaatgc

SEQ ID NO: 670606 - DNA, 33 bp, Homo sapien
tgggcagtctaaacaacagctaaatctcaatgc

SEQ ID NO: 670607 - DNA, 33 bp, Homo sapien
agccatcaaaattttaactttttactccatatc

SEQ ID NO: 670608 - DNA, 33 bp, Homo sapien
agccatcaaaattttacctttttactccatatc

SEQ ID NO: 670609 - DNA, 33 bp, Homo sapien
ggcataactagcacggaacatattgtggtccac

SEQ ID NO: 670610 - DNA, 33 bp, Homo sapien
ggcataactagcacggtacatattgtggtccac

SEQ ID NO: 670611 - DNA, 33 bp, Homo sapien
gcttaacaaatttccactgcagataaataaacc

SEQ ID NO: 670612 - DNA, 33 bp, Homo sapien
gcttaacaaatttccagtgcagataaataaacc

SEQ ID NO: 670613 - DNA, 33 bp, Homo sapien
gacgcatttctaagtaacatatggcatatcatt

SEQ ID NO: 670614 - DNA, 33 bp, Homo sapien
gacgcatttctaagtagcatatggcatatcatt

SEQ ID NO: 670615 - DNA, 33 bp, Homo sapien
gtgtctttctaaagtacataggcaagaatgaaa

SEQ ID NO: 670616 - DNA, 33 bp, Homo sapien
gtgtctttctaaagtatataggcaagaatgaaa

SEQ ID NO: 670617 - DNA, 33 bp, Homo sapien
ttagggggtcttatgagaacttgtgtgatacgc

SEQ ID NO: 670618 - DNA, 33 bp, Homo sapien
ttagggggtcttatgataacttgtgtgatacgc

SEQ ID NO: 670619 - DNA, 33 bp, Homo sapien
agacctatgatcttcaaataaaacccaatctcc

SEQ ID NO: 670620 - DNA, 33 bp, Homo sapien
agacctatgatcttcagataaaacccaatctcc

SEQ ID NO: 670621 - DNA, 33 bp, Homo sapien
cttttgctccagttctcaagttcctcatttcca

SEQ ID NO: 670622 - DNA, 33 bp, Homo sapien
cttttgctccagttctgaagttcctcatttcca

SEQ ID NO: 670623 - DNA, 33 bp, Homo sapien
gcctgtaatacttgctaaagaactactcaaaag

SEQ ID NO: 670624 - DNA, 33 bp, Homo sapien
gcctgtaatacttgctgaagaactactcaaaag

SEQ ID NO: 670625 - DNA, 33 bp, Homo sapien
actcaaaagacaacataagccatgacaaacagt

SEQ ID NO: 670626 - DNA, 33 bp, Homo sapien
actcaaaagacaacatgagccatgacaaacagt

SEQ ID NO: 670627 - DNA, 33 bp, Homo sapien
agatgagtgttacagaaaataaattaccttagg

SEQ ID NO: 670628 - DNA, 33 bp, Homo sapien
agatgagtgttacagacaataaattaccttagg

SEQ ID NO: 670629 - DNA, 33 bp, Homo sapien
aagacagtattgttgaacagattaaataataat

SEQ ID NO: 670630 - DNA, 33 bp, Homo sapien
aagacagtattgttgagcagattaaataataat

SEQ ID NO: 670631 - DNA, 33 bp, Homo sapien
aaaaagtctggatgaactaccagtgggcacagc

SEQ ID NO: 670632 - DNA, 33 bp, Homo sapien
aaaaagtctggatgaattaccagtgggcacagc

SEQ ID NO: 670633 - DNA, 33 bp, Homo sapien
cagaatcttaggagacagtaaagatctcatgac

SEQ ID NO: 670634 - DNA, 33 bp, Homo sapien
cagaatcttaggagacggtaaagatctcatgac

SEQ ID NO: 670635 - DNA, 33 bp, Homo sapien
cctatgctgtacaacacaaggtttatatatttg

SEQ ID NO: 670636 - DNA, 33 bp, Homo sapien
cctatgctgtacaacagaaggtttatatatttg

SEQ ID NO: 670637 - DNA, 33 bp, Homo sapien
gattgagtggtttataagcaacaaaacttatgt

SEQ ID NO: 670638 - DNA, 33 bp, Homo sapien
gattgagtggtttataggcaacaaaacttatgt

SEQ ID NO: 670639 - DNA, 33 bp, Homo sapien
ctcaatcaggaaacagccaatttagtcaaagat

SEQ ID NO: 670640 - DNA, 33 bp, Homo sapien
ctcaatcaggaaacagtcaatttagtcaaagat

SEQ ID NO: 670641 - DNA, 33 bp, Homo sapien; identical to SEQ ID NO: 670639

SEQ ID NO: 670642 - DNA, 33 bp, Homo sapien; identical to SEQ ID NO: 670640

SEQ ID NO: 670643 - DNA, 33 bp, Homo sapien
ttatcacccagagttacgccacccaagaagatc

SEQ ID NO: 670644 - DNA, 33 bp, Homo sapien
ttatcacccagagttatgccacccaagaagatc

SEQ ID NO: 670645 - DNA, 33 bp, Homo sapien
gcctggtatttgagtacgctgttatctgagaac

SEQ ID NO: 670646 - DNA, 33 bp, Homo sapien
gcctggtatttgagtaggctgttatctgagaac

SEQ ID NO: 670647 - DNA, 33 bp, Homo sapien
atttaaccatgcttaccgacggaatggaaactg

SEQ ID NO: 670648 - DNA, 33 bp, Homo sapien
atttaaccatgcttactgacggaatggaaactg

SEQ ID NO: 670649 - DNA, 33 bp, Homo sapien
gacccaggccttgccaccttggaacaggtagga

SEQ ID NO: 670650 - DNA, 33 bp, Homo sapien
gacccaggccttgccatcttggaacaggtagga

SEQ ID NO: 670651 - DNA, 33 bp, Homo sapien
ttttgactgcttgcttcaactattaatagtgaa

SEQ ID NO: 670652 - DNA, 33 bp, Homo sapien
ttttgactgcttgctttaactattaatagtgaa

SEQ ID NO: 670653 - DNA, 33 bp, Homo sapien
ttagtttattagtccacgttttcaatttcattt

SEQ ID NO: 670654 - DNA, 33 bp, Homo sapien
ttagtttattagtccatgttttcaatttcattt

SEQ ID NO: 670655 - DNA, 33 bp, Homo sapien
tcagttctggaatggcagaaggagaagtattat

SEQ ID NO: 670656 - DNA, 33 bp, Homo sapien
tcagttctggaatggccgaaggagaagtattat

SEQ ID NO: 670657 - DNA, 33 bp, Homo sapien
agtgcacccatccttacaagattgcagggaata

SEQ ID NO: 670658 - DNA, 33 bp, Homo sapien
agtgcacccatccttagaagattgcagggaata

SEQ ID NO: 670659 - DNA, 33 bp, Homo sapien
agtaaagggttggagaaggctataccaggcaaa

SEQ ID NO: 670660 - DNA, 33 bp, Homo sapien
agtaaagggttggagacggctataccaggcaaa

SEQ ID NO: 670661 - DNA, 33 bp, Homo sapien
caccacacaggtactcaatagttcattcttcac

SEQ ID NO: 670662 - DNA, 33 bp, Homo sapien
caccacacaggtactcgatagttcattcttcac

SEQ ID NO: 670663 - DNA, 33 bp, Homo sapien
agggattgtccataaacaaattgtccagctttt

SEQ ID NO: 670664 - DNA, 33 bp, Homo sapien
agggattgtccataaataaattgtccagctttt

SEQ ID NO: 670665 - DNA, 33 bp, Homo sapien
gctgatagtgatgtggacaaggaagcccggact

SEQ ID NO: 670666 - DNA, 33 bp, Homo sapien
gctgatagtgatgtggtcaaggaagcccggact

SEQ ID NO: 670667 - DNA, 33 bp, Homo sapien
tgcttttaatagcctacctcagatgcaggagca

SEQ ID NO: 670668 - DNA, 33 bp, Homo sapien
tgcttttaatagcctatctcagatgcaggagca

SEQ ID NO: 670669 - DNA, 33 bp, Homo sapien
gcaaaaacaggaaaaagtgagacagtggggagg

SEQ ID NO: 670670 - DNA, 33 bp, Homo sapien
gcaaaaacaggaaaaattgagacagtggggagg

SEQ ID NO: 670671 - DNA, 33 bp, Homo sapien
aatatttatgttttgacgtggattgaatataga

SEQ ID NO: 670672 - DNA, 33 bp, Homo sapien
aatatttatgttttgatgtggattgaatataga

SEQ ID NO: 670673 - DNA, 33 bp, Homo sapien
cattcaactgtgctaacgtacaggtcactagga

SEQ ID NO: 670674 - DNA, 33 bp, Homo sapien
cattcaactgtgctaaggtacaggtcactagga

SEQ ID NO: 670675 - DNA, 33 bp, Homo sapien
atgttgcacatgggaacctgtctacttcttcaa

SEQ ID NO: 670676 - DNA, 33 bp, Homo sapien
atgttgcacatgggaagctgtctacttcttcaa

SEQ ID NO: 670677 - DNA, 33 bp, Homo sapien
tctacaattttatgtccgaaatggcaattattt

SEQ ID NO: 670678 - DNA, 33 bp, Homo sapien
tctacaattttatgtctgaaatggcaattattt

SEQ ID NO: 670679 - DNA, 33 bp, Homo sapien
aacaagagagttgaaaagttatcagtgaaacaa

SEQ ID NO: 670680 - DNA, 33 bp, Homo sapien
aacaagagagttgaaaggttatcagtgaaacaa

SEQ ID NO: 670681 - DNA, 33 bp, Homo sapien
cagcctttctaagaacccatcttgcttgatttc

SEQ ID NO: 670682 - DNA, 33 bp, Homo sapien
cagcctttctaagaacgcatcttgcttgatttc

SEQ ID NO: 670683 - DNA, 33 bp, Homo sapien
cattcattaaatgttacaaggcaatactaaaat

SEQ ID NO: 670684 - DNA, 33 bp, Homo sapien
cattcattaaatgttataaggcaatactaaaat

SEQ ID NO: 670685 - DNA, 33 bp, Homo sapien
cacatggatgatacaaaaacattggtaatgttg

SEQ ID NO: 670686 - DNA, 33 bp, Homo sapien
cacatggatgatacaagaacattggtaatgttg

SEQ ID NO: 670687 - DNA, 33 bp, Homo sapien
ttaaactcaaattttacgtggaagaatctatat

SEQ ID NO: 670688 - DNA, 33 bp, Homo sapien
ttaaactcaaattttatgtggaagaatctatat

SEQ ID NO: 670689 - DNA, 33 bp, Homo sapien
caagattgtaggaaagcacttcacaaaaaatca

SEQ ID NO: 670690 - DNA, 33 bp, Homo sapien
caagattgtaggaaaggacttcacaaaaaatca

SEQ ID NO: 670691 - DNA, 33 bp, Homo sapien
ctgtccctttcaataaatccaaatacagaaata

SEQ ID NO: 670692 - DNA, 33 bp, Homo sapien
ctgtccctttcaataagtccaaatacagaaata

SEQ ID NO: 670693 - DNA, 33 bp, Homo sapien
aaatctaacaatctgaccaaaaaaatgggttaa

SEQ ID NO: 670694 - DNA, 33 bp, Homo sapien
aaatctaacaatctgatcaaaaaaatgggttaa

SEQ ID NO: 670695 - DNA, 33 bp, Homo sapien
ttaattaataaaacaccgtgaaactggtagact

SEQ ID NO: 670696 - DNA, 33 bp, Homo sapien
ttaattaataaaacactgtgaaactggtagact

SEQ ID NO: 670697 - DNA, 33 bp, Homo sapien
aagaaagggatgaagggcaataaagaagcaatt

SEQ ID NO: 670698 - DNA, 33 bp, Homo sapien
aagaaagggatgaaggtcaataaagaagcaatt

SEQ ID NO: 670699 - DNA, 33 bp, Homo sapien
caattttggagtaaaactgaggatgagcctgga

SEQ ID NO: 670700 - DNA, 33 bp, Homo sapien
caattttggagtaaaattgaggatgagcctgga

SEQ ID NO: 670701 - DNA, 33 bp, Homo sapien
cagtctcatgaggacactaaggttgatgtggct

SEQ ID NO: 670702 - DNA, 33 bp, Homo sapien
cagtctcatgaggacattaaggttgatgtggct

SEQ ID NO: 670703 - DNA, 33 bp, Homo sapien
tctgctgctagacatacgttggagagcctggtc

SEQ ID NO: 670704 - DNA, 33 bp, Homo sapien
tctgctgctagacataggttggagagcctggtc

SEQ ID NO: 670705 - DNA, 33 bp, Homo sapien
ggaatgctgctagtgacataggaccatataaaa

SEQ ID NO: 670706 - DNA, 33 bp, Homo sapien
ggaatgctgctagtgatataggaccatataaaa

SEQ ID NO: 670707 - DNA, 33 bp, Homo sapien
tcatatgccatgtattaaaaagaaaaaggaaat

SEQ ID NO: 670708 - DNA, 33 bp, Homo sapien
tcatatgccatgtattcaaaagaaaaaggaaat

SEQ ID NO: 670709 - DNA, 33 bp, Homo sapien
caggcaaagaaacaagcattgcatggaatattt

SEQ ID NO: 670710 - DNA, 33 bp, Homo sapien
caggcaaagaaacaagtattgcatggaatattt

SEQ ID NO: 670711 - DNA, 33 bp, Homo sapien
tttatggcactgaaaaaccttgaatttctggac

SEQ ID NO: 670712 - DNA, 33 bp, Homo sapien
tttatggcactgaaaacccttgaatttctggac

SEQ ID NO: 670713 - DNA, 33 bp, Homo sapien
taccaggttatagagccgattggaagcaattac

SEQ ID NO: 670714 - DNA, 33 bp, Homo sapien
taccaggttatagagctgattggaagcaattac

SEQ ID NO: 670715 - DNA, 33 bp, Homo sapien
agccagagaagcggcaaagtggagagtgggtag

SEQ ID NO: 670716 - DNA, 33 bp, Homo sapien
agccagagaagcggcagagtggagagtgggtag

SEQ ID NO: 670717 - DNA, 33 bp, Homo sapien
acctgtatttgccaaaagtatcattcatctaag

SEQ ID NO: 670718 - DNA, 33 bp, Homo sapien
acctgtatttgccaaatgtatcattcatctaag

SEQ ID NO: 670719 - DNA, 33 bp, Homo sapien
tagaaactggagataaatagttaatcaaccttg

SEQ ID NO: 670720 - DNA, 33 bp, Homo sapien
tagaaactggagataagtagttaatcaaccttg

SEQ ID NO: 670721 - DNA, 33 bp, Homo sapien
actatcttccttaaaacaagtcttcagcaaaat

SEQ ID NO: 670722 - DNA, 33 bp, Homo sapien
actatcttccttaaaagaagtcttcagcaaaat

SEQ ID NO: 670723 - DNA, 33 bp, Homo sapien
ctcctacaagcagctacgaaacaggggtaacta

SEQ ID NO: 670724 - DNA, 33 bp, Homo sapien
ctcctacaagcagctaggaaacaggggtaacta

SEQ ID NO: 670725 - DNA, 33 bp, Homo sapien
tcctgaagcacccgaccgaataaagccctttct

SEQ ID NO: 670726 - DNA, 33 bp, Homo sapien
tcctgaagcacccgactgaataaagccctttct

SEQ ID NO: 670727 - DNA, 33 bp, Homo sapien
ccagatctttcttctaagacgaagacaggtgat

SEQ ID NO: 670728 - DNA, 33 bp, Homo sapien
ccagatctttcttctaggacgaagacaggtgat

SEQ ID NO: 670729 - DNA, 33 bp, Homo sapien
ttaaatatatttgtcccgataacacctttgtgt

SEQ ID NO: 670730 - DNA, 33 bp, Homo sapien
ttaaatatatttgtcctgataacacctttgtgt

SEQ ID NO: 670731 - DNA, 33 bp, Homo sapien
tgaatagtaagttataaaaactgaacaggaaat

SEQ ID NO: 670732 - DNA, 33 bp, Homo sapien
tgaatagtaagttatagaaactgaacaggaaat

SEQ ID NO: 670733 - DNA, 33 bp, Homo sapien
taagtagaaatccaaactactatgctgagtgag

SEQ ID NO: 670734 - DNA, 33 bp, Homo sapien
taagtagaaatccaaattactatgctgagtgag

SEQ ID NO: 670735 - DNA, 33 bp, Homo sapien
agatggaaacagtcctcaatacccaatatgatt

SEQ ID NO: 670736 - DNA, 33 bp, Homo sapien
agatggaaacagtcctgaatacccaatatgatt

SEQ ID NO: 670737 - DNA, 33 bp, Homo sapien
tactaaactgatagtaactaaaccataaaacaa

SEQ ID NO: 670738 - DNA, 33 bp, Homo sapien
tactaaactgatagtacctaaaccataaaacaa

SEQ ID NO: 670739 - DNA, 33 bp, Homo sapien
cttttgaaactacaaccgtaagattttgaaagg

SEQ ID NO: 670740 - DNA, 33 bp, Homo sapien
cttttgaaactacaactgtaagattttgaaagg

SEQ ID NO: 670741 - DNA, 33 bp, Homo sapien
atgccagattcaaacacagtgaaatatgacagt

SEQ ID NO: 670742 - DNA, 33 bp, Homo sapien
atgccagattcaaacagagtgaaatatgacagt

SEQ ID NO: 670743 - DNA, 33 bp, Homo sapien
taaactgccttgctcaacccttcctgagaaaat

SEQ ID NO: 670744 - DNA, 33 bp, Homo sapien
taaactgccttgctcatcccttcctgagaaaat

SEQ ID NO: 670745 - DNA, 33 bp, Homo sapien
taaagttggagagaaaaatattagcaagctaac

SEQ ID NO: 670746 - DNA, 33 bp, Homo sapien
taaagttggagagaaacatattagcaagctaac

SEQ ID NO: 670747 - DNA, 33 bp, Homo sapien
agtcagtggcaacagccatcatttagttgtgga

SEQ ID NO: 670748 - DNA, 33 bp, Homo sapien
agtcagtggcaacagctatcatttagttgtgga

SEQ ID NO: 670749 - DNA, 33 bp, Homo sapien
ggcagccttcagagtaaaaacacctaacacaat

SEQ ID NO: 670750 - DNA, 33 bp, Homo sapien
ggcagccttcagagtacaaacacctaacacaat

SEQ ID NO: 670751 - DNA, 33 bp, Homo sapien
ggtttgagtaaaggaactggacaatgtagtctt

SEQ ID NO: 670752 - DNA, 33 bp, Homo sapien
ggtttgagtaaaggaattggacaatgtagtctt

SEQ ID NO: 670753 - DNA, 33 bp, Homo sapien
tatcattctttgataccgatgggaattattttg

SEQ ID NO: 670754 - DNA, 33 bp, Homo sapien
tatcattctttgatactgatgggaattattttg

SEQ ID NO: 670755 - DNA, 33 bp, Homo sapien
acccggggccctggaactggggcttcacaactc

SEQ ID NO: 670756 - DNA, 33 bp, Homo sapien
acccggggccctggaattggggcttcacaactc

SEQ ID NO: 670757 - DNA, 33 bp, Homo sapien
cgaaggtgtgcttttcaatataaggatttattt

SEQ ID NO: 670758 - DNA, 33 bp, Homo sapien
cgaaggtgtgcttttcgatataaggatttattt

SEQ ID NO: 670759 - DNA, 33 bp, Homo sapien
ggtgtgtcaatagagcaatagatagatagatag

SEQ ID NO: 670760 - DNA, 33 bp, Homo sapien
ggtgtgtcaatagagcgatagatagatagatag

SEQ ID NO: 670761 - DNA, 33 bp, Homo sapien
tattccacaagcgttaaaataggtggattcata

SEQ ID NO: 670762 - DNA, 33 bp, Homo sapien
tattccacaagcgttataataggtggattcata

SEQ ID NO: 670763 - DNA, 33 bp, Homo sapien
ttacatttcacaattaaactatcaaaatatacc

SEQ ID NO: 670764 - DNA, 33 bp, Homo sapien
ttacatttcacaattagactatcaaaatatacc

SEQ ID NO: 670765 - DNA, 33 bp, Homo sapien
acagtctagaagaaacaatcagtaacagtaaat

SEQ ID NO: 670766 - DNA, 33 bp, Homo sapien
acagtctagaagaaacgatcagtaacagtaaat

SEQ ID NO: 670767 - DNA, 33 bp, Homo sapien
aagatccagtggctcaaaactctcctttattta

SEQ ID NO: 670768 - DNA, 33 bp, Homo sapien
aagatccagtggctcagaactctcctttattta

SEQ ID NO: 670769 - DNA, 33 bp, Homo sapien
aaatacatgaacatgaaaaaataacaagtaaaa

SEQ ID NO: 670770 - DNA, 33 bp, Homo sapien
aaatacatgaacatgagaaaataacaagtaaaa

SEQ ID NO: 670771 - DNA, 33 bp, Homo sapien
atatgagtggtgaatcacaaatcattttttctt

SEQ ID NO: 670772 - DNA, 33 bp, Homo sapien
atatgagtggtgaatcgcaaatcattttttctt

SEQ ID NO: 670773 - DNA, 33 bp, Homo sapien
gtcaggaaaaacatgaagcagtgcaattcagaa

SEQ ID NO: 670774 - DNA, 33 bp, Homo sapien
gtcaggaaaaacatgaggcagtgcaattcagaa

SEQ ID NO: 670775 - DNA, 33 bp, Homo sapien
atgcttcacactcatgaaaatctctttatcaat

SEQ ID NO: 670776 - DNA, 33 bp, Homo sapien
atgcttcacactcatgcaaatctctttatcaat

SEQ ID NO: 670777 - DNA, 33 bp, Homo sapien
ttttgtaagtaataaaacctctgcataaattca

SEQ ID NO: 670778 - DNA, 33 bp, Homo sapien
ttttgtaagtaataaatcctctgcataaattca

SEQ ID NO: 670779 - DNA, 33 bp, Homo sapien
cttttgggtaagatgcactgagactttctcata

SEQ ID NO: 670780 - DNA, 33 bp, Homo sapien
cttttgggtaagatgcgctgagactttctcata

SEQ ID NO: 670781 - DNA, 33 bp, Homo sapien
tctgacatttcaaaaaaaactggccattgattt

SEQ ID NO: 670782 - DNA, 33 bp, Homo sapien
tctgacatttcaaaaacaactggccattgattt

SEQ ID NO: 670783 - DNA, 33 bp, Homo sapien
atagctactttaacaacgtttgacaaaagtgat

SEQ ID NO: 670784 - DNA, 33 bp, Homo sapien
atagctactttaacaatgtttgacaaaagtgat

SEQ ID NO: 670785 - DNA, 33 bp, Homo sapien
cagcctatggcatggcagatttggattgaatta

SEQ ID NO: 670786 - DNA, 33 bp, Homo sapien
cagcctatggcatggcggatttggattgaatta

SEQ ID NO: 670787 - DNA, 33 bp, Homo sapien
attcctattcctttgagtcaaacctttataatc

SEQ ID NO: 670788 - DNA, 33 bp, Homo sapien
attcctattcctttgattcaaacctttataatc

SEQ ID NO: 670789 - DNA, 33 bp, Homo sapien
tttattaaaaacaatgaagaacgtttggatggt

SEQ ID NO: 670790 - DNA, 33 bp, Homo sapien
tttattaaaaacaatggagaacgtttggatggt

SEQ ID NO: 670791 - DNA, 33 bp, Homo sapien
tgtctgatacaggagaaactagcataactatca

SEQ ID NO: 670792 - DNA, 33 bp, Homo sapien
tgtctgatacaggagagactagcataactatca

SEQ ID NO: 670793 - DNA, 33 bp, Homo sapien
tagccttaaatgatgacgttccaccattgtgat

SEQ ID NO: 670794 - DNA, 33 bp, Homo sapien
tagccttaaatgatgatgttccaccattgtgat

SEQ ID NO: 670795 - DNA, 33 bp, Homo sapien
taccttcacaagaataataaaataaccattatc

SEQ ID NO: 670796 - DNA, 33 bp, Homo sapien
taccttcacaagaatactaaaataaccattatc

SEQ ID NO: 670797 - DNA, 33 bp, Homo sapien
attattcatggctaaacgtgcttcccaaagcaa

SEQ ID NO: 670798 - DNA, 33 bp, Homo sapien
attattcatggctaaaggtgcttcccaaagcaa

SEQ ID NO: 670799 - DNA, 33 bp, Homo sapien
acattgctaatctgtaaaagatgatggttgaaa

SEQ ID NO: 670800 - DNA, 33 bp, Homo sapien
acattgctaatctgtagaagatgatggttgaaa

SEQ ID NO: 670801 - DNA, 33 bp, Homo sapien
aagtaaggcctttttacatctacagcacctcca

SEQ ID NO: 670802 - DNA, 33 bp, Homo sapien
aagtaaggcctttttatatctacagcacctcca

SEQ ID NO: 670803 - DNA, 33 bp, Homo sapien
tttttagcattgtccactctttagtcagattct

SEQ ID NO: 670804 - DNA, 33 bp, Homo sapien
tttttagcattgtccattctttagtcagattct

SEQ ID NO: 670805 - DNA, 33 bp, Homo sapien
taacgtgagtgaaaaacttctgttagcagatat

SEQ ID NO: 670806 - DNA, 33 bp, Homo sapien
taacgtgagtgaaaaatttctgttagcagatat

SEQ ID NO: 670807 - DNA, 33 bp, Homo sapien
tgaaggcacaagaaccagagtgatggagagagg

SEQ ID NO: 670808 - DNA, 33 bp, Homo sapien
tgaaggcacaagaaccggagtgatggagagagg

SEQ ID NO: 670809 - DNA, 33 bp, Homo sapien
gtgacagtaaaagagtaacagagagtcaatgac

SEQ ID NO: 670810 - DNA, 33 bp, Homo sapien
gtgacagtaaaagagtgacagagagtcaatgac

SEQ ID NO: 670811 - DNA, 33 bp, Homo sapien
tactctgcatattcacagctccctttctacagt

SEQ ID NO: 670812 - DNA, 33 bp, Homo sapien
tactctgcatattcacggctccctttctacagt

SEQ ID NO: 670813 - DNA, 33 bp, Homo sapien
atctgggatgggagtgaaacagcagggtaaaaa

SEQ ID NO: 670814 - DNA, 33 bp, Homo sapien
atctgggatgggagtggaacagcagggtaaaaa

SEQ ID NO: 670815 - DNA, 33 bp, Homo sapien
ctgaaatggttatttccctgccctcaagaagga

SEQ ID NO: 670816 - DNA, 33 bp, Homo sapien
ctgaaatggttatttctctgccctcaagaagga

SEQ ID NO: 670817 - DNA, 33 bp, Homo sapien
ttcatttctgctatcaactcagtttttgaattc

SEQ ID NO: 670818 - DNA, 33 bp, Homo sapien
ttcatttctgctatcacctcagtttttgaattc

SEQ ID NO: 670819 - DNA, 33 bp, Homo sapien
ttttgttatttaatcacagctgtaagtaggctg

SEQ ID NO: 670820 - DNA, 33 bp, Homo sapien
ttttgttatttaatcatagctgtaagtaggctg

SEQ ID NO: 670821 - DNA, 33 bp, Homo sapien
aaacccactgcattaccggatgagatccttgag

SEQ ID NO: 670822 - DNA, 33 bp, Homo sapien
aaacccactgcattactggatgagatccttgag

SEQ ID NO: 670823 - DNA, 33 bp, Homo sapien
acctttctcccatagcaaaatgtaagcaatagg

SEQ ID NO: 670824 - DNA, 33 bp, Homo sapien
acctttctcccatagcgaaatgtaagcaatagg

SEQ ID NO: 670825 - DNA, 33 bp, Homo sapien
tctcctaaacacccacactgtttcttcagaatt

SEQ ID NO: 670826 - DNA, 33 bp, Homo sapien
tctcctaaacacccactctgtttcttcagaatt

SEQ ID NO: 670827 - DNA, 33 bp, Homo sapien
gcctctcctaactcccacaattttaacagcact

SEQ ID NO: 670828 - DNA, 33 bp, Homo sapien
gcctctcctaactcccgcaattttaacagcact

SEQ ID NO: 670829 - DNA, 33 bp, Homo sapien
gcctaaggtcatattaagccaaaacctgaagtg

SEQ ID NO: 670830 - DNA, 33 bp, Homo sapien
gcctaaggtcatattaggccaaaacctgaagtg

SEQ ID NO: 670831 - DNA, 33 bp, Homo sapien
aagattacaagtgtgacgacaaccgcaagcatg

SEQ ID NO: 670832 - DNA, 33 bp, Homo sapien
aagattacaagtgtgatgacaaccgcaagcatg

SEQ ID NO: 670833 - DNA, 33 bp, Homo sapien
ataacgtattatgcagaagatcatgcttagtca

SEQ ID NO: 670834 - DNA, 33 bp, Homo sapien
ataacgtattatgcagtagatcatgcttagtca

SEQ ID NO: 670835 - DNA, 33 bp, Homo sapien
gtcatcaactatcacaagccatctgaattggat

SEQ ID NO: 670836 - DNA, 33 bp, Homo sapien
gtcatcaactatcacaggccatctgaattggat

SEQ ID NO: 670837 - DNA, 33 bp, Homo sapien
attatctggatactcccagtcaatttcgctcag

SEQ ID NO: 670838 - DNA, 33 bp, Homo sapien
attatctggatactcctagtcaatttcgctcag

SEQ ID NO: 670839 - DNA, 33 bp, Homo sapien
agagtaaaaataaatgaacaaagcctgtaagaa

SEQ ID NO: 670840 - DNA, 33 bp, Homo sapien
agagtaaaaataaatggacaaagcctgtaagaa

SEQ ID NO: 670841 - DNA, 33 bp, Homo sapien
ttatgtttgctatgtaacctcaagtaataaata

SEQ ID NO: 670842 - DNA, 33 bp, Homo sapien
ttatgtttgctatgtatcctcaagtaataaata

SEQ ID NO: 670843 - DNA, 33 bp, Homo sapien
tataataattaaatggcattgtgaacctaagtt

SEQ ID NO: 670844 - DNA, 33 bp, Homo sapien
tataataattaaatggtattgtgaacctaagtt

SEQ ID NO: 670845 - DNA, 33 bp, Homo sapien
gaatattttaagcacacaacaatgcagactgta

SEQ ID NO: 670846 - DNA, 33 bp, Homo sapien
gaatattttaagcacagaacaatgcagactgta

SEQ ID NO: 670847 - DNA, 33 bp, Homo sapien
caaaaccaatcaataacagcatataagcatgga

SEQ ID NO: 670848 - DNA, 33 bp, Homo sapien
caaaaccaatcaataatagcatataagcatgga

SEQ ID NO: 670849 - DNA, 33 bp, Homo sapien
ctcattttccatctgacaccatgtgactcaagt

SEQ ID NO: 670850 - DNA, 33 bp, Homo sapien
ctcattttccatctgataccatgtgactcaagt

SEQ ID NO: 670851 - DNA, 33 bp, Homo sapien
ctgggttccaagtgtgcacctctggagtctgct

SEQ ID NO: 670852 - DNA, 33 bp, Homo sapien
ctgggttccaagtgtgtacctctggagtctgct

SEQ ID NO: 670853 - DNA, 33 bp, Homo sapien
ttacttactcaatgaactgcaatgccaagtcaa

SEQ ID NO: 670854 - DNA, 33 bp, Homo sapien
ttacttactcaatgaagtgcaatgccaagtcaa

SEQ ID NO: 670855 - DNA, 33 bp, Homo sapien
ataaaactttctctaactgatgagagtgtatca

SEQ ID NO: 670856 - DNA, 33 bp, Homo sapien
ataaaactttctctaattgatgagagtgtatca

SEQ ID NO: 670857 - DNA, 33 bp, Homo sapien
gtgtaacatatgattgcagtgaagagtgagtct

SEQ ID NO: 670858 - DNA, 33 bp, Homo sapien
gtgtaacatatgattgtagtgaagagtgagtct

SEQ ID NO: 670859 - DNA, 33 bp, Homo sapien
aaagcagagaaaggaggcatatgctacagttaa

SEQ ID NO: 670860 - DNA, 33 bp, Homo sapien
aaagcagagaaaggagtcatatgctacagttaa

SEQ ID NO: 670861 - DNA, 33 bp, Homo sapien
tttattatgcctcctccatgattctaattttca

SEQ ID NO: 670862 - DNA, 33 bp, Homo sapien
tttattatgcctcctcgatgattctaattttca

SEQ ID NO: 670863 - DNA, 33 bp, Homo sapien
ttcccacctcgacttcccaaactgttggtatta

SEQ ID NO: 670864 - DNA, 33 bp, Homo sapien
ttcccacctcgacttctcaaactgttggtatta

SEQ ID NO: 670865 - DNA, 33 bp, Homo sapien
catagccttatgtataccttgtcactcaatctt

SEQ ID NO: 670866 - DNA, 33 bp, Homo sapien
catagccttatgtatatcttgtcactcaatctt

SEQ ID NO: 670867 - DNA, 33 bp, Homo sapien
aaaaataatttatatcccctactgctattgaga

SEQ ID NO: 670868 - DNA, 33 bp, Homo sapien
aaaaataatttatatctcctactgctattgaga

SEQ ID NO: 670869 - DNA, 33 bp, Homo sapien
aggacaagaggctctaagttatgaccatgaggt

SEQ ID NO: 670870 - DNA, 33 bp, Homo sapien
aggacaagaggctctaggttatgaccatgaggt

SEQ ID NO: 670871 - DNA, 33 bp, Homo sapien
ctatgacaacagatagaagctacttttctctta

SEQ ID NO: 670872 - DNA, 33 bp, Homo sapien
ctatgacaacagataggagctacttttctctta

SEQ ID NO: 670873 - DNA, 33 bp, Homo sapien
aagacactgcctaaaaatgttaagagaaaagta

SEQ ID NO: 670874 - DNA, 33 bp, Homo sapien
aagacactgcctaaaagtgttaagagaaaagta

SEQ ID NO: 670875 - DNA, 33 bp, Homo sapien
tgggctgatgggtccacggaaaaaatgaacaaa

SEQ ID NO: 670876 - DNA, 33 bp, Homo sapien
tgggctgatgggtccatggaaaaaatgaacaaa

SEQ ID NO: 670877 - DNA, 33 bp, Homo sapien
ctttatcttttaaaacacgccttggagatcttt

SEQ ID NO: 670878 - DNA, 33 bp, Homo sapien
ctttatcttttaaaacgcgccttggagatcttt

SEQ ID NO: 670879 - DNA, 33 bp, Homo sapien
gaagtcagaagtatccactattagccatttttc

SEQ ID NO: 670880 - DNA, 33 bp, Homo sapien
gaagtcagaagtatcccctattagccatttttc

SEQ ID NO: 670881 - DNA, 33 bp, Homo sapien
ttgccctttcatctgacaccattgttacttcga

SEQ ID NO: 670882 - DNA, 33 bp, Homo sapien
ttgccctttcatctgataccattgttacttcga

SEQ ID NO: 670883 - DNA, 33 bp, Homo sapien
gttcactgaaaataaactgacactaggcagatt

SEQ ID NO: 670884 - DNA, 33 bp, Homo sapien
gttcactgaaaataaattgacactaggcagatt

SEQ ID NO: 670885 - DNA, 33 bp, Homo sapien
tgagaacacaaaggtgaaaaagtaaatcatagc

SEQ ID NO: 670886 - DNA, 33 bp, Homo sapien
tgagaacacaaaggtgtaaaagtaaatcatagc

SEQ ID NO: 670887 - DNA, 33 bp, Homo sapien
tccaccactgatgaccaaccagagctttctttc

SEQ ID NO: 670888 - DNA, 33 bp, Homo sapien
tccaccactgatgacccaccagagctttctttc

SEQ ID NO: 670889 - DNA, 33 bp, Homo sapien
aaataggaaagtaaaacacaggtgcatcctcct

SEQ ID NO: 670890 - DNA, 33 bp, Homo sapien
aaataggaaagtaaaatacaggtgcatcctcct

SEQ ID NO: 670891 - DNA, 33 bp, Homo sapien
gttctgtaaatgtataatagcaaaatatcgcat

SEQ ID NO: 670892 - DNA, 33 bp, Homo sapien
gttctgtaaatgtatagtagcaaaatatcgcat

SEQ ID NO: 670893 - DNA, 33 bp, Homo sapien
gtgttcaaaatgttccaactaaccagagcagtt

SEQ ID NO: 670894 - DNA, 33 bp, Homo sapien
gtgttcaaaatgttcctactaaccagagcagtt

SEQ ID NO: 670895 - DNA, 33 bp, Homo sapien
acctgatttaactatacggctcaaaaaatattt

SEQ ID NO: 670896 - DNA, 33 bp, Homo sapien
acctgatttaactatatggctcaaaaaatattt

SEQ ID NO: 670897 - DNA, 33 bp, Homo sapien
atgtaatctgcaagtaaaaacaatgtgacctcc

SEQ ID NO: 670898 - DNA, 33 bp, Homo sapien
atgtaatctgcaagtagaaacaatgtgacctcc

SEQ ID NO: 670899 - DNA, 33 bp, Homo sapien; identical to SEQ ID NO: 670897

SEQ ID NO: 670900 - DNA, 33 bp, Homo sapien; identical to SEQ ID NO: 670898

SEQ ID NO: 670901 - DNA, 33 bp, Homo sapien
gcaatctatgctgatccgataaaatattgcaga

SEQ ID NO: 670902 - DNA, 33 bp, Homo sapien
gcaatctatgctgatcggataaaatattgcaga

SEQ ID NO: 670903 - DNA, 33 bp, Homo sapien
cagaaataagactgaccgcccacagctatctga

SEQ ID NO: 670904 - DNA, 33 bp, Homo sapien
cagaaataagactgactgcccacagctatctga

SEQ ID NO: 670905 - DNA, 33 bp, Homo sapien
atgatcaaaaccaccaataatcagagtagagca

SEQ ID NO: 670906 - DNA, 33 bp, Homo sapien
atgatcaaaaccaccagtaatcagagtagagca

SEQ ID NO: 670907 - DNA, 33 bp, Homo sapien
gcacaaatggtagatacagagaaagaaatccaa

SEQ ID NO: 670908 - DNA, 33 bp, Homo sapien
gcacaaatggtagatatagagaaagaaatccaa

SEQ ID NO: 670909 - DNA, 33 bp, Homo sapien
acattagcagacacaaaatcaacttataaatgt

SEQ ID NO: 670910 - DNA, 33 bp, Homo sapien
acattagcagacacaagatcaacttataaatgt

SEQ ID NO: 670911 - DNA, 33 bp, Homo sapien
tttacattatataactcaacaaaatgcaataaa

SEQ ID NO: 670912 - DNA, 33 bp, Homo sapien
tttacattatataactgaacaaaatgcaataaa

SEQ ID NO: 670913 - DNA, 33 bp, Homo sapien
tgtcctcttctttcacacacaagcgtccaggcc

SEQ ID NO: 670914 - DNA, 33 bp, Homo sapien
tgtcctcttctttcacgcacaagcgtccaggcc

SEQ ID NO: 670915 - DNA, 33 bp, Homo sapien
ccagtggtatgggccaaaaacagtcaggtagat

SEQ ID NO: 670916 - DNA, 33 bp, Homo sapien
ccagtggtatgggccagaaacagtcaggtagat

SEQ ID NO: 670917 - DNA, 33 bp, Homo sapien
tcctatcaggtaatacacatccagcgagaatcc

SEQ ID NO: 670918 - DNA, 33 bp, Homo sapien
tcctatcaggtaatacgcatccagcgagaatcc

SEQ ID NO: 670919 - DNA, 33 bp, Homo sapien
ggaaataaggcaatacaagccagggacaatatt

SEQ ID NO: 670920 - DNA, 33 bp, Homo sapien
ggaaataaggcaatacgagccagggacaatatt

SEQ ID NO: 670921 - DNA, 33 bp, Homo sapien
ttctcatacagtcttacggatttcagcacaggt

SEQ ID NO: 670922 - DNA, 33 bp, Homo sapien
ttctcatacagtcttatggatttcagcacaggt

SEQ ID NO: 670923 - DNA, 33 bp, Homo sapien
ctaggactttacaagacgcactacttggaaatc

SEQ ID NO: 670924 - DNA, 33 bp, Homo sapien
ctaggactttacaagatgcactacttggaaatc

SEQ ID NO: 670925 - DNA, 33 bp, Homo sapien
ttgctccagttttcagaagattgagaggttggg

SEQ ID NO: 670926 - DNA, 33 bp, Homo sapien
ttgctccagttttcaggagattgagaggttggg

SEQ ID NO: 670927 - DNA, 33 bp, Homo sapien
cattattcgtttatccaactcaaaagtttcaat

SEQ ID NO: 670928 - DNA, 33 bp, Homo sapien
cattattcgtttatccgactcaaaagtttcaat

SEQ ID NO: 670929 - DNA, 33 bp, Homo sapien
ttttctcaatgattaaagtgacaggcatctgag

SEQ ID NO: 670930 - DNA, 33 bp, Homo sapien
ttttctcaatgattaacgtgacaggcatctgag

SEQ ID NO: 670931 - DNA, 33 bp, Homo sapien
ctcaacttcctacttacatctcactcccttcta

SEQ ID NO: 670932 - DNA, 33 bp, Homo sapien
ctcaacttcctacttatatctcactcccttcta

SEQ ID NO: 670933 - DNA, 33 bp, Homo sapien
tcatcttatgagtccaaaattgacttaatacca

SEQ ID NO: 670934 - DNA, 33 bp, Homo sapien
tcatcttatgagtccataattgacttaatacca

SEQ ID NO: 670935 - DNA, 33 bp, Homo sapien
tcttaaagagaatgcaaagagttgttattacag

SEQ ID NO: 670936 - DNA, 33 bp, Homo sapien
tcttaaagagaatgcatagagttgttattacag

SEQ ID NO: 670937 - DNA, 33 bp, Homo sapien
ctaaatactccaacagactctatattatatcag

SEQ ID NO: 670938 - DNA, 33 bp, Homo sapien
ctaaatactccaacaggctctatattatatcag

SEQ ID NO: 670939 - DNA, 33 bp, Homo sapien
agggacttcttccttcaccactggggagcaaag

SEQ ID NO: 670940 - DNA, 33 bp, Homo sapien
agggacttcttccttcgccactggggagcaaag

SEQ ID NO: 670941 - DNA, 33 bp, Homo sapien
aagtgcacaatcacaacgttcatatgactgtct

SEQ ID NO: 670942 - DNA, 33 bp, Homo sapien
aagtgcacaatcacaatgttcatatgactgtct

SEQ ID NO: 670943 - DNA, 33 bp, Homo sapien
caaagtcaacagagtacataacaggaaaaaagc

SEQ ID NO: 670944 - DNA, 33 bp, Homo sapien
caaagtcaacagagtatataacaggaaaaaagc

SEQ ID NO: 670945 - DNA, 33 bp, Homo sapien
caatccaaaatatgtcaacgaaagcatgaagct

SEQ ID NO: 670946 - DNA, 33 bp, Homo sapien
caatccaaaatatgtcgacgaaagcatgaagct

SEQ ID NO: 670947 - DNA, 33 bp, Homo sapien
cccctggctcaaaaaacagcaactaattgtcgc

SEQ ID NO: 670948 - DNA, 33 bp, Homo sapien
cccctggctcaaaaaatagcaactaattgtcgc

SEQ ID NO: 670949 - DNA, 33 bp, Homo sapien
gtatgagcaagttggccaagatttaaaggggat

SEQ ID NO: 670950 - DNA, 33 bp, Homo sapien
gtatgagcaagttggctaagatttaaaggggat

SEQ ID NO: 670951 - DNA, 33 bp, Homo sapien
gaagccttaaccttcaatatgactgtatttgca

SEQ ID NO: 670952 - DNA, 33 bp, Homo sapien
gaagccttaaccttcagtatgactgtatttgca

SEQ ID NO: 670953 - DNA, 33 bp, Homo sapien
gctttctgcttgatcacggggtctactgggact

SEQ ID NO: 670954 - DNA, 33 bp, Homo sapien
gctttctgcttgatcatggggtctactgggact

SEQ ID NO: 670955 - DNA, 33 bp, Homo sapien
atttacggaagaagcagtatctaacgttataaa

SEQ ID NO: 670956 - DNA, 33 bp, Homo sapien
atttacggaagaagcattatctaacgttataaa

SEQ ID NO: 670957 - DNA, 33 bp, Homo sapien
cttcaccctgaaatgaccctgtgtgcctcatgc

SEQ ID NO: 670958 - DNA, 33 bp, Homo sapien
cttcaccctgaaatgatcctgtgtgcctcatgc

SEQ ID NO: 670959 - DNA, 33 bp, Homo sapien
ggaatggagaaagatccatcgagcaaatggaaa

SEQ ID NO: 670960 - DNA, 33 bp, Homo sapien
ggaatggagaaagatctatcgagcaaatggaaa

SEQ ID NO: 670961 - DNA, 33 bp, Homo sapien
cacgggttggcattgacgggtatggcttttcca

SEQ ID NO: 670962 - DNA, 33 bp, Homo sapien
cacgggttggcattgatgggtatggcttttcca

SEQ ID NO: 670963 - DNA, 33 bp, Homo sapien
ccttagagccttcatacagagcatggtcctatt

SEQ ID NO: 670964 - DNA, 33 bp, Homo sapien
ccttagagccttcatagagagcatggtcctatt

SEQ ID NO: 670965 - DNA, 33 bp, Homo sapien
tttatcctctttggtacggatggagaaatctca

SEQ ID NO: 670966 - DNA, 33 bp, Homo sapien
tttatcctctttggtatggatggagaaatctca

SEQ ID NO: 670967 - DNA, 33 bp, Homo sapien
tagcacgatttattgaagagacaatctattccc

SEQ ID NO: 670968 - DNA, 33 bp, Homo sapien
tagcacgatttattgatgagacaatctattccc

SEQ ID NO: 670969 - DNA, 33 bp, Homo sapien
tacattgcttgaccaaattatattacagggcta

SEQ ID NO: 670970 - DNA, 33 bp, Homo sapien
tacattgcttgaccaatttatattacagggcta

SEQ ID NO: 670971 - DNA, 33 bp, Homo sapien
tgagaaaagcagaggaaaaattagagggaaatt

SEQ ID NO: 670972 - DNA, 33 bp, Homo sapien
tgagaaaagcagaggacaaattagagggaaatt

SEQ ID NO: 670973 - DNA, 33 bp, Homo sapien
tctgcgggccagcaacccagagatccaggacag

SEQ ID NO: 670974 - DNA, 33 bp, Homo sapien
tctgcgggccagcaactcagagatccaggacag

SEQ ID NO: 670975 - DNA, 33 bp, Homo sapien
acaatacagttaggtaaaatacaatgtaatata

SEQ ID NO: 670976 - DNA, 33 bp, Homo sapien
acaatacagttaggtacaatacaatgtaatata

SEQ ID NO: 670977 - DNA, 33 bp, Homo sapien
aactagacatcccaaccgaactatttatttgca

SEQ ID NO: 670978 - DNA, 33 bp, Homo sapien
aactagacatcccaactgaactatttatttgca

SEQ ID NO: 670979 - DNA, 33 bp, Homo sapien
caaattgaggacaataaacacaatcatcacgtt

SEQ ID NO: 670980 - DNA, 33 bp, Homo sapien
caaattgaggacaatatacacaatcatcacgtt

SEQ ID NO: 670981 - DNA, 33 bp, Homo sapien
ttggcagaaatgtaatcagtcatgcaagcaaat

SEQ ID NO: 670982 - DNA, 33 bp, Homo sapien
ttggcagaaatgtaatgagtcatgcaagcaaat

SEQ ID NO: 670983 - DNA, 33 bp, Homo sapien
cagcctgatggcaataggaaagaaaaccccatt

SEQ ID NO: 670984 - DNA, 33 bp, Homo sapien
cagcctgatggcaatatgaaagaaaaccccatt

SEQ ID NO: 670985 - DNA, 33 bp, Homo sapien
acagatatgaaaaaaaaacgcagaaggtagaag

SEQ ID NO: 670986 - DNA, 33 bp, Homo sapien
acagatatgaaaaaaacacgcagaaggtagaag

SEQ ID NO: 670987 - DNA, 33 bp, Homo sapien
aacaaattacttcacacataatgaggtactaaa

SEQ ID NO: 670988 - DNA, 33 bp, Homo sapien
aacaaattacttcacagataatgaggtactaaa

SEQ ID NO: 670989 - DNA, 33 bp, Homo sapien
cattcattcaagacgacgtgacaaagtattgag

SEQ ID NO: 670990 - DNA, 33 bp, Homo sapien
cattcattcaagacgatgtgacaaagtattgag

SEQ ID NO: 670991 - DNA, 33 bp, Homo sapien
taagaacataccaatacgccatttgcatatttg

SEQ ID NO: 670992 - DNA, 33 bp, Homo sapien
taagaacataccaataggccatttgcatatttg

SEQ ID NO: 670993 - DNA, 33 bp, Homo sapien
ttaggcagctgattaacgaagctgttagtgaga

SEQ ID NO: 670994 - DNA, 33 bp, Homo sapien
ttaggcagctgattaatgaagctgttagtgaga

SEQ ID NO: 670995 - DNA, 33 bp, Homo sapien
ttgactgaactcaaaaaggtattatatggtttt

SEQ ID NO: 670996 - DNA, 33 bp, Homo sapien
ttgactgaactcaaaagggtattatatggtttt

SEQ ID NO: 670997 - DNA, 33 bp, Homo sapien
ctttttggatacttcgcaggactcttaaagtat

SEQ ID NO: 670998 - DNA, 33 bp, Homo sapien
ctttttggatacttcggaggactcttaaagtat

SEQ ID NO: 670999 - DNA, 33 bp, Homo sapien
ttgcctagatggtgtcagaaagagccatgtagg

SEQ ID NO: 671000 - DNA, 33 bp, Homo sapien
ttgcctagatggtgtcggaaagagccatgtagg

SEQ ID NO: 671001 - DNA, 33 bp, Homo sapien
tattaagtatccaagagtctagacaaatatagt

SEQ ID NO: 671002 - DNA, 33 bp, Homo sapien
tattaagtatccaagattctagacaaatatagt

SEQ ID NO: 671003 - DNA, 33 bp, Homo sapien
aggtggcacatgactacatttggtaaagttact

SEQ ID NO: 671004 - DNA, 33 bp, Homo sapien
aggtggcacatgactatatttggtaaagttact

SEQ ID NO: 671005 - DNA, 33 bp, Homo sapien
tgaaaacccagaattaaaacagccttggagttt

SEQ ID NO: 671006 - DNA, 33 bp, Homo sapien
tgaaaacccagaattataacagccttggagttt

SEQ ID NO: 671007 - DNA, 33 bp, Homo sapien
ctatgaagagaaaatgaacatcaatctaggttt

SEQ ID NO: 671008 - DNA, 33 bp, Homo sapien
ctatgaagagaaaatggacatcaatctaggttt

SEQ ID NO: 671009 - DNA, 33 bp, Homo sapien
gctattagcagaagcaacaagaaaaataaatgg

SEQ ID NO: 671010 - DNA, 33 bp, Homo sapien
gctattagcagaagcagcaagaaaaataaatgg

SEQ ID NO: 671011 - DNA, 33 bp, Homo sapien
gatagaaatcaaaacactgaatgaccatgagag

SEQ ID NO: 671012 - DNA, 33 bp, Homo sapien
gatagaaatcaaaacattgaatgaccatgagag

SEQ ID NO: 671013 - DNA, 33 bp, Homo sapien
gcttgcacccgagtgaataaatagccatgttgc

SEQ ID NO: 671014 - DNA, 33 bp, Homo sapien
gcttgcacccgagtgagtaaatagccatgttgc

SEQ ID NO: 671015 - DNA, 33 bp, Homo sapien
tcaaaaaataggaagacgatgttaaagtttaga

SEQ ID NO: 671016 - DNA, 33 bp, Homo sapien
tcaaaaaataggaagatgatgttaaagtttaga

SEQ ID NO: 671017 - DNA, 33 bp, Homo sapien
taaacctgcatatttacccttgaatctaacata

SEQ ID NO: 671018 - DNA, 33 bp, Homo sapien
taaacctgcatatttatccttgaatctaacata

SEQ ID NO: 671019 - DNA, 33 bp, Homo sapien
ataaggaccttgctaacaaaaaaagttgaagta

SEQ ID NO: 671020 - DNA, 33 bp, Homo sapien
ataaggaccttgctaataaaaaaagttgaagta

SEQ ID NO: 671021 - DNA, 33 bp, Homo sapien
cttatttgtgctgaacacccattttgttgtttc

SEQ ID NO: 671022 - DNA, 33 bp, Homo sapien
cttatttgtgctgaacgcccattttgttgtttc

SEQ ID NO: 671023 - DNA, 33 bp, Homo sapien
tgccaggtgaatccacagaccagattgaatctc

SEQ ID NO: 671024 - DNA, 33 bp, Homo sapien
tgccaggtgaatccacggaccagattgaatctc

SEQ ID NO: 671025 - DNA, 33 bp, Homo sapien
tatttatgataaaccccaaattattgatgcgtt

SEQ ID NO: 671026 - DNA, 33 bp, Homo sapien
tatttatgataaacccgaaattattgatgcgtt

SEQ ID NO: 671027 - DNA, 33 bp, Homo sapien
tgtgaggataaaagaaactcaacattctgaatt

SEQ ID NO: 671028 - DNA, 33 bp, Homo sapien
tgtgaggataaaagaagctcaacattctgaatt

SEQ ID NO: 671029 - DNA, 33 bp, Homo sapien
gaattccaatgagtcaaattgtgaatatatccc

SEQ ID NO: 671030 - DNA, 33 bp, Homo sapien
gaattccaatgagtcagattgtgaatatatccc

SEQ ID NO: 671031 - DNA, 33 bp, Homo sapien
ctagttctaggtcaaaagccatagttgtttagt

SEQ ID NO: 671032 - DNA, 33 bp, Homo sapien
ctagttctaggtcaaaggccatagttgtttagt

SEQ ID NO: 671033 - DNA, 33 bp, Homo sapien
aacttatttcataaaaaaaagcttggcattctt

SEQ ID NO: 671034 - DNA, 33 bp, Homo sapien
aacttatttcataaaacaaagcttggcattctt

SEQ ID NO: 671035 - DNA, 33 bp, Homo sapien
ggtaactgcctattttcaaaacgtgataaatcc

SEQ ID NO: 671036 - DNA, 33 bp, Homo sapien
ggtaactgcctatttttaaaacgtgataaatcc

SEQ ID NO: 671037 - DNA, 33 bp, Homo sapien
atatcccagatgaatcaatatgaaaactcaaat

SEQ ID NO: 671038 - DNA, 33 bp, Homo sapien
atatcccagatgaatcgatatgaaaactcaaat

SEQ ID NO: 671039 - DNA, 33 bp, Homo sapien
caaatctcactaatccactggatgagtggttgc

SEQ ID NO: 671040 - DNA, 33 bp, Homo sapien
caaatctcactaatcctctggatgagtggttgc

SEQ ID NO: 671041 - DNA, 33 bp, Homo sapien
cctggaaactggttcaagccacgctaccacctc

SEQ ID NO: 671042 - DNA, 33 bp, Homo sapien
cctggaaactggttcatgccacgctaccacctc

SEQ ID NO: 671043 - DNA, 33 bp, Homo sapien
tctttggaaaatgcacagattacagatgttcct

SEQ ID NO: 671044 - DNA, 33 bp, Homo sapien
tctttggaaaatgcacggattacagatgttcct

SEQ ID NO: 671045 - DNA, 33 bp, Homo sapien
aagtttaacattacgcaataactgttagaaatc

SEQ ID NO: 671046 - DNA, 33 bp, Homo sapien
aagtttaacattacgcgataactgttagaaatc

SEQ ID NO: 671047 - DNA, 33 bp, Homo sapien
aagtggtaagagataaatgtctttcataaggtt

SEQ ID NO: 671048 - DNA, 33 bp, Homo sapien
aagtggtaagagataagtgtctttcataaggtt

SEQ ID NO: 671049 - DNA, 33 bp, Homo sapien
tatttatttaatctccacttctaatctgcctca

SEQ ID NO: 671050 - DNA, 33 bp, Homo sapien
tatttatttaatctccccttctaatctgcctca

SEQ ID NO: 671051 - DNA, 33 bp, Homo sapien
aataatggtctgtccacaaattgtaggtgaaat

SEQ ID NO: 671052 - DNA, 33 bp, Homo sapien
aataatggtctgtccataaattgtaggtgaaat

SEQ ID NO: 671053 - DNA, 33 bp, Homo sapien
aattcaaagtgccacagatctcaatggcagggt

SEQ ID NO: 671054 - DNA, 33 bp, Homo sapien
aattcaaagtgccacatatctcaatggcagggt

SEQ ID NO: 671055 - DNA, 33 bp, Homo sapien
attgtaatctattctgaatgaagttcttatgct

SEQ ID NO: 671056 - DNA, 33 bp, Homo sapien
attgtaatctattctgcatgaagttcttatgct

SEQ ID NO: 671057 - DNA, 33 bp, Homo sapien
cactcaaaatgtcttcaaaaagattaggttgag

SEQ ID NO: 671058 - DNA, 33 bp, Homo sapien
cactcaaaatgtcttcgaaaagattaggttgag

SEQ ID NO: 671059 - DNA, 33 bp, Homo sapien
atatgccaataacagcacagaggaggtaggtgg

SEQ ID NO: 671060 - DNA, 33 bp, Homo sapien
atatgccaataacagcgcagaggaggtaggtgg

SEQ ID NO: 671061 - DNA, 33 bp, Homo sapien
atgggcacataggccagtggaacagaagagaaa

SEQ ID NO: 671062 - DNA, 33 bp, Homo sapien
atgggcacataggccattggaacagaagagaaa

SEQ ID NO: 671063 - DNA, 33 bp, Homo sapien
aaaaagagacttaccaccaatttcatcaacaaa

SEQ ID NO: 671064 - DNA, 33 bp, Homo sapien
aaaaagagacttaccatcaatttcatcaacaaa

SEQ ID NO: 671065 - DNA, 33 bp, Homo sapien
gcataactcattgaaccaatattcccaaatggc

SEQ ID NO: 671066 - DNA, 33 bp, Homo sapien
gcataactcattgaactaatattcccaaatggc

SEQ ID NO: 671067 - DNA, 33 bp, Homo sapien
attctcatgagatccactattttttgctaccat

SEQ ID NO: 671068 - DNA, 33 bp, Homo sapien
attctcatgagatccattattttttgctaccat

SEQ ID NO: 671069 - DNA, 33 bp, Homo sapien
tccagtaatggcagagaagcttgtatcaaatta

SEQ ID NO: 671070 - DNA, 33 bp, Homo sapien
tccagtaatggcagagtagcttgtatcaaatta

SEQ ID NO: 671071 - DNA, 33 bp, Homo sapien
acacctgttcaatttacggtaatgatttgtaga

SEQ ID NO: 671072 - DNA, 33 bp, Homo sapien
acacctgttcaatttatggtaatgatttgtaga

SEQ ID NO: 671073 - DNA, 33 bp, Homo sapien
tccctaaacccattcaagtaaaagtcatcaatg

SEQ ID NO: 671074 - DNA, 33 bp, Homo sapien
tccctaaacccattcatgtaaaagtcatcaatg

SEQ ID NO: 671075 - DNA, 33 bp, Homo sapien
aactttacttggcctgaaaataggcaagcattg

SEQ ID NO: 671076 - DNA, 33 bp, Homo sapien
aactttacttggcctgcaaataggcaagcattg

SEQ ID NO: 671077 - DNA, 33 bp, Homo sapien
gctttagaacaagaaacaaagtggggcgattcc

SEQ ID NO: 671078 - DNA, 33 bp, Homo sapien
gctttagaacaagaaagaaagtggggcgattcc

SEQ ID NO: 671079 - DNA, 33 bp, Homo sapien
tatggataaaaggaagccagtgtttacttatca

SEQ ID NO: 671080 - DNA, 33 bp, Homo sapien
tatggataaaaggaagtcagtgtttacttatca

SEQ ID NO: 671081 - DNA, 33 bp, Homo sapien
agtttgtagtcgaaaacaatttggagctagcaa

SEQ ID NO: 671082 - DNA, 33 bp, Homo sapien
agtttgtagtcgaaaataatttggagctagcaa

SEQ ID NO: 671083 - DNA, 33 bp, Homo sapien
aatattgattacaaacacacttttgcaatcagt

SEQ ID NO: 671084 - DNA, 33 bp, Homo sapien
aatattgattacaaacgcacttttgcaatcagt

SEQ ID NO: 671085 - DNA, 33 bp, Homo sapien
tttagtactgagacaccgctagacttcctctaa

SEQ ID NO: 671086 - DNA, 33 bp, Homo sapien
tttagtactgagacactgctagacttcctctaa

SEQ ID NO: 671087 - DNA, 33 bp, Homo sapien
ctttatgcaaagaattaaagcctactgtaggta

SEQ ID NO: 671088 - DNA, 33 bp, Homo sapien
ctttatgcaaagaattgaagcctactgtaggta

SEQ ID NO: 671089 - DNA, 33 bp, Homo sapien
tgggaaactggtgacaatgaggtatatttgtat

SEQ ID NO: 671090 - DNA, 33 bp, Homo sapien
tgggaaactggtgacagtgaggtatatttgtat

SEQ ID NO: 671091 - DNA, 33 bp, Homo sapien
agaagcaggtattatacggtgagggagagaagc

SEQ ID NO: 671092 - DNA, 33 bp, Homo sapien
agaagcaggtattatatggtgagggagagaagc

SEQ ID NO: 671093 - DNA, 33 bp, Homo sapien
ggcacaaagcgttttacgaggaatctgcactta

SEQ ID NO: 671094 - DNA, 33 bp, Homo sapien
ggcacaaagcgttttatgaggaatctgcactta

SEQ ID NO: 671095 - DNA, 33 bp, Homo sapien
ttaaatatgatgcaaacaggatttaggaaatag

SEQ ID NO: 671096 - DNA, 33 bp, Homo sapien
ttaaatatgatgcaaagaggatttaggaaatag

SEQ ID NO: 671097 - DNA, 33 bp, Homo sapien
tatcgaggaattgccggactgtgttccacaatg

SEQ ID NO: 671098 - DNA, 33 bp, Homo sapien
tatcgaggaattgccgtactgtgttccacaatg

SEQ ID NO: 671099 - DNA, 33 bp, Homo sapien
aagtgtcaactccagtcaagatccagcagaacc

SEQ ID NO: 671100 - DNA, 33 bp, Homo sapien
aagtgtcaactccagttaagatccagcagaacc

SEQ ID NO: 671101 - DNA, 33 bp, Homo sapien
aatgatatgctggtggcaaatgtagaaatatat

SEQ ID NO: 671102 - DNA, 33 bp, Homo sapien
aatgatatgctggtggtaaatgtagaaatatat

SEQ ID NO: 671103 - DNA, 33 bp, Homo sapien
ctattataggagtataaaaacttctcccaaaat

SEQ ID NO: 671104 - DNA, 33 bp, Homo sapien
ctattataggagtatacaaacttctcccaaaat

SEQ ID NO: 671105 - DNA, 33 bp, Homo sapien
taatattgatgataaaagaacttcttactttgt

SEQ ID NO: 671106 - DNA, 33 bp, Homo sapien
taatattgatgataaaggaacttcttactttgt

SEQ ID NO: 671107 - DNA, 33 bp, Homo sapien
atatttgccatcttaacagcttctattttaaca

SEQ ID NO: 671108 - DNA, 33 bp, Homo sapien
atatttgccatcttaagagcttctattttaaca

SEQ ID NO: 671109 - DNA, 33 bp, Homo sapien
ttttctctaccttcaacgctccagtcaaatttt

SEQ ID NO: 671110 - DNA, 33 bp, Homo sapien
ttttctctaccttcaatgctccagtcaaatttt

SEQ ID NO: 671111 - DNA, 33 bp, Homo sapien
agacaacatgcagtaacaaaaaaatacaagaaa

SEQ ID NO: 671112 - DNA, 33 bp, Homo sapien
agacaacatgcagtaataaaaaaatacaagaaa

SEQ ID NO: 671113 - DNA, 33 bp, Homo sapien
atactgaatatacttaacttcccatttttagta

SEQ ID NO: 671114 - DNA, 33 bp, Homo sapien
atactgaatatacttatcttcccatttttagta

SEQ ID NO: 671115 - DNA, 33 bp, Homo sapien
ggctatttcctctagaccaataaataacctaga

SEQ ID NO: 671116 - DNA, 33 bp, Homo sapien
ggctatttcctctagatcaataaataacctaga

SEQ ID NO: 671117 - DNA, 33 bp, Homo sapien
ctctgcagtggaatgaacacaaaattggttacc

SEQ ID NO: 671118 - DNA, 33 bp, Homo sapien
ctctgcagtggaatgagcacaaaattggttacc

SEQ ID NO: 671119 - DNA, 33 bp, Homo sapien
attagttcttgtgcaaacaaagatagcaagtaa

SEQ ID NO: 671120 - DNA, 33 bp, Homo sapien
attagttcttgtgcaagcaaagatagcaagtaa

SEQ ID NO: 671121 - DNA, 33 bp, Homo sapien
ggtctaacgtgagttacgggtgtttgttgtaca

SEQ ID NO: 671122 - DNA, 33 bp, Homo sapien
ggtctaacgtgagttatgggtgtttgttgtaca

SEQ ID NO: 671123 - DNA, 33 bp, Homo sapien
tgtgagaacacgtggacacataaaggagaacat

SEQ ID NO: 671124 - DNA, 33 bp, Homo sapien
tgtgagaacacgtggatacataaaggagaacat

SEQ ID NO: 671125 - DNA, 33 bp, Homo sapien
cttttctgtgtagcaacgatacatacttgttta

SEQ ID NO: 671126 - DNA, 33 bp, Homo sapien
cttttctgtgtagcaatgatacatacttgttta

SEQ ID NO: 671127 - DNA, 33 bp, Homo sapien
atcttataaatccataacatcatgaaacgcaga

SEQ ID NO: 671128 - DNA, 33 bp, Homo sapien
atcttataaatccatagcatcatgaaacgcaga

SEQ ID NO: 671129 - DNA, 33 bp, Homo sapien
agctttacaatcctcacggctgtagtaataaat

SEQ ID NO: 671130 - DNA, 33 bp, Homo sapien
agctttacaatcctcagggctgtagtaataaat

SEQ ID NO: 671131 - DNA, 33 bp, Homo sapien
atgctttctctccttaacattgtcaaaataaaa

SEQ ID NO: 671132 - DNA, 33 bp, Homo sapien
atgctttctctccttagcattgtcaaaataaaa

SEQ ID NO: 671133 - DNA, 33 bp, Homo sapien
gcataggaatgaagaaaagcaaaaattctgcaa

SEQ ID NO: 671134 - DNA, 33 bp, Homo sapien
gcataggaatgaagaacagcaaaaattctgcaa

SEQ ID NO: 671135 - DNA, 33 bp, Homo sapien
caatttcagttatccacgatcaaacattgtctt

SEQ ID NO: 671136 - DNA, 33 bp, Homo sapien
caatttcagttatccatgatcaaacattgtctt

SEQ ID NO: 671137 - DNA, 33 bp, Homo sapien
gttaccttgaaggacaatggtgaaagaacatcc

SEQ ID NO: 671138 - DNA, 33 bp, Homo sapien
gttaccttgaaggacagtggtgaaagaacatcc

SEQ ID NO: 671139 - DNA, 33 bp, Homo sapien
tacccatgttttaaaaattattcagagtacatg

SEQ ID NO: 671140 - DNA, 33 bp, Homo sapien
tacccatgttttaaaagttattcagagtacatg

SEQ ID NO: 671141 - DNA, 33 bp, Homo sapien
ctctgaagcaggagagcaagttgtcttcacggg

SEQ ID NO: 671142 - DNA, 33 bp, Homo sapien
ctctgaagcaggagaggaagttgtcttcacggg

SEQ ID NO: 671143 - DNA, 33 bp, Homo sapien
aatgtaagtcagtcacgaaaatacacacacaca

SEQ ID NO: 671144 - DNA, 33 bp, Homo sapien
aatgtaagtcagtcactaaaatacacacacaca

SEQ ID NO: 671145 - DNA, 33 bp, Homo sapien
tctgatatatagagatcaaataccttccctata

SEQ ID NO: 671146 - DNA, 33 bp, Homo sapien
tctgatatatagagattaaataccttccctata

SEQ ID NO: 671147 - DNA, 33 bp, Homo sapien
ttttatgaggtggcataaaggatgagttatttc

SEQ ID NO: 671148 - DNA, 33 bp, Homo sapien
ttttatgaggtggcatgaaggatgagttatttc

SEQ ID NO: 671149 - DNA, 33 bp, Homo sapien
ctaagtgtaattgtcaataggtaggctcttgtt

SEQ ID NO: 671150 - DNA, 33 bp, Homo sapien
ctaagtgtaattgtcagtaggtaggctcttgtt

SEQ ID NO: 671151 - DNA, 33 bp, Homo sapien
cttaaatagttgtctacagctgctgaaatttaa

SEQ ID NO: 671152 - DNA, 33 bp, Homo sapien
cttaaatagttgtctatagctgctgaaatttaa

SEQ ID NO: 671153 - DNA, 33 bp, Homo sapien
agggctctgaattctcactagcatttggtgttg

SEQ ID NO: 671154 - DNA, 33 bp, Homo sapien
agggctctgaattctcgctagcatttggtgttg

SEQ ID NO: 671155 - DNA, 33 bp, Homo sapien
aagggaggatttattacgacagttggctcacac

SEQ ID NO: 671156 - DNA, 33 bp, Homo sapien
aagggaggatttattatgacagttggctcacac

SEQ ID NO: 671157 - DNA, 33 bp, Homo sapien
gaaatttatgacaaaaaagggcaatgagtttac

SEQ ID NO: 671158 - DNA, 33 bp, Homo sapien
gaaatttatgacaaaagagggcaatgagtttac

SEQ ID NO: 671159 - DNA, 33 bp, Homo sapien
ttctgtaacaacagctgaaaacccacacatatt

SEQ ID NO: 671160 - DNA, 33 bp, Homo sapien
ttctgtaacaacagcttaaaacccacacatatt

SEQ ID NO: 671161 - DNA, 33 bp, Homo sapien
tcgttgacattgtcaaagcatatttaactcagc

SEQ ID NO: 671162 - DNA, 33 bp, Homo sapien
tcgttgacattgtcaaggcatatttaactcagc

SEQ ID NO: 671163 - DNA, 33 bp, Homo sapien
tttattgaaagaattgaaaagggtgtttttagc

SEQ ID NO: 671164 - DNA, 33 bp, Homo sapien
tttattgaaagaattgcaaagggtgtttttagc

SEQ ID NO: 671165 - DNA, 33 bp, Homo sapien
cattctaatgaagccacgagaattgaatagatg

SEQ ID NO: 671166 - DNA, 33 bp, Homo sapien
cattctaatgaagccatgagaattgaatagatg

SEQ ID NO: 671167 - DNA, 33 bp, Homo sapien
actgtagagcctttagaaattgagtaaacatag

SEQ ID NO: 671168 - DNA, 33 bp, Homo sapien
actgtagagcctttagcaattgagtaaacatag

SEQ ID NO: 671169 - DNA, 33 bp, Homo sapien
cttcagtattatgataaggctaaatgcagctcc

SEQ ID NO: 671170 - DNA, 33 bp, Homo sapien
cttcagtattatgatagggctaaatgcagctcc

SEQ ID NO: 671171 - DNA, 33 bp, Homo sapien
tatttgaaaatgagcaatatttcgagtttaggc

SEQ ID NO: 671172 - DNA, 33 bp, Homo sapien
tatttgaaaatgagcagtatttcgagtttaggc

SEQ ID NO: 671173 - DNA, 33 bp, Homo sapien
ccttgactgataggcaacaactctggacccctc

SEQ ID NO: 671174 - DNA, 33 bp, Homo sapien
ccttgactgataggcagcaactctggacccctc

SEQ ID NO: 671175 - DNA, 33 bp, Homo sapien
aggactacagataaaaaccttagaagtctaccc

SEQ ID NO: 671176 - DNA, 33 bp, Homo sapien
aggactacagataaaagccttagaagtctaccc

SEQ ID NO: 671177 - DNA, 33 bp, Homo sapien
ctaaagtcttttgctgcaagaagtcagttttct

SEQ ID NO: 671178 - DNA, 33 bp, Homo sapien
ctaaagtcttttgctggaagaagtcagttttct

SEQ ID NO: 671179 - DNA, 33 bp, Homo sapien
atatgtaggcaaaacaaattaagttattgatta

SEQ ID NO: 671180 - DNA, 33 bp, Homo sapien
atatgtaggcaaaacagattaagttattgatta

SEQ ID NO: 671181 - DNA, 33 bp, Homo sapien
catgctaacaaacacaactacttattctcttct

SEQ ID NO: 671182 - DNA, 33 bp, Homo sapien
catgctaacaaacacagctacttattctcttct

SEQ ID NO: 671183 - DNA, 33 bp, Homo sapien
gacctcagaaagagagaattgagtccaggataa

SEQ ID NO: 671184 - DNA, 33 bp, Homo sapien
gacctcagaaagagagcattgagtccaggataa

SEQ ID NO: 671185 - DNA, 33 bp, Homo sapien
aaaaaaatgaggcctaagatattatttggtata

SEQ ID NO: 671186 - DNA, 33 bp, Homo sapien
aaaaaaatgaggcctatgatattatttggtata

SEQ ID NO: 671187 - DNA, 33 bp, Homo sapien
ttaaaactgcattcctcagaagagtagtatgta

SEQ ID NO: 671188 - DNA, 33 bp, Homo sapien
ttaaaactgcattccttagaagagtagtatgta

SEQ ID NO: 671189 - DNA, 33 bp, Homo sapien
ataaattcattgacaaacatcagatttttttaa

SEQ ID NO: 671190 - DNA, 33 bp, Homo sapien
ataaattcattgacaatcatcagatttttttaa

SEQ ID NO: 671191 - DNA, 33 bp, Homo sapien
atgcagatatttgagacggaattttgaaaatgc

SEQ ID NO: 671192 - DNA, 33 bp, Homo sapien
atgcagatatttgagagggaattttgaaaatgc

SEQ ID NO: 671193 - DNA, 33 bp, Homo sapien
agacagatagatgatacactcttgtaatatgta

SEQ ID NO: 671194 - DNA, 33 bp, Homo sapien
agacagatagatgatagactcttgtaatatgta

SEQ ID NO: 671195 - DNA, 33 bp, Homo sapien
tgtataaaagcaaggagatagtgttccttttcc

SEQ ID NO: 671196 - DNA, 33 bp, Homo sapien
tgtataaaagcaaggatatagtgttccttttcc

SEQ ID NO: 671197 - DNA, 33 bp, Homo sapien
tcctgaagcgatacaaagtaaaaagaaactaga

SEQ ID NO: 671198 - DNA, 33 bp, Homo sapien
tcctgaagcgatacaaggtaaaaagaaactaga

SEQ ID NO: 671199 - DNA, 33 bp, Homo sapien
taggaagtggctactaagtttttgtggtttttt

SEQ ID NO: 671200 - DNA, 33 bp, Homo sapien
taggaagtggctactacgtttttgtggtttttt

SEQ ID NO: 671201 - DNA, 33 bp, Homo sapien
attcctaacttaaacacggaagacttcaacaga

SEQ ID NO: 671202 - DNA, 33 bp, Homo sapien
attcctaacttaaacatggaagacttcaacaga

SEQ ID NO: 671203 - DNA, 33 bp, Homo sapien
aaatataattctcaaactctgcagaaggaagat

SEQ ID NO: 671204 - DNA, 33 bp, Homo sapien
aaatataattctcaaagtctgcagaaggaagat

SEQ ID NO: 671205 - DNA, 33 bp, Homo sapien
ttcagaaacctttagcaaaacagagatggctgg

SEQ ID NO: 671206 - DNA, 33 bp, Homo sapien
ttcagaaacctttagcgaaacagagatggctgg

SEQ ID NO: 671207 - DNA, 33 bp, Homo sapien
agagattgagtgagcaaattttttatgtaaaac

SEQ ID NO: 671208 - DNA, 33 bp, Homo sapien
agagattgagtgagcatattttttatgtaaaac

SEQ ID NO: 671209 - DNA, 33 bp, Homo sapien
gatagagaaagcacacaaaagaggttaatggaa

SEQ ID NO: 671210 - DNA, 33 bp, Homo sapien
gatagagaaagcacaccaaagaggttaatggaa

SEQ ID NO: 671211 - DNA, 33 bp, Homo sapien
actcaaagtttggacaaattacaccattgaaaa

SEQ ID NO: 671212 - DNA, 33 bp, Homo sapien
actcaaagtttggacagattacaccattgaaaa

SEQ ID NO: 671213 - DNA, 33 bp, Homo sapien
tgagagtggtatccaacaggcaatgtactgtag

SEQ ID NO: 671214 - DNA, 33 bp, Homo sapien
tgagagtggtatccaataggcaatgtactgtag

SEQ ID NO: 671215 - DNA, 33 bp, Homo sapien
gatggctgcagcaaaccacgatggcacatgtat

SEQ ID NO: 671216 - DNA, 33 bp, Homo sapien
gatggctgcagcaaactacgatggcacatgtat

SEQ ID NO: 671217 - DNA, 33 bp, Homo sapien
attttctattgtcactcaatatttttccactgt

SEQ ID NO: 671218 - DNA, 33 bp, Homo sapien
attttctattgtcacttaatatttttccactgt

SEQ ID NO: 671219 - DNA, 33 bp, Homo sapien
aactgtctacagggaacattcaaagctgagact

SEQ ID NO: 671220 - DNA, 33 bp, Homo sapien
aactgtctacagggaatattcaaagctgagact

SEQ ID NO: 671221 - DNA, 33 bp, Homo sapien
aaacactggagtttgaaagaagaacatcacaca

SEQ ID NO: 671222 - DNA, 33 bp, Homo sapien
aaacactggagtttgagagaagaacatcacaca

SEQ ID NO: 671223 - DNA, 33 bp, Homo sapien
acatgaatggaggtcaccttggcttcagtttgg

SEQ ID NO: 671224 - DNA, 33 bp, Homo sapien
acatgaatggaggtcatcttggcttcagtttgg

SEQ ID NO: 671225 - DNA, 33 bp, Homo sapien
tacaaaaatggtctgaagctggactcttgactg

SEQ ID NO: 671226 - DNA, 33 bp, Homo sapien
tacaaaaatggtctgaggctggactcttgactg

SEQ ID NO: 671227 - DNA, 33 bp, Homo sapien
ctaattcaagagtacaatatatggcttacaaaa

SEQ ID NO: 671228 - DNA, 33 bp, Homo sapien
ctaattcaagagtacattatatggcttacaaaa

SEQ ID NO: 671229 - DNA, 33 bp, Homo sapien
aaggtgaaaagcctagaaaaatgaaatcaggta

SEQ ID NO: 671230 - DNA, 33 bp, Homo sapien
aaggtgaaaagcctaggaaaatgaaatcaggta

SEQ ID NO: 671231 - DNA, 33 bp, Homo sapien
ctgaagagatagaaaaatcagtcttgaaccgcc

SEQ ID NO: 671232 - DNA, 33 bp, Homo sapien
ctgaagagatagaaaactcagtcttgaaccgcc

SEQ ID NO: 671233 - DNA, 33 bp, Homo sapien
actgttacaaatctgacgaaacacaattaccat

SEQ ID NO: 671234 - DNA, 33 bp, Homo sapien
actgttacaaatctgatgaaacacaattaccat

SEQ ID NO: 671235 - DNA, 33 bp, Homo sapien
cagtactttcttcaacacttgtccgtacataat

SEQ ID NO: 671236 - DNA, 33 bp, Homo sapien
cagtactttcttcaacccttgtccgtacataat

SEQ ID NO: 671237 - DNA, 33 bp, Homo sapien
gttataagttgatagcgcaaatggaaaaacggt

SEQ ID NO: 671238 - DNA, 33 bp, Homo sapien
gttataagttgatagctcaaatggaaaaacggt

SEQ ID NO: 671239 - DNA, 33 bp, Homo sapien
ttaaggtatgacccaacgtaatcacagaggtgg

SEQ ID NO: 671240 - DNA, 33 bp, Homo sapien
ttaaggtatgacccaatgtaatcacagaggtgg

SEQ ID NO: 671241 - DNA, 33 bp, Homo sapien
tatctcgtgtactttgaatatttgactcttgcc

SEQ ID NO: 671242 - DNA, 33 bp, Homo sapien
tatctcgtgtactttggatatttgactcttgcc

SEQ ID NO: 671243 - DNA, 33 bp, Homo sapien
ttaaacaaaggatttacgctctctaggcttttt

SEQ ID NO: 671244 - DNA, 33 bp, Homo sapien
ttaaacaaaggatttatgctctctaggcttttt

SEQ ID NO: 671245 - DNA, 33 bp, Homo sapien
aaaagcaacccaatctgaagaaatatgactgcg

SEQ ID NO: 671246 - DNA, 33 bp, Homo sapien
aaaagcaacccaatcttaagaaatatgactgcg

SEQ ID NO: 671247 - DNA, 33 bp, Homo sapien
gggtttaattgattgacggctctgcagactgta

SEQ ID NO: 671248 - DNA, 33 bp, Homo sapien
gggtttaattgattgatggctctgcagactgta

SEQ ID NO: 671249 - DNA, 33 bp, Homo sapien
actttgagtgtgctcaacttaaaaagatggcca

SEQ ID NO: 671250 - DNA, 33 bp, Homo sapien
actttgagtgtgctcaccttaaaaagatggcca

SEQ ID NO: 671251 - DNA, 33 bp, Homo sapien
taaagtgagagatggacggctataaaataatag

SEQ ID NO: 671252 - DNA, 33 bp, Homo sapien
taaagtgagagatggatggctataaaataatag

SEQ ID NO: 671253 - DNA, 33 bp, Homo sapien
tctctatagataatccaaagcaattaataaaaa

SEQ ID NO: 671254 - DNA, 33 bp, Homo sapien
tctctatagataatccgaagcaattaataaaaa

SEQ ID NO: 671255 - DNA, 33 bp, Homo sapien
ttgtacagtattcgaagtagttatcagtattgt

SEQ ID NO: 671256 - DNA, 33 bp, Homo sapien
ttgtacagtattcgaattagttatcagtattgt

SEQ ID NO: 671257 - DNA, 33 bp, Homo sapien
agtaaatagtatggtcaagatactcaaataaat

SEQ ID NO: 671258 - DNA, 33 bp, Homo sapien
agtaaatagtatggtcgagatactcaaataaat

SEQ ID NO: 671259 - DNA, 33 bp, Homo sapien
gagatttcaaccactcagagagcttaattacta

SEQ ID NO: 671260 - DNA, 33 bp, Homo sapien
gagatttcaaccactcggagagcttaattacta

SEQ ID NO: 671261 - DNA, 33 bp, Homo sapien
tggaagaaacaaattcactttctcccattctct

SEQ ID NO: 671262 - DNA, 33 bp, Homo sapien
tggaagaaacaaattcgctttctcccattctct

SEQ ID NO: 671263 - DNA, 33 bp, Homo sapien
tgcactcttggttttaagtgccacagcattcac

SEQ ID NO: 671264 - DNA, 33 bp, Homo sapien
tgcactcttggttttaggtgccacagcattcac

SEQ ID NO: 671265 - DNA, 33 bp, Homo sapien
acccctaaggcttccactatatgatgattgatt

SEQ ID NO: 671266 - DNA, 33 bp, Homo sapien
acccctaaggcttccattatatgatgattgatt

SEQ ID NO: 671267 - DNA, 33 bp, Homo sapien
tttatttttaatacaccctgcacaagaagtttc

SEQ ID NO: 671268 - DNA, 33 bp, Homo sapien
tttatttttaatacacgctgcacaagaagtttc

SEQ ID NO: 671269 - DNA, 33 bp, Homo sapien
cacagcaactgctcaaaatggaatgccactgcc

SEQ ID NO: 671270 - DNA, 33 bp, Homo sapien
cacagcaactgctcaagatggaatgccactgcc

SEQ ID NO: 671271 - DNA, 33 bp, Homo sapien
ttgaacacattccatacaagatgggaagtcctt

SEQ ID NO: 671272 - DNA, 33 bp, Homo sapien
ttgaacacattccatagaagatgggaagtcctt

SEQ ID NO: 671273 - DNA, 33 bp, Homo sapien
ccctgtgtctaggaaaagttcagattctaagcc

SEQ ID NO: 671274 - DNA, 33 bp, Homo sapien
ccctgtgtctaggaaatgttcagattctaagcc

SEQ ID NO: 671275 - DNA, 33 bp, Homo sapien
taaacctgcccatttaaagtcaattgatttttg

SEQ ID NO: 671276 - DNA, 33 bp, Homo sapien
taaacctgcccatttacagtcaattgatttttg

SEQ ID NO: 671277 - DNA, 33 bp, Homo sapien
atcataacttcacattaaacaccataaatgtat

SEQ ID NO: 671278 - DNA, 33 bp, Homo sapien
atcataacttcacattgaacaccataaatgtat

SEQ ID NO: 671279 - DNA, 33 bp, Homo sapien
tatctgtccagtctacagattagatcttcaaag

SEQ ID NO: 671280 - DNA, 33 bp, Homo sapien
tatctgtccagtctacggattagatcttcaaag

SEQ ID NO: 671281 - DNA, 33 bp, Homo sapien
agccagataaaatagaaaatcgtattgaaacta

SEQ ID NO: 671282 - DNA, 33 bp, Homo sapien
agccagataaaatagagaatcgtattgaaacta

SEQ ID NO: 671283 - DNA, 33 bp, Homo sapien
ggccaaggaatgctaaatatgaattttctgtaa

SEQ ID NO: 671284 - DNA, 33 bp, Homo sapien
ggccaaggaatgctaattatgaattttctgtaa

SEQ ID NO: 671285 - DNA, 33 bp, Homo sapien
ccagattaatgataaaactgacacatctcttgt

SEQ ID NO: 671286 - DNA, 33 bp, Homo sapien
ccagattaatgataaatctgacacatctcttgt

SEQ ID NO: 671287 - DNA, 33 bp, Homo sapien
tacacactgatccaaaaacctatgtcgacacaa

SEQ ID NO: 671288 - DNA, 33 bp, Homo sapien
tacacactgatccaaagacctatgtcgacacaa

SEQ ID NO: 671289 - DNA, 33 bp, Homo sapien
tcctggaatccccagaaacagagatgaggcttt

SEQ ID NO: 671290 - DNA, 33 bp, Homo sapien
tcctggaatccccagagacagagatgaggcttt

SEQ ID NO: 671291 - DNA, 33 bp, Homo sapien
tccatgcaccagctccaagaggccttattctca

SEQ ID NO: 671292 - DNA, 33 bp, Homo sapien
tccatgcaccagctccgagaggccttattctca

SEQ ID NO: 671293 - DNA, 33 bp, Homo sapien
attctggattctagaggatagtccacactttct

SEQ ID NO: 671294 - DNA, 33 bp, Homo sapien
attctggattctagagtatagtccacactttct

SEQ ID NO: 671295 - DNA, 33 bp, Homo sapien
agacgttgcctccttaaaagcgcagtaaacagt

SEQ ID NO: 671296 - DNA, 33 bp, Homo sapien
agacgttgcctccttagaagcgcagtaaacagt

SEQ ID NO: 671297 - DNA, 33 bp, Homo sapien
caaaatctatattccaaggaaagcaagcaacaa

SEQ ID NO: 671298 - DNA, 33 bp, Homo sapien
caaaatctatattccatggaaagcaagcaacaa

SEQ ID NO: 671299 - DNA, 33 bp, Homo sapien
tctaggtcttgttgaccgaggttaatctgctcc

SEQ ID NO: 671300 - DNA, 33 bp, Homo sapien
tctaggtcttgttgactgaggttaatctgctcc

SEQ ID NO: 671301 - DNA, 33 bp, Homo sapien
gttgtatgctattcaacaggaagaaagtgtatg

SEQ ID NO: 671302 - DNA, 33 bp, Homo sapien
gttgtatgctattcaagaggaagaaagtgtatg

SEQ ID NO: 671303 - DNA, 33 bp, Homo sapien
atacatggcaatattcacagaagcagcctttac

SEQ ID NO: 671304 - DNA, 33 bp, Homo sapien
atacatggcaatattcgcagaagcagcctttac

SEQ ID NO: 671305 - DNA, 33 bp, Homo sapien
tgcatgtgttatgccactcttttgttactgtaa

SEQ ID NO: 671306 - DNA, 33 bp, Homo sapien
tgcatgtgttatgccattcttttgttactgtaa

SEQ ID NO: 671307 - DNA, 33 bp, Homo sapien
ggggctgaactctacaaaaccacaggggctgag

SEQ ID NO: 671308 - DNA, 33 bp, Homo sapien
ggggctgaactctacagaaccacaggggctgag

SEQ ID NO: 671309 - DNA, 33 bp, Homo sapien
tactgagggtctaaaaagtaaataatgtgtaca

SEQ ID NO: 671310 - DNA, 33 bp, Homo sapien
tactgagggtctaaaaggtaaataatgtgtaca

SEQ ID NO: 671311 - DNA, 33 bp, Homo sapien
cccatcttaccctccacctggaaatagacttga

SEQ ID NO: 671312 - DNA, 33 bp, Homo sapien
cccatcttaccctccatctggaaatagacttga

SEQ ID NO: 671313 - DNA, 33 bp, Homo sapien
taataatatatgaccacgcggaaaattaatctc

SEQ ID NO: 671314 - DNA, 33 bp, Homo sapien
taataatatatgaccatgcggaaaattaatctc

SEQ ID NO: 671315 - DNA, 33 bp, Homo sapien
taatcttaactcacacaatttgaaatgtacacc

SEQ ID NO: 671316 - DNA, 33 bp, Homo sapien
taatcttaactcacactatttgaaatgtacacc

SEQ ID NO: 671317 - DNA, 33 bp, Homo sapien
caaccataatagcaaacagcgcacccagcactc

SEQ ID NO: 671318 - DNA, 33 bp, Homo sapien
caaccataatagcaaagagcgcacccagcactc

SEQ ID NO: 671319 - DNA, 33 bp, Homo sapien
tctgaagccttgtgtaacataatacatagatgg

SEQ ID NO: 671320 - DNA, 33 bp, Homo sapien
tctgaagccttgtgtagcataatacatagatgg

SEQ ID NO: 671321 - DNA, 33 bp, Homo sapien
tttaacctgctataagcagagctgagactttgg

SEQ ID NO: 671322 - DNA, 33 bp, Homo sapien
tttaacctgctataagtagagctgagactttgg

SEQ ID NO: 671323 - DNA, 33 bp, Homo sapien
gctgtgaatggtaaaaatgaataaagatattag

SEQ ID NO: 671324 - DNA, 33 bp, Homo sapien
gctgtgaatggtaaaagtgaataaagatattag

SEQ ID NO: 671325 - DNA, 33 bp, Homo sapien
atttagcaaaataatacgttctcttctgcaaac

SEQ ID NO: 671326 - DNA, 33 bp, Homo sapien
atttagcaaaataatatgttctcttctgcaaac

SEQ ID NO: 671327 - DNA, 33 bp, Homo sapien
ctcactccgttctggaagctgcagttaattttt

SEQ ID NO: 671328 - DNA, 33 bp, Homo sapien
ctcactccgttctggacgctgcagttaattttt

SEQ ID NO: 671329 - DNA, 33 bp, Homo sapien
aatgagagagttgtagcacaccccccaacccta

SEQ ID NO: 671330 - DNA, 33 bp, Homo sapien
aatgagagagttgtaggacaccccccaacccta

SEQ ID NO: 671331 - DNA, 33 bp, Homo sapien
cttctgagaccgtaaaaccctggactcagccac

SEQ ID NO: 671332 - DNA, 33 bp, Homo sapien
cttctgagaccgtaaatccctggactcagccac

SEQ ID NO: 671333 - DNA, 33 bp, Homo sapien
aaactgactttagacacgtaactgtacgtacct

SEQ ID NO: 671334 - DNA, 33 bp, Homo sapien
aaactgactttagacatgtaactgtacgtacct

SEQ ID NO: 671335 - DNA, 33 bp, Homo sapien
catgctaccaagacatgatactccagttacttc

SEQ ID NO: 671336 - DNA, 33 bp, Homo sapien
catgctaccaagacattatactccagttacttc

SEQ ID NO: 671337 - DNA, 33 bp, Homo sapien
tgaaaactatcttcaaagtggtaataataatgt

SEQ ID NO: 671338 - DNA, 33 bp, Homo sapien
tgaaaactatcttcaaggtggtaataataatgt

SEQ ID NO: 671339 - DNA, 33 bp, Homo sapien
cacatacccctaactgaagaatctagatcatgg

SEQ ID NO: 671340 - DNA, 33 bp, Homo sapien
cacatacccctaactggagaatctagatcatgg

SEQ ID NO: 671341 - DNA, 33 bp, Homo sapien
taaaatcattcttaccaaacactgcaaaagaga

SEQ ID NO: 671342 - DNA, 33 bp, Homo sapien
taaaatcattcttaccgaacactgcaaaagaga

SEQ ID NO: 671343 - DNA, 33 bp, Homo sapien
tactcttttaaataaacttggccgggcgagatg

SEQ ID NO: 671344 - DNA, 33 bp, Homo sapien
tactcttttaaataaatttggccgggcgagatg

SEQ ID NO: 671345 - DNA, 33 bp, Homo sapien
gtacaaatttccagcaaagaaattacttcacta

SEQ ID NO: 671346 - DNA, 33 bp, Homo sapien
gtacaaatttccagcagagaaattacttcacta

SEQ ID NO: 671347 - DNA, 33 bp, Homo sapien
aacattttagatgctgaaaattatagagattac

SEQ ID NO: 671348 - DNA, 33 bp, Homo sapien
aacattttagatgctgcaaattatagagattac

SEQ ID NO: 671349 - DNA, 33 bp, Homo sapien
agcctctctaaccacactctattctctgttccc

SEQ ID NO: 671350 - DNA, 33 bp, Homo sapien
agcctctctaaccacattctattctctgttccc

SEQ ID NO: 671351 - DNA, 33 bp, Homo sapien
acctcctttgactacacatcctgcatacagggt

SEQ ID NO: 671352 - DNA, 33 bp, Homo sapien
acctcctttgactacatatcctgcatacagggt

SEQ ID NO: 671353 - DNA, 33 bp, Homo sapien
tctcagatgcaaatgacgagcctattgggaact

SEQ ID NO: 671354 - DNA, 33 bp, Homo sapien
tctcagatgcaaatgaggagcctattgggaact

SEQ ID NO: 671355 - DNA, 33 bp, Homo sapien
gcatcttcattattcaatcaggaatttgctcaa

SEQ ID NO: 671356 - DNA, 33 bp, Homo sapien
gcatcttcattattcagtcaggaatttgctcaa

SEQ ID NO: 671357 - DNA, 33 bp, Homo sapien
catatcaggaatcacaatcaacagttctgacca

SEQ ID NO: 671358 - DNA, 33 bp, Homo sapien
catatcaggaatcacactcaacagttctgacca

SEQ ID NO: 671359 - DNA, 33 bp, Homo sapien
aagcctgcactctaaaactggaccagggtactg

SEQ ID NO: 671360 - DNA, 33 bp, Homo sapien
aagcctgcactctaaagctggaccagggtactg

SEQ ID NO: 671361 - DNA, 33 bp, Homo sapien
tatgggaaatcaatgacggctattgaggaaaca

SEQ ID NO: 671362 - DNA, 33 bp, Homo sapien
tatgggaaatcaatgatggctattgaggaaaca

SEQ ID NO: 671363 - DNA, 33 bp, Homo sapien
cttttacatttgattacgtggaaagacaagtag

SEQ ID NO: 671364 - DNA, 33 bp, Homo sapien
cttttacatttgattatgtggaaagacaagtag

SEQ ID NO: 671365 - DNA, 33 bp, Homo sapien
aaaaagatatttagccaagtaattgaaggatac

SEQ ID NO: 671366 - DNA, 33 bp, Homo sapien
aaaaagatatttagcccagtaattgaaggatac

SEQ ID NO: 671367 - DNA, 33 bp, Homo sapien
aagtttcctatctaaccgacactaaaaattaat

SEQ ID NO: 671368 - DNA, 33 bp, Homo sapien
aagtttcctatctaactgacactaaaaattaat

SEQ ID NO: 671369 - DNA, 33 bp, Homo sapien
caagcatatgagaaaacgttcaacgtcactaat

SEQ ID NO: 671370 - DNA, 33 bp, Homo sapien
caagcatatgagaaaatgttcaacgtcactaat

SEQ ID NO: 671371 - DNA, 33 bp, Homo sapien
gtttagtgtttattccaaatactgagttttgtt

SEQ ID NO: 671372 - DNA, 33 bp, Homo sapien
gtttagtgtttattcccaatactgagttttgtt

SEQ ID NO: 671373 - DNA, 33 bp, Homo sapien
aatggtcatgtagggacgtagtggaagactgga

SEQ ID NO: 671374 - DNA, 33 bp, Homo sapien
aatggtcatgtagggatgtagtggaagactgga

SEQ ID NO: 671375 - DNA, 33 bp, Homo sapien
atgggaccaccatcaactatgtgattcctcatt

SEQ ID NO: 671376 - DNA, 33 bp, Homo sapien
atgggaccaccatcaattatgtgattcctcatt

SEQ ID NO: 671377 - DNA, 33 bp, Homo sapien
aatcttagatggcaaaggtttccaatataatgc

SEQ ID NO: 671378 - DNA, 33 bp, Homo sapien
aatcttagatggcaaatgtttccaatataatgc

SEQ ID NO: 671379 - DNA, 33 bp, Homo sapien
tctaacaatgcaatgcacctattttaactaaaa

SEQ ID NO: 671380 - DNA, 33 bp, Homo sapien
tctaacaatgcaatgctcctattttaactaaaa

SEQ ID NO: 671381 - DNA, 33 bp, Homo sapien
agcagatggaatatgcactaggtaaacttcctg

SEQ ID NO: 671382 - DNA, 33 bp, Homo sapien
agcagatggaatatgcgctaggtaaacttcctg

SEQ ID NO: 671383 - DNA, 33 bp, Homo sapien
ataaaggcagaatcacactaaaagaacaaattt

SEQ ID NO: 671384 - DNA, 33 bp, Homo sapien
ataaaggcagaatcaccctaaaagaacaaattt

SEQ ID NO: 671385 - DNA, 33 bp, Homo sapien
ctgctgaaaatgcaaaatgttatagccactctg

SEQ ID NO: 671386 - DNA, 33 bp, Homo sapien
ctgctgaaaatgcaaattgttatagccactctg

SEQ ID NO: 671387 - DNA, 33 bp, Homo sapien
ttctaaagaataactacgagcagagaaaaacac

SEQ ID NO: 671388 - DNA, 33 bp, Homo sapien
ttctaaagaataactaggagcagagaaaaacac

SEQ ID NO: 671389 - DNA, 33 bp, Homo sapien
attgagcttacttgaacagaggagctgtccctt

SEQ ID NO: 671390 - DNA, 33 bp, Homo sapien
attgagcttacttgaatagaggagctgtccctt

SEQ ID NO: 671391 - DNA, 33 bp, Homo sapien
attagactcaaatttcaccttcagcattatcac

SEQ ID NO: 671392 - DNA, 33 bp, Homo sapien
attagactcaaatttcgccttcagcattatcac

SEQ ID NO: 671393 - DNA, 33 bp, Homo sapien
gtgagagcctgtattcacaaaaagtaagaggaa

SEQ ID NO: 671394 - DNA, 33 bp, Homo sapien
gtgagagcctgtattcgcaaaaagtaagaggaa

SEQ ID NO: 671395 - DNA, 33 bp, Homo sapien
cagttaagggtaaggcaattatacagggcatgt

SEQ ID NO: 671396 - DNA, 33 bp, Homo sapien
cagttaagggtaaggcgattatacagggcatgt

SEQ ID NO: 671397 - DNA, 33 bp, Homo sapien
gctccttccagctgccaggataatctatcatga

SEQ ID NO: 671398 - DNA, 33 bp, Homo sapien
gctccttccagctgccgggataatctatcatga

SEQ ID NO: 671399 - DNA, 33 bp, Homo sapien
cttttttgtggctgtaaatataagaatcttcta

SEQ ID NO: 671400 - DNA, 33 bp, Homo sapien
cttttttgtggctgtagatataagaatcttcta

SEQ ID NO: 671401 - DNA, 33 bp, Homo sapien
caggaatagatgggtacggcaagtagaaacagg

SEQ ID NO: 671402 - DNA, 33 bp, Homo sapien
caggaatagatgggtatggcaagtagaaacagg

SEQ ID NO: 671403 - DNA, 33 bp, Homo sapien
cgtggattatcaagtacagtccttcgtatggct

SEQ ID NO: 671404 - DNA, 33 bp, Homo sapien
cgtggattatcaagtagagtccttcgtatggct

SEQ ID NO: 671405 - DNA, 33 bp, Homo sapien
gtaccacagaaattcccattcaatatcaagaca

SEQ ID NO: 671406 - DNA, 33 bp, Homo sapien
gtaccacagaaattcctattcaatatcaagaca

SEQ ID NO: 671407 - DNA, 33 bp, Homo sapien
tagggagcaattattaacggaggctgtggtgat

SEQ ID NO: 671408 - DNA, 33 bp, Homo sapien
tagggagcaattattagcggaggctgtggtgat

SEQ ID NO: 671409 - DNA, 33 bp, Homo sapien
caggtagaatgttccacgaatgtatgttaggtc

SEQ ID NO: 671410 - DNA, 33 bp, Homo sapien
caggtagaatgttccatgaatgtatgttaggtc

SEQ ID NO: 671411 - DNA, 33 bp, Homo sapien
agacatcacatgtttacgaatcagaagaattaa

SEQ ID NO: 671412 - DNA, 33 bp, Homo sapien
agacatcacatgtttatgaatcagaagaattaa

SEQ ID NO: 671413 - DNA, 33 bp, Homo sapien
catttgaattgacaggaagaactgcacggagtg

SEQ ID NO: 671414 - DNA, 33 bp, Homo sapien
catttgaattgacagggagaactgcacggagtg

SEQ ID NO: 671415 - DNA, 33 bp, Homo sapien
tctgctagtctctcccacaattcctgcctggct

SEQ ID NO: 671416 - DNA, 33 bp, Homo sapien
tctgctagtctctcccgcaattcctgcctggct

SEQ ID NO: 671417 - DNA, 33 bp, Homo sapien
tatgtagtggatagccaaagatccctcttggtg

SEQ ID NO: 671418 - DNA, 33 bp, Homo sapien
tatgtagtggatagccgaagatccctcttggtg

SEQ ID NO: 671419 - DNA, 33 bp, Homo sapien
tgatggaagtcaaacacctatacaagagaagtt

SEQ ID NO: 671420 - DNA, 33 bp, Homo sapien
tgatggaagtcaaacagctatacaagagaagtt

SEQ ID NO: 671421 - DNA, 33 bp, Homo sapien
agccattctaaacctactacagcaaagtcattt

SEQ ID NO: 671422 - DNA, 33 bp, Homo sapien
agccattctaaacctattacagcaaagtcattt

SEQ ID NO: 671423 - DNA, 33 bp, Homo sapien
agggaacagctttatcaagaaaatagttgcaaa

SEQ ID NO: 671424 - DNA, 33 bp, Homo sapien
agggaacagctttatcgagaaaatagttgcaaa

SEQ ID NO: 671425 - DNA, 33 bp, Homo sapien
tagttgatggagaaacagcatctgaatgccaat

SEQ ID NO: 671426 - DNA, 33 bp, Homo sapien
tagttgatggagaaacggcatctgaatgccaat

SEQ ID NO: 671427 - DNA, 33 bp, Homo sapien
tagcaaacaaacattacagcattgttgcaattt

SEQ ID NO: 671428 - DNA, 33 bp, Homo sapien
tagcaaacaaacattagagcattgttgcaattt

SEQ ID NO: 671429 - DNA, 33 bp, Homo sapien
ttaattccgcttggagaactttgttacatttgc

SEQ ID NO: 671430 - DNA, 33 bp, Homo sapien
ttaattccgcttggaggactttgttacatttgc

SEQ ID NO: 671431 - DNA, 33 bp, Homo sapien
cttggtcacgttatcaatctgtttccttatact

SEQ ID NO: 671432 - DNA, 33 bp, Homo sapien
cttggtcacgttatcactctgtttccttatact

SEQ ID NO: 671433 - DNA, 33 bp, Homo sapien
tcaagttcacatcacaataaactcatcactctc

SEQ ID NO: 671434 - DNA, 33 bp, Homo sapien
tcaagttcacatcacagtaaactcatcactctc

SEQ ID NO: 671435 - DNA, 33 bp, Homo sapien
aacacgaaaggggataaaatggacaatggggtt

SEQ ID NO: 671436 - DNA, 33 bp, Homo sapien
aacacgaaaggggatagaatggacaatggggtt

SEQ ID NO: 671437 - DNA, 33 bp, Homo sapien
cagtacagatgcctacgccttctacactttggt

SEQ ID NO: 671438 - DNA, 33 bp, Homo sapien
cagtacagatgcctactccttctacactttggt

SEQ ID NO: 671439 - DNA, 33 bp, Homo sapien
aggcaagttgtatgtacatcctgagaaaccaaa

SEQ ID NO: 671440 - DNA, 33 bp, Homo sapien
aggcaagttgtatgtatatcctgagaaaccaaa

SEQ ID NO: 671441 - DNA, 33 bp, Homo sapien
agcaagtgttggagaaactcataaaagggtatt

SEQ ID NO: 671442 - DNA, 33 bp, Homo sapien
agcaagtgttggagaatctcataaaagggtatt

SEQ ID NO: 671443 - DNA, 33 bp, Homo sapien
acaaataatcaataaccgtattgtgacacttga

SEQ ID NO: 671444 - DNA, 33 bp, Homo sapien
acaaataatcaataactgtattgtgacacttga

SEQ ID NO: 671445 - DNA, 33 bp, Homo sapien
aatagcaagtatgcctcaggaaaaagaaaagaa

SEQ ID NO: 671446 - DNA, 33 bp, Homo sapien
aatagcaagtatgcctgaggaaaaagaaaagaa

SEQ ID NO: 671447 - DNA, 33 bp, Homo sapien
gaagcattgaaggaaaatagagaatgtaagaaa

SEQ ID NO: 671448 - DNA, 33 bp, Homo sapien
gaagcattgaaggaaagtagagaatgtaagaaa

SEQ ID NO: 671449 - DNA, 33 bp, Homo sapien
atggaaaagaggcacaaaaatgatttgaattta

SEQ ID NO: 671450 - DNA, 33 bp, Homo sapien
atggaaaagaggcacagaaatgatttgaattta

SEQ ID NO: 671451 - DNA, 33 bp, Homo sapien
caaggttatcactgaacgagtcaaatgaaagta

SEQ ID NO: 671452 - DNA, 33 bp, Homo sapien
caaggttatcactgaatgagtcaaatgaaagta

SEQ ID NO: 671453 - DNA, 33 bp, Homo sapien
tcacaggaccaagcacaactcttactgtggtta

SEQ ID NO: 671454 - DNA, 33 bp, Homo sapien
tcacaggaccaagcacgactcttactgtggtta

SEQ ID NO: 671455 - DNA, 33 bp, Homo sapien
tgtgttgctagaaaaaatcatattgccaagaaa

SEQ ID NO: 671456 - DNA, 33 bp, Homo sapien
tgtgttgctagaaaaactcatattgccaagaaa

SEQ ID NO: 671457 - DNA, 33 bp, Homo sapien
tttataatgaagaagtaaaaaagccatgaactc

SEQ ID NO: 671458 - DNA, 33 bp, Homo sapien
tttataatgaagaagtgaaaaagccatgaactc

SEQ ID NO: 671459 - DNA, 33 bp, Homo sapien
cttatgcaatcagtacaaaaccatagatgtaaa

SEQ ID NO: 671460 - DNA, 33 bp, Homo sapien
cttatgcaatcagtacgaaaccatagatgtaaa

SEQ ID NO: 671461 - DNA, 33 bp, Homo sapien
tctttaatgagaggcagcagtcaatgatcagaa

SEQ ID NO: 671462 - DNA, 33 bp, Homo sapien
tctttaatgagaggcatcagtcaatgatcagaa

SEQ ID NO: 671463 - DNA, 33 bp, Homo sapien
acacttaaaatatggaaaagccaacaaaattta

SEQ ID NO: 671464 - DNA, 33 bp, Homo sapien
acacttaaaatatggagaagccaacaaaattta

SEQ ID NO: 671465 - DNA, 33 bp, Homo sapien
agcatatcagcaattaaaactgtataaatggaa

SEQ ID NO: 671466 - DNA, 33 bp, Homo sapien
agcatatcagcaattacaactgtataaatggaa

SEQ ID NO: 671467 - DNA, 33 bp, Homo sapien
gatattttgttggtacacacactgtctcataat

SEQ ID NO: 671468 - DNA, 33 bp, Homo sapien
gatattttgttggtacgcacactgtctcataat

SEQ ID NO: 671469 - DNA, 33 bp, Homo sapien
atttactggatgttaaaaaatagtctgtgtctg

SEQ ID NO: 671470 - DNA, 33 bp, Homo sapien
atttactggatgttaataaatagtctgtgtctg

SEQ ID NO: 671471 - DNA, 33 bp, Homo sapien
ctactcatatagaaaagtcggcatttacctaag

SEQ ID NO: 671472 - DNA, 33 bp, Homo sapien
ctactcatatagaaaattcggcatttacctaag

SEQ ID NO: 671473 - DNA, 33 bp, Homo sapien
tcatttcaagaccttcaaatcaccattgtgagt

SEQ ID NO: 671474 - DNA, 33 bp, Homo sapien
tcatttcaagaccttcgaatcaccattgtgagt

SEQ ID NO: 671475 - DNA, 33 bp, Homo sapien
tgtcagcatttacctacgaaagcatttagcttg

SEQ ID NO: 671476 - DNA, 33 bp, Homo sapien
tgtcagcatttacctatgaaagcatttagcttg

SEQ ID NO: 671477 - DNA, 33 bp, Homo sapien
gtcccttaagccttatcagaaatgcaaatcctc

SEQ ID NO: 671478 - DNA, 33 bp, Homo sapien
gtcccttaagccttattagaaatgcaaatcctc

SEQ ID NO: 671479 - DNA, 33 bp, Homo sapien
aagtgtaaatggtttaacagaaattgtattact

SEQ ID NO: 671480 - DNA, 33 bp, Homo sapien
aagtgtaaatggtttatcagaaattgtattact

SEQ ID NO: 671481 - DNA, 33 bp, Homo sapien
aggcaggtctgaaagcagcaaaaatactttgtt

SEQ ID NO: 671482 - DNA, 33 bp, Homo sapien
aggcaggtctgaaagcggcaaaaatactttgtt

SEQ ID NO: 671483 - DNA, 33 bp, Homo sapien
tttatctcatatgttacagaagttcctaaaagc

SEQ ID NO: 671484 - DNA, 33 bp, Homo sapien
tttatctcatatgttatagaagttcctaaaagc

SEQ ID NO: 671485 - DNA, 33 bp, Homo sapien
actgtataagataccaaaatgaaagctgcagca

SEQ ID NO: 671486 - DNA, 33 bp, Homo sapien
actgtataagataccagaatgaaagctgcagca

SEQ ID NO: 671487 - DNA, 33 bp, Homo sapien
atacctgactgtatgcaactttatgcaagttac

SEQ ID NO: 671488 - DNA, 33 bp, Homo sapien
atacctgactgtatgccactttatgcaagttac

SEQ ID NO: 671489 - DNA, 33 bp, Homo sapien
gcccagccattctttaacattttaatcatagcc

SEQ ID NO: 671490 - DNA, 33 bp, Homo sapien
gcccagccattctttagcattttaatcatagcc

SEQ ID NO: 671491 - DNA, 33 bp, Homo sapien
acagcaatcaaacttcacctttgcagtggcagt

SEQ ID NO: 671492 - DNA, 33 bp, Homo sapien
acagcaatcaaacttcgcctttgcagtggcagt

SEQ ID NO: 671493 - DNA, 33 bp, Homo sapien
aatttcagagtttgcaaggtatgcaggatttaa

SEQ ID NO: 671494 - DNA, 33 bp, Homo sapien
aatttcagagtttgcacggtatgcaggatttaa

SEQ ID NO: 671495 - DNA, 33 bp, Homo sapien
attatattgctttccacagatatgactctaggt

SEQ ID NO: 671496 - DNA, 33 bp, Homo sapien
attatattgctttccatagatatgactctaggt

SEQ ID NO: 671497 - DNA, 33 bp, Homo sapien
ttttaaaccaaccttacacaatttggctgaagg

SEQ ID NO: 671498 - DNA, 33 bp, Homo sapien
ttttaaaccaaccttatacaatttggctgaagg

SEQ ID NO: 671499 - DNA, 33 bp, Homo sapien
aaaattagtcaacaaacgaaatatcacctaagt

SEQ ID NO: 671500 - DNA, 33 bp, Homo sapien
aaaattagtcaacaaatgaaatatcacctaagt

SEQ ID NO: 671501 - DNA, 33 bp, Homo sapien
tttaaggaattcaagcacaaaataaaataaagt

SEQ ID NO: 671502 - DNA, 33 bp, Homo sapien
tttaaggaattcaagcgcaaaataaaataaagt

SEQ ID NO: 671503 - DNA, 33 bp, Homo sapien
gaactaaaatacttgcacggcttaatggttata

SEQ ID NO: 671504 - DNA, 33 bp, Homo sapien
gaactaaaatacttgcgcggcttaatggttata

SEQ ID NO: 671505 - DNA, 33 bp, Homo sapien
taaactcaagtgtgaaactcattctttgctcat

SEQ ID NO: 671506 - DNA, 33 bp, Homo sapien
taaactcaagtgtgaatctcattctttgctcat

SEQ ID NO: 671507 - DNA, 33 bp, Homo sapien
ccgttcatttctacgccgaataatattacaaag

SEQ ID NO: 671508 - DNA, 33 bp, Homo sapien
ccgttcatttctacgctgaataatattacaaag

SEQ ID NO: 671509 - DNA, 33 bp, Homo sapien
tatttggcctatcattaaagcacctctcttacc

SEQ ID NO: 671510 - DNA, 33 bp, Homo sapien
tatttggcctatcattgaagcacctctcttacc

SEQ ID NO: 671511 - DNA, 33 bp, Homo sapien
aaatatagagtattccaacacacagacacaata

SEQ ID NO: 671512 - DNA, 33 bp, Homo sapien
aaatatagagtattccgacacacagacacaata

SEQ ID NO: 671513 - DNA, 33 bp, Homo sapien
agccactgtgctcagcaaaggcatattatttag

SEQ ID NO: 671514 - DNA, 33 bp, Homo sapien
agccactgtgctcagccaaggcatattatttag

SEQ ID NO: 671515 - DNA, 33 bp, Homo sapien
ttgattatagatattaagtaccccaattgtttg

SEQ ID NO: 671516 - DNA, 33 bp, Homo sapien
ttgattatagatattaggtaccccaattgtttg

SEQ ID NO: 671517 - DNA, 33 bp, Homo sapien
aaggtagaagcagaagaatgaaaggatggcctc

SEQ ID NO: 671518 - DNA, 33 bp, Homo sapien
aaggtagaagcagaaggatgaaaggatggcctc

SEQ ID NO: 671519 - DNA, 33 bp, Homo sapien
gagcaagagaaagaacagatagaagggtctgca

SEQ ID NO: 671520 - DNA, 33 bp, Homo sapien
gagcaagagaaagaacggatagaagggtctgca

SEQ ID NO: 671521 - DNA, 33 bp, Homo sapien
cacccactgttcagagccaggtatgcctcattg

SEQ ID NO: 671522 - DNA, 33 bp, Homo sapien
cacccactgttcagagtcaggtatgcctcattg

SEQ ID NO: 671523 - DNA, 33 bp, Homo sapien
cagaggatgtagccaacatagcagaagaatgaa

SEQ ID NO: 671524 - DNA, 33 bp, Homo sapien
cagaggatgtagccaagatagcagaagaatgaa

SEQ ID NO: 671525 - DNA, 33 bp, Homo sapien
ggattgtttcagcctcaaatttaacttctggga

SEQ ID NO: 671526 - DNA, 33 bp, Homo sapien
ggattgtttcagcctctaatttaacttctggga

SEQ ID NO: 671527 - DNA, 33 bp, Homo sapien
aattattgcacatttgcaagcccttgaggctgc

SEQ ID NO: 671528 - DNA, 33 bp, Homo sapien
aattattgcacatttgtaagcccttgaggctgc

SEQ ID NO: 671529 - DNA, 33 bp, Homo sapien
ttgtggctacatcattaaaaaggaaatccctta

SEQ ID NO: 671530 - DNA, 33 bp, Homo sapien
ttgtggctacatcattgaaaaggaaatccctta

SEQ ID NO: 671531 - DNA, 33 bp, Homo sapien
gtgatatatagtgttacctggtaccttagtcca

SEQ ID NO: 671532 - DNA, 33 bp, Homo sapien
gtgatatatagtgttagctggtaccttagtcca

SEQ ID NO: 671533 - DNA, 33 bp, Homo sapien
cattttatcagtggtaggttggttagtgtttaa

SEQ ID NO: 671534 - DNA, 33 bp, Homo sapien
cattttatcagtggtatgttggttagtgtttaa

SEQ ID NO: 671535 - DNA, 33 bp, Homo sapien
ctgcagttcagaaagcgcatcagtgttggagac

SEQ ID NO: 671536 - DNA, 33 bp, Homo sapien
ctgcagttcagaaagctcatcagtgttggagac

SEQ ID NO: 671537 - DNA, 33 bp, Homo sapien
tcatcgagttgctacacattacacattcttctc

SEQ ID NO: 671538 - DNA, 33 bp, Homo sapien
tcatcgagttgctacagattacacattcttctc

SEQ ID NO: 671539 - DNA, 33 bp, Homo sapien
atttccaaagatcatcaacctgaatgcccataa

SEQ ID NO: 671540 - DNA, 33 bp, Homo sapien
atttccaaagatcatctacctgaatgcccataa

SEQ ID NO: 671541 - DNA, 33 bp, Homo sapien
acccttcatcctagcccctcctttctttcactt

SEQ ID NO: 671542 - DNA, 33 bp, Homo sapien
acccttcatcctagcctctcctttctttcactt

SEQ ID NO: 671543 - DNA, 33 bp, Homo sapien
acttaaacttttagcgacaaatttatattggta

SEQ ID NO: 671544 - DNA, 33 bp, Homo sapien
acttaaacttttagcggcaaatttatattggta

SEQ ID NO: 671545 - DNA, 33 bp, Homo sapien
gctcagttgagtcttaaccttagaaaaggaata

SEQ ID NO: 671546 - DNA, 33 bp, Homo sapien
gctcagttgagtcttacccttagaaaaggaata

SEQ ID NO: 671547 - DNA, 33 bp, Homo sapien
catattaaagacccacaacaatggcttccatgt

SEQ ID NO: 671548 - DNA, 33 bp, Homo sapien
catattaaagacccacgacaatggcttccatgt

SEQ ID NO: 671549 - DNA, 33 bp, Homo sapien
cttatttgcaagagataatactgagattttagg

SEQ ID NO: 671550 - DNA, 33 bp, Homo sapien
cttatttgcaagagatcatactgagattttagg

SEQ ID NO: 671551 - DNA, 33 bp, Homo sapien
ctcgaaagtaaatgcaccactttggaagcctaa

SEQ ID NO: 671552 - DNA, 33 bp, Homo sapien
ctcgaaagtaaatgcagcactttggaagcctaa

SEQ ID NO: 671553 - DNA, 33 bp, Homo sapien
ctattttgaaaggtcaatagcttacaattcatt

SEQ ID NO: 671554 - DNA, 33 bp, Homo sapien
ctattttgaaaggtcagtagcttacaattcatt

SEQ ID NO: 671555 - DNA, 33 bp, Homo sapien
cttggccaagtcaaaaaacatctcgtttcactt

SEQ ID NO: 671556 - DNA, 33 bp, Homo sapien
cttggccaagtcaaaacacatctcgtttcactt

SEQ ID NO: 671557 - DNA, 33 bp, Homo sapien
aagtgtatagcatttaccatcaatttcttatgg

SEQ ID NO: 671558 - DNA, 33 bp, Homo sapien
aagtgtatagcatttagcatcaatttcttatgg

SEQ ID NO: 671559 - DNA, 33 bp, Homo sapien
ctctaattttcttataactgaatgaatgtattt

SEQ ID NO: 671560 - DNA, 33 bp, Homo sapien
ctctaattttcttatacctgaatgaatgtattt

SEQ ID NO: 671561 - DNA, 33 bp, Homo sapien
atacttgtttgcctctaagaaacacactttgga

SEQ ID NO: 671562 - DNA, 33 bp, Homo sapien
atacttgtttgcctctgagaaacacactttgga

SEQ ID NO: 671563 - DNA, 33 bp, Homo sapien
tggatttgttttgtaaatgcatctcgtgaaaac

SEQ ID NO: 671564 - DNA, 33 bp, Homo sapien
tggatttgttttgtaagtgcatctcgtgaaaac

SEQ ID NO: 671565 - DNA, 33 bp, Homo sapien
ctctgggacaatctcaagctttatatcccttcc

SEQ ID NO: 671566 - DNA, 33 bp, Homo sapien
ctctgggacaatctcaggctttatatcccttcc

SEQ ID NO: 671567 - DNA, 33 bp, Homo sapien
cctgaaaaagataaaactatggaaacagtaaaa

SEQ ID NO: 671568 - DNA, 33 bp, Homo sapien
cctgaaaaagataaaagtatggaaacagtaaaa

SEQ ID NO: 671569 - DNA, 33 bp, Homo sapien
ttgagaaagcttattgaaagtggatcaaccttg

SEQ ID NO: 671570 - DNA, 33 bp, Homo sapien
ttgagaaagcttattgcaagtggatcaaccttg

SEQ ID NO: 671571 - DNA, 33 bp, Homo sapien
aaaaccttgaactcaaccagacttgcagagacc

SEQ ID NO: 671572 - DNA, 33 bp, Homo sapien
aaaaccttgaactcaagcagacttgcagagacc

SEQ ID NO: 671573 - DNA, 33 bp, Homo sapien
ataattattcagaccaccatgattttcttaata

SEQ ID NO: 671574 - DNA, 33 bp, Homo sapien
ataattattcagaccatcatgattttcttaata

SEQ ID NO: 671575 - DNA, 33 bp, Homo sapien
aatcaatattttgtaaactccagaggtgatgtc

SEQ ID NO: 671576 - DNA, 33 bp, Homo sapien
aatcaatattttgtaacctccagaggtgatgtc

SEQ ID NO: 671577 - DNA, 33 bp, Homo sapien
gttgttattactcaaacttagttgttgattacc

SEQ ID NO: 671578 - DNA, 33 bp, Homo sapien
gttgttattactcaaatttagttgttgattacc

SEQ ID NO: 671579 - DNA, 33 bp, Homo sapien
tcatttccttgctccagtataattccatgtctt

SEQ ID NO: 671580 - DNA, 33 bp, Homo sapien
tcatttccttgctccattataattccatgtctt

SEQ ID NO: 671581 - DNA, 33 bp, Homo sapien
attttatgcaatatggaaaatgcgagggaagac

SEQ ID NO: 671582 - DNA, 33 bp, Homo sapien
attttatgcaatatggcaaatgcgagggaagac

SEQ ID NO: 671583 - DNA, 33 bp, Homo sapien
ccttcagtccactagacgcagttcttttcactc

SEQ ID NO: 671584 - DNA, 33 bp, Homo sapien
ccttcagtccactagatgcagttcttttcactc

SEQ ID NO: 671585 - DNA, 33 bp, Homo sapien
ggttatttggatgttaaaggcacatttgagtgt

SEQ ID NO: 671586 - DNA, 33 bp, Homo sapien
ggttatttggatgttagaggcacatttgagtgt

SEQ ID NO: 671587 - DNA, 33 bp, Homo sapien
tggccaaaatctagaacatttgaccaccataat

SEQ ID NO: 671588 - DNA, 33 bp, Homo sapien
tggccaaaatctagaatatttgaccaccataat

SEQ ID NO: 671589 - DNA, 33 bp, Homo sapien
ggttcactcagtggaacaaaagttatgaaatgt

SEQ ID NO: 671590 - DNA, 33 bp, Homo sapien
ggttcactcagtggaataaaagttatgaaatgt

SEQ ID NO: 671591 - DNA, 33 bp, Homo sapien
gttcacttacagattactaaaaactgactctct

SEQ ID NO: 671592 - DNA, 33 bp, Homo sapien
gttcacttacagattattaaaaactgactctct

SEQ ID NO: 671593 - DNA, 33 bp, Homo sapien
cagtcactgataaatacggaaatgctcctacaa

SEQ ID NO: 671594 - DNA, 33 bp, Homo sapien
cagtcactgataaatatggaaatgctcctacaa

SEQ ID NO: 671595 - DNA, 33 bp, Homo sapien
ttgcccataaatgtgacgttccaatttatgtta

SEQ ID NO: 671596 - DNA, 33 bp, Homo sapien
ttgcccataaatgtgatgttccaatttatgtta

SEQ ID NO: 671597 - DNA, 33 bp, Homo sapien
tagcttccacaggaaacgtaactgaatgttagc

SEQ ID NO: 671598 - DNA, 33 bp, Homo sapien
tagcttccacaggaaatgtaactgaatgttagc

SEQ ID NO: 671599 - DNA, 33 bp, Homo sapien
cgcacctggtctcagacgattttaataatagca

SEQ ID NO: 671600 - DNA, 33 bp, Homo sapien
cgcacctggtctcagatgattttaataatagca

SEQ ID NO: 671601 - DNA, 33 bp, Homo sapien
atgaagggaaaagataccaggattgaaactcat

SEQ ID NO: 671602 - DNA, 33 bp, Homo sapien
atgaagggaaaagatatcaggattgaaactcat

SEQ ID NO: 671603 - DNA, 33 bp, Homo sapien
ttatttttcttcacaacgtctttctacagttta

SEQ ID NO: 671604 - DNA, 33 bp, Homo sapien
ttatttttcttcacaatgtctttctacagttta

SEQ ID NO: 671605 - DNA, 33 bp, Homo sapien
tatacaggaggataacagggttcatgacaagct

SEQ ID NO: 671606 - DNA, 33 bp, Homo sapien
tatacaggaggataacggggttcatgacaagct

SEQ ID NO: 671607 - DNA, 33 bp, Homo sapien
gcaccgtatggtgctacagtttttttgaggcag

SEQ ID NO: 671608 - DNA, 33 bp, Homo sapien
gcaccgtatggtgctatagtttttttgaggcag

SEQ ID NO: 671609 - DNA, 33 bp, Homo sapien
aaacactattacaaacagttgcaccagggatag

SEQ ID NO: 671610 - DNA, 33 bp, Homo sapien
aaacactattacaaacggttgcaccagggatag

SEQ ID NO: 671611 - DNA, 33 bp, Homo sapien
cctctggccaattttacaatccaggactgtctt

SEQ ID NO: 671612 - DNA, 33 bp, Homo sapien
cctctggccaattttataatccaggactgtctt

SEQ ID NO: 671613 - DNA, 33 bp, Homo sapien
tgcaccaaattattaaaacattccttctgcctt

SEQ ID NO: 671614 - DNA, 33 bp, Homo sapien
tgcaccaaattattaagacattccttctgcctt

SEQ ID NO: 671615 - DNA, 33 bp, Homo sapien
aagatgtgcataaaagcctcatctgaggtaaac

SEQ ID NO: 671616 - DNA, 33 bp, Homo sapien
aagatgtgcataaaaggctcatctgaggtaaac

SEQ ID NO: 671617 - DNA, 33 bp, Homo sapien
ggttctttctgcctacagcactgacaagaatca

SEQ ID NO: 671618 - DNA, 33 bp, Homo sapien
ggttctttctgcctactgcactgacaagaatca

SEQ ID NO: 671619 - DNA, 33 bp, Homo sapien
acaattatcttgtgaccggaggaagtataagct

SEQ ID NO: 671620 - DNA, 33 bp, Homo sapien
acaattatcttgtgactggaggaagtataagct

SEQ ID NO: 671621 - DNA, 33 bp, Homo sapien
cagaactactagcttacgagggtaattttagat

SEQ ID NO: 671622 - DNA, 33 bp, Homo sapien
cagaactactagcttatgagggtaattttagat

SEQ ID NO: 671623 - DNA, 33 bp, Homo sapien
cactcctgtatagagcaatatcctctcctatga

SEQ ID NO: 671624 - DNA, 33 bp, Homo sapien
cactcctgtatagagcgatatcctctcctatga

SEQ ID NO: 671625 - DNA, 33 bp, Homo sapien
ttccaccaacagtgtacgaatgatggtattcct

SEQ ID NO: 671626 - DNA, 33 bp, Homo sapien
ttccaccaacagtgtatgaatgatggtattcct

SEQ ID NO: 671627 - DNA, 33 bp, Homo sapien
cctaagtgcctatcaacgaattaatagctggat

SEQ ID NO: 671628 - DNA, 33 bp, Homo sapien
cctaagtgcctatcaatgaattaatagctggat

SEQ ID NO: 671629 - DNA, 33 bp, Homo sapien
agatggaactaggagacattatgtcaagtgaag

SEQ ID NO: 671630 - DNA, 33 bp, Homo sapien
agatggaactaggagatattatgtcaagtgaag

SEQ ID NO: 671631 - DNA, 33 bp, Homo sapien
ctgtttttctaaatccactttgtcttgcagctt

SEQ ID NO: 671632 - DNA, 33 bp, Homo sapien
ctgtttttctaaatccgctttgtcttgcagctt

SEQ ID NO: 671633 - DNA, 33 bp, Homo sapien
atggccaagtcaagcaataacctccagtagaaa

SEQ ID NO: 671634 - DNA, 33 bp, Homo sapien
atggccaagtcaagcactaacctccagtagaaa

SEQ ID NO: 671635 - DNA, 33 bp, Homo sapien
acaaaactacagcttcaatcaatacacagagaa

SEQ ID NO: 671636 - DNA, 33 bp, Homo sapien
acaaaactacagcttcgatcaatacacagagaa

SEQ ID NO: 671637 - DNA, 33 bp, Homo sapien
taccccaacagagcgaagatgtgtttctcagct

SEQ ID NO: 671638 - DNA, 33 bp, Homo sapien
taccccaacagagcgacgatgtgtttctcagct

SEQ ID NO: 671639 - DNA, 33 bp, Homo sapien
attaaatctgctccaaaatcatattgcttagac

SEQ ID NO: 671640 - DNA, 33 bp, Homo sapien
attaaatctgctccaagatcatattgcttagac

SEQ ID NO: 671641 - DNA, 33 bp, Homo sapien
atagtttcttctcacccaaagtaactggaacaa

SEQ ID NO: 671642 - DNA, 33 bp, Homo sapien
atagtttcttctcacctaaagtaactggaacaa

SEQ ID NO: 671643 - DNA, 33 bp, Homo sapien
tcggagagaaggtttaactttgaacattagcca

SEQ ID NO: 671644 - DNA, 33 bp, Homo sapien
tcggagagaaggtttagctttgaacattagcca

SEQ ID NO: 671645 - DNA, 33 bp, Homo sapien
tgtatactaagcctaacatctgtttcatttttc

SEQ ID NO: 671646 - DNA, 33 bp, Homo sapien
tgtatactaagcctaatatctgtttcatttttc

SEQ ID NO: 671647 - DNA, 33 bp, Homo sapien
tccattaagaataagcacctaagttattatcca

SEQ ID NO: 671648 - DNA, 33 bp, Homo sapien
tccattaagaataagcgcctaagttattatcca

SEQ ID NO: 671649 - DNA, 33 bp, Homo sapien
taaactactaagattacggtaattcgtcatgca

SEQ ID NO: 671650 - DNA, 33 bp, Homo sapien
taaactactaagattatggtaattcgtcatgca

SEQ ID NO: 671651 - DNA, 33 bp, Homo sapien
caggctctgcaaaatacctgaagcactgatttt

SEQ ID NO: 671652 - DNA, 33 bp, Homo sapien
caggctctgcaaaatatctgaagcactgatttt

SEQ ID NO: 671653 - DNA, 33 bp, Homo sapien
tgaggttattgtggcagtcttaatccttgatca

SEQ ID NO: 671654 - DNA, 33 bp, Homo sapien
tgaggttattgtggcattcttaatccttgatca

SEQ ID NO: 671655 - DNA, 33 bp, Homo sapien
ttttctgacactgaaaatatgggttcccacaaa

SEQ ID NO: 671656 - DNA, 33 bp, Homo sapien
ttttctgacactgaaagtatgggttcccacaaa

SEQ ID NO: 671657 - DNA, 33 bp, Homo sapien
cagagatttgtggataaggtatgtagttatgaa

SEQ ID NO: 671658 - DNA, 33 bp, Homo sapien
cagagatttgtggatagggtatgtagttatgaa

SEQ ID NO: 671659 - DNA, 33 bp, Homo sapien
tcagtatctcaaaataaaaaggtgacagatgct

SEQ ID NO: 671660 - DNA, 33 bp, Homo sapien
tcagtatctcaaaatagaaaggtgacagatgct

SEQ ID NO: 671661 - DNA, 33 bp, Homo sapien
aggatcctttgagccccagacgtcaaggctgct

SEQ ID NO: 671662 - DNA, 33 bp, Homo sapien
aggatcctttgagcccgagacgtcaaggctgct

SEQ ID NO: 671663 - DNA, 33 bp, Homo sapien
gagtattttgtactgaatagtgagagaaaagcc

SEQ ID NO: 671664 - DNA, 33 bp, Homo sapien
gagtattttgtactgactagtgagagaaaagcc

SEQ ID NO: 671665 - DNA, 33 bp, Homo sapien
acattggtacaacacaatagtatctttagaaat

SEQ ID NO: 671666 - DNA, 33 bp, Homo sapien
acattggtacaacacagtagtatctttagaaat

SEQ ID NO: 671667 - DNA, 33 bp, Homo sapien
tagagcttagagaacaggaggaagattatcact

SEQ ID NO: 671668 - DNA, 33 bp, Homo sapien
tagagcttagagaacatgaggaagattatcact

SEQ ID NO: 671669 - DNA, 33 bp, Homo sapien
acacaggcactgccaacgtttgaacttaaagtt

SEQ ID NO: 671670 - DNA, 33 bp, Homo sapien
acacaggcactgccaatgtttgaacttaaagtt

SEQ ID NO: 671671 - DNA, 33 bp, Homo sapien
aagtacttttctgtaaatctaaatcttctctaa

SEQ ID NO: 671672 - DNA, 33 bp, Homo sapien
aagtacttttctgtaactctaaatcttctctaa

SEQ ID NO: 671673 - DNA, 33 bp, Homo sapien
aaaacaggcaagaccaactaattgtgatagaag

SEQ ID NO: 671674 - DNA, 33 bp, Homo sapien
aaaacaggcaagaccagctaattgtgatagaag

SEQ ID NO: 671675 - DNA, 33 bp, Homo sapien
cattatataatagcaaaactatagaggcagaag

SEQ ID NO: 671676 - DNA, 33 bp, Homo sapien
cattatataatagcaagactatagaggcagaag

SEQ ID NO: 671677 - DNA, 33 bp, Homo sapien
atcacaggcaatcaaaataaaaaatagacaaat

SEQ ID NO: 671678 - DNA, 33 bp, Homo sapien
atcacaggcaatcaaagtaaaaaatagacaaat

SEQ ID NO: 671679 - DNA, 33 bp, Homo sapien
ttttttgccaattggacctacttattttgttat

SEQ ID NO: 671680 - DNA, 33 bp, Homo sapien
ttttttgccaattggatctacttattttgttat

SEQ ID NO: 671681 - DNA, 33 bp, Homo sapien
actacagcatcgatgaaaacatttggtgtggac

SEQ ID NO: 671682 - DNA, 33 bp, Homo sapien
actacagcatcgatgacaacatttggtgtggac

SEQ ID NO: 671683 - DNA, 33 bp, Homo sapien
catttcatcagttaggcagacaaagcttctctt

SEQ ID NO: 671684 - DNA, 33 bp, Homo sapien
catttcatcagttaggtagacaaagcttctctt

SEQ ID NO: 671685 - DNA, 33 bp, Homo sapien
tggacatattgctgaaggagagaaacagaaatc

SEQ ID NO: 671686 - DNA, 33 bp, Homo sapien
tggacatattgctgaatgagagaaacagaaatc

SEQ ID NO: 671687 - DNA, 33 bp, Homo sapien
ttgctgtttccgggaactatacagcaaatatcg

SEQ ID NO: 671688 - DNA, 33 bp, Homo sapien
ttgctgtttccgggaagtatacagcaaatatcg

SEQ ID NO: 671689 - DNA, 33 bp, Homo sapien
agcatctagtttgttcaaatttcttaagtgttg

SEQ ID NO: 671690 - DNA, 33 bp, Homo sapien
agcatctagtttgttctaatttcttaagtgttg

SEQ ID NO: 671691 - DNA, 33 bp, Homo sapien
ttaaggaaaatagagacggtgtggacctaaaaa

SEQ ID NO: 671692 - DNA, 33 bp, Homo sapien
ttaaggaaaatagagatggtgtggacctaaaaa

SEQ ID NO: 671693 - DNA, 33 bp, Homo sapien
atttgtaagtagaataaagggtccgtgggaata

SEQ ID NO: 671694 - DNA, 33 bp, Homo sapien
atttgtaagtagaatacagggtccgtgggaata

SEQ ID NO: 671695 - DNA, 33 bp, Homo sapien
aacatatcttggcaaaagctactttctgatatg

SEQ ID NO: 671696 - DNA, 33 bp, Homo sapien
aacatatcttggcaaatgctactttctgatatg

SEQ ID NO: 671697 - DNA, 33 bp, Homo sapien
tttctgtaatggcccaagcaatctcagtgcaag

SEQ ID NO: 671698 - DNA, 33 bp, Homo sapien
tttctgtaatggcccaggcaatctcagtgcaag

SEQ ID NO: 671699 - DNA, 33 bp, Homo sapien
actggctggaaaaccaagtaataaactgatcct

SEQ ID NO: 671700 - DNA, 33 bp, Homo sapien
actggctggaaaaccatgtaataaactgatcct

SEQ ID NO: 671701 - DNA, 33 bp, Homo sapien
gttacttctttttaaacggcaatgctaactatt

SEQ ID NO: 671702 - DNA, 33 bp, Homo sapien
gttacttctttttaaatggcaatgctaactatt

SEQ ID NO: 671703 - DNA, 33 bp, Homo sapien
gtacttacagatctcaacccgtcttccaagtga

SEQ ID NO: 671704 - DNA, 33 bp, Homo sapien
gtacttacagatctcagcccgtcttccaagtga

SEQ ID NO: 671705 - DNA, 33 bp, Homo sapien
gttctagaagctggaagttagagatcacggtgg

SEQ ID NO: 671706 - DNA, 33 bp, Homo sapien
gttctagaagctggaatttagagatcacggtgg

SEQ ID NO: 671707 - DNA, 33 bp, Homo sapien
attatagaaatacgaacgatttttgtatattga

SEQ ID NO: 671708 - DNA, 33 bp, Homo sapien
attatagaaatacgaatgatttttgtatattga

SEQ ID NO: 671709 - DNA, 33 bp, Homo sapien
cattcaacataaacgcacatgcaagtatatgtt

SEQ ID NO: 671710 - DNA, 33 bp, Homo sapien
cattcaacataaacgcgcatgcaagtatatgtt

SEQ ID NO: 671711 - DNA, 33 bp, Homo sapien
catgcattaaaatttggatcctacaaggcagaa

SEQ ID NO: 671712 - DNA, 33 bp, Homo sapien
catgcattaaaatttgtatcctacaaggcagaa

SEQ ID NO: 671713 - DNA, 33 bp, Homo sapien
aacttaagaaaacagacctatgaggcaggcact

SEQ ID NO: 671714 - DNA, 33 bp, Homo sapien
aacttaagaaaacagatctatgaggcaggcact

SEQ ID NO: 671715 - DNA, 33 bp, Homo sapien
ttaacctgacaacaaaccaagtttagatccatt

SEQ ID NO: 671716 - DNA, 33 bp, Homo sapien
ttaacctgacaacaaatcaagtttagatccatt

SEQ ID NO: 671717 - DNA, 33 bp, Homo sapien
ttttgttcagggtaggaaagatcgtgaggatgg

SEQ ID NO: 671718 - DNA, 33 bp, Homo sapien
ttttgttcagggtagggaagatcgtgaggatgg

SEQ ID NO: 671719 - DNA, 33 bp, Homo sapien
gcctgctctgaaatgcactaagctccattacct

SEQ ID NO: 671720 - DNA, 33 bp, Homo sapien
gcctgctctgaaatgcgctaagctccattacct

SEQ ID NO: 671721 - DNA, 33 bp, Homo sapien
tcagaagtcatactagcattttaatgttatgat

SEQ ID NO: 671722 - DNA, 33 bp, Homo sapien
tcagaagtcatactaggattttaatgttatgat

SEQ ID NO: 671723 - DNA, 33 bp, Homo sapien
tttaacaagactgcaaacacgaagtgcctagta

SEQ ID NO: 671724 - DNA, 33 bp, Homo sapien
tttaacaagactgcaaccacgaagtgcctagta

SEQ ID NO: 671725 - DNA, 33 bp, Homo sapien
agctttcacttgcaacaaatcagtcctgtaata

SEQ ID NO: 671726 - DNA, 33 bp, Homo sapien
agctttcacttgcaacgaatcagtcctgtaata

SEQ ID NO: 671727 - DNA, 33 bp, Homo sapien
taggactggacttacactgacgaatatttaatc

SEQ ID NO: 671728 - DNA, 33 bp, Homo sapien
taggactggacttacattgacgaatatttaatc

SEQ ID NO: 671729 - DNA, 33 bp, Homo sapien
tctgctttagtggtcacggtcttttattcctgc

SEQ ID NO: 671730 - DNA, 33 bp, Homo sapien
tctgctttagtggtcatggtcttttattcctgc

SEQ ID NO: 671731 - DNA, 33 bp, Homo sapien
tgaagttgtcgtctataagagctgctggttctg

SEQ ID NO: 671732 - DNA, 33 bp, Homo sapien
tgaagttgtcgtctattagagctgctggttctg

SEQ ID NO: 671733 - DNA, 33 bp, Homo sapien
ttctaactcatacacaaagatagatattctgaa

SEQ ID NO: 671734 - DNA, 33 bp, Homo sapien
ttctaactcatacacagagatagatattctgaa

SEQ ID NO: 671735 - DNA, 33 bp, Homo sapien
aagctaaataccaaagcataaggcctgaacaac

SEQ ID NO: 671736 - DNA, 33 bp, Homo sapien
aagctaaataccaaaggataaggcctgaacaac

SEQ ID NO: 671737 - DNA, 33 bp, Homo sapien
ccaaaatgctaaagaagctcttgttaactcttc

SEQ ID NO: 671738 - DNA, 33 bp, Homo sapien
ccaaaatgctaaagaatctcttgttaactcttc

SEQ ID NO: 671739 - DNA, 33 bp, Homo sapien
tagtaagagaagcatcacccatctaagcaattg

SEQ ID NO: 671740 - DNA, 33 bp, Homo sapien
tagtaagagaagcatcgcccatctaagcaattg

SEQ ID NO: 671741 - DNA, 33 bp, Homo sapien
cttttctacacaattcaagtgcctctttcagca

SEQ ID NO: 671742 - DNA, 33 bp, Homo sapien
cttttctacacaattccagtgcctctttcagca

SEQ ID NO: 671743 - DNA, 33 bp, Homo sapien
agtgcagattaaggacaataatatcagaaacaa

SEQ ID NO: 671744 - DNA, 33 bp, Homo sapien
agtgcagattaaggaccataatatcagaaacaa

SEQ ID NO: 671745 - DNA, 33 bp, Homo sapien
tacatcattataagcaaaactcataaacacatt

SEQ ID NO: 671746 - DNA, 33 bp, Homo sapien
tacatcattataagcataactcataaacacatt

SEQ ID NO: 671747 - DNA, 33 bp, Homo sapien
ctacagtgctattcaacggagtacttagaccat

SEQ ID NO: 671748 - DNA, 33 bp, Homo sapien
ctacagtgctattcaatggagtacttagaccat

SEQ ID NO: 671749 - DNA, 33 bp, Homo sapien
gttagagtcttgaggtaaagattgtgtatagta

SEQ ID NO: 671750 - DNA, 33 bp, Homo sapien
gttagagtcttgaggtgaagattgtgtatagta

SEQ ID NO: 671751 - DNA, 33 bp, Homo sapien
gtgcctgcctccatgcaagaattcaccacagtg

SEQ ID NO: 671752 - DNA, 33 bp, Homo sapien
gtgcctgcctccatgcgagaattcaccacagtg

SEQ ID NO: 671753 - DNA, 33 bp, Homo sapien
ggcaaaactatataaacgctggaaaacacctag

SEQ ID NO: 671754 - DNA, 33 bp, Homo sapien
ggcaaaactatataaatgctggaaaacacctag

SEQ ID NO: 671755 - DNA, 33 bp, Homo sapien
aacataaaactttgcactaaaggcctatttatc

SEQ ID NO: 671756 - DNA, 33 bp, Homo sapien
aacataaaactttgcagtaaaggcctatttatc

SEQ ID NO: 671757 - DNA, 33 bp, Homo sapien
tgggtgtagaccctaaatgttgcaatatttcat

SEQ ID NO: 671758 - DNA, 33 bp, Homo sapien
tgggtgtagaccctaagtgttgcaatatttcat

SEQ ID NO: 671759 - DNA, 33 bp, Homo sapien
tcaaaaatgtgataaaactaacacaaagcaagg

SEQ ID NO: 671760 - DNA, 33 bp, Homo sapien
tcaaaaatgtgataaagctaacacaaagcaagg

SEQ ID NO: 671761 - DNA, 33 bp, Homo sapien
gtgttttacagctggaagttatcataggaatta

SEQ ID NO: 671762 - DNA, 33 bp, Homo sapien
gtgttttacagctggacgttatcataggaatta

SEQ ID NO: 671763 - DNA, 33 bp, Homo sapien
taggagctttgaactacgtgataatagcataac

SEQ ID NO: 671764 - DNA, 33 bp, Homo sapien
taggagctttgaactatgtgataatagcataac

SEQ ID NO: 671765 - DNA, 33 bp, Homo sapien
ttagagaaatgaaaaacgcgctggaaagtctaa

SEQ ID NO: 671766 - DNA, 33 bp, Homo sapien
ttagagaaatgaaaaatgcgctggaaagtctaa

SEQ ID NO: 671767 - DNA, 33 bp, Homo sapien
ctcctctgactgtccccgaccaaattccacgtc

SEQ ID NO: 671768 - DNA, 33 bp, Homo sapien
ctcctctgactgtccctgaccaaattccacgtc

SEQ ID NO: 671769 - DNA, 33 bp, Homo sapien
acttgaatttgatgctcacaatactcaactttc

SEQ ID NO: 671770 - DNA, 33 bp, Homo sapien
acttgaatttgatgctgacaatactcaactttc

SEQ ID NO: 671771 - DNA, 33 bp, Homo sapien
ttcatcactctatacacggctgctttctatgta

SEQ ID NO: 671772 - DNA, 33 bp, Homo sapien
ttcatcactctatacatggctgctttctatgta

SEQ ID NO: 671773 - DNA, 33 bp, Homo sapien
gatcaggatctgaaacactgctagttctggaaa

SEQ ID NO: 671774 - DNA, 33 bp, Homo sapien
gatcaggatctgaaaccctgctagttctggaaa

SEQ ID NO: 671775 - DNA, 33 bp, Homo sapien
ggagtaaggttgcaaacgaatatcacatatgct

SEQ ID NO: 671776 - DNA, 33 bp, Homo sapien
ggagtaaggttgcaaatgaatatcacatatgct

SEQ ID NO: 671777 - DNA, 33 bp, Homo sapien
tttaaagattgcaaaccactctcatttaacatt

SEQ ID NO: 671778 - DNA, 33 bp, Homo sapien
tttaaagattgcaaactactctcatttaacatt

SEQ ID NO: 671779 - DNA, 33 bp, Homo sapien
atttaaaaagagtaagccctaaaagtctcaact

SEQ ID NO: 671780 - DNA, 33 bp, Homo sapien
atttaaaaagagtaaggcctaaaagtctcaact

SEQ ID NO: 671781 - DNA, 33 bp, Homo sapien
tctttgtgttgtttcagaattgaacacataggg

SEQ ID NO: 671782 - DNA, 33 bp, Homo sapien
tctttgtgttgtttcataattgaacacataggg

SEQ ID NO: 671783 - DNA, 33 bp, Homo sapien
cactcattaattttcaacgcaaacaattaagat

SEQ ID NO: 671784 - DNA, 33 bp, Homo sapien
cactcattaattttcatcgcaaacaattaagat

SEQ ID NO: 671785 - DNA, 33 bp, Homo sapien
tagctaaaggtttaatcagattgctgagtttgt

SEQ ID NO: 671786 - DNA, 33 bp, Homo sapien
tagctaaaggtttaattagattgctgagtttgt

SEQ ID NO: 671787 - DNA, 33 bp, Homo sapien
tttgaccaactaaaacaagccttcctgaagaca

SEQ ID NO: 671788 - DNA, 33 bp, Homo sapien
tttgaccaactaaaacgagccttcctgaagaca

SEQ ID NO: 671789 - DNA, 33 bp, Homo sapien
tctctgtttcatggaaagaggccatgctccatg

SEQ ID NO: 671790 - DNA, 33 bp, Homo sapien
tctctgtttcatggaaggaggccatgctccatg

SEQ ID NO: 671791 - DNA, 33 bp, Homo sapien
agaggaatgttctggggaaatgttcctatgcac

SEQ ID NO: 671792 - DNA, 33 bp, Homo sapien
agaggaatgttctgggtaaatgttcctatgcac

SEQ ID NO: 671793 - DNA, 33 bp, Homo sapien
atattgccagttgccaaggtagaggaaaatagt

SEQ ID NO: 671794 - DNA, 33 bp, Homo sapien
atattgccagttgccagggtagaggaaaatagt

SEQ ID NO: 671795 - DNA, 33 bp, Homo sapien
tttaattacactatgaaatggtttgtgagcaaa

SEQ ID NO: 671796 - DNA, 33 bp, Homo sapien
tttaattacactatgagatggtttgtgagcaaa

SEQ ID NO: 671797 - DNA, 33 bp, Homo sapien
aaccctgaaggtcagaacaccagtacattttgg

SEQ ID NO: 671798 - DNA, 33 bp, Homo sapien
aaccctgaaggtcagagcaccagtacattttgg

SEQ ID NO: 671799 - DNA, 33 bp, Homo sapien
tgaagtccttcttacccgcctgcagactatcac

SEQ ID NO: 671800 - DNA, 33 bp, Homo sapien
tgaagtccttcttaccggcctgcagactatcac

SEQ ID NO: 671801 - DNA, 33 bp, Homo sapien
tttctgagtaactaccaagtcaaaagcatattg

SEQ ID NO: 671802 - DNA, 33 bp, Homo sapien
tttctgagtaactaccgagtcaaaagcatattg

SEQ ID NO: 671803 - DNA, 33 bp, Homo sapien
acttcaatcctgcatacgttattagacaaagca

SEQ ID NO: 671804 - DNA, 33 bp, Homo sapien
acttcaatcctgcatatgttattagacaaagca

SEQ ID NO: 671805 - DNA, 33 bp, Homo sapien
gtgctcaaaacctaaaattctttgctaatgacc

SEQ ID NO: 671806 - DNA, 33 bp, Homo sapien
gtgctcaaaacctaaatttctttgctaatgacc

SEQ ID NO: 671807 - DNA, 33 bp, Homo sapien
catagttgaatcaaaactcttgtaatgcctcat

SEQ ID NO: 671808 - DNA, 33 bp, Homo sapien
catagttgaatcaaaattcttgtaatgcctcat

SEQ ID NO: 671809 - DNA, 33 bp, Homo sapien
atagtagagaataaaactgaatgcttaaatctc

SEQ ID NO: 671810 - DNA, 33 bp, Homo sapien
atagtagagaataaaattgaatgcttaaatctc

SEQ ID NO: 671811 - DNA, 33 bp, Homo sapien
cagtttaaacagttacaaaaattgtgtagcata

SEQ ID NO: 671812 - DNA, 33 bp, Homo sapien
cagtttaaacagttacgaaaattgtgtagcata

SEQ ID NO: 671813 - DNA, 33 bp, Homo sapien
tattcttcagcagagagagttttaaaagcagtg

SEQ ID NO: 671814 - DNA, 33 bp, Homo sapien
tattcttcagcagagatagttttaaaagcagtg

SEQ ID NO: 671815 - DNA, 33 bp, Homo sapien
ttcaggagttgaagaaatcaaaggaggatgtgg

SEQ ID NO: 671816 - DNA, 33 bp, Homo sapien
ttcaggagttgaagaagtcaaaggaggatgtgg

SEQ ID NO: 671817 - DNA, 33 bp, Homo sapien
ggagaggagaaccacactgggcagctccttcct

SEQ ID NO: 671818 - DNA, 33 bp, Homo sapien
ggagaggagaaccacattgggcagctccttcct

SEQ ID NO: 671819 - DNA, 33 bp, Homo sapien
ggtgggcccatataaggcaccataaattatcac

SEQ ID NO: 671820 - DNA, 33 bp, Homo sapien
ggtgggcccatataagtcaccataaattatcac

SEQ ID NO: 671821 - DNA, 33 bp, Homo sapien
ggaatgtaaatcagaacaatgtaatgtggtatc

SEQ ID NO: 671822 - DNA, 33 bp, Homo sapien
ggaatgtaaatcagaagaatgtaatgtggtatc

SEQ ID NO: 671823 - DNA, 33 bp, Homo sapien
ccgttccagttaagcccaaccagacccacaact

SEQ ID NO: 671824 - DNA, 33 bp, Homo sapien
ccgttccagttaagcctaaccagacccacaact

SEQ ID NO: 671825 - DNA, 33 bp, Homo sapien
gaaagcatattccacaagtttatcgccttgatt

SEQ ID NO: 671826 - DNA, 33 bp, Homo sapien
gaaagcatattccacaggtttatcgccttgatt

SEQ ID NO: 671827 - DNA, 33 bp, Homo sapien
gtctcttaattttgcaataatgtttttatcaat

SEQ ID NO: 671828 - DNA, 33 bp, Homo sapien
gtctcttaattttgcagtaatgtttttatcaat

SEQ ID NO: 671829 - DNA, 33 bp, Homo sapien
gaagagcctagaaaacagaaagaaagccattat

SEQ ID NO: 671830 - DNA, 33 bp, Homo sapien
gaagagcctagaaaactgaaagaaagccattat

SEQ ID NO: 671831 - DNA, 33 bp, Homo sapien
aagctggagactgctcacggcacacccagtcca

SEQ ID NO: 671832 - DNA, 33 bp, Homo sapien
aagctggagactgctcgcggcacacccagtcca

SEQ ID NO: 671833 - DNA, 33 bp, Homo sapien
agaagaataaaacgacacctatctctcactata

SEQ ID NO: 671834 - DNA, 33 bp, Homo sapien
agaagaataaaacgactcctatctctcactata

SEQ ID NO: 671835 - DNA, 33 bp, Homo sapien
caccaaggactgtgcaccacaatgtagagttat

SEQ ID NO: 671836 - DNA, 33 bp, Homo sapien
caccaaggactgtgcatcacaatgtagagttat

SEQ ID NO: 671837 - DNA, 33 bp, Homo sapien
agaattctaatatgtaagcaaaagaaaccaatg

SEQ ID NO: 671838 - DNA, 33 bp, Homo sapien
agaattctaatatgtaggcaaaagaaaccaatg

SEQ ID NO: 671839 - DNA, 33 bp, Homo sapien
aggtaaactgcacatcaagttaaatgcataaat

SEQ ID NO: 671840 - DNA, 33 bp, Homo sapien
aggtaaactgcacatccagttaaatgcataaat

SEQ ID NO: 671841 - DNA, 33 bp, Homo sapien
gtttacctcaaaaacaacaatgacaaaatcact

SEQ ID NO: 671842 - DNA, 33 bp, Homo sapien
gtttacctcaaaaacagcaatgacaaaatcact

SEQ ID NO: 671843 - DNA, 33 bp, Homo sapien
tctgaacatgcctctaaggaacgatttatttta

SEQ ID NO: 671844 - DNA, 33 bp, Homo sapien
tctgaacatgcctctagggaacgatttatttta

SEQ ID NO: 671845 - DNA, 33 bp, Homo sapien
tgttggacagctgagacaggtcacttctctgag

SEQ ID NO: 671846 - DNA, 33 bp, Homo sapien
tgttggacagctgagataggtcacttctctgag

SEQ ID NO: 671847 - DNA, 33 bp, Homo sapien
ataataatgcaacaagaagtgacataaatcagc

SEQ ID NO: 671848 - DNA, 33 bp, Homo sapien
ataataatgcaacaagcagtgacataaatcagc

SEQ ID NO: 671849 - DNA, 33 bp, Homo sapien
cttcaaaacaatttgagggttgtatattcatgt

SEQ ID NO: 671850 - DNA, 33 bp, Homo sapien
cttcaaaacaatttgatggttgtatattcatgt

SEQ ID NO: 671851 - DNA, 33 bp, Homo sapien
tattcttttacagtccaaaggtatcaccaagat

SEQ ID NO: 671852 - DNA, 33 bp, Homo sapien
tattcttttacagtccgaaggtatcaccaagat

SEQ ID NO: 671853 - DNA, 33 bp, Homo sapien
acaagtcctagtcataagaaaagatcctgtgaa

SEQ ID NO: 671854 - DNA, 33 bp, Homo sapien
acaagtcctagtcataggaaaagatcctgtgaa

SEQ ID NO: 671855 - DNA, 33 bp, Homo sapien
tcaaaaggagacttaaatgattgagaaaaacat

SEQ ID NO: 671856 - DNA, 33 bp, Homo sapien
tcaaaaggagacttaagtgattgagaaaaacat

SEQ ID NO: 671857 - DNA, 33 bp, Homo sapien
aaacatagtggaatccagaaagaatgacacctg

SEQ ID NO: 671858 - DNA, 33 bp, Homo sapien
aaacatagtggaatccggaaagaatgacacctg

SEQ ID NO: 671859 - DNA, 33 bp, Homo sapien
attcccttctctttacactgtgaggcattaaac

SEQ ID NO: 671860 - DNA, 33 bp, Homo sapien
attcccttctctttaccctgtgaggcattaaac

SEQ ID NO: 671861 - DNA, 33 bp, Homo sapien
cacaaagaagtgaactcaaaaagttatgccaat

SEQ ID NO: 671862 - DNA, 33 bp, Homo sapien
cacaaagaagtgaactgaaaaagttatgccaat

SEQ ID NO: 671863 - DNA, 33 bp, Homo sapien
tatggacttaggatatcagtgttgtcacattaa

SEQ ID NO: 671864 - DNA, 33 bp, Homo sapien
tatggacttaggatattagtgttgtcacattaa

SEQ ID NO: 671865 - DNA, 33 bp, Homo sapien
tagcataaggtagaataagagcaaggaatgaat

SEQ ID NO: 671866 - DNA, 33 bp, Homo sapien
tagcataaggtagaatcagagcaaggaatgaat

SEQ ID NO: 671867 - DNA, 33 bp, Homo sapien
cttagatcggctcatactactccaaaatttcta

SEQ ID NO: 671868 - DNA, 33 bp, Homo sapien
cttagatcggctcatagtactccaaaatttcta

SEQ ID NO: 671869 - DNA, 33 bp, Homo sapien
cttatggagtattgccaatctaagaagctcacc

SEQ ID NO: 671870 - DNA, 33 bp, Homo sapien
cttatggagtattgcccatctaagaagctcacc

SEQ ID NO: 671871 - DNA, 33 bp, Homo sapien
tcaatttctgccactacgtctctagttcaagca

SEQ ID NO: 671872 - DNA, 33 bp, Homo sapien
tcaatttctgccactatgtctctagttcaagca

SEQ ID NO: 671873 - DNA, 33 bp, Homo sapien
acagtatatttagatacaagaaatcatccttag

SEQ ID NO: 671874 - DNA, 33 bp, Homo sapien
acagtatatttagatagaagaaatcatccttag

SEQ ID NO: 671875 - DNA, 33 bp, Homo sapien
cttttgccaagtgacagcttcctctatacaatc

SEQ ID NO: 671876 - DNA, 33 bp, Homo sapien
cttttgccaagtgacatcttcctctatacaatc

SEQ ID NO: 671877 - DNA, 33 bp, Homo sapien
tcatacatgatgagaaaccacaattttctggtc

SEQ ID NO: 671878 - DNA, 33 bp, Homo sapien
tcatacatgatgagaagccacaattttctggtc

SEQ ID NO: 671879 - DNA, 33 bp, Homo sapien
gtattacctctccatacatagcaactatccaaa

SEQ ID NO: 671880 - DNA, 33 bp, Homo sapien
gtattacctctccatatatagcaactatccaaa

SEQ ID NO: 671881 - DNA, 33 bp, Homo sapien
ggaacagaaaatcaaactgcatggtctcactta

SEQ ID NO: 671882 - DNA, 33 bp, Homo sapien
ggaacagaaaatcaaattgcatggtctcactta

SEQ ID NO: 671883 - DNA, 33 bp, Homo sapien
taaacatatgtcctgccatttaaagtgacttcc

SEQ ID NO: 671884 - DNA, 33 bp, Homo sapien
taaacatatgtcctgctatttaaagtgacttcc

SEQ ID NO: 671885 - DNA, 33 bp, Homo sapien
caaccacatttgattaaactaggattgagcaac

SEQ ID NO: 671886 - DNA, 33 bp, Homo sapien
caaccacatttgattatactaggattgagcaac

SEQ ID NO: 671887 - DNA, 33 bp, Homo sapien
cagccctcagggtatcaatttgccacctacaat

SEQ ID NO: 671888 - DNA, 33 bp, Homo sapien
cagccctcagggtatcgatttgccacctacaat

SEQ ID NO: 671889 - DNA, 33 bp, Homo sapien
aacattttcttttgtgaagtctggtattttagt

SEQ ID NO: 671890 - DNA, 33 bp, Homo sapien
aacattttcttttgtggagtctggtattttagt

SEQ ID NO: 671891 - DNA, 33 bp, Homo sapien
ccagatttaacgggtcacaagctcttgtccagt

SEQ ID NO: 671892 - DNA, 33 bp, Homo sapien
ccagatttaacgggtcccaagctcttgtccagt

SEQ ID NO: 671893 - DNA, 33 bp, Homo sapien
acatctgtcagtctaaactaaaactgatcattg

SEQ ID NO: 671894 - DNA, 33 bp, Homo sapien
acatctgtcagtctaagctaaaactgatcattg

SEQ ID NO: 671895 - DNA, 33 bp, Homo sapien
atattgttagcaactcaaagtcagaattgagag

SEQ ID NO: 671896 - DNA, 33 bp, Homo sapien
atattgttagcaactcgaagtcagaattgagag

SEQ ID NO: 671897 - DNA, 33 bp, Homo sapien
atcaagaggacattacaaaaaatatgtggtctt

SEQ ID NO: 671898 - DNA, 33 bp, Homo sapien
atcaagaggacattaccaaaaatatgtggtctt

SEQ ID NO: 671899 - DNA, 33 bp, Homo sapien
aaaaatctccagtgaaatcattccttctcatta

SEQ ID NO: 671900 - DNA, 33 bp, Homo sapien
aaaaatctccagtgaagtcattccttctcatta

SEQ ID NO: 671901 - DNA, 33 bp, Homo sapien
tgactttgcattctacaagcatttgcaaatctt

SEQ ID NO: 671902 - DNA, 33 bp, Homo sapien
tgactttgcattctactagcatttgcaaatctt

SEQ ID NO: 671903 - DNA, 33 bp, Homo sapien
gtaatcagaaaggtccaagtgaaagtcacatta

SEQ ID NO: 671904 - DNA, 33 bp, Homo sapien
gtaatcagaaaggtccgagtgaaagtcacatta

SEQ ID NO: 671905 - DNA, 33 bp, Homo sapien
taatgttcagtatctccagaaaaaaatactgtc

SEQ ID NO: 671906 - DNA, 33 bp, Homo sapien
taatgttcagtatctctagaaaaaaatactgtc

SEQ ID NO: 671907 - DNA, 33 bp, Homo sapien
ccattacttgattaggccatccatacagattga

SEQ ID NO: 671908 - DNA, 33 bp, Homo sapien
ccattacttgattaggtcatccatacagattga

SEQ ID NO: 671909 - DNA, 33 bp, Homo sapien
aaccatagtcattataaactggcataaaatgta

SEQ ID NO: 671910 - DNA, 33 bp, Homo sapien
aaccatagtcattatacactggcataaaatgta

SEQ ID NO: 671911 - DNA, 33 bp, Homo sapien
ctttaaaatttctgtacgctgatccatccattc

SEQ ID NO: 671912 - DNA, 33 bp, Homo sapien
ctttaaaatttctgtatgctgatccatccattc

SEQ ID NO: 671913 - DNA, 33 bp, Homo sapien
aaattaagagtgcaggaatgagtgacattcaca

SEQ ID NO: 671914 - DNA, 33 bp, Homo sapien
aaattaagagtgcagggatgagtgacattcaca

SEQ ID NO: 671915 - DNA, 33 bp, Homo sapien
ctgtcataaaactctcactgataagacttagcc

SEQ ID NO: 671916 - DNA, 33 bp, Homo sapien
ctgtcataaaactctccctgataagacttagcc

SEQ ID NO: 671917 - DNA, 33 bp, Homo sapien
tgattattcacagcaaacttcatgtaaatggta

SEQ ID NO: 671918 - DNA, 33 bp, Homo sapien
tgattattcacagcaagcttcatgtaaatggta

SEQ ID NO: 671919 - DNA, 33 bp, Homo sapien
gactggttagcaatttcaaatgctttgctgaat

SEQ ID NO: 671920 - DNA, 33 bp, Homo sapien
gactggttagcaatttgaaatgctttgctgaat

SEQ ID NO: 671921 - DNA, 33 bp, Homo sapien
ttagaactaaaatctaagctcttttcattgtat

SEQ ID NO: 671922 - DNA, 33 bp, Homo sapien
ttagaactaaaatctatgctcttttcattgtat

SEQ ID NO: 671923 - DNA, 33 bp, Homo sapien
tggtctcatccatccagagatgtcattgtgcag

SEQ ID NO: 671924 - DNA, 33 bp, Homo sapien
tggtctcatccatccatagatgtcattgtgcag

SEQ ID NO: 671925 - DNA, 33 bp, Homo sapien
ctttcgtatacctggaacaaacactttacagaa

SEQ ID NO: 671926 - DNA, 33 bp, Homo sapien
ctttcgtatacctggagcaaacactttacagaa

SEQ ID NO: 671927 - DNA, 33 bp, Homo sapien
gagatctttaattttccctgttagctgtattcc

SEQ ID NO: 671928 - DNA, 33 bp, Homo sapien
gagatctttaattttctctgttagctgtattcc

SEQ ID NO: 671929 - DNA, 33 bp, Homo sapien
cttactctatctgtccaacagttgaaagcaaat

SEQ ID NO: 671930 - DNA, 33 bp, Homo sapien
cttactctatctgtccgacagttgaaagcaaat

SEQ ID NO: 671931 - DNA, 33 bp, Homo sapien
aagaactttgtttataaaaccatgtcctctact

SEQ ID NO: 671932 - DNA, 33 bp, Homo sapien
aagaactttgtttatagaaccatgtcctctact

SEQ ID NO: 671933 - DNA, 33 bp, Homo sapien
agatacggaaaattcaatctaggaaaaacaagc

SEQ ID NO: 671934 - DNA, 33 bp, Homo sapien
agatacggaaaattcagtctaggaaaaacaagc

SEQ ID NO: 671935 - DNA, 33 bp, Homo sapien
cctcctgacaagtacacgtccctatatcattga

SEQ ID NO: 671936 - DNA, 33 bp, Homo sapien
cctcctgacaagtacaggtccctatatcattga

SEQ ID NO: 671937 - DNA, 33 bp, Homo sapien
agggcagtagattaaacattgaggttcttgtga

SEQ ID NO: 671938 - DNA, 33 bp, Homo sapien
agggcagtagattaaatattgaggttcttgtga

SEQ ID NO: 671939 - DNA, 33 bp, Homo sapien
cccacatccctgattacgccaggaaaaaagctt

SEQ ID NO: 671940 - DNA, 33 bp, Homo sapien
cccacatccctgattatgccaggaaaaaagctt

SEQ ID NO: 671941 - DNA, 33 bp, Homo sapien
ttgagggctaagaccagattgagcaccacaagg

SEQ ID NO: 671942 - DNA, 33 bp, Homo sapien
ttgagggctaagaccatattgagcaccacaagg

SEQ ID NO: 671943 - DNA, 33 bp, Homo sapien
agcaactgggagtgaactagagcagcttcaaaa

SEQ ID NO: 671944 - DNA, 33 bp, Homo sapien
agcaactgggagtgaattagagcagcttcaaaa

SEQ ID NO: 671945 - DNA, 33 bp, Homo sapien
cataggcactcaatacaagcatgtgagagaagc

SEQ ID NO: 671946 - DNA, 33 bp, Homo sapien
cataggcactcaatacgagcatgtgagagaagc

SEQ ID NO: 671947 - DNA, 33 bp, Homo sapien
ttcttgattctcctaaactcttcctatgcttgt

SEQ ID NO: 671948 - DNA, 33 bp, Homo sapien
ttcttgattctcctaatctcttcctatgcttgt

SEQ ID NO: 671949 - DNA, 33 bp, Homo sapien
attgtacctgttgatacgtatttgatttagtat

SEQ ID NO: 671950 - DNA, 33 bp, Homo sapien
attgtacctgttgatatgtatttgatttagtat

SEQ ID NO: 671951 - DNA, 33 bp, Homo sapien
cccaaacccaggctacacagctctcagtttcca

SEQ ID NO: 671952 - DNA, 33 bp, Homo sapien
cccaaacccaggctacgcagctctcagtttcca

SEQ ID NO: 671953 - DNA, 33 bp, Homo sapien
aggctaaagggtgaaaacacttcagattgagtg

SEQ ID NO: 671954 - DNA, 33 bp, Homo sapien
aggctaaagggtgaaaccacttcagattgagtg

SEQ ID NO: 671955 - DNA, 33 bp, Homo sapien
tgccatgtgtagtgaaatgttatatcgatttag

SEQ ID NO: 671956 - DNA, 33 bp, Homo sapien
tgccatgtgtagtgaagtgttatatcgatttag

SEQ ID NO: 671957 - DNA, 33 bp, Homo sapien
ttgattctagccattgcagtgtgtgtaaagtga

SEQ ID NO: 671958 - DNA, 33 bp, Homo sapien
ttgattctagccattgtagtgtgtgtaaagtga

SEQ ID NO: 671959 - DNA, 33 bp, Homo sapien
caaaggagttgggtggaaacaacactttaatga

SEQ ID NO: 671960 - DNA, 33 bp, Homo sapien
caaaggagttgggtgggaacaacactttaatga

SEQ ID NO: 671961 - DNA, 33 bp, Homo sapien
taatctctggaggtagaaaccattgcttcttcg

SEQ ID NO: 671962 - DNA, 33 bp, Homo sapien
taatctctggaggtagcaaccattgcttcttcg

SEQ ID NO: 671963 - DNA, 33 bp, Homo sapien
agagccccacataaaagggataaacctcaggaa

SEQ ID NO: 671964 - DNA, 33 bp, Homo sapien
agagccccacataaaatggataaacctcaggaa

SEQ ID NO: 671965 - DNA, 33 bp, Homo sapien
gctagaatagcagggaaaaccatcagacatcca

SEQ ID NO: 671966 - DNA, 33 bp, Homo sapien
gctagaatagcagggagaaccatcagacatcca

SEQ ID NO: 671967 - DNA, 33 bp, Homo sapien
ttttccagagttacgaacaacgcgctatgagag

SEQ ID NO: 671968 - DNA, 33 bp, Homo sapien
ttttccagagttacgagcaacgcgctatgagag

SEQ ID NO: 671969 - DNA, 33 bp, Homo sapien
caaggattatttatggacaaattaaagatatca

SEQ ID NO: 671970 - DNA, 33 bp, Homo sapien
caaggattatttatgggcaaattaaagatatca

SEQ ID NO: 671971 - DNA, 33 bp, Homo sapien
ttgcagctttacaaaagaagtcaccatgccatg

SEQ ID NO: 671972 - DNA, 33 bp, Homo sapien
ttgcagctttacaaaataagtcaccatgccatg

SEQ ID NO: 671973 - DNA, 33 bp, Homo sapien
tagactaatagacaccagagtccccaaaaggta

SEQ ID NO: 671974 - DNA, 33 bp, Homo sapien
tagactaatagacaccggagtccccaaaaggta

SEQ ID NO: 671975 - DNA, 33 bp, Homo sapien
gttaccttactttacacagtggcttctagttct

SEQ ID NO: 671976 - DNA, 33 bp, Homo sapien
gttaccttactttacatagtggcttctagttct

SEQ ID NO: 671977 - DNA, 33 bp, Homo sapien
tagttatggccatttgcatgatgtaagagtagc

SEQ ID NO: 671978 - DNA, 33 bp, Homo sapien
tagttatggccatttgtatgatgtaagagtagc

SEQ ID NO: 671979 - DNA, 33 bp, Homo sapien
atgacattggggttacaaacagcattcatatag

SEQ ID NO: 671980 - DNA, 33 bp, Homo sapien
atgacattggggttacgaacagcattcatatag

SEQ ID NO: 671981 - DNA, 33 bp, Homo sapien
tcaggtatcaggcatacaacagcagctcataac

SEQ ID NO: 671982 - DNA, 33 bp, Homo sapien
tcaggtatcaggcatagaacagcagctcataac

SEQ ID NO: 671983 - DNA, 33 bp, Homo sapien
ctgagcctggcaattacggcaaattagcagctg

SEQ ID NO: 671984 - DNA, 33 bp, Homo sapien
ctgagcctggcaattatggcaaattagcagctg

SEQ ID NO: 671985 - DNA, 33 bp, Homo sapien
ccactttgagttcatacattccagatggtactg

SEQ ID NO: 671986 - DNA, 33 bp, Homo sapien
ccactttgagttcatatattccagatggtactg

SEQ ID NO: 671987 - DNA, 33 bp, Homo sapien
gcccatcatccaatacactagtacacagctaat

SEQ ID NO: 671988 - DNA, 33 bp, Homo sapien
gcccatcatccaataccctagtacacagctaat

SEQ ID NO: 671989 - DNA, 33 bp, Homo sapien
tacaatctaacaaatacagcacaaaaggtaaga

SEQ ID NO: 671990 - DNA, 33 bp, Homo sapien
tacaatctaacaaatatagcacaaaaggtaaga

SEQ ID NO: 671991 - DNA, 33 bp, Homo sapien
ttgaaacttggcaaaagtattctgacatcattt

SEQ ID NO: 671992 - DNA, 33 bp, Homo sapien
ttgaaacttggcaaaattattctgacatcattt

SEQ ID NO: 671993 - DNA, 33 bp, Homo sapien
gctgtcatgagaagtgcatatttaaaaataaat

SEQ ID NO: 671994 - DNA, 33 bp, Homo sapien
gctgtcatgagaagtggatatttaaaaataaat

SEQ ID NO: 671995 - DNA, 33 bp, Homo sapien
tttctgttatacggacccaaataattcctaggt

SEQ ID NO: 671996 - DNA, 33 bp, Homo sapien
tttctgttatacggacgcaaataattcctaggt

SEQ ID NO: 671997 - DNA, 33 bp, Homo sapien
ttattttccttacttaaaaacaatctggaagtg

SEQ ID NO: 671998 - DNA, 33 bp, Homo sapien
ttattttccttacttagaaacaatctggaagtg

SEQ ID NO: 671999 - DNA, 33 bp, Homo sapien
attatgaataatatgtaaaactgcaatataaga

SEQ ID NO: 672000 - DNA, 33 bp, Homo sapien
attatgaataatatgtgaaactgcaatataaga

SEQ ID NO: 672001 - DNA, 33 bp, Homo sapien
ctgcaaaacttaatcaaaatacacatggccccc

SEQ ID NO: 672002 - DNA, 33 bp, Homo sapien
ctgcaaaacttaatcagaatacacatggccccc

SEQ ID NO: 672003 - DNA, 33 bp, Homo sapien
accgaaccagcattgaactccatttttccagta

SEQ ID NO: 672004 - DNA, 33 bp, Homo sapien
accgaaccagcattgagctccatttttccagta

SEQ ID NO: 672005 - DNA, 33 bp, Homo sapien
aaaccctacatatgaaacacagtaacattatta

SEQ ID NO: 672006 - DNA, 33 bp, Homo sapien
aaaccctacatatgaagcacagtaacattatta

SEQ ID NO: 672007 - DNA, 33 bp, Homo sapien
tagtagaaacccctgaaagccagttcaatttgc

SEQ ID NO: 672008 - DNA, 33 bp, Homo sapien
tagtagaaacccctgagagccagttcaatttgc

SEQ ID NO: 672009 - DNA, 33 bp, Homo sapien
aatgccagagctgaaacgtaacaatgtggaaag

SEQ ID NO: 672010 - DNA, 33 bp, Homo sapien
aatgccagagctgaaatgtaacaatgtggaaag

SEQ ID NO: 672011 - DNA, 33 bp, Homo sapien
gcttctgtgtaagcaaatctgtataactacaag

SEQ ID NO: 672012 - DNA, 33 bp, Homo sapien
gcttctgtgtaagcaagtctgtataactacaag

SEQ ID NO: 672013 - DNA, 33 bp, Homo sapien
aaagaagaattacaacaaacttcaaaattgtaa

SEQ ID NO: 672014 - DNA, 33 bp, Homo sapien
aaagaagaattacaacgaacttcaaaattgtaa

SEQ ID NO: 672015 - DNA, 33 bp, Homo sapien
acttactgatacttctaaaaatacatggtgtat

SEQ ID NO: 672016 - DNA, 33 bp, Homo sapien
acttactgatacttctgaaaatacatggtgtat

SEQ ID NO: 672017 - DNA, 33 bp, Homo sapien
acaaaaacaaaaattgacaaacgagatttaatt

SEQ ID NO: 672018 - DNA, 33 bp, Homo sapien
acaaaaacaaaaattggcaaacgagatttaatt

SEQ ID NO: 672019 - DNA, 33 bp, Homo sapien
ggttcaacctgctagacagaagacaacaaatga

SEQ ID NO: 672020 - DNA, 33 bp, Homo sapien
ggttcaacctgctagagagaagacaacaaatga

SEQ ID NO: 672021 - DNA, 33 bp, Homo sapien
gtaccacagaaacaaacttaatccatgttgtag

SEQ ID NO: 672022 - DNA, 33 bp, Homo sapien
gtaccacagaaacaaatttaatccatgttgtag

SEQ ID NO: 672023 - DNA, 33 bp, Homo sapien
tcgtttggttaaattccaattctcctgaagcct

SEQ ID NO: 672024 - DNA, 33 bp, Homo sapien
tcgtttggttaaattctaattctcctgaagcct

SEQ ID NO: 672025 - DNA, 33 bp, Homo sapien
ttttggactattgttacattctggaaccaatat

SEQ ID NO: 672026 - DNA, 33 bp, Homo sapien
ttttggactattgttatattctggaaccaatat

SEQ ID NO: 672027 - DNA, 33 bp, Homo sapien
agtagccatcttctcacaattccaataggcagt

SEQ ID NO: 672028 - DNA, 33 bp, Homo sapien
agtagccatcttctcataattccaataggcagt

SEQ ID NO: 672029 - DNA, 33 bp, Homo sapien
tctttgcatctccagaatccagcataatttctg

SEQ ID NO: 672030 - DNA, 33 bp, Homo sapien
tctttgcatctccagagtccagcataatttctg

SEQ ID NO: 672031 - DNA, 33 bp, Homo sapien
agacacttcactgttacacaacaatatattttc

SEQ ID NO: 672032 - DNA, 33 bp, Homo sapien
agacacttcactgttatacaacaatatattttc

SEQ ID NO: 672033 - DNA, 33 bp, Homo sapien
tgagcttgggatctagaccagagcagaaggcag

SEQ ID NO: 672034 - DNA, 33 bp, Homo sapien
tgagcttgggatctaggccagagcagaaggcag

SEQ ID NO: 672035 - DNA, 33 bp, Homo sapien
aatggggttatgctgacgaccaaatggtgaaaa

SEQ ID NO: 672036 - DNA, 33 bp, Homo sapien
aatggggttatgctgatgaccaaatggtgaaaa

SEQ ID NO: 672037 - DNA, 33 bp, Homo sapien
catttataacatttcacgagagcccagaaacaa

SEQ ID NO: 672038 - DNA, 33 bp, Homo sapien
catttataacatttcatgagagcccagaaacaa

SEQ ID NO: 672039 - DNA, 33 bp, Homo sapien
aggaaacagggatccaactgagttaataaaggg

SEQ ID NO: 672040 - DNA, 33 bp, Homo sapien
aggaaacagggatccagctgagttaataaaggg

SEQ ID NO: 672041 - DNA, 33 bp, Homo sapien
aacacccactcacatacgctcaaaaacacacat

SEQ ID NO: 672042 - DNA, 33 bp, Homo sapien
aacacccactcacatatgctcaaaaacacacat

SEQ ID NO: 672043 - DNA, 33 bp, Homo sapien
ataactaatttatgtgacaaaaagctattctac

SEQ ID NO: 672044 - DNA, 33 bp, Homo sapien
ataactaatttatgtgtcaaaaagctattctac

SEQ ID NO: 672045 - DNA, 33 bp, Homo sapien
gcttgatcaaaatcagaaaacagtgttgaagca

SEQ ID NO: 672046 - DNA, 33 bp, Homo sapien
gcttgatcaaaatcaggaaacagtgttgaagca

SEQ ID NO: 672047 - DNA, 33 bp, Homo sapien
tagttggttcgatgaaagagtaagtattcaaca

SEQ ID NO: 672048 - DNA, 33 bp, Homo sapien
tagttggttcgatgaaggagtaagtattcaaca

SEQ ID NO: 672049 - DNA, 33 bp, Homo sapien
tactggaaagcttagacagatgagactcagtga

SEQ ID NO: 672050 - DNA, 33 bp, Homo sapien
tactggaaagcttagatagatgagactcagtga

SEQ ID NO: 672051 - DNA, 33 bp, Homo sapien
ttccagtaacctgccaaagtatcattatatatc

SEQ ID NO: 672052 - DNA, 33 bp, Homo sapien
ttccagtaacctgccacagtatcattatatatc

SEQ ID NO: 672053 - DNA, 33 bp, Homo sapien
tgagtcacctggaaaacagatgatataagtatg

SEQ ID NO: 672054 - DNA, 33 bp, Homo sapien
tgagtcacctggaaaagagatgatataagtatg

SEQ ID NO: 672055 - DNA, 33 bp, Homo sapien
cacaaaaaccagcttacctgttgtgtaagatag

SEQ ID NO: 672056 - DNA, 33 bp, Homo sapien
cacaaaaaccagcttatctgttgtgtaagatag

SEQ ID NO: 672057 - DNA, 33 bp, Homo sapien
gtttatattttattgaagttgtgaaaggaaaat

SEQ ID NO: 672058 - DNA, 33 bp, Homo sapien
gtttatattttattgatgttgtgaaaggaaaat

SEQ ID NO: 672059 - DNA, 33 bp, Homo sapien
gatatgaattccaaaaattaaatggcattaaga

SEQ ID NO: 672060 - DNA, 33 bp, Homo sapien
gatatgaattccaaaatttaaatggcattaaga

SEQ ID NO: 672061 - DNA, 33 bp, Homo sapien
tgaattgcagttttagacaacaactgatatcaa

SEQ ID NO: 672062 - DNA, 33 bp, Homo sapien
tgaattgcagttttaggcaacaactgatatcaa

SEQ ID NO: 672063 - DNA, 33 bp, Homo sapien
aaattccctgaacacccgacccaatcattggcc

SEQ ID NO: 672064 - DNA, 33 bp, Homo sapien
aaattccctgaacacctgacccaatcattggcc

SEQ ID NO: 672065 - DNA, 33 bp, Homo sapien
cacataccaccttctgaagatactttcccaagc

SEQ ID NO: 672066 - DNA, 33 bp, Homo sapien
cacataccaccttctggagatactttcccaagc

SEQ ID NO: 672067 - DNA, 33 bp, Homo sapien
tgtgataaatgtcctacgagttgcattagtctt

SEQ ID NO: 672068 - DNA, 33 bp, Homo sapien
tgtgataaatgtcctatgagttgcattagtctt

SEQ ID NO: 672069 - DNA, 33 bp, Homo sapien
gtagatggaaaggagccgacatttagagataat

SEQ ID NO: 672070 - DNA, 33 bp, Homo sapien
gtagatggaaaggagctgacatttagagataat

SEQ ID NO: 672071 - DNA, 33 bp, Homo sapien
tcttgagtgctctctaaaaatttaacaatggtt

SEQ ID NO: 672072 - DNA, 33 bp, Homo sapien
tcttgagtgctctctagaaatttaacaatggtt

SEQ ID NO: 672073 - DNA, 33 bp, Homo sapien
catgtaggcaaataaaagattgattacatcagg

SEQ ID NO: 672074 - DNA, 33 bp, Homo sapien
catgtaggcaaataaaggattgattacatcagg

SEQ ID NO: 672075 - DNA, 33 bp, Homo sapien
ttgattgcgcgtactacaaaagtattctccaaa

SEQ ID NO: 672076 - DNA, 33 bp, Homo sapien
ttgattgcgcgtactataaaagtattctccaaa

SEQ ID NO: 672077 - DNA, 33 bp, Homo sapien
tgtggagggagttatcaagtataggagagtata

SEQ ID NO: 672078 - DNA, 33 bp, Homo sapien
tgtggagggagttatcgagtataggagagtata

SEQ ID NO: 672079 - DNA, 33 bp, Homo sapien
acttacaataaaaaccgctgcaaagcaaaactg

SEQ ID NO: 672080 - DNA, 33 bp, Homo sapien
acttacaataaaaacctctgcaaagcaaaactg

SEQ ID NO: 672081 - DNA, 33 bp, Homo sapien
cattttcagtgtttccaaactttagtgtctttg

SEQ ID NO: 672082 - DNA, 33 bp, Homo sapien
cattttcagtgtttccgaactttagtgtctttg

SEQ ID NO: 672083 - DNA, 33 bp, Homo sapien
ggatatccaattgtcccaataccatctgctaag

SEQ ID NO: 672084 - DNA, 33 bp, Homo sapien
ggatatccaattgtcctaataccatctgctaag

SEQ ID NO: 672085 - DNA, 33 bp, Homo sapien
ttattgagttgaaagaactcctcatatattgta

SEQ ID NO: 672086 - DNA, 33 bp, Homo sapien
ttattgagttgaaagagctcctcatatattgta

SEQ ID NO: 672087 - DNA, 33 bp, Homo sapien
atcacactatccttcaagtaaacttcttccata

SEQ ID NO: 672088 - DNA, 33 bp, Homo sapien
atcacactatccttcatgtaaacttcttccata

SEQ ID NO: 672089 - DNA, 33 bp, Homo sapien
agggaagtggcttttccaagtttacatggctag

SEQ ID NO: 672090 - DNA, 33 bp, Homo sapien
agggaagtggcttttcgaagtttacatggctag

SEQ ID NO: 672091 - DNA, 33 bp, Homo sapien
tgagatgatgaatataacaatttgtaaccattt

SEQ ID NO: 672092 - DNA, 33 bp, Homo sapien
tgagatgatgaatatagcaatttgtaaccattt

SEQ ID NO: 672093 - DNA, 33 bp, Homo sapien
cacatggcctttccaccgtatgctcacccttcc

SEQ ID NO: 672094 - DNA, 33 bp, Homo sapien
cacatggcctttccactgtatgctcacccttcc

SEQ ID NO: 672095 - DNA, 33 bp, Homo sapien
aatctcaaataactgaatagatgtgtaatctga

SEQ ID NO: 672096 - DNA, 33 bp, Homo sapien
aatctcaaataactgagtagatgtgtaatctga

SEQ ID NO: 672097 - DNA, 33 bp, Homo sapien
ttaaccttctttctgcaatgcttttgtagtgag

SEQ ID NO: 672098 - DNA, 33 bp, Homo sapien
ttaaccttctttctgctatgcttttgtagtgag

SEQ ID NO: 672099 - DNA, 33 bp, Homo sapien
caatttggtattgataacgggtagaagtagaaa

SEQ ID NO: 672100 - DNA, 33 bp, Homo sapien
caatttggtattgatatcgggtagaagtagaaa

SEQ ID NO: 672101 - DNA, 33 bp, Homo sapien
tgtataatgctgtcacaattgaagatgttcaga

SEQ ID NO: 672102 - DNA, 33 bp, Homo sapien
tgtataatgctgtcacgattgaagatgttcaga

SEQ ID NO: 672103 - DNA, 33 bp, Homo sapien
gagaagtgggcagtgacaataaagtgaggatgg

SEQ ID NO: 672104 - DNA, 33 bp, Homo sapien
gagaagtgggcagtgagaataaagtgaggatgg

SEQ ID NO: 672105 - DNA, 33 bp, Homo sapien
ggccctttccttactaggctggataatcattat

SEQ ID NO: 672106 - DNA, 33 bp, Homo sapien
ggccctttccttactatgctggataatcattat

SEQ ID NO: 672107 - DNA, 33 bp, Homo sapien
cttgacttttagaagcaaggagccctcattgat

SEQ ID NO: 672108 - DNA, 33 bp, Homo sapien
cttgacttttagaagcgaggagccctcattgat

SEQ ID NO: 672109 - DNA, 33 bp, Homo sapien
aagcaatcactatagccaagctcagggtcaccg

SEQ ID NO: 672110 - DNA, 33 bp, Homo sapien
aagcaatcactatagctaagctcagggtcaccg

SEQ ID NO: 672111 - DNA, 33 bp, Homo sapien
cctttagacaccaccagaaggaacttccctgtg

SEQ ID NO: 672112 - DNA, 33 bp, Homo sapien
cctttagacaccaccataaggaacttccctgtg

SEQ ID NO: 672113 - DNA, 33 bp, Homo sapien
atgtggtaggataacaatagtggcaatggtgta

SEQ ID NO: 672114 - DNA, 33 bp, Homo sapien
atgtggtaggataacagtagtggcaatggtgta

SEQ ID NO: 672115 - DNA, 33 bp, Homo sapien
ttattttgtttcattccctcttctacgtatgga

SEQ ID NO: 672116 - DNA, 33 bp, Homo sapien
ttattttgtttcattctctcttctacgtatgga

SEQ ID NO: 672117 - DNA, 33 bp, Homo sapien
tcagtgtgtattggggcaaaacattactgaaaa

SEQ ID NO: 672118 - DNA, 33 bp, Homo sapien
tcagtgtgtattggggtaaaacattactgaaaa

SEQ ID NO: 672119 - DNA, 33 bp, Homo sapien
taagattgcaaatacaaattagtgcagtcccat

SEQ ID NO: 672120 - DNA, 33 bp, Homo sapien
taagattgcaaatacagattagtgcagtcccat

SEQ ID NO: 672121 - DNA, 33 bp, Homo sapien
attaagtacttttgggaaacctaatagaaaagt

SEQ ID NO: 672122 - DNA, 33 bp, Homo sapien
attaagtacttttgggcaacctaatagaaaagt

SEQ ID NO: 672123 - DNA, 33 bp, Homo sapien
aaaattggcaagaggaactatcagtgtgttcat

SEQ ID NO: 672124 - DNA, 33 bp, Homo sapien
aaaattggcaagaggacctatcagtgtgttcat

SEQ ID NO: 672125 - DNA, 33 bp, Homo sapien
tttcaataggctctggcaaaaagctgagaataa

SEQ ID NO: 672126 - DNA, 33 bp, Homo sapien
tttcaataggctctggtaaaaagctgagaataa

SEQ ID NO: 672127 - DNA, 33 bp, Homo sapien
ccaagaaggcctgcaacagtgtttggatggtgc

SEQ ID NO: 672128 - DNA, 33 bp, Homo sapien
ccaagaaggcctgcaatagtgtttggatggtgc

SEQ ID NO: 672129 - DNA, 33 bp, Homo sapien
tttattctttcctttgaattaaagcataactct

SEQ ID NO: 672130 - DNA, 33 bp, Homo sapien
tttattctttcctttgcattaaagcataactct

SEQ ID NO: 672131 - DNA, 33 bp, Homo sapien
cacacttcaaaaccaaacgtaccatcccaacag

SEQ ID NO: 672132 - DNA, 33 bp, Homo sapien
cacacttcaaaaccaagcgtaccatcccaacag

SEQ ID NO: 672133 - DNA, 33 bp, Homo sapien
ctggcctcatgacaacagccagttatgaccata

SEQ ID NO: 672134 - DNA, 33 bp, Homo sapien
ctggcctcatgacaaccgccagttatgaccata

SEQ ID NO: 672135 - DNA, 33 bp, Homo sapien
ctaccatacaatccggcaatccaactactggct

SEQ ID NO: 672136 - DNA, 33 bp, Homo sapien
ctaccatacaatccggtaatccaactactggct

SEQ ID NO: 672137 - DNA, 33 bp, Homo sapien
gcttgggtttcaaaagcctgtggagacggtggg

SEQ ID NO: 672138 - DNA, 33 bp, Homo sapien
gcttgggtttcaaaagtctgtggagacggtggg

SEQ ID NO: 672139 - DNA, 33 bp, Homo sapien
tagacttttggactgccatttctatgtgataga

SEQ ID NO: 672140 - DNA, 33 bp, Homo sapien
tagacttttggactgcgatttctatgtgataga

SEQ ID NO: 672141 - DNA, 33 bp, Homo sapien
ttacagaatcattactaaaatgtaggtgttctg

SEQ ID NO: 672142 - DNA, 33 bp, Homo sapien
ttacagaatcattactgaaatgtaggtgttctg

SEQ ID NO: 672143 - DNA, 33 bp, Homo sapien
aatgtaggttaaaaaaattcttgctaggccaag

SEQ ID NO: 672144 - DNA, 33 bp, Homo sapien
aatgtaggttaaaaaagttcttgctaggccaag

SEQ ID NO: 672145 - DNA, 33 bp, Homo sapien
atagagagaacccaaagtattatagacagcttt

SEQ ID NO: 672146 - DNA, 33 bp, Homo sapien
atagagagaacccaaattattatagacagcttt

SEQ ID NO: 672147 - DNA, 33 bp, Homo sapien
aaagagagctccatacacattgcattattattt

SEQ ID NO: 672148 - DNA, 33 bp, Homo sapien
aaagagagctccatactcattgcattattattt

SEQ ID NO: 672149 - DNA, 33 bp, Homo sapien
tatatatatcaaggaacttatctctgtcttcta

SEQ ID NO: 672150 - DNA, 33 bp, Homo sapien
tatatatatcaaggaatttatctctgtcttcta

SEQ ID NO: 672151 - DNA, 33 bp, Homo sapien
atccactgttcagaaaccttacattaaatcaaa

SEQ ID NO: 672152 - DNA, 33 bp, Homo sapien
atccactgttcagaaatcttacattaaatcaaa

SEQ ID NO: 672153 - DNA, 33 bp, Homo sapien
tctgtatctttatctaggtacaaacaagcacta

SEQ ID NO: 672154 - DNA, 33 bp, Homo sapien
tctgtatctttatctatgtacaaacaagcacta

SEQ ID NO: 672155 - DNA, 33 bp, Homo sapien
attaatgtctgaatgaatcaaggaggaaaaaga

SEQ ID NO: 672156 - DNA, 33 bp, Homo sapien
attaatgtctgaatgagtcaaggaggaaaaaga

SEQ ID NO: 672157 - DNA, 33 bp, Homo sapien
cagggttagagatccacgtggtaaacagtctgg

SEQ ID NO: 672158 - DNA, 33 bp, Homo sapien
cagggttagagatccatgtggtaaacagtctgg

SEQ ID NO: 672159 - DNA, 33 bp, Homo sapien
ccataggccacctacaacaaaattgtctaaaat

SEQ ID NO: 672160 - DNA, 33 bp, Homo sapien
ccataggccacctacagcaaaattgtctaaaat

SEQ ID NO: 672161 - DNA, 33 bp, Homo sapien
agcaatgacttttcatgagaacacattcacaga

SEQ ID NO: 672162 - DNA, 33 bp, Homo sapien
agcaatgacttttcattagaacacattcacaga

SEQ ID NO: 672163 - DNA, 33 bp, Homo sapien
gtgacaagtcatgatacggcgaagaccaggcca

SEQ ID NO: 672164 - DNA, 33 bp, Homo sapien
gtgacaagtcatgatatggcgaagaccaggcca

SEQ ID NO: 672165 - DNA, 33 bp, Homo sapien
gaaatttaagagtcctcagaactttcaggcaag

SEQ ID NO: 672166 - DNA, 33 bp, Homo sapien
gaaatttaagagtcctgagaactttcaggcaag

SEQ ID NO: 672167 - DNA, 33 bp, Homo sapien
acctctataaaaggaaccatcagagttaggcac

SEQ ID NO: 672168 - DNA, 33 bp, Homo sapien
acctctataaaaggaatcatcagagttaggcac

SEQ ID NO: 672169 - DNA, 33 bp, Homo sapien
aataggacacaagaggaatttgaaacccccggc

SEQ ID NO: 672170 - DNA, 33 bp, Homo sapien
aataggacacaagaggcatttgaaacccccggc

SEQ ID NO: 672171 - DNA, 33 bp, Homo sapien
cagccctgaatctatccccctctaagccttata

SEQ ID NO: 672172 - DNA, 33 bp, Homo sapien
cagccctgaatctatctccctctaagccttata

SEQ ID NO: 672173 - DNA, 33 bp, Homo sapien
gcttccctggctggcaacggggaatgcagtgac

SEQ ID NO: 672174 - DNA, 33 bp, Homo sapien
gcttccctggctggcaccggggaatgcagtgac

SEQ ID NO: 672175 - DNA, 33 bp, Homo sapien
ttcattctaagagacaatctgagtaacagaaag

SEQ ID NO: 672176 - DNA, 33 bp, Homo sapien
ttcattctaagagacagtctgagtaacagaaag

SEQ ID NO: 672177 - DNA, 33 bp, Homo sapien
caatttattaagtgaccatggacagccctttaa

SEQ ID NO: 672178 - DNA, 33 bp, Homo sapien
caatttattaagtgactatggacagccctttaa

SEQ ID NO: 672179 - DNA, 33 bp, Homo sapien
tagtgaaaactgcctaggttagcctcttggaag

SEQ ID NO: 672180 - DNA, 33 bp, Homo sapien
tagtgaaaactgcctatgttagcctcttggaag

SEQ ID NO: 672181 - DNA, 33 bp, Homo sapien
taattgatctacttcactattcactacaaaatt

SEQ ID NO: 672182 - DNA, 33 bp, Homo sapien
taattgatctacttcagtattcactacaaaatt

SEQ ID NO: 672183 - DNA, 33 bp, Homo sapien
ttccaaacagcacgtacgcttaccaaataaagc

SEQ ID NO: 672184 - DNA, 33 bp, Homo sapien
ttccaaacagcacgtatgcttaccaaataaagc

SEQ ID NO: 672185 - DNA, 33 bp, Homo sapien
gaatgcccatcaccgaaaaacactgcaaaaggt

SEQ ID NO: 672186 - DNA, 33 bp, Homo sapien
gaatgcccatcaccgagaaacactgcaaaaggt

SEQ ID NO: 672187 - DNA, 33 bp, Homo sapien
cctttttcactaaacagctttctgtcagggtcc

SEQ ID NO: 672188 - DNA, 33 bp, Homo sapien
cctttttcactaaacatctttctgtcagggtcc

SEQ ID NO: 672189 - DNA, 33 bp, Homo sapien
agaacagaaccagaaacaaacattctcataatt

SEQ ID NO: 672190 - DNA, 33 bp, Homo sapien
agaacagaaccagaaagaaacattctcataatt

SEQ ID NO: 672191 - DNA, 33 bp, Homo sapien
actggtagggtgactacattttgtaataattta

SEQ ID NO: 672192 - DNA, 33 bp, Homo sapien
actggtagggtgactagattttgtaataattta

SEQ ID NO: 672193 - DNA, 33 bp, Homo sapien
agaaattggtgatttacatgaaaagttagccag

SEQ ID NO: 672194 - DNA, 33 bp, Homo sapien
agaaattggtgatttatatgaaaagttagccag

SEQ ID NO: 672195 - DNA, 33 bp, Homo sapien
cacccccagattatcaacccaatagcttcctat

SEQ ID NO: 672196 - DNA, 33 bp, Homo sapien
cacccccagattatcagcccaatagcttcctat

SEQ ID NO: 672197 - DNA, 33 bp, Homo sapien
gcaactgaatgctttacgggttacaaggaaaat

SEQ ID NO: 672198 - DNA, 33 bp, Homo sapien
gcaactgaatgctttatgggttacaaggaaaat

SEQ ID NO: 672199 - DNA, 33 bp, Homo sapien
aagaatgaaatggatccatcctataccacatag

SEQ ID NO: 672200 - DNA, 33 bp, Homo sapien
aagaatgaaatggatctatcctataccacatag

SEQ ID NO: 672201 - DNA, 33 bp, Homo sapien
gagggtgactggtgaaaacctctatttggctac

SEQ ID NO: 672202 - DNA, 33 bp, Homo sapien
gagggtgactggtgaagacctctatttggctac

SEQ ID NO: 672203 - DNA, 33 bp, Homo sapien
cacagtaggtcttcaagaaaatgtttttgtttc

SEQ ID NO: 672204 - DNA, 33 bp, Homo sapien
cacagtaggtcttcaataaaatgtttttgtttc

SEQ ID NO: 672205 - DNA, 33 bp, Homo sapien
taaatgctagttctgccacaatattcttcacag

SEQ ID NO: 672206 - DNA, 33 bp, Homo sapien
taaatgctagttctgctacaatattcttcacag

SEQ ID NO: 672207 - DNA, 33 bp, Homo sapien
aactagcatttaccacacaaattttctatatag

SEQ ID NO: 672208 - DNA, 33 bp, Homo sapien
aactagcatttaccacgcaaattttctatatag

SEQ ID NO: 672209 - DNA, 33 bp, Homo sapien
ttacactcaaattacacgtgaaagaatggcctt

SEQ ID NO: 672210 - DNA, 33 bp, Homo sapien
ttacactcaaattacatgtgaaagaatggcctt

SEQ ID NO: 672211 - DNA, 33 bp, Homo sapien
attggaagcaaataaaagcagaagggggcctag

SEQ ID NO: 672212 - DNA, 33 bp, Homo sapien
attggaagcaaataaaggcagaagggggcctag

SEQ ID NO: 672213 - DNA, 33 bp, Homo sapien
aggtaagttaagcctgaagtttatttattaata

SEQ ID NO: 672214 - DNA, 33 bp, Homo sapien
aggtaagttaagcctgcagtttatttattaata

SEQ ID NO: 672215 - DNA, 33 bp, Homo sapien
tcatgaagctggcttacgatttagcctagctaa

SEQ ID NO: 672216 - DNA, 33 bp, Homo sapien
tcatgaagctggcttatgatttagcctagctaa

SEQ ID NO: 672217 - DNA, 33 bp, Homo sapien
ctataataaaaccatcaagagatgaaatcaaga

SEQ ID NO: 672218 - DNA, 33 bp, Homo sapien
ctataataaaaccatcgagagatgaaatcaaga

SEQ ID NO: 672219 - DNA, 33 bp, Homo sapien
gagaaatattcaaggacgtagatagcttaaaga

SEQ ID NO: 672220 - DNA, 33 bp, Homo sapien
gagaaatattcaaggaggtagatagcttaaaga

SEQ ID NO: 672221 - DNA, 33 bp, Homo sapien
ggtatgatgcaacacccaacaagaataagcaca

SEQ ID NO: 672222 - DNA, 33 bp, Homo sapien
ggtatgatgcaacacctaacaagaataagcaca

SEQ ID NO: 672223 - DNA, 33 bp, Homo sapien; identical to SEQ ID NO: 672221

SEQ ID NO: 672224 - DNA, 33 bp, Homo sapien; identical to SEQ ID NO: 672222

SEQ ID NO: 672225 - DNA, 33 bp, Homo sapien
ggtaaatgtgatagagaaactcaagagaccagc

SEQ ID NO: 672226 - DNA, 33 bp, Homo sapien
ggtaaatgtgatagaggaactcaagagaccagc

SEQ ID NO: 672227 - DNA, 33 bp, Homo sapien
catttgcccacattgaccaacattacaaatgca

SEQ ID NO: 672228 - DNA, 33 bp, Homo sapien
catttgcccacattgatcaacattacaaatgca

SEQ ID NO: 672229 - DNA, 33 bp, Homo sapien
tggtatccagtaagcaatatgtcagtgtatgta

SEQ ID NO: 672230 - DNA, 33 bp, Homo sapien
tggtatccagtaagcagtatgtcagtgtatgta

SEQ ID NO: 672231 - DNA, 33 bp, Homo sapien
aggtctattagaaagcaaaatccacacaaatat

SEQ ID NO: 672232 - DNA, 33 bp, Homo sapien
aggtctattagaaagcgaaatccacacaaatat

SEQ ID NO: 672233 - DNA, 33 bp, Homo sapien
aaaccactagattcaccgagaataattaggcct

SEQ ID NO: 672234 - DNA, 33 bp, Homo sapien
aaaccactagattcactgagaataattaggcct

SEQ ID NO: 672235 - DNA, 33 bp, Homo sapien
caataatattctggaaacagcactgaagagcaa

SEQ ID NO: 672236 - DNA, 33 bp, Homo sapien
caataatattctggaagcagcactgaagagcaa

SEQ ID NO: 672237 - DNA, 33 bp, Homo sapien
tgaactggtcacctccaaaattttaaatctcta

SEQ ID NO: 672238 - DNA, 33 bp, Homo sapien
tgaactggtcacctccgaaattttaaatctcta

SEQ ID NO: 672239 - DNA, 33 bp, Homo sapien
atataaccatattttaaaagtgtctcttgtcct

SEQ ID NO: 672240 - DNA, 33 bp, Homo sapien
atataaccatattttagaagtgtctcttgtcct

SEQ ID NO: 672241 - DNA, 33 bp, Homo sapien
aatagggcttggaaagcacagatacatggttag

SEQ ID NO: 672242 - DNA, 33 bp, Homo sapien
aatagggcttggaaagtacagatacatggttag

SEQ ID NO: 672243 - DNA, 33 bp, Homo sapien
tcagtcagtgacgggacgacatatacaatggtg

SEQ ID NO: 672244 - DNA, 33 bp, Homo sapien
tcagtcagtgacgggatgacatatacaatggtg

SEQ ID NO: 672245 - DNA, 33 bp, Homo sapien
tataaactgctccaagaaataaagtaataatgt

SEQ ID NO: 672246 - DNA, 33 bp, Homo sapien
tataaactgctccaagcaataaagtaataatgt

SEQ ID NO: 672247 - DNA, 33 bp, Homo sapien
ttgaggcaatgactggaaagaatcacaagtacg

SEQ ID NO: 672248 - DNA, 33 bp, Homo sapien
ttgaggcaatgactggtaagaatcacaagtacg

SEQ ID NO: 672249 - DNA, 33 bp, Homo sapien
catgtgatattcaagaacattatttccttctaa

SEQ ID NO: 672250 - DNA, 33 bp, Homo sapien
catgtgatattcaagagcattatttccttctaa

SEQ ID NO: 672251 - DNA, 33 bp, Homo sapien
tctgactcctttctacaaaatgctttctcctac

SEQ ID NO: 672252 - DNA, 33 bp, Homo sapien
tctgactcctttctaccaaatgctttctcctac

SEQ ID NO: 672253 - DNA, 33 bp, Homo sapien
atacactacggaatacgatgcggccataaagaa

SEQ ID NO: 672254 - DNA, 33 bp, Homo sapien
atacactacggaatactatgcggccataaagaa

SEQ ID NO: 672255 - DNA, 33 bp, Homo sapien
acgcagtcattctctccaccttatcccaagttt

SEQ ID NO: 672256 - DNA, 33 bp, Homo sapien
acgcagtcattctctctaccttatcccaagttt

SEQ ID NO: 672257 - DNA, 33 bp, Homo sapien
tttaggaaactatgaccggctgggccttttttt

SEQ ID NO: 672258 - DNA, 33 bp, Homo sapien
tttaggaaactatgactggctgggccttttttt

SEQ ID NO: 672259 - DNA, 33 bp, Homo sapien
tgttacagttgaaagacgtcctaagttatacaa

SEQ ID NO: 672260 - DNA, 33 bp, Homo sapien
tgttacagttgaaagatgtcctaagttatacaa

SEQ ID NO: 672261 - DNA, 33 bp, Homo sapien
tagaactttggaataaagacttgaaataggatt

SEQ ID NO: 672262 - DNA, 33 bp, Homo sapien
tagaactttggaataacgacttgaaataggatt

SEQ ID NO: 672263 - DNA, 33 bp, Homo sapien
gaagtgattttgtaacaggtgacacagaagttc

SEQ ID NO: 672264 - DNA, 33 bp, Homo sapien
gaagtgattttgtaactggtgacacagaagttc

SEQ ID NO: 672265 - DNA, 33 bp, Homo sapien
ttcactctaccagaaacgcttcacatatacatc

SEQ ID NO: 672266 - DNA, 33 bp, Homo sapien
ttcactctaccagaaatgcttcacatatacatc

SEQ ID NO: 672267 - DNA, 33 bp, Homo sapien
tatctagttagtcacacatttcaataatttcac

SEQ ID NO: 672268 - DNA, 33 bp, Homo sapien
tatctagttagtcacagatttcaataatttcac

SEQ ID NO: 672269 - DNA, 33 bp, Homo sapien
gtagctattcaatgagcatttgttgctttaaac

SEQ ID NO: 672270 - DNA, 33 bp, Homo sapien
gtagctattcaatgaggatttgttgctttaaac

SEQ ID NO: 672271 - DNA, 33 bp, Homo sapien
gttattgtttaatcacactaatacagcattaca

SEQ ID NO: 672272 - DNA, 33 bp, Homo sapien
gttattgtttaatcacgctaatacagcattaca

SEQ ID NO: 672273 - DNA, 33 bp, Homo sapien
ctgataatgctgatgacgaatcaaaggctaaat

SEQ ID NO: 672274 - DNA, 33 bp, Homo sapien
ctgataatgctgatgatgaatcaaaggctaaat

SEQ ID NO: 672275 - DNA, 33 bp, Homo sapien
gaggaaagttttaaaacgaacacagcatgaaca

SEQ ID NO: 672276 - DNA, 33 bp, Homo sapien
gaggaaagttttaaaatgaacacagcatgaaca

SEQ ID NO: 672277 - DNA, 33 bp, Homo sapien
tagagcttcaaatccaatgaaaaatcctttcag

SEQ ID NO: 672278 - DNA, 33 bp, Homo sapien
tagagcttcaaatccagtgaaaaatcctttcag

SEQ ID NO: 672279 - DNA, 33 bp, Homo sapien
atctcattgtgtgcataataaatacaataacgc

SEQ ID NO: 672280 - DNA, 33 bp, Homo sapien
atctcattgtgtgcatgataaatacaataacgc

SEQ ID NO: 672281 - DNA, 33 bp, Homo sapien
gatggaagcattatacagaactgtcaactggca

SEQ ID NO: 672282 - DNA, 33 bp, Homo sapien
gatggaagcattatacggaactgtcaactggca

SEQ ID NO: 672283 - DNA, 33 bp, Homo sapien
ttaaaatttggcttaaaaattcagcttctagaa

SEQ ID NO: 672284 - DNA, 33 bp, Homo sapien
ttaaaatttggcttaacaattcagcttctagaa

SEQ ID NO: 672285 - DNA, 33 bp, Homo sapien
atagaggaagaccttacgatgtggctgtctatg

SEQ ID NO: 672286 - DNA, 33 bp, Homo sapien
atagaggaagaccttatgatgtggctgtctatg

SEQ ID NO: 672287 - DNA, 33 bp, Homo sapien
tacagagccttgtttacgtaaaatagtctatgc

SEQ ID NO: 672288 - DNA, 33 bp, Homo sapien
tacagagccttgtttatgtaaaatagtctatgc

SEQ ID NO: 672289 - DNA, 33 bp, Homo sapien
ttgttcacactcaaagaataatatatataataa

SEQ ID NO: 672290 - DNA, 33 bp, Homo sapien
ttgttcacactcaaaggataatatatataataa

SEQ ID NO: 672291 - DNA, 33 bp, Homo sapien
gttcaaagcaaaatacaattgaactctttaatc

SEQ ID NO: 672292 - DNA, 33 bp, Homo sapien
gttcaaagcaaaatacgattgaactctttaatc

SEQ ID NO: 672293 - DNA, 33 bp, Homo sapien
cctcaaaatactgcaaaggttttctaatatatc

SEQ ID NO: 672294 - DNA, 33 bp, Homo sapien
cctcaaaatactgcaatggttttctaatatatc

SEQ ID NO: 672295 - DNA, 33 bp, Homo sapien
ctagttttgctacagacgtgtactcttcaatat

SEQ ID NO: 672296 - DNA, 33 bp, Homo sapien
ctagttttgctacagatgtgtactcttcaatat

SEQ ID NO: 672297 - DNA, 33 bp, Homo sapien
tctgatccatttatacaactgcacaatgaacat

SEQ ID NO: 672298 - DNA, 33 bp, Homo sapien
tctgatccatttataccactgcacaatgaacat

SEQ ID NO: 672299 - DNA, 33 bp, Homo sapien
actgcctttagagttcaaagttgcaggaatgct

SEQ ID NO: 672300 - DNA, 33 bp, Homo sapien
actgcctttagagttcgaagttgcaggaatgct

SEQ ID NO: 672301 - DNA, 33 bp, Homo sapien
atgagatgttcattgaaaaaaaatcgttgaatt

SEQ ID NO: 672302 - DNA, 33 bp, Homo sapien
atgagatgttcattgacaaaaaatcgttgaatt

SEQ ID NO: 672303 - DNA, 33 bp, Homo sapien
ttttctgcttttcttcaagactctattacttta

SEQ ID NO: 672304 - DNA, 33 bp, Homo sapien
ttttctgcttttcttcgagactctattacttta

SEQ ID NO: 672305 - DNA, 33 bp, Homo sapien
actgaaagatggcctaaagatcaggttctatca

SEQ ID NO: 672306 - DNA, 33 bp, Homo sapien
actgaaagatggcctacagatcaggttctatca

SEQ ID NO: 672307 - DNA, 33 bp, Homo sapien
catactaaatggcaaaatggagtcgcagtcctg

SEQ ID NO: 672308 - DNA, 33 bp, Homo sapien
catactaaatggcaaagtggagtcgcagtcctg

SEQ ID NO: 672309 - DNA, 33 bp, Homo sapien
ttgtttattcagggcccgagtggtctttagtca

SEQ ID NO: 672310 - DNA, 33 bp, Homo sapien
ttgtttattcagggcctgagtggtctttagtca

SEQ ID NO: 672311 - DNA, 33 bp, Homo sapien
gaatcatttagcttcaaagtaaaacggtcatcc

SEQ ID NO: 672312 - DNA, 33 bp, Homo sapien
gaatcatttagcttcagagtaaaacggtcatcc

SEQ ID NO: 672313 - DNA, 33 bp, Homo sapien
cccaattcaagccctaaatttcatctccatatc

SEQ ID NO: 672314 - DNA, 33 bp, Homo sapien
cccaattcaagccctagatttcatctccatatc

SEQ ID NO: 672315 - DNA, 33 bp, Homo sapien
acctccttcaacaaaacgcaaatacctacattg

SEQ ID NO: 672316 - DNA, 33 bp, Homo sapien
acctccttcaacaaaaggcaaatacctacattg

SEQ ID NO: 672317 - DNA, 33 bp, Homo sapien
gctattattcttgtgacattggttctaggcaag

SEQ ID NO: 672318 - DNA, 33 bp, Homo sapien
gctattattcttgtgatattggttctaggcaag

SEQ ID NO: 672319 - DNA, 33 bp, Homo sapien
agagaagcaccgacaacgtatctatagaaacag

SEQ ID NO: 672320 - DNA, 33 bp, Homo sapien
agagaagcaccgacaatgtatctatagaaacag

SEQ ID NO: 672321 - DNA, 33 bp, Homo sapien
acagttgtgaggctgaaattgtagtggagagag

SEQ ID NO: 672322 - DNA, 33 bp, Homo sapien
acagttgtgaggctgacattgtagtggagagag

SEQ ID NO: 672323 - DNA, 33 bp, Homo sapien
ttgttttgctaataaacagagttgtagcctgac

SEQ ID NO: 672324 - DNA, 33 bp, Homo sapien
ttgttttgctaataaagagagttgtagcctgac

SEQ ID NO: 672325 - DNA, 33 bp, Homo sapien
tagatgctagggatacagaaaaaacaggatgaa

SEQ ID NO: 672326 - DNA, 33 bp, Homo sapien
tagatgctagggatacggaaaaaacaggatgaa

SEQ ID NO: 672327 - DNA, 33 bp, Homo sapien
acattttatggaaagcccaaatcttatttccag

SEQ ID NO: 672328 - DNA, 33 bp, Homo sapien
acattttatggaaagcgcaaatcttatttccag

SEQ ID NO: 672329 - DNA, 33 bp, Homo sapien
cttggcccattcccaaatcttccataatttttt

SEQ ID NO: 672330 - DNA, 33 bp, Homo sapien
cttggcccattcccaagtcttccataatttttt

SEQ ID NO: 672331 - DNA, 33 bp, Homo sapien
aaacagcatgatagccaacttgggacttacatc

SEQ ID NO: 672332 - DNA, 33 bp, Homo sapien
aaacagcatgatagccgacttgggacttacatc

SEQ ID NO: 672333 - DNA, 33 bp, Homo sapien
tacctcttactcactcacttacccaaagaactt

SEQ ID NO: 672334 - DNA, 33 bp, Homo sapien
tacctcttactcactcccttacccaaagaactt

SEQ ID NO: 672335 - DNA, 33 bp, Homo sapien
cctccgttgctaatggaatgacagctaatggga

SEQ ID NO: 672336 - DNA, 33 bp, Homo sapien
cctccgttgctaatgggatgacagctaatggga

SEQ ID NO: 672337 - DNA, 33 bp, Homo sapien
aggggaactggaagtcacagtttaggcctgaaa

SEQ ID NO: 672338 - DNA, 33 bp, Homo sapien
aggggaactggaagtcgcagtttaggcctgaaa

SEQ ID NO: 672339 - DNA, 33 bp, Homo sapien
tagtccttcttatccactatattgacttgtaat

SEQ ID NO: 672340 - DNA, 33 bp, Homo sapien
tagtccttcttatccattatattgacttgtaat

SEQ ID NO: 672341 - DNA, 33 bp, Homo sapien
gaattatatctgaaaccaggtctcgatgaatag

SEQ ID NO: 672342 - DNA, 33 bp, Homo sapien
gaattatatctgaaactaggtctcgatgaatag

SEQ ID NO: 672343 - DNA, 33 bp, Homo sapien
gctgcttcaggctaagaaaactaaattctctcc

SEQ ID NO: 672344 - DNA, 33 bp, Homo sapien
gctgcttcaggctaaggaaactaaattctctcc

SEQ ID NO: 672345 - DNA, 33 bp, Homo sapien
tttaatgagaatctcacggtgtttaggatatat

SEQ ID NO: 672346 - DNA, 33 bp, Homo sapien
tttaatgagaatctcatggtgtttaggatatat

SEQ ID NO: 672347 - DNA, 33 bp, Homo sapien
tgtgcaaggtgttgtgcataagataagtagaac

SEQ ID NO: 672348 - DNA, 33 bp, Homo sapien
tgtgcaaggtgttgtggataagataagtagaac

SEQ ID NO: 672349 - DNA, 33 bp, Homo sapien
gaaatcaacatgactacgatccagttttaagtt

SEQ ID NO: 672350 - DNA, 33 bp, Homo sapien
gaaatcaacatgactatgatccagttttaagtt

SEQ ID NO: 672351 - DNA, 33 bp, Homo sapien
atgtaatatactttcccaagatagcaatgtggt

SEQ ID NO: 672352 - DNA, 33 bp, Homo sapien
atgtaatatactttcctaagatagcaatgtggt

SEQ ID NO: 672353 - DNA, 33 bp, Homo sapien
cccaggtatagcaatagaaacgctacagaagct

SEQ ID NO: 672354 - DNA, 33 bp, Homo sapien
cccaggtatagcaatataaacgctacagaagct

SEQ ID NO: 672355 - DNA, 33 bp, Homo sapien
ttcattttcactgacccaaggaggaataagaca

SEQ ID NO: 672356 - DNA, 33 bp, Homo sapien
ttcattttcactgacctaaggaggaataagaca

SEQ ID NO: 672357 - DNA, 33 bp, Homo sapien
gagctgtaaatatgtacaatgtgaagctgatag

SEQ ID NO: 672358 - DNA, 33 bp, Homo sapien
gagctgtaaatatgtataatgtgaagctgatag

SEQ ID NO: 672359 - DNA, 33 bp, Homo sapien
ccacaaacattgtccacaaaagttattgttttg

SEQ ID NO: 672360 - DNA, 33 bp, Homo sapien
ccacaaacattgtccataaaagttattgttttg

SEQ ID NO: 672361 - DNA, 33 bp, Homo sapien
ttcgtgcccacttttacgtaggcaacaagaaaa

SEQ ID NO: 672362 - DNA, 33 bp, Homo sapien
ttcgtgcccacttttatgtaggcaacaagaaaa

SEQ ID NO: 672363 - DNA, 33 bp, Homo sapien
agcacaactttgatcacatcattcattctcatt

SEQ ID NO: 672364 - DNA, 33 bp, Homo sapien
agcacaactttgatcatatcattcattctcatt

SEQ ID NO: 672365 - DNA, 33 bp, Homo sapien
ctgctttagcctgtgacgtagctctctcttcct

SEQ ID NO: 672366 - DNA, 33 bp, Homo sapien
ctgctttagcctgtgatgtagctctctcttcct

SEQ ID NO: 672367 - DNA, 33 bp, Homo sapien
tcccttctccttttaacagttctagaaagcaat

SEQ ID NO: 672368 - DNA, 33 bp, Homo sapien
tcccttctccttttaatagttctagaaagcaat

SEQ ID NO: 672369 - DNA, 33 bp, Homo sapien
atagctgcatatcatcgcagcaatataaaagtg

SEQ ID NO: 672370 - DNA, 33 bp, Homo sapien
atagctgcatatcatctcagcaatataaaagtg

SEQ ID NO: 672371 - DNA, 33 bp, Homo sapien
tgggccaagtcaggtaccaagcacattcattgg

SEQ ID NO: 672372 - DNA, 33 bp, Homo sapien
tgggccaagtcaggtagcaagcacattcattgg

SEQ ID NO: 672373 - DNA, 33 bp, Homo sapien
accacattgagactctaactggattctccagtt

SEQ ID NO: 672374 - DNA, 33 bp, Homo sapien
accacattgagactcttactggattctccagtt

SEQ ID NO: 672375 - DNA, 33 bp, Homo sapien
aaaagatgaagaaagagtagttcaaaagtcttt

SEQ ID NO: 672376 - DNA, 33 bp, Homo sapien
aaaagatgaagaaagattagttcaaaagtcttt

SEQ ID NO: 672377 - DNA, 33 bp, Homo sapien
aattggagagttatgacagccaacaaatcattt

SEQ ID NO: 672378 - DNA, 33 bp, Homo sapien
aattggagagttatgagagccaacaaatcattt

SEQ ID NO: 672379 - DNA, 33 bp, Homo sapien
ataagcagtttattggcatattcaccagtgcct

SEQ ID NO: 672380 - DNA, 33 bp, Homo sapien
ataagcagtttattggtatattcaccagtgcct

SEQ ID NO: 672381 - DNA, 33 bp, Homo sapien
cctcaggcggatcaggaccatgttgaaaggtgt

SEQ ID NO: 672382 - DNA, 33 bp, Homo sapien
cctcaggcggatcagggccatgttgaaaggtgt

SEQ ID NO: 672383 - DNA, 33 bp, Homo sapien
aagatcattaaaaacgacaccgatataagaaaa

SEQ ID NO: 672384 - DNA, 33 bp, Homo sapien
aagatcattaaaaacgccaccgatataagaaaa

SEQ ID NO: 672385 - DNA, 33 bp, Homo sapien
ttcaagcagagattacaaaggattctttcagag

SEQ ID NO: 672386 - DNA, 33 bp, Homo sapien
ttcaagcagagattacgaaggattctttcagag

SEQ ID NO: 672387 - DNA, 33 bp, Homo sapien
cttaaatatgagcagacgttaaaggctcatcag

SEQ ID NO: 672388 - DNA, 33 bp, Homo sapien
cttaaatatgagcagatgttaaaggctcatcag

SEQ ID NO: 672389 - DNA, 33 bp, Homo sapien
gtcttcttgctaatagccattctaactggggtg

SEQ ID NO: 672390 - DNA, 33 bp, Homo sapien
gtcttcttgctaatagtcattctaactggggtg

SEQ ID NO: 672391 - DNA, 33 bp, Homo sapien
tcctaggcaacacatccaaaatttactgacatt

SEQ ID NO: 672392 - DNA, 33 bp, Homo sapien
tcctaggcaacacatctaaaatttactgacatt

SEQ ID NO: 672393 - DNA, 33 bp, Homo sapien
caggtaaactgcatagaacacaataagcactag

SEQ ID NO: 672394 - DNA, 33 bp, Homo sapien
caggtaaactgcatagcacacaataagcactag

SEQ ID NO: 672395 - DNA, 33 bp, Homo sapien
ggtagtggtgtccaaaatgactccgaggtttga

SEQ ID NO: 672396 - DNA, 33 bp, Homo sapien
ggtagtggtgtccaaactgactccgaggtttga

SEQ ID NO: 672397 - DNA, 33 bp, Homo sapien
ctcatagtgtggaagcaacatctcttttaaaat

SEQ ID NO: 672398 - DNA, 33 bp, Homo sapien
ctcatagtgtggaagccacatctcttttaaaat

SEQ ID NO: 672399 - DNA, 33 bp, Homo sapien
caggctggagtgcaataacacagtctcggctca

SEQ ID NO: 672400 - DNA, 33 bp, Homo sapien
caggctggagtgcaatgacacagtctcggctca

SEQ ID NO: 672401 - DNA, 33 bp, Homo sapien
gaatttcttgagaaacaagtgaatgaatctgtg

SEQ ID NO: 672402 - DNA, 33 bp, Homo sapien
gaatttcttgagaaaccagtgaatgaatctgtg

SEQ ID NO: 672403 - DNA, 33 bp, Homo sapien
caatcctcttcccatccatgtgttatacaaatg

SEQ ID NO: 672404 - DNA, 33 bp, Homo sapien
caatcctcttcccatctatgtgttatacaaatg

SEQ ID NO: 672405 - DNA, 33 bp, Homo sapien
acctgaggaacactaacattgaaagagcaggca

SEQ ID NO: 672406 - DNA, 33 bp, Homo sapien
acctgaggaacactaatattgaaagagcaggca

SEQ ID NO: 672407 - DNA, 33 bp, Homo sapien
gtggatcctattcacaaacttcttacactatga

SEQ ID NO: 672408 - DNA, 33 bp, Homo sapien
gtggatcctattcacatacttcttacactatga

SEQ ID NO: 672409 - DNA, 33 bp, Homo sapien
gtatggaattacaggaaaaatgtaacatattct

SEQ ID NO: 672410 - DNA, 33 bp, Homo sapien
gtatggaattacaggacaaatgtaacatattct

SEQ ID NO: 672411 - DNA, 33 bp, Homo sapien
gtgtactaagcctagacaaaatgatgatacggg

SEQ ID NO: 672412 - DNA, 33 bp, Homo sapien
gtgtactaagcctagagaaaatgatgatacggg

SEQ ID NO: 672413 - DNA, 33 bp, Homo sapien
ggggttagggtgagaacgttaaatgatcatgag

SEQ ID NO: 672414 - DNA, 33 bp, Homo sapien
ggggttagggtgagaaggttaaatgatcatgag

SEQ ID NO: 672415 - DNA, 33 bp, Homo sapien
tgatggttaaaagtcaggagattgagcaaggtt

SEQ ID NO: 672416 - DNA, 33 bp, Homo sapien
tgatggttaaaagtcatgagattgagcaaggtt

SEQ ID NO: 672417 - DNA, 33 bp, Homo sapien
acacttgtgtgaactagtacagtaactttattg

SEQ ID NO: 672418 - DNA, 33 bp, Homo sapien
acacttgtgtgaactattacagtaactttattg

SEQ ID NO: 672419 - DNA, 33 bp, Homo sapien
tcagagaaacaggcaggctagagtgactgaggc

SEQ ID NO: 672420 - DNA, 33 bp, Homo sapien
tcagagaaacaggcagtctagagtgactgaggc

SEQ ID NO: 672421 - DNA, 33 bp, Homo sapien
gtattaaaggtccttacaatcgcatggtggaag

SEQ ID NO: 672422 - DNA, 33 bp, Homo sapien
gtattaaaggtccttataatcgcatggtggaag

SEQ ID NO: 672423 - DNA, 33 bp, Homo sapien
tacaacccaactataagtcctgatctgttagta

SEQ ID NO: 672424 - DNA, 33 bp, Homo sapien
tacaacccaactataattcctgatctgttagta

SEQ ID NO: 672425 - DNA, 33 bp, Homo sapien
taatcagttcctcaaaacatcattgacctgaaa

SEQ ID NO: 672426 - DNA, 33 bp, Homo sapien
taatcagttcctcaaagcatcattgacctgaaa

SEQ ID NO: 672427 - DNA, 33 bp, Homo sapien
gctcccttatgttgaaactgtccaagggagcag

SEQ ID NO: 672428 - DNA, 33 bp, Homo sapien
gctcccttatgttgaagctgtccaagggagcag

SEQ ID NO: 672429 - DNA, 33 bp, Homo sapien
ccaagagcaggagttcacagcaacttagaatgc

SEQ ID NO: 672430 - DNA, 33 bp, Homo sapien
ccaagagcaggagttcgcagcaacttagaatgc

SEQ ID NO: 672431 - DNA, 33 bp, Homo sapien
taaatcatttttcttgcattatctgactcaata

SEQ ID NO: 672432 - DNA, 33 bp, Homo sapien
taaatcatttttcttggattatctgactcaata

SEQ ID NO: 672433 - DNA, 33 bp, Homo sapien
tttaaaagtgcccagacgcaaaaagcaacatac

SEQ ID NO: 672434 - DNA, 33 bp, Homo sapien
tttaaaagtgcccagatgcaaaaagcaacatac

SEQ ID NO: 672435 - DNA, 33 bp, Homo sapien
gtggataatgagctgacaaggtaaggctgtata

SEQ ID NO: 672436 - DNA, 33 bp, Homo sapien
gtggataatgagctgataaggtaaggctgtata

SEQ ID NO: 672437 - DNA, 33 bp, Homo sapien
aaatttttctttcaacactgcattaactacatt

SEQ ID NO: 672438 - DNA, 33 bp, Homo sapien
aaatttttctttcaaccctgcattaactacatt

SEQ ID NO: 672439 - DNA, 33 bp, Homo sapien
tttatgtgtaaaaaagaaacattgattattact

SEQ ID NO: 672440 - DNA, 33 bp, Homo sapien
tttatgtgtaaaaaaggaacattgattattact

SEQ ID NO: 672441 - DNA, 33 bp, Homo sapien
atttggaaatatgagaatagaactcaagacaaa

SEQ ID NO: 672442 - DNA, 33 bp, Homo sapien
atttggaaatatgagactagaactcaagacaaa

SEQ ID NO: 672443 - DNA, 33 bp, Homo sapien
ctctgttagttacccaagtattagctagaacca

SEQ ID NO: 672444 - DNA, 33 bp, Homo sapien
ctctgttagttacccatgtattagctagaacca

SEQ ID NO: 672445 - DNA, 33 bp, Homo sapien
tgtttgagagttcagacatttttgggacacagt

SEQ ID NO: 672446 - DNA, 33 bp, Homo sapien
tgtttgagagttcagatatttttgggacacagt

SEQ ID NO: 672447 - DNA, 33 bp, Homo sapien
acattagttagccacccgagaatagtgcctgat

SEQ ID NO: 672448 - DNA, 33 bp, Homo sapien
acattagttagccacctgagaatagtgcctgat

SEQ ID NO: 672449 - DNA, 33 bp, Homo sapien
ctggctcttctatgcactatttccttttaaagc

SEQ ID NO: 672450 - DNA, 33 bp, Homo sapien
ctggctcttctatgcagtatttccttttaaagc

SEQ ID NO: 672451 - DNA, 33 bp, Homo sapien
gataggaaggtcgtaacgaaaagaataatgagg

SEQ ID NO: 672452 - DNA, 33 bp, Homo sapien
gataggaaggtcgtaatgaaaagaataatgagg

SEQ ID NO: 672453 - DNA, 33 bp, Homo sapien
ttgatgtgcctcagcgccaacttcccaagtctc

SEQ ID NO: 672454 - DNA, 33 bp, Homo sapien
ttgatgtgcctcagcgtcaacttcccaagtctc

SEQ ID NO: 672455 - DNA, 33 bp, Homo sapien
cctcccagctaatgataagccatttctttaaga

SEQ ID NO: 672456 - DNA, 33 bp, Homo sapien
cctcccagctaatgatgagccatttctttaaga

SEQ ID NO: 672457 - DNA, 33 bp, Homo sapien
acaatatcacagcatacatataaactttctgcg

SEQ ID NO: 672458 - DNA, 33 bp, Homo sapien
acaatatcacagcatagatataaactttctgcg

SEQ ID NO: 672459 - DNA, 33 bp, Homo sapien
gtggtcttaggctatgccagaggacacaatatg

SEQ ID NO: 672460 - DNA, 33 bp, Homo sapien
gtggtcttaggctatgtcagaggacacaatatg

SEQ ID NO: 672461 - DNA, 33 bp, Homo sapien
tgggattgggttaaaaatctccctattgagcac

SEQ ID NO: 672462 - DNA, 33 bp, Homo sapien
tgggattgggttaaaagtctccctattgagcac

SEQ ID NO: 672463 - DNA, 33 bp, Homo sapien
caaccgattctgtggactactatacagtgggat

SEQ ID NO: 672464 - DNA, 33 bp, Homo sapien
caaccgattctgtggattactatacagtgggat

SEQ ID NO: 672465 - DNA, 33 bp, Homo sapien
gctagcagataactgaaaggtgattggccaaat

SEQ ID NO: 672466 - DNA, 33 bp, Homo sapien
gctagcagataactgagaggtgattggccaaat

SEQ ID NO: 672467 - DNA, 33 bp, Homo sapien
agcatccatggaactaaagaagggtactcatta

SEQ ID NO: 672468 - DNA, 33 bp, Homo sapien
agcatccatggaactatagaagggtactcatta

SEQ ID NO: 672469 - DNA, 33 bp, Homo sapien
tgagtgctcggccactaagctgctagtcccctt

SEQ ID NO: 672470 - DNA, 33 bp, Homo sapien
tgagtgctcggccacttagctgctagtcccctt

SEQ ID NO: 672471 - DNA, 33 bp, Homo sapien
actgtgcagctaaccaacagtcattgtgtttat

SEQ ID NO: 672472 - DNA, 33 bp, Homo sapien
actgtgcagctaaccagcagtcattgtgtttat

SEQ ID NO: 672473 - DNA, 33 bp, Homo sapien
aaaaaatttctttggaaatgagcttaccttcag

SEQ ID NO: 672474 - DNA, 33 bp, Homo sapien
aaaaaatttctttggatatgagcttaccttcag

SEQ ID NO: 672475 - DNA, 33 bp, Homo sapien
cattagaaatcacaggaaacaattaatccgttt

SEQ ID NO: 672476 - DNA, 33 bp, Homo sapien
cattagaaatcacaggcaacaattaatccgttt

SEQ ID NO: 672477 - DNA, 33 bp, Homo sapien
tataggtttgtcctcacgtggtgcaaggggtaa

SEQ ID NO: 672478 - DNA, 33 bp, Homo sapien
tataggtttgtcctcaggtggtgcaaggggtaa

SEQ ID NO: 672479 - DNA, 33 bp, Homo sapien
tctgcagaccaaccacaagtagaacagagaaac

SEQ ID NO: 672480 - DNA, 33 bp, Homo sapien
tctgcagaccaaccacgagtagaacagagaaac

SEQ ID NO: 672481 - DNA, 33 bp, Homo sapien
atgtgataacagcgaaaacgtgtttggaattag

SEQ ID NO: 672482 - DNA, 33 bp, Homo sapien
atgtgataacagcgaagacgtgtttggaattag

SEQ ID NO: 672483 - DNA, 33 bp, Homo sapien
gctgtaaactgatagaagggcttagagaatata

SEQ ID NO: 672484 - DNA, 33 bp, Homo sapien
gctgtaaactgatagaggggcttagagaatata

SEQ ID NO: 672485 - DNA, 33 bp, Homo sapien
catagcaaataaaaacacagcttttggaagttg

SEQ ID NO: 672486 - DNA, 33 bp, Homo sapien
catagcaaataaaaactcagcttttggaagttg

SEQ ID NO: 672487 - DNA, 33 bp, Homo sapien
attaggatatgaaataataagcttgaattctac

SEQ ID NO: 672488 - DNA, 33 bp, Homo sapien
attaggatatgaaatactaagcttgaattctac

SEQ ID NO: 672489 - DNA, 33 bp, Homo sapien
attctcatctttaaaactggataacactggttg

SEQ ID NO: 672490 - DNA, 33 bp, Homo sapien
attctcatctttaaaattggataacactggttg

SEQ ID NO: 672491 - DNA, 33 bp, Homo sapien
cgtgaacaaaatattacgttacaattctagatg

SEQ ID NO: 672492 - DNA, 33 bp, Homo sapien
cgtgaacaaaatattaggttacaattctagatg

SEQ ID NO: 672493 - DNA, 33 bp, Homo sapien
tattttactcaggataagagagtcaacattgca

SEQ ID NO: 672494 - DNA, 33 bp, Homo sapien
tattttactcaggataggagagtcaacattgca

SEQ ID NO: 672495 - DNA, 33 bp, Homo sapien
acatcgagaaaatgatcaggaattgtaaggagt

SEQ ID NO: 672496 - DNA, 33 bp, Homo sapien
acatcgagaaaatgattaggaattgtaaggagt

SEQ ID NO: 672497 - DNA, 33 bp, Homo sapien
aggaagttcaggtgccaactgagaaatccagat

SEQ ID NO: 672498 - DNA, 33 bp, Homo sapien
aggaagttcaggtgcccactgagaaatccagat

SEQ ID NO: 672499 - DNA, 33 bp, Homo sapien
gaaagttctagctaataacatatgttctgaaat

SEQ ID NO: 672500 - DNA, 33 bp, Homo sapien
gaaagttctagctaattacatatgttctgaaat

SEQ ID NO: 672501 - DNA, 33 bp, Homo sapien
aaagaacaagaatcaaatatgtcaaactattag

SEQ ID NO: 672502 - DNA, 33 bp, Homo sapien
aaagaacaagaatcaattatgtcaaactattag

SEQ ID NO: 672503 - DNA, 33 bp, Homo sapien
cttactgtcagataaactcaactggtgccttta

SEQ ID NO: 672504 - DNA, 33 bp, Homo sapien
cttactgtcagataaattcaactggtgccttta

SEQ ID NO: 672505 - DNA, 33 bp, Homo sapien
ttctgtggcctgtacacctggtaggcaagactg

SEQ ID NO: 672506 - DNA, 33 bp, Homo sapien
ttctgtggcctgtacatctggtaggcaagactg

SEQ ID NO: 672507 - DNA, 33 bp, Homo sapien
taaatcctatctgggaaaaaatatatagtagat

SEQ ID NO: 672508 - DNA, 33 bp, Homo sapien
taaatcctatctgggagaaaatatatagtagat

SEQ ID NO: 672509 - DNA, 33 bp, Homo sapien
caactagtcaagtagaacatttatcatatcccc

SEQ ID NO: 672510 - DNA, 33 bp, Homo sapien
caactagtcaagtagagcatttatcatatcccc

SEQ ID NO: 672511 - DNA, 33 bp, Homo sapien
gtactgagttataaaacggaagattattagctt

SEQ ID NO: 672512 - DNA, 33 bp, Homo sapien
gtactgagttataaaatggaagattattagctt

SEQ ID NO: 672513 - DNA, 33 bp, Homo sapien
aatcatttggcaagataaaacatttctctgaga

SEQ ID NO: 672514 - DNA, 33 bp, Homo sapien
aatcatttggcaagatgaaacatttctctgaga

SEQ ID NO: 672515 - DNA, 33 bp, Homo sapien
atgacaacaagcaaacccttagtcaaatataaa

SEQ ID NO: 672516 - DNA, 33 bp, Homo sapien
atgacaacaagcaaactcttagtcaaatataaa

SEQ ID NO: 672517 - DNA, 33 bp, Homo sapien
taataatttgtatggaacgctgtatggagcgct

SEQ ID NO: 672518 - DNA, 33 bp, Homo sapien
taataatttgtatggagcgctgtatggagcgct

SEQ ID NO: 672519 - DNA, 33 bp, Homo sapien
atattccacagagttgaatcaagtttattcata

SEQ ID NO: 672520 - DNA, 33 bp, Homo sapien
atattccacagagttggatcaagtttattcata

SEQ ID NO: 672521 - DNA, 33 bp, Homo sapien
aaatttcatgcaaatcacttcaaccaaacgagg

SEQ ID NO: 672522 - DNA, 33 bp, Homo sapien
aaatttcatgcaaatcgcttcaaccaaacgagg

SEQ ID NO: 672523 - DNA, 33 bp, Homo sapien
tttaaaaattcagcccaaaacagaacatatcat

SEQ ID NO: 672524 - DNA, 33 bp, Homo sapien
tttaaaaattcagccccaaacagaacatatcat

SEQ ID NO: 672525 - DNA, 33 bp, Homo sapien
atgttctagagatgtaaaaaaaaactataactg

SEQ ID NO: 672526 - DNA, 33 bp, Homo sapien
atgttctagagatgtagaaaaaaactataactg

SEQ ID NO: 672527 - DNA, 33 bp, Homo sapien
gttttgtgtagccatcaaagttgtggaaattta

SEQ ID NO: 672528 - DNA, 33 bp, Homo sapien
gttttgtgtagccatccaagttgtggaaattta

SEQ ID NO: 672529 - DNA, 33 bp, Homo sapien
tttaaacatttcatcactgaactaacagattaa

SEQ ID NO: 672530 - DNA, 33 bp, Homo sapien
tttaaacatttcatcattgaactaacagattaa

SEQ ID NO: 672531 - DNA, 33 bp, Homo sapien
tgtagcacctcccataaacgaattcttccttct

SEQ ID NO: 672532 - DNA, 33 bp, Homo sapien
tgtagcacctcccatagacgaattcttccttct

SEQ ID NO: 672533 - DNA, 33 bp, Homo sapien
tctgtatcctagcaaaaacaatattgggaaagc

SEQ ID NO: 672534 - DNA, 33 bp, Homo sapien
tctgtatcctagcaaagacaatattgggaaagc

SEQ ID NO: 672535 - DNA, 33 bp, Homo sapien
cttaaaataacctgcaacaatcgaacaccaatc

SEQ ID NO: 672536 - DNA, 33 bp, Homo sapien
cttaaaataacctgcagcaatcgaacaccaatc

SEQ ID NO: 672537 - DNA, 33 bp, Homo sapien
cacacacacattcttaactggaaaaaagcgcca

SEQ ID NO: 672538 - DNA, 33 bp, Homo sapien
cacacacacattcttagctggaaaaaagcgcca

SEQ ID NO: 672539 - DNA, 33 bp, Homo sapien
cagaaaatataggaggacattgcacatagcaaa

SEQ ID NO: 672540 - DNA, 33 bp, Homo sapien
cagaaaatataggaggtcattgcacatagcaaa

SEQ ID NO: 672541 - DNA, 33 bp, Homo sapien
agattaaactcacaaagcaataattacatatta

SEQ ID NO: 672542 - DNA, 33 bp, Homo sapien
agattaaactcacaaatcaataattacatatta

SEQ ID NO: 672543 - DNA, 33 bp, Homo sapien
gtttaagtgtatgtaccggtatttttcttcagt

SEQ ID NO: 672544 - DNA, 33 bp, Homo sapien
gtttaagtgtatgtactggtatttttcttcagt

SEQ ID NO: 672545 - DNA, 33 bp, Homo sapien
tgtttttccattactcactaatctcctttataa

SEQ ID NO: 672546 - DNA, 33 bp, Homo sapien
tgtttttccattactcgctaatctcctttataa

SEQ ID NO: 672547 - DNA, 33 bp, Homo sapien
ttaaaaccctgacatcaaataatcaaggaaatt

SEQ ID NO: 672548 - DNA, 33 bp, Homo sapien
ttaaaaccctgacatccaataatcaaggaaatt

SEQ ID NO: 672549 - DNA, 33 bp, Homo sapien
aatatgctcccttccaatgaagctcaagggaag

SEQ ID NO: 672550 - DNA, 33 bp, Homo sapien
aatatgctcccttccagtgaagctcaagggaag

SEQ ID NO: 672551 - DNA, 33 bp, Homo sapien
catgattttctctttcaatgtggtcaattagct

SEQ ID NO: 672552 - DNA, 33 bp, Homo sapien
catgattttctctttctatgtggtcaattagct

SEQ ID NO: 672553 - DNA, 33 bp, Homo sapien
agacagcacttagcaacagcaaatcaaatgcag

SEQ ID NO: 672554 - DNA, 33 bp, Homo sapien
agacagcacttagcaatagcaaatcaaatgcag

SEQ ID NO: 672555 - DNA, 33 bp, Homo sapien
gctctggcacctactccgaatttgtggattttc

SEQ ID NO: 672556 - DNA, 33 bp, Homo sapien
gctctggcacctactctgaatttgtggattttc

SEQ ID NO: 672557 - DNA, 33 bp, Homo sapien
acaattttatcgaccgaaaaaatcatggagacg

SEQ ID NO: 672558 - DNA, 33 bp, Homo sapien
acaattttatcgaccgtaaaaatcatggagacg

SEQ ID NO: 672559 - DNA, 33 bp, Homo sapien
aaactgatgattacacaaaaagagaaagaaagg

SEQ ID NO: 672560 - DNA, 33 bp, Homo sapien
aaactgatgattacacgaaaagagaaagaaagg

SEQ ID NO: 672561 - DNA, 33 bp, Homo sapien
ttttccaaaagctttcaaaaatctgacattgat

SEQ ID NO: 672562 - DNA, 33 bp, Homo sapien
ttttccaaaagctttccaaaatctgacattgat

SEQ ID NO: 672563 - DNA, 33 bp, Homo sapien
gagaaaagccaaagaaataaatctgagttacct

SEQ ID NO: 672564 - DNA, 33 bp, Homo sapien
gagaaaagccaaagaagtaaatctgagttacct

SEQ ID NO: 672565 - DNA, 33 bp, Homo sapien
gaaagaaaaatggggcaaaacctactatgccac

SEQ ID NO: 672566 - DNA, 33 bp, Homo sapien
gaaagaaaaatggggcgaaacctactatgccac

SEQ ID NO: 672567 - DNA, 33 bp, Homo sapien
gtaggacaaaaaacacaatagagctgcaaacac

SEQ ID NO: 672568 - DNA, 33 bp, Homo sapien
gtaggacaaaaaacactatagagctgcaaacac

SEQ ID NO: 672569 - DNA, 33 bp, Homo sapien
ataaggctattgtgagaatcaaattagataatt

SEQ ID NO: 672570 - DNA, 33 bp, Homo sapien
ataaggctattgtgagtatcaaattagataatt

SEQ ID NO: 672571 - DNA, 33 bp, Homo sapien
cctcttttgcattacacagatgttctctcttcc

SEQ ID NO: 672572 - DNA, 33 bp, Homo sapien
cctcttttgcattacatagatgttctctcttcc

SEQ ID NO: 672573 - DNA, 33 bp, Homo sapien
caaagatgcctgactacataaaattctcaggca

SEQ ID NO: 672574 - DNA, 33 bp, Homo sapien
caaagatgcctgactatataaaattctcaggca

SEQ ID NO: 672575 - DNA, 33 bp, Homo sapien
aatggttggcaattccaatagttaactactcca

SEQ ID NO: 672576 - DNA, 33 bp, Homo sapien
aatggttggcaattccgatagttaactactcca

SEQ ID NO: 672577 - DNA, 33 bp, Homo sapien
aagccaccacactgccagcgaatagtgctggag

SEQ ID NO: 672578 - DNA, 33 bp, Homo sapien
aagccaccacactgccggcgaatagtgctggag

SEQ ID NO: 672579 - DNA, 33 bp, Homo sapien
gagcacaggaagcataactgggaactgtgctta

SEQ ID NO: 672580 - DNA, 33 bp, Homo sapien
gagcacaggaagcatagctgggaactgtgctta

SEQ ID NO: 672581 - DNA, 33 bp, Homo sapien
tgtgctccataagagacgtataaaaatgtgtcc

SEQ ID NO: 672582 - DNA, 33 bp, Homo sapien
tgtgctccataagagatgtataaaaatgtgtcc

SEQ ID NO: 672583 - DNA, 33 bp, Homo sapien
cctccctttattctccaaagtgtcctagtttag

SEQ ID NO: 672584 - DNA, 33 bp, Homo sapien
cctccctttattctccgaagtgtcctagtttag

SEQ ID NO: 672585 - DNA, 33 bp, Homo sapien
tgtttagagaaaaaaactgcaacactaaatcag

SEQ ID NO: 672586 - DNA, 33 bp, Homo sapien
tgtttagagaaaaaaattgcaacactaaatcag

SEQ ID NO: 672587 - DNA, 33 bp, Homo sapien
ttatctgtataaaatggacctcagtaatagtgc

SEQ ID NO: 672588 - DNA, 33 bp, Homo sapien
ttatctgtataaaatgtacctcagtaatagtgc

SEQ ID NO: 672589 - DNA, 33 bp, Homo sapien
gcactagcttcatgaacaagtgactggtgctgg

SEQ ID NO: 672590 - DNA, 33 bp, Homo sapien
gcactagcttcatgaataagtgactggtgctgg

SEQ ID NO: 672591 - DNA, 33 bp, Homo sapien
cagctctgtattcctccaaatattattgagcgt

SEQ ID NO: 672592 - DNA, 33 bp, Homo sapien
cagctctgtattcctctaaatattattgagcgt

SEQ ID NO: 672593 - DNA, 33 bp, Homo sapien
tgagtccagttctttccagtcagggggttctga

SEQ ID NO: 672594 - DNA, 33 bp, Homo sapien
tgagtccagttctttctagtcagggggttctga

SEQ ID NO: 672595 - DNA, 33 bp, Homo sapien
aaaaatttgctgacaaatccatgggttcaaact

SEQ ID NO: 672596 - DNA, 33 bp, Homo sapien
aaaaatttgctgacaagtccatgggttcaaact

SEQ ID NO: 672597 - DNA, 33 bp, Homo sapien
atctcatagtgcattacagaatacccaccatat

SEQ ID NO: 672598 - DNA, 33 bp, Homo sapien
atctcatagtgcattatagaatacccaccatat

SEQ ID NO: 672599 - DNA, 33 bp, Homo sapien
aaagctttataacccactgggaaaagttctatg

SEQ ID NO: 672600 - DNA, 33 bp, Homo sapien
aaagctttataacccattgggaaaagttctatg

SEQ ID NO: 672601 - DNA, 33 bp, Homo sapien
agggttatttccatagaatcaatcagcacacat

SEQ ID NO: 672602 - DNA, 33 bp, Homo sapien
agggttatttccataggatcaatcagcacacat

SEQ ID NO: 672603 - DNA, 33 bp, Homo sapien
gcctttaccttgagtgaaatatgtaaagtccta

SEQ ID NO: 672604 - DNA, 33 bp, Homo sapien
gcctttaccttgagtgcaatatgtaaagtccta

SEQ ID NO: 672605 - DNA, 33 bp, Homo sapien
gcagtgatgactaaaaaggacacaaatgtaaaa

SEQ ID NO: 672606 - DNA, 33 bp, Homo sapien
gcagtgatgactaaaatggacacaaatgtaaaa

SEQ ID NO: 672607 - DNA, 33 bp, Homo sapien
tcaatgtggttcctatcaaaattctcattgcat

SEQ ID NO: 672608 - DNA, 33 bp, Homo sapien
tcaatgtggttcctatgaaaattctcattgcat

SEQ ID NO: 672609 - DNA, 33 bp, Homo sapien
ggattcgtcctgcttagatcacagttggagatt

SEQ ID NO: 672610 - DNA, 33 bp, Homo sapien
ggattcgtcctgcttatatcacagttggagatt

SEQ ID NO: 672611 - DNA, 33 bp, Homo sapien
atatcaaaattgcttccattgttactgtctgaa

SEQ ID NO: 672612 - DNA, 33 bp, Homo sapien
atatcaaaattgcttctattgttactgtctgaa

SEQ ID NO: 672613 - DNA, 33 bp, Homo sapien
gaattatctaagaatcaaaacagactcctctag

SEQ ID NO: 672614 - DNA, 33 bp, Homo sapien
gaattatctaagaatcgaaacagactcctctag

SEQ ID NO: 672615 - DNA, 33 bp, Homo sapien
ttttaaacacgattgacgaaactatttttaaaa

SEQ ID NO: 672616 - DNA, 33 bp, Homo sapien
ttttaaacacgattgatgaaactatttttaaaa

SEQ ID NO: 672617 - DNA, 33 bp, Homo sapien
agagcaagctttttacacaattatgtatattgt

SEQ ID NO: 672618 - DNA, 33 bp, Homo sapien
agagcaagctttttacgcaattatgtatattgt

SEQ ID NO: 672619 - DNA, 33 bp, Homo sapien
ggggatttttctcctcaaaccaaaaatatagac

SEQ ID NO: 672620 - DNA, 33 bp, Homo sapien
ggggatttttctcctcgaaccaaaaatatagac

SEQ ID NO: 672621 - DNA, 33 bp, Homo sapien
tggcacctgtatcttccctcctggcttcactgg

SEQ ID NO: 672622 - DNA, 33 bp, Homo sapien
tggcacctgtatcttctctcctggcttcactgg

SEQ ID NO: 672623 - DNA, 33 bp, Homo sapien
tacttattagtcaagacgtgcaagaatgtcatt

SEQ ID NO: 672624 - DNA, 33 bp, Homo sapien
tacttattagtcaagatgtgcaagaatgtcatt

SEQ ID NO: 672625 - DNA, 33 bp, Homo sapien
gtattgaaggattttaagaaaggctttggccaa

SEQ ID NO: 672626 - DNA, 33 bp, Homo sapien
gtattgaaggattttaggaaaggctttggccaa

SEQ ID NO: 672627 - DNA, 33 bp, Homo sapien
ttttctgtttccgtgaactgggctgggctttct

SEQ ID NO: 672628 - DNA, 33 bp, Homo sapien
ttttctgtttccgtgagctgggctgggctttct

SEQ ID NO: 672629 - DNA, 33 bp, Homo sapien
cagaacttgttaattcgctactggaaatcaggc

SEQ ID NO: 672630 - DNA, 33 bp, Homo sapien
cagaacttgttaattctctactggaaatcaggc

SEQ ID NO: 672631 - DNA, 33 bp, Homo sapien
cttatatgcttgcaataaaaaaagtgcagaatt

SEQ ID NO: 672632 - DNA, 33 bp, Homo sapien
cttatatgcttgcaatcaaaaaagtgcagaatt

SEQ ID NO: 672633 - DNA, 33 bp, Homo sapien
cagagctattaaagcaatgatttttttactcag

SEQ ID NO: 672634 - DNA, 33 bp, Homo sapien
cagagctattaaagcactgatttttttactcag

SEQ ID NO: 672635 - DNA, 33 bp, Homo sapien
aaagttcatgcttcaaagaacataacacagtac

SEQ ID NO: 672636 - DNA, 33 bp, Homo sapien
aaagttcatgcttcaaggaacataacacagtac

SEQ ID NO: 672637 - DNA, 33 bp, Homo sapien
ggcagtattgggtcataagcaagaatatgaaac

SEQ ID NO: 672638 - DNA, 33 bp, Homo sapien
ggcagtattgggtcatgagcaagaatatgaaac

SEQ ID NO: 672639 - DNA, 33 bp, Homo sapien
ttcttaatggcattgacaacagtaaatcctttc

SEQ ID NO: 672640 - DNA, 33 bp, Homo sapien
ttcttaatggcattgagaacagtaaatcctttc

SEQ ID NO: 672641 - DNA, 33 bp, Homo sapien
catttgtattttataactgctattgatttaaga

SEQ ID NO: 672642 - DNA, 33 bp, Homo sapien
catttgtattttataagtgctattgatttaaga

SEQ ID NO: 672643 - DNA, 33 bp, Homo sapien
ttcacattttttcccaatgaatcttaaatcaat

SEQ ID NO: 672644 - DNA, 33 bp, Homo sapien
ttcacattttttcccagtgaatcttaaatcaat

SEQ ID NO: 672645 - DNA, 33 bp, Homo sapien
tacccccaggttcccaatggatgtttttcttca

SEQ ID NO: 672646 - DNA, 33 bp, Homo sapien
tacccccaggttcccagtggatgtttttcttca

SEQ ID NO: 672647 - DNA, 33 bp, Homo sapien
cagaattctgttaaacacagcaaaagggaatgc

SEQ ID NO: 672648 - DNA, 33 bp, Homo sapien
cagaattctgttaaacccagcaaaagggaatgc

SEQ ID NO: 672649 - DNA, 33 bp, Homo sapien
aagccccaaggcagatcaccctggcagctgtag

SEQ ID NO: 672650 - DNA, 33 bp, Homo sapien
aagccccaaggcagattaccctggcagctgtag

SEQ ID NO: 672651 - DNA, 33 bp, Homo sapien
ggtttctgaagaggtacgccagaggaaaagtgc

SEQ ID NO: 672652 - DNA, 33 bp, Homo sapien
ggtttctgaagaggtatgccagaggaaaagtgc

SEQ ID NO: 672653 - DNA, 33 bp, Homo sapien
atgctattttcaaaagcagaattcagtgcagtc

SEQ ID NO: 672654 - DNA, 33 bp, Homo sapien
atgctattttcaaaaggagaattcagtgcagtc

SEQ ID NO: 672655 - DNA, 33 bp, Homo sapien
caaaaaaatgagattcaaaaaatgatccatgct

SEQ ID NO: 672656 - DNA, 33 bp, Homo sapien
caaaaaaatgagattcgaaaaatgatccatgct

SEQ ID NO: 672657 - DNA, 33 bp, Homo sapien
ttaaatggcattaacagggacagtaaaactctt

SEQ ID NO: 672658 - DNA, 33 bp, Homo sapien
ttaaatggcattaacatggacagtaaaactctt

SEQ ID NO: 672659 - DNA, 33 bp, Homo sapien
tggccagggcttaaagacaacctttctgaacaa

SEQ ID NO: 672660 - DNA, 33 bp, Homo sapien
tggccagggcttaaaggcaacctttctgaacaa

SEQ ID NO: 672661 - DNA, 33 bp, Homo sapien
gataatttctaccatacgattggcaccattata

SEQ ID NO: 672662 - DNA, 33 bp, Homo sapien
gataatttctaccatatgattggcaccattata

SEQ ID NO: 672663 - DNA, 33 bp, Homo sapien
tcttttgtcttgttaacagtagccgttctaact

SEQ ID NO: 672664 - DNA, 33 bp, Homo sapien
tcttttgtcttgttaagagtagccgttctaact

SEQ ID NO: 672665 - DNA, 33 bp, Homo sapien
ctctcattggccagaactgcattgaacagccat

SEQ ID NO: 672666 - DNA, 33 bp, Homo sapien
ctctcattggccagaattgcattgaacagccat

SEQ ID NO: 672667 - DNA, 33 bp, Homo sapien
cccgagagaattagaccgtacatttttcaatct

SEQ ID NO: 672668 - DNA, 33 bp, Homo sapien
cccgagagaattagactgtacatttttcaatct

SEQ ID NO: 672669 - DNA, 33 bp, Homo sapien
acatgtgttatatctgcagcccaaaagagtctg

SEQ ID NO: 672670 - DNA, 33 bp, Homo sapien
acatgtgttatatctgtagcccaaaagagtctg

SEQ ID NO: 672671 - DNA, 33 bp, Homo sapien
cttgaggctgtatctcaacttttctgatttttc

SEQ ID NO: 672672 - DNA, 33 bp, Homo sapien
cttgaggctgtatctccacttttctgatttttc

SEQ ID NO: 672673 - DNA, 33 bp, Homo sapien
agtggtgctctggttgcaaactcaggaagcagg

SEQ ID NO: 672674 - DNA, 33 bp, Homo sapien
agtggtgctctggttggaaactcaggaagcagg

SEQ ID NO: 672675 - DNA, 33 bp, Homo sapien
aattgttcaggcccagaaatatcccagacacat

SEQ ID NO: 672676 - DNA, 33 bp, Homo sapien
aattgttcaggcccaggaatatcccagacacat

SEQ ID NO: 672677 - DNA, 33 bp, Homo sapien
catgcgatgaacatggcaactttctgattgcct

SEQ ID NO: 672678 - DNA, 33 bp, Homo sapien
catgcgatgaacatggtaactttctgattgcct

SEQ ID NO: 672679 - DNA, 33 bp, Homo sapien
gctttgaccatttctaagctaattataatcttt

SEQ ID NO: 672680 - DNA, 33 bp, Homo sapien
gctttgaccatttctaggctaattataatcttt

SEQ ID NO: 672681 - DNA, 33 bp, Homo sapien
attagtgccatgcctacgcaaggaaattatcag

SEQ ID NO: 672682 - DNA, 33 bp, Homo sapien
attagtgccatgcctatgcaaggaaattatcag

SEQ ID NO: 672683 - DNA, 33 bp, Homo sapien
gaaattcttagttgcaaatattcccttttttaa

SEQ ID NO: 672684 - DNA, 33 bp, Homo sapien
gaaattcttagttgcatatattcccttttttaa

SEQ ID NO: 672685 - DNA, 33 bp, Homo sapien
attatagcacagacgtcaaaacattttcaccta

SEQ ID NO: 672686 - DNA, 33 bp, Homo sapien
attatagcacagacgttaaaacattttcaccta

SEQ ID NO: 672687 - DNA, 33 bp, Homo sapien
tagacaatgtgaaatcccattacactacttaga

SEQ ID NO: 672688 - DNA, 33 bp, Homo sapien
tagacaatgtgaaatctcattacactacttaga

SEQ ID NO: 672689 - DNA, 33 bp, Homo sapien
cagttgctgattgagggagccaaaaagagggtt

SEQ ID NO: 672690 - DNA, 33 bp, Homo sapien
cagttgctgattgaggtagccaaaaagagggtt

SEQ ID NO: 672691 - DNA, 33 bp, Homo sapien
aaagtcagtgctttgtaaaggtatgttaatgag

SEQ ID NO: 672692 - DNA, 33 bp, Homo sapien
aaagtcagtgctttgtgaaggtatgttaatgag

SEQ ID NO: 672693 - DNA, 33 bp, Homo sapien
aaaatttcactttatcaacatcgaggtcaatca

SEQ ID NO: 672694 - DNA, 33 bp, Homo sapien
aaaatttcactttatcgacatcgaggtcaatca

SEQ ID NO: 672695 - DNA, 33 bp, Homo sapien
gttatttattattgcccaaactgcttgcatgtt

SEQ ID NO: 672696 - DNA, 33 bp, Homo sapien
gttatttattattgcctaaactgcttgcatgtt

SEQ ID NO: 672697 - DNA, 33 bp, Homo sapien
ggtattgttagtggagccctttctattgaattt

SEQ ID NO: 672698 - DNA, 33 bp, Homo sapien
ggtattgttagtggagtcctttctattgaattt

SEQ ID NO: 672699 - DNA, 33 bp, Homo sapien
aagtgtttctgatagaagaagtagcaaggtaaa

SEQ ID NO: 672700 - DNA, 33 bp, Homo sapien
aagtgtttctgatagaggaagtagcaaggtaaa

SEQ ID NO: 672701 - DNA, 33 bp, Homo sapien
tgcagatttgctgctacggaggtgtatgtctaa

SEQ ID NO: 672702 - DNA, 33 bp, Homo sapien
tgcagatttgctgctatggaggtgtatgtctaa

SEQ ID NO: 672703 - DNA, 33 bp, Homo sapien
tgtttatccaaattcaaacaatatttacctttt

SEQ ID NO: 672704 - DNA, 33 bp, Homo sapien
tgtttatccaaattcagacaatatttacctttt

SEQ ID NO: 672705 - DNA, 33 bp, Homo sapien
cacagcatcccatccaagtttacaactcatgaa

SEQ ID NO: 672706 - DNA, 33 bp, Homo sapien
cacagcatcccatccacgtttacaactcatgaa

SEQ ID NO: 672707 - DNA, 33 bp, Homo sapien
agagctatcttagcaacgtattagcttcatctc

SEQ ID NO: 672708 - DNA, 33 bp, Homo sapien
agagctatcttagcaatgtattagcttcatctc

SEQ ID NO: 672709 - DNA, 33 bp, Homo sapien
agagtgttagtggtataaacatcagacactgct

SEQ ID NO: 672710 - DNA, 33 bp, Homo sapien
agagtgttagtggtatgaacatcagacactgct

SEQ ID NO: 672711 - DNA, 33 bp, Homo sapien
gtgaaaatatgttggccatatatacctgatata

SEQ ID NO: 672712 - DNA, 33 bp, Homo sapien
gtgaaaatatgttggctatatatacctgatata

SEQ ID NO: 672713 - DNA, 33 bp, Homo sapien
tgcatctccctaacaacaatgtgtacttttcaa

SEQ ID NO: 672714 - DNA, 33 bp, Homo sapien
tgcatctccctaacaagaatgtgtacttttcaa

SEQ ID NO: 672715 - DNA, 33 bp, Homo sapien
gggtgtatgcaaaaaaaatggtcaggaagaaac

SEQ ID NO: 672716 - DNA, 33 bp, Homo sapien
gggtgtatgcaaaaaacatggtcaggaagaaac

SEQ ID NO: 672717 - DNA, 33 bp, Homo sapien
gtacagcaacatcgtcacctcattctgaactgg

SEQ ID NO: 672718 - DNA, 33 bp, Homo sapien
gtacagcaacatcgtcgcctcattctgaactgg

SEQ ID NO: 672719 - DNA, 33 bp, Homo sapien
ctatatgacaaaaacaagaggttagaacatccc

SEQ ID NO: 672720 - DNA, 33 bp, Homo sapien
ctatatgacaaaaacaggaggttagaacatccc

SEQ ID NO: 672721 - DNA, 33 bp, Homo sapien
cacctaaaagaggttacaatcttggtcaaaaag

SEQ ID NO: 672722 - DNA, 33 bp, Homo sapien
cacctaaaagaggttataatcttggtcaaaaag

SEQ ID NO: 672723 - DNA, 33 bp, Homo sapien
aaagtgttttgtgggaatacgtttactgtaaca

SEQ ID NO: 672724 - DNA, 33 bp, Homo sapien
aaagtgttttgtgggagtacgtttactgtaaca

SEQ ID NO: 672725 - DNA, 33 bp, Homo sapien
gacatatattcagacacgcataaaatttaaact

SEQ ID NO: 672726 - DNA, 33 bp, Homo sapien
gacatatattcagacatgcataaaatttaaact

SEQ ID NO: 672727 - DNA, 33 bp, Homo sapien
ccaaaataggaacaaacgaaatggacattcaga

SEQ ID NO: 672728 - DNA, 33 bp, Homo sapien
ccaaaataggaacaaatgaaatggacattcaga

SEQ ID NO: 672729 - DNA, 33 bp, Homo sapien
ttctttcttacaatcagatggcttaaaaaaaaa

SEQ ID NO: 672730 - DNA, 33 bp, Homo sapien
ttctttcttacaatcatatggcttaaaaaaaaa

SEQ ID NO: 672731 - DNA, 33 bp, Homo sapien
gagtgacttgagttgaataataaaatgctggtt

SEQ ID NO: 672732 - DNA, 33 bp, Homo sapien
gagtgacttgagttgagtaataaaatgctggtt

SEQ ID NO: 672733 - DNA, 33 bp, Homo sapien
gtacaatgtctaaaggaatggttttagcttgct

SEQ ID NO: 672734 - DNA, 33 bp, Homo sapien
gtacaatgtctaaaggcatggttttagcttgct

SEQ ID NO: 672735 - DNA, 33 bp, Homo sapien
ttatggtctaagttgactacttccatatcatcc

SEQ ID NO: 672736 - DNA, 33 bp, Homo sapien
ttatggtctaagttgagtacttccatatcatcc

SEQ ID NO: 672737 - DNA, 33 bp, Homo sapien
attgtttcttgacatacgattactttaatttgt

SEQ ID NO: 672738 - DNA, 33 bp, Homo sapien
attgtttcttgacatatgattactttaatttgt

SEQ ID NO: 672739 - DNA, 33 bp, Homo sapien
cgatccaggagtgtaaagaatgtgaccaagttt

SEQ ID NO: 672740 - DNA, 33 bp, Homo sapien
cgatccaggagtgtaaggaatgtgaccaagttt

SEQ ID NO: 672741 - DNA, 33 bp, Homo sapien
atctgagccatgtttaacctggttaatgtcagc

SEQ ID NO: 672742 - DNA, 33 bp, Homo sapien
atctgagccatgtttagcctggttaatgtcagc

SEQ ID NO: 672743 - DNA, 33 bp, Homo sapien
ctgtgtgatctgtgcgaagtgtggctttatgag

SEQ ID NO: 672744 - DNA, 33 bp, Homo sapien
ctgtgtgatctgtgcggagtgtggctttatgag

SEQ ID NO: 672745 - DNA, 33 bp, Homo sapien
ttcatcatctaagaacaccttgctgccgaagag

SEQ ID NO: 672746 - DNA, 33 bp, Homo sapien
ttcatcatctaagaactccttgctgccgaagag

SEQ ID NO: 672747 - DNA, 33 bp, Homo sapien
catgattaatagtggactacaaagaaataatga

SEQ ID NO: 672748 - DNA, 33 bp, Homo sapien
catgattaatagtggattacaaagaaataatga

SEQ ID NO: 672749 - DNA, 33 bp, Homo sapien
aagcaattccaaatgcaaagagaatatccattc

SEQ ID NO: 672750 - DNA, 33 bp, Homo sapien
aagcaattccaaatgcgaagagaatatccattc

SEQ ID NO: 672751 - DNA, 33 bp, Homo sapien
ccttgtcttcagaaaggatattgaatgaaggta

SEQ ID NO: 672752 - DNA, 33 bp, Homo sapien
ccttgtcttcagaaagtatattgaatgaaggta

SEQ ID NO: 672753 - DNA, 33 bp, Homo sapien
gttcaacactatggaaactttatcatggctaag

SEQ ID NO: 672754 - DNA, 33 bp, Homo sapien
gttcaacactatggaagctttatcatggctaag

SEQ ID NO: 672755 - DNA, 33 bp, Homo sapien
aagatgcacattattacacacgaagcttacagt

SEQ ID NO: 672756 - DNA, 33 bp, Homo sapien
aagatgcacattattatacacgaagcttacagt

SEQ ID NO: 672757 - DNA, 33 bp, Homo sapien
agcatgacctttaggcaagataaactagatcag

SEQ ID NO: 672758 - DNA, 33 bp, Homo sapien
agcatgacctttaggcgagataaactagatcag

SEQ ID NO: 672759 - DNA, 33 bp, Homo sapien
tctaaatgagaaacaaatagatgcagaaaaaag

SEQ ID NO: 672760 - DNA, 33 bp, Homo sapien
tctaaatgagaaacaagtagatgcagaaaaaag

SEQ ID NO: 672761 - DNA, 33 bp, Homo sapien
agtcagtcactgggtgaatactaacactgttaa

SEQ ID NO: 672762 - DNA, 33 bp, Homo sapien
agtcagtcactgggtggatactaacactgttaa

SEQ ID NO: 672763 - DNA, 33 bp, Homo sapien
agactagagaaaaaaaacatagttctagccact

SEQ ID NO: 672764 - DNA, 33 bp, Homo sapien
agactagagaaaaaaaccatagttctagccact

SEQ ID NO: 672765 - DNA, 33 bp, Homo sapien
atctctttgctgtgtaataaacagaggagaaac

SEQ ID NO: 672766 - DNA, 33 bp, Homo sapien
atctctttgctgtgtagtaaacagaggagaaac

SEQ ID NO: 672767 - DNA, 33 bp, Homo sapien
acccctgtgcagttctaaaacgtctttaggcta

SEQ ID NO: 672768 - DNA, 33 bp, Homo sapien
acccctgtgcagttctgaaacgtctttaggcta

SEQ ID NO: 672769 - DNA, 33 bp, Homo sapien
atatgcttttcaaagacagtgagaatgtagctt

SEQ ID NO: 672770 - DNA, 33 bp, Homo sapien
atatgcttttcaaagatagtgagaatgtagctt

SEQ ID NO: 672771 - DNA, 33 bp, Homo sapien
gtatatctgtatatctaaatatctgagtgaaaa

SEQ ID NO: 672772 - DNA, 33 bp, Homo sapien
gtatatctgtatatcttaatatctgagtgaaaa

SEQ ID NO: 672773 - DNA, 33 bp, Homo sapien
aacaaaattctataaacgtagctccatcaagat

SEQ ID NO: 672774 - DNA, 33 bp, Homo sapien
aacaaaattctataaatgtagctccatcaagat

SEQ ID NO: 672775 - DNA, 33 bp, Homo sapien
tcagtgaaaatgtcacccaattactaatttcta

SEQ ID NO: 672776 - DNA, 33 bp, Homo sapien
tcagtgaaaatgtcactcaattactaatttcta

SEQ ID NO: 672777 - DNA, 33 bp, Homo sapien
ctctaagagatttgcccattgagtggcatatat

SEQ ID NO: 672778 - DNA, 33 bp, Homo sapien
ctctaagagatttgcctattgagtggcatatat

SEQ ID NO: 672779 - DNA, 33 bp, Homo sapien
tagttctcttttctaccgctaattctacaagct

SEQ ID NO: 672780 - DNA, 33 bp, Homo sapien
tagttctcttttctactgctaattctacaagct

SEQ ID NO: 672781 - DNA, 33 bp, Homo sapien
tcacttcagtggaataccctttccttcagtcat

SEQ ID NO: 672782 - DNA, 33 bp, Homo sapien
tcacttcagtggaatatcctttccttcagtcat

SEQ ID NO: 672783 - DNA, 33 bp, Homo sapien
catcttcagctacccaataaacctcacagtaaa

SEQ ID NO: 672784 - DNA, 33 bp, Homo sapien
catcttcagctacccagtaaacctcacagtaaa

SEQ ID NO: 672785 - DNA, 33 bp, Homo sapien
tgagacatgattgctcaagaaacaagagaaaag

SEQ ID NO: 672786 - DNA, 33 bp, Homo sapien
tgagacatgattgctcgagaaacaagagaaaag

SEQ ID NO: 672787 - DNA, 33 bp, Homo sapien
atatctttgacaaataagagtataaatcaaaca

SEQ ID NO: 672788 - DNA, 33 bp, Homo sapien
atatctttgacaaataggagtataaatcaaaca

SEQ ID NO: 672789 - DNA, 33 bp, Homo sapien
cctaaaagttgttttgaatacacagcaatagaa

SEQ ID NO: 672790 - DNA, 33 bp, Homo sapien
cctaaaagttgttttggatacacagcaatagaa

SEQ ID NO: 672791 - DNA, 33 bp, Homo sapien
tggattattgggaatgccaaacaggtttcagtg

SEQ ID NO: 672792 - DNA, 33 bp, Homo sapien
tggattattgggaatgtcaaacaggtttcagtg

SEQ ID NO: 672793 - DNA, 33 bp, Homo sapien
gtaggaagaattagaacctaaaaactgtgcaaa

SEQ ID NO: 672794 - DNA, 33 bp, Homo sapien
gtaggaagaattagaatctaaaaactgtgcaaa

SEQ ID NO: 672795 - DNA, 33 bp, Homo sapien
tcaggttttgattctaaggacatacatcctgaa

SEQ ID NO: 672796 - DNA, 33 bp, Homo sapien
tcaggttttgattctagggacatacatcctgaa

SEQ ID NO: 672797 - DNA, 33 bp, Homo sapien
gtgttataaatcaattaaaaaaaagcgaagtat

SEQ ID NO: 672798 - DNA, 33 bp, Homo sapien
gtgttataaatcaatttaaaaaaagcgaagtat

SEQ ID NO: 672799 - DNA, 33 bp, Homo sapien
taatgcttactctttaggtagaaagcttcagaa

SEQ ID NO: 672800 - DNA, 33 bp, Homo sapien
taatgcttactctttatgtagaaagcttcagaa

SEQ ID NO: 672801 - DNA, 33 bp, Homo sapien
actccaagaaccatgcaataagggaaaatgaag

SEQ ID NO: 672802 - DNA, 33 bp, Homo sapien
actccaagaaccatgcgataagggaaaatgaag

SEQ ID NO: 672803 - DNA, 33 bp, Homo sapien
ttttttatgaaagacaaaaggattccagagaag

SEQ ID NO: 672804 - DNA, 33 bp, Homo sapien
ttttttatgaaagacagaaggattccagagaag

SEQ ID NO: 672805 - DNA, 33 bp, Homo sapien
ctgtgcaaccctcatcgcttactcggcatttgt

SEQ ID NO: 672806 - DNA, 33 bp, Homo sapien
ctgtgcaaccctcatctcttactcggcatttgt

SEQ ID NO: 672807 - DNA, 33 bp, Homo sapien
aaacacaattggggcccgacaggactagacact

SEQ ID NO: 672808 - DNA, 33 bp, Homo sapien
aaacacaattggggcctgacaggactagacact

SEQ ID NO: 672809 - DNA, 33 bp, Homo sapien
caaccagaagcagcccaaaagttgtgagtatcc

SEQ ID NO: 672810 - DNA, 33 bp, Homo sapien
caaccagaagcagccccaaagttgtgagtatcc

SEQ ID NO: 672811 - DNA, 33 bp, Homo sapien
aaacctacactaacaactatttggctcttctgt

SEQ ID NO: 672812 - DNA, 33 bp, Homo sapien
aaacctacactaacaattatttggctcttctgt

SEQ ID NO: 672813 - DNA, 33 bp, Homo sapien
agtggcgtcccaactcagagtcaaatgcaaagt

SEQ ID NO: 672814 - DNA, 33 bp, Homo sapien
agtggcgtcccaactcggagtcaaatgcaaagt

SEQ ID NO: 672815 - DNA, 33 bp, Homo sapien
gaaaaataatgcaataactggagtggtaagtag

SEQ ID NO: 672816 - DNA, 33 bp, Homo sapien
gaaaaataatgcaatagctggagtggtaagtag

SEQ ID NO: 672817 - DNA, 33 bp, Homo sapien
tttcttccagtcaccaataagatggttgaattt

SEQ ID NO: 672818 - DNA, 33 bp, Homo sapien
tttcttccagtcaccagtaagatggttgaattt

SEQ ID NO: 672819 - DNA, 33 bp, Homo sapien
gagtatggagaataaaacggtatacaaaagaca

SEQ ID NO: 672820 - DNA, 33 bp, Homo sapien
gagtatggagaataaagcggtatacaaaagaca

SEQ ID NO: 672821 - DNA, 33 bp, Homo sapien
ttatttgacaaaggaaaaaactgaccttctgag

SEQ ID NO: 672822 - DNA, 33 bp, Homo sapien
ttatttgacaaaggaacaaactgaccttctgag

SEQ ID NO: 672823 - DNA, 33 bp, Homo sapien
aacaagcggacccgtaactgtgctcctgttctg

SEQ ID NO: 672824 - DNA, 33 bp, Homo sapien
aacaagcggacccgtagctgtgctcctgttctg

SEQ ID NO: 672825 - DNA, 33 bp, Homo sapien
aaggccatgacataacaactgaaaagtatctac

SEQ ID NO: 672826 - DNA, 33 bp, Homo sapien
aaggccatgacataacgactgaaaagtatctac

SEQ ID NO: 672827 - DNA, 33 bp, Homo sapien
gacagtaaagctactacggaattttctcctcag

SEQ ID NO: 672828 - DNA, 33 bp, Homo sapien
gacagtaaagctactatggaattttctcctcag

SEQ ID NO: 672829 - DNA, 33 bp, Homo sapien
ggtatctctctcagccccaaacaggaaaataat

SEQ ID NO: 672830 - DNA, 33 bp, Homo sapien
ggtatctctctcagcctcaaacaggaaaataat

SEQ ID NO: 672831 - DNA, 33 bp, Homo sapien
atgctgtaaggttttccagttttgaggataaaa

SEQ ID NO: 672832 - DNA, 33 bp, Homo sapien
atgctgtaaggttttctagttttgaggataaaa

SEQ ID NO: 672833 - DNA, 33 bp, Homo sapien
agaaggagtcttcttgaatcaactcttaggtcc

SEQ ID NO: 672834 - DNA, 33 bp, Homo sapien
agaaggagtcttcttgcatcaactcttaggtcc

SEQ ID NO: 672835 - DNA, 33 bp, Homo sapien
gggttccctcctatcacgctatacctttaatca

SEQ ID NO: 672836 - DNA, 33 bp, Homo sapien
gggttccctcctatcatgctatacctttaatca

SEQ ID NO: 672837 - DNA, 33 bp, Homo sapien
aagaagaactcacggaactattcatccatatgc

SEQ ID NO: 672838 - DNA, 33 bp, Homo sapien
aagaagaactcacggacctattcatccatatgc

SEQ ID NO: 672839 - DNA, 33 bp, Homo sapien
catatctttaaggatcaaaaaacaagttgccta

SEQ ID NO: 672840 - DNA, 33 bp, Homo sapien
catatctttaaggatcgaaaaacaagttgccta

SEQ ID NO: 672841 - DNA, 33 bp, Homo sapien
aatgaaaaagtcaaaaaccaaagtattcacaca

SEQ ID NO: 672842 - DNA, 33 bp, Homo sapien
aatgaaaaagtcaaaagccaaagtattcacaca

SEQ ID NO: 672843 - DNA, 33 bp, Homo sapien
tacgagttgtcaaaaacactcagaatggaagta

SEQ ID NO: 672844 - DNA, 33 bp, Homo sapien
tacgagttgtcaaaaagactcagaatggaagta

SEQ ID NO: 672845 - DNA, 33 bp, Homo sapien
caagggagatggcaaacaatgtgatacggatgg

SEQ ID NO: 672846 - DNA, 33 bp, Homo sapien
caagggagatggcaaagaatgtgatacggatgg

SEQ ID NO: 672847 - DNA, 33 bp, Homo sapien
ctcatcttttctctggaaaacaccttcaaagcc

SEQ ID NO: 672848 - DNA, 33 bp, Homo sapien
ctcatcttttctctgggaaacaccttcaaagcc

SEQ ID NO: 672849 - DNA, 33 bp, Homo sapien
gccaagctctagggtacggcatgaatcctttga

SEQ ID NO: 672850 - DNA, 33 bp, Homo sapien
gccaagctctagggtatggcatgaatcctttga

SEQ ID NO: 672851 - DNA, 33 bp, Homo sapien
gtgcatagagaaaatacgtcttgtaaaaaaagg

SEQ ID NO: 672852 - DNA, 33 bp, Homo sapien
gtgcatagagaaaatatgtcttgtaaaaaaagg

SEQ ID NO: 672853 - DNA, 33 bp, Homo sapien
tcgtcattctcttttcaatggtgcaaataagtc

SEQ ID NO: 672854 - DNA, 33 bp, Homo sapien
tcgtcattctcttttcgatggtgcaaataagtc

SEQ ID NO: 672855 - DNA, 33 bp, Homo sapien
tgctacttatatcttaaacacctcaaactaatt

SEQ ID NO: 672856 - DNA, 33 bp, Homo sapien
tgctacttatatcttatacacctcaaactaatt

SEQ ID NO: 672857 - DNA, 33 bp, Homo sapien
ctcataccacagggaccaggaattaatatgcag

SEQ ID NO: 672858 - DNA, 33 bp, Homo sapien
ctcataccacagggactaggaattaatatgcag

SEQ ID NO: 672859 - DNA, 33 bp, Homo sapien
tttaaagcaggcagaaccttgaaatatagatgg

SEQ ID NO: 672860 - DNA, 33 bp, Homo sapien
tttaaagcaggcagaatcttgaaatatagatgg

SEQ ID NO: 672861 - DNA, 33 bp, Homo sapien
ttgtttttcaaatagacgctttgcaagaatgac

SEQ ID NO: 672862 - DNA, 33 bp, Homo sapien
ttgtttttcaaatagatgctttgcaagaatgac

SEQ ID NO: 672863 - DNA, 33 bp, Homo sapien
gcagcacttcaaagggaaattttcttcactgac

SEQ ID NO: 672864 - DNA, 33 bp, Homo sapien
gcagcacttcaaagggcaattttcttcactgac

SEQ ID NO: 672865 - DNA, 33 bp, Homo sapien
ttttagttatcttcaaagttcatttatacatac

SEQ ID NO: 672866 - DNA, 33 bp, Homo sapien
ttttagttatcttcaaggttcatttatacatac

SEQ ID NO: 672867 - DNA, 33 bp, Homo sapien
gccttatgttactaaccggatgcctaagtgata

SEQ ID NO: 672868 - DNA, 33 bp, Homo sapien
gccttatgttactaactggatgcctaagtgata

SEQ ID NO: 672869 - DNA, 33 bp, Homo sapien
cccttttaccacaaaacctctcattcttttagt

SEQ ID NO: 672870 - DNA, 33 bp, Homo sapien
cccttttaccacaaaagctctcattcttttagt

SEQ ID NO: 672871 - DNA, 33 bp, Homo sapien
aactcaagcttgtggcaagaggctgggaacttc

SEQ ID NO: 672872 - DNA, 33 bp, Homo sapien
aactcaagcttgtggcgagaggctgggaacttc

SEQ ID NO: 672873 - DNA, 33 bp, Homo sapien
acctaaggtattgtcaactctgcagataggagg

SEQ ID NO: 672874 - DNA, 33 bp, Homo sapien
acctaaggtattgtcagctctgcagataggagg

SEQ ID NO: 672875 - DNA, 33 bp, Homo sapien
tcactcaagtggccaaataggtttacgttagtg

SEQ ID NO: 672876 - DNA, 33 bp, Homo sapien
tcactcaagtggccaactaggtttacgttagtg

SEQ ID NO: 672877 - DNA, 33 bp, Homo sapien
acagctcctgatgcacagcttttgtgaaaattt

SEQ ID NO: 672878 - DNA, 33 bp, Homo sapien
acagctcctgatgcacggcttttgtgaaaattt

SEQ ID NO: 672879 - DNA, 33 bp, Homo sapien
aatgagataggatcccacaatggccataattca

SEQ ID NO: 672880 - DNA, 33 bp, Homo sapien
aatgagataggatccctcaatggccataattca

SEQ ID NO: 672881 - DNA, 33 bp, Homo sapien
aattaccatttaagagaaaacaaaggccatctt

SEQ ID NO: 672882 - DNA, 33 bp, Homo sapien
aattaccatttaagaggaaacaaaggccatctt

SEQ ID NO: 672883 - DNA, 33 bp, Homo sapien
tctacatgatttagaaattaatccttcaaatag

SEQ ID NO: 672884 - DNA, 33 bp, Homo sapien
tctacatgatttagaagttaatccttcaaatag

SEQ ID NO: 672885 - DNA, 33 bp, Homo sapien
attgttcgctgacactaaggttgtaagtctagt

SEQ ID NO: 672886 - DNA, 33 bp, Homo sapien
attgttcgctgacactgaggttgtaagtctagt

SEQ ID NO: 672887 - DNA, 33 bp, Homo sapien
gctcccatgatactgcactacattgcctaagtc

SEQ ID NO: 672888 - DNA, 33 bp, Homo sapien
gctcccatgatactgcgctacattgcctaagtc

SEQ ID NO: 672889 - DNA, 33 bp, Homo sapien
cctctagtttaagtcaactaatcctttgcaaga

SEQ ID NO: 672890 - DNA, 33 bp, Homo sapien
cctctagtttaagtcagctaatcctttgcaaga

SEQ ID NO: 672891 - DNA, 33 bp, Homo sapien
accttaaacggtaggaaagaatacagatttatg

SEQ ID NO: 672892 - DNA, 33 bp, Homo sapien
accttaaacggtaggagagaatacagatttatg

SEQ ID NO: 672893 - DNA, 33 bp, Homo sapien
taatcaaaacaccccagtgaatacactcatcac

SEQ ID NO: 672894 - DNA, 33 bp, Homo sapien
taatcaaaacaccccattgaatacactcatcac

SEQ ID NO: 672895 - DNA, 33 bp, Homo sapien
gacacagttgttaaaacaataaagtctcaaagg

SEQ ID NO: 672896 - DNA, 33 bp, Homo sapien
gacacagttgttaaaataataaagtctcaaagg

SEQ ID NO: 672897 - DNA, 33 bp, Homo sapien
gaggccacgtttttaacccagctctgaaagact

SEQ ID NO: 672898 - DNA, 33 bp, Homo sapien
gaggccacgtttttaatccagctctgaaagact

SEQ ID NO: 672899 - DNA, 33 bp, Homo sapien
agtccaatggtttcaccaacgttttctttgtct

SEQ ID NO: 672900 - DNA, 33 bp, Homo sapien
agtccaatggtttcacgaacgttttctttgtct

SEQ ID NO: 672901 - DNA, 33 bp, Homo sapien
cagtgctactagatgacgctttgaaatcacaac

SEQ ID NO: 672902 - DNA, 33 bp, Homo sapien
cagtgctactagatgatgctttgaaatcacaac

SEQ ID NO: 672903 - DNA, 33 bp, Homo sapien
gctgaaataaacccaacgaaaactggaattaga

SEQ ID NO: 672904 - DNA, 33 bp, Homo sapien
gctgaaataaacccaaggaaaactggaattaga

SEQ ID NO: 672905 - DNA, 33 bp, Homo sapien
tggaactgcgggtcttcaaaggctctcactgcc

SEQ ID NO: 672906 - DNA, 33 bp, Homo sapien
tggaactgcgggtcttgaaaggctctcactgcc

SEQ ID NO: 672907 - DNA, 33 bp, Homo sapien
aatgagataatccaagaaaataatggcatttca

SEQ ID NO: 672908 - DNA, 33 bp, Homo sapien
aatgagataatccaagcaaataatggcatttca

SEQ ID NO: 672909 - DNA, 33 bp, Homo sapien
tcgctgaacatattggcaaactgaggcccagag

SEQ ID NO: 672910 - DNA, 33 bp, Homo sapien
tcgctgaacatattggtaaactgaggcccagag

SEQ ID NO: 672911 - DNA, 33 bp, Homo sapien
cagccctttctagccaatctctttaattcttcc

SEQ ID NO: 672912 - DNA, 33 bp, Homo sapien
cagccctttctagccagtctctttaattcttcc

SEQ ID NO: 672913 - DNA, 33 bp, Homo sapien
agagtgtccatgcttgcaccaggtatttctact

SEQ ID NO: 672914 - DNA, 33 bp, Homo sapien
agagtgtccatgcttgtaccaggtatttctact

SEQ ID NO: 672915 - DNA, 33 bp, Homo sapien
aaagcaagagaggccacgagcaattactccacc

SEQ ID NO: 672916 - DNA, 33 bp, Homo sapien
aaagcaagagaggccatgagcaattactccacc

SEQ ID NO: 672917 - DNA, 33 bp, Homo sapien
tattgagctattagagaaaggaatcaattcaag

SEQ ID NO: 672918 - DNA, 33 bp, Homo sapien
tattgagctattagagtaaggaatcaattcaag

SEQ ID NO: 672919 - DNA, 33 bp, Homo sapien
gacgttcagaatttccaactgaaggacctccca

SEQ ID NO: 672920 - DNA, 33 bp, Homo sapien
gacgttcagaatttccgactgaaggacctccca

SEQ ID NO: 672921 - DNA, 33 bp, Homo sapien
gggtgcctaggctttcacatcaagtgggacttg

SEQ ID NO: 672922 - DNA, 33 bp, Homo sapien
gggtgcctaggctttcgcatcaagtgggacttg

SEQ ID NO: 672923 - DNA, 33 bp, Homo sapien
tttcacttagtcatcaatcagaagtgaatctat

SEQ ID NO: 672924 - DNA, 33 bp, Homo sapien
tttcacttagtcatcagtcagaagtgaatctat

SEQ ID NO: 672925 - DNA, 33 bp, Homo sapien
ctgaattcaaatcacaatcttctgtcaactgaa

SEQ ID NO: 672926 - DNA, 33 bp, Homo sapien
ctgaattcaaatcacagtcttctgtcaactgaa

SEQ ID NO: 672927 - DNA, 33 bp, Homo sapien
gtcactgcactcaccaatagttagttactcctg

SEQ ID NO: 672928 - DNA, 33 bp, Homo sapien
gtcactgcactcaccagtagttagttactcctg

SEQ ID NO: 672929 - DNA, 33 bp, Homo sapien
cgtgttcccaggttaaagtaagatgtaacacag

SEQ ID NO: 672930 - DNA, 33 bp, Homo sapien
cgtgttcccaggttaaggtaagatgtaacacag

SEQ ID NO: 672931 - DNA, 33 bp, Homo sapien
tttaaggatctcaagactagatcatcctggatt

SEQ ID NO: 672932 - DNA, 33 bp, Homo sapien
tttaaggatctcaagattagatcatcctggatt

SEQ ID NO: 672933 - DNA, 33 bp, Homo sapien
gatttgggctgagaaagatacttgaatgacttt

SEQ ID NO: 672934 - DNA, 33 bp, Homo sapien
gatttgggctgagaaatatacttgaatgacttt

SEQ ID NO: 672935 - DNA, 33 bp, Homo sapien
ccttgttagaattgagacactgaatccagctca

SEQ ID NO: 672936 - DNA, 33 bp, Homo sapien
ccttgttagaattgagtcactgaatccagctca

SEQ ID NO: 672937 - DNA, 33 bp, Homo sapien
atagctaaacaccaaactcacgataatgacaac

SEQ ID NO: 672938 - DNA, 33 bp, Homo sapien
atagctaaacaccaaattcacgataatgacaac

SEQ ID NO: 672939 - DNA, 33 bp, Homo sapien
aaagatttcaaaaggcaaacgaatgaaacttcc

SEQ ID NO: 672940 - DNA, 33 bp, Homo sapien
aaagatttcaaaaggcgaacgaatgaaacttcc

SEQ ID NO: 672941 - DNA, 33 bp, Homo sapien
acagacagtatgtatgcatgtatgtaagcaaac

SEQ ID NO: 672942 - DNA, 33 bp, Homo sapien
acagacagtatgtatgtatgtatgtaagcaaac

SEQ ID NO: 672943 - DNA, 33 bp, Homo sapien
gtatacatctttgggcaattatttaacctcttt

SEQ ID NO: 672944 - DNA, 33 bp, Homo sapien
gtatacatctttgggcgattatttaacctcttt

SEQ ID NO: 672945 - DNA, 33 bp, Homo sapien
tatttaacaagtattaaactggaagtgatcatg

SEQ ID NO: 672946 - DNA, 33 bp, Homo sapien
tatttaacaagtattagactggaagtgatcatg

SEQ ID NO: 672947 - DNA, 33 bp, Homo sapien
ctcggcttggtgcatccgactctcgactctcca

SEQ ID NO: 672948 - DNA, 33 bp, Homo sapien
ctcggcttggtgcatctgactctcgactctcca

SEQ ID NO: 672949 - DNA, 33 bp, Homo sapien
aaaactctgagtgggacgtttagtcaattgcag

SEQ ID NO: 672950 - DNA, 33 bp, Homo sapien
aaaactctgagtgggaggtttagtcaattgcag

SEQ ID NO: 672951 - DNA, 33 bp, Homo sapien
atgtaattgaataaccagcacaaaggaaaaaaa

SEQ ID NO: 672952 - DNA, 33 bp, Homo sapien
atgtaattgaataacctgcacaaaggaaaaaaa

SEQ ID NO: 672953 - DNA, 33 bp, Homo sapien
atattttatcaagggccatttctgtgtaagcac

SEQ ID NO: 672954 - DNA, 33 bp, Homo sapien
atattttatcaagggctatttctgtgtaagcac

SEQ ID NO: 672955 - DNA, 33 bp, Homo sapien
tgtgtactcactggggcaagatgtttatggaga

SEQ ID NO: 672956 - DNA, 33 bp, Homo sapien
tgtgtactcactggggtaagatgtttatggaga

SEQ ID NO: 672957 - DNA, 33 bp, Homo sapien
gaaagccaaaccccggaacaatatcatctctgc

SEQ ID NO: 672958 - DNA, 33 bp, Homo sapien
gaaagccaaaccccgggacaatatcatctctgc

SEQ ID NO: 672959 - DNA, 33 bp, Homo sapien
tgaattgataagctcaatctccgagataatttg

SEQ ID NO: 672960 - DNA, 33 bp, Homo sapien
tgaattgataagctcagtctccgagataatttg

SEQ ID NO: 672961 - DNA, 33 bp, Homo sapien
agcagtagaaggaaacaaatgtcacattctaca

SEQ ID NO: 672962 - DNA, 33 bp, Homo sapien
agcagtagaaggaaacgaatgtcacattctaca

SEQ ID NO: 672963 - DNA, 33 bp, Homo sapien
ccagtgtttttatggactaaataatctgcaatc

SEQ ID NO: 672964 - DNA, 33 bp, Homo sapien
ccagtgtttttatggagtaaataatctgcaatc

SEQ ID NO: 672965 - DNA, 33 bp, Homo sapien
gtatttttcactttgaccactggtttaatataa

SEQ ID NO: 672966 - DNA, 33 bp, Homo sapien
gtatttttcactttgatcactggtttaatataa

SEQ ID NO: 672967 - DNA, 33 bp, Homo sapien
aaatcttttaataaaaacttcctgcttaaatga

SEQ ID NO: 672968 - DNA, 33 bp, Homo sapien
aaatcttttaataaaaccttcctgcttaaatga

SEQ ID NO: 672969 - DNA, 33 bp, Homo sapien
atggcagccttatccactgagttaagccttttt

SEQ ID NO: 672970 - DNA, 33 bp, Homo sapien
atggcagccttatccagtgagttaagccttttt

SEQ ID NO: 672971 - DNA, 33 bp, Homo sapien
ttcagttttggaaataacactatggctgaaaaa

SEQ ID NO: 672972 - DNA, 33 bp, Homo sapien
ttcagttttggaaatatcactatggctgaaaaa

SEQ ID NO: 672973 - DNA, 33 bp, Homo sapien
ccctcatcatccttcaactatggtagccttgtc

SEQ ID NO: 672974 - DNA, 33 bp, Homo sapien
ccctcatcatccttcagctatggtagccttgtc

SEQ ID NO: 672975 - DNA, 33 bp, Homo sapien
atatcatgtttagttacactgtgagtcttataa

SEQ ID NO: 672976 - DNA, 33 bp, Homo sapien
atatcatgtttagttatactgtgagtcttataa

SEQ ID NO: 672977 - DNA, 33 bp, Homo sapien
ggtgattagcagtccagactttggtgacaagta

SEQ ID NO: 672978 - DNA, 33 bp, Homo sapien
ggtgattagcagtccatactttggtgacaagta

SEQ ID NO: 672979 - DNA, 33 bp, Homo sapien
gatcaccttgagtaaactgaggcttactgaagc

SEQ ID NO: 672980 - DNA, 33 bp, Homo sapien
gatcaccttgagtaaagtgaggcttactgaagc

SEQ ID NO: 672981 - DNA, 33 bp, Homo sapien
gaaacccgattgtctaaagaaagtttaccaact

SEQ ID NO: 672982 - DNA, 33 bp, Homo sapien
gaaacccgattgtctagagaaagtttaccaact

SEQ ID NO: 672983 - DNA, 33 bp, Homo sapien
ttgcttcactgacttcaaggccagttctaaaat

SEQ ID NO: 672984 - DNA, 33 bp, Homo sapien
ttgcttcactgacttcgaggccagttctaaaat

SEQ ID NO: 672985 - DNA, 33 bp, Homo sapien
caagcttaacagtttgaagagtgtgcacgtttt

SEQ ID NO: 672986 - DNA, 33 bp, Homo sapien
caagcttaacagtttgcagagtgtgcacgtttt

SEQ ID NO: 672987 - DNA, 33 bp, Homo sapien
cagaaaaccaacaaagaagcattggacttaatc

SEQ ID NO: 672988 - DNA, 33 bp, Homo sapien
cagaaaaccaacaaagcagcattggacttaatc

SEQ ID NO: 672989 - DNA, 33 bp, Homo sapien
gaccatgaaacttcagaacctgtctctgttctt

SEQ ID NO: 672990 - DNA, 33 bp, Homo sapien
gaccatgaaacttcaggacctgtctctgttctt

SEQ ID NO: 672991 - DNA, 33 bp, Homo sapien
attgaaccaccattacaaaaaaatcttttcagc

SEQ ID NO: 672992 - DNA, 33 bp, Homo sapien
attgaaccaccattacgaaaaaatcttttcagc

SEQ ID NO: 672993 - DNA, 33 bp, Homo sapien
gtattttgctcagctcccatagacttggtcctc

SEQ ID NO: 672994 - DNA, 33 bp, Homo sapien
gtattttgctcagctcgcatagacttggtcctc

SEQ ID NO: 672995 - DNA, 33 bp, Homo sapien
ttttcacaggtaccaaggtatttcttcttagct

SEQ ID NO: 672996 - DNA, 33 bp, Homo sapien
ttttcacaggtaccaatgtatttcttcttagct

SEQ ID NO: 672997 - DNA, 33 bp, Homo sapien
gatctggttgagacaaactctcaaagactcaag

SEQ ID NO: 672998 - DNA, 33 bp, Homo sapien
gatctggttgagacaatctctcaaagactcaag

SEQ ID NO: 672999 - DNA, 33 bp, Homo sapien
agaagaagaatttcagacaaaaatgtgatgaag

SEQ ID NO: 673000 - DNA, 33 bp, Homo sapien
agaagaagaatttcaggcaaaaatgtgatgaag

SEQ ID NO: 673001 - DNA, 33 bp, Homo sapien
catataacgtacacaagatgtgttaatcaactg

SEQ ID NO: 673002 - DNA, 33 bp, Homo sapien
catataacgtacacaatatgtgttaatcaactg

SEQ ID NO: 673003 - DNA, 33 bp, Homo sapien
aacacgtagggtctcaataagtacttttggatg

SEQ ID NO: 673004 - DNA, 33 bp, Homo sapien
aacacgtagggtctcagtaagtacttttggatg

SEQ ID NO: 673005 - DNA, 33 bp, Homo sapien
acaaagttcacactaacgaggagtggaaacgtt

SEQ ID NO: 673006 - DNA, 33 bp, Homo sapien
acaaagttcacactaatgaggagtggaaacgtt

SEQ ID NO: 673007 - DNA, 33 bp, Homo sapien
accaacacttaatcaggaatcaaattgttacga

SEQ ID NO: 673008 - DNA, 33 bp, Homo sapien
accaacacttaatcagtaatcaaattgttacga

SEQ ID NO: 673009 - DNA, 33 bp, Homo sapien
cgagtctggagatatacatacagctaacattcc

SEQ ID NO: 673010 - DNA, 33 bp, Homo sapien
cgagtctggagatatatatacagctaacattcc

SEQ ID NO: 673011 - DNA, 33 bp, Homo sapien
tgattgatgctttcaaatagctttcagtttctt

SEQ ID NO: 673012 - DNA, 33 bp, Homo sapien
tgattgatgctttcaagtagctttcagtttctt

SEQ ID NO: 673013 - DNA, 33 bp, Homo sapien
aatgacaatgaaaaccactctgttgactgtctt

SEQ ID NO: 673014 - DNA, 33 bp, Homo sapien
aatgacaatgaaaacctctctgttgactgtctt

SEQ ID NO: 673015 - DNA, 33 bp, Homo sapien
tcttccccaagatgacacgtgagatgacacgtg

SEQ ID NO: 673016 - DNA, 33 bp, Homo sapien
tcttccccaagatgacgcgtgagatgacacgtg

SEQ ID NO: 673017 - DNA, 33 bp, Homo sapien
agacaatttcatcttgaaagagactatgttaca

SEQ ID NO: 673018 - DNA, 33 bp, Homo sapien
agacaatttcatcttggaagagactatgttaca

SEQ ID NO: 673019 - DNA, 33 bp, Homo sapien
cattatgttaggtaaccatattgcacagagtcc

SEQ ID NO: 673020 - DNA, 33 bp, Homo sapien
cattatgttaggtaactatattgcacagagtcc

SEQ ID NO: 673021 - DNA, 33 bp, Homo sapien
tgttgcagacaatggaacctacagagcctcata

SEQ ID NO: 673022 - DNA, 33 bp, Homo sapien
tgttgcagacaatggaccctacagagcctcata

SEQ ID NO: 673023 - DNA, 33 bp, Homo sapien
gatgaatcaccaaaaggagatgagattgtctta

SEQ ID NO: 673024 - DNA, 33 bp, Homo sapien
gatgaatcaccaaaagtagatgagattgtctta

SEQ ID NO: 673025 - DNA, 33 bp, Homo sapien
aatccatttaactgcaatgagagcaagcatcca

SEQ ID NO: 673026 - DNA, 33 bp, Homo sapien
aatccatttaactgcagtgagagcaagcatcca

SEQ ID NO: 673027 - DNA, 33 bp, Homo sapien
cagttccctatgaagacgatcattatgcaaaag

SEQ ID NO: 673028 - DNA, 33 bp, Homo sapien
cagttccctatgaagaggatcattatgcaaaag

SEQ ID NO: 673029 - DNA, 33 bp, Homo sapien
tgacaacttagatacaccaactgccaagcagcg

SEQ ID NO: 673030 - DNA, 33 bp, Homo sapien
tgacaacttagatacatcaactgccaagcagcg

SEQ ID NO: 673031 - DNA, 33 bp, Homo sapien
ataaggatacactgaaacattagacgataacag

SEQ ID NO: 673032 - DNA, 33 bp, Homo sapien
ataaggatacactgaaccattagacgataacag

SEQ ID NO: 673033 - DNA, 33 bp, Homo sapien
tgtactgtcatatccacgttgatgacagtcctg

SEQ ID NO: 673034 - DNA, 33 bp, Homo sapien
tgtactgtcatatccatgttgatgacagtcctg

SEQ ID NO: 673035 - DNA, 33 bp, Homo sapien
tttatgccaggggtgcacagctttccaagaaaa

SEQ ID NO: 673036 - DNA, 33 bp, Homo sapien
tttatgccaggggtgcgcagctttccaagaaaa

SEQ ID NO: 673037 - DNA, 33 bp, Homo sapien
gaatcagtcatttgcccagtttcttgtaagtgt

SEQ ID NO: 673038 - DNA, 33 bp, Homo sapien
gaatcagtcatttgcctagtttcttgtaagtgt

SEQ ID NO: 673039 - DNA, 33 bp, Homo sapien
agccaatactgatggacgactgtaccatataat

SEQ ID NO: 673040 - DNA, 33 bp, Homo sapien
agccaatactgatggatgactgtaccatataat

SEQ ID NO: 673041 - DNA, 33 bp, Homo sapien
gttgaagccagaaagacagattgctgtagaaga

SEQ ID NO: 673042 - DNA, 33 bp, Homo sapien
gttgaagccagaaagatagattgctgtagaaga

SEQ ID NO: 673043 - DNA, 33 bp, Homo sapien
aagagaccagaaaacacggacttggataatctc

SEQ ID NO: 673044 - DNA, 33 bp, Homo sapien
aagagaccagaaaacatggacttggataatctc

SEQ ID NO: 673045 - DNA, 33 bp, Homo sapien
ggaaatgtggaaggaaagtaattgtagagaatg

SEQ ID NO: 673046 - DNA, 33 bp, Homo sapien
ggaaatgtggaaggaaggtaattgtagagaatg

SEQ ID NO: 673047 - DNA, 33 bp, Homo sapien
tttcaaatgtagaacacatagaactcaatgata

SEQ ID NO: 673048 - DNA, 33 bp, Homo sapien
tttcaaatgtagaacagatagaactcaatgata

SEQ ID NO: 673049 - DNA, 33 bp, Homo sapien
ggacagtgtccttaaactggtctccttaaagag

SEQ ID NO: 673050 - DNA, 33 bp, Homo sapien
ggacagtgtccttaaagtggtctccttaaagag

SEQ ID NO: 673051 - DNA, 33 bp, Homo sapien
agtcacttcaccagtacgtaaacatgagttata

SEQ ID NO: 673052 - DNA, 33 bp, Homo sapien
agtcacttcaccagtatgtaaacatgagttata

SEQ ID NO: 673053 - DNA, 33 bp, Homo sapien
aaatttctgttgtgtaaaataagagcctgataa

SEQ ID NO: 673054 - DNA, 33 bp, Homo sapien
aaatttctgttgtgtagaataagagcctgataa

SEQ ID NO: 673055 - DNA, 33 bp, Homo sapien
ccatgcaaaaccagcaagggatttttctgctgc

SEQ ID NO: 673056 - DNA, 33 bp, Homo sapien
ccatgcaaaaccagcaggggatttttctgctgc

SEQ ID NO: 673057 - DNA, 33 bp, Homo sapien
accgtgatagctgctaaactagtcaggaatttt

SEQ ID NO: 673058 - DNA, 33 bp, Homo sapien
accgtgatagctgctatactagtcaggaatttt

SEQ ID NO: 673059 - DNA, 33 bp, Homo sapien
gagactcaaagtttcaagagcaaatagagaaga

SEQ ID NO: 673060 - DNA, 33 bp, Homo sapien
gagactcaaagtttcaggagcaaatagagaaga

SEQ ID NO: 673061 - DNA, 33 bp, Homo sapien
tgacttccatctcagacctcaggcaggttccat

SEQ ID NO: 673062 - DNA, 33 bp, Homo sapien
tgacttccatctcagatctcaggcaggttccat

SEQ ID NO: 673063 - DNA, 33 bp, Homo sapien
tcatgtcctggtttcaaagttatgtgtgtacac

SEQ ID NO: 673064 - DNA, 33 bp, Homo sapien
tcatgtcctggtttcatagttatgtgtgtacac

SEQ ID NO: 673065 - DNA, 33 bp, Homo sapien
actctcaaggtgtgaagctactgcctaccttga

SEQ ID NO: 673066 - DNA, 33 bp, Homo sapien
actctcaaggtgtgaatctactgcctaccttga

SEQ ID NO: 673067 - DNA, 33 bp, Homo sapien
gaatgcagagctttcaatctggccaagaagaca

SEQ ID NO: 673068 - DNA, 33 bp, Homo sapien
gaatgcagagctttcagtctggccaagaagaca

SEQ ID NO: 673069 - DNA, 33 bp, Homo sapien
gatcataaggctgacacaatagactctttgtgg

SEQ ID NO: 673070 - DNA, 33 bp, Homo sapien
gatcataaggctgacagaatagactctttgtgg

SEQ ID NO: 673071 - DNA, 33 bp, Homo sapien
agccctggctcaaagtcacaagttgtggcccag

SEQ ID NO: 673072 - DNA, 33 bp, Homo sapien
agccctggctcaaagttacaagttgtggcccag

SEQ ID NO: 673073 - DNA, 33 bp, Homo sapien
ctgtaaaaataagtacggagtcaaaggttttca

SEQ ID NO: 673074 - DNA, 33 bp, Homo sapien
ctgtaaaaataagtactgagtcaaaggttttca

SEQ ID NO: 673075 - DNA, 33 bp, Homo sapien
gtatacattttgtaagaccctctttacatagta

SEQ ID NO: 673076 - DNA, 33 bp, Homo sapien
gtatacattttgtaaggccctctttacatagta

SEQ ID NO: 673077 - DNA, 33 bp, Homo sapien
ttgctgtgggagatgaactttcaagtatgtatt

SEQ ID NO: 673078 - DNA, 33 bp, Homo sapien
ttgctgtgggagatgatctttcaagtatgtatt

SEQ ID NO: 673079 - DNA, 33 bp, Homo sapien
ggctgccagcctcagaaaaaggcgcccaggtgt

SEQ ID NO: 673080 - DNA, 33 bp, Homo sapien
ggctgccagcctcagagaaaggcgcccaggtgt

SEQ ID NO: 673081 - DNA, 33 bp, Homo sapien
gagacccccgggaatccaagataggccaaggtt

SEQ ID NO: 673082 - DNA, 33 bp, Homo sapien
gagacccccgggaatctaagataggccaaggtt

SEQ ID NO: 673083 - DNA, 33 bp, Homo sapien
aaatgttcacaaaatacagggactcaagagatt

SEQ ID NO: 673084 - DNA, 33 bp, Homo sapien
aaatgttcacaaaatatagggactcaagagatt

SEQ ID NO: 673085 - DNA, 33 bp, Homo sapien
gagctttcttagacgacaccaattttatgtact

SEQ ID NO: 673086 - DNA, 33 bp, Homo sapien
gagctttcttagacgagaccaattttatgtact

SEQ ID NO: 673087 - DNA, 33 bp, Homo sapien
tttgcctttacctaccacttcctaatgttctca

SEQ ID NO: 673088 - DNA, 33 bp, Homo sapien
tttgcctttacctaccgcttcctaatgttctca

SEQ ID NO: 673089 - DNA, 33 bp, Homo sapien
acaactctggaatagagtcaagtgtcaaaataa

SEQ ID NO: 673090 - DNA, 33 bp, Homo sapien
acaactctggaatagattcaagtgtcaaaataa

SEQ ID NO: 673091 - DNA, 33 bp, Homo sapien
ttcattgtggcttaaagaaatatgaacataatc

SEQ ID NO: 673092 - DNA, 33 bp, Homo sapien
ttcattgtggcttaaataaatatgaacataatc

SEQ ID NO: 673093 - DNA, 33 bp, Homo sapien
tccttaggagaacaaaaactgtaggtgacccaa

SEQ ID NO: 673094 - DNA, 33 bp, Homo sapien
tccttaggagaacaaagactgtaggtgacccaa

SEQ ID NO: 673095 - DNA, 33 bp, Homo sapien
acacggcaattcagaacctcagcccaaaaaaca

SEQ ID NO: 673096 - DNA, 33 bp, Homo sapien
acacggcaattcagaatctcagcccaaaaaaca

SEQ ID NO: 673097 - DNA, 33 bp, Homo sapien
agatgaccctaaaatacccatttctgccatatg

SEQ ID NO: 673098 - DNA, 33 bp, Homo sapien
agatgaccctaaaatatccatttctgccatatg

SEQ ID NO: 673099 - DNA, 33 bp, Homo sapien
cagacaagtaaatagtcaaaggacagtatgata

SEQ ID NO: 673100 - DNA, 33 bp, Homo sapien
cagacaagtaaatagttaaaggacagtatgata

SEQ ID NO: 673101 - DNA, 33 bp, Homo sapien
accacaacaataaatgacaaaaggcctatgtat

SEQ ID NO: 673102 - DNA, 33 bp, Homo sapien
accacaacaataaatgtcaaaaggcctatgtat

SEQ ID NO: 673103 - DNA, 33 bp, Homo sapien
tgtaagtacactctacacacaatattcaccaga

SEQ ID NO: 673104 - DNA, 33 bp, Homo sapien
tgtaagtacactctacgcacaatattcaccaga

SEQ ID NO: 673105 - DNA, 33 bp, Homo sapien
atattgcagtatccaaccataattgttgaagag

SEQ ID NO: 673106 - DNA, 33 bp, Homo sapien
atattgcagtatccaatcataattgttgaagag

SEQ ID NO: 673107 - DNA, 33 bp, Homo sapien
tatagaagacttgaacaacaagataaactacat

SEQ ID NO: 673108 - DNA, 33 bp, Homo sapien
tatagaagacttgaacgacaagataaactacat

SEQ ID NO: 673109 - DNA, 33 bp, Homo sapien
tttactgtcttaggtaaaagtgtttttcatcta

SEQ ID NO: 673110 - DNA, 33 bp, Homo sapien
tttactgtcttaggtagaagtgtttttcatcta

SEQ ID NO: 673111 - DNA, 33 bp, Homo sapien
aacatttaattgttggaattttatgttggagca

SEQ ID NO: 673112 - DNA, 33 bp, Homo sapien
aacatttaattgttgggattttatgttggagca

SEQ ID NO: 673113 - DNA, 33 bp, Homo sapien
caatccaggtctacaacgtgccagttacaatga

SEQ ID NO: 673114 - DNA, 33 bp, Homo sapien
caatccaggtctacaatgtgccagttacaatga

SEQ ID NO: 673115 - DNA, 33 bp, Homo sapien
gaatgcatattccagaaacttatttttgccaaa

SEQ ID NO: 673116 - DNA, 33 bp, Homo sapien
gaatgcatattccagagacttatttttgccaaa

SEQ ID NO: 673117 - DNA, 33 bp, Homo sapien
gcaaatgctaaaattaagatggtaatgagtggc

SEQ ID NO: 673118 - DNA, 33 bp, Homo sapien
gcaaatgctaaaattaggatggtaatgagtggc

SEQ ID NO: 673119 - DNA, 33 bp, Homo sapien
acacatctttctcctccagtagacagcacgctt

SEQ ID NO: 673120 - DNA, 33 bp, Homo sapien
acacatctttctcctctagtagacagcacgctt

SEQ ID NO: 673121 - DNA, 33 bp, Homo sapien
ttggcacccctttaaacaataagctgctgaaca

SEQ ID NO: 673122 - DNA, 33 bp, Homo sapien
ttggcacccctttaaataataagctgctgaaca

SEQ ID NO: 673123 - DNA, 33 bp, Homo sapien; identical to SEQ ID NO: 673121

SEQ ID NO: 673124 - DNA, 33 bp, Homo sapien; identical to SEQ ID NO: 673122

SEQ ID NO: 673125 - DNA, 33 bp, Homo sapien
catgatcaaaataaaaatgaatgttctccccca

SEQ ID NO: 673126 - DNA, 33 bp, Homo sapien
catgatcaaaataaaagtgaatgttctccccca

SEQ ID NO: 673127 - DNA, 33 bp, Homo sapien
tctttatgagaagccacgagagaagtttctgtt

SEQ ID NO: 673128 - DNA, 33 bp, Homo sapien
tctttatgagaagccatgagagaagtttctgtt

SEQ ID NO: 673129 - DNA, 33 bp, Homo sapien
tctaggtttttggttaaactatggttctggtcc

SEQ ID NO: 673130 - DNA, 33 bp, Homo sapien
tctaggtttttggttagactatggttctggtcc

SEQ ID NO: 673131 - DNA, 33 bp, Homo sapien
taacagaaaccatctcactcacttactctggcc

SEQ ID NO: 673132 - DNA, 33 bp, Homo sapien
taacagaaaccatctcgctcacttactctggcc

SEQ ID NO: 673133 - DNA, 33 bp, Homo sapien
ggttctaattaacccacataaccttggtctggc

SEQ ID NO: 673134 - DNA, 33 bp, Homo sapien
ggttctaattaacccagataaccttggtctggc

SEQ ID NO: 673135 - DNA, 33 bp, Homo sapien
cttatctgccaagtcactactggatctacaagg

SEQ ID NO: 673136 - DNA, 33 bp, Homo sapien
cttatctgccaagtcagtactggatctacaagg

SEQ ID NO: 673137 - DNA, 33 bp, Homo sapien
tggcagtaacagtaacacaaaacaagtatggag

SEQ ID NO: 673138 - DNA, 33 bp, Homo sapien
tggcagtaacagtaactcaaaacaagtatggag

SEQ ID NO: 673139 - DNA, 33 bp, Homo sapien
tccttgtgccataaaacctagactcaaacacaa

SEQ ID NO: 673140 - DNA, 33 bp, Homo sapien
tccttgtgccataaaatctagactcaaacacaa

SEQ ID NO: 673141 - DNA, 33 bp, Homo sapien
acttccaattaatctacgcttcctataaatcat

SEQ ID NO: 673142 - DNA, 33 bp, Homo sapien
acttccaattaatctatgcttcctataaatcat

SEQ ID NO: 673143 - DNA, 33 bp, Homo sapien
cagtagaattctattacagagatgtaggtacta

SEQ ID NO: 673144 - DNA, 33 bp, Homo sapien
cagtagaattctattagagagatgtaggtacta

SEQ ID NO: 673145 - DNA, 33 bp, Homo sapien
ttgctgttttttgcccacagcagaacgaatgcc

SEQ ID NO: 673146 - DNA, 33 bp, Homo sapien
ttgctgttttttgcccgcagcagaacgaatgcc

SEQ ID NO: 673147 - DNA, 33 bp, Homo sapien
ctctgtcagcaaaagggactaaaatcctcttct

SEQ ID NO: 673148 - DNA, 33 bp, Homo sapien
ctctgtcagcaaaaggtactaaaatcctcttct

SEQ ID NO: 673149 - DNA, 33 bp, Homo sapien
tttctaggtttttacactggaattgttttgtct

SEQ ID NO: 673150 - DNA, 33 bp, Homo sapien
tttctaggtttttacattggaattgttttgtct

SEQ ID NO: 673151 - DNA, 33 bp, Homo sapien
tactgaatgagccatacgctgatgatccccata

SEQ ID NO: 673152 - DNA, 33 bp, Homo sapien
tactgaatgagccatatgctgatgatccccata

SEQ ID NO: 673153 - DNA, 33 bp, Homo sapien
tagactcgaaggaggaaagacaggaggcatcca

SEQ ID NO: 673154 - DNA, 33 bp, Homo sapien
tagactcgaaggaggagagacaggaggcatcca

SEQ ID NO: 673155 - DNA, 33 bp, Homo sapien
cttaatcaaaattttacctaggctcccagcctg

SEQ ID NO: 673156 - DNA, 33 bp, Homo sapien
cttaatcaaaattttatctaggctcccagcctg

SEQ ID NO: 673157 - DNA, 33 bp, Homo sapien
aaaacaagagtgcacactagatcaagaggtctt

SEQ ID NO: 673158 - DNA, 33 bp, Homo sapien
aaaacaagagtgcacattagatcaagaggtctt

SEQ ID NO: 673159 - DNA, 33 bp, Homo sapien
ggactggaagacaccacaaacctgccctgaagt

SEQ ID NO: 673160 - DNA, 33 bp, Homo sapien
ggactggaagacaccataaacctgccctgaagt

SEQ ID NO: 673161 - DNA, 33 bp, Homo sapien
tgcaactacctaagtcactatacttcagcctat

SEQ ID NO: 673162 - DNA, 33 bp, Homo sapien
tgcaactacctaagtcgctatacttcagcctat

SEQ ID NO: 673163 - DNA, 33 bp, Homo sapien
agaagggcatcagaaaagaaagaattggcataa

SEQ ID NO: 673164 - DNA, 33 bp, Homo sapien
agaagggcatcagaaaggaaagaattggcataa

SEQ ID NO: 673165 - DNA, 33 bp, Homo sapien
caccctcaaaagatatgagattgccctccgcaa

SEQ ID NO: 673166 - DNA, 33 bp, Homo sapien
caccctcaaaagatattagattgccctccgcaa

SEQ ID NO: 673167 - DNA, 33 bp, Homo sapien
aatggctgatatgtgacaagcacggtacaagtg

SEQ ID NO: 673168 - DNA, 33 bp, Homo sapien
aatggctgatatgtgataagcacggtacaagtg

SEQ ID NO: 673169 - DNA, 33 bp, Homo sapien
ctattacttggaaagacactatagatgactttt

SEQ ID NO: 673170 - DNA, 33 bp, Homo sapien
ctattacttggaaagagactatagatgactttt

SEQ ID NO: 673171 - DNA, 33 bp, Homo sapien
aaatgtgttataaaaaatggttaaaatcttgat

SEQ ID NO: 673172 - DNA, 33 bp, Homo sapien
aaatgtgttataaaaattggttaaaatcttgat

SEQ ID NO: 673173 - DNA, 33 bp, Homo sapien
ttgattttaaggcaaacttctttagtaaagttc

SEQ ID NO: 673174 - DNA, 33 bp, Homo sapien
ttgattttaaggcaaagttctttagtaaagttc

SEQ ID NO: 673175 - DNA, 33 bp, Homo sapien
gcagctccttccttccagaaatatctgctctcc

SEQ ID NO: 673176 - DNA, 33 bp, Homo sapien
gcagctccttccttccggaaatatctgctctcc

SEQ ID NO: 673177 - DNA, 33 bp, Homo sapien
aggttctaccacattaagcagtcaagataattt

SEQ ID NO: 673178 - DNA, 33 bp, Homo sapien
aggttctaccacattaggcagtcaagataattt

SEQ ID NO: 673179 - DNA, 33 bp, Homo sapien
agagtttgtcacaaagaaaatgttcaatgttgg

SEQ ID NO: 673180 - DNA, 33 bp, Homo sapien
agagtttgtcacaaaggaaatgttcaatgttgg

SEQ ID NO: 673181 - DNA, 33 bp, Homo sapien
gacagcctaaatattccacagtggggcaagtga

SEQ ID NO: 673182 - DNA, 33 bp, Homo sapien
gacagcctaaatattctacagtggggcaagtga

SEQ ID NO: 673183 - DNA, 33 bp, Homo sapien
gatttcctgaccttgaagcatctatatttcaat

SEQ ID NO: 673184 - DNA, 33 bp, Homo sapien
gatttcctgaccttgaggcatctatatttcaat

SEQ ID NO: 673185 - DNA, 33 bp, Homo sapien
cttcaacaatgaagaaagaccaatctgggccag

SEQ ID NO: 673186 - DNA, 33 bp, Homo sapien
cttcaacaatgaagaaggaccaatctgggccag

SEQ ID NO: 673187 - DNA, 33 bp, Homo sapien
tgtaatgcttttcttacgatagcacgcattggt

SEQ ID NO: 673188 - DNA, 33 bp, Homo sapien
tgtaatgcttttcttatgatagcacgcattggt

SEQ ID NO: 673189 - DNA, 33 bp, Homo sapien
gacaacatcctacacaactcacatctcaggttc

SEQ ID NO: 673190 - DNA, 33 bp, Homo sapien
gacaacatcctacacatctcacatctcaggttc

SEQ ID NO: 673191 - DNA, 33 bp, Homo sapien
taaagccaatcgtacacctaagtgaatttgtca

SEQ ID NO: 673192 - DNA, 33 bp, Homo sapien
taaagccaatcgtacatctaagtgaatttgtca

SEQ ID NO: 673193 - DNA, 33 bp, Homo sapien
agatacaactgaaaaaattagccatctgaaaat

SEQ ID NO: 673194 - DNA, 33 bp, Homo sapien
agatacaactgaaaaacttagccatctgaaaat

SEQ ID NO: 673195 - DNA, 33 bp, Homo sapien
ccctgtttgtcaacacaccagagttgcgaatac

SEQ ID NO: 673196 - DNA, 33 bp, Homo sapien
ccctgtttgtcaacactccagagttgcgaatac

SEQ ID NO: 673197 - DNA, 33 bp, Homo sapien
agtatctctgtagacacagcgggtattgttgat

SEQ ID NO: 673198 - DNA, 33 bp, Homo sapien
agtatctctgtagacatagcgggtattgttgat

SEQ ID NO: 673199 - DNA, 33 bp, Homo sapien
ctacgcatctccgttacggtgaactgttttagg

SEQ ID NO: 673200 - DNA, 33 bp, Homo sapien
ctacgcatctccgttatggtgaactgttttagg

SEQ ID NO: 673201 - DNA, 33 bp, Homo sapien
tgcctagtgtctcgaaccagcccaaggagaggc

SEQ ID NO: 673202 - DNA, 33 bp, Homo sapien
tgcctagtgtctcgaatcagcccaaggagaggc

SEQ ID NO: 673203 - DNA, 33 bp, Homo sapien
gtgaagagaatgaaaacgaagagagaggaaaag

SEQ ID NO: 673204 - DNA, 33 bp, Homo sapien
gtgaagagaatgaaaaggaagagagaggaaaag

SEQ ID NO: 673205 - DNA, 33 bp, Homo sapien
ttttctgtggggcttagaatggcctgtaacctg

SEQ ID NO: 673206 - DNA, 33 bp, Homo sapien
ttttctgtggggcttataatggcctgtaacctg

SEQ ID NO: 673207 - DNA, 33 bp, Homo sapien
ggatgacaacaaaaaaattggatgtgcagggtt

SEQ ID NO: 673208 - DNA, 33 bp, Homo sapien
ggatgacaacaaaaaagttggatgtgcagggtt

SEQ ID NO: 673209 - DNA, 33 bp, Homo sapien
tcagaaacctcacagcaatgggcagttctgctg

SEQ ID NO: 673210 - DNA, 33 bp, Homo sapien
tcagaaacctcacagcgatgggcagttctgctg

SEQ ID NO: 673211 - DNA, 33 bp, Homo sapien
taatgcttactatataacctgcattttctaagc

SEQ ID NO: 673212 - DNA, 33 bp, Homo sapien
taatgcttactatataccctgcattttctaagc

SEQ ID NO: 673213 - DNA, 33 bp, Homo sapien
caagagcatagtacagaaagactaataagctgt

SEQ ID NO: 673214 - DNA, 33 bp, Homo sapien
caagagcatagtacaggaagactaataagctgt

SEQ ID NO: 673215 - DNA, 33 bp, Homo sapien
cattatcaataagaagccatatgggaattttta

SEQ ID NO: 673216 - DNA, 33 bp, Homo sapien
cattatcaataagaaggcatatgggaattttta

SEQ ID NO: 673217 - DNA, 33 bp, Homo sapien
ataggctcagccactacctacttgagtgagctc

SEQ ID NO: 673218 - DNA, 33 bp, Homo sapien
ataggctcagccactatctacttgagtgagctc

SEQ ID NO: 673219 - DNA, 33 bp, Homo sapien
agccctagcctaatcaagggagacctctggcca

SEQ ID NO: 673220 - DNA, 33 bp, Homo sapien
agccctagcctaatcaggggagacctctggcca

SEQ ID NO: 673221 - DNA, 33 bp, Homo sapien
acaggtaaagaccaaaaagttacacagctgtca

SEQ ID NO: 673222 - DNA, 33 bp, Homo sapien
acaggtaaagaccaaacagttacacagctgtca

SEQ ID NO: 673223 - DNA, 33 bp, Homo sapien
actgtactggcttctaacaaaatataatgcttt

SEQ ID NO: 673224 - DNA, 33 bp, Homo sapien
actgtactggcttctatcaaaatataatgcttt

SEQ ID NO: 673225 - DNA, 33 bp, Homo sapien
caggtgaggccagtgcacctttgttttctctta

SEQ ID NO: 673226 - DNA, 33 bp, Homo sapien
caggtgaggccagtgcgcctttgttttctctta

SEQ ID NO: 673227 - DNA, 33 bp, Homo sapien
catgttactcctttgcacagaaccctctgatgg

SEQ ID NO: 673228 - DNA, 33 bp, Homo sapien
catgttactcctttgcgcagaaccctctgatgg

SEQ ID NO: 673229 - DNA, 33 bp, Homo sapien
gaaatgatggcaaaacaatatgatggaaaaact

SEQ ID NO: 673230 - DNA, 33 bp, Homo sapien
gaaatgatggcaaaaccatatgatggaaaaact

SEQ ID NO: 673231 - DNA, 33 bp, Homo sapien
tttcctgtgcttcttacaggttccaatggctga

SEQ ID NO: 673232 - DNA, 33 bp, Homo sapien
tttcctgtgcttcttataggttccaatggctga

SEQ ID NO: 673233 - DNA, 33 bp, Homo sapien
ccgacacattatataccggacttatcggtcaaa

SEQ ID NO: 673234 - DNA, 33 bp, Homo sapien
ccgacacattatatactggacttatcggtcaaa

SEQ ID NO: 673235 - DNA, 33 bp, Homo sapien
ttctagagacttggaaagtaagcctgtaaatgg

SEQ ID NO: 673236 - DNA, 33 bp, Homo sapien
ttctagagacttggaaggtaagcctgtaaatgg

SEQ ID NO: 673237 - DNA, 33 bp, Homo sapien
ctctccagcttccccccacaaagttccagacct

SEQ ID NO: 673238 - DNA, 33 bp, Homo sapien
ctctccagcttcccccgacaaagttccagacct

SEQ ID NO: 673239 - DNA, 33 bp, Homo sapien
tttctcctggagaacaacgatcactgaagaaca

SEQ ID NO: 673240 - DNA, 33 bp, Homo sapien
tttctcctggagaacagcgatcactgaagaaca

SEQ ID NO: 673241 - DNA, 33 bp, Homo sapien
agcctgcatatttcaacaatttaataggacaga

SEQ ID NO: 673242 - DNA, 33 bp, Homo sapien
agcctgcatatttcaataatttaataggacaga

SEQ ID NO: 673243 - DNA, 33 bp, Homo sapien
gccaggacaagaatacaaggagagaaatagaga

SEQ ID NO: 673244 - DNA, 33 bp, Homo sapien
gccaggacaagaatacgaggagagaaatagaga

SEQ ID NO: 673245 - DNA, 33 bp, Homo sapien
gtcctcatcaggttacacttcagcagggcccct

SEQ ID NO: 673246 - DNA, 33 bp, Homo sapien
gtcctcatcaggttactcttcagcagggcccct

SEQ ID NO: 673247 - DNA, 33 bp, Homo sapien
ggagagagaggacagacaagcacaataagtgca

SEQ ID NO: 673248 - DNA, 33 bp, Homo sapien
ggagagagaggacagagaagcacaataagtgca

SEQ ID NO: 673249 - DNA, 33 bp, Homo sapien
ttctctacacccagacggagaaaagggcttttg

SEQ ID NO: 673250 - DNA, 33 bp, Homo sapien
ttctctacacccagactgagaaaagggcttttg

SEQ ID NO: 673251 - DNA, 33 bp, Homo sapien
tactgttaggagaaaagatgtcttctctcattg

SEQ ID NO: 673252 - DNA, 33 bp, Homo sapien
tactgttaggagaaaatatgtcttctctcattg

SEQ ID NO: 673253 - DNA, 33 bp, Homo sapien
ttcctaaagcctgtcaaggtcacaaaaaacaag

SEQ ID NO: 673254 - DNA, 33 bp, Homo sapien
ttcctaaagcctgtcagggtcacaaaaaacaag

SEQ ID NO: 673255 - DNA, 33 bp, Homo sapien
gacagcagaagttgtgcaagcctatatatcatt

SEQ ID NO: 673256 - DNA, 33 bp, Homo sapien
gacagcagaagttgtggaagcctatatatcatt

SEQ ID NO: 673257 - DNA, 33 bp, Homo sapien
acaatttgctggaaaacgaattgtgatctgtac

SEQ ID NO: 673258 - DNA, 33 bp, Homo sapien
acaatttgctggaaaatgaattgtgatctgtac

SEQ ID NO: 673259 - DNA, 33 bp, Homo sapien
agacactaatacttaccacataggatggttatg

SEQ ID NO: 673260 - DNA, 33 bp, Homo sapien
agacactaatacttactacataggatggttatg

SEQ ID NO: 673261 - DNA, 33 bp, Homo sapien
atcttgtcaaataaaacatacagccataacttg

SEQ ID NO: 673262 - DNA, 33 bp, Homo sapien
atcttgtcaaataaaagatacagccataacttg

SEQ ID NO: 673263 - DNA, 33 bp, Homo sapien
acagaaaggtaggatccagcaggtgatgaagag

SEQ ID NO: 673264 - DNA, 33 bp, Homo sapien
acagaaaggtaggatctagcaggtgatgaagag

SEQ ID NO: 673265 - DNA, 33 bp, Homo sapien
aacagtccaatggcaacgactggagatgtgtaa

SEQ ID NO: 673266 - DNA, 33 bp, Homo sapien
aacagtccaatggcaatgactggagatgtgtaa

SEQ ID NO: 673267 - DNA, 33 bp, Homo sapien
ctatagcaggcatatgcagcaaaccatgtggag

SEQ ID NO: 673268 - DNA, 33 bp, Homo sapien
ctatagcaggcatatgtagcaaaccatgtggag

SEQ ID NO: 673269 - DNA, 33 bp, Homo sapien
agactcgggaaagttacggttcaagttcaaagg

SEQ ID NO: 673270 - DNA, 33 bp, Homo sapien
agactcgggaaagttatggttcaagttcaaagg

SEQ ID NO: 673271 - DNA, 33 bp, Homo sapien
acacaaataactcaaactggaacttgaccctat

SEQ ID NO: 673272 - DNA, 33 bp, Homo sapien
acacaaataactcaaattggaacttgaccctat

SEQ ID NO: 673273 - DNA, 33 bp, Homo sapien
cagtagtatacaaaaactctgctcctaatcagc

SEQ ID NO: 673274 - DNA, 33 bp, Homo sapien
cagtagtatacaaaaattctgctcctaatcagc

SEQ ID NO: 673275 - DNA, 33 bp, Homo sapien
aatgtaatccagaatcacaaagttttgaaggat

SEQ ID NO: 673276 - DNA, 33 bp, Homo sapien
aatgtaatccagaatcgcaaagttttgaaggat

SEQ ID NO: 673277 - DNA, 33 bp, Homo sapien
tagtcatggatcaggaaatgagcattaaggaaa

SEQ ID NO: 673278 - DNA, 33 bp, Homo sapien
tagtcatggatcaggagatgagcattaaggaaa

SEQ ID NO: 673279 - DNA, 33 bp, Homo sapien
ctcctttaattgcttacgactcagaggcaaccg

SEQ ID NO: 673280 - DNA, 33 bp, Homo sapien
ctcctttaattgcttaggactcagaggcaaccg

SEQ ID NO: 673281 - DNA, 33 bp, Homo sapien
cctctgcaacatagcgaaaggtccttaagtatt

SEQ ID NO: 673282 - DNA, 33 bp, Homo sapien
cctctgcaacatagcggaaggtccttaagtatt

SEQ ID NO: 673283 - DNA, 33 bp, Homo sapien
tctcagacagaaatgacgaaatgttgaaaactg

SEQ ID NO: 673284 - DNA, 33 bp, Homo sapien
tctcagacagaaatgaggaaatgttgaaaactg

SEQ ID NO: 673285 - DNA, 33 bp, Homo sapien
agggggaaaatggttagcaactagcatactgtc

SEQ ID NO: 673286 - DNA, 33 bp, Homo sapien
agggggaaaatggttatcaactagcatactgtc

SEQ ID NO: 673287 - DNA, 33 bp, Homo sapien
tttaaaaactttagaaagtcagaggatcccagg

SEQ ID NO: 673288 - DNA, 33 bp, Homo sapien
tttaaaaactttagaatgtcagaggatcccagg

SEQ ID NO: 673289 - DNA, 33 bp, Homo sapien
gggtggagtttgaaaacgctttgtaagcagtat

SEQ ID NO: 673290 - DNA, 33 bp, Homo sapien
gggtggagtttgaaaatgctttgtaagcagtat

SEQ ID NO: 673291 - DNA, 33 bp, Homo sapien
tgaagggcttagcatacggaattatagatcttc

SEQ ID NO: 673292 - DNA, 33 bp, Homo sapien
tgaagggcttagcatatggaattatagatcttc

SEQ ID NO: 673293 - DNA, 33 bp, Homo sapien
gagctggactaagaagacttactgattctaact

SEQ ID NO: 673294 - DNA, 33 bp, Homo sapien
gagctggactaagaaggcttactgattctaact

SEQ ID NO: 673295 - DNA, 33 bp, Homo sapien
aatccccacttaccacagaggtccatttccaga

SEQ ID NO: 673296 - DNA, 33 bp, Homo sapien
aatccccacttaccacggaggtccatttccaga

SEQ ID NO: 673297 - DNA, 33 bp, Homo sapien
agttcagtactttaacactttccctgacagaaa

SEQ ID NO: 673298 - DNA, 33 bp, Homo sapien
agttcagtactttaacgctttccctgacagaaa

SEQ ID NO: 673299 - DNA, 33 bp, Homo sapien
cacccttcatttgttggatatttaggttagtcc

SEQ ID NO: 673300 - DNA, 33 bp, Homo sapien
cacccttcatttgttgtatatttaggttagtcc

SEQ ID NO: 673301 - DNA, 33 bp, Homo sapien
ataagcctaatatggagaactaaaatcaagggt

SEQ ID NO: 673302 - DNA, 33 bp, Homo sapien
ataagcctaatatggataactaaaatcaagggt

SEQ ID NO: 673303 - DNA, 33 bp, Homo sapien
ttgttttgtctgtaacagcctcgttttactctt

SEQ ID NO: 673304 - DNA, 33 bp, Homo sapien
ttgttttgtctgtaaccgcctcgttttactctt

SEQ ID NO: 673305 - DNA, 33 bp, Homo sapien
aagagaaagtgagagaaatctacattgttatta

SEQ ID NO: 673306 - DNA, 33 bp, Homo sapien
aagagaaagtgagagagatctacattgttatta

SEQ ID NO: 673307 - DNA, 33 bp, Homo sapien
acaactaggagtatgaagcagggaagacattga

SEQ ID NO: 673308 - DNA, 33 bp, Homo sapien
acaactaggagtatgatgcagggaagacattga

SEQ ID NO: 673309 - DNA, 33 bp, Homo sapien
tgccatttttcttctcaccataccatacctaga

SEQ ID NO: 673310 - DNA, 33 bp, Homo sapien
tgccatttttcttctcgccataccatacctaga

SEQ ID NO: 673311 - DNA, 33 bp, Homo sapien
tgttcttactcaaataacttaaacaaggaagac

SEQ ID NO: 673312 - DNA, 33 bp, Homo sapien
tgttcttactcaaataccttaaacaaggaagac

SEQ ID NO: 673313 - DNA, 33 bp, Homo sapien
aacaaataaaaactggcagcaagatgttaagac

SEQ ID NO: 673314 - DNA, 33 bp, Homo sapien
aacaaataaaaactggtagcaagatgttaagac

SEQ ID NO: 673315 - DNA, 33 bp, Homo sapien
ggctcatattctagcaataaatgacacttacaa

SEQ ID NO: 673316 - DNA, 33 bp, Homo sapien
ggctcatattctagcagtaaatgacacttacaa

SEQ ID NO: 673317 - DNA, 33 bp, Homo sapien
ggaaagagaaatgtgagtattgtagctcttaag

SEQ ID NO: 673318 - DNA, 33 bp, Homo sapien
ggaaagagaaatgtgattattgtagctcttaag

SEQ ID NO: 673319 - DNA, 33 bp, Homo sapien
tttcccttaatgatacaagtctctgtaccagcg

SEQ ID NO: 673320 - DNA, 33 bp, Homo sapien
tttcccttaatgataccagtctctgtaccagcg

SEQ ID NO: 673321 - DNA, 33 bp, Homo sapien
acagtaaatctccttcactctttaacattccac

SEQ ID NO: 673322 - DNA, 33 bp, Homo sapien
acagtaaatctccttcgctctttaacattccac

SEQ ID NO: 673323 - DNA, 33 bp, Homo sapien
actgtgttgaccaagacagcctctggttcctaa

SEQ ID NO: 673324 - DNA, 33 bp, Homo sapien
actgtgttgaccaagatagcctctggttcctaa

SEQ ID NO: 673325 - DNA, 33 bp, Homo sapien
cgataggaactgcatagaagcactgtactctag

SEQ ID NO: 673326 - DNA, 33 bp, Homo sapien
cgataggaactgcatataagcactgtactctag

SEQ ID NO: 673327 - DNA, 33 bp, Homo sapien
ttttttctaatgctgtcaaaaatgacattggta

SEQ ID NO: 673328 - DNA, 33 bp, Homo sapien
ttttttctaatgctgttaaaaatgacattggta

SEQ ID NO: 673329 - DNA, 33 bp, Homo sapien
cgttcacctgcagagacgtcacattcatttact

SEQ ID NO: 673330 - DNA, 33 bp, Homo sapien
cgttcacctgcagagatgtcacattcatttact

SEQ ID NO: 673331 - DNA, 33 bp, Homo sapien
cttgtatggccagataatagaattcagacttgc

SEQ ID NO: 673332 - DNA, 33 bp, Homo sapien
cttgtatggccagatactagaattcagacttgc

SEQ ID NO: 673333 - DNA, 33 bp, Homo sapien
gcctgtccaagaaaataatcaggttgaaacaac

SEQ ID NO: 673334 - DNA, 33 bp, Homo sapien
gcctgtccaagaaaatgatcaggttgaaacaac

SEQ ID NO: 673335 - DNA, 33 bp, Homo sapien
tgagaactgtcttggcaattcctatggcaacag

SEQ ID NO: 673336 - DNA, 33 bp, Homo sapien
tgagaactgtcttggcgattcctatggcaacag

SEQ ID NO: 673337 - DNA, 33 bp, Homo sapien
ctacttcatcctctacagtaccactactactat

SEQ ID NO: 673338 - DNA, 33 bp, Homo sapien
ctacttcatcctctacggtaccactactactat

SEQ ID NO: 673339 - DNA, 33 bp, Homo sapien
agctggccatcgtcacaggcattcttattagtc

SEQ ID NO: 673340 - DNA, 33 bp, Homo sapien
agctggccatcgtcacgggcattcttattagtc

SEQ ID NO: 673341 - DNA, 33 bp, Homo sapien
tcttgagggccctctacgttgtggaaattcaga

SEQ ID NO: 673342 - DNA, 33 bp, Homo sapien
tcttgagggccctctatgttgtggaaattcaga

SEQ ID NO: 673343 - DNA, 33 bp, Homo sapien
cttaacactctgaacccatctcttagaccacat

SEQ ID NO: 673344 - DNA, 33 bp, Homo sapien
cttaacactctgaacctatctcttagaccacat

SEQ ID NO: 673345 - DNA, 33 bp, Homo sapien
ggcggatgtggtagcactcagggatatttttga

SEQ ID NO: 673346 - DNA, 33 bp, Homo sapien
ggcggatgtggtagcattcagggatatttttga

SEQ ID NO: 673347 - DNA, 33 bp, Homo sapien
tatattgtggtaagtcacacacacacacacaca

SEQ ID NO: 673348 - DNA, 33 bp, Homo sapien
tatattgtggtaagtctcacacacacacacaca

SEQ ID NO: 673349 - DNA, 33 bp, Homo sapien
aaatcctttttcccctcaagctatttccaagga

SEQ ID NO: 673350 - DNA, 33 bp, Homo sapien
aaatcctttttcccctgaagctatttccaagga

SEQ ID NO: 673351 - DNA, 33 bp, Homo sapien
aatcgcagctttgccaatgattagccatagaac

SEQ ID NO: 673352 - DNA, 33 bp, Homo sapien
aatcgcagctttgccactgattagccatagaac

SEQ ID NO: 673353 - DNA, 33 bp, Homo sapien
gaactttgaatttgacagagatgatttagggta

SEQ ID NO: 673354 - DNA, 33 bp, Homo sapien
gaactttgaatttgactgagatgatttagggta

SEQ ID NO: 673355 - DNA, 33 bp, Homo sapien
attcatgctaaatagccaggatcaaggtcttca

SEQ ID NO: 673356 - DNA, 33 bp, Homo sapien
attcatgctaaatagctaggatcaaggtcttca

SEQ ID NO: 673357 - DNA, 33 bp, Homo sapien
aaacaatccttcaagaagacctagaactattat

SEQ ID NO: 673358 - DNA, 33 bp, Homo sapien
aaacaatccttcaagaggacctagaactattat

SEQ ID NO: 673359 - DNA, 33 bp, Homo sapien
aggtagagcgtggttaaaaaatagcaaaggaaa

SEQ ID NO: 673360 - DNA, 33 bp, Homo sapien
aggtagagcgtggttacaaaatagcaaaggaaa

SEQ ID NO: 673361 - DNA, 33 bp, Homo sapien
ggtgaaacctaactaaataagtctgattgagta

SEQ ID NO: 673362 - DNA, 33 bp, Homo sapien
ggtgaaacctaactaagtaagtctgattgagta

SEQ ID NO: 673363 - DNA, 33 bp, Homo sapien
catgagaaaaggaaacgcttacactgttaagaa

SEQ ID NO: 673364 - DNA, 33 bp, Homo sapien
catgagaaaaggaaactcttacactgttaagaa

SEQ ID NO: 673365 - DNA, 33 bp, Homo sapien
agtatagcaatcaggaaagcaattaaccagaac

SEQ ID NO: 673366 - DNA, 33 bp, Homo sapien
agtatagcaatcaggacagcaattaaccagaac

SEQ ID NO: 673367 - DNA, 33 bp, Homo sapien
aactttgaggaaagttaaaaccagcatccctgt

SEQ ID NO: 673368 - DNA, 33 bp, Homo sapien
aactttgaggaaagttcaaaccagcatccctgt

SEQ ID NO: 673369 - DNA, 33 bp, Homo sapien
ctcttgaaatactgccactgaaactgtccgcat

SEQ ID NO: 673370 - DNA, 33 bp, Homo sapien
ctcttgaaatactgccgctgaaactgtccgcat

SEQ ID NO: 673371 - DNA, 33 bp, Homo sapien
gcagagaataggtcaaaaggggatgctgcaaaa

SEQ ID NO: 673372 - DNA, 33 bp, Homo sapien
gcagagaataggtcaagaggggatgctgcaaaa

SEQ ID NO: 673373 - DNA, 33 bp, Homo sapien
gatttctccactgtaaaatgactcttttatttc

SEQ ID NO: 673374 - DNA, 33 bp, Homo sapien
gatttctccactgtaatatgactcttttatttc

SEQ ID NO: 673375 - DNA, 33 bp, Homo sapien
acaagcgattctaagaagcaaatctaattaacg

SEQ ID NO: 673376 - DNA, 33 bp, Homo sapien
acaagcgattctaagaggcaaatctaattaacg

SEQ ID NO: 673377 - DNA, 33 bp, Homo sapien
tgtcctgaacgcattgcaccaattgtcctgttt

SEQ ID NO: 673378 - DNA, 33 bp, Homo sapien
tgtcctgaacgcattgtaccaattgtcctgttt

SEQ ID NO: 673379 - DNA, 33 bp, Homo sapien
gagaaagctccaatgcactagtacttttgaagc

SEQ ID NO: 673380 - DNA, 33 bp, Homo sapien
gagaaagctccaatgcgctagtacttttgaagc

SEQ ID NO: 673381 - DNA, 33 bp, Homo sapien
tttacagtgagagccacagctttagttcacctt

SEQ ID NO: 673382 - DNA, 33 bp, Homo sapien
tttacagtgagagccatagctttagttcacctt

SEQ ID NO: 673383 - DNA, 33 bp, Homo sapien
tcttactagcaaaggagggtccttttattatga

SEQ ID NO: 673384 - DNA, 33 bp, Homo sapien
tcttactagcaaaggatggtccttttattatga

SEQ ID NO: 673385 - DNA, 33 bp, Homo sapien
ttcttgacctgatgctaaaaatcacctcgaaat

SEQ ID NO: 673386 - DNA, 33 bp, Homo sapien
ttcttgacctgatgctgaaaatcacctcgaaat

SEQ ID NO: 673387 - DNA, 33 bp, Homo sapien
tgaacttttaatgagagatgcctaaatgctcca

SEQ ID NO: 673388 - DNA, 33 bp, Homo sapien
tgaacttttaatgagatatgcctaaatgctcca

SEQ ID NO: 673389 - DNA, 33 bp, Homo sapien
aaataagtggatgtcactattatctccatttta

SEQ ID NO: 673390 - DNA, 33 bp, Homo sapien
aaataagtggatgtcattattatctccatttta

SEQ ID NO: 673391 - DNA, 33 bp, Homo sapien
gaaagctagacaggccagatataactcattcct

SEQ ID NO: 673392 - DNA, 33 bp, Homo sapien
gaaagctagacaggccggatataactcattcct

SEQ ID NO: 673393 - DNA, 33 bp, Homo sapien
aagatgctaacttatacgtagaaaggttgcagg

SEQ ID NO: 673394 - DNA, 33 bp, Homo sapien
aagatgctaacttatatgtagaaaggttgcagg

SEQ ID NO: 673395 - DNA, 33 bp, Homo sapien
ctgggacacctgtggtaaatgattaagtgaatt

SEQ ID NO: 673396 - DNA, 33 bp, Homo sapien
ctgggacacctgtggttaatgattaagtgaatt

SEQ ID NO: 673397 - DNA, 33 bp, Homo sapien
tggctgcccaatgacccactcagtttacacacc

SEQ ID NO: 673398 - DNA, 33 bp, Homo sapien
tggctgcccaatgacctactcagtttacacacc

SEQ ID NO: 673399 - DNA, 33 bp, Homo sapien
acaagcaacttgaacacaacaagaaagcattcc

SEQ ID NO: 673400 - DNA, 33 bp, Homo sapien
acaagcaacttgaacagaacaagaaagcattcc

SEQ ID NO: 673401 - DNA, 33 bp, Homo sapien
ctactgagattcaaacaaaggtccttccctatt

SEQ ID NO: 673402 - DNA, 33 bp, Homo sapien
ctactgagattcaaacgaaggtccttccctatt

SEQ ID NO: 673403 - DNA, 33 bp, Homo sapien
tgacaccctgcacggcagaaactctaccactag

SEQ ID NO: 673404 - DNA, 33 bp, Homo sapien
tgacaccctgcacggcggaaactctaccactag

SEQ ID NO: 673405 - DNA, 33 bp, Homo sapien
attggtgactactttacggtatttctgtcgtgt

SEQ ID NO: 673406 - DNA, 33 bp, Homo sapien
attggtgactactttatggtatttctgtcgtgt

SEQ ID NO: 673407 - DNA, 33 bp, Homo sapien
tcagggttcaatgccaacaggatggaccaaaga

SEQ ID NO: 673408 - DNA, 33 bp, Homo sapien
tcagggttcaatgccagcaggatggaccaaaga

SEQ ID NO: 673409 - DNA, 33 bp, Homo sapien
atattttgagacttaaactaccttttgcacata

SEQ ID NO: 673410 - DNA, 33 bp, Homo sapien
atattttgagacttaacctaccttttgcacata

SEQ ID NO: 673411 - DNA, 33 bp, Homo sapien
ttacttggccattatccgaagtagttgtatttc

SEQ ID NO: 673412 - DNA, 33 bp, Homo sapien
ttacttggccattatctgaagtagttgtatttc

SEQ ID NO: 673413 - DNA, 33 bp, Homo sapien
aactaggatattccacaagactgacactgtgca

SEQ ID NO: 673414 - DNA, 33 bp, Homo sapien
aactaggatattccacgagactgacactgtgca

SEQ ID NO: 673415 - DNA, 33 bp, Homo sapien
ttaatccttaaaacaaagtccattaggagaata

SEQ ID NO: 673416 - DNA, 33 bp, Homo sapien
ttaatccttaaaacaacgtccattaggagaata

SEQ ID NO: 673417 - DNA, 33 bp, Homo sapien
gtgcctttagaagacaatctattctattttgcc

SEQ ID NO: 673418 - DNA, 33 bp, Homo sapien
gtgcctttagaagacagtctattctattttgcc

SEQ ID NO: 673419 - DNA, 33 bp, Homo sapien
aggtgaattatagcagaatcatatccagttaaa

SEQ ID NO: 673420 - DNA, 33 bp, Homo sapien
aggtgaattatagcagtatcatatccagttaaa

SEQ ID NO: 673421 - DNA, 33 bp, Homo sapien
ttaaaattcaccagaaaacaggaccatacataa

SEQ ID NO: 673422 - DNA, 33 bp, Homo sapien
ttaaaattcaccagaagacaggaccatacataa

SEQ ID NO: 673423 - DNA, 33 bp, Homo sapien
gctttacctctgccacaagtctgggagccataa

SEQ ID NO: 673424 - DNA, 33 bp, Homo sapien
gctttacctctgccacgagtctgggagccataa

SEQ ID NO: 673425 - DNA, 33 bp, Homo sapien
agaccacagcctttgacgcttccagcctgtact

SEQ ID NO: 673426 - DNA, 33 bp, Homo sapien
agaccacagcctttgatgcttccagcctgtact

SEQ ID NO: 673427 - DNA, 33 bp, Homo sapien
agtccaggttgtgaataataagagtggggtgtc

SEQ ID NO: 673428 - DNA, 33 bp, Homo sapien
agtccaggttgtgaatcataagagtggggtgtc

SEQ ID NO: 673429 - DNA, 33 bp, Homo sapien
ctcctaccactgtggaagaatagaacaaagaaa

SEQ ID NO: 673430 - DNA, 33 bp, Homo sapien
ctcctaccactgtggaggaatagaacaaagaaa

SEQ ID NO: 673431 - DNA, 33 bp, Homo sapien
aaaaaaaactctgccaagtgaccagagactcat

SEQ ID NO: 673432 - DNA, 33 bp, Homo sapien
aaaaaaaactctgccaggtgaccagagactcat

SEQ ID NO: 673433 - DNA, 33 bp, Homo sapien
attaggagaaataagacgtttacactgactgta

SEQ ID NO: 673434 - DNA, 33 bp, Homo sapien
attaggagaaataagatgtttacactgactgta

SEQ ID NO: 673435 - DNA, 33 bp, Homo sapien
cagtgtcttccaagttgaaaaaatcagtccagc

SEQ ID NO: 673436 - DNA, 33 bp, Homo sapien
cagtgtcttccaagtttaaaaaatcagtccagc

SEQ ID NO: 673437 - DNA, 33 bp, Homo sapien
cattttcagcattataaattttttcctcttgat

SEQ ID NO: 673438 - DNA, 33 bp, Homo sapien
cattttcagcattatagattttttcctcttgat

SEQ ID NO: 673439 - DNA, 33 bp, Homo sapien
ttggcgattagagacgaattttactttgggtct

SEQ ID NO: 673440 - DNA, 33 bp, Homo sapien
ttggcgattagagacggattttactttgggtct

SEQ ID NO: 673441 - DNA, 33 bp, Homo sapien
ggccttaacccttgcccaggaaccagataatca

SEQ ID NO: 673442 - DNA, 33 bp, Homo sapien
ggccttaacccttgcctaggaaccagataatca

SEQ ID NO: 673443 - DNA, 33 bp, Homo sapien
aagtactgtacatggaccaactgtagtttctga

SEQ ID NO: 673444 - DNA, 33 bp, Homo sapien
aagtactgtacatggagcaactgtagtttctga

SEQ ID NO: 673445 - DNA, 33 bp, Homo sapien
gacacaaaacaataaaatggcgaaatgttcaca

SEQ ID NO: 673446 - DNA, 33 bp, Homo sapien
gacacaaaacaataaattggcgaaatgttcaca

SEQ ID NO: 673447 - DNA, 33 bp, Homo sapien
accaatgcaaggatacaggtacacttacccaca

SEQ ID NO: 673448 - DNA, 33 bp, Homo sapien
accaatgcaaggatacgggtacacttacccaca

SEQ ID NO: 673449 - DNA, 33 bp, Homo sapien
ctcacagttgaagctacggacttgtctggactg

SEQ ID NO: 673450 - DNA, 33 bp, Homo sapien
ctcacagttgaagctatggacttgtctggactg

SEQ ID NO: 673451 - DNA, 33 bp, Homo sapien
tatccaggtcctagcacgtagttgtatcagaca

SEQ ID NO: 673452 - DNA, 33 bp, Homo sapien
tatccaggtcctagcatgtagttgtatcagaca

SEQ ID NO: 673453 - DNA, 33 bp, Homo sapien
tccttatccataacgacagatgtgtattacata

SEQ ID NO: 673454 - DNA, 33 bp, Homo sapien
tccttatccataacgatagatgtgtattacata

SEQ ID NO: 673455 - DNA, 33 bp, Homo sapien
cgttaagaaagctgaacctcaccagagaatgtg

SEQ ID NO: 673456 - DNA, 33 bp, Homo sapien
cgttaagaaagctgaatctcaccagagaatgtg

SEQ ID NO: 673457 - DNA, 33 bp, Homo sapien
aaaggtttgttaaaggaatgcatgaatttagga

SEQ ID NO: 673458 - DNA, 33 bp, Homo sapien
aaaggtttgttaaagggatgcatgaatttagga

SEQ ID NO: 673459 - DNA, 33 bp, Homo sapien
agaaattggaatgcataataaaactgtcatgta

SEQ ID NO: 673460 - DNA, 33 bp, Homo sapien
agaaattggaatgcatgataaaactgtcatgta

SEQ ID NO: 673461 - DNA, 33 bp, Homo sapien
atccaaagaataagcaactgataatttcagatt

SEQ ID NO: 673462 - DNA, 33 bp, Homo sapien
atccaaagaataagcacctgataatttcagatt

SEQ ID NO: 673463 - DNA, 33 bp, Homo sapien
gggtattgtagaggagaatgacctggctacaat

SEQ ID NO: 673464 - DNA, 33 bp, Homo sapien
gggtattgtagaggaggatgacctggctacaat

SEQ ID NO: 673465 - DNA, 33 bp, Homo sapien
gggaagaccaggaaagccttcatataaaggtga

SEQ ID NO: 673466 - DNA, 33 bp, Homo sapien
gggaagaccaggaaaggcttcatataaaggtga

SEQ ID NO: 673467 - DNA, 33 bp, Homo sapien
tatagattggttattacggaaatgaagacatat

SEQ ID NO: 673468 - DNA, 33 bp, Homo sapien
tatagattggttattatggaaatgaagacatat

SEQ ID NO: 673469 - DNA, 33 bp, Homo sapien
tactggacacttacataagagcaatgccatata

SEQ ID NO: 673470 - DNA, 33 bp, Homo sapien
tactggacacttacatgagagcaatgccatata

SEQ ID NO: 673471 - DNA, 33 bp, Homo sapien
gagatgggatgcaaaggcctgatgcttccaggt

SEQ ID NO: 673472 - DNA, 33 bp, Homo sapien
gagatgggatgcaaagtcctgatgcttccaggt

SEQ ID NO: 673473 - DNA, 33 bp, Homo sapien
tggtgcttgtagtgtaagttgtggtatgtcaca

SEQ ID NO: 673474 - DNA, 33 bp, Homo sapien
tggtgcttgtagtgtatgttgtggtatgtcaca

SEQ ID NO: 673475 - DNA, 33 bp, Homo sapien
taatctggccagtaaacgaaaacctattgcttt

SEQ ID NO: 673476 - DNA, 33 bp, Homo sapien
taatctggccagtaaaggaaaacctattgcttt

SEQ ID NO: 673477 - DNA, 33 bp, Homo sapien
ggaaataattttgaaccgagctaactgtgagta

SEQ ID NO: 673478 - DNA, 33 bp, Homo sapien
ggaaataattttgaactgagctaactgtgagta

SEQ ID NO: 673479 - DNA, 33 bp, Homo sapien
gaaattcccaagtcacaactacaaacctgcttg

SEQ ID NO: 673480 - DNA, 33 bp, Homo sapien
gaaattcccaagtcacgactacaaacctgcttg

SEQ ID NO: 673481 - DNA, 33 bp, Homo sapien
acagccaggagcccaacaatagctacctggagc

SEQ ID NO: 673482 - DNA, 33 bp, Homo sapien
acagccaggagcccaataatagctacctggagc

SEQ ID NO: 673483 - DNA, 33 bp, Homo sapien
gtggcctagccatagagataaaagcttgaaaaa

SEQ ID NO: 673484 - DNA, 33 bp, Homo sapien
gtggcctagccatagatataaaagcttgaaaaa

SEQ ID NO: 673485 - DNA, 33 bp, Homo sapien
gcagaacataacataaatgcaaagagagttcag

SEQ ID NO: 673486 - DNA, 33 bp, Homo sapien
gcagaacataacataagtgcaaagagagttcag

SEQ ID NO: 673487 - DNA, 33 bp, Homo sapien
agctgagtggggaatacggatgtaaacaagtta

SEQ ID NO: 673488 - DNA, 33 bp, Homo sapien
agctgagtggggaatatggatgtaaacaagtta

SEQ ID NO: 673489 - DNA, 33 bp, Homo sapien
aagtttcaataatgaacggcttttatgtcttga

SEQ ID NO: 673490 - DNA, 33 bp, Homo sapien
aagtttcaataatgaatggcttttatgtcttga

SEQ ID NO: 673491 - DNA, 33 bp, Homo sapien
actgctggataaaatacagctccagtccaagag

SEQ ID NO: 673492 - DNA, 33 bp, Homo sapien
actgctggataaaatatagctccagtccaagag

SEQ ID NO: 673493 - DNA, 33 bp, Homo sapien
agctgattactctgagacctccatgctgtgagg

SEQ ID NO: 673494 - DNA, 33 bp, Homo sapien
agctgattactctgagtcctccatgctgtgagg

SEQ ID NO: 673495 - DNA, 33 bp, Homo sapien
tgcaaatgagtcaatacgtgacattgtgtcaac

SEQ ID NO: 673496 - DNA, 33 bp, Homo sapien
tgcaaatgagtcaatatgtgacattgtgtcaac

SEQ ID NO: 673497 - DNA, 33 bp, Homo sapien
tatttggagaagagcactcctacgtgagaggac

SEQ ID NO: 673498 - DNA, 33 bp, Homo sapien
tatttggagaagagcattcctacgtgagaggac

SEQ ID NO: 673499 - DNA, 33 bp, Homo sapien
gggcggagcccttgagaaagtgaagaccctgga

SEQ ID NO: 673500 - DNA, 33 bp, Homo sapien
gggcggagcccttgaggaagtgaagaccctgga

SEQ ID NO: 673501 - DNA, 33 bp, Homo sapien
atactctagtcatccaagccagtagctgcaatt

SEQ ID NO: 673502 - DNA, 33 bp, Homo sapien
atactctagtcatccaggccagtagctgcaatt

SEQ ID NO: 673503 - DNA, 33 bp, Homo sapien
catagcctcctctttccctttcattgtctcctc

SEQ ID NO: 673504 - DNA, 33 bp, Homo sapien
catagcctcctctttctctttcattgtctcctc

SEQ ID NO: 673505 - DNA, 33 bp, Homo sapien
taaatgagacacaggtaaatttttattggcgac

SEQ ID NO: 673506 - DNA, 33 bp, Homo sapien
taaatgagacacaggtgaatttttattggcgac

SEQ ID NO: 673507 - DNA, 33 bp, Homo sapien
tggtgagtaacagtaacagtaaacataggaaca

SEQ ID NO: 673508 - DNA, 33 bp, Homo sapien
tggtgagtaacagtaatagtaaacataggaaca

SEQ ID NO: 673509 - DNA, 33 bp, Homo sapien
gggtaacagtggaggaaataaagtgtatggagg

SEQ ID NO: 673510 - DNA, 33 bp, Homo sapien
gggtaacagtggaggatataaagtgtatggagg

SEQ ID NO: 673511 - DNA, 33 bp, Homo sapien
ataagtagatatatagacaaagatatgcaaaca

SEQ ID NO: 673512 - DNA, 33 bp, Homo sapien
ataagtagatatataggcaaagatatgcaaaca

SEQ ID NO: 673513 - DNA, 33 bp, Homo sapien
ttgccactgaacgtaacatccctttctaatttt

SEQ ID NO: 673514 - DNA, 33 bp, Homo sapien
ttgccactgaacgtaatatccctttctaatttt

SEQ ID NO: 673515 - DNA, 33 bp, Homo sapien
tattatggatataaaccgtatccacgtgggtgt

SEQ ID NO: 673516 - DNA, 33 bp, Homo sapien
tattatggatataaactgtatccacgtgggtgt

SEQ ID NO: 673517 - DNA, 33 bp, Homo sapien
gtggaatcagaaatcaataatacattttctgcc

SEQ ID NO: 673518 - DNA, 33 bp, Homo sapien
gtggaatcagaaatcagtaatacattttctgcc

SEQ ID NO: 673519 - DNA, 33 bp, Homo sapien
gggacacaatatggtagagtagaagaaacagta

SEQ ID NO: 673520 - DNA, 33 bp, Homo sapien
gggacacaatatggtatagtagaagaaacagta

SEQ ID NO: 673521 - DNA, 33 bp, Homo sapien
gttgtatttcccttaacgtgtgggctgcctgag

SEQ ID NO: 673522 - DNA, 33 bp, Homo sapien
gttgtatttcccttaatgtgtgggctgcctgag

SEQ ID NO: 673523 - DNA, 33 bp, Homo sapien
gtaacagcagcagagcaaccaactgagaaggaa

SEQ ID NO: 673524 - DNA, 33 bp, Homo sapien
gtaacagcagcagagcgaccaactgagaaggaa

SEQ ID NO: 673525 - DNA, 33 bp, Homo sapien
agggtgaggaccaatgcagcataagagacacaa

SEQ ID NO: 673526 - DNA, 33 bp, Homo sapien
agggtgaggaccaatgtagcataagagacacaa

SEQ ID NO: 673527 - DNA, 33 bp, Homo sapien
ccagtttggtttgtagaccttgaacatttcaca

SEQ ID NO: 673528 - DNA, 33 bp, Homo sapien
ccagtttggtttgtaggccttgaacatttcaca

SEQ ID NO: 673529 - DNA, 33 bp, Homo sapien
ccattaactctgatcaataattgttagcatttt

SEQ ID NO: 673530 - DNA, 33 bp, Homo sapien
ccattaactctgatcagtaattgttagcatttt

SEQ ID NO: 673531 - DNA, 33 bp, Homo sapien
aaattcgagtactgaacaaaaacaatgttctat

SEQ ID NO: 673532 - DNA, 33 bp, Homo sapien
aaattcgagtactgaataaaaacaatgttctat

SEQ ID NO: 673533 - DNA, 33 bp, Homo sapien
aaactacaggtagttcaactagggctgaagctg

SEQ ID NO: 673534 - DNA, 33 bp, Homo sapien
aaactacaggtagttcgactagggctgaagctg

SEQ ID NO: 673535 - DNA, 33 bp, Homo sapien
agccacgatcacgcccaacttgaacgaccacaa

SEQ ID NO: 673536 - DNA, 33 bp, Homo sapien
agccacgatcacgcccgacttgaacgaccacaa

SEQ ID NO: 673537 - DNA, 33 bp, Homo sapien
aaacttacttggcctaagtctataataacaaag

SEQ ID NO: 673538 - DNA, 33 bp, Homo sapien
aaacttacttggcctatgtctataataacaaag

SEQ ID NO: 673539 - DNA, 33 bp, Homo sapien
ccccataggtaatacacgaatagggtgatgcag

SEQ ID NO: 673540 - DNA, 33 bp, Homo sapien
ccccataggtaatacatgaatagggtgatgcag

SEQ ID NO: 673541 - DNA, 33 bp, Homo sapien
ttctttctcacctagaaggttgcaagagctgct

SEQ ID NO: 673542 - DNA, 33 bp, Homo sapien
ttctttctcacctagacggttgcaagagctgct

SEQ ID NO: 673543 - DNA, 33 bp, Homo sapien
tggtggtttgccaccacgtgaaggaaaggaatg

SEQ ID NO: 673544 - DNA, 33 bp, Homo sapien
tggtggtttgccaccatgtgaaggaaaggaatg

SEQ ID NO: 673545 - DNA, 33 bp, Homo sapien
ccacacatgcatatttcaaaactctgagaacaa

SEQ ID NO: 673546 - DNA, 33 bp, Homo sapien
ccacacatgcatattttaaaactctgagaacaa

SEQ ID NO: 673547 - DNA, 33 bp, Homo sapien
actatgccctctgggaaaaggaaatgtccagga

SEQ ID NO: 673548 - DNA, 33 bp, Homo sapien
actatgccctctgggagaaggaaatgtccagga

SEQ ID NO: 673549 - DNA, 33 bp, Homo sapien
tacagtcacagaagtaacattgagggtataatc

SEQ ID NO: 673550 - DNA, 33 bp, Homo sapien
tacagtcacagaagtagcattgagggtataatc

SEQ ID NO: 673551 - DNA, 33 bp, Homo sapien
gccatgattgatgagaagcgatatattatagag

SEQ ID NO: 673552 - DNA, 33 bp, Homo sapien
gccatgattgatgagaggcgatatattatagag

SEQ ID NO: 673553 - DNA, 33 bp, Homo sapien
gaaatagaggctctgcacggtaaagtgactcac

SEQ ID NO: 673554 - DNA, 33 bp, Homo sapien
gaaatagaggctctgcgcggtaaagtgactcac

SEQ ID NO: 673555 - DNA, 33 bp, Homo sapien
aaagacaatgatcccccgggcgatatcaacatg

SEQ ID NO: 673556 - DNA, 33 bp, Homo sapien
aaagacaatgatcccctgggcgatatcaacatg

SEQ ID NO: 673557 - DNA, 33 bp, Homo sapien
atcccccaacttccacaactctctattatatat

SEQ ID NO: 673558 - DNA, 33 bp, Homo sapien
atcccccaacttccaccactctctattatatat

SEQ ID NO: 673559 - DNA, 33 bp, Homo sapien
cttggaccaggtaggaaccatgaagatagaaag

SEQ ID NO: 673560 - DNA, 33 bp, Homo sapien
cttggaccaggtaggagccatgaagatagaaag

SEQ ID NO: 673561 - DNA, 33 bp, Homo sapien
tcaggctacatcggacacaattaatccattatt

SEQ ID NO: 673562 - DNA, 33 bp, Homo sapien
tcaggctacatcggacgcaattaatccattatt

SEQ ID NO: 673563 - DNA, 33 bp, Homo sapien
tatgtgcaagtatatgcagtgtattataatgtt

SEQ ID NO: 673564 - DNA, 33 bp, Homo sapien
tatgtgcaagtatatgtagtgtattataatgtt

SEQ ID NO: 673565 - DNA, 33 bp, Homo sapien
gacattcagagaaaagactttcacaatagacac

SEQ ID NO: 673566 - DNA, 33 bp, Homo sapien
gacattcagagaaaaggctttcacaatagacac

SEQ ID NO: 673567 - DNA, 33 bp, Homo sapien
tgtttgcaccctatacccaagtctacaaaactg

SEQ ID NO: 673568 - DNA, 33 bp, Homo sapien
tgtttgcaccctatactcaagtctacaaaactg

SEQ ID NO: 673569 - DNA, 33 bp, Homo sapien
ttaaaggacaagaaaagtctcctccaatccacg

SEQ ID NO: 673570 - DNA, 33 bp, Homo sapien
ttaaaggacaagaaaattctcctccaatccacg

SEQ ID NO: 673571 - DNA, 33 bp, Homo sapien
cacagtcaccctgtcacgtctttggattaagca

SEQ ID NO: 673572 - DNA, 33 bp, Homo sapien
cacagtcaccctgtcatgtctttggattaagca

SEQ ID NO: 673573 - DNA, 33 bp, Homo sapien
ctttactggggcacaagagctactctgaaaatc

SEQ ID NO: 673574 - DNA, 33 bp, Homo sapien
ctttactggggcacaatagctactctgaaaatc

SEQ ID NO: 673575 - DNA, 33 bp, Homo sapien
gttgacccctgagacaagtttgccttttttcat

SEQ ID NO: 673576 - DNA, 33 bp, Homo sapien
gttgacccctgagacatgtttgccttttttcat

SEQ ID NO: 673577 - DNA, 33 bp, Homo sapien
ttccctccaaatattaccatcgtttcccattta

SEQ ID NO: 673578 - DNA, 33 bp, Homo sapien
ttccctccaaatattatcatcgtttcccattta

SEQ ID NO: 673579 - DNA, 33 bp, Homo sapien
gggagttgatttgtcaagccatttgtaaaatca

SEQ ID NO: 673580 - DNA, 33 bp, Homo sapien
gggagttgatttgtcaggccatttgtaaaatca

SEQ ID NO: 673581 - DNA, 33 bp, Homo sapien
ctcccttgagattagcactaaatctttccacca

SEQ ID NO: 673582 - DNA, 33 bp, Homo sapien
ctcccttgagattagcgctaaatctttccacca

SEQ ID NO: 673583 - DNA, 33 bp, Homo sapien
ctatcctcgatacctccctctactacccattat

SEQ ID NO: 673584 - DNA, 33 bp, Homo sapien
ctatcctcgatacctctctctactacccattat

SEQ ID NO: 673585 - DNA, 33 bp, Homo sapien
tatttctcagctttaccgaacttatatcaatat

SEQ ID NO: 673586 - DNA, 33 bp, Homo sapien
tatttctcagctttactgaacttatatcaatat

SEQ ID NO: 673587 - DNA, 33 bp, Homo sapien; identical to SEQ ID NO: 673585

SEQ ID NO: 673588 - DNA, 33 bp, Homo sapien; identical to SEQ ID NO: 673586

SEQ ID NO: 673589 - DNA, 33 bp, Homo sapien
cctgtaatgactgttcaagtaatatcattatct

SEQ ID NO: 673590 - DNA, 33 bp, Homo sapien
cctgtaatgactgttcgagtaatatcattatct

SEQ ID NO: 673591 - DNA, 33 bp, Homo sapien
tcctcactgctctgccaaaaaaagcacatgaca

SEQ ID NO: 673592 - DNA, 33 bp, Homo sapien
tcctcactgctctgccgaaaaaagcacatgaca

SEQ ID NO: 673593 - DNA, 33 bp, Homo sapien
attgattattgtgtgaaagctctacttcccagg

SEQ ID NO: 673594 - DNA, 33 bp, Homo sapien
attgattattgtgtgatagctctacttcccagg

SEQ ID NO: 673595 - DNA, 33 bp, Homo sapien
aatatctctgactgcaatgaataaatctgggag

SEQ ID NO: 673596 - DNA, 33 bp, Homo sapien
aatatctctgactgcagtgaataaatctgggag

SEQ ID NO: 673597 - DNA, 33 bp, Homo sapien
caaggttcttaaataacacctgtagcatagatg

SEQ ID NO: 673598 - DNA, 33 bp, Homo sapien
caaggttcttaaataatacctgtagcatagatg

SEQ ID NO: 673599 - DNA, 33 bp, Homo sapien
aagtagtcaatgaactaaaatctgaagtgccta

SEQ ID NO: 673600 - DNA, 33 bp, Homo sapien
aagtagtcaatgaactgaaatctgaagtgccta

SEQ ID NO: 673601 - DNA, 33 bp, Homo sapien
catatgaggagggataagcctaagtgttgtatt

SEQ ID NO: 673602 - DNA, 33 bp, Homo sapien
catatgaggagggataggcctaagtgttgtatt

SEQ ID NO: 673603 - DNA, 33 bp, Homo sapien
tagtggtgtcaagatacagtgtcaatgttacca

SEQ ID NO: 673604 - DNA, 33 bp, Homo sapien
tagtggtgtcaagatatagtgtcaatgttacca

SEQ ID NO: 673605 - DNA, 33 bp, Homo sapien
tactgccttctgttggaaccaaagaggccatag

SEQ ID NO: 673606 - DNA, 33 bp, Homo sapien
tactgccttctgttgggaccaaagaggccatag

SEQ ID NO: 673607 - DNA, 33 bp, Homo sapien
taatttcttgccactaaccatgattttttaaat

SEQ ID NO: 673608 - DNA, 33 bp, Homo sapien
taatttcttgccactagccatgattttttaaat

SEQ ID NO: 673609 - DNA, 33 bp, Homo sapien
aatttattcattcatcgaaaattttctcatttc

SEQ ID NO: 673610 - DNA, 33 bp, Homo sapien
aatttattcattcatctaaaattttctcatttc

SEQ ID NO: 673611 - DNA, 33 bp, Homo sapien
cagaagttctcagctccgaccacatatgagcat

SEQ ID NO: 673612 - DNA, 33 bp, Homo sapien
cagaagttctcagctctgaccacatatgagcat

SEQ ID NO: 673613 - DNA, 33 bp, Homo sapien
catagataagctcagtgactaggtttccttcga

SEQ ID NO: 673614 - DNA, 33 bp, Homo sapien
catagataagctcagttactaggtttccttcga

SEQ ID NO: 673615 - DNA, 33 bp, Homo sapien
atttctttgtgaaaaacggccttgggaagagac

SEQ ID NO: 673616 - DNA, 33 bp, Homo sapien
atttctttgtgaaaaatggccttgggaagagac

SEQ ID NO: 673617 - DNA, 33 bp, Homo sapien
aaaagcatttacatgacctaaatcaaaaggtct

SEQ ID NO: 673618 - DNA, 33 bp, Homo sapien
aaaagcatttacatgatctaaatcaaaaggtct

SEQ ID NO: 673619 - DNA, 33 bp, Homo sapien
tggatgtagtccataaagaaggtcctcagctgg

SEQ ID NO: 673620 - DNA, 33 bp, Homo sapien
tggatgtagtccataaggaaggtcctcagctgg

SEQ ID NO: 673621 - DNA, 33 bp, Homo sapien
cattctaaaaggtaggccatttggcatgtgatc

SEQ ID NO: 673622 - DNA, 33 bp, Homo sapien
cattctaaaaggtaggtcatttggcatgtgatc

SEQ ID NO: 673623 - DNA, 33 bp, Homo sapien
gttacagtgcaaggtacggtctctgagtaaatg

SEQ ID NO: 673624 - DNA, 33 bp, Homo sapien
gttacagtgcaaggtatggtctctgagtaaatg

SEQ ID NO: 673625 - DNA, 33 bp, Homo sapien
cctggaagtaatttaactggggtaggtgatagg

SEQ ID NO: 673626 - DNA, 33 bp, Homo sapien
cctggaagtaatttaattggggtaggtgatagg

SEQ ID NO: 673627 - DNA, 33 bp, Homo sapien
acaaattacttaccagaatgaggtctagtgagt

SEQ ID NO: 673628 - DNA, 33 bp, Homo sapien
acaaattacttaccagcatgaggtctagtgagt

SEQ ID NO: 673629 - DNA, 33 bp, Homo sapien
gtcttgatgtacctcaatgactgggttatattt

SEQ ID NO: 673630 - DNA, 33 bp, Homo sapien
gtcttgatgtacctcagtgactgggttatattt

SEQ ID NO: 673631 - DNA, 33 bp, Homo sapien
tcctcctgagccctaccgaggcatttactagct

SEQ ID NO: 673632 - DNA, 33 bp, Homo sapien
tcctcctgagccctacggaggcatttactagct

SEQ ID NO: 673633 - DNA, 33 bp, Homo sapien
gtgcactgctagttcaccaaaagtgagagatag

SEQ ID NO: 673634 - DNA, 33 bp, Homo sapien
gtgcactgctagttcatcaaaagtgagagatag

SEQ ID NO: 673635 - DNA, 33 bp, Homo sapien
aaattccccaaacctcacaggataggctcaata

SEQ ID NO: 673636 - DNA, 33 bp, Homo sapien
aaattccccaaacctcgcaggataggctcaata

SEQ ID NO: 673637 - DNA, 33 bp, Homo sapien
cttatgagaagcaacaactaggaaaggtgaggg

SEQ ID NO: 673638 - DNA, 33 bp, Homo sapien
cttatgagaagcaacagctaggaaaggtgaggg

SEQ ID NO: 673639 - DNA, 33 bp, Homo sapien
agtttgatttttggtacattcacaaagttgtat

SEQ ID NO: 673640 - DNA, 33 bp, Homo sapien
agtttgatttttggtatattcacaaagttgtat

SEQ ID NO: 673641 - DNA, 33 bp, Homo sapien
cttttaaaagttcacaatgcgatggtttttagc

SEQ ID NO: 673642 - DNA, 33 bp, Homo sapien
cttttaaaagttcacagtgcgatggtttttagc

SEQ ID NO: 673643 - DNA, 33 bp, Homo sapien
tgttgggaggctgtacaagctaagtgggagtgg

SEQ ID NO: 673644 - DNA, 33 bp, Homo sapien
tgttgggaggctgtacgagctaagtgggagtgg

SEQ ID NO: 673645 - DNA, 33 bp, Homo sapien
tgtatttcctctttaccctaagcataaatatgt

SEQ ID NO: 673646 - DNA, 33 bp, Homo sapien
tgtatttcctctttactctaagcataaatatgt

SEQ ID NO: 673647 - DNA, 33 bp, Homo sapien
tcctctcacttttatacagccattggttgggtt

SEQ ID NO: 673648 - DNA, 33 bp, Homo sapien
tcctctcacttttatatagccattggttgggtt

SEQ ID NO: 673649 - DNA, 33 bp, Homo sapien
gaaagtgagaagcatgagaaaagctaggaaaga

SEQ ID NO: 673650 - DNA, 33 bp, Homo sapien
gaaagtgagaagcatgggaaaagctaggaaaga

SEQ ID NO: 673651 - DNA, 33 bp, Homo sapien
tcttcataatgtcaaggcctaaccaagaacgct

SEQ ID NO: 673652 - DNA, 33 bp, Homo sapien
tcttcataatgtcaagtcctaaccaagaacgct

SEQ ID NO: 673653 - DNA, 33 bp, Homo sapien
catttagattgaaagaaaataacatgtgggggt

SEQ ID NO: 673654 - DNA, 33 bp, Homo sapien
catttagattgaaagataataacatgtgggggt

SEQ ID NO: 673655 - DNA, 33 bp, Homo sapien
cttaagaaaaaaagccaggatactggatcggcc

SEQ ID NO: 673656 - DNA, 33 bp, Homo sapien
cttaagaaaaaaagccgggatactggatcggcc

SEQ ID NO: 673657 - DNA, 33 bp, Homo sapien
tatcaagctgcaaaaccatctacgctcctatgt

SEQ ID NO: 673658 - DNA, 33 bp, Homo sapien
tatcaagctgcaaaactatctacgctcctatgt

SEQ ID NO: 673659 - DNA, 33 bp, Homo sapien
gcagtaacttacaggaaatggaaaaagcaggga

SEQ ID NO: 673660 - DNA, 33 bp, Homo sapien
gcagtaacttacaggagatggaaaaagcaggga

SEQ ID NO: 673661 - DNA, 33 bp, Homo sapien
gtgtggcccaggattgaatttctccagatgact

SEQ ID NO: 673662 - DNA, 33 bp, Homo sapien
gtgtggcccaggattgcatttctccagatgact

SEQ ID NO: 673663 - DNA, 33 bp, Homo sapien
tacatttttacagatcgacacttcctagaacta

SEQ ID NO: 673664 - DNA, 33 bp, Homo sapien
tacatttttacagatctacacttcctagaacta

SEQ ID NO: 673665 - DNA, 33 bp, Homo sapien
ccagcaccataccacaccaaattgtcttctatg

SEQ ID NO: 673666 - DNA, 33 bp, Homo sapien
ccagcaccataccacagcaaattgtcttctatg

SEQ ID NO: 673667 - DNA, 33 bp, Homo sapien
gcgtgcttgtctgatgcacggtttttcttcagg

SEQ ID NO: 673668 - DNA, 33 bp, Homo sapien
gcgtgcttgtctgatggacggtttttcttcagg

SEQ ID NO: 673669 - DNA, 33 bp, Homo sapien
tgatctgaggatattacaagacagagcataaaa

SEQ ID NO: 673670 - DNA, 33 bp, Homo sapien
tgatctgaggatattagaagacagagcataaaa

SEQ ID NO: 673671 - DNA, 33 bp, Homo sapien
tgcctgtagatagaaaaatcctgtgcattggtg

SEQ ID NO: 673672 - DNA, 33 bp, Homo sapien
tgcctgtagatagaaacatcctgtgcattggtg

SEQ ID NO: 673673 - DNA, 33 bp, Homo sapien
aaatatttgtgctattaaaaacttggacatctt

SEQ ID NO: 673674 - DNA, 33 bp, Homo sapien
aaatatttgtgctattgaaaacttggacatctt

SEQ ID NO: 673675 - DNA, 33 bp, Homo sapien
atttggatgtaaccacaggcttgccatatgaaa

SEQ ID NO: 673676 - DNA, 33 bp, Homo sapien
atttggatgtaaccacgggcttgccatatgaaa

SEQ ID NO: 673677 - DNA, 33 bp, Homo sapien
agtttaactttccagccctctcattcttaattc

SEQ ID NO: 673678 - DNA, 33 bp, Homo sapien
agtttaactttccagctctctcattcttaattc

SEQ ID NO: 673679 - DNA, 33 bp, Homo sapien
acagaaaagtgcaggacaaatctctttggtcat

SEQ ID NO: 673680 - DNA, 33 bp, Homo sapien
acagaaaagtgcaggagaaatctctttggtcat

SEQ ID NO: 673681 - DNA, 33 bp, Homo sapien
gtgttgttggcaaaaacaggggtaagctttgat

SEQ ID NO: 673682 - DNA, 33 bp, Homo sapien
gtgttgttggcaaaaagaggggtaagctttgat

SEQ ID NO: 673683 - DNA, 33 bp, Homo sapien
aggagttaaagctgtacgggtatcaaaagagca

SEQ ID NO: 673684 - DNA, 33 bp, Homo sapien
aggagttaaagctgtatgggtatcaaaagagca

SEQ ID NO: 673685 - DNA, 33 bp, Homo sapien
catctttggtgaaacccacacagatcatttaca

SEQ ID NO: 673686 - DNA, 33 bp, Homo sapien
catctttggtgaaacctacacagatcatttaca

SEQ ID NO: 673687 - DNA, 33 bp, Homo sapien
tccagtaaaaacttagaactgttattagcatca

SEQ ID NO: 673688 - DNA, 33 bp, Homo sapien
tccagtaaaaacttaggactgttattagcatca

SEQ ID NO: 673689 - DNA, 33 bp, Homo sapien
taaagtcaggtggtaacgaggccatgaagatcc

SEQ ID NO: 673690 - DNA, 33 bp, Homo sapien
taaagtcaggtggtaatgaggccatgaagatcc

SEQ ID NO: 673691 - DNA, 33 bp, Homo sapien
tgaagtgtttggtgaaactaccgcctttttccc

SEQ ID NO: 673692 - DNA, 33 bp, Homo sapien
tgaagtgtttggtgaagctaccgcctttttccc

SEQ ID NO: 673693 - DNA, 33 bp, Homo sapien
tattttattttaatccacttaacttgatatgct

SEQ ID NO: 673694 - DNA, 33 bp, Homo sapien
tattttattttaatcctcttaacttgatatgct

SEQ ID NO: 673695 - DNA, 33 bp, Homo sapien
tctagtcttgggagtaactggcttccatgctgg

SEQ ID NO: 673696 - DNA, 33 bp, Homo sapien
tctagtcttgggagtagctggcttccatgctgg

SEQ ID NO: 673697 - DNA, 33 bp, Homo sapien
cttaaggaatcttctactaaaatgtagccactt

SEQ ID NO: 673698 - DNA, 33 bp, Homo sapien
cttaaggaatcttctattaaaatgtagccactt

SEQ ID NO: 673699 - DNA, 33 bp, Homo sapien
ttactttatcagcacagtacctagcacattgct

SEQ ID NO: 673700 - DNA, 33 bp, Homo sapien
ttactttatcagcacattacctagcacattgct

SEQ ID NO: 673701 - DNA, 33 bp, Homo sapien
tttattacttattggacgaagaatgtagacaat

SEQ ID NO: 673702 - DNA, 33 bp, Homo sapien
tttattacttattggatgaagaatgtagacaat

SEQ ID NO: 673703 - DNA, 33 bp, Homo sapien
gtttcggctatagtaaggtctttctgatgctct

SEQ ID NO: 673704 - DNA, 33 bp, Homo sapien
gtttcggctatagtaatgtctttctgatgctct

SEQ ID NO: 673705 - DNA, 33 bp, Homo sapien
gggactgctgatataccacctaaaggaggtgac

SEQ ID NO: 673706 - DNA, 33 bp, Homo sapien
gggactgctgatatactacctaaaggaggtgac

SEQ ID NO: 673707 - DNA, 33 bp, Homo sapien
tgctgagagaggaaatcatactgaagtgtttat

SEQ ID NO: 673708 - DNA, 33 bp, Homo sapien
tgctgagagaggaaatgatactgaagtgtttat

SEQ ID NO: 673709 - DNA, 33 bp, Homo sapien
ctaatctactcaaatgcaatgaagtttcatttc

SEQ ID NO: 673710 - DNA, 33 bp, Homo sapien
ctaatctactcaaatggaatgaagtttcatttc

SEQ ID NO: 673711 - DNA, 33 bp, Homo sapien
gaatagaaaaacaatgcagtctttgcaggagct

SEQ ID NO: 673712 - DNA, 33 bp, Homo sapien
gaatagaaaaacaatggagtctttgcaggagct

SEQ ID NO: 673713 - DNA, 33 bp, Homo sapien
aagaagtcacccagtaactaataaatattaaaa

SEQ ID NO: 673714 - DNA, 33 bp, Homo sapien
aagaagtcacccagtagctaataaatattaaaa

SEQ ID NO: 673715 - DNA, 33 bp, Homo sapien
ggcaggataagcacagaatcttggtggactgga

SEQ ID NO: 673716 - DNA, 33 bp, Homo sapien
ggcaggataagcacaggatcttggtggactgga

SEQ ID NO: 673717 - DNA, 33 bp, Homo sapien
aactaggctaagcactcaagtttcccaagaaat

SEQ ID NO: 673718 - DNA, 33 bp, Homo sapien
aactaggctaagcactgaagtttcccaagaaat

SEQ ID NO: 673719 - DNA, 33 bp, Homo sapien
aaaaaagcttctcctcccaaatctctccaaaag

SEQ ID NO: 673720 - DNA, 33 bp, Homo sapien
aaaaaagcttctcctcgcaaatctctccaaaag

SEQ ID NO: 673721 - DNA, 33 bp, Homo sapien
tttttgaagcatggagaacagaacctttctacc

SEQ ID NO: 673722 - DNA, 33 bp, Homo sapien
tttttgaagcatggaggacagaacctttctacc

SEQ ID NO: 673723 - DNA, 33 bp, Homo sapien
catacttcttgggataaagataaatgacacagt

SEQ ID NO: 673724 - DNA, 33 bp, Homo sapien
catacttcttgggatagagataaatgacacagt

SEQ ID NO: 673725 - DNA, 33 bp, Homo sapien
ggggcagtctcaacaactgtctcaactaaacta

SEQ ID NO: 673726 - DNA, 33 bp, Homo sapien
ggggcagtctcaacaagtgtctcaactaaacta

SEQ ID NO: 673727 - DNA, 33 bp, Homo sapien
tctagcctgtcttgtacctaggtgtgtccatgt

SEQ ID NO: 673728 - DNA, 33 bp, Homo sapien
tctagcctgtcttgtagctaggtgtgtccatgt

SEQ ID NO: 673729 - DNA, 33 bp, Homo sapien
ttctctttgtcttttcccatggacaccatgctt

SEQ ID NO: 673730 - DNA, 33 bp, Homo sapien
ttctctttgtcttttctcatggacaccatgctt

SEQ ID NO: 673731 - DNA, 33 bp, Homo sapien
ccagttccatccaaaaagacctggaaaatttaa

SEQ ID NO: 673732 - DNA, 33 bp, Homo sapien
ccagttccatccaaaatgacctggaaaatttaa

SEQ ID NO: 673733 - DNA, 33 bp, Homo sapien
ttcttctagctattagacggtccattacaccta

SEQ ID NO: 673734 - DNA, 33 bp, Homo sapien
ttcttctagctattaggcggtccattacaccta

SEQ ID NO: 673735 - DNA, 33 bp, Homo sapien
gtggagaagagagttcaaaggagtctgactaaa

SEQ ID NO: 673736 - DNA, 33 bp, Homo sapien
gtggagaagagagttcgaaggagtctgactaaa

SEQ ID NO: 673737 - DNA, 33 bp, Homo sapien
acatataagatcaatacatgtttcagctaacaa

SEQ ID NO: 673738 - DNA, 33 bp, Homo sapien
acatataagatcaatatatgtttcagctaacaa

SEQ ID NO: 673739 - DNA, 33 bp, Homo sapien
tagagataattaaaagaagtttgctaacagttc

SEQ ID NO: 673740 - DNA, 33 bp, Homo sapien
tagagataattaaaagtagtttgctaacagttc

SEQ ID NO: 673741 - DNA, 33 bp, Homo sapien
cctatggctttgaactaaggacgaattcatgta

SEQ ID NO: 673742 - DNA, 33 bp, Homo sapien
cctatggctttgaactgaggacgaattcatgta

SEQ ID NO: 673743 - DNA, 33 bp, Homo sapien
tgggaaactctcagaaataatcttttagagacc

SEQ ID NO: 673744 - DNA, 33 bp, Homo sapien
tgggaaactctcagaagtaatcttttagagacc

SEQ ID NO: 673745 - DNA, 33 bp, Homo sapien
cattagacgacaagtacgcttcattgaaaaaga

SEQ ID NO: 673746 - DNA, 33 bp, Homo sapien
cattagacgacaagtatgcttcattgaaaaaga

SEQ ID NO: 673747 - DNA, 33 bp, Homo sapien
cctaaggctgtcctaccaaaaaatcaaaaccta

SEQ ID NO: 673748 - DNA, 33 bp, Homo sapien
cctaaggctgtcctacgaaaaaatcaaaaccta

SEQ ID NO: 673749 - DNA, 33 bp, Homo sapien
ccgtctttgtgccttcacggtctgacttttcac

SEQ ID NO: 673750 - DNA, 33 bp, Homo sapien
ccgtctttgtgccttcgcggtctgacttttcac

SEQ ID NO: 673751 - DNA, 33 bp, Homo sapien
tttactgaatgaataaaagaaatcagaacaggc

SEQ ID NO: 673752 - DNA, 33 bp, Homo sapien
tttactgaatgaataagagaaatcagaacaggc

SEQ ID NO: 673753 - DNA, 33 bp, Homo sapien
ctcaccagaccccaacaatactggactgggttc

SEQ ID NO: 673754 - DNA, 33 bp, Homo sapien
ctcaccagaccccaaccatactggactgggttc

SEQ ID NO: 673755 - DNA, 33 bp, Homo sapien
aaataacaaaaaggtacatatgcagtttgttag

SEQ ID NO: 673756 - DNA, 33 bp, Homo sapien
aaataacaaaaaggtagatatgcagtttgttag

SEQ ID NO: 673757 - DNA, 33 bp, Homo sapien
cactgaccttggtgtcactatttcaaagatgat

SEQ ID NO: 673758 - DNA, 33 bp, Homo sapien
cactgaccttggtgtcgctatttcaaagatgat

SEQ ID NO: 673759 - DNA, 33 bp, Homo sapien
aatcccagcactttgaaaacctgaggcaggcag

SEQ ID NO: 673760 - DNA, 33 bp, Homo sapien
aatcccagcactttgagaacctgaggcaggcag

SEQ ID NO: 673761 - DNA, 33 bp, Homo sapien
tataatcagcttgtcaacttcaaaacaaaaagt

SEQ ID NO: 673762 - DNA, 33 bp, Homo sapien
tataatcagcttgtcatcttcaaaacaaaaagt

SEQ ID NO: 673763 - DNA, 33 bp, Homo sapien
tatcatgaagtcgacacgtattagctaaggctc

SEQ ID NO: 673764 - DNA, 33 bp, Homo sapien
tatcatgaagtcgacatgtattagctaaggctc

SEQ ID NO: 673765 - DNA, 33 bp, Homo sapien
cgatctctaacactcaaatttctaacactcaaa

SEQ ID NO: 673766 - DNA, 33 bp, Homo sapien
cgatctctaacactcatatttctaacactcaaa

SEQ ID NO: 673767 - DNA, 33 bp, Homo sapien
tattttccagattgtcacaaatttccaaaaact

SEQ ID NO: 673768 - DNA, 33 bp, Homo sapien
tattttccagattgtcgcaaatttccaaaaact

SEQ ID NO: 673769 - DNA, 33 bp, Homo sapien
taggatctttttaacaactaggtctaggacagg

SEQ ID NO: 673770 - DNA, 33 bp, Homo sapien
taggatctttttaacagctaggtctaggacagg

SEQ ID NO: 673771 - DNA, 33 bp, Homo sapien
ttacaagaaaaagttgaattgctcagtatgtac

SEQ ID NO: 673772 - DNA, 33 bp, Homo sapien
ttacaagaaaaagttgtattgctcagtatgtac

SEQ ID NO: 673773 - DNA, 33 bp, Homo sapien
gttcattaggagctaactagaagaacttaccac

SEQ ID NO: 673774 - DNA, 33 bp, Homo sapien
gttcattaggagctaagtagaagaacttaccac

SEQ ID NO: 673775 - DNA, 33 bp, Homo sapien
tgcttacatggtctgccaatattaacaaactcc

SEQ ID NO: 673776 - DNA, 33 bp, Homo sapien
tgcttacatggtctgcgaatattaacaaactcc

SEQ ID NO: 673777 - DNA, 33 bp, Homo sapien
aaacattttgtggtagcaaatggtatgtaattt

SEQ ID NO: 673778 - DNA, 33 bp, Homo sapien
aaacattttgtggtagtaaatggtatgtaattt

SEQ ID NO: 673779 - DNA, 33 bp, Homo sapien
ctgctaaattgactggaagccctggcgaaactc

SEQ ID NO: 673780 - DNA, 33 bp, Homo sapien
ctgctaaattgactggcagccctggcgaaactc

SEQ ID NO: 673781 - DNA, 33 bp, Homo sapien
aactgactccaccttacaatgggtgcatgattt

SEQ ID NO: 673782 - DNA, 33 bp, Homo sapien
aactgactccaccttataatgggtgcatgattt

SEQ ID NO: 673783 - DNA, 33 bp, Homo sapien
cttgcacgagtgaaagcctgtgtgattgtatgt

SEQ ID NO: 673784 - DNA, 33 bp, Homo sapien
cttgcacgagtgaaaggctgtgtgattgtatgt

SEQ ID NO: 673785 - DNA, 33 bp, Homo sapien
tattgacgtcttcttacgatttcaagatgtggt

SEQ ID NO: 673786 - DNA, 33 bp, Homo sapien
tattgacgtcttcttatgatttcaagatgtggt

SEQ ID NO: 673787 - DNA, 33 bp, Homo sapien
attaagttgttagatcagagttatccaaaaggc

SEQ ID NO: 673788 - DNA, 33 bp, Homo sapien
attaagttgttagatcggagttatccaaaaggc

SEQ ID NO: 673789 - DNA, 33 bp, Homo sapien
gcatatggaggacatcaagtaaatgatttgtca

SEQ ID NO: 673790 - DNA, 33 bp, Homo sapien
gcatatggaggacatcgagtaaatgatttgtca

SEQ ID NO: 673791 - DNA, 33 bp, Homo sapien
tgcatttggaaatgtacgagagagaaaaaaaaa

SEQ ID NO: 673792 - DNA, 33 bp, Homo sapien
tgcatttggaaatgtaggagagagaaaaaaaaa

SEQ ID NO: 673793 - DNA, 33 bp, Homo sapien
tgcttatttgagtgaccggtaatttttttattt

SEQ ID NO: 673794 - DNA, 33 bp, Homo sapien
tgcttatttgagtgactggtaatttttttattt

SEQ ID NO: 673795 - DNA, 33 bp, Homo sapien
atatatatttgtagtacagacacacacaggtaa

SEQ ID NO: 673796 - DNA, 33 bp, Homo sapien
atatatatttgtagtatagacacacacaggtaa

SEQ ID NO: 673797 - DNA, 33 bp, Homo sapien
catagtttggtattgacgtaacccagcctcatg

SEQ ID NO: 673798 - DNA, 33 bp, Homo sapien
catagtttggtattgatgtaacccagcctcatg

SEQ ID NO: 673799 - DNA, 33 bp, Homo sapien
ctgctaaaagtctgaacgtaccaaaggctggta

SEQ ID NO: 673800 - DNA, 33 bp, Homo sapien
ctgctaaaagtctgaatgtaccaaaggctggta

SEQ ID NO: 673801 - DNA, 33 bp, Homo sapien
ccctatttctttgtaagattccccacagtctca

SEQ ID NO: 673802 - DNA, 33 bp, Homo sapien
ccctatttctttgtaatattccccacagtctca

SEQ ID NO: 673803 - DNA, 33 bp, Homo sapien
ttcttaaaacatgctacatcaacactgaatgag

SEQ ID NO: 673804 - DNA, 33 bp, Homo sapien
ttcttaaaacatgctatatcaacactgaatgag

SEQ ID NO: 673805 - DNA, 33 bp, Homo sapien
gaactcaatgtctctagcttccccagtgtaaca

SEQ ID NO: 673806 - DNA, 33 bp, Homo sapien
gaactcaatgtctctatcttccccagtgtaaca

SEQ ID NO: 673807 - DNA, 33 bp, Homo sapien
ttgtacctctaaacaacagtcaagaacagagtt

SEQ ID NO: 673808 - DNA, 33 bp, Homo sapien
ttgtacctctaaacaatagtcaagaacagagtt

SEQ ID NO: 673809 - DNA, 33 bp, Homo sapien
aataatgaataaatcaacaatctgatgagcaaa

SEQ ID NO: 673810 - DNA, 33 bp, Homo sapien
aataatgaataaatcagcaatctgatgagcaaa

SEQ ID NO: 673811 - DNA, 33 bp, Homo sapien
agagcctatcctgatagtacaaggaacagatgg

SEQ ID NO: 673812 - DNA, 33 bp, Homo sapien
agagcctatcctgatattacaaggaacagatgg

SEQ ID NO: 673813 - DNA, 33 bp, Homo sapien
tgaatgtgctttcaggcaatctcttccaggggt

SEQ ID NO: 673814 - DNA, 33 bp, Homo sapien
tgaatgtgctttcaggtaatctcttccaggggt

SEQ ID NO: 673815 - DNA, 33 bp, Homo sapien
gtacaacgattatataccaactttaaaaataaa

SEQ ID NO: 673816 - DNA, 33 bp, Homo sapien
gtacaacgattatatagcaactttaaaaataaa

SEQ ID NO: 673817 - DNA, 33 bp, Homo sapien
caccaacctaatacaactaaaagtggaattggt

SEQ ID NO: 673818 - DNA, 33 bp, Homo sapien
caccaacctaatacaagtaaaagtggaattggt

SEQ ID NO: 673819 - DNA, 33 bp, Homo sapien
gttgcatgggtgtggaatattaaaaagctttac

SEQ ID NO: 673820 - DNA, 33 bp, Homo sapien
gttgcatgggtgtggactattaaaaagctttac

SEQ ID NO: 673821 - DNA, 33 bp, Homo sapien
acagttacagagatgaccagatagttgagtgat

SEQ ID NO: 673822 - DNA, 33 bp, Homo sapien
acagttacagagatgatcagatagttgagtgat

SEQ ID NO: 673823 - DNA, 33 bp, Homo sapien
tgagatacaatccccacgaggcaatatgagttc

SEQ ID NO: 673824 - DNA, 33 bp, Homo sapien
tgagatacaatccccatgaggcaatatgagttc

SEQ ID NO: 673825 - DNA, 33 bp, Homo sapien
catttctcctaattctcacctctaccacgtcaa

SEQ ID NO: 673826 - DNA, 33 bp, Homo sapien
catttctcctaattcttacctctaccacgtcaa

SEQ ID NO: 673827 - DNA, 33 bp, Homo sapien
taattaatccccaaaacaatccaatgcggtatt

SEQ ID NO: 673828 - DNA, 33 bp, Homo sapien
taattaatccccaaaataatccaatgcggtatt

SEQ ID NO: 673829 - DNA, 33 bp, Homo sapien
acccagatactctcaccggaaataccactccac

SEQ ID NO: 673830 - DNA, 33 bp, Homo sapien
acccagatactctcactggaaataccactccac

SEQ ID NO: 673831 - DNA, 33 bp, Homo sapien
gagaagccttagaagaaaccaactaatcctgct

SEQ ID NO: 673832 - DNA, 33 bp, Homo sapien
gagaagccttagaagacaccaactaatcctgct

SEQ ID NO: 673833 - DNA, 33 bp, Homo sapien
tttttaacataaggatgaatggccgttcattca

SEQ ID NO: 673834 - DNA, 33 bp, Homo sapien
tttttaacataaggattaatggccgttcattca

SEQ ID NO: 673835 - DNA, 33 bp, Homo sapien
atcagaatcagatgtcaatgaataatttgtttt

SEQ ID NO: 673836 - DNA, 33 bp, Homo sapien
atcagaatcagatgtcgatgaataatttgtttt

SEQ ID NO: 673837 - DNA, 33 bp, Homo sapien
gcgtttcaatagttcaaggcggtcctttgtttc

SEQ ID NO: 673838 - DNA, 33 bp, Homo sapien
gcgtttcaatagttcagggcggtcctttgtttc

SEQ ID NO: 673839 - DNA, 33 bp, Homo sapien
acttgccttattttagcagtctgttagtaggat

SEQ ID NO: 673840 - DNA, 33 bp, Homo sapien
acttgccttattttagtagtctgttagtaggat

SEQ ID NO: 673841 - DNA, 33 bp, Homo sapien
acttctatttccagcaaagttgttatagcattc

SEQ ID NO: 673842 - DNA, 33 bp, Homo sapien
acttctatttccagcacagttgttatagcattc

SEQ ID NO: 673843 - DNA, 33 bp, Homo sapien
aatggctgctaaggtggagtttcttcaaataca

SEQ ID NO: 673844 - DNA, 33 bp, Homo sapien
aatggctgctaaggtgtagtttcttcaaataca

SEQ ID NO: 673845 - DNA, 33 bp, Homo sapien
ataaacttgcataatacaaggacaatgcagtta

SEQ ID NO: 673846 - DNA, 33 bp, Homo sapien
ataaacttgcataatataaggacaatgcagtta

SEQ ID NO: 673847 - DNA, 33 bp, Homo sapien
aaccactaactgtggaccatagtcactaaatgg

SEQ ID NO: 673848 - DNA, 33 bp, Homo sapien
aaccactaactgtggatcatagtcactaaatgg

SEQ ID NO: 673849 - DNA, 33 bp, Homo sapien
attgcttcctctaagacgccttcctgattgctg

SEQ ID NO: 673850 - DNA, 33 bp, Homo sapien
attgcttcctctaagatgccttcctgattgctg

SEQ ID NO: 673851 - DNA, 33 bp, Homo sapien
accttcacattgcaagcctgcctgtgctgaaac

SEQ ID NO: 673852 - DNA, 33 bp, Homo sapien
accttcacattgcaagtctgcctgtgctgaaac

SEQ ID NO: 673853 - DNA, 33 bp, Homo sapien
acgatgctgtgaccaaacctccaggatgctggc

SEQ ID NO: 673854 - DNA, 33 bp, Homo sapien
acgatgctgtgaccaaccctccaggatgctggc

SEQ ID NO: 673855 - DNA, 33 bp, Homo sapien
ttgcaactgaacctcaacttaaatcatgaggaa

SEQ ID NO: 673856 - DNA, 33 bp, Homo sapien
ttgcaactgaacctcaccttaaatcatgaggaa

SEQ ID NO: 673857 - DNA, 33 bp, Homo sapien
ctatcgctgataaagacataaattgttgactcc

SEQ ID NO: 673858 - DNA, 33 bp, Homo sapien
ctatcgctgataaagatataaattgttgactcc

SEQ ID NO: 673859 - DNA, 33 bp, Homo sapien
actcgcacatgggtagaatgtgacttctatgta

SEQ ID NO: 673860 - DNA, 33 bp, Homo sapien
actcgcacatgggtaggatgtgacttctatgta

SEQ ID NO: 673861 - DNA, 33 bp, Homo sapien
cactcatctattttgaagtctatatacgtttat

SEQ ID NO: 673862 - DNA, 33 bp, Homo sapien
cactcatctattttgatgtctatatacgtttat

SEQ ID NO: 673863 - DNA, 33 bp, Homo sapien
actcagccatgcagtcacaaagttgttaactgg

SEQ ID NO: 673864 - DNA, 33 bp, Homo sapien
actcagccatgcagtcgcaaagttgttaactgg

SEQ ID NO: 673865 - DNA, 33 bp, Homo sapien
ctattaggttgcattaccaagatacattgttta

SEQ ID NO: 673866 - DNA, 33 bp, Homo sapien
ctattaggttgcattatcaagatacattgttta

SEQ ID NO: 673867 - DNA, 33 bp, Homo sapien
tttggctccatttaacagctcgtaaaataattt

SEQ ID NO: 673868 - DNA, 33 bp, Homo sapien
tttggctccatttaacggctcgtaaaataattt

SEQ ID NO: 673869 - DNA, 33 bp, Homo sapien
cattttgtcataacaaagtgagatgggctttac

SEQ ID NO: 673870 - DNA, 33 bp, Homo sapien
cattttgtcataacaaggtgagatgggctttac

SEQ ID NO: 673871 - DNA, 33 bp, Homo sapien
gcactacagagtgggaactactattacatctgc

SEQ ID NO: 673872 - DNA, 33 bp, Homo sapien
gcactacagagtgggatctactattacatctgc

SEQ ID NO: 673873 - DNA, 33 bp, Homo sapien
aaagaaaagtaaaataacaagcctatctatggt

SEQ ID NO: 673874 - DNA, 33 bp, Homo sapien
aaagaaaagtaaaatagcaagcctatctatggt

SEQ ID NO: 673875 - DNA, 33 bp, Homo sapien
aatcattggtaaatcaccaacattaaaactcat

SEQ ID NO: 673876 - DNA, 33 bp, Homo sapien
aatcattggtaaatcatcaacattaaaactcat

SEQ ID NO: 673877 - DNA, 33 bp, Homo sapien
ccgagtgtcttgtttcaagaagatattacagtc

SEQ ID NO: 673878 - DNA, 33 bp, Homo sapien
ccgagtgtcttgtttccagaagatattacagtc

SEQ ID NO: 673879 - DNA, 33 bp, Homo sapien
tgtaattaaccagatactgagccttcaggaggg

SEQ ID NO: 673880 - DNA, 33 bp, Homo sapien
tgtaattaaccagatattgagccttcaggaggg

SEQ ID NO: 673881 - DNA, 33 bp, Homo sapien
tagaggactgcttagacgcatgcttattctaga

SEQ ID NO: 673882 - DNA, 33 bp, Homo sapien
tagaggactgcttagatgcatgcttattctaga

SEQ ID NO: 673883 - DNA, 33 bp, Homo sapien
tccccatatctctcgaagctagtgaacaaaaga

SEQ ID NO: 673884 - DNA, 33 bp, Homo sapien
tccccatatctctcgaggctagtgaacaaaaga

SEQ ID NO: 673885 - DNA, 33 bp, Homo sapien
tttgtaaaatgaatccccaccaagaatcacttt

SEQ ID NO: 673886 - DNA, 33 bp, Homo sapien
tttgtaaaatgaatcctcaccaagaatcacttt

SEQ ID NO: 673887 - DNA, 33 bp, Homo sapien
tcctctcactcttagactcaggaaattattgtc

SEQ ID NO: 673888 - DNA, 33 bp, Homo sapien
tcctctcactcttagattcaggaaattattgtc

SEQ ID NO: 673889 - DNA, 33 bp, Homo sapien
aaacacacagtactgcacggcaggctcagcaga

SEQ ID NO: 673890 - DNA, 33 bp, Homo sapien
aaacacacagtactgcgcggcaggctcagcaga

SEQ ID NO: 673891 - DNA, 33 bp, Homo sapien
tgttatcatctgtacacctccttctcatgattg

SEQ ID NO: 673892 - DNA, 33 bp, Homo sapien
tgttatcatctgtacagctccttctcatgattg

SEQ ID NO: 673893 - DNA, 33 bp, Homo sapien
caacactttacttagacgctttgcccaggttac

SEQ ID NO: 673894 - DNA, 33 bp, Homo sapien
caacactttacttagatgctttgcccaggttac

SEQ ID NO: 673895 - DNA, 33 bp, Homo sapien
catcctaaaatacaaacggctatgcaacataac

SEQ ID NO: 673896 - DNA, 33 bp, Homo sapien
catcctaaaatacaaatggctatgcaacataac

SEQ ID NO: 673897 - DNA, 33 bp, Homo sapien
tcattgtatggatctagtacattttggttattc

SEQ ID NO: 673898 - DNA, 33 bp, Homo sapien
tcattgtatggatctattacattttggttattc

SEQ ID NO: 673899 - DNA, 33 bp, Homo sapien
ccattaatattgattacctcagtaagatcaagt

SEQ ID NO: 673900 - DNA, 33 bp, Homo sapien
ccattaatattgattatctcagtaagatcaagt

SEQ ID NO: 673901 - DNA, 33 bp, Homo sapien
caagagaatgtgaccaaaaatatctttatgtgg

SEQ ID NO: 673902 - DNA, 33 bp, Homo sapien
caagagaatgtgaccacaaatatctttatgtgg

SEQ ID NO: 673903 - DNA, 33 bp, Homo sapien
taaaaattgttgacaaagttaaaggtcagcttg

SEQ ID NO: 673904 - DNA, 33 bp, Homo sapien
taaaaattgttgacaatgttaaaggtcagcttg

SEQ ID NO: 673905 - DNA, 33 bp, Homo sapien; identical to SEQ ID NO: 673903

SEQ ID NO: 673906 - DNA, 33 bp, Homo sapien; identical to SEQ ID NO: 673904

SEQ ID NO: 673907 - DNA, 33 bp, Homo sapien
aatttaagaccttccacaatgaacagttcactt

SEQ ID NO: 673908 - DNA, 33 bp, Homo sapien
aatttaagaccttccagaatgaacagttcactt

SEQ ID NO: 673909 - DNA, 33 bp, Homo sapien
ttcagttatcttctaccgcctgtattttctact

SEQ ID NO: 673910 - DNA, 33 bp, Homo sapien
ttcagttatcttctactgcctgtattttctact

SEQ ID NO: 673911 - DNA, 33 bp, Homo sapien
acaaaacaaactccgtaaataaacaaggcattc

SEQ ID NO: 673912 - DNA, 33 bp, Homo sapien
acaaaacaaactccgtgaataaacaaggcattc

SEQ ID NO: 673913 - DNA, 33 bp, Homo sapien
tcctgaaggaaataaaacttgttaagatgcagt

SEQ ID NO: 673914 - DNA, 33 bp, Homo sapien
tcctgaaggaaataaaccttgttaagatgcagt

SEQ ID NO: 673915 - DNA, 33 bp, Homo sapien
gccttctgctgtcccacgtgttaaattgttata

SEQ ID NO: 673916 - DNA, 33 bp, Homo sapien
gccttctgctgtcccatgtgttaaattgttata

SEQ ID NO: 673917 - DNA, 33 bp, Homo sapien
catggcagaagatggaaataaccaaatggagat

SEQ ID NO: 673918 - DNA, 33 bp, Homo sapien
catggcagaagatggatataaccaaatggagat

SEQ ID NO: 673919 - DNA, 33 bp, Homo sapien
agttatagcagcagaactggaatataggcctga

SEQ ID NO: 673920 - DNA, 33 bp, Homo sapien
agttatagcagcagaattggaatataggcctga

SEQ ID NO: 673921 - DNA, 33 bp, Homo sapien
caacacaatgggatgaacagccagccccttgat

SEQ ID NO: 673922 - DNA, 33 bp, Homo sapien
caacacaatgggatgagcagccagccccttgat

SEQ ID NO: 673923 - DNA, 33 bp, Homo sapien
tagagtatatacaaaaattatcattcaccttat

SEQ ID NO: 673924 - DNA, 33 bp, Homo sapien
tagagtatatacaaaacttatcattcaccttat

SEQ ID NO: 673925 - DNA, 33 bp, Homo sapien
ttcaacaatttttactaagctccccagtcattt

SEQ ID NO: 673926 - DNA, 33 bp, Homo sapien
ttcaacaatttttactgagctccccagtcattt

SEQ ID NO: 673927 - DNA, 33 bp, Homo sapien
cgggggaagcatcccaatccaggtcggccagtg

SEQ ID NO: 673928 - DNA, 33 bp, Homo sapien
cgggggaagcatcccagtccaggtcggccagtg

SEQ ID NO: 673929 - DNA, 33 bp, Homo sapien
aggatgaagcttaactaaggaaggtagaaccaa

SEQ ID NO: 673930 - DNA, 33 bp, Homo sapien
aggatgaagcttaactgaggaaggtagaaccaa

SEQ ID NO: 673931 - DNA, 33 bp, Homo sapien
ggccaagacttttcaccgactataataattctg

SEQ ID NO: 673932 - DNA, 33 bp, Homo sapien
ggccaagacttttcactgactataataattctg

SEQ ID NO: 673933 - DNA, 33 bp, Homo sapien
gaaaatcctatccacaaagcatgaggaacatga

SEQ ID NO: 673934 - DNA, 33 bp, Homo sapien
gaaaatcctatccacagagcatgaggaacatga

SEQ ID NO: 673935 - DNA, 33 bp, Homo sapien
ttctactcactctccagaggttgtacccactgc

SEQ ID NO: 673936 - DNA, 33 bp, Homo sapien
ttctactcactctccataggttgtacccactgc

SEQ ID NO: 673937 - DNA, 33 bp, Homo sapien
ctttcttcatccaaaaacatcaaacctcattcc

SEQ ID NO: 673938 - DNA, 33 bp, Homo sapien
ctttcttcatccaaaagcatcaaacctcattcc

SEQ ID NO: 673939 - DNA, 33 bp, Homo sapien
gaaagacgtgtatgaaagtaaacaagaggagca

SEQ ID NO: 673940 - DNA, 33 bp, Homo sapien
gaaagacgtgtatgaaggtaaacaagaggagca

SEQ ID NO: 673941 - DNA, 33 bp, Homo sapien
tgtctttttggaaccacagaaagacgtgtatga

SEQ ID NO: 673942 - DNA, 33 bp, Homo sapien
tgtctttttggaaccatagaaagacgtgtatga

SEQ ID NO: 673943 - DNA, 33 bp, Homo sapien
aatgtctgttctatcacacaccaagctctcatg

SEQ ID NO: 673944 - DNA, 33 bp, Homo sapien
aatgtctgttctatcatacaccaagctctcatg

SEQ ID NO: 673945 - DNA, 33 bp, Homo sapien
tgtctggtctattgtacgtcctcaagaaatact

SEQ ID NO: 673946 - DNA, 33 bp, Homo sapien
tgtctggtctattgtatgtcctcaagaaatact

SEQ ID NO: 673947 - DNA, 33 bp, Homo sapien
tgctttcacctttggagaaatgataagaaagaa

SEQ ID NO: 673948 - DNA, 33 bp, Homo sapien
tgctttcacctttggataaatgataagaaagaa

SEQ ID NO: 673949 - DNA, 33 bp, Homo sapien
ggagtgccagatggaaagctaaagaagccagcc

SEQ ID NO: 673950 - DNA, 33 bp, Homo sapien
ggagtgccagatggaaggctaaagaagccagcc

SEQ ID NO: 673951 - DNA, 33 bp, Homo sapien
agcagccttctctcgacccacctctctgtgcac

SEQ ID NO: 673952 - DNA, 33 bp, Homo sapien
agcagccttctctcgatccacctctctgtgcac

SEQ ID NO: 673953 - DNA, 33 bp, Homo sapien
tcatctgatattttcacataggcagaagcaatt

SEQ ID NO: 673954 - DNA, 33 bp, Homo sapien
tcatctgatattttcatataggcagaagcaatt

SEQ ID NO: 673955 - DNA, 33 bp, Homo sapien
agagtgacagatctaaccaagtttcttctctta

SEQ ID NO: 673956 - DNA, 33 bp, Homo sapien
agagtgacagatctaatcaagtttcttctctta

SEQ ID NO: 673957 - DNA, 33 bp, Homo sapien
caacccagatgcaggaaaagtactccaaaagtg

SEQ ID NO: 673958 - DNA, 33 bp, Homo sapien
caacccagatgcaggacaagtactccaaaagtg

SEQ ID NO: 673959 - DNA, 33 bp, Homo sapien
tctggaccatgttgccactagaaatctgaatgc

SEQ ID NO: 673960 - DNA, 33 bp, Homo sapien
tctggaccatgttgccgctagaaatctgaatgc

SEQ ID NO: 673961 - DNA, 33 bp, Homo sapien
tacagacgaggagacaagaaataatgtactcaa

SEQ ID NO: 673962 - DNA, 33 bp, Homo sapien
tacagacgaggagacacgaaataatgtactcaa

SEQ ID NO: 673963 - DNA, 33 bp, Homo sapien
gatctgacgttccttgcagctcataattctcta

SEQ ID NO: 673964 - DNA, 33 bp, Homo sapien
gatctgacgttccttgtagctcataattctcta

SEQ ID NO: 673965 - DNA, 33 bp, Homo sapien
tttctttcctgctttcaaacacaaatgggtaaa

SEQ ID NO: 673966 - DNA, 33 bp, Homo sapien
tttctttcctgctttccaacacaaatgggtaaa

SEQ ID NO: 673967 - DNA, 33 bp, Homo sapien
cattggactcaaaaggaaaactgaaccaacggt

SEQ ID NO: 673968 - DNA, 33 bp, Homo sapien
cattggactcaaaagggaaactgaaccaacggt

SEQ ID NO: 673969 - DNA, 33 bp, Homo sapien; identical to SEQ ID NO: 673967

SEQ ID NO: 673970 - DNA, 33 bp, Homo sapien; identical to SEQ ID NO: 673968

SEQ ID NO: 673971 - DNA, 33 bp, Homo sapien
gacagctccaaatctacgtttacagcaacctca

SEQ ID NO: 673972 - DNA, 33 bp, Homo sapien
gacagctccaaatctatgtttacagcaacctca

SEQ ID NO: 673973 - DNA, 33 bp, Homo sapien
aacttataataaaatgcaaacgcaatactgtca

SEQ ID NO: 673974 - DNA, 33 bp, Homo sapien
aacttataataaaatgtaaacgcaatactgtca

SEQ ID NO: 673975 - DNA, 33 bp, Homo sapien
acttcaaggctaataaatattttcaggagatag

SEQ ID NO: 673976 - DNA, 33 bp, Homo sapien
acttcaaggctaataagtattttcaggagatag

SEQ ID NO: 673977 - DNA, 33 bp, Homo sapien
gggaacctggaagaagcaagattgtaaagtcaa

SEQ ID NO: 673978 - DNA, 33 bp, Homo sapien
gggaacctggaagaaggaagattgtaaagtcaa

SEQ ID NO: 673979 - DNA, 33 bp, Homo sapien
tggctgtgggactgtacattactttatattcat

SEQ ID NO: 673980 - DNA, 33 bp, Homo sapien
tggctgtgggactgtagattactttatattcat

SEQ ID NO: 673981 - DNA, 33 bp, Homo sapien
aaatcaatcatcaaaacgacacccacgtatttt

SEQ ID NO: 673982 - DNA, 33 bp, Homo sapien
aaatcaatcatcaaaatgacacccacgtatttt

SEQ ID NO: 673983 - DNA, 33 bp, Homo sapien
ataattgatgctaacagtatctctggatggact

SEQ ID NO: 673984 - DNA, 33 bp, Homo sapien
ataattgatgctaacattatctctggatggact

SEQ ID NO: 673985 - DNA, 33 bp, Homo sapien
agtggagggtgaaacagatttggtacagtgagc

SEQ ID NO: 673986 - DNA, 33 bp, Homo sapien
agtggagggtgaaacatatttggtacagtgagc

SEQ ID NO: 673987 - DNA, 33 bp, Homo sapien
gctgacaggcaaaatcgccagtattaaaaagaa

SEQ ID NO: 673988 - DNA, 33 bp, Homo sapien
gctgacaggcaaaatctccagtattaaaaagaa

SEQ ID NO: 673989 - DNA, 33 bp, Homo sapien
agcatttgatttcagccgagcaggtttagtcat

SEQ ID NO: 673990 - DNA, 33 bp, Homo sapien
agcatttgatttcagctgagcaggtttagtcat

SEQ ID NO: 673991 - DNA, 33 bp, Homo sapien
atgtatttgatggagaggttatttaaatggtaa

SEQ ID NO: 673992 - DNA, 33 bp, Homo sapien
atgtatttgatggagatgttatttaaatggtaa

SEQ ID NO: 673993 - DNA, 33 bp, Homo sapien
tttacaggactgaggactagaaagaataatgct

SEQ ID NO: 673994 - DNA, 33 bp, Homo sapien
tttacaggactgaggattagaaagaataatgct

SEQ ID NO: 673995 - DNA, 33 bp, Homo sapien
gcaccaatataagcataagtctgttggtgggaa

SEQ ID NO: 673996 - DNA, 33 bp, Homo sapien
gcaccaatataagcattagtctgttggtgggaa

SEQ ID NO: 673997 - DNA, 33 bp, Homo sapien
atagcagagcaaagaacctctgagtttgaggat

SEQ ID NO: 673998 - DNA, 33 bp, Homo sapien
atagcagagcaaagaatctctgagtttgaggat

SEQ ID NO: 673999 - DNA, 33 bp, Homo sapien
gagctatgaaaaatgtcacacagtacttggtga

SEQ ID NO: 674000 - DNA, 33 bp, Homo sapien
gagctatgaaaaatgtgacacagtacttggtga

SEQ ID NO: 674001 - DNA, 33 bp, Homo sapien
gagtgagtgctttttgcaagagatagcttgcca

SEQ ID NO: 674002 - DNA, 33 bp, Homo sapien
gagtgagtgctttttgtaagagatagcttgcca

SEQ ID NO: 674003 - DNA, 33 bp, Homo sapien
taggtgcatatgaaaactattaaagattggctg

SEQ ID NO: 674004 - DNA, 33 bp, Homo sapien
taggtgcatatgaaaattattaaagattggctg

SEQ ID NO: 674005 - DNA, 33 bp, Homo sapien
ctgtagctgtaggtatcagtatagttggctaag

SEQ ID NO: 674006 - DNA, 33 bp, Homo sapien
ctgtagctgtaggtatgagtatagttggctaag

SEQ ID NO: 674007 - DNA, 33 bp, Homo sapien
ggagactttgtagactgaagaatatcctgaaag

SEQ ID NO: 674008 - DNA, 33 bp, Homo sapien
ggagactttgtagacttaagaatatcctgaaag

SEQ ID NO: 674009 - DNA, 33 bp, Homo sapien
tcatgcctcccatctgaacaccatgttgtatag

SEQ ID NO: 674010 - DNA, 33 bp, Homo sapien
tcatgcctcccatctggacaccatgttgtatag

SEQ ID NO: 674011 - DNA, 33 bp, Homo sapien
tgactcaatttgttcacacctttccagaaacat

SEQ ID NO: 674012 - DNA, 33 bp, Homo sapien
tgactcaatttgttcatacctttccagaaacat

SEQ ID NO: 674013 - DNA, 33 bp, Homo sapien
agaaaaagaatttagaaaactgctacaagaaaa

SEQ ID NO: 674014 - DNA, 33 bp, Homo sapien
agaaaaagaatttagagaactgctacaagaaaa

SEQ ID NO: 674015 - DNA, 33 bp, Homo sapien
aagcttagacattaagaagccagtacagaagct

SEQ ID NO: 674016 - DNA, 33 bp, Homo sapien
aagcttagacattaaggagccagtacagaagct

SEQ ID NO: 674017 - DNA, 33 bp, Homo sapien
gcctcctttagattgaacctgttattgccatgc

SEQ ID NO: 674018 - DNA, 33 bp, Homo sapien
gcctcctttagattgagcctgttattgccatgc

SEQ ID NO: 674019 - DNA, 33 bp, Homo sapien
agtttacttgggcctcagaacctggcctttaat

SEQ ID NO: 674020 - DNA, 33 bp, Homo sapien
agtttacttgggcctcggaacctggcctttaat

SEQ ID NO: 674021 - DNA, 33 bp, Homo sapien
acattcaacacacagaaagtaagagatcgcaga

SEQ ID NO: 674022 - DNA, 33 bp, Homo sapien
acattcaacacacagagagtaagagatcgcaga

SEQ ID NO: 674023 - DNA, 33 bp, Homo sapien
gttgcgcagtaaagcacggttagtcccatcact

SEQ ID NO: 674024 - DNA, 33 bp, Homo sapien
gttgcgcagtaaagcatggttagtcccatcact

SEQ ID NO: 674025 - DNA, 33 bp, Homo sapien
tgatactaggtagatacagagaatgcacagaca

SEQ ID NO: 674026 - DNA, 33 bp, Homo sapien
tgatactaggtagatatagagaatgcacagaca

SEQ ID NO: 674027 - DNA, 33 bp, Homo sapien
ttctggggggaaaatacatatgtctgtgcattc

SEQ ID NO: 674028 - DNA, 33 bp, Homo sapien
ttctggggggaaaatatatatgtctgtgcattc

SEQ ID NO: 674029 - DNA, 33 bp, Homo sapien
tgtacagtatttataaagcctacagtaatgcat

SEQ ID NO: 674030 - DNA, 33 bp, Homo sapien
tgtacagtatttataaggcctacagtaatgcat

SEQ ID NO: 674031 - DNA, 33 bp, Homo sapien
ttaacgtttctggtaacgtacagcgacatctag

SEQ ID NO: 674032 - DNA, 33 bp, Homo sapien
ttaacgtttctggtaatgtacagcgacatctag

SEQ ID NO: 674033 - DNA, 33 bp, Homo sapien
tagtgaacactgtaccaaacaggtcatttttca

SEQ ID NO: 674034 - DNA, 33 bp, Homo sapien
tagtgaacactgtaccgaacaggtcatttttca

SEQ ID NO: 674035 - DNA, 33 bp, Homo sapien
acatgctaaactttccacacttcctttgcattt

SEQ ID NO: 674036 - DNA, 33 bp, Homo sapien
acatgctaaactttccgcacttcctttgcattt

SEQ ID NO: 674037 - DNA, 33 bp, Homo sapien
agcttcccgttttctcacttttcctattgtctt

SEQ ID NO: 674038 - DNA, 33 bp, Homo sapien
agcttcccgttttctcgcttttcctattgtctt

SEQ ID NO: 674039 - DNA, 33 bp, Homo sapien
atagtatcacgcagggaccaagagaagcgggtg

SEQ ID NO: 674040 - DNA, 33 bp, Homo sapien
atagtatcacgcaggggccaagagaagcgggtg

SEQ ID NO: 674041 - DNA, 33 bp, Homo sapien
gatcttctcaagctgacgcacttgtttcttttt

SEQ ID NO: 674042 - DNA, 33 bp, Homo sapien
gatcttctcaagctgatgcacttgtttcttttt

SEQ ID NO: 674043 - DNA, 33 bp, Homo sapien
taatcttctaactccaacccagtaatgatctca

SEQ ID NO: 674044 - DNA, 33 bp, Homo sapien
taatcttctaactccatcccagtaatgatctca

SEQ ID NO: 674045 - DNA, 33 bp, Homo sapien
tcccacaattaatctacatcagtgcttcttctt

SEQ ID NO: 674046 - DNA, 33 bp, Homo sapien
tcccacaattaatctatatcagtgcttcttctt

SEQ ID NO: 674047 - DNA, 33 bp, Homo sapien
aactacaaaagcaattgaagctgtttgagagat

SEQ ID NO: 674048 - DNA, 33 bp, Homo sapien
aactacaaaagcaatttaagctgtttgagagat

SEQ ID NO: 674049 - DNA, 33 bp, Homo sapien
cccgactggaccacctcaaaaagcgacagcctc

SEQ ID NO: 674050 - DNA, 33 bp, Homo sapien
cccgactggaccaccttaaaaagcgacagcctc

SEQ ID NO: 674051 - DNA, 33 bp, Homo sapien
aggccaactaatcttaaaggataaatttatcac

SEQ ID NO: 674052 - DNA, 33 bp, Homo sapien
aggccaactaatcttacaggataaatttatcac

SEQ ID NO: 674053 - DNA, 33 bp, Homo sapien
ctgtcatctaatcaatcatcagaaagtcttcaa

SEQ ID NO: 674054 - DNA, 33 bp, Homo sapien
ctgtcatctaatcaatgatcagaaagtcttcaa

SEQ ID NO: 674055 - DNA, 33 bp, Homo sapien
tttcctgattcaataagaggaattgtgccacaa

SEQ ID NO: 674056 - DNA, 33 bp, Homo sapien
tttcctgattcaataataggaattgtgccacaa

SEQ ID NO: 674057 - DNA, 33 bp, Homo sapien
attttgaaatttcagagaagcattgtggtctct

SEQ ID NO: 674058 - DNA, 33 bp, Homo sapien
attttgaaatttcagataagcattgtggtctct

SEQ ID NO: 674059 - DNA, 33 bp, Homo sapien
gcctcttgtatttctcacctgattagtagaatc

SEQ ID NO: 674060 - DNA, 33 bp, Homo sapien
gcctcttgtatttctctcctgattagtagaatc

SEQ ID NO: 674061 - DNA, 33 bp, Homo sapien
aatttaagcaacgataacctttcccgaagtttg

SEQ ID NO: 674062 - DNA, 33 bp, Homo sapien
aatttaagcaacgataccctttcccgaagtttg

SEQ ID NO: 674063 - DNA, 33 bp, Homo sapien
attacctagatagttcacaagaaccaaccaaaa

SEQ ID NO: 674064 - DNA, 33 bp, Homo sapien
attacctagatagttcgcaagaaccaaccaaaa

SEQ ID NO: 674065 - DNA, 33 bp, Homo sapien
aattcccagatggttcacagaaaattagaagtt

SEQ ID NO: 674066 - DNA, 33 bp, Homo sapien
aattcccagatggttcgcagaaaattagaagtt

SEQ ID NO: 674067 - DNA, 33 bp, Homo sapien
aacaattctaatcctccatattgccagagaaat

SEQ ID NO: 674068 - DNA, 33 bp, Homo sapien
aacaattctaatcctcgatattgccagagaaat

SEQ ID NO: 674069 - DNA, 33 bp, Homo sapien
atcagcatataagtgcaacatactgcatcacca

SEQ ID NO: 674070 - DNA, 33 bp, Homo sapien
atcagcatataagtgccacatactgcatcacca

SEQ ID NO: 674071 - DNA, 33 bp, Homo sapien
ggactatgggagaaaccagtactgcaatatgtt

SEQ ID NO: 674072 - DNA, 33 bp, Homo sapien
ggactatgggagaaactagtactgcaatatgtt

SEQ ID NO: 674073 - DNA, 33 bp, Homo sapien
agagaaatgcaaactacgtttagagaatgctat

SEQ ID NO: 674074 - DNA, 33 bp, Homo sapien
agagaaatgcaaactaggtttagagaatgctat

SEQ ID NO: 674075 - DNA, 33 bp, Homo sapien
atgtcatttctggtgaatacttcatatattaga

SEQ ID NO: 674076 - DNA, 33 bp, Homo sapien
atgtcatttctggtgactacttcatatattaga

SEQ ID NO: 674077 - DNA, 33 bp, Homo sapien
agctgggatttgaatccagatcttttgattttt

SEQ ID NO: 674078 - DNA, 33 bp, Homo sapien
agctgggatttgaatctagatcttttgattttt

SEQ ID NO: 674079 - DNA, 33 bp, Homo sapien
atgaaaatatatggtacaagaacctattgctct

SEQ ID NO: 674080 - DNA, 33 bp, Homo sapien
atgaaaatatatggtagaagaacctattgctct

SEQ ID NO: 674081 - DNA, 33 bp, Homo sapien
ctacaaggctacaatcacgtttgcattgagtct

SEQ ID NO: 674082 - DNA, 33 bp, Homo sapien
ctacaaggctacaatcgcgtttgcattgagtct

SEQ ID NO: 674083 - DNA, 33 bp, Homo sapien
tgctaagctgcatcaacttgaggaggatttaaa

SEQ ID NO: 674084 - DNA, 33 bp, Homo sapien
tgctaagctgcatcaatttgaggaggatttaaa

SEQ ID NO: 674085 - DNA, 33 bp, Homo sapien
tacacactatgggaggcagaactagccttgttc

SEQ ID NO: 674086 - DNA, 33 bp, Homo sapien
tacacactatgggaggtagaactagccttgttc

SEQ ID NO: 674087 - DNA, 33 bp, Homo sapien
ctgtcaaataactcaacgcatcgtattattata

SEQ ID NO: 674088 - DNA, 33 bp, Homo sapien
ctgtcaaataactcaaggcatcgtattattata

SEQ ID NO: 674089 - DNA, 33 bp, Homo sapien
gcaagttgtttttgcactcacatattaggtctt

SEQ ID NO: 674090 - DNA, 33 bp, Homo sapien
gcaagttgtttttgcattcacatattaggtctt

SEQ ID NO: 674091 - DNA, 33 bp, Homo sapien
gagcccagaggcattgaatccaagatacttgca

SEQ ID NO: 674092 - DNA, 33 bp, Homo sapien
gagcccagaggcattggatccaagatacttgca

SEQ ID NO: 674093 - DNA, 33 bp, Homo sapien
ggtcacaagaatggaaatctcgtgaatggcatt

SEQ ID NO: 674094 - DNA, 33 bp, Homo sapien
ggtcacaagaatggaactctcgtgaatggcatt

SEQ ID NO: 674095 - DNA, 33 bp, Homo sapien
aactgagcaagataaaggtcatagaatacttta

SEQ ID NO: 674096 - DNA, 33 bp, Homo sapien
aactgagcaagataaatgtcatagaatacttta

SEQ ID NO: 674097 - DNA, 33 bp, Homo sapien
gttgataatcatgaaactacgattttgttaaga

SEQ ID NO: 674098 - DNA, 33 bp, Homo sapien
gttgataatcatgaaattacgattttgttaaga

SEQ ID NO: 674099 - DNA, 33 bp, Homo sapien
tctccatgttagcttacgtttcgcttgcattca

SEQ ID NO: 674100 - DNA, 33 bp, Homo sapien
tctccatgttagcttatgtttcgcttgcattca

SEQ ID NO: 674101 - DNA, 33 bp, Homo sapien
gaggtgctgattagaaatggaatactatgcagc

SEQ ID NO: 674102 - DNA, 33 bp, Homo sapien
gaggtgctgattagaagtggaatactatgcagc

SEQ ID NO: 674103 - DNA, 33 bp, Homo sapien
ttcagcaagatattcacagaccatcagaaagct

SEQ ID NO: 674104 - DNA, 33 bp, Homo sapien
ttcagcaagatattcagagaccatcagaaagct

SEQ ID NO: 674105 - DNA, 33 bp, Homo sapien
ttgcatcttatatgaacgttacagcaggccaac

SEQ ID NO: 674106 - DNA, 33 bp, Homo sapien
ttgcatcttatatgaatgttacagcaggccaac

SEQ ID NO: 674107 - DNA, 33 bp, Homo sapien
gtcatccaatgtcatacctttgcacatagggca

SEQ ID NO: 674108 - DNA, 33 bp, Homo sapien
gtcatccaatgtcatatctttgcacatagggca

SEQ ID NO: 674109 - DNA, 33 bp, Homo sapien
tcctgcattttgccataaaaagaacttgcatca

SEQ ID NO: 674110 - DNA, 33 bp, Homo sapien
tcctgcattttgccatgaaaagaacttgcatca

SEQ ID NO: 674111 - DNA, 33 bp, Homo sapien
aggggatacttaatggacaaggaaaagaaaatg

SEQ ID NO: 674112 - DNA, 33 bp, Homo sapien
aggggatacttaatggccaaggaaaagaaaatg

SEQ ID NO: 674113 - DNA, 33 bp, Homo sapien
agtgtcctcaaaacataataattgacaaggagg

SEQ ID NO: 674114 - DNA, 33 bp, Homo sapien
agtgtcctcaaaacatgataattgacaaggagg

SEQ ID NO: 674115 - DNA, 33 bp, Homo sapien
taatgttgctctatgggaatgtaggttcaactt

SEQ ID NO: 674116 - DNA, 33 bp, Homo sapien
taatgttgctctatggtaatgtaggttcaactt

SEQ ID NO: 674117 - DNA, 33 bp, Homo sapien
cactattaagaattacaccaggaaaacaggtac

SEQ ID NO: 674118 - DNA, 33 bp, Homo sapien
cactattaagaattacgccaggaaaacaggtac

SEQ ID NO: 674119 - DNA, 33 bp, Homo sapien
aaagtgagccacagagacatttcagtggagtaa

SEQ ID NO: 674120 - DNA, 33 bp, Homo sapien
aaagtgagccacagaggcatttcagtggagtaa

SEQ ID NO: 674121 - DNA, 33 bp, Homo sapien
agaaagtagaggaagacggaactttctaaaatc

SEQ ID NO: 674122 - DNA, 33 bp, Homo sapien
agaaagtagaggaagagggaactttctaaaatc

SEQ ID NO: 674123 - DNA, 33 bp, Homo sapien
caaatgtaaacaatggaacaagtgcagaagtgc

SEQ ID NO: 674124 - DNA, 33 bp, Homo sapien
caaatgtaaacaatggcacaagtgcagaagtgc

SEQ ID NO: 674125 - DNA, 33 bp, Homo sapien
cctgtcttaacaaaaaatacaactaagcttcac

SEQ ID NO: 674126 - DNA, 33 bp, Homo sapien
cctgtcttaacaaaaagtacaactaagcttcac

SEQ ID NO: 674127 - DNA, 33 bp, Homo sapien
aatatgattacatgacacaattataggaatgga

SEQ ID NO: 674128 - DNA, 33 bp, Homo sapien
aatatgattacatgacgcaattataggaatgga

SEQ ID NO: 674129 - DNA, 33 bp, Homo sapien
tgagttgggcatgcaacggatataggtaacaat

SEQ ID NO: 674130 - DNA, 33 bp, Homo sapien
tgagttgggcatgcaatggatataggtaacaat

SEQ ID NO: 674131 - DNA, 33 bp, Homo sapien
atcacttgtaactttccacatggtacctcatag

SEQ ID NO: 674132 - DNA, 33 bp, Homo sapien
atcacttgtaactttctacatggtacctcatag

SEQ ID NO: 674133 - DNA, 33 bp, Homo sapien
ttggtcagatcaaggtaaaaaacagtggaatga

SEQ ID NO: 674134 - DNA, 33 bp, Homo sapien
ttggtcagatcaaggtgaaaaacagtggaatga

SEQ ID NO: 674135 - DNA, 33 bp, Homo sapien
tttctgatgagataagactgactaacttttcag

SEQ ID NO: 674136 - DNA, 33 bp, Homo sapien
tttctgatgagataagtctgactaacttttcag

SEQ ID NO: 674137 - DNA, 33 bp, Homo sapien
acccctgtcttagaggaacaaatgtgaattcca

SEQ ID NO: 674138 - DNA, 33 bp, Homo sapien
acccctgtcttagagggacaaatgtgaattcca

SEQ ID NO: 674139 - DNA, 33 bp, Homo sapien
tctatatatcactagactagcattgaggaaata

SEQ ID NO: 674140 - DNA, 33 bp, Homo sapien
tctatatatcactagagtagcattgaggaaata

SEQ ID NO: 674141 - DNA, 33 bp, Homo sapien
ctggatatgtatccaaaagaaaatgaatcattc

SEQ ID NO: 674142 - DNA, 33 bp, Homo sapien
ctggatatgtatccaagagaaaatgaatcattc

SEQ ID NO: 674143 - DNA, 33 bp, Homo sapien
taggttaacatggagacgtcacttccaatctcc

SEQ ID NO: 674144 - DNA, 33 bp, Homo sapien
taggttaacatggagatgtcacttccaatctcc

SEQ ID NO: 674145 - DNA, 33 bp, Homo sapien
tcatgttgaaacgccacaatgctgggtgaagac

SEQ ID NO: 674146 - DNA, 33 bp, Homo sapien
tcatgttgaaacgccagaatgctgggtgaagac

SEQ ID NO: 674147 - DNA, 33 bp, Homo sapien
tatgtaattctggtaaatctttgtagagtagta

SEQ ID NO: 674148 - DNA, 33 bp, Homo sapien
tatgtaattctggtaattctttgtagagtagta

SEQ ID NO: 674149 - DNA, 33 bp, Homo sapien
taaaggaaagaataaaatggataagctggtgag

SEQ ID NO: 674150 - DNA, 33 bp, Homo sapien
taaaggaaagaataaagtggataagctggtgag

SEQ ID NO: 674151 - DNA, 33 bp, Homo sapien
gagggatccacttccaatacccaaacacctccc

SEQ ID NO: 674152 - DNA, 33 bp, Homo sapien
gagggatccacttccagtacccaaacacctccc

SEQ ID NO: 674153 - DNA, 33 bp, Homo sapien
attataaaatgtagggaccaaacttcaaagtgt

SEQ ID NO: 674154 - DNA, 33 bp, Homo sapien
attataaaatgtaggggccaaacttcaaagtgt

SEQ ID NO: 674155 - DNA, 33 bp, Homo sapien
gaaatacaaaattctacatcttgccagacctgc

SEQ ID NO: 674156 - DNA, 33 bp, Homo sapien
gaaatacaaaattctagatcttgccagacctgc

SEQ ID NO: 674157 - DNA, 33 bp, Homo sapien
ctgtataaaggtgaaccagttatgtgggtaaaa

SEQ ID NO: 674158 - DNA, 33 bp, Homo sapien
ctgtataaaggtgaacgagttatgtgggtaaaa

SEQ ID NO: 674159 - DNA, 33 bp, Homo sapien
atgcttacgtcaccagaaaagtagcattaccaa

SEQ ID NO: 674160 - DNA, 33 bp, Homo sapien
atgcttacgtcaccaggaaagtagcattaccaa

SEQ ID NO: 674161 - DNA, 33 bp, Homo sapien
atatcagtatcctctggagtaagctaatcatga

SEQ ID NO: 674162 - DNA, 33 bp, Homo sapien
atatcagtatcctctgtagtaagctaatcatga

SEQ ID NO: 674163 - DNA, 33 bp, Homo sapien
tgataatttccaagccactaacatcaactgcat

SEQ ID NO: 674164 - DNA, 33 bp, Homo sapien
tgataatttccaagccgctaacatcaactgcat

SEQ ID NO: 674165 - DNA, 33 bp, Homo sapien
tcaaggtaaggtgtaaagattgattgagatgag

SEQ ID NO: 674166 - DNA, 33 bp, Homo sapien
tcaaggtaaggtgtaaggattgattgagatgag

SEQ ID NO: 674167 - DNA, 33 bp, Homo sapien
aaatatagttctacaaatatacacataacatat

SEQ ID NO: 674168 - DNA, 33 bp, Homo sapien
aaatatagttctacaagtatacacataacatat

SEQ ID NO: 674169 - DNA, 33 bp, Homo sapien
ggcacatgaaaaatagaaaagaagcatattgac

SEQ ID NO: 674170 - DNA, 33 bp, Homo sapien
ggcacatgaaaaataggaaagaagcatattgac

SEQ ID NO: 674171 - DNA, 33 bp, Homo sapien
ctagaagcattagaacacatctgatctgaattt

SEQ ID NO: 674172 - DNA, 33 bp, Homo sapien
ctagaagcattagaactcatctgatctgaattt

SEQ ID NO: 674173 - DNA, 33 bp, Homo sapien
gaggatcttgcttttaagatggacaccaccaag

SEQ ID NO: 674174 - DNA, 33 bp, Homo sapien
gaggatcttgcttttaggatggacaccaccaag

SEQ ID NO: 674175 - DNA, 33 bp, Homo sapien
attcctggactaataaatccaaaatctctgcta

SEQ ID NO: 674176 - DNA, 33 bp, Homo sapien
attcctggactaataattccaaaatctctgcta

SEQ ID NO: 674177 - DNA, 33 bp, Homo sapien
atgtgtttgtactataaggatgtaagacgtcta

SEQ ID NO: 674178 - DNA, 33 bp, Homo sapien
atgtgtttgtactatagggatgtaagacgtcta

SEQ ID NO: 674179 - DNA, 33 bp, Homo sapien
ctttctctactttgtgcactaacctccttctta

SEQ ID NO: 674180 - DNA, 33 bp, Homo sapien
ctttctctactttgtgtactaacctccttctta

SEQ ID NO: 674181 - DNA, 33 bp, Homo sapien
gactcatgccttagctcaatttctgcagtcaac

SEQ ID NO: 674182 - DNA, 33 bp, Homo sapien
gactcatgccttagcttaatttctgcagtcaac

SEQ ID NO: 674183 - DNA, 33 bp, Homo sapien
aggtgaaaaacaggaaacggtgtaaagagaagg

SEQ ID NO: 674184 - DNA, 33 bp, Homo sapien
aggtgaaaaacaggaagcggtgtaaagagaagg

SEQ ID NO: 674185 - DNA, 33 bp, Homo sapien
gaaatctgtgggcaaacgttctacttattacaa

SEQ ID NO: 674186 - DNA, 33 bp, Homo sapien
gaaatctgtgggcaaatgttctacttattacaa

SEQ ID NO: 674187 - DNA, 33 bp, Homo sapien
agactcagaagtttaaaacatattctagcacat

SEQ ID NO: 674188 - DNA, 33 bp, Homo sapien
agactcagaagtttaagacatattctagcacat

SEQ ID NO: 674189 - DNA, 33 bp, Homo sapien
acaagaaccttacaaacactatggagatttctc

SEQ ID NO: 674190 - DNA, 33 bp, Homo sapien
acaagaaccttacaaatactatggagatttctc

SEQ ID NO: 674191 - DNA, 33 bp, Homo sapien
aggagctcgggaaagaaacttcacaaatttgtt

SEQ ID NO: 674192 - DNA, 33 bp, Homo sapien
aggagctcgggaaagatacttcacaaatttgtt

SEQ ID NO: 674193 - DNA, 33 bp, Homo sapien
taatgtgctgggggtaagtggtgatattccctc

SEQ ID NO: 674194 - DNA, 33 bp, Homo sapien
taatgtgctgggggtaggtggtgatattccctc

SEQ ID NO: 674195 - DNA, 33 bp, Homo sapien
tcttttattcttttcaacatataaccctggagt

SEQ ID NO: 674196 - DNA, 33 bp, Homo sapien
tcttttattcttttcagcatataaccctggagt

SEQ ID NO: 674197 - DNA, 33 bp, Homo sapien
ttatcatggtttcccaactcgaactgccttgtc

SEQ ID NO: 674198 - DNA, 33 bp, Homo sapien
ttatcatggtttcccagctcgaactgccttgtc

SEQ ID NO: 674199 - DNA, 33 bp, Homo sapien
ttgttataggcaaaaaagtaaggcagtagagca

SEQ ID NO: 674200 - DNA, 33 bp, Homo sapien
ttgttataggcaaaaatgtaaggcagtagagca

SEQ ID NO: 674201 - DNA, 33 bp, Homo sapien
gagttgaaaagtggcaagtgctttatcatgaag

SEQ ID NO: 674202 - DNA, 33 bp, Homo sapien
gagttgaaaagtggcaggtgctttatcatgaag

SEQ ID NO: 674203 - DNA, 33 bp, Homo sapien
catattaatgaggggaacattattgtttaaatt

SEQ ID NO: 674204 - DNA, 33 bp, Homo sapien
catattaatgaggggagcattattgtttaaatt

SEQ ID NO: 674205 - DNA, 33 bp, Homo sapien
attgtcttttgttaagccagacactaccatttt

SEQ ID NO: 674206 - DNA, 33 bp, Homo sapien
attgtcttttgttaagtcagacactaccatttt

SEQ ID NO: 674207 - DNA, 33 bp, Homo sapien
cctacatgatgtgtgacattgcaacaaattgaa

SEQ ID NO: 674208 - DNA, 33 bp, Homo sapien
cctacatgatgtgtgatattgcaacaaattgaa

SEQ ID NO: 674209 - DNA, 33 bp, Homo sapien
agtgtgtggttcagaacatacgtaaagctaaaa

SEQ ID NO: 674210 - DNA, 33 bp, Homo sapien
agtgtgtggttcagaagatacgtaaagctaaaa

SEQ ID NO: 674211 - DNA, 33 bp, Homo sapien
ttgtagagggtgataaacgttagggacttactg

SEQ ID NO: 674212 - DNA, 33 bp, Homo sapien
ttgtagagggtgataaccgttagggacttactg

SEQ ID NO: 674213 - DNA, 33 bp, Homo sapien
cacttcatctgtaataactttgttgcaagcatc

SEQ ID NO: 674214 - DNA, 33 bp, Homo sapien
cacttcatctgtaatacctttgttgcaagcatc

SEQ ID NO: 674215 - DNA, 33 bp, Homo sapien
aagtctgtctgtagcaacatggggagtgaaata

SEQ ID NO: 674216 - DNA, 33 bp, Homo sapien
aagtctgtctgtagcagcatggggagtgaaata

SEQ ID NO: 674217 - DNA, 33 bp, Homo sapien
gagattacatcgttaacctaacttgatatagga

SEQ ID NO: 674218 - DNA, 33 bp, Homo sapien
gagattacatcgttaagctaacttgatatagga

SEQ ID NO: 674219 - DNA, 33 bp, Homo sapien
tttttctctgcagacgacatcccttctcttcca

SEQ ID NO: 674220 - DNA, 33 bp, Homo sapien
tttttctctgcagacggcatcccttctcttcca

SEQ ID NO: 674221 - DNA, 33 bp, Homo sapien
agccttctaaatgcaaatatcagcaaccaacac

SEQ ID NO: 674222 - DNA, 33 bp, Homo sapien
agccttctaaatgcaactatcagcaaccaacac

SEQ ID NO: 674223 - DNA, 33 bp, Homo sapien
tcacatcctaatacaacgtaagtatgaagatgc

SEQ ID NO: 674224 - DNA, 33 bp, Homo sapien
tcacatcctaatacaatgtaagtatgaagatgc

SEQ ID NO: 674225 - DNA, 33 bp, Homo sapien
aatgtattttgagagacatataaagaaacccaa

SEQ ID NO: 674226 - DNA, 33 bp, Homo sapien
aatgtattttgagagagatataaagaaacccaa

SEQ ID NO: 674227 - DNA, 33 bp, Homo sapien
tggactaatacagaaaaaatacttgcagtttat

SEQ ID NO: 674228 - DNA, 33 bp, Homo sapien
tggactaatacagaaacaatacttgcagtttat

SEQ ID NO: 674229 - DNA, 33 bp, Homo sapien
acaccaagaacataaaaggacagtctcttcaat

SEQ ID NO: 674230 - DNA, 33 bp, Homo sapien
acaccaagaacataaacggacagtctcttcaat

SEQ ID NO: 674231 - DNA, 33 bp, Homo sapien
gtagttataaacaaacagaagactgctccacct

SEQ ID NO: 674232 - DNA, 33 bp, Homo sapien
gtagttataaacaaacggaagactgctccacct

SEQ ID NO: 674233 - DNA, 33 bp, Homo sapien
actggagcaaaaatgacgagcaaattaataccg

SEQ ID NO: 674234 - DNA, 33 bp, Homo sapien
actggagcaaaaatgatgagcaaattaataccg

SEQ ID NO: 674235 - DNA, 33 bp, Homo sapien
tataatcttagtattgcattccagtgatattgc

SEQ ID NO: 674236 - DNA, 33 bp, Homo sapien
tataatcttagtattgtattccagtgatattgc

SEQ ID NO: 674237 - DNA, 33 bp, Homo sapien
tatttcctggcctcaacggctggatggtcacaa

SEQ ID NO: 674238 - DNA, 33 bp, Homo sapien
tatttcctggcctcaatggctggatggtcacaa

SEQ ID NO: 674239 - DNA, 33 bp, Homo sapien
aacctagcctctttgaatatcaccccctacact

SEQ ID NO: 674240 - DNA, 33 bp, Homo sapien
aacctagcctctttgagtatcaccccctacact

SEQ ID NO: 674241 - DNA, 33 bp, Homo sapien
tattagccaatgataccctagtggcgtctgcta

SEQ ID NO: 674242 - DNA, 33 bp, Homo sapien
tattagccaatgatactctagtggcgtctgcta

SEQ ID NO: 674243 - DNA, 33 bp, Homo sapien
cccattctccagccacagagagcctgaaagagc

SEQ ID NO: 674244 - DNA, 33 bp, Homo sapien
cccattctccagccaccgagagcctgaaagagc

SEQ ID NO: 674245 - DNA, 33 bp, Homo sapien
tgttcaaatagagtgaagttgagtaagttaata

SEQ ID NO: 674246 - DNA, 33 bp, Homo sapien
tgttcaaatagagtgaggttgagtaagttaata

SEQ ID NO: 674247 - DNA, 33 bp, Homo sapien
aacttgacagtaccaaacaaattcaagaaaagg

SEQ ID NO: 674248 - DNA, 33 bp, Homo sapien
aacttgacagtaccaaccaaattcaagaaaagg

SEQ ID NO: 674249 - DNA, 33 bp, Homo sapien
gaagctaagaaaacacagactgaattttgaaga

SEQ ID NO: 674250 - DNA, 33 bp, Homo sapien
gaagctaagaaaacacggactgaattttgaaga

SEQ ID NO: 674251 - DNA, 33 bp, Homo sapien
aactcacaagtcaccaagtatcttctcattaac

SEQ ID NO: 674252 - DNA, 33 bp, Homo sapien
aactcacaagtcaccacgtatcttctcattaac

SEQ ID NO: 674253 - DNA, 33 bp, Homo sapien
ctagtgcttgaatctgcaagttttattaggaaa

SEQ ID NO: 674254 - DNA, 33 bp, Homo sapien
ctagtgcttgaatctgtaagttttattaggaaa

SEQ ID NO: 674255 - DNA, 33 bp, Homo sapien
actattttgtcaaatacgtgcactagaatcatt

SEQ ID NO: 674256 - DNA, 33 bp, Homo sapien
actattttgtcaaatatgtgcactagaatcatt

SEQ ID NO: 674257 - DNA, 33 bp, Homo sapien
aaaacaatgataaagacggcaatgtctgctgat

SEQ ID NO: 674258 - DNA, 33 bp, Homo sapien
aaaacaatgataaagatggcaatgtctgctgat

SEQ ID NO: 674259 - DNA, 33 bp, Homo sapien
aagttgaatctgagaacatatgtccagaccaca

SEQ ID NO: 674260 - DNA, 33 bp, Homo sapien
aagttgaatctgagaatatatgtccagaccaca

SEQ ID NO: 674261 - DNA, 33 bp, Homo sapien
aagcagttacaggctaaagattccttagtgcag

SEQ ID NO: 674262 - DNA, 33 bp, Homo sapien
aagcagttacaggctacagattccttagtgcag

SEQ ID NO: 674263 - DNA, 33 bp, Homo sapien
agtattaaaaagttcaactgagacctggcctag

SEQ ID NO: 674264 - DNA, 33 bp, Homo sapien
agtattaaaaagttcatctgagacctggcctag

SEQ ID NO: 674265 - DNA, 33 bp, Homo sapien
ccagttctattcctgacctacccaattatgaga

SEQ ID NO: 674266 - DNA, 33 bp, Homo sapien
ccagttctattcctgatctacccaattatgaga

SEQ ID NO: 674267 - DNA, 33 bp, Homo sapien
ttgactctgatccttcgcactttaacaacttct

SEQ ID NO: 674268 - DNA, 33 bp, Homo sapien
ttgactctgatccttctcactttaacaacttct

SEQ ID NO: 674269 - DNA, 33 bp, Homo sapien
acaatctataacaataacatcatactgctttga

SEQ ID NO: 674270 - DNA, 33 bp, Homo sapien
acaatctataacaatatcatcatactgctttga

SEQ ID NO: 674271 - DNA, 33 bp, Homo sapien
aacagtttataatacaatcagcagtacatgaga

SEQ ID NO: 674272 - DNA, 33 bp, Homo sapien
aacagtttataatacagtcagcagtacatgaga

SEQ ID NO: 674273 - DNA, 33 bp, Homo sapien
agttaaacatctacgaaaagatgtttgaatcta

SEQ ID NO: 674274 - DNA, 33 bp, Homo sapien
agttaaacatctacgacaagatgtttgaatcta

SEQ ID NO: 674275 - DNA, 33 bp, Homo sapien
taagaatttataatacaatcagcaatacgcttt

SEQ ID NO: 674276 - DNA, 33 bp, Homo sapien
taagaatttataatacgatcagcaatacgcttt

SEQ ID NO: 674277 - DNA, 33 bp, Homo sapien
gtatatggctaaagtcactaatatggtttggct

SEQ ID NO: 674278 - DNA, 33 bp, Homo sapien
gtatatggctaaagtcgctaatatggtttggct

SEQ ID NO: 674279 - DNA, 33 bp, Homo sapien
aatcctgaaattcaaacggaagagaaagtaaac

SEQ ID NO: 674280 - DNA, 33 bp, Homo sapien
aatcctgaaattcaaatggaagagaaagtaaac

SEQ ID NO: 674281 - DNA, 33 bp, Homo sapien
tgccattaatatcctacgctataacaccactca

SEQ ID NO: 674282 - DNA, 33 bp, Homo sapien
tgccattaatatcctatgctataacaccactca

SEQ ID NO: 674283 - DNA, 33 bp, Homo sapien
aggaggaattacagcactcaagtgagaataata

SEQ ID NO: 674284 - DNA, 33 bp, Homo sapien
aggaggaattacagcattcaagtgagaataata

SEQ ID NO: 674285 - DNA, 33 bp, Homo sapien
agtcagatactgcactaaacacttttcgtgcat

SEQ ID NO: 674286 - DNA, 33 bp, Homo sapien
agtcagatactgcactgaacacttttcgtgcat

SEQ ID NO: 674287 - DNA, 33 bp, Homo sapien
tcagtacaaaagtagaataggttggaagaaaac

SEQ ID NO: 674288 - DNA, 33 bp, Homo sapien
tcagtacaaaagtagagtaggttggaagaaaac

SEQ ID NO: 674289 - DNA, 33 bp, Homo sapien
ggatagaattctcagaaaagcggctcaatagct

SEQ ID NO: 674290 - DNA, 33 bp, Homo sapien
ggatagaattctcagacaagcggctcaatagct

SEQ ID NO: 674291 - DNA, 33 bp, Homo sapien
gggactgtggttcatacctcataaacacgcctg

SEQ ID NO: 674292 - DNA, 33 bp, Homo sapien
gggactgtggttcatatctcataaacacgcctg

SEQ ID NO: 674293 - DNA, 33 bp, Homo sapien
ataactattacctgaaaacaatcacaaagacaa

SEQ ID NO: 674294 - DNA, 33 bp, Homo sapien
ataactattacctgaagacaatcacaaagacaa

SEQ ID NO: 674295 - DNA, 33 bp, Homo sapien
gcaagtggagaatttaccctgtacattgttcca

SEQ ID NO: 674296 - DNA, 33 bp, Homo sapien
gcaagtggagaatttatcctgtacattgttcca

SEQ ID NO: 674297 - DNA, 33 bp, Homo sapien
tatccttttctttctcaactatgcacaaaagaa

SEQ ID NO: 674298 - DNA, 33 bp, Homo sapien
tatccttttctttctcgactatgcacaaaagaa

SEQ ID NO: 674299 - DNA, 33 bp, Homo sapien
ttatatagatggttcacggtacgggaaaaatat

SEQ ID NO: 674300 - DNA, 33 bp, Homo sapien
ttatatagatggttcatggtacgggaaaaatat

SEQ ID NO: 674301 - DNA, 33 bp, Homo sapien
ctgtaattaaaaccacaatgacttcttctgacc

SEQ ID NO: 674302 - DNA, 33 bp, Homo sapien
ctgtaattaaaaccaccatgacttcttctgacc

SEQ ID NO: 674303 - DNA, 33 bp, Homo sapien
tctggtttttagggtaaatgtgtaactacagaa

SEQ ID NO: 674304 - DNA, 33 bp, Homo sapien
tctggtttttagggtagatgtgtaactacagaa

SEQ ID NO: 674305 - DNA, 33 bp, Homo sapien
agcatttcaaatccaacagccctttctcctatt

SEQ ID NO: 674306 - DNA, 33 bp, Homo sapien
agcatttcaaatccaagagccctttctcctatt

SEQ ID NO: 674307 - DNA, 33 bp, Homo sapien
atgtcatctgaagcacactcattctctagtact

SEQ ID NO: 674308 - DNA, 33 bp, Homo sapien
atgtcatctgaagcacgctcattctctagtact

SEQ ID NO: 674309 - DNA, 33 bp, Homo sapien
tgtaggtagtaaatccactttggaaagccaata

SEQ ID NO: 674310 - DNA, 33 bp, Homo sapien
tgtaggtagtaaatccgctttggaaagccaata

SEQ ID NO: 674311 - DNA, 33 bp, Homo sapien
tacacatattagggaccgctaaaggaagtttaa

SEQ ID NO: 674312 - DNA, 33 bp, Homo sapien
tacacatattagggactgctaaaggaagtttaa

SEQ ID NO: 674313 - DNA, 33 bp, Homo sapien
gaagtggtggttgtcacatggaaaaaaactttt

SEQ ID NO: 674314 - DNA, 33 bp, Homo sapien
gaagtggtggttgtcatatggaaaaaaactttt

SEQ ID NO: 674315 - DNA, 33 bp, Homo sapien
ctacaagattgatgccaaaagtccctgttattt

SEQ ID NO: 674316 - DNA, 33 bp, Homo sapien
ctacaagattgatgccgaaagtccctgttattt

SEQ ID NO: 674317 - DNA, 33 bp, Homo sapien
aatgctatacaatatacagtggatccttgttat

SEQ ID NO: 674318 - DNA, 33 bp, Homo sapien
aatgctatacaatatagagtggatccttgttat

SEQ ID NO: 674319 - DNA, 33 bp, Homo sapien
gttaaatgttaccataggaaaatcatcgattga

SEQ ID NO: 674320 - DNA, 33 bp, Homo sapien
gttaaatgttaccatatgaaaatcatcgattga

SEQ ID NO: 674321 - DNA, 33 bp, Homo sapien
tttttctaggatatagacctgcagctaactgga

SEQ ID NO: 674322 - DNA, 33 bp, Homo sapien
tttttctaggatataggcctgcagctaactgga

SEQ ID NO: 674323 - DNA, 33 bp, Homo sapien
atttgctttagtaagaaagttggcaaagagatg

SEQ ID NO: 674324 - DNA, 33 bp, Homo sapien
atttgctttagtaagagagttggcaaagagatg

SEQ ID NO: 674325 - DNA, 33 bp, Homo sapien
gtcagttggaatacaaaatcatttaagcggcca

SEQ ID NO: 674326 - DNA, 33 bp, Homo sapien
gtcagttggaatacaacatcatttaagcggcca

SEQ ID NO: 674327 - DNA, 33 bp, Homo sapien
gatatacaatatcataccacagctaatttattt

SEQ ID NO: 674328 - DNA, 33 bp, Homo sapien
gatatacaatatcatatcacagctaatttattt

SEQ ID NO: 674329 - DNA, 33 bp, Homo sapien
aatgcatgaaaaataacgaccagaaatttatga

SEQ ID NO: 674330 - DNA, 33 bp, Homo sapien
aatgcatgaaaaataatgaccagaaatttatga

SEQ ID NO: 674331 - DNA, 33 bp, Homo sapien
aaagcttgcagcaggaagaactggtagttcagt

SEQ ID NO: 674332 - DNA, 33 bp, Homo sapien
aaagcttgcagcaggacgaactggtagttcagt

SEQ ID NO: 674333 - DNA, 33 bp, Homo sapien
tagccctgggatctcaatcctgggaaagcttgc

SEQ ID NO: 674334 - DNA, 33 bp, Homo sapien
tagccctgggatctcagtcctgggaaagcttgc

SEQ ID NO: 674335 - DNA, 33 bp, Homo sapien
ggcacagcatactccaaggtgataggcccatga

SEQ ID NO: 674336 - DNA, 33 bp, Homo sapien
ggcacagcatactccagggtgataggcccatga

SEQ ID NO: 674337 - DNA, 33 bp, Homo sapien
ctgagctgggccaaaagccatgtatccttccct

SEQ ID NO: 674338 - DNA, 33 bp, Homo sapien
ctgagctgggccaaaatccatgtatccttccct

SEQ ID NO: 674339 - DNA, 33 bp, Homo sapien
atatcatgttctccaccgtcaagtccttttgac

SEQ ID NO: 674340 - DNA, 33 bp, Homo sapien
atatcatgttctccactgtcaagtccttttgac

SEQ ID NO: 674341 - DNA, 33 bp, Homo sapien
gcactgggtgaagaagactcccaaattgtggta

SEQ ID NO: 674342 - DNA, 33 bp, Homo sapien
gcactgggtgaagaagcctcccaaattgtggta

SEQ ID NO: 674343 - DNA, 33 bp, Homo sapien
taacttctctgcgactcagtaatctcatctctg

SEQ ID NO: 674344 - DNA, 33 bp, Homo sapien
taacttctctgcgacttagtaatctcatctctg

SEQ ID NO: 674345 - DNA, 33 bp, Homo sapien
cattgccgggttttaagcctatgagtatgttct

SEQ ID NO: 674346 - DNA, 33 bp, Homo sapien
cattgccgggttttaatcctatgagtatgttct

SEQ ID NO: 674347 - DNA, 33 bp, Homo sapien
gtagtgatgcctttgacagactatagaatctta

SEQ ID NO: 674348 - DNA, 33 bp, Homo sapien
gtagtgatgcctttgatagactatagaatctta

SEQ ID NO: 674349 - DNA, 33 bp, Homo sapien
ttaggtaggtacagcaatcaaatcttggaaaca

SEQ ID NO: 674350 - DNA, 33 bp, Homo sapien
ttaggtaggtacagcagtcaaatcttggaaaca

SEQ ID NO: 674351 - DNA, 33 bp, Homo sapien
ggctatagcgactataaagtaaagaagttgaag

SEQ ID NO: 674352 - DNA, 33 bp, Homo sapien
ggctatagcgactatagagtaaagaagttgaag

SEQ ID NO: 674353 - DNA, 33 bp, Homo sapien
gaaggcattttagttaaaactcatgagatgctg

SEQ ID NO: 674354 - DNA, 33 bp, Homo sapien
gaaggcattttagttagaactcatgagatgctg

SEQ ID NO: 674355 - DNA, 33 bp, Homo sapien
gcatttgatagcctaaaaaatttcaaataaaat

SEQ ID NO: 674356 - DNA, 33 bp, Homo sapien
gcatttgatagcctaagaaatttcaaataaaat

SEQ ID NO: 674357 - DNA, 33 bp, Homo sapien
tctaaatagtctctcacgctggagtaaactcct

SEQ ID NO: 674358 - DNA, 33 bp, Homo sapien
tctaaatagtctctcatgctggagtaaactcct

SEQ ID NO: 674359 - DNA, 33 bp, Homo sapien
atttagtattaaaatgcagctggcatgtattta

SEQ ID NO: 674360 - DNA, 33 bp, Homo sapien
atttagtattaaaatgtagctggcatgtattta

SEQ ID NO: 674361 - DNA, 33 bp, Homo sapien
cagtagtacagtccaccagcataatctagagga

SEQ ID NO: 674362 - DNA, 33 bp, Homo sapien
cagtagtacagtccacgagcataatctagagga

SEQ ID NO: 674363 - DNA, 33 bp, Homo sapien
ttctttgcatttttgaaaacaggatttttattg

SEQ ID NO: 674364 - DNA, 33 bp, Homo sapien
ttctttgcatttttgagaacaggatttttattg

SEQ ID NO: 674365 - DNA, 33 bp, Homo sapien
ttattcctgcctagacacctccttatttatgat

SEQ ID NO: 674366 - DNA, 33 bp, Homo sapien
ttattcctgcctagacccctccttatttatgat

SEQ ID NO: 674367 - DNA, 33 bp, Homo sapien
tccaactataatgaccacatctagaaataagct

SEQ ID NO: 674368 - DNA, 33 bp, Homo sapien
tccaactataatgaccgcatctagaaataagct

SEQ ID NO: 674369 - DNA, 33 bp, Homo sapien
ttcaactacatttttccaaagtacagaggtaag

SEQ ID NO: 674370 - DNA, 33 bp, Homo sapien
ttcaactacatttttctaaagtacagaggtaag

SEQ ID NO: 674371 - DNA, 33 bp, Homo sapien
aaatctgaaagttactcacacctcaactatgtg

SEQ ID NO: 674372 - DNA, 33 bp, Homo sapien
aaatctgaaagttactgacacctcaactatgtg

SEQ ID NO: 674373 - DNA, 33 bp, Homo sapien
tgtaatccagcatttaaaggacttaaaaacaca

SEQ ID NO: 674374 - DNA, 33 bp, Homo sapien
tgtaatccagcatttataggacttaaaaacaca

SEQ ID NO: 674375 - DNA, 33 bp, Homo sapien
ttaaagcattattccaatgaaactaaatactct

SEQ ID NO: 674376 - DNA, 33 bp, Homo sapien
ttaaagcattattccagtgaaactaaatactct

SEQ ID NO: 674377 - DNA, 33 bp, Homo sapien
aacccttctcattttaccctgctcatttacctc

SEQ ID NO: 674378 - DNA, 33 bp, Homo sapien
aacccttctcattttatcctgctcatttacctc

SEQ ID NO: 674379 - DNA, 33 bp, Homo sapien
acaatcaagctggatcaacacctttagtttcca

SEQ ID NO: 674380 - DNA, 33 bp, Homo sapien
acaatcaagctggatctacacctttagtttcca

SEQ ID NO: 674381 - DNA, 33 bp, Homo sapien
caaacatatagttagagagaagaaggaagttct

SEQ ID NO: 674382 - DNA, 33 bp, Homo sapien
caaacatatagttagatagaagaaggaagttct

SEQ ID NO: 674383 - DNA, 33 bp, Homo sapien
acttctgtctccagcacagtgtcagtattttct

SEQ ID NO: 674384 - DNA, 33 bp, Homo sapien
acttctgtctccagcatagtgtcagtattttct

SEQ ID NO: 674385 - DNA, 33 bp, Homo sapien
tggtttggctcagaacagtatcttaagaggtgt

SEQ ID NO: 674386 - DNA, 33 bp, Homo sapien
tggtttggctcagaacggtatcttaagaggtgt

SEQ ID NO: 674387 - DNA, 33 bp, Homo sapien
tttccacttgaatgtcgaatagtgaagttcaca

SEQ ID NO: 674388 - DNA, 33 bp, Homo sapien
tttccacttgaatgtctaatagtgaagttcaca

SEQ ID NO: 674389 - DNA, 33 bp, Homo sapien
attatgaaacaggatgacatcacctacaattgt

SEQ ID NO: 674390 - DNA, 33 bp, Homo sapien
attatgaaacaggatggcatcacctacaattgt

SEQ ID NO: 674391 - DNA, 33 bp, Homo sapien
accttggtctagacaaagcatttttaaacatga

SEQ ID NO: 674392 - DNA, 33 bp, Homo sapien
accttggtctagacaacgcatttttaaacatga

SEQ ID NO: 674393 - DNA, 33 bp, Homo sapien
tcttaacattcaactgcaagaggcaaaaacatt

SEQ ID NO: 674394 - DNA, 33 bp, Homo sapien
tcttaacattcaactggaagaggcaaaaacatt

SEQ ID NO: 674395 - DNA, 33 bp, Homo sapien
ttttcatattagttgacgttttagggatgtgtt

SEQ ID NO: 674396 - DNA, 33 bp, Homo sapien
ttttcatattagttgatgttttagggatgtgtt

SEQ ID NO: 674397 - DNA, 33 bp, Homo sapien
atttgcattttctgtacgcttgatgccatcatt

SEQ ID NO: 674398 - DNA, 33 bp, Homo sapien
atttgcattttctgtatgcttgatgccatcatt

SEQ ID NO: 674399 - DNA, 33 bp, Homo sapien
ggcctgctagatttccaaagtcattttttatga

SEQ ID NO: 674400 - DNA, 33 bp, Homo sapien
ggcctgctagatttccgaagtcattttttatga

SEQ ID NO: 674401 - DNA, 33 bp, Homo sapien
gcatcaatttcaataactgttgtggaattctcc

SEQ ID NO: 674402 - DNA, 33 bp, Homo sapien
gcatcaatttcaataagtgttgtggaattctcc

SEQ ID NO: 674403 - DNA, 33 bp, Homo sapien
gaatttgacaaattaccaagaatgacctccaag

SEQ ID NO: 674404 - DNA, 33 bp, Homo sapien
gaatttgacaaattactaagaatgacctccaag

SEQ ID NO: 674405 - DNA, 33 bp, Homo sapien
actaggttgtcaacaccacaacaagttgacact

SEQ ID NO: 674406 - DNA, 33 bp, Homo sapien
actaggttgtcaacactacaacaagttgacact

SEQ ID NO: 674407 - DNA, 33 bp, Homo sapien
aaaaagtcaactgaacacacatatcaaacctgt

SEQ ID NO: 674408 - DNA, 33 bp, Homo sapien
aaaaagtcaactgaacgcacatatcaaacctgt

SEQ ID NO: 674409 - DNA, 33 bp, Homo sapien
gtcctcatgtcttatcaccttgcttataatgcc

SEQ ID NO: 674410 - DNA, 33 bp, Homo sapien
gtcctcatgtcttatcgccttgcttataatgcc

SEQ ID NO: 674411 - DNA, 33 bp, Homo sapien
tctctgctctagtacactgagaagagctcattt

SEQ ID NO: 674412 - DNA, 33 bp, Homo sapien
tctctgctctagtacattgagaagagctcattt

SEQ ID NO: 674413 - DNA, 33 bp, Homo sapien
tagatgagatgtccacaaaacattttttaaaat

SEQ ID NO: 674414 - DNA, 33 bp, Homo sapien
tagatgagatgtccacgaaacattttttaaaat

SEQ ID NO: 674415 - DNA, 33 bp, Homo sapien
tatttttttccatggacgggtggtgtaaatatt

SEQ ID NO: 674416 - DNA, 33 bp, Homo sapien
tatttttttccatggatgggtggtgtaaatatt

SEQ ID NO: 674417 - DNA, 33 bp, Homo sapien
taaaaaagagctttcaatatagttgaggagaaa

SEQ ID NO: 674418 - DNA, 33 bp, Homo sapien
taaaaaagagctttcactatagttgaggagaaa

SEQ ID NO: 674419 - DNA, 33 bp, Homo sapien
agatgtagaaagaaaaagagtcagtgtgtctat

SEQ ID NO: 674420 - DNA, 33 bp, Homo sapien
agatgtagaaagaaaaggagtcagtgtgtctat

SEQ ID NO: 674421 - DNA, 33 bp, Homo sapien
ttctcattagtggaaaacagcttatcaactacc

SEQ ID NO: 674422 - DNA, 33 bp, Homo sapien
ttctcattagtggaaagcagcttatcaactacc

SEQ ID NO: 674423 - DNA, 33 bp, Homo sapien
ataaatccattttgtaggtaggatgtcagagac

SEQ ID NO: 674424 - DNA, 33 bp, Homo sapien
ataaatccattttgtatgtaggatgtcagagac

SEQ ID NO: 674425 - DNA, 33 bp, Homo sapien
tgttgagtaaaagaaacggctgtcacctaaagt

SEQ ID NO: 674426 - DNA, 33 bp, Homo sapien
tgttgagtaaaagaaatggctgtcacctaaagt

SEQ ID NO: 674427 - DNA, 33 bp, Homo sapien
ggagtgataagaaataccacaggagagccaaag

SEQ ID NO: 674428 - DNA, 33 bp, Homo sapien
ggagtgataagaaatagcacaggagagccaaag

SEQ ID NO: 674429 - DNA, 33 bp, Homo sapien
cctttccagcttcttcaatttcctggcattcca

SEQ ID NO: 674430 - DNA, 33 bp, Homo sapien
cctttccagcttcttcgatttcctggcattcca

SEQ ID NO: 674431 - DNA, 33 bp, Homo sapien
ttctagccctcttttcacaatccaggaggcaac

SEQ ID NO: 674432 - DNA, 33 bp, Homo sapien
ttctagccctcttttcgcaatccaggaggcaac

SEQ ID NO: 674433 - DNA, 33 bp, Homo sapien
taaaatcttcactgagaaaacatttaatttcat

SEQ ID NO: 674434 - DNA, 33 bp, Homo sapien
taaaatcttcactgagtaaacatttaatttcat

SEQ ID NO: 674435 - DNA, 33 bp, Homo sapien
ttgaagcaagtcggcaggacctcagtgggaaag

SEQ ID NO: 674436 - DNA, 33 bp, Homo sapien
ttgaagcaagtcggcatgacctcagtgggaaag

SEQ ID NO: 674437 - DNA, 33 bp, Homo sapien
ggaatcctgagaaccaaacagatgcttgcattt

SEQ ID NO: 674438 - DNA, 33 bp, Homo sapien
ggaatcctgagaaccagacagatgcttgcattt

SEQ ID NO: 674439 - DNA, 33 bp, Homo sapien
caattccaaaatccacactcttaactaggtcat

SEQ ID NO: 674440 - DNA, 33 bp, Homo sapien
caattccaaaatccaccctcttaactaggtcat

SEQ ID NO: 674441 - DNA, 33 bp, Homo sapien
ctttcagcctgaagatcaacattagaattttca

SEQ ID NO: 674442 - DNA, 33 bp, Homo sapien
ctttcagcctgaagatgaacattagaattttca

SEQ ID NO: 674443 - DNA, 33 bp, Homo sapien
taatgttccatgtttacgtggcatcatgctcca

SEQ ID NO: 674444 - DNA, 33 bp, Homo sapien
taatgttccatgtttatgtggcatcatgctcca

SEQ ID NO: 674445 - DNA, 33 bp, Homo sapien
gacgttcccaaaataccaacaagcctggttaaa

SEQ ID NO: 674446 - DNA, 33 bp, Homo sapien
gacgttcccaaaatacgaacaagcctggttaaa

SEQ ID NO: 674447 - DNA, 33 bp, Homo sapien
gagtacttcttttgcccactgtgcttacaatca

SEQ ID NO: 674448 - DNA, 33 bp, Homo sapien
gagtacttcttttgcctactgtgcttacaatca

SEQ ID NO: 674449 - DNA, 33 bp, Homo sapien
ctggtggacagtgataccagcaaacagaccatg

SEQ ID NO: 674450 - DNA, 33 bp, Homo sapien
ctggtggacagtgatagcagcaaacagaccatg

SEQ ID NO: 674451 - DNA, 33 bp, Homo sapien
aattttcttgatagcaaaaaccagatctaacga

SEQ ID NO: 674452 - DNA, 33 bp, Homo sapien
aattttcttgatagcagaaaccagatctaacga

SEQ ID NO: 674453 - DNA, 33 bp, Homo sapien
cattttacacatgagaaactaagagttcagcca

SEQ ID NO: 674454 - DNA, 33 bp, Homo sapien
cattttacacatgagatactaagagttcagcca

SEQ ID NO: 674455 - DNA, 33 bp, Homo sapien
tgccttttcttgacaagcatcatctccttaact

SEQ ID NO: 674456 - DNA, 33 bp, Homo sapien
tgccttttcttgacaatcatcatctccttaact

SEQ ID NO: 674457 - DNA, 33 bp, Homo sapien
aagcgttagcatgccaaatgagtaatgcggcca

SEQ ID NO: 674458 - DNA, 33 bp, Homo sapien
aagcgttagcatgccagatgagtaatgcggcca

SEQ ID NO: 674459 - DNA, 33 bp, Homo sapien
gtaggcatatactaaacgacagttattgttatt

SEQ ID NO: 674460 - DNA, 33 bp, Homo sapien
gtaggcatatactaaatgacagttattgttatt

SEQ ID NO: 674461 - DNA, 33 bp, Homo sapien
catggcttcatgttgccgatctggctggagtcc

SEQ ID NO: 674462 - DNA, 33 bp, Homo sapien
catggcttcatgttgctgatctggctggagtcc

SEQ ID NO: 674463 - DNA, 33 bp, Homo sapien
tgaatgcttcatcttcaaaggaaaaagaaaaat

SEQ ID NO: 674464 - DNA, 33 bp, Homo sapien
tgaatgcttcatcttctaaggaaaaagaaaaat

SEQ ID NO: 674465 - DNA, 33 bp, Homo sapien
catagcatttggctccccactattgatggtagt

SEQ ID NO: 674466 - DNA, 33 bp, Homo sapien
catagcatttggctccgcactattgatggtagt

SEQ ID NO: 674467 - DNA, 33 bp, Homo sapien
aactgagacattagctaagattgcttctactac

SEQ ID NO: 674468 - DNA, 33 bp, Homo sapien
aactgagacattagctgagattgcttctactac

SEQ ID NO: 674469 - DNA, 33 bp, Homo sapien
tgaaaagctcataaatgagggcatgtcacaaaa

SEQ ID NO: 674470 - DNA, 33 bp, Homo sapien
tgaaaagctcataaattagggcatgtcacaaaa

SEQ ID NO: 674471 - DNA, 33 bp, Homo sapien
aaaatatttcttgagaacaagtgacattagctt

SEQ ID NO: 674472 - DNA, 33 bp, Homo sapien
aaaatatttcttgagagcaagtgacattagctt

SEQ ID NO: 674473 - DNA, 33 bp, Homo sapien
ggaatgatgttatttgcactccattcttatcct

SEQ ID NO: 674474 - DNA, 33 bp, Homo sapien
ggaatgatgttatttgtactccattcttatcct

SEQ ID NO: 674475 - DNA, 33 bp, Homo sapien
tagctaattctgagtacaagatagacttaggtt

SEQ ID NO: 674476 - DNA, 33 bp, Homo sapien
tagctaattctgagtataagatagacttaggtt

SEQ ID NO: 674477 - DNA, 33 bp, Homo sapien
cttcagtattctaccaacatttctctgtcttcc

SEQ ID NO: 674478 - DNA, 33 bp, Homo sapien
cttcagtattctaccaccatttctctgtcttcc

SEQ ID NO: 674479 - DNA, 33 bp, Homo sapien
atgccacagcactagaatcaggaatgtattggg

SEQ ID NO: 674480 - DNA, 33 bp, Homo sapien
atgccacagcactagattcaggaatgtattggg

SEQ ID NO: 674481 - DNA, 33 bp, Homo sapien
attgaaatctgtgaaacagctccactaacttga

SEQ ID NO: 674482 - DNA, 33 bp, Homo sapien
attgaaatctgtgaaatagctccactaacttga

SEQ ID NO: 674483 - DNA, 33 bp, Homo sapien
cagtttacaagtcacgaaatacacttacccatg

SEQ ID NO: 674484 - DNA, 33 bp, Homo sapien
cagtttacaagtcacggaatacacttacccatg

SEQ ID NO: 674485 - DNA, 33 bp, Homo sapien
ggttcagatactttacaagagaaggcaataagg

SEQ ID NO: 674486 - DNA, 33 bp, Homo sapien
ggttcagatactttacgagagaaggcaataagg

SEQ ID NO: 674487 - DNA, 33 bp, Homo sapien
ttctagaacaaacaaactgctttcctgctcatt

SEQ ID NO: 674488 - DNA, 33 bp, Homo sapien
ttctagaacaaacaaattgctttcctgctcatt

SEQ ID NO: 674489 - DNA, 33 bp, Homo sapien
tttccagtgtagtagacgctaagaaaataaata

SEQ ID NO: 674490 - DNA, 33 bp, Homo sapien
tttccagtgtagtagatgctaagaaaataaata

SEQ ID NO: 674491 - DNA, 33 bp, Homo sapien
tgtagagttcattctcaaggcaatagagtgttt

SEQ ID NO: 674492 - DNA, 33 bp, Homo sapien
tgtagagttcattctcgaggcaatagagtgttt

SEQ ID NO: 674493 - DNA, 33 bp, Homo sapien
tttgagttttcgtttcaagtcaaactctgaaat

SEQ ID NO: 674494 - DNA, 33 bp, Homo sapien
tttgagttttcgtttcgagtcaaactctgaaat

SEQ ID NO: 674495 - DNA, 33 bp, Homo sapien
gggatttgttgctggtaaattacaaaagagaca

SEQ ID NO: 674496 - DNA, 33 bp, Homo sapien
gggatttgttgctggtgaattacaaaagagaca

SEQ ID NO: 674497 - DNA, 33 bp, Homo sapien
gccatatgaccttggaaaactaatgtcaacctt

SEQ ID NO: 674498 - DNA, 33 bp, Homo sapien
gccatatgaccttggagaactaatgtcaacctt

SEQ ID NO: 674499 - DNA, 33 bp, Homo sapien
tatggtttggatgtcccctcctattctctggga

SEQ ID NO: 674500 - DNA, 33 bp, Homo sapien
tatggtttggatgtcctctcctattctctggga

SEQ ID NO: 674501 - DNA, 33 bp, Homo sapien
caaatctccatcagcaagtcataaagtcaaact

SEQ ID NO: 674502 - DNA, 33 bp, Homo sapien
caaatctccatcagcacgtcataaagtcaaact

SEQ ID NO: 674503 - DNA, 33 bp, Homo sapien
cagctatcattaaaggccatacccattatctag

SEQ ID NO: 674504 - DNA, 33 bp, Homo sapien
cagctatcattaaaggtcatacccattatctag

SEQ ID NO: 674505 - DNA, 33 bp, Homo sapien
ctatgtgtaaaagacaccactcatcaatatatg

SEQ ID NO: 674506 - DNA, 33 bp, Homo sapien
ctatgtgtaaaagacatcactcatcaatatatg

SEQ ID NO: 674507 - DNA, 33 bp, Homo sapien
tcataccatcaaacaccgtacctcaaagactaa

SEQ ID NO: 674508 - DNA, 33 bp, Homo sapien
tcataccatcaaacactgtacctcaaagactaa

SEQ ID NO: 674509 - DNA, 33 bp, Homo sapien
ctcttgtggaaagaacaatgctaaataagaaac

SEQ ID NO: 674510 - DNA, 33 bp, Homo sapien
ctcttgtggaaagaacgatgctaaataagaaac

SEQ ID NO: 674511 - DNA, 33 bp, Homo sapien
tgaaaatgatagtccaagtttattcggagacat

SEQ ID NO: 674512 - DNA, 33 bp, Homo sapien
tgaaaatgatagtccaggtttattcggagacat

SEQ ID NO: 674513 - DNA, 33 bp, Homo sapien
tctgtacttgtctctcaccttcacttttcatat

SEQ ID NO: 674514 - DNA, 33 bp, Homo sapien
tctgtacttgtctctccccttcacttttcatat

SEQ ID NO: 674515 - DNA, 33 bp, Homo sapien
tattgcaactgggagacgagttaagaggttatt

SEQ ID NO: 674516 - DNA, 33 bp, Homo sapien
tattgcaactgggagatgagttaagaggttatt

SEQ ID NO: 674517 - DNA, 33 bp, Homo sapien
tcatcttataagctgactaggaacagggaatgg

SEQ ID NO: 674518 - DNA, 33 bp, Homo sapien
tcatcttataagctgagtaggaacagggaatgg

SEQ ID NO: 674519 - DNA, 33 bp, Homo sapien
tccattgtggaatttaaatggcaggtgatagga

SEQ ID NO: 674520 - DNA, 33 bp, Homo sapien
tccattgtggaatttacatggcaggtgatagga

SEQ ID NO: 674521 - DNA, 33 bp, Homo sapien
cccattgtctactaggaaacagtgcatccattc

SEQ ID NO: 674522 - DNA, 33 bp, Homo sapien
cccattgtctactaggcaacagtgcatccattc

SEQ ID NO: 674523 - DNA, 33 bp, Homo sapien
ggcatggctgtgcttacggacaatgtatgtgaa

SEQ ID NO: 674524 - DNA, 33 bp, Homo sapien
ggcatggctgtgcttatggacaatgtatgtgaa

SEQ ID NO: 674525 - DNA, 33 bp, Homo sapien
atatggctgactgatcaatatagtggctgatga

SEQ ID NO: 674526 - DNA, 33 bp, Homo sapien
atatggctgactgatcgatatagtggctgatga

SEQ ID NO: 674527 - DNA, 33 bp, Homo sapien
tgggatcagtgagaaacggtggaagctagttta

SEQ ID NO: 674528 - DNA, 33 bp, Homo sapien
tgggatcagtgagaaatggtggaagctagttta

SEQ ID NO: 674529 - DNA, 33 bp, Homo sapien
aatatacaacggaatacgatggaatttcagggg

SEQ ID NO: 674530 - DNA, 33 bp, Homo sapien
aatatacaacggaatatgatggaatttcagggg

SEQ ID NO: 674531 - DNA, 33 bp, Homo sapien
tgcgttcttagagtgaaccttgtttctgtaaca

SEQ ID NO: 674532 - DNA, 33 bp, Homo sapien
tgcgttcttagagtgacccttgtttctgtaaca

SEQ ID NO: 674533 - DNA, 33 bp, Homo sapien
atcagatacagagtgaataagtgagccgtacta

SEQ ID NO: 674534 - DNA, 33 bp, Homo sapien
atcagatacagagtgattaagtgagccgtacta

SEQ ID NO: 674535 - DNA, 33 bp, Homo sapien
gctggcagacagaaagaccattgtgtgccaaat

SEQ ID NO: 674536 - DNA, 33 bp, Homo sapien
gctggcagacagaaaggccattgtgtgccaaat

SEQ ID NO: 674537 - DNA, 33 bp, Homo sapien
ggtgaagtggaccttcaaataaggattttaaac

SEQ ID NO: 674538 - DNA, 33 bp, Homo sapien
ggtgaagtggaccttccaataaggattttaaac

SEQ ID NO: 674539 - DNA, 33 bp, Homo sapien
attcgtgcacagaggaagtattcattccttctg

SEQ ID NO: 674540 - DNA, 33 bp, Homo sapien
attcgtgcacagaggaggtattcattccttctg

SEQ ID NO: 674541 - DNA, 33 bp, Homo sapien
cctcatggtgtcaagcacagaaatttgcacatt

SEQ ID NO: 674542 - DNA, 33 bp, Homo sapien
cctcatggtgtcaagcgcagaaatttgcacatt

SEQ ID NO: 674543 - DNA, 33 bp, Homo sapien
ttctaggccttcagtaaaagttgaattaatatt

SEQ ID NO: 674544 - DNA, 33 bp, Homo sapien
ttctaggccttcagtagaagttgaattaatatt

SEQ ID NO: 674545 - DNA, 33 bp, Homo sapien
attatttttatgctaacgagtactgacaagcaa

SEQ ID NO: 674546 - DNA, 33 bp, Homo sapien
attatttttatgctaatgagtactgacaagcaa

SEQ ID NO: 674547 - DNA, 33 bp, Homo sapien
tgtgtgagagagacaaatagagggacataggac

SEQ ID NO: 674548 - DNA, 33 bp, Homo sapien
tgtgtgagagagacaagtagagggacataggac

SEQ ID NO: 674549 - DNA, 33 bp, Homo sapien
tatgtaccatcaactacgcaaggtgctgaagat

SEQ ID NO: 674550 - DNA, 33 bp, Homo sapien
tatgtaccatcaactatgcaaggtgctgaagat

SEQ ID NO: 674551 - DNA, 33 bp, Homo sapien
gcagcagatttaataaaccacaatttccagatt

SEQ ID NO: 674552 - DNA, 33 bp, Homo sapien
gcagcagatttaataagccacaatttccagatt

SEQ ID NO: 674553 - DNA, 33 bp, Homo sapien
tatcctcataaagttagaggcatctggagacaa

SEQ ID NO: 674554 - DNA, 33 bp, Homo sapien
tatcctcataaagttataggcatctggagacaa

SEQ ID NO: 674555 - DNA, 33 bp, Homo sapien
aggcatctggagacaacgactacagcaaagact

SEQ ID NO: 674556 - DNA, 33 bp, Homo sapien
aggcatctggagacaatgactacagcaaagact

SEQ ID NO: 674557 - DNA, 33 bp, Homo sapien
cgtgcctttggggatgaagaaaaatgatttatg

SEQ ID NO: 674558 - DNA, 33 bp, Homo sapien
cgtgcctttggggatgtagaaaaatgatttatg

SEQ ID NO: 674559 - DNA, 33 bp, Homo sapien
tgaaggagccaagaaactgtgggagctttcatg

SEQ ID NO: 674560 - DNA, 33 bp, Homo sapien
tgaaggagccaagaaattgtgggagctttcatg

SEQ ID NO: 674561 - DNA, 33 bp, Homo sapien
taacattcatttgatcacgacttattgatattt

SEQ ID NO: 674562 - DNA, 33 bp, Homo sapien
taacattcatttgatcccgacttattgatattt

SEQ ID NO: 674563 - DNA, 33 bp, Homo sapien
acaaaaccaacaatagaatatctagaaagtaac

SEQ ID NO: 674564 - DNA, 33 bp, Homo sapien
acaaaaccaacaataggatatctagaaagtaac

SEQ ID NO: 674565 - DNA, 33 bp, Homo sapien
attttgcaacccagggcatatacatggctctac

SEQ ID NO: 674566 - DNA, 33 bp, Homo sapien
attttgcaacccaggggatatacatggctctac

SEQ ID NO: 674567 - DNA, 33 bp, Homo sapien
gaaggggttggatgaggatggcacctgttattt

SEQ ID NO: 674568 - DNA, 33 bp, Homo sapien
gaaggggttggatgagtatggcacctgttattt

SEQ ID NO: 674569 - DNA, 33 bp, Homo sapien
tcacaagtcttggaaaactgaatagattatctg

SEQ ID NO: 674570 - DNA, 33 bp, Homo sapien
tcacaagtcttggaaagctgaatagattatctg

SEQ ID NO: 674571 - DNA, 33 bp, Homo sapien
tctcaaaaatcttgcacgtgtatagaaagctgg

SEQ ID NO: 674572 - DNA, 33 bp, Homo sapien
tctcaaaaatcttgcatgtgtatagaaagctgg

SEQ ID NO: 674573 - DNA, 33 bp, Homo sapien
atatactttatacttaccccatgcaaagggaaa

SEQ ID NO: 674574 - DNA, 33 bp, Homo sapien
atatactttatacttatcccatgcaaagggaaa

SEQ ID NO: 674575 - DNA, 33 bp, Homo sapien
gaaatctgtaacctgaatataattatgaagaaa

SEQ ID NO: 674576 - DNA, 33 bp, Homo sapien
gaaatctgtaacctgagtataattatgaagaaa

SEQ ID NO: 674577 - DNA, 33 bp, Homo sapien
acagattattttgtgaccaaggtaatgaacata

SEQ ID NO: 674578 - DNA, 33 bp, Homo sapien
acagattattttgtgagcaaggtaatgaacata

SEQ ID NO: 674579 - DNA, 33 bp, Homo sapien
atatatttccacagtgcatatgtacgacatttt

SEQ ID NO: 674580 - DNA, 33 bp, Homo sapien
atatatttccacagtgtatatgtacgacatttt

SEQ ID NO: 674581 - DNA, 33 bp, Homo sapien
ttatttgactgattcacgtgtctattacaattg

SEQ ID NO: 674582 - DNA, 33 bp, Homo sapien
ttatttgactgattcatgtgtctattacaattg

SEQ ID NO: 674583 - DNA, 33 bp, Homo sapien
tgatttaacttttgccactgttgaatgtacact

SEQ ID NO: 674584 - DNA, 33 bp, Homo sapien
tgatttaacttttgccgctgttgaatgtacact

SEQ ID NO: 674585 - DNA, 33 bp, Homo sapien
ttgaaggaagatggacacagccaaactggagga

SEQ ID NO: 674586 - DNA, 33 bp, Homo sapien
ttgaaggaagatggacgcagccaaactggagga

SEQ ID NO: 674587 - DNA, 33 bp, Homo sapien
ataaaagttgaccaaaatgatgctttatttccg

SEQ ID NO: 674588 - DNA, 33 bp, Homo sapien
ataaaagttgaccaaagtgatgctttatttccg

SEQ ID NO: 674589 - DNA, 33 bp, Homo sapien
ttaagactaaattaaaagaaatgcagaccaaag

SEQ ID NO: 674590 - DNA, 33 bp, Homo sapien
ttaagactaaattaaaggaaatgcagaccaaag

SEQ ID NO: 674591 - DNA, 33 bp, Homo sapien
aattagatcatcatcacacttcaaagacaacgc

SEQ ID NO: 674592 - DNA, 33 bp, Homo sapien
aattagatcatcatcagacttcaaagacaacgc

SEQ ID NO: 674593 - DNA, 33 bp, Homo sapien
ctgtgatctatcaacactattttaggttacccc

SEQ ID NO: 674594 - DNA, 33 bp, Homo sapien
ctgtgatctatcaacagtattttaggttacccc

SEQ ID NO: 674595 - DNA, 33 bp, Homo sapien
atttgctgttattctccctatgcccacggctca

SEQ ID NO: 674596 - DNA, 33 bp, Homo sapien
atttgctgttattctctctatgcccacggctca

SEQ ID NO: 674597 - DNA, 33 bp, Homo sapien
tcctacttatttttccaccagtttcaggtgtct

SEQ ID NO: 674598 - DNA, 33 bp, Homo sapien
tcctacttatttttccgccagtttcaggtgtct

SEQ ID NO: 674599 - DNA, 33 bp, Homo sapien
ccacaaagctgtaagacaggcatggacaaaatt

SEQ ID NO: 674600 - DNA, 33 bp, Homo sapien
ccacaaagctgtaagataggcatggacaaaatt

SEQ ID NO: 674601 - DNA, 33 bp, Homo sapien
cattcatgtgttgaaaatgaattcacattgtgg

SEQ ID NO: 674602 - DNA, 33 bp, Homo sapien
cattcatgtgttgaaactgaattcacattgtgg

SEQ ID NO: 674603 - DNA, 33 bp, Homo sapien
tttactgaagcagcaacataatgtggaaaaatg

SEQ ID NO: 674604 - DNA, 33 bp, Homo sapien
tttactgaagcagcaatataatgtggaaaaatg

SEQ ID NO: 674605 - DNA, 33 bp, Homo sapien
taattgtaattgcaccaaagagttcaggtggaa

SEQ ID NO: 674606 - DNA, 33 bp, Homo sapien
taattgtaattgcaccgaagagttcaggtggaa

SEQ ID NO: 674607 - DNA, 33 bp, Homo sapien
cctagaattcttgcaacctagacactcaagaag

SEQ ID NO: 674608 - DNA, 33 bp, Homo sapien
cctagaattcttgcaagctagacactcaagaag

SEQ ID NO: 674609 - DNA, 33 bp, Homo sapien
cttcctaagatggagacacctcttgggccctgg

SEQ ID NO: 674610 - DNA, 33 bp, Homo sapien
cttcctaagatggagagacctcttgggccctgg

SEQ ID NO: 674611 - DNA, 33 bp, Homo sapien
tgttgatggcaatgtccctgtttccaatgtcct

SEQ ID NO: 674612 - DNA, 33 bp, Homo sapien
tgttgatggcaatgtctctgtttccaatgtcct

SEQ ID NO: 674613 - DNA, 33 bp, Homo sapien
ttaaagactaattatccactccccatgcaatta

SEQ ID NO: 674614 - DNA, 33 bp, Homo sapien
ttaaagactaattatctactccccatgcaatta

SEQ ID NO: 674615 - DNA, 33 bp, Homo sapien
ttagtgaattctgtggaatatactcatcttctt

SEQ ID NO: 674616 - DNA, 33 bp, Homo sapien
ttagtgaattctgtgggatatactcatcttctt

SEQ ID NO: 674617 - DNA, 33 bp, Homo sapien
cccatgagtgactccactgagtaaggaccacct

SEQ ID NO: 674618 - DNA, 33 bp, Homo sapien
cccatgagtgactccattgagtaaggaccacct

SEQ ID NO: 674619 - DNA, 33 bp, Homo sapien
atagcttttcatgagcaacttctcttatctatt

SEQ ID NO: 674620 - DNA, 33 bp, Homo sapien
atagcttttcatgagcgacttctcttatctatt

SEQ ID NO: 674621 - DNA, 33 bp, Homo sapien
aaatcctgatgttttcaagcaagaacaagtagc

SEQ ID NO: 674622 - DNA, 33 bp, Homo sapien
aaatcctgatgttttcgagcaagaacaagtagc

SEQ ID NO: 674623 - DNA, 33 bp, Homo sapien
gctaaattgatttaaacggcaagacaagtagag

SEQ ID NO: 674624 - DNA, 33 bp, Homo sapien
gctaaattgatttaaatggcaagacaagtagag

SEQ ID NO: 674625 - DNA, 33 bp, Homo sapien
aaacagaacttttttacgtattatgtggttgta

SEQ ID NO: 674626 - DNA, 33 bp, Homo sapien
aaacagaacttttttatgtattatgtggttgta

SEQ ID NO: 674627 - DNA, 33 bp, Homo sapien
aggagccagtcatgtacagatttgaggcaagag

SEQ ID NO: 674628 - DNA, 33 bp, Homo sapien
aggagccagtcatgtagagatttgaggcaagag

SEQ ID NO: 674629 - DNA, 33 bp, Homo sapien
atccagaactcaaatacgcagatgaggcagatc

SEQ ID NO: 674630 - DNA, 33 bp, Homo sapien
atccagaactcaaatatgcagatgaggcagatc

SEQ ID NO: 674631 - DNA, 33 bp, Homo sapien
atgattcttggtaagccgacaaagaaagaaggc

SEQ ID NO: 674632 - DNA, 33 bp, Homo sapien
atgattcttggtaagctgacaaagaaagaaggc

SEQ ID NO: 674633 - DNA, 33 bp, Homo sapien
ggtatttcagagttcaaatttttgaggttgtta

SEQ ID NO: 674634 - DNA, 33 bp, Homo sapien
ggtatttcagagttcacatttttgaggttgtta

SEQ ID NO: 674635 - DNA, 33 bp, Homo sapien
agaagacttatcagcactcggtcccagtatatg

SEQ ID NO: 674636 - DNA, 33 bp, Homo sapien
agaagacttatcagcattcggtcccagtatatg

SEQ ID NO: 674637 - DNA, 33 bp, Homo sapien
ttatacaggaaagaatcagttagcaatgagaag

SEQ ID NO: 674638 - DNA, 33 bp, Homo sapien
ttatacaggaaagaatgagttagcaatgagaag

SEQ ID NO: 674639 - DNA, 33 bp, Homo sapien
aatattaacaaatttcaaagtttggaatcatat

SEQ ID NO: 674640 - DNA, 33 bp, Homo sapien
aatattaacaaatttcgaagtttggaatcatat

SEQ ID NO: 674641 - DNA, 33 bp, Homo sapien
tgtacctttttctataacttcacgttcaacctg

SEQ ID NO: 674642 - DNA, 33 bp, Homo sapien
tgtacctttttctataccttcacgttcaacctg

SEQ ID NO: 674643 - DNA, 33 bp, Homo sapien
acagcttgaccctatacctcaaaagccacagac

SEQ ID NO: 674644 - DNA, 33 bp, Homo sapien
acagcttgaccctatagctcaaaagccacagac

SEQ ID NO: 674645 - DNA, 33 bp, Homo sapien
gccagagtaggaacaaaagggagcaagcaaggt

SEQ ID NO: 674646 - DNA, 33 bp, Homo sapien
gccagagtaggaacaagagggagcaagcaaggt

SEQ ID NO: 674647 - DNA, 33 bp, Homo sapien
taattcactatgatacaaactacaaaatgttac

SEQ ID NO: 674648 - DNA, 33 bp, Homo sapien
taattcactatgataccaactacaaaatgttac

SEQ ID NO: 674649 - DNA, 33 bp, Homo sapien
ggaaactgatgagcaacagatggaaaatactct

SEQ ID NO: 674650 - DNA, 33 bp, Homo sapien
ggaaactgatgagcaatagatggaaaatactct

SEQ ID NO: 674651 - DNA, 33 bp, Homo sapien
ttagacctctcagataagtgaatcatatacatc

SEQ ID NO: 674652 - DNA, 33 bp, Homo sapien
ttagacctctcagataggtgaatcatatacatc

SEQ ID NO: 674653 - DNA, 33 bp, Homo sapien
tctaccaggttaataaatacgaccagcagagac

SEQ ID NO: 674654 - DNA, 33 bp, Homo sapien
tctaccaggttaataactacgaccagcagagac

SEQ ID NO: 674655 - DNA, 33 bp, Homo sapien
tcttgaaaaataatcaacatgcagacactatta

SEQ ID NO: 674656 - DNA, 33 bp, Homo sapien
tcttgaaaaataatcagcatgcagacactatta

SEQ ID NO: 674657 - DNA, 33 bp, Homo sapien
ccataaattagaatcaccatgcttgcagtgttt

SEQ ID NO: 674658 - DNA, 33 bp, Homo sapien
ccataaattagaatcatcatgcttgcagtgttt

SEQ ID NO: 674659 - DNA, 33 bp, Homo sapien
cttcagttggctcttaactatgtttactatacc

SEQ ID NO: 674660 - DNA, 33 bp, Homo sapien
cttcagttggctcttagctatgtttactatacc

SEQ ID NO: 674661 - DNA, 33 bp, Homo sapien
tgagactattacagccagcaagatactagcaaa

SEQ ID NO: 674662 - DNA, 33 bp, Homo sapien
tgagactattacagccggcaagatactagcaaa

SEQ ID NO: 674663 - DNA, 33 bp, Homo sapien
accatgtttgtactgaaaatattttgctaattt

SEQ ID NO: 674664 - DNA, 33 bp, Homo sapien
accatgtttgtactgagaatattttgctaattt

SEQ ID NO: 674665 - DNA, 33 bp, Homo sapien
agcttggagtcaaaaactgagatcagcactcaa

SEQ ID NO: 674666 - DNA, 33 bp, Homo sapien
agcttggagtcaaaaattgagatcagcactcaa

SEQ ID NO: 674667 - DNA, 33 bp, Homo sapien
agcactcaagtagagcactcatcggtgcaagag

SEQ ID NO: 674668 - DNA, 33 bp, Homo sapien
agcactcaagtagagcgctcatcggtgcaagag

SEQ ID NO: 674669 - DNA, 33 bp, Homo sapien
gcaggtcataagtaagactctagaatgaagaac

SEQ ID NO: 674670 - DNA, 33 bp, Homo sapien
gcaggtcataagtaagtctctagaatgaagaac

SEQ ID NO: 674671 - DNA, 33 bp, Homo sapien
ctcactggtaacaaaccccttcacatcagtaat

SEQ ID NO: 674672 - DNA, 33 bp, Homo sapien
ctcactggtaacaaactccttcacatcagtaat

SEQ ID NO: 674673 - DNA, 33 bp, Homo sapien
cacctggaagcttatcagaaaggcaagatctca

SEQ ID NO: 674674 - DNA, 33 bp, Homo sapien
cacctggaagcttatccgaaaggcaagatctca

SEQ ID NO: 674675 - DNA, 33 bp, Homo sapien
aaccggacaaggaaaagattacaggccaaattc

SEQ ID NO: 674676 - DNA, 33 bp, Homo sapien
aaccggacaaggaaaatattacaggccaaattc

SEQ ID NO: 674677 - DNA, 33 bp, Homo sapien
gaatcatgggctaatagaagtcaccaagaggaa

SEQ ID NO: 674678 - DNA, 33 bp, Homo sapien
gaatcatgggctaatataagtcaccaagaggaa

SEQ ID NO: 674679 - DNA, 33 bp, Homo sapien
gaggatacctggcaaaaactctggattctatta

SEQ ID NO: 674680 - DNA, 33 bp, Homo sapien
gaggatacctggcaaacactctggattctatta

SEQ ID NO: 674681 - DNA, 33 bp, Homo sapien
tctcaagtgccaagaacctaaattggaaacaat

SEQ ID NO: 674682 - DNA, 33 bp, Homo sapien
tctcaagtgccaagaatctaaattggaaacaat

SEQ ID NO: 674683 - DNA, 33 bp, Homo sapien
aaaaaaagtgcaagcaacttattatcactggaa

SEQ ID NO: 674684 - DNA, 33 bp, Homo sapien
aaaaaaagtgcaagcagcttattatcactggaa

SEQ ID NO: 674685 - DNA, 33 bp, Homo sapien
acagcaaacactgaacagtactccttagggtca

SEQ ID NO: 674686 - DNA, 33 bp, Homo sapien
acagcaaacactgaactgtactccttagggtca

SEQ ID NO: 674687 - DNA, 33 bp, Homo sapien
caattgctgaaattaaatgcctgtagaattgac

SEQ ID NO: 674688 - DNA, 33 bp, Homo sapien
caattgctgaaattaagtgcctgtagaattgac

SEQ ID NO: 674689 - DNA, 33 bp, Homo sapien
tattaggaaggggaaaactgttcacctctctgg

SEQ ID NO: 674690 - DNA, 33 bp, Homo sapien
tattaggaaggggaaatctgttcacctctctgg

SEQ ID NO: 674691 - DNA, 33 bp, Homo sapien
atccaactaaccaatcagataatgagcatggag

SEQ ID NO: 674692 - DNA, 33 bp, Homo sapien
atccaactaaccaatcggataatgagcatggag

SEQ ID NO: 674693 - DNA, 33 bp, Homo sapien
aaaaattggacatctaacctccatcaaaccaga

SEQ ID NO: 674694 - DNA, 33 bp, Homo sapien
aaaaattggacatctaccctccatcaaaccaga

SEQ ID NO: 674695 - DNA, 33 bp, Homo sapien
tgggcaaaatctctaacgagcttccctactaga

SEQ ID NO: 674696 - DNA, 33 bp, Homo sapien
tgggcaaaatctctaatgagcttccctactaga

SEQ ID NO: 674697 - DNA, 33 bp, Homo sapien
caaacgatatagtttacgttgaacacctgcttt

SEQ ID NO: 674698 - DNA, 33 bp, Homo sapien
caaacgatatagtttatgttgaacacctgcttt

SEQ ID NO: 674699 - DNA, 33 bp, Homo sapien
caggcagttcattttacggaaacttaatggagt

SEQ ID NO: 674700 - DNA, 33 bp, Homo sapien
caggcagttcattttatggaaacttaatggagt

SEQ ID NO: 674701 - DNA, 33 bp, Homo sapien
gaagctacaaaactcacgggcaatagtaagtgc

SEQ ID NO: 674702 - DNA, 33 bp, Homo sapien
gaagctacaaaactcatgggcaatagtaagtgc

SEQ ID NO: 674703 - DNA, 33 bp, Homo sapien
caaattttaaaatagggaatgaaagcacagaat

SEQ ID NO: 674704 - DNA, 33 bp, Homo sapien
caaattttaaaataggtaatgaaagcacagaat

SEQ ID NO: 674705 - DNA, 33 bp, Homo sapien
ttgaccaatgtaaaaacgtaacttgttgatgtt

SEQ ID NO: 674706 - DNA, 33 bp, Homo sapien
ttgaccaatgtaaaaaggtaacttgttgatgtt

SEQ ID NO: 674707 - DNA, 33 bp, Homo sapien
agtgaaaagttacagacatttggagccttcaca

SEQ ID NO: 674708 - DNA, 33 bp, Homo sapien
agtgaaaagttacagatatttggagccttcaca

SEQ ID NO: 674709 - DNA, 33 bp, Homo sapien
tcctatgccatagttacacttctagttatgcta

SEQ ID NO: 674710 - DNA, 33 bp, Homo sapien
tcctatgccatagttatacttctagttatgcta

SEQ ID NO: 674711 - DNA, 33 bp, Homo sapien
gaaccattgtcagagaactcttgcagtcttggt

SEQ ID NO: 674712 - DNA, 33 bp, Homo sapien
gaaccattgtcagagacctcttgcagtcttggt

SEQ ID NO: 674713 - DNA, 33 bp, Homo sapien
actgtaatgcaaagaacaacatcatatagtgtt

SEQ ID NO: 674714 - DNA, 33 bp, Homo sapien
actgtaatgcaaagaagaacatcatatagtgtt

SEQ ID NO: 674715 - DNA, 33 bp, Homo sapien
ttttatgtaatcattacagttagtgtgtagtgt

SEQ ID NO: 674716 - DNA, 33 bp, Homo sapien
ttttatgtaatcattatagttagtgtgtagtgt

SEQ ID NO: 674717 - DNA, 33 bp, Homo sapien
ggtgatgccagtgttacgcattttcatcattct

SEQ ID NO: 674718 - DNA, 33 bp, Homo sapien
ggtgatgccagtgttatgcattttcatcattct

SEQ ID NO: 674719 - DNA, 33 bp, Homo sapien
tatttaactgatgccaccaagaaagcactctat

SEQ ID NO: 674720 - DNA, 33 bp, Homo sapien
tatttaactgatgccagcaagaaagcactctat

SEQ ID NO: 674721 - DNA, 33 bp, Homo sapien
ccagtgatctatcaagcaacttcaggaagcctg

SEQ ID NO: 674722 - DNA, 33 bp, Homo sapien
ccagtgatctatcaagtaacttcaggaagcctg

SEQ ID NO: 674723 - DNA, 33 bp, Homo sapien
attttcagcataccaaacaacttgtgccagagt

SEQ ID NO: 674724 - DNA, 33 bp, Homo sapien
attttcagcataccaagcaacttgtgccagagt

SEQ ID NO: 674725 - DNA, 33 bp, Homo sapien
tggctaagcaactgaaagttccactctggcaca

SEQ ID NO: 674726 - DNA, 33 bp, Homo sapien
tggctaagcaactgaatgttccactctggcaca

SEQ ID NO: 674727 - DNA, 33 bp, Homo sapien
attattatgagcattacatagagattttctgct

SEQ ID NO: 674728 - DNA, 33 bp, Homo sapien
attattatgagcattatatagagattttctgct

SEQ ID NO: 674729 - DNA, 33 bp, Homo sapien
aatcctagatttctaaagtagaggtaacacatt

SEQ ID NO: 674730 - DNA, 33 bp, Homo sapien
aatcctagatttctaacgtagaggtaacacatt

SEQ ID NO: 674731 - DNA, 33 bp, Homo sapien
ataagtgttcagaataacactgcaagtaatcat

SEQ ID NO: 674732 - DNA, 33 bp, Homo sapien
ataagtgttcagaatatcactgcaagtaatcat

SEQ ID NO: 674733 - DNA, 33 bp, Homo sapien
gcagtgcaaacctggactcaaatattgccccca

SEQ ID NO: 674734 - DNA, 33 bp, Homo sapien
gcagtgcaaacctggattcaaatattgccccca

SEQ ID NO: 674735 - DNA, 33 bp, Homo sapien
tatgcttctatggtaaatatatccagatacaag

SEQ ID NO: 674736 - DNA, 33 bp, Homo sapien
tatgcttctatggtaagtatatccagatacaag

SEQ ID NO: 674737 - DNA, 33 bp, Homo sapien
acctgtagtacatttacgattactgcacaggcc

SEQ ID NO: 674738 - DNA, 33 bp, Homo sapien
acctgtagtacatttatgattactgcacaggcc

SEQ ID NO: 674739 - DNA, 33 bp, Homo sapien
aatgttaagtaattcacactattcgtgcttggt

SEQ ID NO: 674740 - DNA, 33 bp, Homo sapien
aatgttaagtaattcatactattcgtgcttggt

SEQ ID NO: 674741 - DNA, 33 bp, Homo sapien
aagagtaccaagaccacataaagaggaaaacac

SEQ ID NO: 674742 - DNA, 33 bp, Homo sapien
aagagtaccaagaccatataaagaggaaaacac

SEQ ID NO: 674743 - DNA, 33 bp, Homo sapien
cctaattccaaaatacagcagaaagctacagtc

SEQ ID NO: 674744 - DNA, 33 bp, Homo sapien
cctaattccaaaatacggcagaaagctacagtc

SEQ ID NO: 674745 - DNA, 33 bp, Homo sapien
aggctttaatcaacacagcagccaaagggattt

SEQ ID NO: 674746 - DNA, 33 bp, Homo sapien
aggctttaatcaacaccgcagccaaagggattt

SEQ ID NO: 674747 - DNA, 33 bp, Homo sapien
ctcttactgctttacacacactaccttgcatga

SEQ ID NO: 674748 - DNA, 33 bp, Homo sapien
ctcttactgctttacatacactaccttgcatga

SEQ ID NO: 674749 - DNA, 33 bp, Homo sapien
gtgatgctgataatgcaagtttatggaacacac

SEQ ID NO: 674750 - DNA, 33 bp, Homo sapien
gtgatgctgataatgcgagtttatggaacacac

SEQ ID NO: 674751 - DNA, 33 bp, Homo sapien
tattccctaaatgtgacgcatagaaaactaata

SEQ ID NO: 674752 - DNA, 33 bp, Homo sapien
tattccctaaatgtgatgcatagaaaactaata

SEQ ID NO: 674753 - DNA, 33 bp, Homo sapien
tttttgttgttttaaccaataggcaatggtggc

SEQ ID NO: 674754 - DNA, 33 bp, Homo sapien
tttttgttgttttaactaataggcaatggtggc

SEQ ID NO: 674755 - DNA, 33 bp, Homo sapien
ttatgcactgcataacgatgttttggtaaatga

SEQ ID NO: 674756 - DNA, 33 bp, Homo sapien
ttatgcactgcataactatgttttggtaaatga

SEQ ID NO: 674757 - DNA, 33 bp, Homo sapien
ccagccagatcagccaactaaccagatatgcat

SEQ ID NO: 674758 - DNA, 33 bp, Homo sapien
ccagccagatcagccacctaaccagatatgcat

SEQ ID NO: 674759 - DNA, 33 bp, Homo sapien
ctttgagaattacttacggacatttgtcaaaaa

SEQ ID NO: 674760 - DNA, 33 bp, Homo sapien
ctttgagaattacttagggacatttgtcaaaaa

SEQ ID NO: 674761 - DNA, 33 bp, Homo sapien
accagaggaatgaccaacttgtttttaactata

SEQ ID NO: 674762 - DNA, 33 bp, Homo sapien
accagaggaatgaccaccttgtttttaactata

SEQ ID NO: 674763 - DNA, 33 bp, Homo sapien
caagactatattacaccgaactctactctccta

SEQ ID NO: 674764 - DNA, 33 bp, Homo sapien
caagactatattacactgaactctactctccta

SEQ ID NO: 674765 - DNA, 33 bp, Homo sapien
taggggttccatgaaaattgccaaatcagaata

SEQ ID NO: 674766 - DNA, 33 bp, Homo sapien
taggggttccatgaaagttgccaaatcagaata

SEQ ID NO: 674767 - DNA, 33 bp, Homo sapien
tgaggaacttcacaggaaaacaaacatataaac

SEQ ID NO: 674768 - DNA, 33 bp, Homo sapien
tgaggaacttcacagggaaacaaacatataaac

SEQ ID NO: 674769 - DNA, 33 bp, Homo sapien
acatcaaaatgtcacacattcgaattgaggtaa

SEQ ID NO: 674770 - DNA, 33 bp, Homo sapien
acatcaaaatgtcacatattcgaattgaggtaa

SEQ ID NO: 674771 - DNA, 33 bp, Homo sapien
ctgtggatgaagtcaaataatataaggcaccaa

SEQ ID NO: 674772 - DNA, 33 bp, Homo sapien
ctgtggatgaagtcaagtaatataaggcaccaa

SEQ ID NO: 674773 - DNA, 33 bp, Homo sapien
ttgtgattaaaatagccgaagatgttcagaatc

SEQ ID NO: 674774 - DNA, 33 bp, Homo sapien
ttgtgattaaaatagctgaagatgttcagaatc

SEQ ID NO: 674775 - DNA, 33 bp, Homo sapien
cattctagactttccacgatctcaaaataatgt

SEQ ID NO: 674776 - DNA, 33 bp, Homo sapien
cattctagactttccatgatctcaaaataatgt

SEQ ID NO: 674777 - DNA, 33 bp, Homo sapien
atataggagaggaagtaaaaattgcatatcatt

SEQ ID NO: 674778 - DNA, 33 bp, Homo sapien
atataggagaggaagtgaaaattgcatatcatt

SEQ ID NO: 674779 - DNA, 33 bp, Homo sapien
ctggaaaagaagagaacagtacacctgtatagg

SEQ ID NO: 674780 - DNA, 33 bp, Homo sapien
ctggaaaagaagagaatagtacacctgtatagg

SEQ ID NO: 674781 - DNA, 33 bp, Homo sapien
aacatagcttgcaaccaaagggtcaggataaat

SEQ ID NO: 674782 - DNA, 33 bp, Homo sapien
aacatagcttgcaaccgaagggtcaggataaat

SEQ ID NO: 674783 - DNA, 33 bp, Homo sapien
tgccaagtaatttgagcatattaatccatataa

SEQ ID NO: 674784 - DNA, 33 bp, Homo sapien
tgccaagtaatttgagtatattaatccatataa

SEQ ID NO: 674785 - DNA, 33 bp, Homo sapien
tggtgttagatatgccagattcataagtgttca

SEQ ID NO: 674786 - DNA, 33 bp, Homo sapien
tggtgttagatatgccggattcataagtgttca

SEQ ID NO: 674787 - DNA, 33 bp, Homo sapien
caaatgaagaaagagacataaacatagcttctc

SEQ ID NO: 674788 - DNA, 33 bp, Homo sapien
caaatgaagaaagagagataaacatagcttctc

SEQ ID NO: 674789 - DNA, 33 bp, Homo sapien
ttctctctggtagggcaagaccatttcccctgg

SEQ ID NO: 674790 - DNA, 33 bp, Homo sapien
ttctctctggtagggcgagaccatttcccctgg

SEQ ID NO: 674791 - DNA, 33 bp, Homo sapien
gcaggctgtggggccaatgaacgtatgtgagca

SEQ ID NO: 674792 - DNA, 33 bp, Homo sapien
gcaggctgtggggccattgaacgtatgtgagca

SEQ ID NO: 674793 - DNA, 33 bp, Homo sapien
ccactataggagatataagaccatagatgagag

SEQ ID NO: 674794 - DNA, 33 bp, Homo sapien
ccactataggagatatgagaccatagatgagag

SEQ ID NO: 674795 - DNA, 33 bp, Homo sapien
ggtgttcacgcaacaacaaaaatcagttaagat

SEQ ID NO: 674796 - DNA, 33 bp, Homo sapien
ggtgttcacgcaacaataaaaatcagttaagat

SEQ ID NO: 674797 - DNA, 33 bp, Homo sapien
ttgttatttgtgaaggaaaggatcatttttctt

SEQ ID NO: 674798 - DNA, 33 bp, Homo sapien
ttgttatttgtgaagggaaggatcatttttctt

SEQ ID NO: 674799 - DNA, 33 bp, Homo sapien
tcctaactgtgatggcaaaattctccttcagtg

SEQ ID NO: 674800 - DNA, 33 bp, Homo sapien
tcctaactgtgatggccaaattctccttcagtg

SEQ ID NO: 674801 - DNA, 33 bp, Homo sapien
aaatccaaggtgagtccgacctaaatgagtgag

SEQ ID NO: 674802 - DNA, 33 bp, Homo sapien
aaatccaaggtgagtctgacctaaatgagtgag

SEQ ID NO: 674803 - DNA, 33 bp, Homo sapien
aagaagatgttattagaatgacaatacacaaaa

SEQ ID NO: 674804 - DNA, 33 bp, Homo sapien
aagaagatgttattaggatgacaatacacaaaa

SEQ ID NO: 674805 - DNA, 33 bp, Homo sapien
tttctattgcctaaacagtccccatcctacatt

SEQ ID NO: 674806 - DNA, 33 bp, Homo sapien
tttctattgcctaaacggtccccatcctacatt

SEQ ID NO: 674807 - DNA, 33 bp, Homo sapien
ccctgggaaatgaccacactttggaaatgggag

SEQ ID NO: 674808 - DNA, 33 bp, Homo sapien
ccctgggaaatgaccatactttggaaatgggag

SEQ ID NO: 674809 - DNA, 33 bp, Homo sapien
actcacaaacaaggcaacacagtattaaagaga

SEQ ID NO: 674810 - DNA, 33 bp, Homo sapien
actcacaaacaaggcatcacagtattaaagaga

SEQ ID NO: 674811 - DNA, 33 bp, Homo sapien
cttcatacaagcggaaatgcactgatccccaac

SEQ ID NO: 674812 - DNA, 33 bp, Homo sapien
cttcatacaagcggaagtgcactgatccccaac

SEQ ID NO: 674813 - DNA, 33 bp, Homo sapien
caggtgaagtggccatcaattaacaaacttgat

SEQ ID NO: 674814 - DNA, 33 bp, Homo sapien
caggtgaagtggccattaattaacaaacttgat

SEQ ID NO: 674815 - DNA, 33 bp, Homo sapien
ctacagttaatttccaagtcttgaagatttccc

SEQ ID NO: 674816 - DNA, 33 bp, Homo sapien
ctacagttaatttccaggtcttgaagatttccc

SEQ ID NO: 674817 - DNA, 33 bp, Homo sapien
atgatatgctgttagagatatcctagctggtaa

SEQ ID NO: 674818 - DNA, 33 bp, Homo sapien
atgatatgctgttagatatatcctagctggtaa

SEQ ID NO: 674819 - DNA, 33 bp, Homo sapien
atagatctaatagacccctaccggactctccac

SEQ ID NO: 674820 - DNA, 33 bp, Homo sapien
atagatctaatagacctctaccggactctccac

SEQ ID NO: 674821 - DNA, 33 bp, Homo sapien
tcctttgtaaagggcacagtgcaatggtgttcc

SEQ ID NO: 674822 - DNA, 33 bp, Homo sapien
tcctttgtaaagggcatagtgcaatggtgttcc

SEQ ID NO: 674823 - DNA, 33 bp, Homo sapien
ttgctacatttacatcccaacttaacatgactc

SEQ ID NO: 674824 - DNA, 33 bp, Homo sapien
ttgctacatttacatctcaacttaacatgactc

SEQ ID NO: 674825 - DNA, 33 bp, Homo sapien
gtttgctgttctaatgaaaaaagctaacgattt

SEQ ID NO: 674826 - DNA, 33 bp, Homo sapien
gtttgctgttctaatggaaaaagctaacgattt

SEQ ID NO: 674827 - DNA, 33 bp, Homo sapien
ggctagacagttcaatcaatgaaaagtttctgt

SEQ ID NO: 674828 - DNA, 33 bp, Homo sapien
ggctagacagttcaatgaatgaaaagtttctgt

SEQ ID NO: 674829 - DNA, 33 bp, Homo sapien
gagtccaagagaattaagaagagcccaagaaat

SEQ ID NO: 674830 - DNA, 33 bp, Homo sapien
gagtccaagagaattaggaagagcccaagaaat

SEQ ID NO: 674831 - DNA, 33 bp, Homo sapien
aaaacaaattataaagaagcgcttgagatgttt

SEQ ID NO: 674832 - DNA, 33 bp, Homo sapien
aaaacaaattataaaggagcgcttgagatgttt

SEQ ID NO: 674833 - DNA, 33 bp, Homo sapien
tgtttagttgctataaagtttgcaaagctacat

SEQ ID NO: 674834 - DNA, 33 bp, Homo sapien
tgtttagttgctataaggtttgcaaagctacat

SEQ ID NO: 674835 - DNA, 33 bp, Homo sapien
agggtattacgaaaaacaaggaatgaacagata

SEQ ID NO: 674836 - DNA, 33 bp, Homo sapien
agggtattacgaaaaataaggaatgaacagata

SEQ ID NO: 674837 - DNA, 33 bp, Homo sapien
ggcagaagcaacatcacgggcaaagacctagag

SEQ ID NO: 674838 - DNA, 33 bp, Homo sapien
ggcagaagcaacatcatgggcaaagacctagag

SEQ ID NO: 674839 - DNA, 33 bp, Homo sapien
agctgaaaatggtcaacgaagtgaaattagatc

SEQ ID NO: 674840 - DNA, 33 bp, Homo sapien
agctgaaaatggtcaatgaagtgaaattagatc

SEQ ID NO: 674841 - DNA, 33 bp, Homo sapien
aataatttgcataagaaaatgacatttacaaat

SEQ ID NO: 674842 - DNA, 33 bp, Homo sapien
aataatttgcataagagaatgacatttacaaat

SEQ ID NO: 674843 - DNA, 33 bp, Homo sapien
gtgatgggttctgggactcagtcaaaaaatggg

SEQ ID NO: 674844 - DNA, 33 bp, Homo sapien
gtgatgggttctgggattcagtcaaaaaatggg

SEQ ID NO: 674845 - DNA, 33 bp, Homo sapien
tttgtcagggatgggtaaaactggtcagcactg

SEQ ID NO: 674846 - DNA, 33 bp, Homo sapien
tttgtcagggatgggtgaaactggtcagcactg

SEQ ID NO: 674847 - DNA, 33 bp, Homo sapien
tttgtatagttagttacaaatcatttcccaggg

SEQ ID NO: 674848 - DNA, 33 bp, Homo sapien
tttgtatagttagttataaatcatttcccaggg

SEQ ID NO: 674849 - DNA, 33 bp, Homo sapien
tttactgacactttcaataagactcacctaagg

SEQ ID NO: 674850 - DNA, 33 bp, Homo sapien
tttactgacactttcactaagactcacctaagg

SEQ ID NO: 674851 - DNA, 33 bp, Homo sapien
gggtattagtctggagaatttgtcccttacact

SEQ ID NO: 674852 - DNA, 33 bp, Homo sapien
gggtattagtctggagcatttgtcccttacact

SEQ ID NO: 674853 - DNA, 33 bp, Homo sapien
gctatcatagctaccactaaattcctcattgtg

SEQ ID NO: 674854 - DNA, 33 bp, Homo sapien
gctatcatagctaccattaaattcctcattgtg

SEQ ID NO: 674855 - DNA, 33 bp, Homo sapien
aaattatgctatggtacagggaatcccaacatg

SEQ ID NO: 674856 - DNA, 33 bp, Homo sapien
aaattatgctatggtatagggaatcccaacatg

SEQ ID NO: 674857 - DNA, 33 bp, Homo sapien
tccattttaagttgcaaaggtaactcatacaat

SEQ ID NO: 674858 - DNA, 33 bp, Homo sapien
tccattttaagttgcagaggtaactcatacaat

SEQ ID NO: 674859 - DNA, 33 bp, Homo sapien
gaaaagcaattggacacctcctaatgatacatg

SEQ ID NO: 674860 - DNA, 33 bp, Homo sapien
gaaaagcaattggacatctcctaatgatacatg

SEQ ID NO: 674861 - DNA, 33 bp, Homo sapien
tttctgttgatgttacaataggaaaggaagaca

SEQ ID NO: 674862 - DNA, 33 bp, Homo sapien
tttctgttgatgttaccataggaaaggaagaca

SEQ ID NO: 674863 - DNA, 33 bp, Homo sapien
aaatctaactggctcaagatgttattagaaaac

SEQ ID NO: 674864 - DNA, 33 bp, Homo sapien
aaatctaactggctcaggatgttattagaaaac

SEQ ID NO: 674865 - DNA, 33 bp, Homo sapien
tgttttaggtggcgtacggcaaatcatatttca

SEQ ID NO: 674866 - DNA, 33 bp, Homo sapien
tgttttaggtggcgtatggcaaatcatatttca

SEQ ID NO: 674867 - DNA, 33 bp, Homo sapien
tatttgcatcttttcccaatgctaattgctata

SEQ ID NO: 674868 - DNA, 33 bp, Homo sapien
tatttgcatcttttcctaatgctaattgctata

SEQ ID NO: 674869 - DNA, 33 bp, Homo sapien
tcaaaggccccactgtcaacaatctttattctt

SEQ ID NO: 674870 - DNA, 33 bp, Homo sapien
tcaaaggccccactgtgaacaatctttattctt

SEQ ID NO: 674871 - DNA, 33 bp, Homo sapien
tgtgatcatggaaataccttttgtgaaatcttt

SEQ ID NO: 674872 - DNA, 33 bp, Homo sapien
tgtgatcatggaaatatcttttgtgaaatcttt

SEQ ID NO: 674873 - DNA, 33 bp, Homo sapien
aacttgaccattaagaataagaaagcaaacctt

SEQ ID NO: 674874 - DNA, 33 bp, Homo sapien
aacttgaccattaagagtaagaaagcaaacctt

SEQ ID NO: 674875 - DNA, 33 bp, Homo sapien
atcaaaacagtattgcaaacatgattcttacgc

SEQ ID NO: 674876 - DNA, 33 bp, Homo sapien
atcaaaacagtattgcgaacatgattcttacgc

SEQ ID NO: 674877 - DNA, 33 bp, Homo sapien
agatcacagaactaaactgagttgcctgattgt

SEQ ID NO: 674878 - DNA, 33 bp, Homo sapien
agatcacagaactaaattgagttgcctgattgt

SEQ ID NO: 674879 - DNA, 33 bp, Homo sapien
gattctgctggccttccaaattacatcttcatc

SEQ ID NO: 674880 - DNA, 33 bp, Homo sapien
gattctgctggccttctaaattacatcttcatc

SEQ ID NO: 674881 - DNA, 33 bp, Homo sapien
gtaaccaacagaccacaagtgcctaaggtaggc

SEQ ID NO: 674882 - DNA, 33 bp, Homo sapien
gtaaccaacagaccacgagtgcctaaggtaggc

SEQ ID NO: 674883 - DNA, 33 bp, Homo sapien
ctcccttcagtgaacgacctctgaaagccaacc

SEQ ID NO: 674884 - DNA, 33 bp, Homo sapien
ctcccttcagtgaacggcctctgaaagccaacc

SEQ ID NO: 674885 - DNA, 33 bp, Homo sapien
agttaaaagttgtcaacacagtaggcttattca

SEQ ID NO: 674886 - DNA, 33 bp, Homo sapien
agttaaaagttgtcaagacagtaggcttattca

SEQ ID NO: 674887 - DNA, 33 bp, Homo sapien
cttaagaactcatacaactcaggcttataactt

SEQ ID NO: 674888 - DNA, 33 bp, Homo sapien
cttaagaactcatacatctcaggcttataactt

SEQ ID NO: 674889 - DNA, 33 bp, Homo sapien
gtagaatgatagttaccaaaagctaggaaggtt

SEQ ID NO: 674890 - DNA, 33 bp, Homo sapien
gtagaatgatagttactaaaagctaggaaggtt

SEQ ID NO: 674891 - DNA, 33 bp, Homo sapien
aaatttacacggacaacaggaaattttaaaata

SEQ ID NO: 674892 - DNA, 33 bp, Homo sapien
aaatttacacggacaataggaaattttaaaata

SEQ ID NO: 674893 - DNA, 33 bp, Homo sapien
aatttccagacgaataacatatcataatgtata

SEQ ID NO: 674894 - DNA, 33 bp, Homo sapien
aatttccagacgaatagcatatcataatgtata

SEQ ID NO: 674895 - DNA, 33 bp, Homo sapien
gattatgttctgagtacgtatttggccaatgaa

SEQ ID NO: 674896 - DNA, 33 bp, Homo sapien
gattatgttctgagtatgtatttggccaatgaa

SEQ ID NO: 674897 - DNA, 33 bp, Homo sapien
ggaagaaatgttgtaaatcctctttctcatttc

SEQ ID NO: 674898 - DNA, 33 bp, Homo sapien
ggaagaaatgttgtaagtcctctttctcatttc

SEQ ID NO: 674899 - DNA, 33 bp, Homo sapien
agcaacataacaaataatacactttaggaataa

SEQ ID NO: 674900 - DNA, 33 bp, Homo sapien
agcaacataacaaatagtacactttaggaataa

SEQ ID NO: 674901 - DNA, 33 bp, Homo sapien
agctcaatggtctgaaatcaaattcagctcagt

SEQ ID NO: 674902 - DNA, 33 bp, Homo sapien
agctcaatggtctgaactcaaattcagctcagt

SEQ ID NO: 674903 - DNA, 33 bp, Homo sapien
atataaatttatgtggcacaaagtgatgttatg

SEQ ID NO: 674904 - DNA, 33 bp, Homo sapien
atataaatttatgtggtacaaagtgatgttatg

SEQ ID NO: 674905 - DNA, 33 bp, Homo sapien
tgatcctatctatacaactgaagatgcatatat

SEQ ID NO: 674906 - DNA, 33 bp, Homo sapien
tgatcctatctatacagctgaagatgcatatat

SEQ ID NO: 674907 - DNA, 33 bp, Homo sapien
aagtacatcttgcaacaatttccaggaacactc

SEQ ID NO: 674908 - DNA, 33 bp, Homo sapien
aagtacatcttgcaacgatttccaggaacactc

SEQ ID NO: 674909 - DNA, 33 bp, Homo sapien
acttgagctgagaacagtccaccttcaatgtca

SEQ ID NO: 674910 - DNA, 33 bp, Homo sapien
acttgagctgagaacattccaccttcaatgtca

SEQ ID NO: 674911 - DNA, 33 bp, Homo sapien
atattatatgtaaagaaagcattataacctagc

SEQ ID NO: 674912 - DNA, 33 bp, Homo sapien
atattatatgtaaagagagcattataacctagc

SEQ ID NO: 674913 - DNA, 33 bp, Homo sapien
aatgagaggataaagacactgtggataaaaaac

SEQ ID NO: 674914 - DNA, 33 bp, Homo sapien
aatgagaggataaagatactgtggataaaaaac

SEQ ID NO: 674915 - DNA, 33 bp, Homo sapien
tagaaataaataagtaacggtaggatcaaaata

SEQ ID NO: 674916 - DNA, 33 bp, Homo sapien
tagaaataaataagtatcggtaggatcaaaata

SEQ ID NO: 674917 - DNA, 33 bp, Homo sapien
tcaaccatgtggagatcagtgtatgcttagtgg

SEQ ID NO: 674918 - DNA, 33 bp, Homo sapien
tcaaccatgtggagattagtgtatgcttagtgg

SEQ ID NO: 674919 - DNA, 33 bp, Homo sapien
tttgcacacctttcagaccacttctatgacttc

SEQ ID NO: 674920 - DNA, 33 bp, Homo sapien
tttgcacacctttcaggccacttctatgacttc

SEQ ID NO: 674921 - DNA, 33 bp, Homo sapien
ttgccacctttagtataacttctcgtggatgcc

SEQ ID NO: 674922 - DNA, 33 bp, Homo sapien
ttgccacctttagtattacttctcgtggatgcc

SEQ ID NO: 674923 - DNA, 33 bp, Homo sapien
acacaatagggtatctaaaagcagactcacgga

SEQ ID NO: 674924 - DNA, 33 bp, Homo sapien
acacaatagggtatctgaaagcagactcacgga

SEQ ID NO: 674925 - DNA, 33 bp, Homo sapien
gacatgacagctcttcaaagaaaaggggcactc

SEQ ID NO: 674926 - DNA, 33 bp, Homo sapien
gacatgacagctcttccaagaaaaggggcactc

SEQ ID NO: 674927 - DNA, 33 bp, Homo sapien
cccgagataagggtcccagaatgaaattgtgaa

SEQ ID NO: 674928 - DNA, 33 bp, Homo sapien
cccgagataagggtcctagaatgaaattgtgaa

SEQ ID NO: 674929 - DNA, 33 bp, Homo sapien
ttgaattctagtcataaaagttggacagcttct

SEQ ID NO: 674930 - DNA, 33 bp, Homo sapien
ttgaattctagtcatataagttggacagcttct

SEQ ID NO: 674931 - DNA, 33 bp, Homo sapien
ttcagcaaatatcacaagtatgcaaatgcttca

SEQ ID NO: 674932 - DNA, 33 bp, Homo sapien
ttcagcaaatatcacaggtatgcaaatgcttca

SEQ ID NO: 674933 - DNA, 33 bp, Homo sapien
tttagaccaaaatatagctagagcttactgttt

SEQ ID NO: 674934 - DNA, 33 bp, Homo sapien
tttagaccaaaatatatctagagcttactgttt

SEQ ID NO: 674935 - DNA, 33 bp, Homo sapien
ctgtatagggcacttagcgtcagtagagcttgc

SEQ ID NO: 674936 - DNA, 33 bp, Homo sapien
ctgtatagggcacttatcgtcagtagagcttgc

SEQ ID NO: 674937 - DNA, 33 bp, Homo sapien
cccagatggtttgaacgaggaattaaagtatgt

SEQ ID NO: 674938 - DNA, 33 bp, Homo sapien
cccagatggtttgaactaggaattaaagtatgt

SEQ ID NO: 674939 - DNA, 33 bp, Homo sapien
aattcaggtttggccaagttgagctaaggtgtt

SEQ ID NO: 674940 - DNA, 33 bp, Homo sapien
aattcaggtttggccaggttgagctaaggtgtt

SEQ ID NO: 674941 - DNA, 33 bp, Homo sapien
tctctcagcactctcaaacacctttcagacaat

SEQ ID NO: 674942 - DNA, 33 bp, Homo sapien
tctctcagcactctcacacacctttcagacaat

SEQ ID NO: 674943 - DNA, 33 bp, Homo sapien
acttcatcatgagttgaaatctaactgacttga

SEQ ID NO: 674944 - DNA, 33 bp, Homo sapien
acttcatcatgagttggaatctaactgacttga

SEQ ID NO: 674945 - DNA, 33 bp, Homo sapien
aatgcagaatttcatacgggaagtattattggc

SEQ ID NO: 674946 - DNA, 33 bp, Homo sapien
aatgcagaatttcatatgggaagtattattggc

SEQ ID NO: 674947 - DNA, 33 bp, Homo sapien
tgacgtatcagaaaatgatgtatgtcactaaac

SEQ ID NO: 674948 - DNA, 33 bp, Homo sapien
tgacgtatcagaaaattatgtatgtcactaaac

SEQ ID NO: 674949 - DNA, 33 bp, Homo sapien
aaaatgaatgatttgaaccggaaattccacctg

SEQ ID NO: 674950 - DNA, 33 bp, Homo sapien
aaaatgaatgatttgacccggaaattccacctg

SEQ ID NO: 674951 - DNA, 33 bp, Homo sapien
atctcacataactccccatcctactttccaccc

SEQ ID NO: 674952 - DNA, 33 bp, Homo sapien
atctcacataactccctatcctactttccaccc

SEQ ID NO: 674953 - DNA, 33 bp, Homo sapien
tatggtggggtaaggacgaagttttttggtgcg

SEQ ID NO: 674954 - DNA, 33 bp, Homo sapien
tatggtggggtaaggatgaagttttttggtgcg

SEQ ID NO: 674955 - DNA, 33 bp, Homo sapien
ttttatggatgaggaaaataaggtgcacagagg

SEQ ID NO: 674956 - DNA, 33 bp, Homo sapien
ttttatggatgaggaagataaggtgcacagagg

SEQ ID NO: 674957 - DNA, 33 bp, Homo sapien
cacccggaaccggcacactggtgactcagagct

SEQ ID NO: 674958 - DNA, 33 bp, Homo sapien
cacccggaaccggcacgctggtgactcagagct

SEQ ID NO: 674959 - DNA, 33 bp, Homo sapien
ataaattatcacaaacaaaatagtattcaatac

SEQ ID NO: 674960 - DNA, 33 bp, Homo sapien
ataaattatcacaaaccaaatagtattcaatac

SEQ ID NO: 674961 - DNA, 33 bp, Homo sapien
acatgttgttgtactacggatatataggggtga

SEQ ID NO: 674962 - DNA, 33 bp, Homo sapien
acatgttgttgtactatggatatataggggtga

SEQ ID NO: 674963 - DNA, 33 bp, Homo sapien
aactgtgtttgtagaaggtgagaaaatgtgaac

SEQ ID NO: 674964 - DNA, 33 bp, Homo sapien
aactgtgtttgtagaatgtgagaaaatgtgaac

SEQ ID NO: 674965 - DNA, 33 bp, Homo sapien
tcggccttgatttcagcactcatcaggttcttg

SEQ ID NO: 674966 - DNA, 33 bp, Homo sapien
tcggccttgatttcaggactcatcaggttcttg

SEQ ID NO: 674967 - DNA, 33 bp, Homo sapien
aaaacaagggaaaaacacattgccaagaatatt

SEQ ID NO: 674968 - DNA, 33 bp, Homo sapien
aaaacaagggaaaaacgcattgccaagaatatt

SEQ ID NO: 674969 - DNA, 33 bp, Homo sapien
attttgctcaagaacaaatcacatacatgaggg

SEQ ID NO: 674970 - DNA, 33 bp, Homo sapien
attttgctcaagaacagatcacatacatgaggg

SEQ ID NO: 674971 - DNA, 33 bp, Homo sapien
agtaagccttactacaaaggataaaagaatgat

SEQ ID NO: 674972 - DNA, 33 bp, Homo sapien
agtaagccttactacagaggataaaagaatgat

SEQ ID NO: 674973 - DNA, 33 bp, Homo sapien; identical to SEQ ID NO: 674971

SEQ ID NO: 674974 - DNA, 33 bp, Homo sapien; identical to SEQ ID NO: 674972

SEQ ID NO: 674975 - DNA, 33 bp, Homo sapien
catcatcaaactctgactaaaatggagaaaaaa

SEQ ID NO: 674976 - DNA, 33 bp, Homo sapien
catcatcaaactctgagtaaaatggagaaaaaa

SEQ ID NO: 674977 - DNA, 33 bp, Homo sapien
taatgagagatggcaaaaagaatgctcaaggta

SEQ ID NO: 674978 - DNA, 33 bp, Homo sapien
taatgagagatggcaagaagaatgctcaaggta

SEQ ID NO: 674979 - DNA, 33 bp, Homo sapien
taactgtgatgtcctgcatttataagtgcctaa

SEQ ID NO: 674980 - DNA, 33 bp, Homo sapien
taactgtgatgtcctgtatttataagtgcctaa

SEQ ID NO: 674981 - DNA, 33 bp, Homo sapien
ttctgctttttgcatacagtaccaagtttacca

SEQ ID NO: 674982 - DNA, 33 bp, Homo sapien
ttctgctttttgcatatagtaccaagtttacca

SEQ ID NO: 674983 - DNA, 33 bp, Homo sapien
gcacatcaccttgccaatccattagtctatttc

SEQ ID NO: 674984 - DNA, 33 bp, Homo sapien
gcacatcaccttgccattccattagtctatttc

SEQ ID NO: 674985 - DNA, 33 bp, Homo sapien
ttttcttatgaccttacgcgtacaggacaaaat

SEQ ID NO: 674986 - DNA, 33 bp, Homo sapien
ttttcttatgaccttatgcgtacaggacaaaat

SEQ ID NO: 674987 - DNA, 33 bp, Homo sapien
tgggagtattttctaacactttactcagaatga

SEQ ID NO: 674988 - DNA, 33 bp, Homo sapien
tgggagtattttctaagactttactcagaatga

SEQ ID NO: 674989 - DNA, 33 bp, Homo sapien
cagctattatcaatcaagaagttggtatttgaa

SEQ ID NO: 674990 - DNA, 33 bp, Homo sapien
cagctattatcaatcaggaagttggtatttgaa

SEQ ID NO: 674991 - DNA, 33 bp, Homo sapien
tacttccaagggacaactcacttctgtatacct

SEQ ID NO: 674992 - DNA, 33 bp, Homo sapien
tacttccaagggacaattcacttctgtatacct

SEQ ID NO: 674993 - DNA, 33 bp, Homo sapien
gtattttgtaaaactacaggctcttttctcata

SEQ ID NO: 674994 - DNA, 33 bp, Homo sapien
gtattttgtaaaactataggctcttttctcata

SEQ ID NO: 674995 - DNA, 33 bp, Homo sapien
ttgagtctcaacacaaactttaaaactataaag

SEQ ID NO: 674996 - DNA, 33 bp, Homo sapien
ttgagtctcaacacaagctttaaaactataaag

SEQ ID NO: 674997 - DNA, 33 bp, Homo sapien
attcaatttatctacccgcttcaggacaagaat

SEQ ID NO: 674998 - DNA, 33 bp, Homo sapien
attcaatttatctacctgcttcaggacaagaat

SEQ ID NO: 674999 - DNA, 33 bp, Homo sapien
tatcctatagtgctaacgagaggaaaaatcagg

SEQ ID NO: 675000 - DNA, 33 bp, Homo sapien
tatcctatagtgctaatgagaggaaaaatcagg

SEQ ID NO: 675001 - DNA, 33 bp, Homo sapien
atttttatcttatctaacctctcagtgctttca

SEQ ID NO: 675002 - DNA, 33 bp, Homo sapien
atttttatcttatctatcctctcagtgctttca

SEQ ID NO: 675003 - DNA, 33 bp, Homo sapien
cttagagactctagaaaaactatgcctaggaaa

SEQ ID NO: 675004 - DNA, 33 bp, Homo sapien
cttagagactctagaagaactatgcctaggaaa

SEQ ID NO: 675005 - DNA, 33 bp, Homo sapien
gtgtagcacctgttaacatcgaaccctttttca

SEQ ID NO: 675006 - DNA, 33 bp, Homo sapien
gtgtagcacctgttaatatcgaaccctttttca

SEQ ID NO: 675007 - DNA, 33 bp, Homo sapien
aggtgtttgttacgcaatgatgactaagataca

SEQ ID NO: 675008 - DNA, 33 bp, Homo sapien
aggtgtttgttacgcagtgatgactaagataca

SEQ ID NO: 675009 - DNA, 33 bp, Homo sapien
aaagtataactggctacctgagaacattcaatt

SEQ ID NO: 675010 - DNA, 33 bp, Homo sapien
aaagtataactggctatctgagaacattcaatt

SEQ ID NO: 675011 - DNA, 33 bp, Homo sapien
ggctttaggttttcaacgtgcttatgaaaatgg

SEQ ID NO: 675012 - DNA, 33 bp, Homo sapien
ggctttaggttttcaatgtgcttatgaaaatgg

SEQ ID NO: 675013 - DNA, 33 bp, Homo sapien
aatagctgaaccaaccgctcaaactcatattcc

SEQ ID NO: 675014 - DNA, 33 bp, Homo sapien
aatagctgaaccaacctctcaaactcatattcc

SEQ ID NO: 675015 - DNA, 33 bp, Homo sapien
tctttcattctcaggagtacatttgacatgagt

SEQ ID NO: 675016 - DNA, 33 bp, Homo sapien
tctttcattctcaggattacatttgacatgagt

SEQ ID NO: 675017 - DNA, 33 bp, Homo sapien
agcctctgacaaacgaagattcttcacagaaga

SEQ ID NO: 675018 - DNA, 33 bp, Homo sapien
agcctctgacaaacgaggattcttcacagaaga

SEQ ID NO: 675019 - DNA, 33 bp, Homo sapien
ttgcattacacttcaaccaaaaattatggctca

SEQ ID NO: 675020 - DNA, 33 bp, Homo sapien
ttgcattacacttcaatcaaaaattatggctca

SEQ ID NO: 675021 - DNA, 33 bp, Homo sapien
ccaagcaggtaggagtaaaggaattcaaagtag

SEQ ID NO: 675022 - DNA, 33 bp, Homo sapien
ccaagcaggtaggagtcaaggaattcaaagtag

SEQ ID NO: 675023 - DNA, 33 bp, Homo sapien
ttttaagtctctgaaaaagtagcaaagatattt

SEQ ID NO: 675024 - DNA, 33 bp, Homo sapien
ttttaagtctctgaaacagtagcaaagatattt

SEQ ID NO: 675025 - DNA, 33 bp, Homo sapien
ttgcaaagcctactgacgtgctagatatttaaa

SEQ ID NO: 675026 - DNA, 33 bp, Homo sapien
ttgcaaagcctactgatgtgctagatatttaaa

SEQ ID NO: 675027 - DNA, 33 bp, Homo sapien
tgctgaacaaaataataaccgtctcaaaaataa

SEQ ID NO: 675028 - DNA, 33 bp, Homo sapien
tgctgaacaaaataatcaccgtctcaaaaataa

SEQ ID NO: 675029 - DNA, 33 bp, Homo sapien
aacttactttgaacaaacatttcccagtgcgca

SEQ ID NO: 675030 - DNA, 33 bp, Homo sapien
aacttactttgaacaagcatttcccagtgcgca

SEQ ID NO: 675031 - DNA, 33 bp, Homo sapien
aatggaaatgccaagaagaaaagtgacatgata

SEQ ID NO: 675032 - DNA, 33 bp, Homo sapien
aatggaaatgccaagaggaaaagtgacatgata

SEQ ID NO: 675033 - DNA, 33 bp, Homo sapien
ctagattatagctagactcaacactagagtaaa

SEQ ID NO: 675034 - DNA, 33 bp, Homo sapien
ctagattatagctagattcaacactagagtaaa

SEQ ID NO: 675035 - DNA, 33 bp, Homo sapien
gttgcatttgttataccggtgactattatagac

SEQ ID NO: 675036 - DNA, 33 bp, Homo sapien
gttgcatttgttatacgggtgactattatagac

SEQ ID NO: 675037 - DNA, 33 bp, Homo sapien
attaaaaactattgtcagaactcttaaataata

SEQ ID NO: 675038 - DNA, 33 bp, Homo sapien
attaaaaactattgtcggaactcttaaataata

SEQ ID NO: 675039 - DNA, 33 bp, Homo sapien
acaatatggtgataaacatgcatgcatacagaa

SEQ ID NO: 675040 - DNA, 33 bp, Homo sapien
acaatatggtgataaagatgcatgcatacagaa

SEQ ID NO: 675041 - DNA, 33 bp, Homo sapien
gtatcatctcagagtacagcataagttcagtat

SEQ ID NO: 675042 - DNA, 33 bp, Homo sapien
gtatcatctcagagtatagcataagttcagtat

SEQ ID NO: 675043 - DNA, 33 bp, Homo sapien
ttattttgtgatctaaatacattgtatcttgtt

SEQ ID NO: 675044 - DNA, 33 bp, Homo sapien
ttattttgtgatctaattacattgtatcttgtt

SEQ ID NO: 675045 - DNA, 33 bp, Homo sapien
catctggatttttataggtgattttgctttcta

SEQ ID NO: 675046 - DNA, 33 bp, Homo sapien
catctggatttttatatgtgattttgctttcta

SEQ ID NO: 675047 - DNA, 33 bp, Homo sapien
acaaagaaaatgcataataagtatgtagagtag

SEQ ID NO: 675048 - DNA, 33 bp, Homo sapien
acaaagaaaatgcatagtaagtatgtagagtag

SEQ ID NO: 675049 - DNA, 33 bp, Homo sapien
ttacaaaaatgtttgaagctaaggaaagtaaag

SEQ ID NO: 675050 - DNA, 33 bp, Homo sapien
ttacaaaaatgtttgacgctaaggaaagtaaag

SEQ ID NO: 675051 - DNA, 33 bp, Homo sapien
agtatatttaaaagcaacccaagagcttacatc

SEQ ID NO: 675052 - DNA, 33 bp, Homo sapien
agtatatttaaaagcagcccaagagcttacatc

SEQ ID NO: 675053 - DNA, 33 bp, Homo sapien
aaggaagactttggaaattataaaacacattat

SEQ ID NO: 675054 - DNA, 33 bp, Homo sapien
aaggaagactttggaagttataaaacacattat

SEQ ID NO: 675055 - DNA, 33 bp, Homo sapien
ttgatttgaaatttgacgtcattaattgcgtat

SEQ ID NO: 675056 - DNA, 33 bp, Homo sapien
ttgatttgaaatttgatgtcattaattgcgtat

SEQ ID NO: 675057 - DNA, 33 bp, Homo sapien
ggtgggtcagactagtgacatctcagtgatcag

SEQ ID NO: 675058 - DNA, 33 bp, Homo sapien
ggtgggtcagactagttacatctcagtgatcag

SEQ ID NO: 675059 - DNA, 33 bp, Homo sapien
ttagaggactagatgacggtcttcaagttgaat

SEQ ID NO: 675060 - DNA, 33 bp, Homo sapien
ttagaggactagatgatggtcttcaagttgaat

SEQ ID NO: 675061 - DNA, 33 bp, Homo sapien
gtttgaaaaagtatacgcatatttgcataacaa

SEQ ID NO: 675062 - DNA, 33 bp, Homo sapien
gtttgaaaaagtatactcatatttgcataacaa

SEQ ID NO: 675063 - DNA, 33 bp, Homo sapien
ctgtacattggaactcaaaagatcagagtggat

SEQ ID NO: 675064 - DNA, 33 bp, Homo sapien
ctgtacattggaactcgaaagatcagagtggat

SEQ ID NO: 675065 - DNA, 33 bp, Homo sapien
atttgcttaccttatacgatttgaataatgtat

SEQ ID NO: 675066 - DNA, 33 bp, Homo sapien
atttgcttaccttatatgatttgaataatgtat

SEQ ID NO: 675067 - DNA, 33 bp, Homo sapien
ggtaatggcccttacaactggagcaaagaaatc

SEQ ID NO: 675068 - DNA, 33 bp, Homo sapien
ggtaatggcccttacacctggagcaaagaaatc

SEQ ID NO: 675069 - DNA, 33 bp, Homo sapien
aatgtttcaattaacaaggcactattttatgag

SEQ ID NO: 675070 - DNA, 33 bp, Homo sapien
aatgtttcaattaacagggcactattttatgag

SEQ ID NO: 675071 - DNA, 33 bp, Homo sapien
gtacagaatgcttctcacaacaggtgcaatggt

SEQ ID NO: 675072 - DNA, 33 bp, Homo sapien
gtacagaatgcttctcccaacaggtgcaatggt

SEQ ID NO: 675073 - DNA, 33 bp, Homo sapien
tcatatttgccaagagaacagtaaaatgataaa

SEQ ID NO: 675074 - DNA, 33 bp, Homo sapien
tcatatttgccaagaggacagtaaaatgataaa

SEQ ID NO: 675075 - DNA, 33 bp, Homo sapien
gaaactgagcacaaagaagttaagaaaactggc

SEQ ID NO: 675076 - DNA, 33 bp, Homo sapien
gaaactgagcacaaagcagttaagaaaactggc

SEQ ID NO: 675077 - DNA, 33 bp, Homo sapien
agaatcaagattccaacctaacattctatcacc

SEQ ID NO: 675078 - DNA, 33 bp, Homo sapien
agaatcaagattccaatctaacattctatcacc

SEQ ID NO: 675079 - DNA, 33 bp, Homo sapien
actggatttctaaaacaccttttatcttctgct

SEQ ID NO: 675080 - DNA, 33 bp, Homo sapien
actggatttctaaaacgccttttatcttctgct

SEQ ID NO: 675081 - DNA, 33 bp, Homo sapien
tctgctgaaatgactacctctctgatttatcat

SEQ ID NO: 675082 - DNA, 33 bp, Homo sapien
tctgctgaaatgactatctctctgatttatcat

SEQ ID NO: 675083 - DNA, 33 bp, Homo sapien
agtagaagcgaatcataatatggatttagaata

SEQ ID NO: 675084 - DNA, 33 bp, Homo sapien
agtagaagcgaatcatgatatggatttagaata

SEQ ID NO: 675085 - DNA, 33 bp, Homo sapien
tctggacatttttgagccataaagccatcttac

SEQ ID NO: 675086 - DNA, 33 bp, Homo sapien
tctggacatttttgagtcataaagccatcttac

SEQ ID NO: 675087 - DNA, 33 bp, Homo sapien
ctcttgttttactcacacctttttaatcatgtt

SEQ ID NO: 675088 - DNA, 33 bp, Homo sapien
ctcttgttttactcacgcctttttaatcatgtt

SEQ ID NO: 675089 - DNA, 33 bp, Homo sapien
gcggaatcccagcgagcaagagctgagtgcagc

SEQ ID NO: 675090 - DNA, 33 bp, Homo sapien
gcggaatcccagcgaggaagagctgagtgcagc

SEQ ID NO: 675091 - DNA, 33 bp, Homo sapien
tttataggtttggaataaggaggctctgaccgg

SEQ ID NO: 675092 - DNA, 33 bp, Homo sapien
tttataggtttggaatgaggaggctctgaccgg

SEQ ID NO: 675093 - DNA, 33 bp, Homo sapien
tatttaaactccacataacctcaggtctatttt

SEQ ID NO: 675094 - DNA, 33 bp, Homo sapien
tatttaaactccacattacctcaggtctatttt

SEQ ID NO: 675095 - DNA, 33 bp, Homo sapien
aaaaaggtaataacacccataatgtttgaaaca

SEQ ID NO: 675096 - DNA, 33 bp, Homo sapien
aaaaaggtaataacactcataatgtttgaaaca

SEQ ID NO: 675097 - DNA, 33 bp, Homo sapien
tgtcggccgtagcctcaaataaacctgggtttg

SEQ ID NO: 675098 - DNA, 33 bp, Homo sapien
tgtcggccgtagcctcgaataaacctgggtttg

SEQ ID NO: 675099 - DNA, 33 bp, Homo sapien
aaagttttgtaaaatacatgaatgaacaaagca

SEQ ID NO: 675100 - DNA, 33 bp, Homo sapien
aaagttttgtaaaatagatgaatgaacaaagca

SEQ ID NO: 675101 - DNA, 33 bp, Homo sapien
gcatgggaataaacaaaaacaatgtgattgctt

SEQ ID NO: 675102 - DNA, 33 bp, Homo sapien
gcatgggaataaacaagaacaatgtgattgctt

SEQ ID NO: 675103 - DNA, 33 bp, Homo sapien
tatctgagttccataactggtgacagaaatgtt

SEQ ID NO: 675104 - DNA, 33 bp, Homo sapien
tatctgagttccataattggtgacagaaatgtt

SEQ ID NO: 675105 - DNA, 33 bp, Homo sapien
aacaaggagttcaaaaatctcaataacttacag

SEQ ID NO: 675106 - DNA, 33 bp, Homo sapien
aacaaggagttcaaaagtctcaataacttacag

SEQ ID NO: 675107 - DNA, 33 bp, Homo sapien
tgctttacctattgacaagttcctgagttggca

SEQ ID NO: 675108 - DNA, 33 bp, Homo sapien
tgctttacctattgaccagttcctgagttggca

SEQ ID NO: 675109 - DNA, 33 bp, Homo sapien
taattgacgtggatgacggcagatagtaagtag

SEQ ID NO: 675110 - DNA, 33 bp, Homo sapien
taattgacgtggatgatggcagatagtaagtag

SEQ ID NO: 675111 - DNA, 33 bp, Homo sapien
aaatttgccatttaagacaccatttaggaattt

SEQ ID NO: 675112 - DNA, 33 bp, Homo sapien
aaatttgccatttaagccaccatttaggaattt

SEQ ID NO: 675113 - DNA, 33 bp, Homo sapien
tctaaccatattctgacgttgtagagacaatag

SEQ ID NO: 675114 - DNA, 33 bp, Homo sapien
tctaaccatattctgatgttgtagagacaatag

SEQ ID NO: 675115 - DNA, 33 bp, Homo sapien
tagaaagaccagagccactttagaataatcact

SEQ ID NO: 675116 - DNA, 33 bp, Homo sapien
tagaaagaccagagccgctttagaataatcact

SEQ ID NO: 675117 - DNA, 33 bp, Homo sapien
taatctcattcaaatactacacagtttaatggc

SEQ ID NO: 675118 - DNA, 33 bp, Homo sapien
taatctcattcaaatattacacagtttaatggc

SEQ ID NO: 675119 - DNA, 33 bp, Homo sapien
tcatccctacagtctccgaatctgttgtgattt

SEQ ID NO: 675120 - DNA, 33 bp, Homo sapien
tcatccctacagtctctgaatctgttgtgattt

SEQ ID NO: 675121 - DNA, 33 bp, Homo sapien
ttaacttacagcttaaatgaaaggtataaacta

SEQ ID NO: 675122 - DNA, 33 bp, Homo sapien
ttaacttacagcttaagtgaaaggtataaacta

SEQ ID NO: 675123 - DNA, 33 bp, Homo sapien
tgcattgtaattttacagatggtgaatagttat

SEQ ID NO: 675124 - DNA, 33 bp, Homo sapien
tgcattgtaattttacggatggtgaatagttat

SEQ ID NO: 675125 - DNA, 33 bp, Homo sapien
tgttctttccactctactactgtgtttcctggt

SEQ ID NO: 675126 - DNA, 33 bp, Homo sapien
tgttctttccactctattactgtgtttcctggt

SEQ ID NO: 675127 - DNA, 33 bp, Homo sapien
aagctcttttcctgccaccaaccacgtaagatg

SEQ ID NO: 675128 - DNA, 33 bp, Homo sapien
aagctcttttcctgccgccaaccacgtaagatg

SEQ ID NO: 675129 - DNA, 33 bp, Homo sapien
caaacagcagttagataaataaaccaaaattaa

SEQ ID NO: 675130 - DNA, 33 bp, Homo sapien
caaacagcagttagattaataaaccaaaattaa

SEQ ID NO: 675131 - DNA, 33 bp, Homo sapien
aaaggtacaattatagaaggagaccaaggagga

SEQ ID NO: 675132 - DNA, 33 bp, Homo sapien
aaaggtacaattataggaggagaccaaggagga

SEQ ID NO: 675133 - DNA, 33 bp, Homo sapien
cgtctcaataaaagtgacactaaacactggaat

SEQ ID NO: 675134 - DNA, 33 bp, Homo sapien
cgtctcaataaaagtgccactaaacactggaat

SEQ ID NO: 675135 - DNA, 33 bp, Homo sapien
ttttataagcatggtcactttcttgtctttttc

SEQ ID NO: 675136 - DNA, 33 bp, Homo sapien
ttttataagcatggtcgctttcttgtctttttc

SEQ ID NO: 675137 - DNA, 33 bp, Homo sapien
cactagtcattatatccatttcaagcaaaaggg

SEQ ID NO: 675138 - DNA, 33 bp, Homo sapien
cactagtcattatatctatttcaagcaaaaggg

SEQ ID NO: 675139 - DNA, 33 bp, Homo sapien
tcccacttgggtcaaacgttgtgcagttttacc

SEQ ID NO: 675140 - DNA, 33 bp, Homo sapien
tcccacttgggtcaaaggttgtgcagttttacc

SEQ ID NO: 675141 - DNA, 33 bp, Homo sapien
ctagattgacttgccacgggctcatacatttaa

SEQ ID NO: 675142 - DNA, 33 bp, Homo sapien
ctagattgacttgccatgggctcatacatttaa

SEQ ID NO: 675143 - DNA, 33 bp, Homo sapien
attaggatggctgaacaaggtatccaaaggcaa

SEQ ID NO: 675144 - DNA, 33 bp, Homo sapien
attaggatggctgaaccaggtatccaaaggcaa

SEQ ID NO: 675145 - DNA, 33 bp, Homo sapien
attaaaaatctggataataaaatgtaaatggta

SEQ ID NO: 675146 - DNA, 33 bp, Homo sapien
attaaaaatctggatactaaaatgtaaatggta

SEQ ID NO: 675147 - DNA, 33 bp, Homo sapien
aagatctgtgttatggacagactaggaaagaac

SEQ ID NO: 675148 - DNA, 33 bp, Homo sapien
aagatctgtgttatggccagactaggaaagaac

SEQ ID NO: 675149 - DNA, 33 bp, Homo sapien
aatgtgtcattatttacagctgattcattccac

SEQ ID NO: 675150 - DNA, 33 bp, Homo sapien
aatgtgtcattatttatagctgattcattccac

SEQ ID NO: 675151 - DNA, 33 bp, Homo sapien
cattgttatttgtcccaagcaagaagagaagaa

SEQ ID NO: 675152 - DNA, 33 bp, Homo sapien
cattgttatttgtcccgagcaagaagagaagaa

SEQ ID NO: 675153 - DNA, 33 bp, Homo sapien
ataaaccagtatctcaatctaaaagtaaatatg

SEQ ID NO: 675154 - DNA, 33 bp, Homo sapien
ataaaccagtatctcagtctaaaagtaaatatg

SEQ ID NO: 675155 - DNA, 33 bp, Homo sapien
ttgcaacctcaagaataaatgagttttaatgga

SEQ ID NO: 675156 - DNA, 33 bp, Homo sapien
ttgcaacctcaagaattaatgagttttaatgga

SEQ ID NO: 675157 - DNA, 33 bp, Homo sapien
ttcacaggtaaaggaaacttttcatgatctagt

SEQ ID NO: 675158 - DNA, 33 bp, Homo sapien
ttcacaggtaaaggaagcttttcatgatctagt

SEQ ID NO: 675159 - DNA, 33 bp, Homo sapien
tcaaatcacctatacaatacaattcaattcaat

SEQ ID NO: 675160 - DNA, 33 bp, Homo sapien
tcaaatcacctatacagtacaattcaattcaat

SEQ ID NO: 675161 - DNA, 33 bp, Homo sapien
ggacaagggtggccaaggtacattcacctcagg

SEQ ID NO: 675162 - DNA, 33 bp, Homo sapien
ggacaagggtggccaatgtacattcacctcagg

SEQ ID NO: 675163 - DNA, 33 bp, Homo sapien
tcttctcttcatggaaatattttaagggtgctg

SEQ ID NO: 675164 - DNA, 33 bp, Homo sapien
tcttctcttcatggaattattttaagggtgctg

SEQ ID NO: 675165 - DNA, 33 bp, Homo sapien
cacttattagtgagaacttatgctcaggatatc

SEQ ID NO: 675166 - DNA, 33 bp, Homo sapien
cacttattagtgagaagttatgctcaggatatc

SEQ ID NO: 675167 - DNA, 33 bp, Homo sapien
tctatgactgtgtatacgttaagactgtcatat

SEQ ID NO: 675168 - DNA, 33 bp, Homo sapien
tctatgactgtgtatatgttaagactgtcatat

SEQ ID NO: 675169 - DNA, 33 bp, Homo sapien
cagcaaagactctgccaaaaactgctgcttatt

SEQ ID NO: 675170 - DNA, 33 bp, Homo sapien
cagcaaagactctgccgaaaactgctgcttatt

SEQ ID NO: 675171 - DNA, 33 bp, Homo sapien
tcacgatctcatcgaaacctaattacctaccaa

SEQ ID NO: 675172 - DNA, 33 bp, Homo sapien
tcacgatctcatcgaagcctaattacctaccaa

SEQ ID NO: 675173 - DNA, 33 bp, Homo sapien
gataggtgtgaaaagggagaatgaagaaaatca

SEQ ID NO: 675174 - DNA, 33 bp, Homo sapien
gataggtgtgaaaaggtagaatgaagaaaatca

SEQ ID NO: 675175 - DNA, 33 bp, Homo sapien
tcactctgacccttcaataaaagcacttgccca

SEQ ID NO: 675176 - DNA, 33 bp, Homo sapien
tcactctgacccttcagtaaaagcacttgccca

SEQ ID NO: 675177 - DNA, 33 bp, Homo sapien
catgccgtggctgcaaatctgctctacactatc

SEQ ID NO: 675178 - DNA, 33 bp, Homo sapien
catgccgtggctgcaactctgctctacactatc

SEQ ID NO: 675179 - DNA, 33 bp, Homo sapien
gtataagcctttctggaacgagctggtaagtaa

SEQ ID NO: 675180 - DNA, 33 bp, Homo sapien
gtataagcctttctgggacgagctggtaagtaa

SEQ ID NO: 675181 - DNA, 33 bp, Homo sapien
gggtaagagagagtaactgaaaattggggtaaa

SEQ ID NO: 675182 - DNA, 33 bp, Homo sapien
gggtaagagagagtaagtgaaaattggggtaaa

SEQ ID NO: 675183 - DNA, 33 bp, Homo sapien
tttgaagttgggtaataatggtgctttcatctt

SEQ ID NO: 675184 - DNA, 33 bp, Homo sapien
tttgaagttgggtaatgatggtgctttcatctt

SEQ ID NO: 675185 - DNA, 33 bp, Homo sapien
cagtcattaagaaagcagacttcagtatcagaa

SEQ ID NO: 675186 - DNA, 33 bp, Homo sapien
cagtcattaagaaagccgacttcagtatcagaa

SEQ ID NO: 675187 - DNA, 33 bp, Homo sapien
tgatatcatttgagaacactacttgaaacaaac

SEQ ID NO: 675188 - DNA, 33 bp, Homo sapien
tgatatcatttgagaatactacttgaaacaaac

SEQ ID NO: 675189 - DNA, 33 bp, Homo sapien
acttggtgaaattccacaaagtttttaagaagt

SEQ ID NO: 675190 - DNA, 33 bp, Homo sapien
acttggtgaaattccagaaagtttttaagaagt

SEQ ID NO: 675191 - DNA, 33 bp, Homo sapien
tatcaataactcctccccatgtttgtggccttt

SEQ ID NO: 675192 - DNA, 33 bp, Homo sapien
tatcaataactcctcctcatgtttgtggccttt

SEQ ID NO: 675193 - DNA, 33 bp, Homo sapien
gagctctacagtcagaagacacagaatagttcc

SEQ ID NO: 675194 - DNA, 33 bp, Homo sapien
gagctctacagtcagaggacacagaatagttcc

SEQ ID NO: 675195 - DNA, 33 bp, Homo sapien
ccctccacccaagatacagacatggcttctgtt

SEQ ID NO: 675196 - DNA, 33 bp, Homo sapien
ccctccacccaagatatagacatggcttctgtt

SEQ ID NO: 675197 - DNA, 33 bp, Homo sapien
tttaaaaatggtgataaaaacactgagtaaagc

SEQ ID NO: 675198 - DNA, 33 bp, Homo sapien
tttaaaaatggtgatagaaacactgagtaaagc

SEQ ID NO: 675199 - DNA, 33 bp, Homo sapien
tgcagataggatgtcaagattgaatgacagact

SEQ ID NO: 675200 - DNA, 33 bp, Homo sapien
tgcagataggatgtcaggattgaatgacagact

SEQ ID NO: 675201 - DNA, 33 bp, Homo sapien
accattaggaccagggccaaattacaaaataac

SEQ ID NO: 675202 - DNA, 33 bp, Homo sapien
accattaggaccagggtcaaattacaaaataac

SEQ ID NO: 675203 - DNA, 33 bp, Homo sapien
tatttattttacattgaaaacctctttagtgta

SEQ ID NO: 675204 - DNA, 33 bp, Homo sapien
tatttattttacattggaaacctctttagtgta

SEQ ID NO: 675205 - DNA, 33 bp, Homo sapien
cttctgcataacttgcagcaacttctatgtcag

SEQ ID NO: 675206 - DNA, 33 bp, Homo sapien
cttctgcataacttgctgcaacttctatgtcag

SEQ ID NO: 675207 - DNA, 33 bp, Homo sapien
aagggcataaattctcaaatgtgactgtaaagg

SEQ ID NO: 675208 - DNA, 33 bp, Homo sapien
aagggcataaattctcgaatgtgactgtaaagg

SEQ ID NO: 675209 - DNA, 33 bp, Homo sapien
attaataaacttggagacataacaacagaagta

SEQ ID NO: 675210 - DNA, 33 bp, Homo sapien
attaataaacttggagtcataacaacagaagta

SEQ ID NO: 675211 - DNA, 33 bp, Homo sapien
tatccatctcaatgtaccctcaaaagaaacaaa

SEQ ID NO: 675212 - DNA, 33 bp, Homo sapien
tatccatctcaatgtatcctcaaaagaaacaaa

SEQ ID NO: 675213 - DNA, 33 bp, Homo sapien
ggtcctaccattatcacgaattttgagtagttc

SEQ ID NO: 675214 - DNA, 33 bp, Homo sapien
ggtcctaccattatcatgaattttgagtagttc

SEQ ID NO: 675215 - DNA, 33 bp, Homo sapien
tactctgtccaattcaatatgtatgtgttcaac

SEQ ID NO: 675216 - DNA, 33 bp, Homo sapien
tactctgtccaattcagtatgtatgtgttcaac

SEQ ID NO: 675217 - DNA, 33 bp, Homo sapien
ataggcctgtcttcaaagcaatattaaagtcag

SEQ ID NO: 675218 - DNA, 33 bp, Homo sapien
ataggcctgtcttcaaggcaatattaaagtcag

SEQ ID NO: 675219 - DNA, 33 bp, Homo sapien
aacagaacagaatagaaggacaagttcgcaatt

SEQ ID NO: 675220 - DNA, 33 bp, Homo sapien
aacagaacagaatagagggacaagttcgcaatt

SEQ ID NO: 675221 - DNA, 33 bp, Homo sapien
ctataccacaaggaaaaagaacagaaagctaag

SEQ ID NO: 675222 - DNA, 33 bp, Homo sapien
ctataccacaaggaaagagaacagaaagctaag

SEQ ID NO: 675223 - DNA, 33 bp, Homo sapien
tctcctctttagcagtcactctacatccatgct

SEQ ID NO: 675224 - DNA, 33 bp, Homo sapien
tctcctctttagcagtgactctacatccatgct

SEQ ID NO: 675225 - DNA, 33 bp, Homo sapien
caatacatggaaagaactagtattcacagaatc

SEQ ID NO: 675226 - DNA, 33 bp, Homo sapien
caatacatggaaagaagtagtattcacagaatc

SEQ ID NO: 675227 - DNA, 33 bp, Homo sapien
ttaattaatttactaaactgctcaatgaccctg

SEQ ID NO: 675228 - DNA, 33 bp, Homo sapien
ttaattaatttactaacctgctcaatgaccctg

SEQ ID NO: 675229 - DNA, 33 bp, Homo sapien
cccccactttcttgacaacaaacgcaccacaaa

SEQ ID NO: 675230 - DNA, 33 bp, Homo sapien
cccccactttcttgacgacaaacgcaccacaaa

SEQ ID NO: 675231 - DNA, 33 bp, Homo sapien
caagatagtatgggaaatcctagccagagaaat

SEQ ID NO: 675232 - DNA, 33 bp, Homo sapien
caagatagtatgggaagtcctagccagagaaat

SEQ ID NO: 675233 - DNA, 33 bp, Homo sapien
aagataacttactcacgcaacacccagttttcc

SEQ ID NO: 675234 - DNA, 33 bp, Homo sapien
aagataacttactcactcaacacccagttttcc

SEQ ID NO: 675235 - DNA, 33 bp, Homo sapien
ttgcttttccacactcaaaggcagtgcattcac

SEQ ID NO: 675236 - DNA, 33 bp, Homo sapien
ttgcttttccacactcgaaggcagtgcattcac

SEQ ID NO: 675237 - DNA, 33 bp, Homo sapien
agataaagttagtaaacggacatcaacatgaaa

SEQ ID NO: 675238 - DNA, 33 bp, Homo sapien
agataaagttagtaaatggacatcaacatgaaa

SEQ ID NO: 675239 - DNA, 33 bp, Homo sapien
acagggttagcatttaaaagaccttcaaaactt

SEQ ID NO: 675240 - DNA, 33 bp, Homo sapien
acagggttagcatttagaagaccttcaaaactt

SEQ ID NO: 675241 - DNA, 33 bp, Homo sapien
gtaaagggctgattaaagatcctccactcctct

SEQ ID NO: 675242 - DNA, 33 bp, Homo sapien
gtaaagggctgattaacgatcctccactcctct

SEQ ID NO: 675243 - DNA, 33 bp, Homo sapien
acttcacaaactttgcaaagccctgaattttag

SEQ ID NO: 675244 - DNA, 33 bp, Homo sapien
acttcacaaactttgctaagccctgaattttag

SEQ ID NO: 675245 - DNA, 33 bp, Homo sapien
gaaagcaaaatatactcagactcgagttttggg

SEQ ID NO: 675246 - DNA, 33 bp, Homo sapien
gaaagcaaaatatactgagactcgagttttggg

SEQ ID NO: 675247 - DNA, 33 bp, Homo sapien
gatcccatagggtaaaatcctctggtcacagct

SEQ ID NO: 675248 - DNA, 33 bp, Homo sapien
gatcccatagggtaaagtcctctggtcacagct

SEQ ID NO: 675249 - DNA, 33 bp, Homo sapien
ttcacttagtccatcaactactctgaagggtgt

SEQ ID NO: 675250 - DNA, 33 bp, Homo sapien
ttcacttagtccatcagctactctgaagggtgt

SEQ ID NO: 675251 - DNA, 33 bp, Homo sapien
agcttggaatcaaacactatgttaaacatgaaa

SEQ ID NO: 675252 - DNA, 33 bp, Homo sapien
agcttggaatcaaacagtatgttaaacatgaaa

SEQ ID NO: 675253 - DNA, 33 bp, Homo sapien
tcacagtacgttatcacggaaaaatactagagt

SEQ ID NO: 675254 - DNA, 33 bp, Homo sapien
tcacagtacgttatcatggaaaaatactagagt

SEQ ID NO: 675255 - DNA, 33 bp, Homo sapien
tatttcaggcatattccaggatgatcctgcctc

SEQ ID NO: 675256 - DNA, 33 bp, Homo sapien
tatttcaggcatattctaggatgatcctgcctc

SEQ ID NO: 675257 - DNA, 33 bp, Homo sapien
cagccccaaatgccacaaagagctgtgttgttg

SEQ ID NO: 675258 - DNA, 33 bp, Homo sapien
cagccccaaatgccaccaagagctgtgttgttg

SEQ ID NO: 675259 - DNA, 33 bp, Homo sapien
caatattttcattttaagagtgctaaagcagtc

SEQ ID NO: 675260 - DNA, 33 bp, Homo sapien
caatattttcattttaggagtgctaaagcagtc

SEQ ID NO: 675261 - DNA, 33 bp, Homo sapien
gattcctatttcagtaggctcatttcatggctt

SEQ ID NO: 675262 - DNA, 33 bp, Homo sapien
gattcctatttcagtatgctcatttcatggctt

SEQ ID NO: 675263 - DNA, 33 bp, Homo sapien
ttagcatgattttctgcaggtttgtcaggtggt

SEQ ID NO: 675264 - DNA, 33 bp, Homo sapien
ttagcatgattttctggaggtttgtcaggtggt

SEQ ID NO: 675265 - DNA, 33 bp, Homo sapien
tcatgctttcaaaagccgatgtataatttggac

SEQ ID NO: 675266 - DNA, 33 bp, Homo sapien
tcatgctttcaaaagctgatgtataatttggac

SEQ ID NO: 675267 - DNA, 33 bp, Homo sapien
ttcctgttgtataataggtgctaaataaataac

SEQ ID NO: 675268 - DNA, 33 bp, Homo sapien
ttcctgttgtataatatgtgctaaataaataac

SEQ ID NO: 675269 - DNA, 33 bp, Homo sapien
ggtagctgccaacaaacgaatgaataaagaaaa

SEQ ID NO: 675270 - DNA, 33 bp, Homo sapien
ggtagctgccaacaaatgaatgaataaagaaaa

SEQ ID NO: 675271 - DNA, 33 bp, Homo sapien
atggaatgtctgtacacgtatttttcacttctc

SEQ ID NO: 675272 - DNA, 33 bp, Homo sapien
atggaatgtctgtacatgtatttttcacttctc

SEQ ID NO: 675273 - DNA, 33 bp, Homo sapien
caagtatttttgctgcaattatttcatatattt

SEQ ID NO: 675274 - DNA, 33 bp, Homo sapien
caagtatttttgctgccattatttcatatattt

SEQ ID NO: 675275 - DNA, 33 bp, Homo sapien
tagctatgctcagataaggatactaatctatgc

SEQ ID NO: 675276 - DNA, 33 bp, Homo sapien
tagctatgctcagatacggatactaatctatgc

SEQ ID NO: 675277 - DNA, 33 bp, Homo sapien
atatccaatctccttcccctgcttcgactttct

SEQ ID NO: 675278 - DNA, 33 bp, Homo sapien
atatccaatctccttctcctgcttcgactttct

SEQ ID NO: 675279 - DNA, 33 bp, Homo sapien
ttccactcctcaactacaaacttgtcatatcca

SEQ ID NO: 675280 - DNA, 33 bp, Homo sapien
ttccactcctcaactataaacttgtcatatcca

SEQ ID NO: 675281 - DNA, 33 bp, Homo sapien
gctgatagcaagaaaaatgtttgaatattattg

SEQ ID NO: 675282 - DNA, 33 bp, Homo sapien
gctgatagcaagaaaagtgtttgaatattattg

SEQ ID NO: 675283 - DNA, 33 bp, Homo sapien
tgccatatgtaaggcaataattgaggttcttca

SEQ ID NO: 675284 - DNA, 33 bp, Homo sapien
tgccatatgtaaggcattaattgaggttcttca

SEQ ID NO: 675285 - DNA, 33 bp, Homo sapien
atgaggtaatgtaatacaagtgcttagcacaag

SEQ ID NO: 675286 - DNA, 33 bp, Homo sapien
atgaggtaatgtaatataagtgcttagcacaag

SEQ ID NO: 675287 - DNA, 33 bp, Homo sapien
caacaaataaccacaacaaaatcatcagccagg

SEQ ID NO: 675288 - DNA, 33 bp, Homo sapien
caacaaataaccacaataaaatcatcagccagg

SEQ ID NO: 675289 - DNA, 33 bp, Homo sapien
accactgcactcaaacacaggttaacacagtga

SEQ ID NO: 675290 - DNA, 33 bp, Homo sapien
accactgcactcaaacgcaggttaacacagtga

SEQ ID NO: 675291 - DNA, 33 bp, Homo sapien
tcaggcctcccagagaaaattaaagaactatac

SEQ ID NO: 675292 - DNA, 33 bp, Homo sapien
tcaggcctcccagagagaattaaagaactatac

SEQ ID NO: 675293 - DNA, 33 bp, Homo sapien
ttgtgttgaacatcaacggtagaaacagtagaa

SEQ ID NO: 675294 - DNA, 33 bp, Homo sapien
ttgtgttgaacatcaatggtagaaacagtagaa

SEQ ID NO: 675295 - DNA, 33 bp, Homo sapien
taattgcttttcaaccactgtcttcaagtgtat

SEQ ID NO: 675296 - DNA, 33 bp, Homo sapien
taattgcttttcaacctctgtcttcaagtgtat

SEQ ID NO: 675297 - DNA, 33 bp, Homo sapien
ggccaaaagagaagtacgcgtgagatttggatg

SEQ ID NO: 675298 - DNA, 33 bp, Homo sapien
ggccaaaagagaagtatgcgtgagatttggatg

SEQ ID NO: 675299 - DNA, 33 bp, Homo sapien
aaaatagagaatgccacgtccgacccagactcc

SEQ ID NO: 675300 - DNA, 33 bp, Homo sapien
aaaatagagaatgccaggtccgacccagactcc

SEQ ID NO: 675301 - DNA, 33 bp, Homo sapien
aggaataagaccactaactaaccaatgtatttg

SEQ ID NO: 675302 - DNA, 33 bp, Homo sapien
aggaataagaccactatctaaccaatgtatttg

SEQ ID NO: 675303 - DNA, 33 bp, Homo sapien
agtttttactacattcaaaaatgcatcgccggg

SEQ ID NO: 675304 - DNA, 33 bp, Homo sapien
agtttttactacattctaaaatgcatcgccggg

SEQ ID NO: 675305 - DNA, 33 bp, Homo sapien
ttacactaaggtgaaacaggaacgaacatttga

SEQ ID NO: 675306 - DNA, 33 bp, Homo sapien
ttacactaaggtgaaataggaacgaacatttga

SEQ ID NO: 675307 - DNA, 33 bp, Homo sapien
aggcataattattgtaagtgctttgttcttgtg

SEQ ID NO: 675308 - DNA, 33 bp, Homo sapien
aggcataattattgtaggtgctttgttcttgtg

SEQ ID NO: 675309 - DNA, 33 bp, Homo sapien
gtgcaaagtgctcctgcagactcttgaacaata

SEQ ID NO: 675310 - DNA, 33 bp, Homo sapien
gtgcaaagtgctcctggagactcttgaacaata

SEQ ID NO: 675311 - DNA, 33 bp, Homo sapien
gtactgaaggaaaattaaagataagccctctgg

SEQ ID NO: 675312 - DNA, 33 bp, Homo sapien
gtactgaaggaaaattcaagataagccctctgg

SEQ ID NO: 675313 - DNA, 33 bp, Homo sapien
tttgaaatcagtctccggagatatatgtttccc

SEQ ID NO: 675314 - DNA, 33 bp, Homo sapien
tttgaaatcagtctcctgagatatatgtttccc

SEQ ID NO: 675315 - DNA, 33 bp, Homo sapien
ccaagttcttcttcagcccaggtaactcctaca

SEQ ID NO: 675316 - DNA, 33 bp, Homo sapien
ccaagttcttcttcagtccaggtaactcctaca

SEQ ID NO: 675317 - DNA, 33 bp, Homo sapien
aaagtggggccaaccaagagccatgaaactagt

SEQ ID NO: 675318 - DNA, 33 bp, Homo sapien
aaagtggggccaaccaggagccatgaaactagt

SEQ ID NO: 675319 - DNA, 33 bp, Homo sapien
ctaatgcttaatgacaatatttttgcctattgg

SEQ ID NO: 675320 - DNA, 33 bp, Homo sapien
ctaatgcttaatgacactatttttgcctattgg

SEQ ID NO: 675321 - DNA, 33 bp, Homo sapien
caatctactaactgaacgaacaaaattctgtac

SEQ ID NO: 675322 - DNA, 33 bp, Homo sapien
caatctactaactgaatgaacaaaattctgtac

SEQ ID NO: 675323 - DNA, 33 bp, Homo sapien
ttttcttgagaggaaggcttcctagtgatttaa

SEQ ID NO: 675324 - DNA, 33 bp, Homo sapien
ttttcttgagaggaagtcttcctagtgatttaa

SEQ ID NO: 675325 - DNA, 33 bp, Homo sapien
tatctgtttaattcaaatagtctaaatgctcac

SEQ ID NO: 675326 - DNA, 33 bp, Homo sapien
tatctgtttaattcaagtagtctaaatgctcac

SEQ ID NO: 675327 - DNA, 33 bp, Homo sapien
tttaaaatatctgtccaagaaactaaatgtatt

SEQ ID NO: 675328 - DNA, 33 bp, Homo sapien
tttaaaatatctgtccgagaaactaaatgtatt

SEQ ID NO: 675329 - DNA, 33 bp, Homo sapien
cacaaggctctcacacacttgctcttacgtact

SEQ ID NO: 675330 - DNA, 33 bp, Homo sapien
cacaaggctctcacacgcttgctcttacgtact

SEQ ID NO: 675331 - DNA, 33 bp, Homo sapien
ggtatctgaaagtgcaataagtaaagcatgata

SEQ ID NO: 675332 - DNA, 33 bp, Homo sapien
ggtatctgaaagtgcagtaagtaaagcatgata

SEQ ID NO: 675333 - DNA, 33 bp, Homo sapien
ttcttcaataaatggacattttgtttacactga

SEQ ID NO: 675334 - DNA, 33 bp, Homo sapien
ttcttcaataaatggatattttgtttacactga

SEQ ID NO: 675335 - DNA, 33 bp, Homo sapien
atgggtaagccttttacactacaaacacttcac

SEQ ID NO: 675336 - DNA, 33 bp, Homo sapien
atgggtaagccttttatactacaaacacttcac

SEQ ID NO: 675337 - DNA, 33 bp, Homo sapien
cacattgaactgattacgagtactgctggtagt

SEQ ID NO: 675338 - DNA, 33 bp, Homo sapien
cacattgaactgattatgagtactgctggtagt

SEQ ID NO: 675339 - DNA, 33 bp, Homo sapien
gccacctctgctgggacaggcaatggtatccat

SEQ ID NO: 675340 - DNA, 33 bp, Homo sapien
gccacctctgctgggataggcaatggtatccat

SEQ ID NO: 675341 - DNA, 33 bp, Homo sapien
cacactcagattgaagactggaaagctgaggga

SEQ ID NO: 675342 - DNA, 33 bp, Homo sapien
cacactcagattgaagcctggaaagctgaggga

SEQ ID NO: 675343 - DNA, 33 bp, Homo sapien
ttttctgtttctatccacggtcgctatgcctct

SEQ ID NO: 675344 - DNA, 33 bp, Homo sapien
ttttctgtttctatccgcggtcgctatgcctct

SEQ ID NO: 675345 - DNA, 33 bp, Homo sapien
atactagtgattcttcaatcaggaatacaactt

SEQ ID NO: 675346 - DNA, 33 bp, Homo sapien
atactagtgattcttcgatcaggaatacaactt

SEQ ID NO: 675347 - DNA, 33 bp, Homo sapien
ctccactttggcttttaacaacatggtagaaca

SEQ ID NO: 675348 - DNA, 33 bp, Homo sapien
ctccactttggctttttacaacatggtagaaca

SEQ ID NO: 675349 - DNA, 33 bp, Homo sapien
tagagaagattctggaagggcttttgctttttc

SEQ ID NO: 675350 - DNA, 33 bp, Homo sapien
tagagaagattctggaggggcttttgctttttc

SEQ ID NO: 675351 - DNA, 33 bp, Homo sapien
tattaaggcttatagaccaatgaaagtttgtaa

SEQ ID NO: 675352 - DNA, 33 bp, Homo sapien
tattaaggcttatagatcaatgaaagtttgtaa

SEQ ID NO: 675353 - DNA, 33 bp, Homo sapien
ttattgaaagtattacactgcatgatagagtag

SEQ ID NO: 675354 - DNA, 33 bp, Homo sapien
ttattgaaagtattacgctgcatgatagagtag

SEQ ID NO: 675355 - DNA, 33 bp, Homo sapien
attcactcattgaaagccatagtattgtgtgat

SEQ ID NO: 675356 - DNA, 33 bp, Homo sapien
attcactcattgaaagtcatagtattgtgtgat

SEQ ID NO: 675357 - DNA, 33 bp, Homo sapien
gtgatgtctatgcacccacaagcaggcttccta

SEQ ID NO: 675358 - DNA, 33 bp, Homo sapien
gtgatgtctatgcacctacaagcaggcttccta

SEQ ID NO: 675359 - DNA, 33 bp, Homo sapien
tagcttcaccgtgctcacctgtgttttgacaaa

SEQ ID NO: 675360 - DNA, 33 bp, Homo sapien
tagcttcaccgtgctcgcctgtgttttgacaaa

SEQ ID NO: 675361 - DNA, 33 bp, Homo sapien
tttgaatatgctttcacataaaggggagaagta

SEQ ID NO: 675362 - DNA, 33 bp, Homo sapien
tttgaatatgctttcagataaaggggagaagta

SEQ ID NO: 675363 - DNA, 33 bp, Homo sapien
gcatagggttaagagcagcaagtaagatttccc

SEQ ID NO: 675364 - DNA, 33 bp, Homo sapien
gcatagggttaagagcggcaagtaagatttccc

SEQ ID NO: 675365 - DNA, 33 bp, Homo sapien
cagtttgtaaatctccaaatagtcaattagcat

SEQ ID NO: 675366 - DNA, 33 bp, Homo sapien
cagtttgtaaatctcccaatagtcaattagcat

SEQ ID NO: 675367 - DNA, 33 bp, Homo sapien
aagatgttatcaataacgatggtgcctgaaact

SEQ ID NO: 675368 - DNA, 33 bp, Homo sapien
aagatgttatcaataatgatggtgcctgaaact

SEQ ID NO: 675369 - DNA, 33 bp, Homo sapien
tttaggcatcagtcaacgaaaaccccacttgag

SEQ ID NO: 675370 - DNA, 33 bp, Homo sapien
tttaggcatcagtcaatgaaaaccccacttgag

SEQ ID NO: 675371 - DNA, 33 bp, Homo sapien
taacaaagggagagtacggagaactgataaaaa

SEQ ID NO: 675372 - DNA, 33 bp, Homo sapien
taacaaagggagagtatggagaactgataaaaa

SEQ ID NO: 675373 - DNA, 33 bp, Homo sapien
gcttcatttctttgctcaattcagagaacagtg

SEQ ID NO: 675374 - DNA, 33 bp, Homo sapien
gcttcatttctttgcttaattcagagaacagtg

SEQ ID NO: 675375 - DNA, 33 bp, Homo sapien
tgttttgagatatttacaacattcaaactttca

SEQ ID NO: 675376 - DNA, 33 bp, Homo sapien
tgttttgagatatttataacattcaaactttca

SEQ ID NO: 675377 - DNA, 33 bp, Homo sapien
aatttggggtttcgagcatcatcaagatggtgt

SEQ ID NO: 675378 - DNA, 33 bp, Homo sapien
aatttggggtttcgagtatcatcaagatggtgt

SEQ ID NO: 675379 - DNA, 33 bp, Homo sapien
ctgtggattaaatagacatgtagcagattgttt

SEQ ID NO: 675380 - DNA, 33 bp, Homo sapien
ctgtggattaaatagatatgtagcagattgttt

SEQ ID NO: 675381 - DNA, 33 bp, Homo sapien
ttggcttgtatattcacccagaagggaagccat

SEQ ID NO: 675382 - DNA, 33 bp, Homo sapien
ttggcttgtatattcatccagaagggaagccat

SEQ ID NO: 675383 - DNA, 33 bp, Homo sapien
gtgtagttgaaaaatcaattttccagactgaag

SEQ ID NO: 675384 - DNA, 33 bp, Homo sapien
gtgtagttgaaaaatcgattttccagactgaag

SEQ ID NO: 675385 - DNA, 33 bp, Homo sapien
gggaaccatgacattcacaaatggaaaaaacaa

SEQ ID NO: 675386 - DNA, 33 bp, Homo sapien
gggaaccatgacattcgcaaatggaaaaaacaa

SEQ ID NO: 675387 - DNA, 33 bp, Homo sapien
agtgaagttcgagcaaaatattgtagaaatgtg

SEQ ID NO: 675388 - DNA, 33 bp, Homo sapien
agtgaagttcgagcaacatattgtagaaatgtg

SEQ ID NO: 675389 - DNA, 33 bp, Homo sapien
aggctcattgaaccaacgttaccagtaatgtac

SEQ ID NO: 675390 - DNA, 33 bp, Homo sapien
aggctcattgaaccaatgttaccagtaatgtac

SEQ ID NO: 675391 - DNA, 33 bp, Homo sapien
atccagaaatagtgtcaagcagatattttgtcc

SEQ ID NO: 675392 - DNA, 33 bp, Homo sapien
atccagaaatagtgtcgagcagatattttgtcc

SEQ ID NO: 675393 - DNA, 33 bp, Homo sapien
aaatacatagcaaacaaatatggtaagcagaaa

SEQ ID NO: 675394 - DNA, 33 bp, Homo sapien
aaatacatagcaaacacatatggtaagcagaaa

SEQ ID NO: 675395 - DNA, 33 bp, Homo sapien
agtagatgcaaaactaccttcttcaacagtggg

SEQ ID NO: 675396 - DNA, 33 bp, Homo sapien
agtagatgcaaaactagcttcttcaacagtggg

SEQ ID NO: 675397 - DNA, 33 bp, Homo sapien
tctaagcatatggcagcagcactaagaaatatc

SEQ ID NO: 675398 - DNA, 33 bp, Homo sapien
tctaagcatatggcaggagcactaagaaatatc

SEQ ID NO: 675399 - DNA, 33 bp, Homo sapien
aattaaatagcctgaaacagaacaatcaagagg

SEQ ID NO: 675400 - DNA, 33 bp, Homo sapien
aattaaatagcctgaagcagaacaatcaagagg

SEQ ID NO: 675401 - DNA, 33 bp, Homo sapien
catgctgaatcctcacaatttgcctgtttaatt

SEQ ID NO: 675402 - DNA, 33 bp, Homo sapien
catgctgaatcctcaccatttgcctgtttaatt

SEQ ID NO: 675403 - DNA, 33 bp, Homo sapien
attttaagtagcagccagaatctgtttccagct

SEQ ID NO: 675404 - DNA, 33 bp, Homo sapien
attttaagtagcagccggaatctgtttccagct

SEQ ID NO: 675405 - DNA, 33 bp, Homo sapien
tctagcatctgggttacagcaagagccaataat

SEQ ID NO: 675406 - DNA, 33 bp, Homo sapien
tctagcatctgggttatagcaagagccaataat

SEQ ID NO: 675407 - DNA, 33 bp, Homo sapien
tcatcctagatttataagcagatccgcagtttt

SEQ ID NO: 675408 - DNA, 33 bp, Homo sapien
tcatcctagatttatatgcagatccgcagtttt

SEQ ID NO: 675409 - DNA, 33 bp, Homo sapien
caactcagctaaaccacgacacctgacagcctc

SEQ ID NO: 675410 - DNA, 33 bp, Homo sapien
caactcagctaaaccatgacacctgacagcctc

SEQ ID NO: 675411 - DNA, 33 bp, Homo sapien
agccctgctacattataaggtcatcataaggag

SEQ ID NO: 675412 - DNA, 33 bp, Homo sapien
agccctgctacattattaggtcatcataaggag

SEQ ID NO: 675413 - DNA, 33 bp, Homo sapien
agacccatgacaaattcaagtgtatcacttaac

SEQ ID NO: 675414 - DNA, 33 bp, Homo sapien
agacccatgacaaattgaagtgtatcacttaac

SEQ ID NO: 675415 - DNA, 33 bp, Homo sapien
caatccaggtgttttccaccacgtgagactgaa

SEQ ID NO: 675416 - DNA, 33 bp, Homo sapien
caatccaggtgttttctaccacgtgagactgaa

SEQ ID NO: 675417 - DNA, 33 bp, Homo sapien
ttttacagtcctctgaataactatttatagtca

SEQ ID NO: 675418 - DNA, 33 bp, Homo sapien
ttttacagtcctctgagtaactatttatagtca

SEQ ID NO: 675419 - DNA, 33 bp, Homo sapien
ttgtattaatgcgacagtgatgttcaaggtcag

SEQ ID NO: 675420 - DNA, 33 bp, Homo sapien
ttgtattaatgcgacattgatgttcaaggtcag

SEQ ID NO: 675421 - DNA, 33 bp, Homo sapien
aaccattcagagaaacaagaataacaatatatg

SEQ ID NO: 675422 - DNA, 33 bp, Homo sapien
aaccattcagagaaacgagaataacaatatatg

SEQ ID NO: 675423 - DNA, 33 bp, Homo sapien
tcatgagttctacacaatattttaatttaatgt

SEQ ID NO: 675424 - DNA, 33 bp, Homo sapien
tcatgagttctacacattattttaatttaatgt

SEQ ID NO: 675425 - DNA, 33 bp, Homo sapien
aaactgtatagaaaaacccatttgcatgtatgt

SEQ ID NO: 675426 - DNA, 33 bp, Homo sapien
aaactgtatagaaaaatccatttgcatgtatgt

SEQ ID NO: 675427 - DNA, 33 bp, Homo sapien
ccctcagttagcggataataaatgctgtcagga

SEQ ID NO: 675428 - DNA, 33 bp, Homo sapien
ccctcagttagcggatgataaatgctgtcagga

SEQ ID NO: 675429 - DNA, 33 bp, Homo sapien
tgaaaattggaagagtaacagtaaatgaggtca

SEQ ID NO: 675430 - DNA, 33 bp, Homo sapien
tgaaaattggaagagttacagtaaatgaggtca

SEQ ID NO: 675431 - DNA, 33 bp, Homo sapien
tgaatctcttgtcaaaaatacacttgacctcat

SEQ ID NO: 675432 - DNA, 33 bp, Homo sapien
tgaatctcttgtcaaacatacacttgacctcat

SEQ ID NO: 675433 - DNA, 33 bp, Homo sapien
ttgatttaatctagcaagtgtttttcagttctt

SEQ ID NO: 675434 - DNA, 33 bp, Homo sapien
ttgatttaatctagcaggtgtttttcagttctt

SEQ ID NO: 675435 - DNA, 33 bp, Homo sapien
ctccctctctcttgaacgataatgtagctagat

SEQ ID NO: 675436 - DNA, 33 bp, Homo sapien
ctccctctctcttgaatgataatgtagctagat

SEQ ID NO: 675437 - DNA, 33 bp, Homo sapien
acacataacattggtaacccaaatatgatattt

SEQ ID NO: 675438 - DNA, 33 bp, Homo sapien
acacataacattggtagcccaaatatgatattt

SEQ ID NO: 675439 - DNA, 33 bp, Homo sapien
catttctttctacaaccaagaatcaatgcagca

SEQ ID NO: 675440 - DNA, 33 bp, Homo sapien
catttctttctacaacgaagaatcaatgcagca

SEQ ID NO: 675441 - DNA, 33 bp, Homo sapien
ggcaagtgatccttaaaccaacccctactgctt

SEQ ID NO: 675442 - DNA, 33 bp, Homo sapien
ggcaagtgatccttaacccaacccctactgctt

SEQ ID NO: 675443 - DNA, 33 bp, Homo sapien
ttcttaggaggctcatgatagtctttagttaca

SEQ ID NO: 675444 - DNA, 33 bp, Homo sapien
ttcttaggaggctcattatagtctttagttaca

SEQ ID NO: 675445 - DNA, 33 bp, Homo sapien
tgattttattttaacaaagtggctcagaacaaa

SEQ ID NO: 675446 - DNA, 33 bp, Homo sapien
tgattttattttaacacagtggctcagaacaaa

SEQ ID NO: 675447 - DNA, 33 bp, Homo sapien
atgctggaaacaacacaataattcccattttaa

SEQ ID NO: 675448 - DNA, 33 bp, Homo sapien
atgctggaaacaacacgataattcccattttaa

SEQ ID NO: 675449 - DNA, 33 bp, Homo sapien
agctccttcttttatacggctgcctagaatttc

SEQ ID NO: 675450 - DNA, 33 bp, Homo sapien
agctccttcttttatatggctgcctagaatttc

SEQ ID NO: 675451 - DNA, 33 bp, Homo sapien
aagatgtccacgtctacaaaaaatgcctgggtt

SEQ ID NO: 675452 - DNA, 33 bp, Homo sapien
aagatgtccacgtctataaaaaatgcctgggtt

SEQ ID NO: 675453 - DNA, 33 bp, Homo sapien
caagtatttggcctgactaaggtctcatgaaat

SEQ ID NO: 675454 - DNA, 33 bp, Homo sapien
caagtatttggcctgattaaggtctcatgaaat

SEQ ID NO: 675455 - DNA, 33 bp, Homo sapien
ttgtagactttcactaccttgtgctatgccctg

SEQ ID NO: 675456 - DNA, 33 bp, Homo sapien
ttgtagactttcactatcttgtgctatgccctg

SEQ ID NO: 675457 - DNA, 33 bp, Homo sapien
agaagctctagcatgacattcagcaatgttaac

SEQ ID NO: 675458 - DNA, 33 bp, Homo sapien
agaagctctagcatgagattcagcaatgttaac

SEQ ID NO: 675459 - DNA, 33 bp, Homo sapien
agagacagtactgccacgtgattaaaaggtcaa

SEQ ID NO: 675460 - DNA, 33 bp, Homo sapien
agagacagtactgccatgtgattaaaaggtcaa

SEQ ID NO: 675461 - DNA, 33 bp, Homo sapien
ttgcttcagaggtcccagaatttccagaggagc

SEQ ID NO: 675462 - DNA, 33 bp, Homo sapien
ttgcttcagaggtcccggaatttccagaggagc

SEQ ID NO: 675463 - DNA, 33 bp, Homo sapien
gaagatatcaaggcaactggtattttcagaaaa

SEQ ID NO: 675464 - DNA, 33 bp, Homo sapien
gaagatatcaaggcaattggtattttcagaaaa

SEQ ID NO: 675465 - DNA, 33 bp, Homo sapien
atatttatgagcattaaaaagcccaatatttac

SEQ ID NO: 675466 - DNA, 33 bp, Homo sapien
atatttatgagcattagaaagcccaatatttac

SEQ ID NO: 675467 - DNA, 33 bp, Homo sapien
tgagatgttctgcatgacagctttattgcactt

SEQ ID NO: 675468 - DNA, 33 bp, Homo sapien
tgagatgttctgcatggcagctttattgcactt

SEQ ID NO: 675469 - DNA, 33 bp, Homo sapien
ctgccagagatactgaaaaaacagtcccaggag

SEQ ID NO: 675470 - DNA, 33 bp, Homo sapien
ctgccagagatactgagaaaacagtcccaggag

SEQ ID NO: 675471 - DNA, 33 bp, Homo sapien
atgactgaaatgtgaaaatcagcggttggtccg

SEQ ID NO: 675472 - DNA, 33 bp, Homo sapien
atgactgaaatgtgaagatcagcggttggtccg

SEQ ID NO: 675473 - DNA, 33 bp, Homo sapien
ctggccacctcaaaagcattactcatgggattg

SEQ ID NO: 675474 - DNA, 33 bp, Homo sapien
ctggccacctcaaaagtattactcatgggattg

SEQ ID NO: 675475 - DNA, 33 bp, Homo sapien
tggtttttattccccaatacacaatatagtacc

SEQ ID NO: 675476 - DNA, 33 bp, Homo sapien
tggtttttattccccagtacacaatatagtacc

SEQ ID NO: 675477 - DNA, 33 bp, Homo sapien
ggaataaaaaccagcacataaagttaagaaata

SEQ ID NO: 675478 - DNA, 33 bp, Homo sapien
ggaataaaaaccagcatataaagttaagaaata

SEQ ID NO: 675479 - DNA, 33 bp, Homo sapien
agcatccaagtacatacattgggattcatcaag

SEQ ID NO: 675480 - DNA, 33 bp, Homo sapien
agcatccaagtacatatattgggattcatcaag

SEQ ID NO: 675481 - DNA, 33 bp, Homo sapien
gaggagaaatgagaaccgagacctgtgtgaaca

SEQ ID NO: 675482 - DNA, 33 bp, Homo sapien
gaggagaaatgagaactgagacctgtgtgaaca

SEQ ID NO: 675483 - DNA, 33 bp, Homo sapien
atattagacagaacacaaaggcagaaaattaac

SEQ ID NO: 675484 - DNA, 33 bp, Homo sapien
atattagacagaacaccaaggcagaaaattaac

SEQ ID NO: 675485 - DNA, 33 bp, Homo sapien
aggtctgtttatgtaacgaaccatgtttattga

SEQ ID NO: 675486 - DNA, 33 bp, Homo sapien
aggtctgtttatgtaatgaaccatgtttattga

SEQ ID NO: 675487 - DNA, 33 bp, Homo sapien
gtctttatagagcgaaccaggttaaaaaaagat

SEQ ID NO: 675488 - DNA, 33 bp, Homo sapien
gtctttatagagcgaatcaggttaaaaaaagat

SEQ ID NO: 675489 - DNA, 33 bp, Homo sapien
agagtttgggaataagacggtgaacaaagaaag

SEQ ID NO: 675490 - DNA, 33 bp, Homo sapien
agagtttgggaataagtcggtgaacaaagaaag

SEQ ID NO: 675491 - DNA, 33 bp, Homo sapien
agtaaaaccgtaatcacgtcatttagagataca

SEQ ID NO: 675492 - DNA, 33 bp, Homo sapien
agtaaaaccgtaatcatgtcatttagagataca

SEQ ID NO: 675493 - DNA, 33 bp, Homo sapien
ggccattcctgcagctaaagatatcagaccaag

SEQ ID NO: 675494 - DNA, 33 bp, Homo sapien
ggccattcctgcagctgaagatatcagaccaag

SEQ ID NO: 675495 - DNA, 33 bp, Homo sapien
tttggccattttcacccctgaaggctcccggag

SEQ ID NO: 675496 - DNA, 33 bp, Homo sapien
tttggccattttcacctctgaaggctcccggag

SEQ ID NO: 675497 - DNA, 33 bp, Homo sapien
tctgacagaaatagagaatagggttcatcttcc

SEQ ID NO: 675498 - DNA, 33 bp, Homo sapien
tctgacagaaatagaggatagggttcatcttcc

SEQ ID NO: 675499 - DNA, 33 bp, Homo sapien
caacaaagaatttctgaactctgtcttaatttt

SEQ ID NO: 675500 - DNA, 33 bp, Homo sapien
caacaaagaatttctggactctgtcttaatttt

SEQ ID NO: 675501 - DNA, 33 bp, Homo sapien
tatcaatgttcaaagaaaaagagttttaaagag

SEQ ID NO: 675502 - DNA, 33 bp, Homo sapien
tatcaatgttcaaagataaagagttttaaagag

SEQ ID NO: 675503 - DNA, 33 bp, Homo sapien
tcttcaccactagaaactaaacctgtccatcgg

SEQ ID NO: 675504 - DNA, 33 bp, Homo sapien
tcttcaccactagaaattaaacctgtccatcgg

SEQ ID NO: 675505 - DNA, 33 bp, Homo sapien
ctgcagatcggtgggaaagcatttgagatagca

SEQ ID NO: 675506 - DNA, 33 bp, Homo sapien
ctgcagatcggtgggagagcatttgagatagca

SEQ ID NO: 675507 - DNA, 33 bp, Homo sapien
aactccctgactagacggtcagcattttgaagg

SEQ ID NO: 675508 - DNA, 33 bp, Homo sapien
aactccctgactagactgtcagcattttgaagg

SEQ ID NO: 675509 - DNA, 33 bp, Homo sapien
actttttgcctaatgcgaatccttacaagttct

SEQ ID NO: 675510 - DNA, 33 bp, Homo sapien
actttttgcctaatgctaatccttacaagttct

SEQ ID NO: 675511 - DNA, 33 bp, Homo sapien
taccaagaagtgaagacagcagacctcgtttaa

SEQ ID NO: 675512 - DNA, 33 bp, Homo sapien
taccaagaagtgaagagagcagacctcgtttaa

SEQ ID NO: 675513 - DNA, 33 bp, Homo sapien
agcccatgtgtaaatacgaaacatgatcacatt

SEQ ID NO: 675514 - DNA, 33 bp, Homo sapien
agcccatgtgtaaataggaaacatgatcacatt

SEQ ID NO: 675515 - DNA, 33 bp, Homo sapien
ctcaacaaatacaaacagctatcattaagtcac

SEQ ID NO: 675516 - DNA, 33 bp, Homo sapien
ctcaacaaatacaaactgctatcattaagtcac

SEQ ID NO: 675517 - DNA, 33 bp, Homo sapien
acagtgcatgtagaacacgtagcagagtgctga

SEQ ID NO: 675518 - DNA, 33 bp, Homo sapien
acagtgcatgtagaacgcgtagcagagtgctga

SEQ ID NO: 675519 - DNA, 33 bp, Homo sapien
ccaaacctacactcaaagagacagtcaagtatc

SEQ ID NO: 675520 - DNA, 33 bp, Homo sapien
ccaaacctacactcaaggagacagtcaagtatc

SEQ ID NO: 675521 - DNA, 33 bp, Homo sapien
ctgggctcatgattcaaaactactctggatttt

SEQ ID NO: 675522 - DNA, 33 bp, Homo sapien
ctgggctcatgattcacaactactctggatttt

SEQ ID NO: 675523 - DNA, 33 bp, Homo sapien
tatacagtcacccacactatcagaaggcatagc

SEQ ID NO: 675524 - DNA, 33 bp, Homo sapien
tatacagtcacccacagtatcagaaggcatagc

SEQ ID NO: 675525 - DNA, 33 bp, Homo sapien
ttgccaactattttccactgcaaggcccacatc

SEQ ID NO: 675526 - DNA, 33 bp, Homo sapien
ttgccaactattttccgctgcaaggcccacatc

SEQ ID NO: 675527 - DNA, 33 bp, Homo sapien
actgctctattcatgacgaactttctaaacaca

SEQ ID NO: 675528 - DNA, 33 bp, Homo sapien
actgctctattcatgatgaactttctaaacaca

SEQ ID NO: 675529 - DNA, 33 bp, Homo sapien
catatcacactatcaagaatttctttactttat

SEQ ID NO: 675530 - DNA, 33 bp, Homo sapien
catatcacactatcaataatttctttactttat

SEQ ID NO: 675531 - DNA, 33 bp, Homo sapien
tactggtatggcgataaataaacttagatccat

SEQ ID NO: 675532 - DNA, 33 bp, Homo sapien
tactggtatggcgatacataaacttagatccat

SEQ ID NO: 675533 - DNA, 33 bp, Homo sapien
tttgacttgttttagccaacaggacgaaagaaa

SEQ ID NO: 675534 - DNA, 33 bp, Homo sapien
tttgacttgttttagctaacaggacgaaagaaa

SEQ ID NO: 675535 - DNA, 33 bp, Homo sapien
atttagttgcaagttaccactgtgttacaactg

SEQ ID NO: 675536 - DNA, 33 bp, Homo sapien
atttagttgcaagttagcactgtgttacaactg

SEQ ID NO: 675537 - DNA, 33 bp, Homo sapien
tcaaaataaatagcaacgctggagtagctccct

SEQ ID NO: 675538 - DNA, 33 bp, Homo sapien
tcaaaataaatagcaatgctggagtagctccct

SEQ ID NO: 675539 - DNA, 33 bp, Homo sapien
actatcttgcaagtgacgaatggcggtgatgtt

SEQ ID NO: 675540 - DNA, 33 bp, Homo sapien
actatcttgcaagtgatgaatggcggtgatgtt

SEQ ID NO: 675541 - DNA, 33 bp, Homo sapien
cagaaacccatccgtaaagcagggcaccggccg

SEQ ID NO: 675542 - DNA, 33 bp, Homo sapien
cagaaacccatccgtacagcagggcaccggccg

SEQ ID NO: 675543 - DNA, 33 bp, Homo sapien
ttcttaaaaatgtgtccatgtttctcagttatg

SEQ ID NO: 675544 - DNA, 33 bp, Homo sapien
ttcttaaaaatgtgtcgatgtttctcagttatg

SEQ ID NO: 675545 - DNA, 33 bp, Homo sapien
ttatacagtaggcccccatctttatggtaacat

SEQ ID NO: 675546 - DNA, 33 bp, Homo sapien
ttatacagtaggcccctatctttatggtaacat

SEQ ID NO: 675547 - DNA, 33 bp, Homo sapien
tagaagacttggctggaatcagtatacatggga

SEQ ID NO: 675548 - DNA, 33 bp, Homo sapien
tagaagacttggctggcatcagtatacatggga

SEQ ID NO: 675549 - DNA, 33 bp, Homo sapien
actgatcactcaaataactgtactgtgcatacc

SEQ ID NO: 675550 - DNA, 33 bp, Homo sapien
actgatcactcaaatagctgtactgtgcatacc

SEQ ID NO: 675551 - DNA, 33 bp, Homo sapien
ttaagatagatgttcagtaaatactgtatgata

SEQ ID NO: 675552 - DNA, 33 bp, Homo sapien
ttaagatagatgttcattaaatactgtatgata

SEQ ID NO: 675553 - DNA, 33 bp, Homo sapien
gatgttagttaatttcaattgtcctacatattc

SEQ ID NO: 675554 - DNA, 33 bp, Homo sapien
gatgttagttaatttccattgtcctacatattc

SEQ ID NO: 675555 - DNA, 33 bp, Homo sapien
tagcaattgtgtgcaacgtgcatggtactgccg

SEQ ID NO: 675556 - DNA, 33 bp, Homo sapien
tagcaattgtgtgcaatgtgcatggtactgccg

SEQ ID NO: 675557 - DNA, 33 bp, Homo sapien
tttcaattttaaaatactagtcaaggtcagaat

SEQ ID NO: 675558 - DNA, 33 bp, Homo sapien
tttcaattttaaaatattagtcaaggtcagaat

SEQ ID NO: 675559 - DNA, 33 bp, Homo sapien
ctcagctctgtttataagattgcttcttgtgct

SEQ ID NO: 675560 - DNA, 33 bp, Homo sapien
ctcagctctgtttataggattgcttcttgtgct

SEQ ID NO: 675561 - DNA, 33 bp, Homo sapien
caaaacgcaactgttaagtaccccttgccattt

SEQ ID NO: 675562 - DNA, 33 bp, Homo sapien
caaaacgcaactgttaggtaccccttgccattt

SEQ ID NO: 675563 - DNA, 33 bp, Homo sapien
tttatttaaaaataaccgatgttgcatactgtc

SEQ ID NO: 675564 - DNA, 33 bp, Homo sapien
tttatttaaaaataactgatgttgcatactgtc

SEQ ID NO: 675565 - DNA, 33 bp, Homo sapien
cctaagaacatactaaacaattatggagaactt

SEQ ID NO: 675566 - DNA, 33 bp, Homo sapien
cctaagaacatactaatcaattatggagaactt

SEQ ID NO: 675567 - DNA, 33 bp, Homo sapien
gacttctagtatcaaactggtttcaactgtgat

SEQ ID NO: 675568 - DNA, 33 bp, Homo sapien
gacttctagtatcaaattggtttcaactgtgat

SEQ ID NO: 675569 - DNA, 33 bp, Homo sapien
aactggtaacagttcaagtatctataaaccaag

SEQ ID NO: 675570 - DNA, 33 bp, Homo sapien
aactggtaacagttcaggtatctataaaccaag

SEQ ID NO: 675571 - DNA, 33 bp, Homo sapien
aaaaggaggctgataccgactgcctgaaagact

SEQ ID NO: 675572 - DNA, 33 bp, Homo sapien
aaaaggaggctgatactgactgcctgaaagact

SEQ ID NO: 675573 - DNA, 33 bp, Homo sapien
ttgacattcataacaaatgaccttgaggtaaac

SEQ ID NO: 675574 - DNA, 33 bp, Homo sapien
ttgacattcataacaagtgaccttgaggtaaac

SEQ ID NO: 675575 - DNA, 33 bp, Homo sapien
cacactggtggtagaaatatcaataactacaac

SEQ ID NO: 675576 - DNA, 33 bp, Homo sapien
cacactggtggtagaagtatcaataactacaac

SEQ ID NO: 675577 - DNA, 33 bp, Homo sapien
tttgcaagcaacagaaacagtctagttatctga

SEQ ID NO: 675578 - DNA, 33 bp, Homo sapien
tttgcaagcaacagaatcagtctagttatctga

SEQ ID NO: 675579 - DNA, 33 bp, Homo sapien
gccttagagagacatacggaatggtattcaaga

SEQ ID NO: 675580 - DNA, 33 bp, Homo sapien
gccttagagagacatatggaatggtattcaaga

SEQ ID NO: 675581 - DNA, 33 bp, Homo sapien
gactctgtactctgttaaaatatcaacttcttt

SEQ ID NO: 675582 - DNA, 33 bp, Homo sapien
gactctgtactctgttcaaatatcaacttcttt

SEQ ID NO: 675583 - DNA, 33 bp, Homo sapien
aggggttatctaagataataggcaaaacagtca

SEQ ID NO: 675584 - DNA, 33 bp, Homo sapien
aggggttatctaagatgataggcaaaacagtca

SEQ ID NO: 675585 - DNA, 33 bp, Homo sapien
ccttcagtaggtcaaacttgataaacttggtac

SEQ ID NO: 675586 - DNA, 33 bp, Homo sapien
ccttcagtaggtcaaagttgataaacttggtac

SEQ ID NO: 675587 - DNA, 33 bp, Homo sapien
ggatttaggagcaaccagaaccagacccatttg

SEQ ID NO: 675588 - DNA, 33 bp, Homo sapien
ggatttaggagcaaccggaaccagacccatttg

SEQ ID NO: 675589 - DNA, 33 bp, Homo sapien
ataaaagtttaaaaaagtcgtcagcagattaaa

SEQ ID NO: 675590 - DNA, 33 bp, Homo sapien
ataaaagtttaaaaaattcgtcagcagattaaa

SEQ ID NO: 675591 - DNA, 33 bp, Homo sapien
tagaaagtagctcaaaaacaaatgcgtcatcct

SEQ ID NO: 675592 - DNA, 33 bp, Homo sapien
tagaaagtagctcaaagacaaatgcgtcatcct

SEQ ID NO: 675593 - DNA, 33 bp, Homo sapien
agtagtggtatgattaacaagtgttgtttctgt

SEQ ID NO: 675594 - DNA, 33 bp, Homo sapien
agtagtggtatgattatcaagtgttgtttctgt

SEQ ID NO: 675595 - DNA, 33 bp, Homo sapien
cagttagtgtgtgagaagtacttagaacaatgg

SEQ ID NO: 675596 - DNA, 33 bp, Homo sapien
cagttagtgtgtgagaggtacttagaacaatgg

SEQ ID NO: 675597 - DNA, 33 bp, Homo sapien
cagtctcccgaaagaactagaggtaactgcttc

SEQ ID NO: 675598 - DNA, 33 bp, Homo sapien
cagtctcccgaaagaattagaggtaactgcttc

SEQ ID NO: 675599 - DNA, 33 bp, Homo sapien
catgtctttagcgatgaaagttgcaaatgtgta

SEQ ID NO: 675600 - DNA, 33 bp, Homo sapien
catgtctttagcgatgcaagttgcaaatgtgta

SEQ ID NO: 675601 - DNA, 33 bp, Homo sapien
ctctaatattccattaaccagtgcttggtctta

SEQ ID NO: 675602 - DNA, 33 bp, Homo sapien
ctctaatattccattagccagtgcttggtctta

SEQ ID NO: 675603 - DNA, 33 bp, Homo sapien
aagtggtgtaaaacagaaagacaggaagcaagc

SEQ ID NO: 675604 - DNA, 33 bp, Homo sapien
aagtggtgtaaaacagtaagacaggaagcaagc

SEQ ID NO: 675605 - DNA, 33 bp, Homo sapien
gtatctgcttttccaaagaataaaactaagcag

SEQ ID NO: 675606 - DNA, 33 bp, Homo sapien
gtatctgcttttccaatgaataaaactaagcag

SEQ ID NO: 675607 - DNA, 33 bp, Homo sapien
aaaacgtagatagagggattttcctggagtaga

SEQ ID NO: 675608 - DNA, 33 bp, Homo sapien
aaaacgtagatagaggtattttcctggagtaga

SEQ ID NO: 675609 - DNA, 33 bp, Homo sapien
cagttttcccgactacaatatggagctaaacgg

SEQ ID NO: 675610 - DNA, 33 bp, Homo sapien
cagttttcccgactacgatatggagctaaacgg

SEQ ID NO: 675611 - DNA, 33 bp, Homo sapien
cttttctttccttagaacttttggttggatgcc

SEQ ID NO: 675612 - DNA, 33 bp, Homo sapien
cttttctttccttagagcttttggttggatgcc

SEQ ID NO: 675613 - DNA, 33 bp, Homo sapien
tctagtgggcaaactacaagtgagtaaatcagg

SEQ ID NO: 675614 - DNA, 33 bp, Homo sapien
tctagtgggcaaactataagtgagtaaatcagg

SEQ ID NO: 675615 - DNA, 33 bp, Homo sapien
ggtcgatggcgtttcacactgaataatattaca

SEQ ID NO: 675616 - DNA, 33 bp, Homo sapien
ggtcgatggcgtttcatactgaataatattaca

SEQ ID NO: 675617 - DNA, 33 bp, Homo sapien
cttaggtcaacaactgaacttaccttaggtcag

SEQ ID NO: 675618 - DNA, 33 bp, Homo sapien
cttaggtcaacaactggacttaccttaggtcag

SEQ ID NO: 675619 - DNA, 33 bp, Homo sapien
agtgacctcggtgaaaggtacaagagttggaat

SEQ ID NO: 675620 - DNA, 33 bp, Homo sapien
agtgacctcggtgaaatgtacaagagttggaat

SEQ ID NO: 675621 - DNA, 33 bp, Homo sapien
ccataaattttggaaactgagttgataaatgct

SEQ ID NO: 675622 - DNA, 33 bp, Homo sapien
ccataaattttggaaattgagttgataaatgct

SEQ ID NO: 675623 - DNA, 33 bp, Homo sapien
gaggttgtgtcatttacaagttgcaaagagttt

SEQ ID NO: 675624 - DNA, 33 bp, Homo sapien
gaggttgtgtcatttagaagttgcaaagagttt

SEQ ID NO: 675625 - DNA, 33 bp, Homo sapien
ctgctattctctaaaggccttatttgttactat

SEQ ID NO: 675626 - DNA, 33 bp, Homo sapien
ctgctattctctaaagtccttatttgttactat

SEQ ID NO: 675627 - DNA, 33 bp, Homo sapien
gttgacttaagagacactgtcagatactccagg

SEQ ID NO: 675628 - DNA, 33 bp, Homo sapien
gttgacttaagagacagtgtcagatactccagg

SEQ ID NO: 675629 - DNA, 33 bp, Homo sapien
ccactgcagccagacaacatgtgattcaaatct

SEQ ID NO: 675630 - DNA, 33 bp, Homo sapien
ccactgcagccagacagcatgtgattcaaatct

SEQ ID NO: 675631 - DNA, 33 bp, Homo sapien
aagtctcattaaatccaaatctctgggggtgag

SEQ ID NO: 675632 - DNA, 33 bp, Homo sapien
aagtctcattaaatccgaatctctgggggtgag

SEQ ID NO: 675633 - DNA, 33 bp, Homo sapien
tccatcctgataaacccatcctaagtcgaaaat

SEQ ID NO: 675634 - DNA, 33 bp, Homo sapien
tccatcctgataaacctatcctaagtcgaaaat

SEQ ID NO: 675635 - DNA, 33 bp, Homo sapien
aacattactctgaagaaagaaacagagccaccc

SEQ ID NO: 675636 - DNA, 33 bp, Homo sapien
aacattactctgaagacagaaacagagccaccc

SEQ ID NO: 675637 - DNA, 33 bp, Homo sapien
caagccagaaagctggaaggttttattaattat

SEQ ID NO: 675638 - DNA, 33 bp, Homo sapien
caagccagaaagctggcaggttttattaattat

SEQ ID NO: 675639 - DNA, 33 bp, Homo sapien
attgtaagatagaagaaaacactgaacacctga

SEQ ID NO: 675640 - DNA, 33 bp, Homo sapien
attgtaagatagaagagaacactgaacacctga

SEQ ID NO: 675641 - DNA, 33 bp, Homo sapien
agcccacattcgatacaatgatgtgtgtgaatg

SEQ ID NO: 675642 - DNA, 33 bp, Homo sapien
agcccacattcgatacgatgatgtgtgtgaatg

SEQ ID NO: 675643 - DNA, 33 bp, Homo sapien
aattcctgtagaaagccgcaatgtgctgtaaac

SEQ ID NO: 675644 - DNA, 33 bp, Homo sapien
aattcctgtagaaagctgcaatgtgctgtaaac

SEQ ID NO: 675645 - DNA, 33 bp, Homo sapien
catcaaacagttggggaagaatcatttttacag

SEQ ID NO: 675646 - DNA, 33 bp, Homo sapien
catcaaacagttggggtagaatcatttttacag

SEQ ID NO: 675647 - DNA, 33 bp, Homo sapien
taaaattcagattctacaccagttctcttgctt

SEQ ID NO: 675648 - DNA, 33 bp, Homo sapien
taaaattcagattctataccagttctcttgctt

SEQ ID NO: 675649 - DNA, 33 bp, Homo sapien
tctcggaaaaaagaaccatgatagagactttga

SEQ ID NO: 675650 - DNA, 33 bp, Homo sapien
tctcggaaaaaagaactatgatagagactttga

SEQ ID NO: 675651 - DNA, 33 bp, Homo sapien
ttcccctattggctaggattggaccacgcagtc

SEQ ID NO: 675652 - DNA, 33 bp, Homo sapien
ttcccctattggctagtattggaccacgcagtc

SEQ ID NO: 675653 - DNA, 33 bp, Homo sapien
caagctacacgtgtgaaaagcagaattgctcct

SEQ ID NO: 675654 - DNA, 33 bp, Homo sapien
caagctacacgtgtgagaagcagaattgctcct

SEQ ID NO: 675655 - DNA, 33 bp, Homo sapien
gttttgtttgagactacaccagcatgtgttcag

SEQ ID NO: 675656 - DNA, 33 bp, Homo sapien
gttttgtttgagactataccagcatgtgttcag

SEQ ID NO: 675657 - DNA, 33 bp, Homo sapien
ggctctgctgctccacggaagacccttgattat

SEQ ID NO: 675658 - DNA, 33 bp, Homo sapien
ggctctgctgctccactgaagacccttgattat

SEQ ID NO: 675659 - DNA, 33 bp, Homo sapien
caaattctatattgcaactatccttatctagct

SEQ ID NO: 675660 - DNA, 33 bp, Homo sapien
caaattctatattgcagctatccttatctagct

SEQ ID NO: 675661 - DNA, 33 bp, Homo sapien
gcagcggtcatcctaacagtgatgtaataggtg

SEQ ID NO: 675662 - DNA, 33 bp, Homo sapien
gcagcggtcatcctaatagtgatgtaataggtg

SEQ ID NO: 675663 - DNA, 33 bp, Homo sapien
gtctatcaccaaagtcacgcatgaaggcctaat

SEQ ID NO: 675664 - DNA, 33 bp, Homo sapien
gtctatcaccaaagtctcgcatgaaggcctaat

SEQ ID NO: 675665 - DNA, 33 bp, Homo sapien
tttggaagaaattaagaaatcccaacctgacag

SEQ ID NO: 675666 - DNA, 33 bp, Homo sapien
tttggaagaaattaaggaatcccaacctgacag

SEQ ID NO: 675667 - DNA, 33 bp, Homo sapien
ttatcagattttttcacgtataagccaaaatga

SEQ ID NO: 675668 - DNA, 33 bp, Homo sapien
ttatcagattttttcatgtataagccaaaatga

SEQ ID NO: 675669 - DNA, 33 bp, Homo sapien
attaaggtctcaagaacgaaataggctggtaca

SEQ ID NO: 675670 - DNA, 33 bp, Homo sapien
attaaggtctcaagaatgaaataggctggtaca

SEQ ID NO: 675671 - DNA, 33 bp, Homo sapien
gggaaatgaggatgaaaccactaaggtatataa

SEQ ID NO: 675672 - DNA, 33 bp, Homo sapien
gggaaatgaggatgaatccactaaggtatataa

SEQ ID NO: 675673 - DNA, 33 bp, Homo sapien
aacatcgggagcttaaaagattagcactaggcc

SEQ ID NO: 675674 - DNA, 33 bp, Homo sapien
aacatcgggagcttaacagattagcactaggcc

SEQ ID NO: 675675 - DNA, 33 bp, Homo sapien
agggaaatcaaacttacgatacagatcctaaaa

SEQ ID NO: 675676 - DNA, 33 bp, Homo sapien
agggaaatcaaacttatgatacagatcctaaaa

SEQ ID NO: 675677 - DNA, 33 bp, Homo sapien
agatgagaaaaagcaccgacattataagtgtgt

SEQ ID NO: 675678 - DNA, 33 bp, Homo sapien
agatgagaaaaagcactgacattataagtgtgt

SEQ ID NO: 675679 - DNA, 33 bp, Homo sapien
tatgagtagtatacaaatggcaatggccatgaa

SEQ ID NO: 675680 - DNA, 33 bp, Homo sapien
tatgagtagtatacaactggcaatggccatgaa

SEQ ID NO: 675681 - DNA, 33 bp, Homo sapien
ttttttctggcctaaggcacatttgacatatgg

SEQ ID NO: 675682 - DNA, 33 bp, Homo sapien
ttttttctggcctaagtcacatttgacatatgg

SEQ ID NO: 675683 - DNA, 33 bp, Homo sapien
gaatacacatccatgcactttaccagataacct

SEQ ID NO: 675684 - DNA, 33 bp, Homo sapien
gaatacacatccatgcgctttaccagataacct

SEQ ID NO: 675685 - DNA, 33 bp, Homo sapien
catactgccagataaacggcctagcaatagaat

SEQ ID NO: 675686 - DNA, 33 bp, Homo sapien
catactgccagataaatggcctagcaatagaat

SEQ ID NO: 675687 - DNA, 33 bp, Homo sapien
catcatggtcagtttacagagaattctccacct

SEQ ID NO: 675688 - DNA, 33 bp, Homo sapien
catcatggtcagtttagagagaattctccacct

SEQ ID NO: 675689 - DNA, 33 bp, Homo sapien
ctgctactggagaagacatttattgcatacata

SEQ ID NO: 675690 - DNA, 33 bp, Homo sapien
ctgctactggagaagatatttattgcatacata

SEQ ID NO: 675691 - DNA, 33 bp, Homo sapien
ctctgcttgtattccaaatttgcaacattttct

SEQ ID NO: 675692 - DNA, 33 bp, Homo sapien
ctctgcttgtattccatatttgcaacattttct

SEQ ID NO: 675693 - DNA, 33 bp, Homo sapien
gacctcctgtcaacgccgatttgtccaaaatgt

SEQ ID NO: 675694 - DNA, 33 bp, Homo sapien
gacctcctgtcaacgctgatttgtccaaaatgt

SEQ ID NO: 675695 - DNA, 33 bp, Homo sapien
ttactttttcacgggagacgaatgatcatgccc

SEQ ID NO: 675696 - DNA, 33 bp, Homo sapien
ttactttttcacgggatacgaatgatcatgccc

SEQ ID NO: 675697 - DNA, 33 bp, Homo sapien
ctaactactttaagaaaaaatgtgaatgccaca

SEQ ID NO: 675698 - DNA, 33 bp, Homo sapien
ctaactactttaagaacaaatgtgaatgccaca

SEQ ID NO: 675699 - DNA, 33 bp, Homo sapien
agaagagaagacaggaatatatgaaacaggagc

SEQ ID NO: 675700 - DNA, 33 bp, Homo sapien
agaagagaagacaggactatatgaaacaggagc

SEQ ID NO: 675701 - DNA, 33 bp, Homo sapien
cagtggcaagtgacgaacaggacatgaaagcaa

SEQ ID NO: 675702 - DNA, 33 bp, Homo sapien
cagtggcaagtgacgatcaggacatgaaagcaa

SEQ ID NO: 675703 - DNA, 33 bp, Homo sapien
cagaggcaaggacttacagctctgagaattgaa

SEQ ID NO: 675704 - DNA, 33 bp, Homo sapien
cagaggcaaggacttatagctctgagaattgaa

SEQ ID NO: 675705 - DNA, 33 bp, Homo sapien
tgactattttagcagaccttacttgtagctttg

SEQ ID NO: 675706 - DNA, 33 bp, Homo sapien
tgactattttagcagatcttacttgtagctttg

SEQ ID NO: 675707 - DNA, 33 bp, Homo sapien
tcagctatttaaattccctggacgttgcattga

SEQ ID NO: 675708 - DNA, 33 bp, Homo sapien
tcagctatttaaattctctggacgttgcattga

SEQ ID NO: 675709 - DNA, 33 bp, Homo sapien
aaatgttccagacagacatgaagtcctcagacg

SEQ ID NO: 675710 - DNA, 33 bp, Homo sapien
aaatgttccagacagatatgaagtcctcagacg

SEQ ID NO: 675711 - DNA, 33 bp, Homo sapien
aaacacctcgtatttacggccaagtcatacagt

SEQ ID NO: 675712 - DNA, 33 bp, Homo sapien
aaacacctcgtatttatggccaagtcatacagt

SEQ ID NO: 675713 - DNA, 33 bp, Homo sapien
catacacacatcctgggacattatccacataca

SEQ ID NO: 675714 - DNA, 33 bp, Homo sapien
catacacacatcctggtacattatccacataca

SEQ ID NO: 675715 - DNA, 33 bp, Homo sapien
tgacttaggactgaaccggtcattgtgccagtg

SEQ ID NO: 675716 - DNA, 33 bp, Homo sapien
tgacttaggactgaactggtcattgtgccagtg

SEQ ID NO: 675717 - DNA, 33 bp, Homo sapien
agctgtgtctaaactccgaaagggagagagcat

SEQ ID NO: 675718 - DNA, 33 bp, Homo sapien
agctgtgtctaaactctgaaagggagagagcat

SEQ ID NO: 675719 - DNA, 33 bp, Homo sapien
agggatatcgctcatgcaaattatcctgcttct

SEQ ID NO: 675720 - DNA, 33 bp, Homo sapien
agggatatcgctcatgtaaattatcctgcttct

SEQ ID NO: 675721 - DNA, 33 bp, Homo sapien
taggatttcgtggctacaacaccgtcgtttatg

SEQ ID NO: 675722 - DNA, 33 bp, Homo sapien
taggatttcgtggctataacaccgtcgtttatg

SEQ ID NO: 675723 - DNA, 33 bp, Homo sapien
aaatttttcctccaaagtttccgatacaatgaa

SEQ ID NO: 675724 - DNA, 33 bp, Homo sapien
aaatttttcctccaaattttccgatacaatgaa

SEQ ID NO: 675725 - DNA, 33 bp, Homo sapien
tttatggctcttgagacgaatgtatgcccaagt

SEQ ID NO: 675726 - DNA, 33 bp, Homo sapien
tttatggctcttgagatgaatgtatgcccaagt

SEQ ID NO: 675727 - DNA, 33 bp, Homo sapien
acacaaaggaagcgtacgtaggttatttctgca

SEQ ID NO: 675728 - DNA, 33 bp, Homo sapien
acacaaaggaagcgtatgtaggttatttctgca

SEQ ID NO: 675729 - DNA, 33 bp, Homo sapien
atgttcaaatctaggcagaccctaatgaatgtc

SEQ ID NO: 675730 - DNA, 33 bp, Homo sapien
atgttcaaatctaggcggaccctaatgaatgtc

SEQ ID NO: 675731 - DNA, 33 bp, Homo sapien
caaaataaacatttccaaacattctagatcaat

SEQ ID NO: 675732 - DNA, 33 bp, Homo sapien
caaaataaacatttccgaacattctagatcaat

SEQ ID NO: 675733 - DNA, 33 bp, Homo sapien
ccagagcaggtgcctacgcggtatagtccagtc

SEQ ID NO: 675734 - DNA, 33 bp, Homo sapien
ccagagcaggtgcctatgcggtatagtccagtc

SEQ ID NO: 675735 - DNA, 33 bp, Homo sapien
ctgtaggtcaaagggccgaaggaggaatatagg

SEQ ID NO: 675736 - DNA, 33 bp, Homo sapien
ctgtaggtcaaagggctgaaggaggaatatagg

SEQ ID NO: 675737 - DNA, 33 bp, Homo sapien
agccctgagtttgacacgatgccaagctgtagg

SEQ ID NO: 675738 - DNA, 33 bp, Homo sapien
agccctgagtttgacatgatgccaagctgtagg

SEQ ID NO: 675739 - DNA, 33 bp, Homo sapien
ctctttcaggatatataacattcaaaatttcag

SEQ ID NO: 675740 - DNA, 33 bp, Homo sapien
ctctttcaggatatatgacattcaaaatttcag

SEQ ID NO: 675741 - DNA, 33 bp, Homo sapien
ctaggccagagaagcaataaaccaggaagcccc

SEQ ID NO: 675742 - DNA, 33 bp, Homo sapien
ctaggccagagaagcagtaaaccaggaagcccc

SEQ ID NO: 675743 - DNA, 33 bp, Homo sapien
ttcagacagtgctccacgtccctatcttatatt

SEQ ID NO: 675744 - DNA, 33 bp, Homo sapien
ttcagacagtgctccatgtccctatcttatatt

SEQ ID NO: 675745 - DNA, 33 bp, Homo sapien
tttgcttacattcgcacaggcatatcggtgagt

SEQ ID NO: 675746 - DNA, 33 bp, Homo sapien
tttgcttacattcgcataggcatatcggtgagt

SEQ ID NO: 675747 - DNA, 33 bp, Homo sapien
aggcttgaaactagaacggaaagagatgctatt

SEQ ID NO: 675748 - DNA, 33 bp, Homo sapien
aggcttgaaactagaatggaaagagatgctatt

SEQ ID NO: 675749 - DNA, 33 bp, Homo sapien
tgggctatctttaagcaaagagtttgaatgaca

SEQ ID NO: 675750 - DNA, 33 bp, Homo sapien
tgggctatctttaagcgaagagtttgaatgaca

SEQ ID NO: 675751 - DNA, 33 bp, Homo sapien
cttggaggaacttacgccctgtgctttcttcag

SEQ ID NO: 675752 - DNA, 33 bp, Homo sapien
cttggaggaacttacgtcctgtgctttcttcag

SEQ ID NO: 675753 - DNA, 33 bp, Homo sapien
accaaattctagcaataaagtatcacacataca

SEQ ID NO: 675754 - DNA, 33 bp, Homo sapien
accaaattctagcaatgaagtatcacacataca

SEQ ID NO: 675755 - DNA, 33 bp, Homo sapien
ccaatgtctattttcacgatggccgtaaaacaa

SEQ ID NO: 675756 - DNA, 33 bp, Homo sapien
ccaatgtctattttcatgatggccgtaaaacaa

SEQ ID NO: 675757 - DNA, 33 bp, Homo sapien
gggacaaccaatcggcaatacattattttagct

SEQ ID NO: 675758 - DNA, 33 bp, Homo sapien
gggacaaccaatcggcgatacattattttagct

SEQ ID NO: 675759 - DNA, 33 bp, Homo sapien
gacaccgcagccatcacaatgtcctagtacaat

SEQ ID NO: 675760 - DNA, 33 bp, Homo sapien
gacaccgcagccatcagaatgtcctagtacaat

SEQ ID NO: 675761 - DNA, 33 bp, Homo sapien
tgaagtatagatggtgacaaacctgggtgtggt

SEQ ID NO: 675762 - DNA, 33 bp, Homo sapien
tgaagtatagatggtggcaaacctgggtgtggt

SEQ ID NO: 675763 - DNA, 33 bp, Homo sapien
gccttcagaatttagaccaacttgggcaggagt

SEQ ID NO: 675764 - DNA, 33 bp, Homo sapien
gccttcagaatttagagcaacttgggcaggagt

SEQ ID NO: 675765 - DNA, 33 bp, Homo sapien
ttggaagatactgagcaaaaacctagagcttat

SEQ ID NO: 675766 - DNA, 33 bp, Homo sapien
ttggaagatactgagcgaaaacctagagcttat

SEQ ID NO: 675767 - DNA, 33 bp, Homo sapien
atgtttaactggaaaaacaccacgtattgagag

SEQ ID NO: 675768 - DNA, 33 bp, Homo sapien
atgtttaactggaaaatcaccacgtattgagag

SEQ ID NO: 675769 - DNA, 33 bp, Homo sapien
tcttgtgaatggaggacgtttggaacctcaaga

SEQ ID NO: 675770 - DNA, 33 bp, Homo sapien
tcttgtgaatggaggatgtttggaacctcaaga

SEQ ID NO: 675771 - DNA, 33 bp, Homo sapien
tttctgtctcagtaaaagctttccaaatttcca

SEQ ID NO: 675772 - DNA, 33 bp, Homo sapien
tttctgtctcagtaaatgctttccaaatttcca

SEQ ID NO: 675773 - DNA, 33 bp, Homo sapien
aacttcagtttcgtcacgagtaaaatggcaata

SEQ ID NO: 675774 - DNA, 33 bp, Homo sapien
aacttcagtttcgtcatgagtaaaatggcaata

SEQ ID NO: 675775 - DNA, 33 bp, Homo sapien
atcattcatcaatccaacgaaacctgctcatcc

SEQ ID NO: 675776 - DNA, 33 bp, Homo sapien
atcattcatcaatccagcgaaacctgctcatcc

SEQ ID NO: 675777 - DNA, 33 bp, Homo sapien
gtaggtaaggaggaaagaactgagaaactgagc

SEQ ID NO: 675778 - DNA, 33 bp, Homo sapien
gtaggtaaggaggaaataactgagaaactgagc

SEQ ID NO: 675779 - DNA, 33 bp, Homo sapien
ttactatctcggaccactgcaacatataatctc

SEQ ID NO: 675780 - DNA, 33 bp, Homo sapien
ttactatctcggaccattgcaacatataatctc

SEQ ID NO: 675781 - DNA, 33 bp, Homo sapien
gatagtaagaataattaaattatgcagctagct

SEQ ID NO: 675782 - DNA, 33 bp, Homo sapien
gatagtaagaataattcaattatgcagctagct

SEQ ID NO: 675783 - DNA, 33 bp, Homo sapien
tattattatgtcttaagtctatggctaatttgt

SEQ ID NO: 675784 - DNA, 33 bp, Homo sapien
tattattatgtcttaattctatggctaatttgt

SEQ ID NO: 675785 - DNA, 33 bp, Homo sapien
tattcatgataagagacagttgttgattcttct

SEQ ID NO: 675786 - DNA, 33 bp, Homo sapien
tattcatgataagagatagttgttgattcttct

SEQ ID NO: 675787 - DNA, 33 bp, Homo sapien
tattgctaatagtcacaggaattcttcctccac

SEQ ID NO: 675788 - DNA, 33 bp, Homo sapien
tattgctaatagtcacgggaattcttcctccac

SEQ ID NO: 675789 - DNA, 33 bp, Homo sapien
agatggtttttgttcaagcgatatcaggtctta

SEQ ID NO: 675790 - DNA, 33 bp, Homo sapien
agatggtttttgttcatgcgatatcaggtctta

SEQ ID NO: 675791 - DNA, 33 bp, Homo sapien
tgaggggacaatgtgcacaatatgaggaagcac

SEQ ID NO: 675792 - DNA, 33 bp, Homo sapien
tgaggggacaatgtgcgcaatatgaggaagcac

SEQ ID NO: 675793 - DNA, 33 bp, Homo sapien
ctcctgaactgctcacgctgctttcatcactgg

SEQ ID NO: 675794 - DNA, 33 bp, Homo sapien
ctcctgaactgctcactctgctttcatcactgg

SEQ ID NO: 675795 - DNA, 33 bp, Homo sapien
ggcaatgggtggatggaaggtaaagaaggaaaa

SEQ ID NO: 675796 - DNA, 33 bp, Homo sapien
ggcaatgggtggatgggaggtaaagaaggaaaa

SEQ ID NO: 675797 - DNA, 33 bp, Homo sapien
ttcatgcttggcaccaacaatatccccaaagaa

SEQ ID NO: 675798 - DNA, 33 bp, Homo sapien
ttcatgcttggcaccagcaatatccccaaagaa

SEQ ID NO: 675799 - DNA, 33 bp, Homo sapien
atggagtcagaaaactcagaaattaaaaagtca

SEQ ID NO: 675800 - DNA, 33 bp, Homo sapien
atggagtcagaaaactgagaaattaaaaagtca

SEQ ID NO: 675801 - DNA, 33 bp, Homo sapien
gaggacctcacaatcacgtgatcctgcattgac

SEQ ID NO: 675802 - DNA, 33 bp, Homo sapien
gaggacctcacaatcatgtgatcctgcattgac

SEQ ID NO: 675803 - DNA, 33 bp, Homo sapien
tcaaagagcatctgtacagttatcaagtcgcca

SEQ ID NO: 675804 - DNA, 33 bp, Homo sapien
tcaaagagcatctgtatagttatcaagtcgcca

SEQ ID NO: 675805 - DNA, 33 bp, Homo sapien
tttgtcagatacagcaaagtcgtatctgacttt

SEQ ID NO: 675806 - DNA, 33 bp, Homo sapien
tttgtcagatacagcatagtcgtatctgacttt

SEQ ID NO: 675807 - DNA, 33 bp, Homo sapien
gcaaggagtctttgaaagtacccctagagcaac

SEQ ID NO: 675808 - DNA, 33 bp, Homo sapien
gcaaggagtctttgaaggtacccctagagcaac

SEQ ID NO: 675809 - DNA, 33 bp, Homo sapien
actccttgccaagttcaatgtccccagatgata

SEQ ID NO: 675810 - DNA, 33 bp, Homo sapien
actccttgccaagttcgatgtccccagatgata

SEQ ID NO: 675811 - DNA, 33 bp, Homo sapien
cgcgcccggcctattacgcaaattttgatgctg

SEQ ID NO: 675812 - DNA, 33 bp, Homo sapien
cgcgcccggcctattatgcaaattttgatgctg

SEQ ID NO: 675813 - DNA, 33 bp, Homo sapien
cctatgattaagtgcacatttcccattaaattc

SEQ ID NO: 675814 - DNA, 33 bp, Homo sapien
cctatgattaagtgcatatttcccattaaattc

SEQ ID NO: 675815 - DNA, 33 bp, Homo sapien
aagccacagagctgtacaaggttgtcgtgtgtt

SEQ ID NO: 675816 - DNA, 33 bp, Homo sapien
aagccacagagctgtagaaggttgtcgtgtgtt

SEQ ID NO: 675817 - DNA, 33 bp, Homo sapien
accccaagtcctaagacagcaggtagtctgtcc

SEQ ID NO: 675818 - DNA, 33 bp, Homo sapien
accccaagtcctaagatagcaggtagtctgtcc

SEQ ID NO: 675819 - DNA, 33 bp, Homo sapien
cttgcaaggagaaggaactcagacatgaacaaa

SEQ ID NO: 675820 - DNA, 33 bp, Homo sapien
cttgcaaggagaaggagctcagacatgaacaaa

SEQ ID NO: 675821 - DNA, 33 bp, Homo sapien
gttctccaaaaacagacattgccttgtgaaaaa

SEQ ID NO: 675822 - DNA, 33 bp, Homo sapien
gttctccaaaaacagagattgccttgtgaaaaa

SEQ ID NO: 675823 - DNA, 33 bp, Homo sapien
ggcttacgtggataatcagtttaagcagaaagg

SEQ ID NO: 675824 - DNA, 33 bp, Homo sapien
ggcttacgtggataattagtttaagcagaaagg

SEQ ID NO: 675825 - DNA, 33 bp, Homo sapien
aataatctgaattggcaagtagtggtactcagc

SEQ ID NO: 675826 - DNA, 33 bp, Homo sapien
aataatctgaattggcgagtagtggtactcagc

SEQ ID NO: 675827 - DNA, 33 bp, Homo sapien
atgtaattatttagctcaagaataaacaaaact

SEQ ID NO: 675828 - DNA, 33 bp, Homo sapien
atgtaattatttagctgaagaataaacaaaact

SEQ ID NO: 675829 - DNA, 33 bp, Homo sapien
tgaaactgctttctgaatatcattttgtgggaa

SEQ ID NO: 675830 - DNA, 33 bp, Homo sapien
tgaaactgctttctgagtatcattttgtgggaa

SEQ ID NO: 675831 - DNA, 33 bp, Homo sapien
ctttgggatttttatacggcatagttagactgg

SEQ ID NO: 675832 - DNA, 33 bp, Homo sapien
ctttgggatttttatatggcatagttagactgg

SEQ ID NO: 675833 - DNA, 33 bp, Homo sapien
caatgaccagcattatcactcccgtaatacgaa

SEQ ID NO: 675834 - DNA, 33 bp, Homo sapien
caatgaccagcattatgactcccgtaatacgaa

SEQ ID NO: 675835 - DNA, 33 bp, Homo sapien
ctgtgcttgtttcttcaaaattcatcaataaaa

SEQ ID NO: 675836 - DNA, 33 bp, Homo sapien
ctgtgcttgtttcttcgaaattcatcaataaaa

SEQ ID NO: 675837 - DNA, 33 bp, Homo sapien
atttagaagatagaaaaaagtctagtctagaaa

SEQ ID NO: 675838 - DNA, 33 bp, Homo sapien
atttagaagatagaaagaagtctagtctagaaa

SEQ ID NO: 675839 - DNA, 33 bp, Homo sapien
taatgggtcaacattcacattttagaaaggaaa

SEQ ID NO: 675840 - DNA, 33 bp, Homo sapien
taatgggtcaacattcgcattttagaaaggaaa

SEQ ID NO: 675841 - DNA, 33 bp, Homo sapien
ggttctggccagggacagagatctaccacaagc

SEQ ID NO: 675842 - DNA, 33 bp, Homo sapien
ggttctggccagggacggagatctaccacaagc

SEQ ID NO: 675843 - DNA, 33 bp, Homo sapien
atatggtggaataatacgttgcaggcttcactc

SEQ ID NO: 675844 - DNA, 33 bp, Homo sapien
atatggtggaataatatgttgcaggcttcactc

SEQ ID NO: 675845 - DNA, 33 bp, Homo sapien
tcatttcaacctcggaaaatctggcgactatgt

SEQ ID NO: 675846 - DNA, 33 bp, Homo sapien
tcatttcaacctcggagaatctggcgactatgt

SEQ ID NO: 675847 - DNA, 33 bp, Homo sapien
aagctgaaacttcctgacagaacacagacccag

SEQ ID NO: 675848 - DNA, 33 bp, Homo sapien
aagctgaaacttcctgtcagaacacagacccag

SEQ ID NO: 675849 - DNA, 33 bp, Homo sapien
tcctttctcttgttacagcttcaaacctgacag

SEQ ID NO: 675850 - DNA, 33 bp, Homo sapien
tcctttctcttgttacggcttcaaacctgacag

SEQ ID NO: 675851 - DNA, 33 bp, Homo sapien
caaggtggcaggaaagaatgtgctgtattgaaa

SEQ ID NO: 675852 - DNA, 33 bp, Homo sapien
caaggtggcaggaaaggatgtgctgtattgaaa

SEQ ID NO: 675853 - DNA, 33 bp, Homo sapien
agtatgacactatcacccttaacaacaaccaac

SEQ ID NO: 675854 - DNA, 33 bp, Homo sapien
agtatgacactatcactcttaacaacaaccaac

SEQ ID NO: 675855 - DNA, 33 bp, Homo sapien
ctgatataaaataaagaccttgccctgactttc

SEQ ID NO: 675856 - DNA, 33 bp, Homo sapien
ctgatataaaataaagcccttgccctgactttc

SEQ ID NO: 675857 - DNA, 33 bp, Homo sapien
cagcctttacatacagacgaagtataaaactcc

SEQ ID NO: 675858 - DNA, 33 bp, Homo sapien
cagcctttacatacagtcgaagtataaaactcc

SEQ ID NO: 675859 - DNA, 33 bp, Homo sapien
acatctgaacatctaaaaaacggaggccttgtg

SEQ ID NO: 675860 - DNA, 33 bp, Homo sapien
acatctgaacatctaacaaacggaggccttgtg

SEQ ID NO: 675861 - DNA, 33 bp, Homo sapien
aaacagtcaagatcaaaggtgaagagaactgag

SEQ ID NO: 675862 - DNA, 33 bp, Homo sapien
aaacagtcaagatcaatggtgaagagaactgag

SEQ ID NO: 675863 - DNA, 33 bp, Homo sapien
gagatcatcttagtggcattttaaaggtgatat

SEQ ID NO: 675864 - DNA, 33 bp, Homo sapien
gagatcatcttagtggtattttaaaggtgatat

SEQ ID NO: 675865 - DNA, 33 bp, Homo sapien
aaatcattccactcacactatacctcagaccaa

SEQ ID NO: 675866 - DNA, 33 bp, Homo sapien
aaatcattccactcacgctatacctcagaccaa

SEQ ID NO: 675867 - DNA, 33 bp, Homo sapien
tatcacttcatttcgagcactttctgcaagttt

SEQ ID NO: 675868 - DNA, 33 bp, Homo sapien
tatcacttcatttcgatcactttctgcaagttt

SEQ ID NO: 675869 - DNA, 33 bp, Homo sapien
gattttgaagaagaacaagagatatttctagga

SEQ ID NO: 675870 - DNA, 33 bp, Homo sapien
gattttgaagaagaaccagagatatttctagga

SEQ ID NO: 675871 - DNA, 33 bp, Homo sapien
agatgaagactgagtcagaacaatccaggaaga

SEQ ID NO: 675872 - DNA, 33 bp, Homo sapien
agatgaagactgagtcggaacaatccaggaaga

SEQ ID NO: 675873 - DNA, 33 bp, Homo sapien
ggtggttctaccaaaaacagagagtacaactcc

SEQ ID NO: 675874 - DNA, 33 bp, Homo sapien
ggtggttctaccaaaaccagagagtacaactcc

SEQ ID NO: 675875 - DNA, 33 bp, Homo sapien
ttacgaaggtatagtccatcctaacattaacac

SEQ ID NO: 675876 - DNA, 33 bp, Homo sapien
ttacgaaggtatagtctatcctaacattaacac

SEQ ID NO: 675877 - DNA, 33 bp, Homo sapien
tgggtcaacgggaagactactagcatgaggccc

SEQ ID NO: 675878 - DNA, 33 bp, Homo sapien
tgggtcaacgggaagagtactagcatgaggccc

SEQ ID NO: 675879 - DNA, 33 bp, Homo sapien
tctggtagtagaaagacgcttattaaatattag

SEQ ID NO: 675880 - DNA, 33 bp, Homo sapien
tctggtagtagaaagatgcttattaaatattag

SEQ ID NO: 675881 - DNA, 33 bp, Homo sapien
tttcttgcatccctgaagcttgtgggcagccat

SEQ ID NO: 675882 - DNA, 33 bp, Homo sapien
tttcttgcatccctgaggcttgtgggcagccat

SEQ ID NO: 675883 - DNA, 33 bp, Homo sapien
tgatcttgggaaaacacctcagaatcttatttc

SEQ ID NO: 675884 - DNA, 33 bp, Homo sapien
tgatcttgggaaaacatctcagaatcttatttc

SEQ ID NO: 675885 - DNA, 33 bp, Homo sapien
tttagaattcctgtgcaatctttggcatagtga

SEQ ID NO: 675886 - DNA, 33 bp, Homo sapien
tttagaattcctgtgcgatctttggcatagtga

SEQ ID NO: 675887 - DNA, 33 bp, Homo sapien
aacccagatcacgtcaggtagaaagtcaaacag

SEQ ID NO: 675888 - DNA, 33 bp, Homo sapien
aacccagatcacgtcatgtagaaagtcaaacag

SEQ ID NO: 675889 - DNA, 33 bp, Homo sapien
aagtctcttgtatctaagcacagggtcacaata

SEQ ID NO: 675890 - DNA, 33 bp, Homo sapien
aagtctcttgtatctaggcacagggtcacaata

SEQ ID NO: 675891 - DNA, 33 bp, Homo sapien
ggcttgagatagagaagaatgagtaaatgaaag

SEQ ID NO: 675892 - DNA, 33 bp, Homo sapien
ggcttgagatagagaataatgagtaaatgaaag

SEQ ID NO: 675893 - DNA, 33 bp, Homo sapien
caaggcaaaaggatggcccacccaggagtgaca

SEQ ID NO: 675894 - DNA, 33 bp, Homo sapien
caaggcaaaaggatggtccacccaggagtgaca

SEQ ID NO: 675895 - DNA, 33 bp, Homo sapien
taccttgtaaggacaaacaacagcaattactgt

SEQ ID NO: 675896 - DNA, 33 bp, Homo sapien
taccttgtaaggacaatcaacagcaattactgt

SEQ ID NO: 675897 - DNA, 33 bp, Homo sapien
tttctcattccacaaagcacatgggcatctaac

SEQ ID NO: 675898 - DNA, 33 bp, Homo sapien
tttctcattccacaaatcacatgggcatctaac

SEQ ID NO: 675899 - DNA, 33 bp, Homo sapien
aaccagatatttgtaagtggagctgcttgacca

SEQ ID NO: 675900 - DNA, 33 bp, Homo sapien
aaccagatatttgtaattggagctgcttgacca

SEQ ID NO: 675901 - DNA, 33 bp, Homo sapien
tagcgatggtaggctacgagcagaaagggagca

SEQ ID NO: 675902 - DNA, 33 bp, Homo sapien
tagcgatggtaggctatgagcagaaagggagca

SEQ ID NO: 675903 - DNA, 33 bp, Homo sapien
aatttcataggtacagaatgagtgttaaatata

SEQ ID NO: 675904 - DNA, 33 bp, Homo sapien
aatttcataggtacaggatgagtgttaaatata

SEQ ID NO: 675905 - DNA, 33 bp, Homo sapien
aagaaatcattacaccaaaaagattcctgcact

SEQ ID NO: 675906 - DNA, 33 bp, Homo sapien
aagaaatcattacaccgaaaagattcctgcact

SEQ ID NO: 675907 - DNA, 33 bp, Homo sapien
actttgttatggcttcaatctcattacttgtta

SEQ ID NO: 675908 - DNA, 33 bp, Homo sapien
actttgttatggcttccatctcattacttgtta

SEQ ID NO: 675909 - DNA, 33 bp, Homo sapien
ttaagcagtatcatgcacaagaaatggactttg

SEQ ID NO: 675910 - DNA, 33 bp, Homo sapien
ttaagcagtatcatgcccaagaaatggactttg

SEQ ID NO: 675911 - DNA, 33 bp, Homo sapien
aaaatgagatcattgccaaatttaactgataga

SEQ ID NO: 675912 - DNA, 33 bp, Homo sapien
aaaatgagatcattgctaaatttaactgataga

SEQ ID NO: 675913 - DNA, 33 bp, Homo sapien
agtttgtgttgtgggaagtctaaatatgggagg

SEQ ID NO: 675914 - DNA, 33 bp, Homo sapien
agtttgtgttgtgggaggtctaaatatgggagg

SEQ ID NO: 675915 - DNA, 33 bp, Homo sapien; identical to SEQ ID NO: 675913

SEQ ID NO: 675916 - DNA, 33 bp, Homo sapien; identical to SEQ ID NO: 675914

SEQ ID NO: 675917 - DNA, 33 bp, Homo sapien
tatttttctagtaagaccaaacgagtaattttt

SEQ ID NO: 675918 - DNA, 33 bp, Homo sapien
tatttttctagtaagatcaaacgagtaattttt

SEQ ID NO: 675919 - DNA, 33 bp, Homo sapien
tgtgagatctggagcacggcctgaatctgtcag

SEQ ID NO: 675920 - DNA, 33 bp, Homo sapien
tgtgagatctggagcatggcctgaatctgtcag

SEQ ID NO: 675921 - DNA, 33 bp, Homo sapien
tcatgacagtcctgccaatttaaaccaaataaa

SEQ ID NO: 675922 - DNA, 33 bp, Homo sapien
tcatgacagtcctgccgatttaaaccaaataaa

SEQ ID NO: 675923 - DNA, 33 bp, Homo sapien
tttttccttcaaatgaaaacacatgaaaatact

SEQ ID NO: 675924 - DNA, 33 bp, Homo sapien
tttttccttcaaatgacaacacatgaaaatact

SEQ ID NO: 675925 - DNA, 33 bp, Homo sapien
tctctttatcttgtcccgaggttatataatagt

SEQ ID NO: 675926 - DNA, 33 bp, Homo sapien
tctctttatcttgtcctgaggttatataatagt

SEQ ID NO: 675927 - DNA, 33 bp, Homo sapien
tttgcaaaatggtaccaatgagctctccttggt

SEQ ID NO: 675928 - DNA, 33 bp, Homo sapien
tttgcaaaatggtaccgatgagctctccttggt

SEQ ID NO: 675929 - DNA, 33 bp, Homo sapien
ttggtaattaccctctaaaaatgcctgagctgt

SEQ ID NO: 675930 - DNA, 33 bp, Homo sapien
ttggtaattaccctctcaaaatgcctgagctgt

SEQ ID NO: 675931 - DNA, 33 bp, Homo sapien
aatgtctattactagcaagatcttgtgtttgta

SEQ ID NO: 675932 - DNA, 33 bp, Homo sapien
aatgtctattactagctagatcttgtgtttgta

SEQ ID NO: 675933 - DNA, 33 bp, Homo sapien
attgctacacccagcaatatgaatgtcccctga

SEQ ID NO: 675934 - DNA, 33 bp, Homo sapien
attgctacacccagcagtatgaatgtcccctga

SEQ ID NO: 675935 - DNA, 33 bp, Homo sapien
ttgtttagccattctcgaatgagagacttctag

SEQ ID NO: 675936 - DNA, 33 bp, Homo sapien
ttgtttagccattctctaatgagagacttctag

SEQ ID NO: 675937 - DNA, 33 bp, Homo sapien
tttgatatctaaactaagcattggccagaaatt

SEQ ID NO: 675938 - DNA, 33 bp, Homo sapien
tttgatatctaaactaggcattggccagaaatt

SEQ ID NO: 675939 - DNA, 33 bp, Homo sapien
cctttacctacttaaccgtgttggttagaacat

SEQ ID NO: 675940 - DNA, 33 bp, Homo sapien
cctttacctacttaactgtgttggttagaacat

SEQ ID NO: 675941 - DNA, 33 bp, Homo sapien
tctttgcagatagcaacgtagatagacagcaga

SEQ ID NO: 675942 - DNA, 33 bp, Homo sapien
tctttgcagatagcaaggtagatagacagcaga

SEQ ID NO: 675943 - DNA, 33 bp, Homo sapien
tctgtgtagagaataaaccaaataggtgaatgc

SEQ ID NO: 675944 - DNA, 33 bp, Homo sapien
tctgtgtagagaataacccaaataggtgaatgc

SEQ ID NO: 675945 - DNA, 33 bp, Homo sapien
cctgcttaaatctgccacagttccaaacagctt

SEQ ID NO: 675946 - DNA, 33 bp, Homo sapien
cctgcttaaatctgcctcagttccaaacagctt

SEQ ID NO: 675947 - DNA, 33 bp, Homo sapien
gactcaaaatttgacactaaattcagctaatat

SEQ ID NO: 675948 - DNA, 33 bp, Homo sapien
gactcaaaatttgacattaaattcagctaatat

SEQ ID NO: 675949 - DNA, 33 bp, Homo sapien
cacactctgatggggaagggtgctggtcaaagc

SEQ ID NO: 675950 - DNA, 33 bp, Homo sapien
cacactctgatggggaggggtgctggtcaaagc

SEQ ID NO: 675951 - DNA, 33 bp, Homo sapien
agaagcttaggaaagacagactttacagaaaaa

SEQ ID NO: 675952 - DNA, 33 bp, Homo sapien
agaagcttaggaaagagagactttacagaaaaa

SEQ ID NO: 675953 - DNA, 33 bp, Homo sapien
ggatagagagcacaaacaatctgattgtatacc

SEQ ID NO: 675954 - DNA, 33 bp, Homo sapien
ggatagagagcacaaataatctgattgtatacc

SEQ ID NO: 675955 - DNA, 33 bp, Homo sapien
ttagtaccattcacaaaaactccaagaggcagg

SEQ ID NO: 675956 - DNA, 33 bp, Homo sapien
ttagtaccattcacaacaactccaagaggcagg

SEQ ID NO: 675957 - DNA, 33 bp, Homo sapien
tcccctagaaaagagaaagtcacatacaagtat

SEQ ID NO: 675958 - DNA, 33 bp, Homo sapien
tcccctagaaaagagatagtcacatacaagtat

SEQ ID NO: 675959 - DNA, 33 bp, Homo sapien
gtaaaagtaatggggacagaaggaagaatatca

SEQ ID NO: 675960 - DNA, 33 bp, Homo sapien
gtaaaagtaatggggagagaaggaagaatatca

SEQ ID NO: 675961 - DNA, 33 bp, Homo sapien
gattctgggtatggcacctaggagtatgaggtc

SEQ ID NO: 675962 - DNA, 33 bp, Homo sapien
gattctgggtatggcatctaggagtatgaggtc

SEQ ID NO: 675963 - DNA, 33 bp, Homo sapien
aaatcgtcatgaaagcaatcaaaagtatctcat

SEQ ID NO: 675964 - DNA, 33 bp, Homo sapien
aaatcgtcatgaaagcgatcaaaagtatctcat

SEQ ID NO: 675965 - DNA, 33 bp, Homo sapien
ttggaaggatacataacaaacagtggttttgag

SEQ ID NO: 675966 - DNA, 33 bp, Homo sapien
ttggaaggatacataagaaacagtggttttgag

SEQ ID NO: 675967 - DNA, 33 bp, Homo sapien
aaataagccaggcacactaagacaagtatcact

SEQ ID NO: 675968 - DNA, 33 bp, Homo sapien
aaataagccaggcacagtaagacaagtatcact

SEQ ID NO: 675969 - DNA, 33 bp, Homo sapien
ccctttgtctgccatacgtgtttcaaaaatttt

SEQ ID NO: 675970 - DNA, 33 bp, Homo sapien
ccctttgtctgccatatgtgtttcaaaaatttt

SEQ ID NO: 675971 - DNA, 33 bp, Homo sapien
tgagcaggtgatatgaggccctatgaaatgaga

SEQ ID NO: 675972 - DNA, 33 bp, Homo sapien
tgagcaggtgatatgatgccctatgaaatgaga

SEQ ID NO: 675973 - DNA, 33 bp, Homo sapien
agccattggcacatagcagtttaatttttaaaa

SEQ ID NO: 675974 - DNA, 33 bp, Homo sapien
agccattggcacataggagtttaatttttaaaa

SEQ ID NO: 675975 - DNA, 33 bp, Homo sapien
ttaatagattctttcagtcattcaatttccttt

SEQ ID NO: 675976 - DNA, 33 bp, Homo sapien
ttaatagattctttcattcattcaatttccttt

SEQ ID NO: 675977 - DNA, 33 bp, Homo sapien
aaattttcatgtttgacaactcttatatttgca

SEQ ID NO: 675978 - DNA, 33 bp, Homo sapien
aaattttcatgtttgagaactcttatatttgca

SEQ ID NO: 675979 - DNA, 33 bp, Homo sapien
aagattaaataagtcaacatgaaaacagaccaa

SEQ ID NO: 675980 - DNA, 33 bp, Homo sapien
aagattaaataagtcatcatgaaaacagaccaa

SEQ ID NO: 675981 - DNA, 33 bp, Homo sapien
gcttctcatgtcagcactatggctcagaaggaa

SEQ ID NO: 675982 - DNA, 33 bp, Homo sapien
gcttctcatgtcagcagtatggctcagaaggaa

SEQ ID NO: 675983 - DNA, 33 bp, Homo sapien
tttgtgcttcactgtccaggtttttcaacatca

SEQ ID NO: 675984 - DNA, 33 bp, Homo sapien
tttgtgcttcactgtcgaggtttttcaacatca

SEQ ID NO: 675985 - DNA, 33 bp, Homo sapien
ttgactggtaaggagacaatgaacacacatcgc

SEQ ID NO: 675986 - DNA, 33 bp, Homo sapien
ttgactggtaaggagataatgaacacacatcgc

SEQ ID NO: 675987 - DNA, 33 bp, Homo sapien
agccttcctgagagtaccataaattaaggcaag

SEQ ID NO: 675988 - DNA, 33 bp, Homo sapien
agccttcctgagagtatcataaattaaggcaag

SEQ ID NO: 675989 - DNA, 33 bp, Homo sapien
tatagatattactgccccaaggtattgattgta

SEQ ID NO: 675990 - DNA, 33 bp, Homo sapien
tatagatattactgcctcaaggtattgattgta

SEQ ID NO: 675991 - DNA, 33 bp, Homo sapien
tgtgatacagcagaaacagtaaaatttggaagc

SEQ ID NO: 675992 - DNA, 33 bp, Homo sapien
tgtgatacagcagaaatagtaaaatttggaagc

SEQ ID NO: 675993 - DNA, 33 bp, Homo sapien
tttcttcctccttaaacgtgtgatggtacatcc

SEQ ID NO: 675994 - DNA, 33 bp, Homo sapien
tttcttcctccttaaatgtgtgatggtacatcc

SEQ ID NO: 675995 - DNA, 33 bp, Homo sapien
ctccccttttggagaacagaattaccaggatag

SEQ ID NO: 675996 - DNA, 33 bp, Homo sapien
ctccccttttggagaagagaattaccaggatag

SEQ ID NO: 675997 - DNA, 33 bp, Homo sapien
tcatgttgctttcctgaatagaaacctgaaatg

SEQ ID NO: 675998 - DNA, 33 bp, Homo sapien
tcatgttgctttcctgcatagaaacctgaaatg

SEQ ID NO: 675999 - DNA, 33 bp, Homo sapien
acccaattactggttacctggctgaccagaggc

SEQ ID NO: 676000 - DNA, 33 bp, Homo sapien
acccaattactggttatctggctgaccagaggc

SEQ ID NO: 676001 - DNA, 33 bp, Homo sapien
aagccagatgcctaccccaacattagaactgat

SEQ ID NO: 676002 - DNA, 33 bp, Homo sapien
aagccagatgcctacctcaacattagaactgat

SEQ ID NO: 676003 - DNA, 33 bp, Homo sapien
ttaaaattcacaaacaaaagctttcttgttccc

SEQ ID NO: 676004 - DNA, 33 bp, Homo sapien
ttaaaattcacaaacacaagctttcttgttccc

SEQ ID NO: 676005 - DNA, 33 bp, Homo sapien
aaatgtggtagcagcaagaagttctgtaatcct

SEQ ID NO: 676006 - DNA, 33 bp, Homo sapien
aaatgtggtagcagcaggaagttctgtaatcct

SEQ ID NO: 676007 - DNA, 33 bp, Homo sapien
cagtgggatgctcagaagaggagctgaaatgtg

SEQ ID NO: 676008 - DNA, 33 bp, Homo sapien
cagtgggatgctcagaggaggagctgaaatgtg

SEQ ID NO: 676009 - DNA, 33 bp, Homo sapien
aagagacatgttttgcgaaatatagtcccagag

SEQ ID NO: 676010 - DNA, 33 bp, Homo sapien
aagagacatgttttgctaaatatagtcccagag

SEQ ID NO: 676011 - DNA, 33 bp, Homo sapien
ggaatgagcttgtttgcagtgatattattatga

SEQ ID NO: 676012 - DNA, 33 bp, Homo sapien
ggaatgagcttgtttggagtgatattattatga

SEQ ID NO: 676013 - DNA, 33 bp, Homo sapien
actgtaaagcctgaacaaaaaaaatgtcagatt

SEQ ID NO: 676014 - DNA, 33 bp, Homo sapien
actgtaaagcctgaaccaaaaaaatgtcagatt

SEQ ID NO: 676015 - DNA, 33 bp, Homo sapien
aaaatttgtatgttgacgtcccaacccctagta

SEQ ID NO: 676016 - DNA, 33 bp, Homo sapien
aaaatttgtatgttgatgtcccaacccctagta

SEQ ID NO: 676017 - DNA, 33 bp, Homo sapien
caacatgatctcatctcaacaagttacatctac

SEQ ID NO: 676018 - DNA, 33 bp, Homo sapien
caacatgatctcatcttaacaagttacatctac

SEQ ID NO: 676019 - DNA, 33 bp, Homo sapien
gcttctttacttttgccctggtgtctgttttta

SEQ ID NO: 676020 - DNA, 33 bp, Homo sapien
gcttctttacttttgctctggtgtctgttttta

SEQ ID NO: 676021 - DNA, 33 bp, Homo sapien
aaaaaaagataggaaaagcaatagacatgggag

SEQ ID NO: 676022 - DNA, 33 bp, Homo sapien
aaaaaaagataggaaacgcaatagacatgggag

SEQ ID NO: 676023 - DNA, 33 bp, Homo sapien
tctattgcagctggggacagttagacctcaagc

SEQ ID NO: 676024 - DNA, 33 bp, Homo sapien
tctattgcagctgggggcagttagacctcaagc

SEQ ID NO: 676025 - DNA, 33 bp, Homo sapien
tgttccatttgttaagcagtggattactgatca

SEQ ID NO: 676026 - DNA, 33 bp, Homo sapien
tgttccatttgttaagtagtggattactgatca

SEQ ID NO: 676027 - DNA, 33 bp, Homo sapien
gctttagtaatccttcaaagacggaaatatggc

SEQ ID NO: 676028 - DNA, 33 bp, Homo sapien
gctttagtaatccttcgaagacggaaatatggc

SEQ ID NO: 676029 - DNA, 33 bp, Homo sapien
gcatttgataaaatgtaaaacgatatgcagaac

SEQ ID NO: 676030 - DNA, 33 bp, Homo sapien
gcatttgataaaatgtgaaacgatatgcagaac

SEQ ID NO: 676031 - DNA, 33 bp, Homo sapien
atgtctctactgagcacctgttaatttctaagc

SEQ ID NO: 676032 - DNA, 33 bp, Homo sapien
atgtctctactgagcatctgttaatttctaagc

SEQ ID NO: 676033 - DNA, 33 bp, Homo sapien
ttattctggtttggtactaaagttattctgact

SEQ ID NO: 676034 - DNA, 33 bp, Homo sapien
ttattctggtttggtattaaagttattctgact

SEQ ID NO: 676035 - DNA, 33 bp, Homo sapien
ttgtgttagtttgagaaatatctggtccaatat

SEQ ID NO: 676036 - DNA, 33 bp, Homo sapien
ttgtgttagtttgagacatatctggtccaatat

SEQ ID NO: 676037 - DNA, 33 bp, Homo sapien
aggcatggacaaaccactcaaatgcaagaaatg

SEQ ID NO: 676038 - DNA, 33 bp, Homo sapien
aggcatggacaaaccattcaaatgcaagaaatg

SEQ ID NO: 676039 - DNA, 33 bp, Homo sapien
acctctcttttcatccagaaggcatcaacttta

SEQ ID NO: 676040 - DNA, 33 bp, Homo sapien
acctctcttttcatcctgaaggcatcaacttta

SEQ ID NO: 676041 - DNA, 33 bp, Homo sapien
tgtgtttgagtgacacagccagatactgccact

SEQ ID NO: 676042 - DNA, 33 bp, Homo sapien
tgtgtttgagtgacacggccagatactgccact

SEQ ID NO: 676043 - DNA, 33 bp, Homo sapien
ggtatactttgcatatcaccattctaggttttc

SEQ ID NO: 676044 - DNA, 33 bp, Homo sapien
ggtatactttgcatatgaccattctaggttttc

SEQ ID NO: 676045 - DNA, 33 bp, Homo sapien
aatatttaggataatgaatttaattgccttcaa

SEQ ID NO: 676046 - DNA, 33 bp, Homo sapien
aatatttaggataatgtatttaattgccttcaa

SEQ ID NO: 676047 - DNA, 33 bp, Homo sapien
tctattaaacactaaacgtgtagaaagcagttt

SEQ ID NO: 676048 - DNA, 33 bp, Homo sapien
tctattaaacactaaatgtgtagaaagcagttt

SEQ ID NO: 676049 - DNA, 33 bp, Homo sapien
tggatgagaaaagataagccaaacaggcagatt

SEQ ID NO: 676050 - DNA, 33 bp, Homo sapien
tggatgagaaaagataggccaaacaggcagatt

SEQ ID NO: 676051 - DNA, 33 bp, Homo sapien
tacaacagaaggtaagccctttgataaaacaat

SEQ ID NO: 676052 - DNA, 33 bp, Homo sapien
tacaacagaaggtaaggcctttgataaaacaat

SEQ ID NO: 676053 - DNA, 33 bp, Homo sapien
agctctgtcaccattaactgaggtggaagcaaa

SEQ ID NO: 676054 - DNA, 33 bp, Homo sapien
agctctgtcaccattacctgaggtggaagcaaa

SEQ ID NO: 676055 - DNA, 33 bp, Homo sapien
gcagtcaaatcacagacgcacttgttcctactc

SEQ ID NO: 676056 - DNA, 33 bp, Homo sapien
gcagtcaaatcacagatgcacttgttcctactc

SEQ ID NO: 676057 - DNA, 33 bp, Homo sapien
attgaggccttgaatacggtccaccagtatgga

SEQ ID NO: 676058 - DNA, 33 bp, Homo sapien
attgaggccttgaatatggtccaccagtatgga

SEQ ID NO: 676059 - DNA, 33 bp, Homo sapien
taaccatatcatactaaaacttgttaacttaac

SEQ ID NO: 676060 - DNA, 33 bp, Homo sapien
taaccatatcatactataacttgttaacttaac

SEQ ID NO: 676061 - DNA, 33 bp, Homo sapien
atttgagttggctagactatttataaacattga

SEQ ID NO: 676062 - DNA, 33 bp, Homo sapien
atttgagttggctagattatttataaacattga

SEQ ID NO: 676063 - DNA, 33 bp, Homo sapien
aaagtgttcaacaggaagaagagcataaaaatt

SEQ ID NO: 676064 - DNA, 33 bp, Homo sapien
aaagtgttcaacaggaggaagagcataaaaatt

SEQ ID NO: 676065 - DNA, 33 bp, Homo sapien
ctgggactcctcaataaaaacagaagtattaga

SEQ ID NO: 676066 - DNA, 33 bp, Homo sapien
ctgggactcctcaatagaaacagaagtattaga

SEQ ID NO: 676067 - DNA, 33 bp, Homo sapien
ccccacctgcagaagacgtttgacacagcaagt

SEQ ID NO: 676068 - DNA, 33 bp, Homo sapien
ccccacctgcagaagatgtttgacacagcaagt

SEQ ID NO: 676069 - DNA, 33 bp, Homo sapien
gattttatttatggaacattcatgaaataacat

SEQ ID NO: 676070 - DNA, 33 bp, Homo sapien
gattttatttatggaagattcatgaaataacat

SEQ ID NO: 676071 - DNA, 33 bp, Homo sapien
gttatccaaaaatcataaagggaagcctactta

SEQ ID NO: 676072 - DNA, 33 bp, Homo sapien
gttatccaaaaatcatgaagggaagcctactta

SEQ ID NO: 676073 - DNA, 33 bp, Homo sapien
gcacttgaagtcagaagaaaaaagaaaagacaa

SEQ ID NO: 676074 - DNA, 33 bp, Homo sapien
gcacttgaagtcagaataaaaaagaaaagacaa

SEQ ID NO: 676075 - DNA, 33 bp, Homo sapien
tgatgagagtgtgtcaggagctaagaaatgtga

SEQ ID NO: 676076 - DNA, 33 bp, Homo sapien
tgatgagagtgtgtcatgagctaagaaatgtga

SEQ ID NO: 676077 - DNA, 33 bp, Homo sapien
aattagccttgccataagttgattcttcttgtt

SEQ ID NO: 676078 - DNA, 33 bp, Homo sapien
aattagccttgccatacgttgattcttcttgtt

SEQ ID NO: 676079 - DNA, 33 bp, Homo sapien
ttttctatcatgtttacgtcttaattacatgtc

SEQ ID NO: 676080 - DNA, 33 bp, Homo sapien
ttttctatcatgtttaggtcttaattacatgtc

SEQ ID NO: 676081 - DNA, 33 bp, Homo sapien
ggcaagctttctttcactagctagcaggcattc

SEQ ID NO: 676082 - DNA, 33 bp, Homo sapien
ggcaagctttctttcattagctagcaggcattc

SEQ ID NO: 676083 - DNA, 33 bp, Homo sapien
attcatgctaacaaacactgaattcaaatgata

SEQ ID NO: 676084 - DNA, 33 bp, Homo sapien
attcatgctaacaaacgctgaattcaaatgata

SEQ ID NO: 676085 - DNA, 33 bp, Homo sapien
ttcccaggttgtctaaatctacacagctagtaa

SEQ ID NO: 676086 - DNA, 33 bp, Homo sapien
ttcccaggttgtctaagtctacacagctagtaa

SEQ ID NO: 676087 - DNA, 33 bp, Homo sapien
agcacccacattttacactgtcaggaaagctca

SEQ ID NO: 676088 - DNA, 33 bp, Homo sapien
agcacccacattttacgctgtcaggaaagctca

SEQ ID NO: 676089 - DNA, 33 bp, Homo sapien
acaatcattcagaaaaacctcaaccctagttaa

SEQ ID NO: 676090 - DNA, 33 bp, Homo sapien
acaatcattcagaaaagcctcaaccctagttaa

SEQ ID NO: 676091 - DNA, 33 bp, Homo sapien
cacctgcaattgaagcaaagtcttcttcagccc

SEQ ID NO: 676092 - DNA, 33 bp, Homo sapien
cacctgcaattgaagcgaagtcttcttcagccc

SEQ ID NO: 676093 - DNA, 33 bp, Homo sapien
aactctgggagtggaaaatcaaactccccacgc

SEQ ID NO: 676094 - DNA, 33 bp, Homo sapien
aactctgggagtggaacatcaaactccccacgc

SEQ ID NO: 676095 - DNA, 33 bp, Homo sapien
aaggacctttggataactagcagtaggaccttg

SEQ ID NO: 676096 - DNA, 33 bp, Homo sapien
aaggacctttggataagtagcagtaggaccttg

SEQ ID NO: 676097 - DNA, 33 bp, Homo sapien
tctcaagtagacaaagaactagaaaatgtattt

SEQ ID NO: 676098 - DNA, 33 bp, Homo sapien
tctcaagtagacaaaggactagaaaatgtattt

SEQ ID NO: 676099 - DNA, 33 bp, Homo sapien
agacacatccacttgcacattcattgcaacact

SEQ ID NO: 676100 - DNA, 33 bp, Homo sapien
agacacatccacttgcgcattcattgcaacact

SEQ ID NO: 676101 - DNA, 33 bp, Homo sapien
tggaagattgaatcatcacatggtgtactaaag

SEQ ID NO: 676102 - DNA, 33 bp, Homo sapien
tggaagattgaatcatgacatggtgtactaaag

SEQ ID NO: 676103 - DNA, 33 bp, Homo sapien
ggagtacaaatggagaactaaataccttccttt

SEQ ID NO: 676104 - DNA, 33 bp, Homo sapien
ggagtacaaatggagagctaaataccttccttt

SEQ ID NO: 676105 - DNA, 33 bp, Homo sapien
aaccaccttgttcctcactctaacatcttataa

SEQ ID NO: 676106 - DNA, 33 bp, Homo sapien
aaccaccttgttcctcgctctaacatcttataa

SEQ ID NO: 676107 - DNA, 33 bp, Homo sapien
ctataatgcgcacttgaaaaaaactggggattt

SEQ ID NO: 676108 - DNA, 33 bp, Homo sapien
ctataatgcgcacttgcaaaaaactggggattt

SEQ ID NO: 676109 - DNA, 33 bp, Homo sapien
tgagttgagtggaacaaagacatctgctactta

SEQ ID NO: 676110 - DNA, 33 bp, Homo sapien
tgagttgagtggaacagagacatctgctactta

SEQ ID NO: 676111 - DNA, 33 bp, Homo sapien
gttgcagttggtactccgaagtgccatgctctt

SEQ ID NO: 676112 - DNA, 33 bp, Homo sapien
gttgcagttggtactctgaagtgccatgctctt

SEQ ID NO: 676113 - DNA, 33 bp, Homo sapien
agctaccagtacactaataatctcctggtttga

SEQ ID NO: 676114 - DNA, 33 bp, Homo sapien
agctaccagtacactattaatctcctggtttga

SEQ ID NO: 676115 - DNA, 33 bp, Homo sapien
atatttgtcgagtcaacgtaaccccacacttat

SEQ ID NO: 676116 - DNA, 33 bp, Homo sapien
atatttgtcgagtcaatgtaaccccacacttat

SEQ ID NO: 676117 - DNA, 33 bp, Homo sapien
aaaataccactcaaaactccagattatatagaa

SEQ ID NO: 676118 - DNA, 33 bp, Homo sapien
aaaataccactcaaaattccagattatatagaa

SEQ ID NO: 676119 - DNA, 33 bp, Homo sapien
ccttgctgtgcttggaatatatcagtgatgtcc

SEQ ID NO: 676120 - DNA, 33 bp, Homo sapien
ccttgctgtgcttggagtatatcagtgatgtcc

SEQ ID NO: 676121 - DNA, 33 bp, Homo sapien
tcttcctacaagtcaaagaaccgagttaactgg

SEQ ID NO: 676122 - DNA, 33 bp, Homo sapien
tcttcctacaagtcaatgaaccgagttaactgg

SEQ ID NO: 676123 - DNA, 33 bp, Homo sapien
tccttatgaagtaagacagccagagagtgacag

SEQ ID NO: 676124 - DNA, 33 bp, Homo sapien
tccttatgaagtaagatagccagagagtgacag

SEQ ID NO: 676125 - DNA, 33 bp, Homo sapien
actaaatttgtagagaaagacacatccattaac

SEQ ID NO: 676126 - DNA, 33 bp, Homo sapien
actaaatttgtagagagagacacatccattaac

SEQ ID NO: 676127 - DNA, 33 bp, Homo sapien
agctcctcgaactttaaaaaataattcaacttt

SEQ ID NO: 676128 - DNA, 33 bp, Homo sapien
agctcctcgaactttagaaaataattcaacttt

SEQ ID NO: 676129 - DNA, 33 bp, Homo sapien
tttaaagcttaatgtacagtaggaaaatgtatt

SEQ ID NO: 676130 - DNA, 33 bp, Homo sapien
tttaaagcttaatgtagagtaggaaaatgtatt

SEQ ID NO: 676131 - DNA, 33 bp, Homo sapien
aaaaatcagtttataactcagtgtgccaccaca

SEQ ID NO: 676132 - DNA, 33 bp, Homo sapien
aaaaatcagtttataattcagtgtgccaccaca

SEQ ID NO: 676133 - DNA, 33 bp, Homo sapien
ttaaaaatgatttttaaactctctttggggact

SEQ ID NO: 676134 - DNA, 33 bp, Homo sapien
ttaaaaatgatttttagactctctttggggact

SEQ ID NO: 676135 - DNA, 33 bp, Homo sapien
tcttcttgcatcatagcaaaacaattgttggag

SEQ ID NO: 676136 - DNA, 33 bp, Homo sapien
tcttcttgcatcatagtaaaacaattgttggag

SEQ ID NO: 676137 - DNA, 33 bp, Homo sapien
gccatacagaatgacactgaggaatattaaaaa

SEQ ID NO: 676138 - DNA, 33 bp, Homo sapien
gccatacagaatgacagtgaggaatattaaaaa

SEQ ID NO: 676139 - DNA, 33 bp, Homo sapien
gtgcttacatcacgaccccagaagctatgggta

SEQ ID NO: 676140 - DNA, 33 bp, Homo sapien
gtgcttacatcacgactccagaagctatgggta

SEQ ID NO: 676141 - DNA, 33 bp, Homo sapien
aatttggatactaaaactcaacttcttctttcc

SEQ ID NO: 676142 - DNA, 33 bp, Homo sapien
aatttggatactaaaattcaacttcttctttcc

SEQ ID NO: 676143 - DNA, 33 bp, Homo sapien
ataatcatacctcttaccatttttctactggat

SEQ ID NO: 676144 - DNA, 33 bp, Homo sapien
ataatcatacctcttatcatttttctactggat

SEQ ID NO: 676145 - DNA, 33 bp, Homo sapien
tcttctgccctttccaagttttagtggccacgc

SEQ ID NO: 676146 - DNA, 33 bp, Homo sapien
tcttctgccctttccatgttttagtggccacgc

SEQ ID NO: 676147 - DNA, 33 bp, Homo sapien
agcaaatgattgagaaaggaagagtatccaggc

SEQ ID NO: 676148 - DNA, 33 bp, Homo sapien
agcaaatgattgagaagggaagagtatccaggc

SEQ ID NO: 676149 - DNA, 33 bp, Homo sapien
gtagggaaatacggaaacaagaatctcaccttt

SEQ ID NO: 676150 - DNA, 33 bp, Homo sapien
gtagggaaatacggaagcaagaatctcaccttt

SEQ ID NO: 676151 - DNA, 33 bp, Homo sapien
taagtttttcaccccacgctgatatttatatac

SEQ ID NO: 676152 - DNA, 33 bp, Homo sapien
taagtttttcaccccatgctgatatttatatac

SEQ ID NO: 676153 - DNA, 33 bp, Homo sapien
aataaagaaatgaataaatgatttggaagagca

SEQ ID NO: 676154 - DNA, 33 bp, Homo sapien
aataaagaaatgaatacatgatttggaagagca

SEQ ID NO: 676155 - DNA, 33 bp, Homo sapien
ttaaatatcatacagagtctaaaagctaaatct

SEQ ID NO: 676156 - DNA, 33 bp, Homo sapien
ttaaatatcatacagattctaaaagctaaatct

SEQ ID NO: 676157 - DNA, 33 bp, Homo sapien
ttattgaggctttatgcatattcatcacttaat

SEQ ID NO: 676158 - DNA, 33 bp, Homo sapien
ttattgaggctttatgtatattcatcacttaat

SEQ ID NO: 676159 - DNA, 33 bp, Homo sapien
agagtgttatcctaacaaaactctacagttcca

SEQ ID NO: 676160 - DNA, 33 bp, Homo sapien
agagtgttatcctaaccaaactctacagttcca

SEQ ID NO: 676161 - DNA, 33 bp, Homo sapien
tttcctgctatggtgaccatttccatgactttg

SEQ ID NO: 676162 - DNA, 33 bp, Homo sapien
tttcctgctatggtgatcatttccatgactttg

SEQ ID NO: 676163 - DNA, 33 bp, Homo sapien
tccactggcattaaaaatgagaccagcaggcta

SEQ ID NO: 676164 - DNA, 33 bp, Homo sapien
tccactggcattaaaagtgagaccagcaggcta

SEQ ID NO: 676165 - DNA, 33 bp, Homo sapien
ctactttcctacatgaaccatacatcgaagtgg

SEQ ID NO: 676166 - DNA, 33 bp, Homo sapien
ctactttcctacatgatccatacatcgaagtgg

SEQ ID NO: 676167 - DNA, 33 bp, Homo sapien
tatctctacctggatacccttcaggcacttaaa

SEQ ID NO: 676168 - DNA, 33 bp, Homo sapien
tatctctacctggatagccttcaggcacttaaa

SEQ ID NO: 676169 - DNA, 33 bp, Homo sapien
tcaatagttcaaaactcaatgctactaaaggat

SEQ ID NO: 676170 - DNA, 33 bp, Homo sapien
tcaatagttcaaaactgaatgctactaaaggat

SEQ ID NO: 676171 - DNA, 33 bp, Homo sapien
cagaactaataaaaacgcaatcaaagttgtctc

SEQ ID NO: 676172 - DNA, 33 bp, Homo sapien
cagaactaataaaaactcaatcaaagttgtctc

SEQ ID NO: 676173 - DNA, 33 bp, Homo sapien
taatttacatgctaaaaggtataagagttagtt

SEQ ID NO: 676174 - DNA, 33 bp, Homo sapien
taatttacatgctaaagggtataagagttagtt

SEQ ID NO: 676175 - DNA, 33 bp, Homo sapien
aacatgaaatgcagtaggcttagtcagtggagt

SEQ ID NO: 676176 - DNA, 33 bp, Homo sapien
aacatgaaatgcagtatgcttagtcagtggagt

SEQ ID NO: 676177 - DNA, 33 bp, Homo sapien
gtattctgcttcttaccaaaaccaggatcataa

SEQ ID NO: 676178 - DNA, 33 bp, Homo sapien
gtattctgcttcttactaaaaccaggatcataa

SEQ ID NO: 676179 - DNA, 33 bp, Homo sapien
ctcctctatgaagacaacatttaaaaatcaaac

SEQ ID NO: 676180 - DNA, 33 bp, Homo sapien
ctcctctatgaagacagcatttaaaaatcaaac

SEQ ID NO: 676181 - DNA, 33 bp, Homo sapien
tggagagctgcttgaaatatgtgtaaagacccg

SEQ ID NO: 676182 - DNA, 33 bp, Homo sapien
tggagagctgcttgaagtatgtgtaaagacccg

SEQ ID NO: 676183 - DNA, 33 bp, Homo sapien
cttagttcagcctttgcaagaatatgtctcacg

SEQ ID NO: 676184 - DNA, 33 bp, Homo sapien
cttagttcagcctttggaagaatatgtctcacg

SEQ ID NO: 676185 - DNA, 33 bp, Homo sapien
agcctgaggactctgaaaaatctaaactttatt

SEQ ID NO: 676186 - DNA, 33 bp, Homo sapien
agcctgaggactctgagaaatctaaactttatt

SEQ ID NO: 676187 - DNA, 33 bp, Homo sapien
agcaggtgtaggggagacaaaaatgacttctgt

SEQ ID NO: 676188 - DNA, 33 bp, Homo sapien
agcaggtgtaggggagccaaaaatgacttctgt

SEQ ID NO: 676189 - DNA, 33 bp, Homo sapien
caccatacaattcctcccatcgtcatcacataa

SEQ ID NO: 676190 - DNA, 33 bp, Homo sapien
caccatacaattcctctcatcgtcatcacataa

SEQ ID NO: 676191 - DNA, 33 bp, Homo sapien
tttgccctgtagccatcagatgtgggaatgttc

SEQ ID NO: 676192 - DNA, 33 bp, Homo sapien
tttgccctgtagccatgagatgtgggaatgttc

SEQ ID NO: 676193 - DNA, 33 bp, Homo sapien
gaattgtgaaattgaaactactctttcggtttt

SEQ ID NO: 676194 - DNA, 33 bp, Homo sapien
gaattgtgaaattgaagctactctttcggtttt

SEQ ID NO: 676195 - DNA, 33 bp, Homo sapien
gtaccaaaagagggcaaaacaatgaccagccac

SEQ ID NO: 676196 - DNA, 33 bp, Homo sapien
gtaccaaaagagggcagaacaatgaccagccac

SEQ ID NO: 676197 - DNA, 33 bp, Homo sapien
aggaaatgcctaaatacatacatctctgcatgg

SEQ ID NO: 676198 - DNA, 33 bp, Homo sapien
aggaaatgcctaaatagatacatctctgcatgg

SEQ ID NO: 676199 - DNA, 33 bp, Homo sapien
aatgtataaagactcacgtaacaatagcctgca

SEQ ID NO: 676200 - DNA, 33 bp, Homo sapien
aatgtataaagactcatgtaacaatagcctgca

SEQ ID NO: 676201 - DNA, 33 bp, Homo sapien
ggaataagaggaataacgtacatggacactgga

SEQ ID NO: 676202 - DNA, 33 bp, Homo sapien
ggaataagaggaataaggtacatggacactgga

SEQ ID NO: 676203 - DNA, 33 bp, Homo sapien
tctgtacagccaataacaatctcctaatggctt

SEQ ID NO: 676204 - DNA, 33 bp, Homo sapien
tctgtacagccaataataatctcctaatggctt

SEQ ID NO: 676205 - DNA, 33 bp, Homo sapien
aggtcaagaaaagcaaagactaaggaattatta

SEQ ID NO: 676206 - DNA, 33 bp, Homo sapien
aggtcaagaaaagcaatgactaaggaattatta

SEQ ID NO: 676207 - DNA, 33 bp, Homo sapien
aggacaaaaatgatataaaacttctcaacaaca

SEQ ID NO: 676208 - DNA, 33 bp, Homo sapien
aggacaaaaatgatatgaaacttctcaacaaca

SEQ ID NO: 676209 - DNA, 33 bp, Homo sapien
tttgaacatttttcccagcatttcatacatctc

SEQ ID NO: 676210 - DNA, 33 bp, Homo sapien
tttgaacatttttcccggcatttcatacatctc

SEQ ID NO: 676211 - DNA, 33 bp, Homo sapien
tttcttaccaagttgacgattttgttagcattg

SEQ ID NO: 676212 - DNA, 33 bp, Homo sapien
tttcttaccaagttgatgattttgttagcattg

SEQ ID NO: 676213 - DNA, 33 bp, Homo sapien
tacaaagtagcagtccaaaggggaatttagtcc

SEQ ID NO: 676214 - DNA, 33 bp, Homo sapien
tacaaagtagcagtccgaaggggaatttagtcc

SEQ ID NO: 676215 - DNA, 33 bp, Homo sapien
tgaatgtgaaggcccacgacattactacacact

SEQ ID NO: 676216 - DNA, 33 bp, Homo sapien
tgaatgtgaaggcccatgacattactacacact

SEQ ID NO: 676217 - DNA, 33 bp, Homo sapien
agagtaaagaaggttaaatgtgaaagtgagaga

SEQ ID NO: 676218 - DNA, 33 bp, Homo sapien
agagtaaagaaggttagatgtgaaagtgagaga

SEQ ID NO: 676219 - DNA, 33 bp, Homo sapien
ctcagcctacctaaaccactgtaggtcagaaaa

SEQ ID NO: 676220 - DNA, 33 bp, Homo sapien
ctcagcctacctaaactactgtaggtcagaaaa

SEQ ID NO: 676221 - DNA, 33 bp, Homo sapien
cttcaaattataccagaaaactataattaccaa

SEQ ID NO: 676222 - DNA, 33 bp, Homo sapien
cttcaaattataccaggaaactataattaccaa

SEQ ID NO: 676223 - DNA, 33 bp, Homo sapien
aactgcgtgaaagaacaggttatccccatttta

SEQ ID NO: 676224 - DNA, 33 bp, Homo sapien
aactgcgtgaaagaacgggttatccccatttta

SEQ ID NO: 676225 - DNA, 33 bp, Homo sapien
catgtgtctcagagtaagatttatttgactttg

SEQ ID NO: 676226 - DNA, 33 bp, Homo sapien
catgtgtctcagagtaggatttatttgactttg

SEQ ID NO: 676227 - DNA, 33 bp, Homo sapien
caaaaatcttaaattacggacagtggaatgaga

SEQ ID NO: 676228 - DNA, 33 bp, Homo sapien
caaaaatcttaaattatggacagtggaatgaga

SEQ ID NO: 676229 - DNA, 33 bp, Homo sapien
gatgcaggtatttggaaaaccacagtgtaaaca

SEQ ID NO: 676230 - DNA, 33 bp, Homo sapien
gatgcaggtatttggagaaccacagtgtaaaca

SEQ ID NO: 676231 - DNA, 33 bp, Homo sapien
accttgttgccagaaagtgtgtaggctatgttg

SEQ ID NO: 676232 - DNA, 33 bp, Homo sapien
accttgttgccagaaattgtgtaggctatgttg

SEQ ID NO: 676233 - DNA, 33 bp, Homo sapien
ggtagaggtcccccaacagttagagacaagcat

SEQ ID NO: 676234 - DNA, 33 bp, Homo sapien
ggtagaggtcccccaagagttagagacaagcat

SEQ ID NO: 676235 - DNA, 33 bp, Homo sapien
gttgtcatcaaagcaaactactgtatcccattt

SEQ ID NO: 676236 - DNA, 33 bp, Homo sapien
gttgtcatcaaagcaacctactgtatcccattt

SEQ ID NO: 676237 - DNA, 33 bp, Homo sapien
gttttagtgtcccatacgtcacacaattaacta

SEQ ID NO: 676238 - DNA, 33 bp, Homo sapien
gttttagtgtcccatatgtcacacaattaacta

SEQ ID NO: 676239 - DNA, 33 bp, Homo sapien
catttggggatctttccacactcccaaattagg

SEQ ID NO: 676240 - DNA, 33 bp, Homo sapien
catttggggatctttctacactcccaaattagg

SEQ ID NO: 676241 - DNA, 33 bp, Homo sapien
actttgtgatttttgcacaagttcctcggactc

SEQ ID NO: 676242 - DNA, 33 bp, Homo sapien
actttgtgatttttgcgcaagttcctcggactc

SEQ ID NO: 676243 - DNA, 33 bp, Homo sapien
cttcaagccttgagaagaagacacttaaaagaa

SEQ ID NO: 676244 - DNA, 33 bp, Homo sapien
cttcaagccttgagaataagacacttaaaagaa

SEQ ID NO: 676245 - DNA, 33 bp, Homo sapien
acatcagtaatagaataaagtggtcagctgctg

SEQ ID NO: 676246 - DNA, 33 bp, Homo sapien
acatcagtaatagaatgaagtggtcagctgctg

SEQ ID NO: 676247 - DNA, 33 bp, Homo sapien
tcattctttgctaccacgagaaggtcccaggta

SEQ ID NO: 676248 - DNA, 33 bp, Homo sapien
tcattctttgctaccatgagaaggtcccaggta

SEQ ID NO: 676249 - DNA, 33 bp, Homo sapien
tccagaagaaaaggcaatatctggtagaatgag

SEQ ID NO: 676250 - DNA, 33 bp, Homo sapien
tccagaagaaaaggcagtatctggtagaatgag

SEQ ID NO: 676251 - DNA, 33 bp, Homo sapien
aaaaattgttggcatacattattaaattgtcct

SEQ ID NO: 676252 - DNA, 33 bp, Homo sapien
aaaaattgttggcatatattattaaattgtcct

SEQ ID NO: 676253 - DNA, 33 bp, Homo sapien
tatgacttagaaagagaccaggaacaggaatag

SEQ ID NO: 676254 - DNA, 33 bp, Homo sapien
tatgacttagaaagaggccaggaacaggaatag

SEQ ID NO: 676255 - DNA, 33 bp, Homo sapien
cccacaaatcaacgtgaaaaattagtctctaca

SEQ ID NO: 676256 - DNA, 33 bp, Homo sapien
cccacaaatcaacgtggaaaattagtctctaca

SEQ ID NO: 676257 - DNA, 33 bp, Homo sapien
gtgcagaaaaaatgttcaaaagatcaattatca

SEQ ID NO: 676258 - DNA, 33 bp, Homo sapien
gtgcagaaaaaatgtttaaaagatcaattatca

SEQ ID NO: 676259 - DNA, 33 bp, Homo sapien
gagttccttgatgagactatttgtgcctatatt

SEQ ID NO: 676260 - DNA, 33 bp, Homo sapien
gagttccttgatgagattatttgtgcctatatt

SEQ ID NO: 676261 - DNA, 33 bp, Homo sapien
aagtagtgtctctttcaaatatagctttatctc

SEQ ID NO: 676262 - DNA, 33 bp, Homo sapien
aagtagtgtctctttcgaatatagctttatctc

SEQ ID NO: 676263 - DNA, 33 bp, Homo sapien
ttttgctaatagaaacccctcttaccctcactg

SEQ ID NO: 676264 - DNA, 33 bp, Homo sapien
ttttgctaatagaaactcctcttaccctcactg

SEQ ID NO: 676265 - DNA, 33 bp, Homo sapien
caaactgtaactataggaggtccatcacccaat

SEQ ID NO: 676266 - DNA, 33 bp, Homo sapien
caaactgtaactatagtaggtccatcacccaat

SEQ ID NO: 676267 - DNA, 33 bp, Homo sapien
aaatgcaaagaactcacactcacttcagggact

SEQ ID NO: 676268 - DNA, 33 bp, Homo sapien
aaatgcaaagaactcatactcacttcagggact

SEQ ID NO: 676269 - DNA, 33 bp, Homo sapien
gtacttagaggtaaaactgctagattacaagtt

SEQ ID NO: 676270 - DNA, 33 bp, Homo sapien
gtacttagaggtaaaattgctagattacaagtt

SEQ ID NO: 676271 - DNA, 33 bp, Homo sapien
tccagcttgggcatagcaagtccttgtctcaaa

SEQ ID NO: 676272 - DNA, 33 bp, Homo sapien
tccagcttgggcatagtaagtccttgtctcaaa

SEQ ID NO: 676273 - DNA, 33 bp, Homo sapien
gtgacttgcataaataatacactcaaggacatt

SEQ ID NO: 676274 - DNA, 33 bp, Homo sapien
gtgacttgcataaatactacactcaaggacatt

SEQ ID NO: 676275 - DNA, 33 bp, Homo sapien
tgggtggatattagctcactggtttagtactta

SEQ ID NO: 676276 - DNA, 33 bp, Homo sapien
tgggtggatattagctgactggtttagtactta

SEQ ID NO: 676277 - DNA, 33 bp, Homo sapien
tggcctggaattatacaacttctgagccaattt

SEQ ID NO: 676278 - DNA, 33 bp, Homo sapien
tggcctggaattatacgacttctgagccaattt

SEQ ID NO: 676279 - DNA, 33 bp, Homo sapien
gtgtagttattacaaaagaaatgtagtatacct

SEQ ID NO: 676280 - DNA, 33 bp, Homo sapien
gtgtagttattacaaaggaaatgtagtatacct

SEQ ID NO: 676281 - DNA, 33 bp, Homo sapien
ttttcttacctcctaaatagagtctgaagtctg

SEQ ID NO: 676282 - DNA, 33 bp, Homo sapien
ttttcttacctcctaagtagagtctgaagtctg

SEQ ID NO: 676283 - DNA, 33 bp, Homo sapien
gcataaaatagtcatcaaattataaacctctga

SEQ ID NO: 676284 - DNA, 33 bp, Homo sapien
gcataaaatagtcatccaattataaacctctga

SEQ ID NO: 676285 - DNA, 33 bp, Homo sapien
atctgacagaaaggataagaactcaagtttatt

SEQ ID NO: 676286 - DNA, 33 bp, Homo sapien
atctgacagaaaggatgagaactcaagtttatt

SEQ ID NO: 676287 - DNA, 33 bp, Homo sapien
tctgactcattgtcaccaaagaggaacctcctt

SEQ ID NO: 676288 - DNA, 33 bp, Homo sapien
tctgactcattgtcactaaagaggaacctcctt

SEQ ID NO: 676289 - DNA, 33 bp, Homo sapien
ctacttctgcttagccaaaagccaaaatagaca

SEQ ID NO: 676290 - DNA, 33 bp, Homo sapien
ctacttctgcttagcccaaagccaaaatagaca

SEQ ID NO: 676291 - DNA, 33 bp, Homo sapien
aatttgtcttgcagaaagggtgtactaaccaaa

SEQ ID NO: 676292 - DNA, 33 bp, Homo sapien
aatttgtcttgcagaaggggtgtactaaccaaa

SEQ ID NO: 676293 - DNA, 33 bp, Homo sapien
ccctccaagccaaagacagtaattgccagtgct

SEQ ID NO: 676294 - DNA, 33 bp, Homo sapien
ccctccaagccaaagatagtaattgccagtgct

SEQ ID NO: 676295 - DNA, 33 bp, Homo sapien
actgaggcttaaaaaaataataattggccagtc

SEQ ID NO: 676296 - DNA, 33 bp, Homo sapien
actgaggcttaaaaaagtaataattggccagtc

SEQ ID NO: 676297 - DNA, 33 bp, Homo sapien
cagagtgaatcacgtcaactttgttttggagca

SEQ ID NO: 676298 - DNA, 33 bp, Homo sapien
cagagtgaatcacgtcgactttgttttggagca

SEQ ID NO: 676299 - DNA, 33 bp, Homo sapien
ttggagggaaaaaatacgaaagtcattgccagt

SEQ ID NO: 676300 - DNA, 33 bp, Homo sapien
ttggagggaaaaaatatgaaagtcattgccagt

SEQ ID NO: 676301 - DNA, 33 bp, Homo sapien
gatctcctagatattacattgatacctagctgt

SEQ ID NO: 676302 - DNA, 33 bp, Homo sapien
gatctcctagatattagattgatacctagctgt

SEQ ID NO: 676303 - DNA, 33 bp, Homo sapien
tttcagttgccccttaaatgtccaagaggaaat

SEQ ID NO: 676304 - DNA, 33 bp, Homo sapien
tttcagttgccccttagatgtccaagaggaaat

SEQ ID NO: 676305 - DNA, 33 bp, Homo sapien
aggcacctgacatcaaagtgaggttgctgttct

SEQ ID NO: 676306 - DNA, 33 bp, Homo sapien
aggcacctgacatcaaggtgaggttgctgttct

SEQ ID NO: 676307 - DNA, 33 bp, Homo sapien
caggatgactaaaggcaacttcccaccatgctt

SEQ ID NO: 676308 - DNA, 33 bp, Homo sapien
caggatgactaaaggcgacttcccaccatgctt

SEQ ID NO: 676309 - DNA, 33 bp, Homo sapien
aaaagaccatgagttcactgaataccaagagct

SEQ ID NO: 676310 - DNA, 33 bp, Homo sapien
aaaagaccatgagttcgctgaataccaagagct

SEQ ID NO: 676311 - DNA, 33 bp, Homo sapien; identical to SEQ ID NO: 676309

SEQ ID NO: 676312 - DNA, 33 bp, Homo sapien; identical to SEQ ID NO: 676310

SEQ ID NO: 676313 - DNA, 33 bp, Homo sapien
tactaacaagtgctgcaagaagcctttgattct

SEQ ID NO: 676314 - DNA, 33 bp, Homo sapien
tactaacaagtgctgcgagaagcctttgattct

SEQ ID NO: 676315 - DNA, 33 bp, Homo sapien
atgtttggcactaatacatctcaaaaacaagtg

SEQ ID NO: 676316 - DNA, 33 bp, Homo sapien
atgtttggcactaatatatctcaaaaacaagtg

SEQ ID NO: 676317 - DNA, 33 bp, Homo sapien
agccttggggcagatcagaaaaaaagagcaagt

SEQ ID NO: 676318 - DNA, 33 bp, Homo sapien
agccttggggcagatccgaaaaaaagagcaagt

SEQ ID NO: 676319 - DNA, 33 bp, Homo sapien
ggggagggctacctgacaggagctgtgactttt

SEQ ID NO: 676320 - DNA, 33 bp, Homo sapien
ggggagggctacctgataggagctgtgactttt

SEQ ID NO: 676321 - DNA, 33 bp, Homo sapien
catacctatattgtaccacttatcccacagtgt

SEQ ID NO: 676322 - DNA, 33 bp, Homo sapien
catacctatattgtactacttatcccacagtgt

SEQ ID NO: 676323 - DNA, 33 bp, Homo sapien
gcgggctcgtttctcacgttccagtctagaata

SEQ ID NO: 676324 - DNA, 33 bp, Homo sapien
gcgggctcgtttctcatgttccagtctagaata

SEQ ID NO: 676325 - DNA, 33 bp, Homo sapien
taataagaagtgataacaatttgctattttcat

SEQ ID NO: 676326 - DNA, 33 bp, Homo sapien
taataagaagtgataataatttgctattttcat

SEQ ID NO: 676327 - DNA, 33 bp, Homo sapien
gatgaaactctcctacaaagaagggccaaaccg

SEQ ID NO: 676328 - DNA, 33 bp, Homo sapien
gatgaaactctcctaccaagaagggccaaaccg

SEQ ID NO: 676329 - DNA, 33 bp, Homo sapien
aatttttaaaaatgcacgtagcctcagaaaagt

SEQ ID NO: 676330 - DNA, 33 bp, Homo sapien
aatttttaaaaatgcatgtagcctcagaaaagt

SEQ ID NO: 676331 - DNA, 33 bp, Homo sapien
ggctaaaaagaaatggcagcatgcaatacttga

SEQ ID NO: 676332 - DNA, 33 bp, Homo sapien
ggctaaaaagaaatgggagcatgcaatacttga

SEQ ID NO: 676333 - DNA, 33 bp, Homo sapien
gaagcactggttactaagtgtagaacactaagg

SEQ ID NO: 676334 - DNA, 33 bp, Homo sapien
gaagcactggttactacgtgtagaacactaagg

SEQ ID NO: 676335 - DNA, 33 bp, Homo sapien
cttactggaaaaatcaatatcagaatcttgcca

SEQ ID NO: 676336 - DNA, 33 bp, Homo sapien
cttactggaaaaatcagtatcagaatcttgcca

SEQ ID NO: 676337 - DNA, 33 bp, Homo sapien
catccagttgtccacgccagtaactctactaga

SEQ ID NO: 676338 - DNA, 33 bp, Homo sapien
catccagttgtccacggcagtaactctactaga

SEQ ID NO: 676339 - DNA, 33 bp, Homo sapien
cttatgcagaattaccaagtaaaagatgtctct

SEQ ID NO: 676340 - DNA, 33 bp, Homo sapien
cttatgcagaattaccgagtaaaagatgtctct

SEQ ID NO: 676341 - DNA, 33 bp, Homo sapien
ttcaacagcagatccagtgaagtaaatgtgttc

SEQ ID NO: 676342 - DNA, 33 bp, Homo sapien
ttcaacagcagatccattgaagtaaatgtgttc

SEQ ID NO: 676343 - DNA, 33 bp, Homo sapien
tgaatttcctcagctacaaatctcaagatattc

SEQ ID NO: 676344 - DNA, 33 bp, Homo sapien
tgaatttcctcagctataaatctcaagatattc

SEQ ID NO: 676345 - DNA, 33 bp, Homo sapien
gtcacaacaaatccacaccaggacaaatcacat

SEQ ID NO: 676346 - DNA, 33 bp, Homo sapien
gtcacaacaaatccacgccaggacaaatcacat

SEQ ID NO: 676347 - DNA, 33 bp, Homo sapien
aatcaggccaggttcaagatgacagtgaaatgc

SEQ ID NO: 676348 - DNA, 33 bp, Homo sapien
aatcaggccaggttcacgatgacagtgaaatgc

SEQ ID NO: 676349 - DNA, 33 bp, Homo sapien
tcaatcctgataaaaagtctatgtggataactg

SEQ ID NO: 676350 - DNA, 33 bp, Homo sapien
tcaatcctgataaaaattctatgtggataactg

SEQ ID NO: 676351 - DNA, 33 bp, Homo sapien
ataaggtttgggagaccctctggattttgcaag

SEQ ID NO: 676352 - DNA, 33 bp, Homo sapien
ataaggtttgggagactctctggattttgcaag

SEQ ID NO: 676353 - DNA, 33 bp, Homo sapien
gagacacccatggatccaaaaatcataaaaaaa

SEQ ID NO: 676354 - DNA, 33 bp, Homo sapien
gagacacccatggatctaaaaatcataaaaaaa

SEQ ID NO: 676355 - DNA, 33 bp, Homo sapien
gataaatgctatcatacgcctaactataattct

SEQ ID NO: 676356 - DNA, 33 bp, Homo sapien
gataaatgctatcatatgcctaactataattct

SEQ ID NO: 676357 - DNA, 33 bp, Homo sapien
tgaaacatttggatgccgaggggaaaaactctt

SEQ ID NO: 676358 - DNA, 33 bp, Homo sapien
tgaaacatttggatgctgaggggaaaaactctt

SEQ ID NO: 676359 - DNA, 33 bp, Homo sapien
atttgctatgtctggaacacaaacttggtgaaa

SEQ ID NO: 676360 - DNA, 33 bp, Homo sapien
atttgctatgtctggagcacaaacttggtgaaa

SEQ ID NO: 676361 - DNA, 33 bp, Homo sapien
aagctgaaattattgaatatcttctgatgcttt

SEQ ID NO: 676362 - DNA, 33 bp, Homo sapien
aagctgaaattattgagtatcttctgatgcttt

SEQ ID NO: 676363 - DNA, 33 bp, Homo sapien
agcctgttacctatcaagtcgtcccctctttgc

SEQ ID NO: 676364 - DNA, 33 bp, Homo sapien
agcctgttacctatcaggtcgtcccctctttgc

SEQ ID NO: 676365 - DNA, 33 bp, Homo sapien
ctcaacgctactgaccaatgacactgggctact

SEQ ID NO: 676366 - DNA, 33 bp, Homo sapien
ctcaacgctactgaccgatgacactgggctact

SEQ ID NO: 676367 - DNA, 33 bp, Homo sapien
agcttataatccattacagatcgggacttaata

SEQ ID NO: 676368 - DNA, 33 bp, Homo sapien
agcttataatccattagagatcgggacttaata

SEQ ID NO: 676369 - DNA, 33 bp, Homo sapien
ataaccaaacagaaaaagcatttttgcaatgaa

SEQ ID NO: 676370 - DNA, 33 bp, Homo sapien
ataaccaaacagaaaaggcatttttgcaatgaa

SEQ ID NO: 676371 - DNA, 33 bp, Homo sapien
ctatatgttctttccacaatctcccttctcttg

SEQ ID NO: 676372 - DNA, 33 bp, Homo sapien
ctatatgttctttccataatctcccttctcttg

SEQ ID NO: 676373 - DNA, 33 bp, Homo sapien
gcatccaactaaggaacctgtcatattaataag

SEQ ID NO: 676374 - DNA, 33 bp, Homo sapien
gcatccaactaaggaatctgtcatattaataag

SEQ ID NO: 676375 - DNA, 33 bp, Homo sapien
ccttctaggagcttacagacaacagaggagatg

SEQ ID NO: 676376 - DNA, 33 bp, Homo sapien
ccttctaggagcttacggacaacagaggagatg

SEQ ID NO: 676377 - DNA, 33 bp, Homo sapien
gaaatgatgtgaaaccacttggcgcactagaaa

SEQ ID NO: 676378 - DNA, 33 bp, Homo sapien
gaaatgatgtgaaaccgcttggcgcactagaaa

SEQ ID NO: 676379 - DNA, 33 bp, Homo sapien
caggtgtgcctcagacaaagttgatatgctttt

SEQ ID NO: 676380 - DNA, 33 bp, Homo sapien
caggtgtgcctcagacgaagttgatatgctttt

SEQ ID NO: 676381 - DNA, 33 bp, Homo sapien
acattccaggagagaacgctctaacataatacc

SEQ ID NO: 676382 - DNA, 33 bp, Homo sapien
acattccaggagagaaggctctaacataatacc

SEQ ID NO: 676383 - DNA, 33 bp, Homo sapien
ccaccgtctctttctagctgtatatgaatacgt

SEQ ID NO: 676384 - DNA, 33 bp, Homo sapien
ccaccgtctctttctatctgtatatgaatacgt

SEQ ID NO: 676385 - DNA, 33 bp, Homo sapien
tcatgattataacgtaggtgggaccaaacttca

SEQ ID NO: 676386 - DNA, 33 bp, Homo sapien
tcatgattataacgtatgtgggaccaaacttca

SEQ ID NO: 676387 - DNA, 33 bp, Homo sapien
agactgtagagaagcacggtctgagactgggtg

SEQ ID NO: 676388 - DNA, 33 bp, Homo sapien
agactgtagagaagcatggtctgagactgggtg

SEQ ID NO: 676389 - DNA, 33 bp, Homo sapien
atggtgtatgtagcaacctggataatggaatgg

SEQ ID NO: 676390 - DNA, 33 bp, Homo sapien
atggtgtatgtagcaatctggataatggaatgg

SEQ ID NO: 676391 - DNA, 33 bp, Homo sapien
ttgatgaggtaagttcaactattctgtttctct

SEQ ID NO: 676392 - DNA, 33 bp, Homo sapien
ttgatgaggtaagttcgactattctgtttctct

SEQ ID NO: 676393 - DNA, 33 bp, Homo sapien
gactttcactcgtcaacgaacagctaccatttg

SEQ ID NO: 676394 - DNA, 33 bp, Homo sapien
gactttcactcgtcaatgaacagctaccatttg

SEQ ID NO: 676395 - DNA, 33 bp, Homo sapien
ggctgctttggaaaaccgagagaacctcagctg

SEQ ID NO: 676396 - DNA, 33 bp, Homo sapien
ggctgctttggaaaactgagagaacctcagctg

SEQ ID NO: 676397 - DNA, 33 bp, Homo sapien
tcattcttttctttgacagtcgattgcttcttc

SEQ ID NO: 676398 - DNA, 33 bp, Homo sapien
tcattcttttctttgatagtcgattgcttcttc

SEQ ID NO: 676399 - DNA, 33 bp, Homo sapien
ggtgtgcttgactaagaccctgccaatggcgtg

SEQ ID NO: 676400 - DNA, 33 bp, Homo sapien
ggtgtgcttgactaagtccctgccaatggcgtg

SEQ ID NO: 676401 - DNA, 33 bp, Homo sapien
gtgctatgagatcagacggaaaacagatgaaca

SEQ ID NO: 676402 - DNA, 33 bp, Homo sapien
gtgctatgagatcagatggaaaacagatgaaca

SEQ ID NO: 676403 - DNA, 33 bp, Homo sapien
atttaatttcaaccacacattttactaatgaaa

SEQ ID NO: 676404 - DNA, 33 bp, Homo sapien
atttaatttcaaccacgcattttactaatgaaa

SEQ ID NO: 676405 - DNA, 33 bp, Homo sapien
catccttctggcaaatcagttgagactattaaa

SEQ ID NO: 676406 - DNA, 33 bp, Homo sapien
catccttctggcaaattagttgagactattaaa

SEQ ID NO: 676407 - DNA, 33 bp, Homo sapien
ttagagttaagcagaacgtgattttgaatctag

SEQ ID NO: 676408 - DNA, 33 bp, Homo sapien
ttagagttaagcagaatgtgattttgaatctag

SEQ ID NO: 676409 - DNA, 33 bp, Homo sapien
aatgcatcttccctgaacaaaagagagaggagc

SEQ ID NO: 676410 - DNA, 33 bp, Homo sapien
aatgcatcttccctgagcaaaagagagaggagc

SEQ ID NO: 676411 - DNA, 33 bp, Homo sapien
aactttctacaagacaataagatatcaccgttg

SEQ ID NO: 676412 - DNA, 33 bp, Homo sapien
aactttctacaagacagtaagatatcaccgttg

SEQ ID NO: 676413 - DNA, 33 bp, Homo sapien
cagtttataagaagaacagttgaaatttgagcc

SEQ ID NO: 676414 - DNA, 33 bp, Homo sapien
cagtttataagaagaagagttgaaatttgagcc

SEQ ID NO: 676415 - DNA, 33 bp, Homo sapien
tgatggtgggttacaacgcctaggaaccacagt

SEQ ID NO: 676416 - DNA, 33 bp, Homo sapien
tgatggtgggttacaatgcctaggaaccacagt

SEQ ID NO: 676417 - DNA, 33 bp, Homo sapien
tgcatacaattctcacggattcacctgcaattg

SEQ ID NO: 676418 - DNA, 33 bp, Homo sapien
tgcatacaattctcactgattcacctgcaattg

SEQ ID NO: 676419 - DNA, 33 bp, Homo sapien
acataactcggcaagacgggattcaaagaggtg

SEQ ID NO: 676420 - DNA, 33 bp, Homo sapien
acataactcggcaagatgggattcaaagaggtg

SEQ ID NO: 676421 - DNA, 33 bp, Homo sapien
atgcatgctatttaaacatggataaatctcatt

SEQ ID NO: 676422 - DNA, 33 bp, Homo sapien
atgcatgctatttaaagatggataaatctcatt

SEQ ID NO: 676423 - DNA, 33 bp, Homo sapien
atgtttagctatttcaccattttctagtatatt

SEQ ID NO: 676424 - DNA, 33 bp, Homo sapien
atgtttagctatttcatcattttctagtatatt

SEQ ID NO: 676425 - DNA, 33 bp, Homo sapien
gggaataattgggagactcaattcagtttgaaa

SEQ ID NO: 676426 - DNA, 33 bp, Homo sapien
gggaataattgggagattcaattcagtttgaaa

SEQ ID NO: 676427 - DNA, 33 bp, Homo sapien
tttgtttggtgtaatacagacagctccactaga

SEQ ID NO: 676428 - DNA, 33 bp, Homo sapien
tttgtttggtgtaatatagacagctccactaga

SEQ ID NO: 676429 - DNA, 33 bp, Homo sapien
tctaaaagttgaggaaaacacagtaataatcac

SEQ ID NO: 676430 - DNA, 33 bp, Homo sapien
tctaaaagttgaggaacacacagtaataatcac

SEQ ID NO: 676431 - DNA, 33 bp, Homo sapien
agtgccacatactgctaaatacattgattcatc

SEQ ID NO: 676432 - DNA, 33 bp, Homo sapien
agtgccacatactgctgaatacattgattcatc

SEQ ID NO: 676433 - DNA, 33 bp, Homo sapien
gtactgtaacatatcacctcaggacttcacaat

SEQ ID NO: 676434 - DNA, 33 bp, Homo sapien
gtactgtaacatatcatctcaggacttcacaat

SEQ ID NO: 676435 - DNA, 33 bp, Homo sapien
ggttaggtcttatctaccgttgtatggctctgc

SEQ ID NO: 676436 - DNA, 33 bp, Homo sapien
ggttaggtcttatctatcgttgtatggctctgc

SEQ ID NO: 676437 - DNA, 33 bp, Homo sapien
acagggagcgtgtttaaaaaggtcacccctgga

SEQ ID NO: 676438 - DNA, 33 bp, Homo sapien
acagggagcgtgtttataaaggtcacccctgga

SEQ ID NO: 676439 - DNA, 33 bp, Homo sapien
tggagcagcatttagacatagaactactcttta

SEQ ID NO: 676440 - DNA, 33 bp, Homo sapien
tggagcagcatttagatatagaactactcttta

SEQ ID NO: 676441 - DNA, 33 bp, Homo sapien
atattagtatattgcaccttgaaaaataaagta

SEQ ID NO: 676442 - DNA, 33 bp, Homo sapien
atattagtatattgcatcttgaaaaataaagta

SEQ ID NO: 676443 - DNA, 33 bp, Homo sapien
tctactatatgtaacccaagaggacaaaatgga

SEQ ID NO: 676444 - DNA, 33 bp, Homo sapien
tctactatatgtaacctaagaggacaaaatgga

SEQ ID NO: 676445 - DNA, 33 bp, Homo sapien
attaagaaagctgtaactcaccaaaattagttc

SEQ ID NO: 676446 - DNA, 33 bp, Homo sapien
attaagaaagctgtaattcaccaaaattagttc

SEQ ID NO: 676447 - DNA, 33 bp, Homo sapien
agatgagcgtactttcacaatacctcagtgaga

SEQ ID NO: 676448 - DNA, 33 bp, Homo sapien
agatgagcgtactttctcaatacctcagtgaga

SEQ ID NO: 676449 - DNA, 33 bp, Homo sapien
ctgcctcaaatgcaaagactgtaatatgaaaat

SEQ ID NO: 676450 - DNA, 33 bp, Homo sapien
ctgcctcaaatgcaaatactgtaatatgaaaat

SEQ ID NO: 676451 - DNA, 33 bp, Homo sapien
attccagcatccagagaaaattactactaatat

SEQ ID NO: 676452 - DNA, 33 bp, Homo sapien
attccagcatccagaggaaattactactaatat

SEQ ID NO: 676453 - DNA, 33 bp, Homo sapien
ctaggggcaatttaaaatcatgctgacagagtt

SEQ ID NO: 676454 - DNA, 33 bp, Homo sapien
ctaggggcaatttaaagtcatgctgacagagtt

SEQ ID NO: 676455 - DNA, 33 bp, Homo sapien
tgctctctggcactgccacctgaattttcttgg

SEQ ID NO: 676456 - DNA, 33 bp, Homo sapien
tgctctctggcactgctacctgaattttcttgg

SEQ ID NO: 676457 - DNA, 33 bp, Homo sapien
tttaatcaagtagtcaaaactggctactggaga

SEQ ID NO: 676458 - DNA, 33 bp, Homo sapien
tttaatcaagtagtcagaactggctactggaga

SEQ ID NO: 676459 - DNA, 33 bp, Homo sapien
tggggttggtataagagctcctaagtggtcaga

SEQ ID NO: 676460 - DNA, 33 bp, Homo sapien
tggggttggtataagatctcctaagtggtcaga

SEQ ID NO: 676461 - DNA, 33 bp, Homo sapien
cggcgaggctgtttgcacctttgcttttggtgg

SEQ ID NO: 676462 - DNA, 33 bp, Homo sapien
cggcgaggctgtttgctcctttgcttttggtgg

SEQ ID NO: 676463 - DNA, 33 bp, Homo sapien
gatttatagaattaacaacattgagagacacaa

SEQ ID NO: 676464 - DNA, 33 bp, Homo sapien
gatttatagaattaacgacattgagagacacaa

SEQ ID NO: 676465 - DNA, 33 bp, Homo sapien
gatttaatttatcataagtagcacctcagacac

SEQ ID NO: 676466 - DNA, 33 bp, Homo sapien
gatttaatttatcatacgtagcacctcagacac

SEQ ID NO: 676467 - DNA, 33 bp, Homo sapien
agtgctatcaccataaacatacacactccttcc

SEQ ID NO: 676468 - DNA, 33 bp, Homo sapien
agtgctatcaccataatcatacacactccttcc

SEQ ID NO: 676469 - DNA, 33 bp, Homo sapien
ttcaatttctctaccaaatggctgagtctaatt

SEQ ID NO: 676470 - DNA, 33 bp, Homo sapien
ttcaatttctctaccacatggctgagtctaatt

SEQ ID NO: 676471 - DNA, 33 bp, Homo sapien
tagcaaccagaaataactgacttagagacttgc

SEQ ID NO: 676472 - DNA, 33 bp, Homo sapien
tagcaaccagaaataattgacttagagacttgc

SEQ ID NO: 676473 - DNA, 33 bp, Homo sapien
tttccaaaacaagatgaaactagcaagcactcc

SEQ ID NO: 676474 - DNA, 33 bp, Homo sapien
tttccaaaacaagatgcaactagcaagcactcc

SEQ ID NO: 676475 - DNA, 33 bp, Homo sapien
aagtcatttgagccataatagaaatgctgatta

SEQ ID NO: 676476 - DNA, 33 bp, Homo sapien
aagtcatttgagccatgatagaaatgctgatta

SEQ ID NO: 676477 - DNA, 33 bp, Homo sapien
attggatgtgtaaatacgtttctcaagaaggaa

SEQ ID NO: 676478 - DNA, 33 bp, Homo sapien
attggatgtgtaaatatgtttctcaagaaggaa

SEQ ID NO: 676479 - DNA, 33 bp, Homo sapien
gaaggtagcagcacaaagaatggaattgccagg

SEQ ID NO: 676480 - DNA, 33 bp, Homo sapien
gaaggtagcagcacaacgaatggaattgccagg

SEQ ID NO: 676481 - DNA, 33 bp, Homo sapien
acatcacacactagaagctggcaaaggttaatc

SEQ ID NO: 676482 - DNA, 33 bp, Homo sapien
acatcacacactagaatctggcaaaggttaatc

SEQ ID NO: 676483 - DNA, 33 bp, Homo sapien
ccatagttgaagacaccagatagagtcacaact

SEQ ID NO: 676484 - DNA, 33 bp, Homo sapien
ccatagttgaagacacgagatagagtcacaact

SEQ ID NO: 676485 - DNA, 33 bp, Homo sapien
acacgtgtgactttcacaataaaaaatcaaatt

SEQ ID NO: 676486 - DNA, 33 bp, Homo sapien
acacgtgtgactttcataataaaaaatcaaatt

SEQ ID NO: 676487 - DNA, 33 bp, Homo sapien
agccataaatattggcactatctttaacatgat

SEQ ID NO: 676488 - DNA, 33 bp, Homo sapien
agccataaatattggcgctatctttaacatgat

SEQ ID NO: 676489 - DNA, 33 bp, Homo sapien
tcataaaggtttaaggccatatagggtcacagt

SEQ ID NO: 676490 - DNA, 33 bp, Homo sapien
tcataaaggtttaaggtcatatagggtcacagt

SEQ ID NO: 676491 - DNA, 33 bp, Homo sapien
ctgatatctctgctacaatagtcactttttgtg

SEQ ID NO: 676492 - DNA, 33 bp, Homo sapien
ctgatatctctgctacgatagtcactttttgtg

SEQ ID NO: 676493 - DNA, 33 bp, Homo sapien
tttgctaacatcgagaagcttgatatttcttac

SEQ ID NO: 676494 - DNA, 33 bp, Homo sapien
tttgctaacatcgagatgcttgatatttcttac

SEQ ID NO: 676495 - DNA, 33 bp, Homo sapien
ttctaattccacatgaccttggctggttagaga

SEQ ID NO: 676496 - DNA, 33 bp, Homo sapien
ttctaattccacatgatcttggctggttagaga

SEQ ID NO: 676497 - DNA, 33 bp, Homo sapien
aacctgatgactaaaccatttaggtgcgataaa

SEQ ID NO: 676498 - DNA, 33 bp, Homo sapien
aacctgatgactaaacgatttaggtgcgataaa

SEQ ID NO: 676499 - DNA, 33 bp, Homo sapien
acaaatgagtatgacccaagtcttttcagcttt

SEQ ID NO: 676500 - DNA, 33 bp, Homo sapien
acaaatgagtatgaccgaagtcttttcagcttt

SEQ ID NO: 676501 - DNA, 33 bp, Homo sapien
gaaagaggagagttgaacttgtttagtcagata

SEQ ID NO: 676502 - DNA, 33 bp, Homo sapien
gaaagaggagagttgatcttgtttagtcagata

SEQ ID NO: 676503 - DNA, 33 bp, Homo sapien
catatccattagcaataatcttttaacttttat

SEQ ID NO: 676504 - DNA, 33 bp, Homo sapien
catatccattagcaatcatcttttaacttttat

SEQ ID NO: 676505 - DNA, 33 bp, Homo sapien
atgttgaggtggtaaagacaaagaactttgttt

SEQ ID NO: 676506 - DNA, 33 bp, Homo sapien
atgttgaggtggtaaatacaaagaactttgttt

SEQ ID NO: 676507 - DNA, 33 bp, Homo sapien
aacaaacaaacatagagaataatttttccttaa

SEQ ID NO: 676508 - DNA, 33 bp, Homo sapien
aacaaacaaacatagataataatttttccttaa

SEQ ID NO: 676509 - DNA, 33 bp, Homo sapien
aggagacaatgccgtacgaagatcaaggcagag

SEQ ID NO: 676510 - DNA, 33 bp, Homo sapien
aggagacaatgccgtatgaagatcaaggcagag

SEQ ID NO: 676511 - DNA, 33 bp, Homo sapien
tttggcatttagtctcaaaggatattttaatag

SEQ ID NO: 676512 - DNA, 33 bp, Homo sapien
tttggcatttagtctcgaaggatattttaatag

SEQ ID NO: 676513 - DNA, 33 bp, Homo sapien
gtggctgtagataccaaagattttagttgcctc

SEQ ID NO: 676514 - DNA, 33 bp, Homo sapien
gtggctgtagataccagagattttagttgcctc

SEQ ID NO: 676515 - DNA, 33 bp, Homo sapien
gcagaagaactctctaaactctaaagtatccag

SEQ ID NO: 676516 - DNA, 33 bp, Homo sapien
gcagaagaactctctacactctaaagtatccag

SEQ ID NO: 676517 - DNA, 33 bp, Homo sapien
caagcacctactataacatcatgtgaatggagg

SEQ ID NO: 676518 - DNA, 33 bp, Homo sapien
caagcacctactataatatcatgtgaatggagg

SEQ ID NO: 676519 - DNA, 33 bp, Homo sapien
ctgtattggttttctcccagaacagatagcaaa

SEQ ID NO: 676520 - DNA, 33 bp, Homo sapien
ctgtattggttttctctcagaacagatagcaaa

SEQ ID NO: 676521 - DNA, 33 bp, Homo sapien
atgtaagacaataaaactgaaatcgtatcctaa

SEQ ID NO: 676522 - DNA, 33 bp, Homo sapien
atgtaagacaataaaattgaaatcgtatcctaa

SEQ ID NO: 676523 - DNA, 33 bp, Homo sapien
ttcgagctctcaaaacagaagggaaatagaatt

SEQ ID NO: 676524 - DNA, 33 bp, Homo sapien
ttcgagctctcaaaacggaagggaaatagaatt

SEQ ID NO: 676525 - DNA, 33 bp, Homo sapien
gaagataactgtcttgaaagccatcctattcag

SEQ ID NO: 676526 - DNA, 33 bp, Homo sapien
gaagataactgtcttgtaagccatcctattcag

SEQ ID NO: 676527 - DNA, 33 bp, Homo sapien
atcgccattacacataccttaaccgagtaactc

SEQ ID NO: 676528 - DNA, 33 bp, Homo sapien
atcgccattacacatatcttaaccgagtaactc

SEQ ID NO: 676529 - DNA, 33 bp, Homo sapien
aagaatgtcttcaaagcatacagtcagataaag

SEQ ID NO: 676530 - DNA, 33 bp, Homo sapien
aagaatgtcttcaaaggatacagtcagataaag

SEQ ID NO: 676531 - DNA, 33 bp, Homo sapien
atttcttcttggttcaatattggcaggttgtat

SEQ ID NO: 676532 - DNA, 33 bp, Homo sapien
atttcttcttggttcagtattggcaggttgtat

SEQ ID NO: 676533 - DNA, 33 bp, Homo sapien
aaggcacatatgaagtcaaccattctttggaca

SEQ ID NO: 676534 - DNA, 33 bp, Homo sapien
aaggcacatatgaagttaaccattctttggaca

SEQ ID NO: 676535 - DNA, 33 bp, Homo sapien
gcgtagaaatcattgcagaagcacatcaaacac

SEQ ID NO: 676536 - DNA, 33 bp, Homo sapien
gcgtagaaatcattgcggaagcacatcaaacac

SEQ ID NO: 676537 - DNA, 33 bp, Homo sapien
gttcaagggtaggtccaccatgagcagggctgc

SEQ ID NO: 676538 - DNA, 33 bp, Homo sapien
gttcaagggtaggtccgccatgagcagggctgc

SEQ ID NO: 676539 - DNA, 33 bp, Homo sapien
acacttgcctcccaaacgagaaccaagacaatg

SEQ ID NO: 676540 - DNA, 33 bp, Homo sapien
acacttgcctcccaaatgagaaccaagacaatg

SEQ ID NO: 676541 - DNA, 33 bp, Homo sapien
tgcaagaatgatgtaaagaacattgttgtatat

SEQ ID NO: 676542 - DNA, 33 bp, Homo sapien
tgcaagaatgatgtaaggaacattgttgtatat

SEQ ID NO: 676543 - DNA, 33 bp, Homo sapien
ttataattccagtttaacatcttctcacagacc

SEQ ID NO: 676544 - DNA, 33 bp, Homo sapien
ttataattccagtttagcatcttctcacagacc

SEQ ID NO: 676545 - DNA, 33 bp, Homo sapien
gttttgatagtgagaacgagaagcaagcagaag

SEQ ID NO: 676546 - DNA, 33 bp, Homo sapien
gttttgatagtgagaatgagaagcaagcagaag

SEQ ID NO: 676547 - DNA, 33 bp, Homo sapien
ttaatgcttgagttccaaaaataaatacttcag

SEQ ID NO: 676548 - DNA, 33 bp, Homo sapien
ttaatgcttgagttcccaaaataaatacttcag

SEQ ID NO: 676549 - DNA, 33 bp, Homo sapien
atcatgagggatatgcaaaccaaactacaagga

SEQ ID NO: 676550 - DNA, 33 bp, Homo sapien
atcatgagggatatgccaaccaaactacaagga

SEQ ID NO: 676551 - DNA, 33 bp, Homo sapien
ataatagaatagtgtaaatggtaaagtggaacc

SEQ ID NO: 676552 - DNA, 33 bp, Homo sapien
ataatagaatagtgtacatggtaaagtggaacc

SEQ ID NO: 676553 - DNA, 33 bp, Homo sapien
taacctcctactattacgatcctggagtgcaaa

SEQ ID NO: 676554 - DNA, 33 bp, Homo sapien
taacctcctactattatgatcctggagtgcaaa

SEQ ID NO: 676555 - DNA, 33 bp, Homo sapien
tttcctagatttggcaagttctctgttattatc

SEQ ID NO: 676556 - DNA, 33 bp, Homo sapien
tttcctagatttggcaggttctctgttattatc

SEQ ID NO: 676557 - DNA, 33 bp, Homo sapien
agtacatttgaattcacgagagaaagaaatgca

SEQ ID NO: 676558 - DNA, 33 bp, Homo sapien
agtacatttgaattcatgagagaaagaaatgca

SEQ ID NO: 676559 - DNA, 33 bp, Homo sapien
caattatccaacaaacagatgcttataatcttg

SEQ ID NO: 676560 - DNA, 33 bp, Homo sapien
caattatccaacaaacggatgcttataatcttg

SEQ ID NO: 676561 - DNA, 33 bp, Homo sapien
ctgcactgtcaatgacacttcaaaagaaaactg

SEQ ID NO: 676562 - DNA, 33 bp, Homo sapien
ctgcactgtcaatgactcttcaaaagaaaactg

SEQ ID NO: 676563 - DNA, 33 bp, Homo sapien
gagcattgactttagacgtggtcttttatttta

SEQ ID NO: 676564 - DNA, 33 bp, Homo sapien
gagcattgactttagatgtggtcttttatttta

SEQ ID NO: 676565 - DNA, 33 bp, Homo sapien
acagaatactcttgcaatgatataccattttgt

SEQ ID NO: 676566 - DNA, 33 bp, Homo sapien
acagaatactcttgcattgatataccattttgt

SEQ ID NO: 676567 - DNA, 33 bp, Homo sapien
catggttcccatgctgaagttcagattgtcaaa

SEQ ID NO: 676568 - DNA, 33 bp, Homo sapien
catggttcccatgctgtagttcagattgtcaaa

SEQ ID NO: 676569 - DNA, 33 bp, Homo sapien
acttgtattgtgatttaaaacagagaaatctcc

SEQ ID NO: 676570 - DNA, 33 bp, Homo sapien
acttgtattgtgatttgaaacagagaaatctcc

SEQ ID NO: 676571 - DNA, 33 bp, Homo sapien
tagaggagccaaactggatgataagtctgatgt

SEQ ID NO: 676572 - DNA, 33 bp, Homo sapien
tagaggagccaaactgtatgataagtctgatgt

SEQ ID NO: 676573 - DNA, 33 bp, Homo sapien
aacaacctttcttacaatagaaccatcctttct

SEQ ID NO: 676574 - DNA, 33 bp, Homo sapien
aacaacctttcttacagtagaaccatcctttct

SEQ ID NO: 676575 - DNA, 33 bp, Homo sapien
tactagctgatgccagcaggtgccaaaggttgt

SEQ ID NO: 676576 - DNA, 33 bp, Homo sapien
tactagctgatgccaggaggtgccaaaggttgt

SEQ ID NO: 676577 - DNA, 33 bp, Homo sapien
tttttgtaattccagacgcaataatgtatgcac

SEQ ID NO: 676578 - DNA, 33 bp, Homo sapien
tttttgtaattccagatgcaataatgtatgcac

SEQ ID NO: 676579 - DNA, 33 bp, Homo sapien
gagctggaaataaagaacaatcatttgaatcaa

SEQ ID NO: 676580 - DNA, 33 bp, Homo sapien
gagctggaaataaagagcaatcatttgaatcaa

SEQ ID NO: 676581 - DNA, 33 bp, Homo sapien
tgtctgtaaatccataaattccaggtatgctta

SEQ ID NO: 676582 - DNA, 33 bp, Homo sapien
tgtctgtaaatccatagattccaggtatgctta

SEQ ID NO: 676583 - DNA, 33 bp, Homo sapien
acaatgattatacatacgaggtggagctggagg

SEQ ID NO: 676584 - DNA, 33 bp, Homo sapien
acaatgattatacatatgaggtggagctggagg

SEQ ID NO: 676585 - DNA, 33 bp, Homo sapien
tgggtcaaaatccaaccgtgttcttggcttact

SEQ ID NO: 676586 - DNA, 33 bp, Homo sapien
tgggtcaaaatccaactgtgttcttggcttact

SEQ ID NO: 676587 - DNA, 33 bp, Homo sapien
ttaataattatgaaaaagaaatgtcacaattcc

SEQ ID NO: 676588 - DNA, 33 bp, Homo sapien
ttaataattatgaaaacgaaatgtcacaattcc

SEQ ID NO: 676589 - DNA, 33 bp, Homo sapien
agagctctgggattcaaagtgaaatgcagcctc

SEQ ID NO: 676590 - DNA, 33 bp, Homo sapien
agagctctgggattcagagtgaaatgcagcctc

SEQ ID NO: 676591 - DNA, 33 bp, Homo sapien
tggcaatgactttttacctacaacatcaaaggc

SEQ ID NO: 676592 - DNA, 33 bp, Homo sapien
tggcaatgactttttatctacaacatcaaaggc

SEQ ID NO: 676593 - DNA, 33 bp, Homo sapien
ttcaactatgtccttacggattttctcccttcg

SEQ ID NO: 676594 - DNA, 33 bp, Homo sapien
ttcaactatgtccttatggattttctcccttcg

SEQ ID NO: 676595 - DNA, 33 bp, Homo sapien
tgagtgtgtgtgtataaataatcggtcaaataa

SEQ ID NO: 676596 - DNA, 33 bp, Homo sapien
tgagtgtgtgtgtatatataatcggtcaaataa

SEQ ID NO: 676597 - DNA, 33 bp, Homo sapien
atattccagaatgcacaaatttttaagccttgt

SEQ ID NO: 676598 - DNA, 33 bp, Homo sapien
atattccagaatgcacgaatttttaagccttgt

SEQ ID NO: 676599 - DNA, 33 bp, Homo sapien
tgatatgaatcataaaagacacctctaaaatct

SEQ ID NO: 676600 - DNA, 33 bp, Homo sapien
tgatatgaatcataaaggacacctctaaaatct

SEQ ID NO: 676601 - DNA, 33 bp, Homo sapien
gagccaacagtgagtaagagagagagtagtaat

SEQ ID NO: 676602 - DNA, 33 bp, Homo sapien
gagccaacagtgagtacgagagagagtagtaat

SEQ ID NO: 676603 - DNA, 33 bp, Homo sapien
tttcttatttttatccaagatttctttccatcc

SEQ ID NO: 676604 - DNA, 33 bp, Homo sapien
tttcttatttttatcccagatttctttccatcc

SEQ ID NO: 676605 - DNA, 33 bp, Homo sapien
tttctgcagacatacacggaaaattctcttctg

SEQ ID NO: 676606 - DNA, 33 bp, Homo sapien
tttctgcagacatacatggaaaattctcttctg

SEQ ID NO: 676607 - DNA, 33 bp, Homo sapien
tgtgaacacaataacaacttgggaatacttatt

SEQ ID NO: 676608 - DNA, 33 bp, Homo sapien
tgtgaacacaataacatcttgggaatacttatt

SEQ ID NO: 676609 - DNA, 33 bp, Homo sapien
agaagaatcactggaacaagcattcaatccagc

SEQ ID NO: 676610 - DNA, 33 bp, Homo sapien
agaagaatcactggaagaagcattcaatccagc

SEQ ID NO: 676611 - DNA, 33 bp, Homo sapien
gcaatggaagactaagaagaacactatgagaac

SEQ ID NO: 676612 - DNA, 33 bp, Homo sapien
gcaatggaagactaaggagaacactatgagaac

SEQ ID NO: 676613 - DNA, 33 bp, Homo sapien
tttgttttttaatcacaaactgagatctttaca

SEQ ID NO: 676614 - DNA, 33 bp, Homo sapien
tttgttttttaatcaccaactgagatctttaca

SEQ ID NO: 676615 - DNA, 33 bp, Homo sapien
attagcactaggagtaactttttctaatattgt

SEQ ID NO: 676616 - DNA, 33 bp, Homo sapien
attagcactaggagtacctttttctaatattgt

SEQ ID NO: 676617 - DNA, 33 bp, Homo sapien
tgtgagtctatgattacactcttacctccatta

SEQ ID NO: 676618 - DNA, 33 bp, Homo sapien
tgtgagtctatgattatactcttacctccatta

SEQ ID NO: 676619 - DNA, 33 bp, Homo sapien
atctccagtcgtttaacgcttcaactatccaaa

SEQ ID NO: 676620 - DNA, 33 bp, Homo sapien
atctccagtcgtttaatgcttcaactatccaaa

SEQ ID NO: 676621 - DNA, 33 bp, Homo sapien
catccaagttgaagtacattaagaaggtagcca

SEQ ID NO: 676622 - DNA, 33 bp, Homo sapien
catccaagttgaagtagattaagaaggtagcca

SEQ ID NO: 676623 - DNA, 33 bp, Homo sapien
gagttgggtcacaggaagtcatctctggagaca

SEQ ID NO: 676624 - DNA, 33 bp, Homo sapien
gagttgggtcacaggaggtcatctctggagaca

SEQ ID NO: 676625 - DNA, 33 bp, Homo sapien
gaattactctctcacaccagatctggcctgtga

SEQ ID NO: 676626 - DNA, 33 bp, Homo sapien
gaattactctctcacagcagatctggcctgtga

SEQ ID NO: 676627 - DNA, 33 bp, Homo sapien
ataaagaaatgaagacacatagagttgaaatga

SEQ ID NO: 676628 - DNA, 33 bp, Homo sapien
ataaagaaatgaagacccatagagttgaaatga

SEQ ID NO: 676629 - DNA, 33 bp, Homo sapien
gattgaataaatgagaaaagtgctatatactta

SEQ ID NO: 676630 - DNA, 33 bp, Homo sapien
gattgaataaatgagacaagtgctatatactta

SEQ ID NO: 676631 - DNA, 33 bp, Homo sapien
attgtttcttctttaccacaaggctacacattt

SEQ ID NO: 676632 - DNA, 33 bp, Homo sapien
attgtttcttctttactacaaggctacacattt

SEQ ID NO: 676633 - DNA, 33 bp, Homo sapien
tgatgacaggatgtccaaatagaaacatctggc

SEQ ID NO: 676634 - DNA, 33 bp, Homo sapien
tgatgacaggatgtccgaatagaaacatctggc

SEQ ID NO: 676635 - DNA, 33 bp, Homo sapien
ctgtttccctgaagaaccataatacaagaagta

SEQ ID NO: 676636 - DNA, 33 bp, Homo sapien
ctgtttccctgaagaatcataatacaagaagta

SEQ ID NO: 676637 - DNA, 33 bp, Homo sapien
cttattttgggctcacaaacaagcttctgactg

SEQ ID NO: 676638 - DNA, 33 bp, Homo sapien
cttattttgggctcacgaacaagcttctgactg

SEQ ID NO: 676639 - DNA, 33 bp, Homo sapien
gacctcatgtggtagaacccagtcaaaatgtag

SEQ ID NO: 676640 - DNA, 33 bp, Homo sapien
gacctcatgtggtagatcccagtcaaaatgtag

SEQ ID NO: 676641 - DNA, 33 bp, Homo sapien
gcttcctgtaccacccggctcaagtagcggaca

SEQ ID NO: 676642 - DNA, 33 bp, Homo sapien
gcttcctgtaccaccctgctcaagtagcggaca

SEQ ID NO: 676643 - DNA, 33 bp, Homo sapien
acaattgaggcttaaaactttcctttacttcac

SEQ ID NO: 676644 - DNA, 33 bp, Homo sapien
acaattgaggcttaaagctttcctttacttcac

SEQ ID NO: 676645 - DNA, 33 bp, Homo sapien
aaaatcaccaaagaaaagactgacagatataac

SEQ ID NO: 676646 - DNA, 33 bp, Homo sapien
aaaatcaccaaagaaaggactgacagatataac

SEQ ID NO: 676647 - DNA, 33 bp, Homo sapien
ttatgttttgtgctacactgaggaatgcctttc

SEQ ID NO: 676648 - DNA, 33 bp, Homo sapien
ttatgttttgtgctacgctgaggaatgcctttc

SEQ ID NO: 676649 - DNA, 33 bp, Homo sapien
agggtggtaacttccaggtgattgggttgttgc

SEQ ID NO: 676650 - DNA, 33 bp, Homo sapien
agggtggtaacttccatgtgattgggttgttgc

SEQ ID NO: 676651 - DNA, 33 bp, Homo sapien
tgggaactaggtgatacgagattctgtaatgag

SEQ ID NO: 676652 - DNA, 33 bp, Homo sapien
tgggaactaggtgatatgagattctgtaatgag

SEQ ID NO: 676653 - DNA, 33 bp, Homo sapien
tagatcctgtctgaacaaatgcaatgtttcttt

SEQ ID NO: 676654 - DNA, 33 bp, Homo sapien
tagatcctgtctgaacgaatgcaatgtttcttt

SEQ ID NO: 676655 - DNA, 33 bp, Homo sapien
tttgtaaaccatttcccgattgaagaacattta

SEQ ID NO: 676656 - DNA, 33 bp, Homo sapien
tttgtaaaccatttcctgattgaagaacattta

SEQ ID NO: 676657 - DNA, 33 bp, Homo sapien
ttttatgtattgtggaaaaaggaggtataggca

SEQ ID NO: 676658 - DNA, 33 bp, Homo sapien
ttttatgtattgtggacaaaggaggtataggca

SEQ ID NO: 676659 - DNA, 33 bp, Homo sapien
acaccacagaaaacacgaggtaaggattagcaa

SEQ ID NO: 676660 - DNA, 33 bp, Homo sapien
acaccacagaaaacactaggtaaggattagcaa

SEQ ID NO: 676661 - DNA, 33 bp, Homo sapien
catgtaatttcactgaagaatcatggactcaca

SEQ ID NO: 676662 - DNA, 33 bp, Homo sapien
catgtaatttcactgaggaatcatggactcaca

SEQ ID NO: 676663 - DNA, 33 bp, Homo sapien
tctatagatcatctgcaatcatttgttttgtag

SEQ ID NO: 676664 - DNA, 33 bp, Homo sapien
tctatagatcatctgcgatcatttgttttgtag

SEQ ID NO: 676665 - DNA, 33 bp, Homo sapien
acttttgacaagatgcagaaaattaggaacagg

SEQ ID NO: 676666 - DNA, 33 bp, Homo sapien
acttttgacaagatgctgaaaattaggaacagg

SEQ ID NO: 676667 - DNA, 33 bp, Homo sapien
atcatcagcagcattcacttcccataagagtgc

SEQ ID NO: 676668 - DNA, 33 bp, Homo sapien
atcatcagcagcattcgcttcccataagagtgc

SEQ ID NO: 676669 - DNA, 33 bp, Homo sapien
ccatgcaaaagtgctaagtaaaatgttggccag

SEQ ID NO: 676670 - DNA, 33 bp, Homo sapien
ccatgcaaaagtgctaggtaaaatgttggccag

SEQ ID NO: 676671 - DNA, 33 bp, Homo sapien
gaaccagactcagataagacacagatgttggaa

SEQ ID NO: 676672 - DNA, 33 bp, Homo sapien
gaaccagactcagatacgacacagatgttggaa

SEQ ID NO: 676673 - DNA, 33 bp, Homo sapien
tccagttgacataaccccatcattatgattttg

SEQ ID NO: 676674 - DNA, 33 bp, Homo sapien
tccagttgacataacctcatcattatgattttg

SEQ ID NO: 676675 - DNA, 33 bp, Homo sapien
gagggcaggcttttcccatgctgttctcatgag

SEQ ID NO: 676676 - DNA, 33 bp, Homo sapien
gagggcaggcttttcctatgctgttctcatgag

SEQ ID NO: 676677 - DNA, 33 bp, Homo sapien
accctcagattcagacgaacacagaaggcaaaa

SEQ ID NO: 676678 - DNA, 33 bp, Homo sapien
accctcagattcagactaacacagaaggcaaaa

SEQ ID NO: 676679 - DNA, 33 bp, Homo sapien
ggtaccagtgcttgcaaacagatgtgtagaggg

SEQ ID NO: 676680 - DNA, 33 bp, Homo sapien
ggtaccagtgcttgcagacagatgtgtagaggg

SEQ ID NO: 676681 - DNA, 33 bp, Homo sapien
ctgccattaggatatgcacaacgaccagtcttt

SEQ ID NO: 676682 - DNA, 33 bp, Homo sapien
ctgccattaggatatggacaacgaccagtcttt

SEQ ID NO: 676683 - DNA, 33 bp, Homo sapien
aaagcaaaaaagtacacggtcagtttgtttcaa

SEQ ID NO: 676684 - DNA, 33 bp, Homo sapien
aaagcaaaaaagtacatggtcagtttgtttcaa

SEQ ID NO: 676685 - DNA, 33 bp, Homo sapien
tcaagattcagactctaaagtttgacaccacag

SEQ ID NO: 676686 - DNA, 33 bp, Homo sapien
tcaagattcagactctgaagtttgacaccacag

SEQ ID NO: 676687 - DNA, 33 bp, Homo sapien
aacttattccatttcaaagagaactgttagata

SEQ ID NO: 676688 - DNA, 33 bp, Homo sapien
aacttattccatttcagagagaactgttagata

SEQ ID NO: 676689 - DNA, 33 bp, Homo sapien
actatatgaattggcaaaagtatttcatcattt

SEQ ID NO: 676690 - DNA, 33 bp, Homo sapien
actatatgaattggcataagtatttcatcattt

SEQ ID NO: 676691 - DNA, 33 bp, Homo sapien
gtgaaaaagcactatccgaagaactaatttcaa

SEQ ID NO: 676692 - DNA, 33 bp, Homo sapien
gtgaaaaagcactatctgaagaactaatttcaa

SEQ ID NO: 676693 - DNA, 33 bp, Homo sapien
ttcccatacatatgcaaacacagaagatttcaa

SEQ ID NO: 676694 - DNA, 33 bp, Homo sapien
ttcccatacatatgcagacacagaagatttcaa

SEQ ID NO: 676695 - DNA, 33 bp, Homo sapien
gtctactgagtatccccagtttcttagctcttt

SEQ ID NO: 676696 - DNA, 33 bp, Homo sapien
gtctactgagtatccctagtttcttagctcttt

SEQ ID NO: 676697 - DNA, 33 bp, Homo sapien
ctaaaacacttttccacatacaggcagatttgt

SEQ ID NO: 676698 - DNA, 33 bp, Homo sapien
ctaaaacacttttccagatacaggcagatttgt

SEQ ID NO: 676699 - DNA, 33 bp, Homo sapien
gtctacatacatggtaacaaacctattacaaga

SEQ ID NO: 676700 - DNA, 33 bp, Homo sapien
gtctacatacatggtagcaaacctattacaaga

SEQ ID NO: 676701 - DNA, 33 bp, Homo sapien
agctggatggtatttacaattcacgtttcttaa

SEQ ID NO: 676702 - DNA, 33 bp, Homo sapien
agctggatggtatttataattcacgtttcttaa

SEQ ID NO: 676703 - DNA, 33 bp, Homo sapien
actcatttctaatgtcaacccagatggccagta

SEQ ID NO: 676704 - DNA, 33 bp, Homo sapien
actcatttctaatgtcgacccagatggccagta

SEQ ID NO: 676705 - DNA, 33 bp, Homo sapien
aatggcacttaagctaactcaattttcaagttt

SEQ ID NO: 676706 - DNA, 33 bp, Homo sapien
aatggcacttaagctacctcaattttcaagttt

SEQ ID NO: 676707 - DNA, 33 bp, Homo sapien
aagaaagactgagaaacggcatttgcttttagc

SEQ ID NO: 676708 - DNA, 33 bp, Homo sapien
aagaaagactgagaaatggcatttgcttttagc

SEQ ID NO: 676709 - DNA, 33 bp, Homo sapien
gtgggttgggaattgacgttttgcttgacttgg

SEQ ID NO: 676710 - DNA, 33 bp, Homo sapien
gtgggttgggaattgatgttttgcttgacttgg

SEQ ID NO: 676711 - DNA, 33 bp, Homo sapien
gcttgacttggtctcacgctaccattccacact

SEQ ID NO: 676712 - DNA, 33 bp, Homo sapien
gcttgacttggtctcatgctaccattccacact

SEQ ID NO: 676713 - DNA, 33 bp, Homo sapien
gcaaggaacagagtggaaacacaaagtattgtt

SEQ ID NO: 676714 - DNA, 33 bp, Homo sapien
gcaaggaacagagtgggaacacaaagtattgtt

SEQ ID NO: 676715 - DNA, 33 bp, Homo sapien
gttccctggatgtttaactttagctccacctac

SEQ ID NO: 676716 - DNA, 33 bp, Homo sapien
gttccctggatgtttagctttagctccacctac

SEQ ID NO: 676717 - DNA, 33 bp, Homo sapien
cctctttgtgatgaacaactcagttcagatatg

SEQ ID NO: 676718 - DNA, 33 bp, Homo sapien
cctctttgtgatgaacgactcagttcagatatg

SEQ ID NO: 676719 - DNA, 33 bp, Homo sapien
ttataggccaggggaacgacagaactaggaaat

SEQ ID NO: 676720 - DNA, 33 bp, Homo sapien
ttataggccaggggaatgacagaactaggaaat

SEQ ID NO: 676721 - DNA, 33 bp, Homo sapien
tcagccccagcaacaacagtttaagcagtctga

SEQ ID NO: 676722 - DNA, 33 bp, Homo sapien
tcagccccagcaacaagagtttaagcagtctga

SEQ ID NO: 676723 - DNA, 33 bp, Homo sapien
tggatggagaaaaaagcagaatgaaatttaatc

SEQ ID NO: 676724 - DNA, 33 bp, Homo sapien
tggatggagaaaaaaggagaatgaaatttaatc

SEQ ID NO: 676725 - DNA, 33 bp, Homo sapien
agaaaattgacgaccaatctagaggtctatagt

SEQ ID NO: 676726 - DNA, 33 bp, Homo sapien
agaaaattgacgaccagtctagaggtctatagt

SEQ ID NO: 676727 - DNA, 33 bp, Homo sapien
atgacaaaggggatgaagcaggtattgatcaat

SEQ ID NO: 676728 - DNA, 33 bp, Homo sapien
atgacaaaggggatgaggcaggtattgatcaat

SEQ ID NO: 676729 - DNA, 33 bp, Homo sapien
tagtaagcactaagtaaataactgttgaattaa

SEQ ID NO: 676730 - DNA, 33 bp, Homo sapien
tagtaagcactaagtacataactgttgaattaa

SEQ ID NO: 676731 - DNA, 33 bp, Homo sapien
gaaagagaaagtttcaaatggctgcgaacaatt

SEQ ID NO: 676732 - DNA, 33 bp, Homo sapien
gaaagagaaagtttcagatggctgcgaacaatt

SEQ ID NO: 676733 - DNA, 33 bp, Homo sapien
cctccctttcaacttacaaaccacagaacgatc

SEQ ID NO: 676734 - DNA, 33 bp, Homo sapien
cctccctttcaacttataaaccacagaacgatc

SEQ ID NO: 676735 - DNA, 33 bp, Homo sapien
gtcattcttaacagacaaacaacatacctttag

SEQ ID NO: 676736 - DNA, 33 bp, Homo sapien
gtcattcttaacagacgaacaacatacctttag

SEQ ID NO: 676737 - DNA, 33 bp, Homo sapien
acttgataggttttacagacttgctatacattg

SEQ ID NO: 676738 - DNA, 33 bp, Homo sapien
acttgataggttttacggacttgctatacattg

SEQ ID NO: 676739 - DNA, 33 bp, Homo sapien
tctctcttgtgttttaagttaatgatgttttgg

SEQ ID NO: 676740 - DNA, 33 bp, Homo sapien
tctctcttgtgttttaggttaatgatgttttgg

SEQ ID NO: 676741 - DNA, 33 bp, Homo sapien
gacacaggataggaaaacagcaagcacaacaaa

SEQ ID NO: 676742 - DNA, 33 bp, Homo sapien
gacacaggataggaaaccagcaagcacaacaaa

SEQ ID NO: 676743 - DNA, 33 bp, Homo sapien
attgagagcagcaaataaaggtggcaagggcat

SEQ ID NO: 676744 - DNA, 33 bp, Homo sapien
attgagagcagcaaatgaaggtggcaagggcat

SEQ ID NO: 676745 - DNA, 33 bp, Homo sapien
tgtggtaccaaattcaaacttttccacagttca

SEQ ID NO: 676746 - DNA, 33 bp, Homo sapien
tgtggtaccaaattcagacttttccacagttca

SEQ ID NO: 676747 - DNA, 33 bp, Homo sapien
tgtctctctaaaataacaattgattacagccag

SEQ ID NO: 676748 - DNA, 33 bp, Homo sapien
tgtctctctaaaataagaattgattacagccag

SEQ ID NO: 676749 - DNA, 33 bp, Homo sapien
gtgcacattcgtggagaaacacagccgtgtgct

SEQ ID NO: 676750 - DNA, 33 bp, Homo sapien
gtgcacattcgtggagcaacacagccgtgtgct

SEQ ID NO: 676751 - DNA, 33 bp, Homo sapien
aggtattgttaaaatccgacaaacactaagtga

SEQ ID NO: 676752 - DNA, 33 bp, Homo sapien
aggtattgttaaaatctgacaaacactaagtga

SEQ ID NO: 676753 - DNA, 33 bp, Homo sapien
tcactgtcttttaccaagcttctctgcctcttg

SEQ ID NO: 676754 - DNA, 33 bp, Homo sapien
tcactgtcttttaccaggcttctctgcctcttg

SEQ ID NO: 676755 - DNA, 33 bp, Homo sapien
cagttttcctgtgtaaatgcttcaacatcattc

SEQ ID NO: 676756 - DNA, 33 bp, Homo sapien
cagttttcctgtgtaattgcttcaacatcattc

SEQ ID NO: 676757 - DNA, 33 bp, Homo sapien
tgctccatagtgttagacatgtgtaggtaaata

SEQ ID NO: 676758 - DNA, 33 bp, Homo sapien
tgctccatagtgttagtcatgtgtaggtaaata

SEQ ID NO: 676759 - DNA, 33 bp, Homo sapien
aggcctgatggataacacatgcaggatgggctt

SEQ ID NO: 676760 - DNA, 33 bp, Homo sapien
aggcctgatggataacgcatgcaggatgggctt

SEQ ID NO: 676761 - DNA, 33 bp, Homo sapien
taaaataaaaactatccatagggagatgattcg

SEQ ID NO: 676762 - DNA, 33 bp, Homo sapien
taaaataaaaactatctatagggagatgattcg

SEQ ID NO: 676763 - DNA, 33 bp, Homo sapien
atgagcacacctctaccggaacaatcacctgca

SEQ ID NO: 676764 - DNA, 33 bp, Homo sapien
atgagcacacctctactggaacaatcacctgca

SEQ ID NO: 676765 - DNA, 33 bp, Homo sapien
ttttatgtagatggaacggaaggtttatgtagg

SEQ ID NO: 676766 - DNA, 33 bp, Homo sapien
ttttatgtagatggaatggaaggtttatgtagg

SEQ ID NO: 676767 - DNA, 33 bp, Homo sapien
gggatgaggtattagaacttagtgagcatcaga

SEQ ID NO: 676768 - DNA, 33 bp, Homo sapien
gggatgaggtattagaccttagtgagcatcaga

SEQ ID NO: 676769 - DNA, 33 bp, Homo sapien
ctgtgtccacttagctcactgttattaatatat

SEQ ID NO: 676770 - DNA, 33 bp, Homo sapien
ctgtgtccacttagcttactgttattaatatat

SEQ ID NO: 676771 - DNA, 33 bp, Homo sapien
aagctataagcaataactgggtctaaaattaac

SEQ ID NO: 676772 - DNA, 33 bp, Homo sapien
aagctataagcaataagtgggtctaaaattaac

SEQ ID NO: 676773 - DNA, 33 bp, Homo sapien
attttttgattggttgaatcctctgttaatttt

SEQ ID NO: 676774 - DNA, 33 bp, Homo sapien
attttttgattggttggatcctctgttaatttt

SEQ ID NO: 676775 - DNA, 33 bp, Homo sapien
atgatatgtatttagacaaaggtaatgttgaag

SEQ ID NO: 676776 - DNA, 33 bp, Homo sapien
atgatatgtatttagagaaaggtaatgttgaag

SEQ ID NO: 676777 - DNA, 33 bp, Homo sapien
ttagagtttcagtcacaaactaaatgaacttat

SEQ ID NO: 676778 - DNA, 33 bp, Homo sapien
ttagagtttcagtcactaactaaatgaacttat

SEQ ID NO: 676779 - DNA, 33 bp, Homo sapien
aacaagtcaacctcaacagcctattgtattttt

SEQ ID NO: 676780 - DNA, 33 bp, Homo sapien
aacaagtcaacctcaagagcctattgtattttt

SEQ ID NO: 676781 - DNA, 33 bp, Homo sapien
ccagtttcactttaggaatgttcttgataaaac

SEQ ID NO: 676782 - DNA, 33 bp, Homo sapien
ccagtttcactttagggatgttcttgataaaac

SEQ ID NO: 676783 - DNA, 33 bp, Homo sapien
tctgggatccttttgacagagtgtttaggatat

SEQ ID NO: 676784 - DNA, 33 bp, Homo sapien
tctgggatccttttgatagagtgtttaggatat

SEQ ID NO: 676785 - DNA, 33 bp, Homo sapien
agaacaaaagtctcctaaacttaagcaagatga

SEQ ID NO: 676786 - DNA, 33 bp, Homo sapien
agaacaaaagtctccttaacttaagcaagatga

SEQ ID NO: 676787 - DNA, 33 bp, Homo sapien
gaaaatacctaatgtagacccccaaaagctaca

SEQ ID NO: 676788 - DNA, 33 bp, Homo sapien
gaaaatacctaatgtatacccccaaaagctaca

SEQ ID NO: 676789 - DNA, 33 bp, Homo sapien
agcttgcccaagatcacggttagtaaacagaag

SEQ ID NO: 676790 - DNA, 33 bp, Homo sapien
agcttgcccaagatcatggttagtaaacagaag

SEQ ID NO: 676791 - DNA, 33 bp, Homo sapien
gggtctctataggtaacgtcaggctgagaaagg

SEQ ID NO: 676792 - DNA, 33 bp, Homo sapien
gggtctctataggtaaggtcaggctgagaaagg

SEQ ID NO: 676793 - DNA, 33 bp, Homo sapien
aggtgatgcattcacacagcaacatttgagaag

SEQ ID NO: 676794 - DNA, 33 bp, Homo sapien
aggtgatgcattcacatagcaacatttgagaag

SEQ ID NO: 676795 - DNA, 33 bp, Homo sapien
gtttatgtaaagcagcactacaaccaatttctt

SEQ ID NO: 676796 - DNA, 33 bp, Homo sapien
gtttatgtaaagcagctctacaaccaatttctt

SEQ ID NO: 676797 - DNA, 33 bp, Homo sapien
gtcacttgtggcaagaaaataatgtggaaaaat

SEQ ID NO: 676798 - DNA, 33 bp, Homo sapien
gtcacttgtggcaagacaataatgtggaaaaat

SEQ ID NO: 676799 - DNA, 33 bp, Homo sapien
ctgccttttttactcaccataggcttttgtttt

SEQ ID NO: 676800 - DNA, 33 bp, Homo sapien
ctgccttttttactcatcataggcttttgtttt

SEQ ID NO: 676801 - DNA, 33 bp, Homo sapien
tggctgtagcctttcaaaacagggtcagtatgg

SEQ ID NO: 676802 - DNA, 33 bp, Homo sapien
tggctgtagcctttcagaacagggtcagtatgg

SEQ ID NO: 676803 - DNA, 33 bp, Homo sapien
agcacaccgcatatcaatctttgcagttatttg

SEQ ID NO: 676804 - DNA, 33 bp, Homo sapien
agcacaccgcatatcactctttgcagttatttg

SEQ ID NO: 676805 - DNA, 33 bp, Homo sapien
cttgctgagtaaacaggatgggatgagaaagag

SEQ ID NO: 676806 - DNA, 33 bp, Homo sapien
cttgctgagtaaacagtatgggatgagaaagag

SEQ ID NO: 676807 - DNA, 33 bp, Homo sapien
ctattcaaagaggttacgtaacttattcagtca

SEQ ID NO: 676808 - DNA, 33 bp, Homo sapien
ctattcaaagaggttatgtaacttattcagtca

SEQ ID NO: 676809 - DNA, 33 bp, Homo sapien
tattgctaggaaaaaaatctgaacagaccgatg

SEQ ID NO: 676810 - DNA, 33 bp, Homo sapien
tattgctaggaaaaaattctgaacagaccgatg

SEQ ID NO: 676811 - DNA, 33 bp, Homo sapien
cacctacctggttatcaaagacagaaacgtaag

SEQ ID NO: 676812 - DNA, 33 bp, Homo sapien
cacctacctggttatcgaagacagaaacgtaag

SEQ ID NO: 676813 - DNA, 33 bp, Homo sapien
ttatctctgaggatagaagagttcagagtagat

SEQ ID NO: 676814 - DNA, 33 bp, Homo sapien
ttatctctgaggataggagagttcagagtagat

SEQ ID NO: 676815 - DNA, 33 bp, Homo sapien
agcagtattaggcttacgtcaagattgagagga

SEQ ID NO: 676816 - DNA, 33 bp, Homo sapien
agcagtattaggcttatgtcaagattgagagga

SEQ ID NO: 676817 - DNA, 33 bp, Homo sapien
atacagatacaggatgacacttattaatatact

SEQ ID NO: 676818 - DNA, 33 bp, Homo sapien
atacagatacaggatggcacttattaatatact

SEQ ID NO: 676819 - DNA, 33 bp, Homo sapien
cttattctctagaatacgctgcattttttcatt

SEQ ID NO: 676820 - DNA, 33 bp, Homo sapien
cttattctctagaataggctgcattttttcatt

SEQ ID NO: 676821 - DNA, 33 bp, Homo sapien
tgcccttcatctccaccgaactactttctggat

SEQ ID NO: 676822 - DNA, 33 bp, Homo sapien
tgcccttcatctccactgaactactttctggat

SEQ ID NO: 676823 - DNA, 33 bp, Homo sapien
gcttgttgtaaaagaaattcaaacaaaacagaa

SEQ ID NO: 676824 - DNA, 33 bp, Homo sapien
gcttgttgtaaaagaatttcaaacaaaacagaa

SEQ ID NO: 676825 - DNA, 33 bp, Homo sapien
tttatttattgtggtcacttgagggctgtgaga

SEQ ID NO: 676826 - DNA, 33 bp, Homo sapien
tttatttattgtggtcccttgagggctgtgaga

SEQ ID NO: 676827 - DNA, 33 bp, Homo sapien
attgaaaaattgagagcacacagtttttaaact

SEQ ID NO: 676828 - DNA, 33 bp, Homo sapien
attgaaaaattgagaggacacagtttttaaact

SEQ ID NO: 676829 - DNA, 33 bp, Homo sapien
ctgcatgctaaaagtacgtgtacaaattgacaa

SEQ ID NO: 676830 - DNA, 33 bp, Homo sapien
ctgcatgctaaaagtatgtgtacaaattgacaa

SEQ ID NO: 676831 - DNA, 33 bp, Homo sapien
tgaggaataacaggataaagtttacaaggttgt

SEQ ID NO: 676832 - DNA, 33 bp, Homo sapien
tgaggaataacaggatcaagtttacaaggttgt

SEQ ID NO: 676833 - DNA, 33 bp, Homo sapien
gagagagagaaagagaagagcaaggaaaggagg

SEQ ID NO: 676834 - DNA, 33 bp, Homo sapien
gagagagagaaagagaggagcaaggaaaggagg

SEQ ID NO: 676835 - DNA, 33 bp, Homo sapien
ataccgacgctgaggaaacacatccaattgcaa

SEQ ID NO: 676836 - DNA, 33 bp, Homo sapien
ataccgacgctgaggacacacatccaattgcaa

SEQ ID NO: 676837 - DNA, 33 bp, Homo sapien
tgttgggaataaatgacggtgccaggaacttca

SEQ ID NO: 676838 - DNA, 33 bp, Homo sapien
tgttgggaataaatgagggtgccaggaacttca

SEQ ID NO: 676839 - DNA, 33 bp, Homo sapien
actgtgcccagccagaaacatgatttttaaaca

SEQ ID NO: 676840 - DNA, 33 bp, Homo sapien
actgtgcccagccagagacatgatttttaaaca

SEQ ID NO: 676841 - DNA, 33 bp, Homo sapien
tactttgcagagttcacgtagagaagagagaca

SEQ ID NO: 676842 - DNA, 33 bp, Homo sapien
tactttgcagagttcatgtagagaagagagaca

SEQ ID NO: 676843 - DNA, 33 bp, Homo sapien
agaggtgctgttacaactgcttatgagacaaca

SEQ ID NO: 676844 - DNA, 33 bp, Homo sapien
agaggtgctgttacaattgcttatgagacaaca

SEQ ID NO: 676845 - DNA, 33 bp, Homo sapien
aataaacgtgcattaaataaataagattacaca

SEQ ID NO: 676846 - DNA, 33 bp, Homo sapien
aataaacgtgcattaagtaaataagattacaca

SEQ ID NO: 676847 - DNA, 33 bp, Homo sapien
aacgaggattatcacaactacttcataaagtct

SEQ ID NO: 676848 - DNA, 33 bp, Homo sapien
aacgaggattatcacacctacttcataaagtct

SEQ ID NO: 676849 - DNA, 33 bp, Homo sapien
tccattctcttatctgccaagctcctcctcctc

SEQ ID NO: 676850 - DNA, 33 bp, Homo sapien
tccattctcttatctgtcaagctcctcctcctc

SEQ ID NO: 676851 - DNA, 33 bp, Homo sapien
ctaaaagctgtcaccacggagtttcaccctttg

SEQ ID NO: 676852 - DNA, 33 bp, Homo sapien
ctaaaagctgtcaccatggagtttcaccctttg

SEQ ID NO: 676853 - DNA, 33 bp, Homo sapien
ataaatcagtcgtgacagcaacttcaatgatat

SEQ ID NO: 676854 - DNA, 33 bp, Homo sapien
ataaatcagtcgtgacggcaacttcaatgatat

SEQ ID NO: 676855 - DNA, 33 bp, Homo sapien
gtcattcaagtaaacactggagccttgtctgtc

SEQ ID NO: 676856 - DNA, 33 bp, Homo sapien
gtcattcaagtaaacattggagccttgtctgtc

SEQ ID NO: 676857 - DNA, 33 bp, Homo sapien
tggaaataatccttggcaaattaacttaagttc

SEQ ID NO: 676858 - DNA, 33 bp, Homo sapien
tggaaataatccttggtaaattaacttaagttc

SEQ ID NO: 676859 - DNA, 33 bp, Homo sapien
gaccacacgaggatataaccaggaagaaggccc

SEQ ID NO: 676860 - DNA, 33 bp, Homo sapien
gaccacacgaggatatcaccaggaagaaggccc

SEQ ID NO: 676861 - DNA, 33 bp, Homo sapien
aaattaaggaaggacccctcattatgtgaatat

SEQ ID NO: 676862 - DNA, 33 bp, Homo sapien
aaattaaggaaggacctctcattatgtgaatat

SEQ ID NO: 676863 - DNA, 33 bp, Homo sapien
ttgtacctcaaacaacaatgtcacaagtttacc

SEQ ID NO: 676864 - DNA, 33 bp, Homo sapien
ttgtacctcaaacaacgatgtcacaagtttacc

SEQ ID NO: 676865 - DNA, 33 bp, Homo sapien
atatccagaattcaaaatgccccaaaatctgaa

SEQ ID NO: 676866 - DNA, 33 bp, Homo sapien
atatccagaattcaaattgccccaaaatctgaa

SEQ ID NO: 676867 - DNA, 33 bp, Homo sapien
caacatgggaaaagcagggggtaatcactggct

SEQ ID NO: 676868 - DNA, 33 bp, Homo sapien
caacatgggaaaagcatggggtaatcactggct

SEQ ID NO: 676869 - DNA, 33 bp, Homo sapien
caaaaatgttttaaaaatgtaggacaatatctg

SEQ ID NO: 676870 - DNA, 33 bp, Homo sapien
caaaaatgttttaaaactgtaggacaatatctg

SEQ ID NO: 676871 - DNA, 33 bp, Homo sapien
cactcagcttagagaacggaaaatgggtgagaa

SEQ ID NO: 676872 - DNA, 33 bp, Homo sapien
cactcagcttagagaatggaaaatgggtgagaa

SEQ ID NO: 676873 - DNA, 33 bp, Homo sapien
agccaagttgtgatcacgatgactcacacagat

SEQ ID NO: 676874 - DNA, 33 bp, Homo sapien
agccaagttgtgatcatgatgactcacacagat

SEQ ID NO: 676875 - DNA, 33 bp, Homo sapien
ttgacatcaaagtaaacagcaagtttgaagaat

SEQ ID NO: 676876 - DNA, 33 bp, Homo sapien
ttgacatcaaagtaaatagcaagtttgaagaat

SEQ ID NO: 676877 - DNA, 33 bp, Homo sapien
atcatagagaattccaagccaatgtaaccatta

SEQ ID NO: 676878 - DNA, 33 bp, Homo sapien
atcatagagaattccaggccaatgtaaccatta

SEQ ID NO: 676879 - DNA, 33 bp, Homo sapien
tctagttagtcataagcccaagcagtttaggta

SEQ ID NO: 676880 - DNA, 33 bp, Homo sapien
tctagttagtcataagtccaagcagtttaggta

SEQ ID NO: 676881 - DNA, 33 bp, Homo sapien
tcatttctctcctaaaatgtagcaatagtgcct

SEQ ID NO: 676882 - DNA, 33 bp, Homo sapien
tcatttctctcctaaactgtagcaatagtgcct

SEQ ID NO: 676883 - DNA, 33 bp, Homo sapien
caatgtttggagggcacctatagtaaccaaaag

SEQ ID NO: 676884 - DNA, 33 bp, Homo sapien
caatgtttggagggcatctatagtaaccaaaag

SEQ ID NO: 676885 - DNA, 33 bp, Homo sapien
gctcttagtgggcaacacatagcagcaaaatga

SEQ ID NO: 676886 - DNA, 33 bp, Homo sapien
gctcttagtgggcaactcatagcagcaaaatga

SEQ ID NO: 676887 - DNA, 33 bp, Homo sapien
aaatatctaaaacagaaccatgtacctttaact

SEQ ID NO: 676888 - DNA, 33 bp, Homo sapien
aaatatctaaaacagagccatgtacctttaact

SEQ ID NO: 676889 - DNA, 33 bp, Homo sapien
atctgtctattacacaaagctataaactttttc

SEQ ID NO: 676890 - DNA, 33 bp, Homo sapien
atctgtctattacacagagctataaactttttc

SEQ ID NO: 676891 - DNA, 33 bp, Homo sapien
taattctattgtattacacctattgaggctgat

SEQ ID NO: 676892 - DNA, 33 bp, Homo sapien
taattctattgtattatacctattgaggctgat

SEQ ID NO: 676893 - DNA, 33 bp, Homo sapien
ttttctcagcaatgatcaaagtgtgtacaaagt

SEQ ID NO: 676894 - DNA, 33 bp, Homo sapien
ttttctcagcaatgattaaagtgtgtacaaagt

SEQ ID NO: 676895 - DNA, 33 bp, Homo sapien
aggtccaagagtccaaactagttctgtgaggct

SEQ ID NO: 676896 - DNA, 33 bp, Homo sapien
aggtccaagagtccaacctagttctgtgaggct

SEQ ID NO: 676897 - DNA, 33 bp, Homo sapien
aaggaatgcaaaactcgaaatgacgtcctttag

SEQ ID NO: 676898 - DNA, 33 bp, Homo sapien
aaggaatgcaaaactctaaatgacgtcctttag

SEQ ID NO: 676899 - DNA, 33 bp, Homo sapien
tcttgacctgtccttgaatattttccttgatta

SEQ ID NO: 676900 - DNA, 33 bp, Homo sapien
tcttgacctgtccttggatattttccttgatta

SEQ ID NO: 676901 - DNA, 33 bp, Homo sapien
actgacaaatattccactaaaggagagacttgt

SEQ ID NO: 676902 - DNA, 33 bp, Homo sapien
actgacaaatattccattaaaggagagacttgt

SEQ ID NO: 676903 - DNA, 33 bp, Homo sapien
ctgaagagggtcaaagactttcacttgatgagt

SEQ ID NO: 676904 - DNA, 33 bp, Homo sapien
ctgaagagggtcaaagcctttcacttgatgagt

SEQ ID NO: 676905 - DNA, 33 bp, Homo sapien
gatatgcatacggtgacacccactactgcagtg

SEQ ID NO: 676906 - DNA, 33 bp, Homo sapien
gatatgcatacggtgatacccactactgcagtg

SEQ ID NO: 676907 - DNA, 33 bp, Homo sapien
agttagctgtagccagactcactacaaaatgaa

SEQ ID NO: 676908 - DNA, 33 bp, Homo sapien
agttagctgtagccagtctcactacaaaatgaa

SEQ ID NO: 676909 - DNA, 33 bp, Homo sapien
agcaaagcaggatatacgccaaaaattatctga

SEQ ID NO: 676910 - DNA, 33 bp, Homo sapien
agcaaagcaggatatatgccaaaaattatctga

SEQ ID NO: 676911 - DNA, 33 bp, Homo sapien
cttcactttgaacttacgaaaggcacctttcta

SEQ ID NO: 676912 - DNA, 33 bp, Homo sapien
cttcactttgaacttatgaaaggcacctttcta

SEQ ID NO: 676913 - DNA, 33 bp, Homo sapien
ttctccttgccgcaaaacctcccgactcaccac

SEQ ID NO: 676914 - DNA, 33 bp, Homo sapien
ttctccttgccgcaaagcctcccgactcaccac

SEQ ID NO: 676915 - DNA, 33 bp, Homo sapien
gaatcctacttcttaacctaagccaaaatggga

SEQ ID NO: 676916 - DNA, 33 bp, Homo sapien
gaatcctacttcttaagctaagccaaaatggga

SEQ ID NO: 676917 - DNA, 33 bp, Homo sapien
acttttttcaagtcaacattttcatgctgatta

SEQ ID NO: 676918 - DNA, 33 bp, Homo sapien
acttttttcaagtcaatattttcatgctgatta

SEQ ID NO: 676919 - DNA, 33 bp, Homo sapien
tgcatagacaggaaaaaagtattgcgttgtgac

SEQ ID NO: 676920 - DNA, 33 bp, Homo sapien
tgcatagacaggaaaacagtattgcgttgtgac

SEQ ID NO: 676921 - DNA, 33 bp, Homo sapien
aaagctgctgaacacaaacacaggtacacgtgt

SEQ ID NO: 676922 - DNA, 33 bp, Homo sapien
aaagctgctgaacacagacacaggtacacgtgt

SEQ ID NO: 676923 - DNA, 33 bp, Homo sapien
ctagactgactaagccacaattgagtctggatc

SEQ ID NO: 676924 - DNA, 33 bp, Homo sapien
ctagactgactaagccgcaattgagtctggatc

SEQ ID NO: 676925 - DNA, 33 bp, Homo sapien
gagagttaaaaggcaaaatacagagcaggagtc

SEQ ID NO: 676926 - DNA, 33 bp, Homo sapien
gagagttaaaaggcaagatacagagcaggagtc

SEQ ID NO: 676927 - DNA, 33 bp, Homo sapien
ctggaaacaagaatcaagcttgggctgcgcagg

SEQ ID NO: 676928 - DNA, 33 bp, Homo sapien
ctggaaacaagaatcaggcttgggctgcgcagg

SEQ ID NO: 676929 - DNA, 33 bp, Homo sapien
ttctattgttctatccaaatgataatttctaag

SEQ ID NO: 676930 - DNA, 33 bp, Homo sapien
ttctattgttctatcctaatgataatttctaag

SEQ ID NO: 676931 - DNA, 33 bp, Homo sapien
ttctttcactatttgccgaaatgaaatgtttgc

SEQ ID NO: 676932 - DNA, 33 bp, Homo sapien
ttctttcactatttgctgaaatgaaatgtttgc

SEQ ID NO: 676933 - DNA, 33 bp, Homo sapien
catattgacactgtgaagtaaaactacatcttt

SEQ ID NO: 676934 - DNA, 33 bp, Homo sapien
catattgacactgtgaggtaaaactacatcttt

SEQ ID NO: 676935 - DNA, 33 bp, Homo sapien
gggagaggagatcttcaccacttaaaataacta

SEQ ID NO: 676936 - DNA, 33 bp, Homo sapien
gggagaggagatcttcgccacttaaaataacta

SEQ ID NO: 676937 - DNA, 33 bp, Homo sapien
atcttatgaactctcaatcgttgaaatgtcaat

SEQ ID NO: 676938 - DNA, 33 bp, Homo sapien
atcttatgaactctcagtcgttgaaatgtcaat

SEQ ID NO: 676939 - DNA, 33 bp, Homo sapien
ttgttattgttattagaaaatcagtcatctaaa

SEQ ID NO: 676940 - DNA, 33 bp, Homo sapien
ttgttattgttattagtaaatcagtcatctaaa

SEQ ID NO: 676941 - DNA, 33 bp, Homo sapien
gtgtgtgtctaatccccgctgtgtataaaacaa

SEQ ID NO: 676942 - DNA, 33 bp, Homo sapien
gtgtgtgtctaatccctgctgtgtataaaacaa

SEQ ID NO: 676943 - DNA, 33 bp, Homo sapien
aatagattttttttgccgatagaaataaggaca

SEQ ID NO: 676944 - DNA, 33 bp, Homo sapien
aatagattttttttgctgatagaaataaggaca

SEQ ID NO: 676945 - DNA, 33 bp, Homo sapien
cccttgaccaatataacaccatatgccaaggag

SEQ ID NO: 676946 - DNA, 33 bp, Homo sapien
cccttgaccaatataagaccatatgccaaggag

SEQ ID NO: 676947 - DNA, 33 bp, Homo sapien
tatttggatgttgtaacaattctggtgacattt

SEQ ID NO: 676948 - DNA, 33 bp, Homo sapien
tatttggatgttgtaataattctggtgacattt

SEQ ID NO: 676949 - DNA, 33 bp, Homo sapien
gagcctgagctagaaaccaaactgctatagtta

SEQ ID NO: 676950 - DNA, 33 bp, Homo sapien
gagcctgagctagaaatcaaactgctatagtta

SEQ ID NO: 676951 - DNA, 33 bp, Homo sapien
tgttatttaccttctccaagcctcagtactctc

SEQ ID NO: 676952 - DNA, 33 bp, Homo sapien
tgttatttaccttctctaagcctcagtactctc

SEQ ID NO: 676953 - DNA, 33 bp, Homo sapien
agtgctcatcttgaacacctttcctacacttta

SEQ ID NO: 676954 - DNA, 33 bp, Homo sapien
agtgctcatcttgaacgcctttcctacacttta

SEQ ID NO: 676955 - DNA, 33 bp, Homo sapien
acattaaaaatgcttacacaattagtaaaaaat

SEQ ID NO: 676956 - DNA, 33 bp, Homo sapien
acattaaaaatgcttagacaattagtaaaaaat

SEQ ID NO: 676957 - DNA, 33 bp, Homo sapien
cccagcaacctaaacacaaatctgaaggaatgg

SEQ ID NO: 676958 - DNA, 33 bp, Homo sapien
cccagcaacctaaacagaaatctgaaggaatgg

SEQ ID NO: 676959 - DNA, 33 bp, Homo sapien
agaatgctggagtgaaacctctactaatccctg

SEQ ID NO: 676960 - DNA, 33 bp, Homo sapien
agaatgctggagtgaagcctctactaatccctg

SEQ ID NO: 676961 - DNA, 33 bp, Homo sapien
aagtatgtgcattggaaaccaagaatgtacaaa

SEQ ID NO: 676962 - DNA, 33 bp, Homo sapien
aagtatgtgcattggagaccaagaatgtacaaa

SEQ ID NO: 676963 - DNA, 33 bp, Homo sapien
ctccctattccaaaccgcataagaaaggaaacc

SEQ ID NO: 676964 - DNA, 33 bp, Homo sapien
ctccctattccaaacctcataagaaaggaaacc

SEQ ID NO: 676965 - DNA, 33 bp, Homo sapien
aaagaaacttcagacaaatctcaggaagctgag

SEQ ID NO: 676966 - DNA, 33 bp, Homo sapien
aaagaaacttcagacagatctcaggaagctgag

SEQ ID NO: 676967 - DNA, 33 bp, Homo sapien
catggtgcctgaagcagatcacctggctgtatg

SEQ ID NO: 676968 - DNA, 33 bp, Homo sapien
catggtgcctgaagcatatcacctggctgtatg

SEQ ID NO: 676969 - DNA, 33 bp, Homo sapien
ctgtgtggggtctcaacactaacccagaaatac

SEQ ID NO: 676970 - DNA, 33 bp, Homo sapien
ctgtgtggggtctcaatactaacccagaaatac

SEQ ID NO: 676971 - DNA, 33 bp, Homo sapien
actgtcaatgtgggaaaaccttgataccacata

SEQ ID NO: 676972 - DNA, 33 bp, Homo sapien
actgtcaatgtgggaagaccttgataccacata

SEQ ID NO: 676973 - DNA, 33 bp, Homo sapien
gggattgctgcaacaacattctagctgtaccta

SEQ ID NO: 676974 - DNA, 33 bp, Homo sapien
gggattgctgcaacaatattctagctgtaccta

SEQ ID NO: 676975 - DNA, 33 bp, Homo sapien
cataacttgggcagaacgagggaatgctaatac

SEQ ID NO: 676976 - DNA, 33 bp, Homo sapien
cataacttgggcagaatgagggaatgctaatac

SEQ ID NO: 676977 - DNA, 33 bp, Homo sapien
tcccttctcccttctccgactgattcgagggtt

SEQ ID NO: 676978 - DNA, 33 bp, Homo sapien
tcccttctcccttctctgactgattcgagggtt

SEQ ID NO: 676979 - DNA, 33 bp, Homo sapien
ctctccactctctaatcatgtgggcagcatctg

SEQ ID NO: 676980 - DNA, 33 bp, Homo sapien
ctctccactctctaattatgtgggcagcatctg

SEQ ID NO: 676981 - DNA, 33 bp, Homo sapien
tttgctatgatttgtccaggtgtagattacatt

SEQ ID NO: 676982 - DNA, 33 bp, Homo sapien
tttgctatgatttgtcgaggtgtagattacatt

SEQ ID NO: 676983 - DNA, 33 bp, Homo sapien
tgcttgctggattttacggtcgcttagcagtac

SEQ ID NO: 676984 - DNA, 33 bp, Homo sapien
tgcttgctggattttatggtcgcttagcagtac

SEQ ID NO: 676985 - DNA, 33 bp, Homo sapien
ctggggaagatagacactgagcagataattgtt

SEQ ID NO: 676986 - DNA, 33 bp, Homo sapien
ctggggaagatagacattgagcagataattgtt

SEQ ID NO: 676987 - DNA, 33 bp, Homo sapien
cattttagaatcatcacaagtttcaattggatg

SEQ ID NO: 676988 - DNA, 33 bp, Homo sapien
cattttagaatcatcataagtttcaattggatg

SEQ ID NO: 676989 - DNA, 33 bp, Homo sapien
catgaaccttatggtacactcactccaaatctg

SEQ ID NO: 676990 - DNA, 33 bp, Homo sapien
catgaaccttatggtatactcactccaaatctg

SEQ ID NO: 676991 - DNA, 33 bp, Homo sapien
attgcttgtttaataacctcttttctgctagac

SEQ ID NO: 676992 - DNA, 33 bp, Homo sapien
attgcttgtttaataatctcttttctgctagac

SEQ ID NO: 676993 - DNA, 33 bp, Homo sapien
acctgtatgtttctgcacttcatttttctgccc

SEQ ID NO: 676994 - DNA, 33 bp, Homo sapien
acctgtatgtttctgctcttcatttttctgccc

SEQ ID NO: 676995 - DNA, 33 bp, Homo sapien
aaagtcttaggatgcaatacagactctaataat

SEQ ID NO: 676996 - DNA, 33 bp, Homo sapien
aaagtcttaggatgcagtacagactctaataat

SEQ ID NO: 676997 - DNA, 33 bp, Homo sapien
ttttttcaaaccagtcaaaggacatcaggacaa

SEQ ID NO: 676998 - DNA, 33 bp, Homo sapien
ttttttcaaaccagtcgaaggacatcaggacaa

SEQ ID NO: 676999 - DNA, 33 bp, Homo sapien
gagtctttgaatagaaatctgcaggagggacag

SEQ ID NO: 677000 - DNA, 33 bp, Homo sapien
gagtctttgaatagaagtctgcaggagggacag

SEQ ID NO: 677001 - DNA, 33 bp, Homo sapien
aatttggggtcacaaaatctctatatggataat

SEQ ID NO: 677002 - DNA, 33 bp, Homo sapien
aatttggggtcacaaattctctatatggataat

SEQ ID NO: 677003 - DNA, 33 bp, Homo sapien
tttcctagcagactacaagtttcacaaaggcag

SEQ ID NO: 677004 - DNA, 33 bp, Homo sapien
tttcctagcagactactagtttcacaaaggcag

SEQ ID NO: 677005 - DNA, 33 bp, Homo sapien
gtaggagctcaatcacacagagtcttgtaactt

SEQ ID NO: 677006 - DNA, 33 bp, Homo sapien
gtaggagctcaatcacgcagagtcttgtaactt

SEQ ID NO: 677007 - DNA, 33 bp, Homo sapien
ctcaaatctaatcataactactttccccttaaa

SEQ ID NO: 677008 - DNA, 33 bp, Homo sapien
ctcaaatctaatcatatctactttccccttaaa

SEQ ID NO: 677009 - DNA, 33 bp, Homo sapien
ttaaccattcactctcaccctcttaaatcagtt

SEQ ID NO: 677010 - DNA, 33 bp, Homo sapien
ttaaccattcactctcgccctcttaaatcagtt

SEQ ID NO: 677011 - DNA, 33 bp, Homo sapien
atttgttctatgttacaaacttttcacacccag

SEQ ID NO: 677012 - DNA, 33 bp, Homo sapien
atttgttctatgttaccaacttttcacacccag

SEQ ID NO: 677013 - DNA, 33 bp, Homo sapien
tccctttttcctgagacgtgtttttcataagac

SEQ ID NO: 677014 - DNA, 33 bp, Homo sapien
tccctttttcctgagatgtgtttttcataagac

SEQ ID NO: 677015 - DNA, 33 bp, Homo sapien
gagagacagagatttccaaaggaccaacattaa

SEQ ID NO: 677016 - DNA, 33 bp, Homo sapien
gagagacagagatttcgaaaggaccaacattaa

SEQ ID NO: 677017 - DNA, 33 bp, Homo sapien
tgtgtatatttggcttcaacaccatagcaggtt

SEQ ID NO: 677018 - DNA, 33 bp, Homo sapien
tgtgtatatttggctttaacaccatagcaggtt

SEQ ID NO: 677019 - DNA, 33 bp, Homo sapien
gaccctgactacagagaaaattgatgactgagt

SEQ ID NO: 677020 - DNA, 33 bp, Homo sapien
gaccctgactacagaggaaattgatgactgagt

SEQ ID NO: 677021 - DNA, 33 bp, Homo sapien
ctcaggcttctcaagcacatctaaccagtaacc

SEQ ID NO: 677022 - DNA, 33 bp, Homo sapien
ctcaggcttctcaagctcatctaaccagtaacc

SEQ ID NO: 677023 - DNA, 33 bp, Homo sapien
ctagtcacaaaagcaacggtgtcccagttagag

SEQ ID NO: 677024 - DNA, 33 bp, Homo sapien
ctagtcacaaaagcaatggtgtcccagttagag

SEQ ID NO: 677025 - DNA, 33 bp, Homo sapien
tttaacttctgtaccaggcttttatttctggta

SEQ ID NO: 677026 - DNA, 33 bp, Homo sapien
tttaacttctgtaccatgcttttatttctggta

SEQ ID NO: 677027 - DNA, 33 bp, Homo sapien
tttggtctattctgaggcctctctgcttggctt

SEQ ID NO: 677028 - DNA, 33 bp, Homo sapien
tttggtctattctgagtcctctctgcttggctt

SEQ ID NO: 677029 - DNA, 33 bp, Homo sapien
ccctgcaaatgtacttgaaattctacgctctta

SEQ ID NO: 677030 - DNA, 33 bp, Homo sapien
ccctgcaaatgtactttaaattctacgctctta

SEQ ID NO: 677031 - DNA, 33 bp, Homo sapien
taagtgagtatttttaagatagggacactcaag

SEQ ID NO: 677032 - DNA, 33 bp, Homo sapien
taagtgagtatttttatgatagggacactcaag

SEQ ID NO: 677033 - DNA, 33 bp, Homo sapien
atatagtgaactgtaacctagctgaatgtgtaa

SEQ ID NO: 677034 - DNA, 33 bp, Homo sapien
atatagtgaactgtaagctagctgaatgtgtaa

SEQ ID NO: 677035 - DNA, 33 bp, Homo sapien
aataaaaccctaccagcccctatgcagtctggc

SEQ ID NO: 677036 - DNA, 33 bp, Homo sapien
aataaaaccctaccagtccctatgcagtctggc

SEQ ID NO: 677037 - DNA, 33 bp, Homo sapien
ctttctatttatgccagaattgctttctcccac

SEQ ID NO: 677038 - DNA, 33 bp, Homo sapien
ctttctatttatgccataattgctttctcccac

SEQ ID NO: 677039 - DNA, 33 bp, Homo sapien
aggttcttcaccacacaattagtttcttagagc

SEQ ID NO: 677040 - DNA, 33 bp, Homo sapien
aggttcttcaccacaccattagtttcttagagc

SEQ ID NO: 677041 - DNA, 33 bp, Homo sapien
gactctgcagccaaaaggcataggctcaaagtt

SEQ ID NO: 677042 - DNA, 33 bp, Homo sapien
gactctgcagccaaaatgcataggctcaaagtt

SEQ ID NO: 677043 - DNA, 33 bp, Homo sapien
tggcttaatagcagcaagagaactgtcgtgggt

SEQ ID NO: 677044 - DNA, 33 bp, Homo sapien
tggcttaatagcagcatgagaactgtcgtgggt

SEQ ID NO: 677045 - DNA, 33 bp, Homo sapien
tagatggtgctgtctaaatggaagctctttatc

SEQ ID NO: 677046 - DNA, 33 bp, Homo sapien
tagatggtgctgtctatatggaagctctttatc

SEQ ID NO: 677047 - DNA, 33 bp, Homo sapien
tggttgttgcaagatccgaatactacttggcaa

SEQ ID NO: 677048 - DNA, 33 bp, Homo sapien
tggttgttgcaagatctgaatactacttggcaa

SEQ ID NO: 677049 - DNA, 33 bp, Homo sapien
tatttcttgcaaaataaattgctgaaaccacct

SEQ ID NO: 677050 - DNA, 33 bp, Homo sapien
tatttcttgcaaaatagattgctgaaaccacct

SEQ ID NO: 677051 - DNA, 33 bp, Homo sapien
aactattcttcaaggcaatacctttttccccag

SEQ ID NO: 677052 - DNA, 33 bp, Homo sapien
aactattcttcaaggcgatacctttttccccag

SEQ ID NO: 677053 - DNA, 33 bp, Homo sapien
ggtgaaacctgctggaaaggagcgagtcattat

SEQ ID NO: 677054 - DNA, 33 bp, Homo sapien
ggtgaaacctgctggacaggagcgagtcattat

SEQ ID NO: 677055 - DNA, 33 bp, Homo sapien
ggtcagactattgaaaagtggaggaactggtga

SEQ ID NO: 677056 - DNA, 33 bp, Homo sapien
ggtcagactattgaaaggtggaggaactggtga

SEQ ID NO: 677057 - DNA, 33 bp, Homo sapien
tcatcatgacttaatacgtacaacacaacttgt

SEQ ID NO: 677058 - DNA, 33 bp, Homo sapien
tcatcatgacttaatatgtacaacacaacttgt

SEQ ID NO: 677059 - DNA, 33 bp, Homo sapien
tttacttcttacgataacaatgaagtttcagaa

SEQ ID NO: 677060 - DNA, 33 bp, Homo sapien
tttacttcttacgataccaatgaagtttcagaa

SEQ ID NO: 677061 - DNA, 33 bp, Homo sapien
taagcaaagcaacacaatcacatgctagattag

SEQ ID NO: 677062 - DNA, 33 bp, Homo sapien
taagcaaagcaacacagtcacatgctagattag

SEQ ID NO: 677063 - DNA, 33 bp, Homo sapien
agagttcgatctttccagaagagaaatgtggtt

SEQ ID NO: 677064 - DNA, 33 bp, Homo sapien
agagttcgatctttccggaagagaaatgtggtt

SEQ ID NO: 677065 - DNA, 33 bp, Homo sapien
ttgatctaagataagcaaaaaagggttgtgact

SEQ ID NO: 677066 - DNA, 33 bp, Homo sapien
ttgatctaagataagcgaaaaagggttgtgact

SEQ ID NO: 677067 - DNA, 33 bp, Homo sapien
gccttaggtgaaggtccgaaagaaaaaaatctg

SEQ ID NO: 677068 - DNA, 33 bp, Homo sapien
gccttaggtgaaggtctgaaagaaaaaaatctg

SEQ ID NO: 677069 - DNA, 33 bp, Homo sapien
aaagttgttttcgctcacattcctttcattact

SEQ ID NO: 677070 - DNA, 33 bp, Homo sapien
aaagttgttttcgctcgcattcctttcattact

SEQ ID NO: 677071 - DNA, 33 bp, Homo sapien
tcataaatatgtgttaaaatgatggttgcactt

SEQ ID NO: 677072 - DNA, 33 bp, Homo sapien
tcataaatatgtgttacaatgatggttgcactt

SEQ ID NO: 677073 - DNA, 33 bp, Homo sapien
agaaatgcttcagggaatactacaaccaaaagt

SEQ ID NO: 677074 - DNA, 33 bp, Homo sapien
agaaatgcttcagggagtactacaaccaaaagt

SEQ ID NO: 677075 - DNA, 33 bp, Homo sapien
agatctcttgaagatacgtctggcatcaagtca

SEQ ID NO: 677076 - DNA, 33 bp, Homo sapien
agatctcttgaagatatgtctggcatcaagtca

SEQ ID NO: 677077 - DNA, 33 bp, Homo sapien
aaatttgactaggggaaaaagcagaattactgt

SEQ ID NO: 677078 - DNA, 33 bp, Homo sapien
aaatttgactaggggagaaagcagaattactgt

SEQ ID NO: 677079 - DNA, 33 bp, Homo sapien
tgggcaccaaccaatcagaagggactctggtat

SEQ ID NO: 677080 - DNA, 33 bp, Homo sapien
tgggcaccaaccaatcggaagggactctggtat

SEQ ID NO: 677081 - DNA, 33 bp, Homo sapien
tgactagcccagaaaaaagttagaaaatgagta

SEQ ID NO: 677082 - DNA, 33 bp, Homo sapien
tgactagcccagaaaacagttagaaaatgagta

SEQ ID NO: 677083 - DNA, 33 bp, Homo sapien
gttcattgctttctcccctttgatacaatttgc

SEQ ID NO: 677084 - DNA, 33 bp, Homo sapien
gttcattgctttctcctctttgatacaatttgc

SEQ ID NO: 677085 - DNA, 33 bp, Homo sapien
catacactgattggatcaaaaggatgaataagt

SEQ ID NO: 677086 - DNA, 33 bp, Homo sapien
catacactgattggattaaaaggatgaataagt

SEQ ID NO: 677087 - DNA, 33 bp, Homo sapien
aatacagcagtgttaacaaagacagatatggaa

SEQ ID NO: 677088 - DNA, 33 bp, Homo sapien
aatacagcagtgttaagaaagacagatatggaa

SEQ ID NO: 677089 - DNA, 33 bp, Homo sapien
tacaatgtattattataaagtccagtctgcaat

SEQ ID NO: 677090 - DNA, 33 bp, Homo sapien
tacaatgtattattatgaagtccagtctgcaat

SEQ ID NO: 677091 - DNA, 33 bp, Homo sapien
tttgctcattttctaactggatcactgaattac

SEQ ID NO: 677092 - DNA, 33 bp, Homo sapien
tttgctcattttctaattggatcactgaattac

SEQ ID NO: 677093 - DNA, 33 bp, Homo sapien
tgatttttcagtgcacaaagctctaactaaaca

SEQ ID NO: 677094 - DNA, 33 bp, Homo sapien
tgatttttcagtgcacgaagctctaactaaaca

SEQ ID NO: 677095 - DNA, 33 bp, Homo sapien
atcgtgacttgtatccagaactcttacaactta

SEQ ID NO: 677096 - DNA, 33 bp, Homo sapien
atcgtgacttgtatccggaactcttacaactta

SEQ ID NO: 677097 - DNA, 33 bp, Homo sapien
ttgtaacaaagtcttacaaatcactattttaaa

SEQ ID NO: 677098 - DNA, 33 bp, Homo sapien
ttgtaacaaagtcttagaaatcactattttaaa

SEQ ID NO: 677099 - DNA, 33 bp, Homo sapien
gggcaatacccaataccaagcaagagattttta

SEQ ID NO: 677100 - DNA, 33 bp, Homo sapien
gggcaatacccaatacgaagcaagagattttta

SEQ ID NO: 677101 - DNA, 33 bp, Homo sapien
tttgcgcaaaatgtggaaagaagaagacattgc

SEQ ID NO: 677102 - DNA, 33 bp, Homo sapien
tttgcgcaaaatgtgggaagaagaagacattgc

SEQ ID NO: 677103 - DNA, 33 bp, Homo sapien
tacaaaagacagtggaagattcttatctcataa

SEQ ID NO: 677104 - DNA, 33 bp, Homo sapien
tacaaaagacagtggaggattcttatctcataa

SEQ ID NO: 677105 - DNA, 33 bp, Homo sapien
gatggagtatgtcagcactgtaaagaagttctt

SEQ ID NO: 677106 - DNA, 33 bp, Homo sapien
gatggagtatgtcagcgctgtaaagaagttctt

SEQ ID NO: 677107 - DNA, 33 bp, Homo sapien
cattggtggtcttggacagtttctcattgctgg

SEQ ID NO: 677108 - DNA, 33 bp, Homo sapien
cattggtggtcttggatagtttctcattgctgg

SEQ ID NO: 677109 - DNA, 33 bp, Homo sapien
gttgtataatgtccacagtctggagtacaggcc

SEQ ID NO: 677110 - DNA, 33 bp, Homo sapien
gttgtataatgtccacggtctggagtacaggcc

SEQ ID NO: 677111 - DNA, 33 bp, Homo sapien
gactgtcaagagaccaccagtaatgccatccac

SEQ ID NO: 677112 - DNA, 33 bp, Homo sapien
gactgtcaagagaccagcagtaatgccatccac

SEQ ID NO: 677113 - DNA, 33 bp, Homo sapien
ttttgtctccattaaaagtctgttgttttttgt

SEQ ID NO: 677114 - DNA, 33 bp, Homo sapien
ttttgtctccattaaatgtctgttgttttttgt

SEQ ID NO: 677115 - DNA, 33 bp, Homo sapien
gctctccagcttctcaacatacacacttccaaa

SEQ ID NO: 677116 - DNA, 33 bp, Homo sapien
gctctccagcttctcatcatacacacttccaaa

SEQ ID NO: 677117 - DNA, 33 bp, Homo sapien
atttaaaagtaatacactctcgctgcagaaaaa

SEQ ID NO: 677118 - DNA, 33 bp, Homo sapien
atttaaaagtaatacattctcgctgcagaaaaa

SEQ ID NO: 677119 - DNA, 33 bp, Homo sapien
ctgttacaagctgaaacggattcataatttggg

SEQ ID NO: 677120 - DNA, 33 bp, Homo sapien
ctgttacaagctgaaatggattcataatttggg

SEQ ID NO: 677121 - DNA, 33 bp, Homo sapien
ggatgtcatggtatgaggctcccaggatcttgg

SEQ ID NO: 677122 - DNA, 33 bp, Homo sapien
ggatgtcatggtatgatgctcccaggatcttgg

SEQ ID NO: 677123 - DNA, 33 bp, Homo sapien
aaacactgtatacttacagccaattaaatttat

SEQ ID NO: 677124 - DNA, 33 bp, Homo sapien
aaacactgtatacttagagccaattaaatttat

SEQ ID NO: 677125 - DNA, 33 bp, Homo sapien
attatgctgagtaatacctgcaatgcatagaaa

SEQ ID NO: 677126 - DNA, 33 bp, Homo sapien
attatgctgagtaatatctgcaatgcatagaaa

SEQ ID NO: 677127 - DNA, 33 bp, Homo sapien
ggcgtattatggtggtaaataggtgaagtgaac

SEQ ID NO: 677128 - DNA, 33 bp, Homo sapien
ggcgtattatggtggtgaataggtgaagtgaac

SEQ ID NO: 677129 - DNA, 33 bp, Homo sapien
cccccataccctaccaccatgttgcaatggtct

SEQ ID NO: 677130 - DNA, 33 bp, Homo sapien
cccccataccctaccatcatgttgcaatggtct

SEQ ID NO: 677131 - DNA, 33 bp, Homo sapien
ttcttctgttagggagaatagaatgctctggat

SEQ ID NO: 677132 - DNA, 33 bp, Homo sapien
ttcttctgttagggaggatagaatgctctggat

SEQ ID NO: 677133 - DNA, 33 bp, Homo sapien
tgaatcctgaacccgggataccattgtgaaaag

SEQ ID NO: 677134 - DNA, 33 bp, Homo sapien
tgaatcctgaacccggtataccattgtgaaaag

SEQ ID NO: 677135 - DNA, 33 bp, Homo sapien
tatttttagcctttcccaagatctttacatttg

SEQ ID NO: 677136 - DNA, 33 bp, Homo sapien
tatttttagcctttcctaagatctttacatttg

SEQ ID NO: 677137 - DNA, 33 bp, Homo sapien
gagtaagaaaacaagaggagtgtcaaagcaata

SEQ ID NO: 677138 - DNA, 33 bp, Homo sapien
gagtaagaaaacaagatgagtgtcaaagcaata

SEQ ID NO: 677139 - DNA, 33 bp, Homo sapien
tccatgctacaaaaaaaagaatagaatccaaat

SEQ ID NO: 677140 - DNA, 33 bp, Homo sapien
tccatgctacaaaaaagagaatagaatccaaat

SEQ ID NO: 677141 - DNA, 33 bp, Homo sapien
gatctgcctggaagcaacatcagaattcccctg

SEQ ID NO: 677142 - DNA, 33 bp, Homo sapien
gatctgcctggaagcagcatcagaattcccctg

SEQ ID NO: 677143 - DNA, 33 bp, Homo sapien
ttgattccttggtaaactgtctctgaaaaggtg

SEQ ID NO: 677144 - DNA, 33 bp, Homo sapien
ttgattccttggtaaattgtctctgaaaaggtg

SEQ ID NO: 677145 - DNA, 33 bp, Homo sapien
aaaaattgtcacactacaaaaaagtgatgtgca

SEQ ID NO: 677146 - DNA, 33 bp, Homo sapien
aaaaattgtcacactataaaaaagtgatgtgca

SEQ ID NO: 677147 - DNA, 33 bp, Homo sapien
caactggcacagaaggaaagtcactgagaatgg

SEQ ID NO: 677148 - DNA, 33 bp, Homo sapien
caactggcacagaagggaagtcactgagaatgg

SEQ ID NO: 677149 - DNA, 33 bp, Homo sapien
ataatcctgttcctccaaataatcctgttcctc

SEQ ID NO: 677150 - DNA, 33 bp, Homo sapien
ataatcctgttcctccgaataatcctgttcctc

SEQ ID NO: 677151 - DNA, 33 bp, Homo sapien
cataacagtttgaaaacgagaggtgttgtctgg

SEQ ID NO: 677152 - DNA, 33 bp, Homo sapien
cataacagtttgaaaatgagaggtgttgtctgg

SEQ ID NO: 677153 - DNA, 33 bp, Homo sapien
atcctttcccgtgaaacgagagatttaagtcag

SEQ ID NO: 677154 - DNA, 33 bp, Homo sapien
atcctttcccgtgaaatgagagatttaagtcag

SEQ ID NO: 677155 - DNA, 33 bp, Homo sapien
tacgacactctgcccaggttggctaaaagtgag

SEQ ID NO: 677156 - DNA, 33 bp, Homo sapien
tacgacactctgcccatgttggctaaaagtgag

SEQ ID NO: 677157 - DNA, 33 bp, Homo sapien
ttagtttctattttcaggtatatcctaaaacat

SEQ ID NO: 677158 - DNA, 33 bp, Homo sapien
ttagtttctattttcatgtatatcctaaaacat

SEQ ID NO: 677159 - DNA, 33 bp, Homo sapien
atggccgtggggctccaatgactccctgactgt

SEQ ID NO: 677160 - DNA, 33 bp, Homo sapien
atggccgtggggctccgatgactccctgactgt

SEQ ID NO: 677161 - DNA, 33 bp, Homo sapien
gagagagtcaaggaaaccctagagcagaagggc

SEQ ID NO: 677162 - DNA, 33 bp, Homo sapien
gagagagtcaaggaaatcctagagcagaagggc

SEQ ID NO: 677163 - DNA, 33 bp, Homo sapien
gggaaggctgggtgaaagcagctcaatcacctg

SEQ ID NO: 677164 - DNA, 33 bp, Homo sapien
gggaaggctgggtgaaggcagctcaatcacctg

SEQ ID NO: 677165 - DNA, 33 bp, Homo sapien
tcagttacacgtaagacacaagccaaaataaca

SEQ ID NO: 677166 - DNA, 33 bp, Homo sapien
tcagttacacgtaagagacaagccaaaataaca

SEQ ID NO: 677167 - DNA, 33 bp, Homo sapien
tacgagttaacatcaccgagcaaaatcactgca

SEQ ID NO: 677168 - DNA, 33 bp, Homo sapien
tacgagttaacatcactgagcaaaatcactgca

SEQ ID NO: 677169 - DNA, 33 bp, Homo sapien
ctgcgccacactttcacacttacagtttcaggt

SEQ ID NO: 677170 - DNA, 33 bp, Homo sapien
ctgcgccacactttcagacttacagtttcaggt

SEQ ID NO: 677171 - DNA, 33 bp, Homo sapien
agactcccattcctaaaccctagctcaggtctc

SEQ ID NO: 677172 - DNA, 33 bp, Homo sapien
agactcccattcctaagccctagctcaggtctc

SEQ ID NO: 677173 - DNA, 33 bp, Homo sapien
ctaaaatccttatatgccagagttctaggagaa

SEQ ID NO: 677174 - DNA, 33 bp, Homo sapien
ctaaaatccttatatgtcagagttctaggagaa

SEQ ID NO: 677175 - DNA, 33 bp, Homo sapien
taccttgtgtttaggaaatgggcttgtttgccc

SEQ ID NO: 677176 - DNA, 33 bp, Homo sapien
taccttgtgtttaggatatgggcttgtttgccc

SEQ ID NO: 677177 - DNA, 33 bp, Homo sapien
accaccagataaaatccctcagacttagaagtt

SEQ ID NO: 677178 - DNA, 33 bp, Homo sapien
accaccagataaaatcgctcagacttagaagtt

SEQ ID NO: 677179 - DNA, 33 bp, Homo sapien
gggctgctgcttaacaaaggccgagagggacat

SEQ ID NO: 677180 - DNA, 33 bp, Homo sapien
gggctgctgcttaacagaggccgagagggacat

SEQ ID NO: 677181 - DNA, 33 bp, Homo sapien
gtggggacagatcttgaaaagggcaaacattgc

SEQ ID NO: 677182 - DNA, 33 bp, Homo sapien
gtggggacagatcttggaaagggcaaacattgc

SEQ ID NO: 677183 - DNA, 33 bp, Homo sapien
gtataactcgacagacaaaagtcagcaggggta

SEQ ID NO: 677184 - DNA, 33 bp, Homo sapien
gtataactcgacagacgaaagtcagcaggggta

SEQ ID NO: 677185 - DNA, 33 bp, Homo sapien
aaagttgtaaaatacacgttgaaggagaaatga

SEQ ID NO: 677186 - DNA, 33 bp, Homo sapien
aaagttgtaaaatacatgttgaaggagaaatga

SEQ ID NO: 677187 - DNA, 33 bp, Homo sapien
aatgaaattagggcagaatgttatttgctcatg

SEQ ID NO: 677188 - DNA, 33 bp, Homo sapien
aatgaaattagggcaggatgttatttgctcatg

SEQ ID NO: 677189 - DNA, 33 bp, Homo sapien
ccttgactttcctcagccgaagaaagaagaatt

SEQ ID NO: 677190 - DNA, 33 bp, Homo sapien
ccttgactttcctcaggcgaagaaagaagaatt

SEQ ID NO: 677191 - DNA, 33 bp, Homo sapien
ctgcaaagaaaggaacaaccttgtaatcctatc

SEQ ID NO: 677192 - DNA, 33 bp, Homo sapien
ctgcaaagaaaggaacgaccttgtaatcctatc

SEQ ID NO: 677193 - DNA, 33 bp, Homo sapien
ctgtgtttccaatgacaatgccccacagccctc

SEQ ID NO: 677194 - DNA, 33 bp, Homo sapien
ctgtgtttccaatgacgatgccccacagccctc

SEQ ID NO: 677195 - DNA, 33 bp, Homo sapien
tatagaggttaattcaacagacaacttatcgtg

SEQ ID NO: 677196 - DNA, 33 bp, Homo sapien
tatagaggttaattcagcagacaacttatcgtg

SEQ ID NO: 677197 - DNA, 33 bp, Homo sapien
cacctagaaaaccagcaatgataggccctcata

SEQ ID NO: 677198 - DNA, 33 bp, Homo sapien
cacctagaaaaccagccatgataggccctcata

SEQ ID NO: 677199 - DNA, 33 bp, Homo sapien
atacagcggataggaaaacctcattacttcaat

SEQ ID NO: 677200 - DNA, 33 bp, Homo sapien
atacagcggataggaagacctcattacttcaat

SEQ ID NO: 677201 - DNA, 33 bp, Homo sapien
acatctctctcagagacgttgctctctcttcct

SEQ ID NO: 677202 - DNA, 33 bp, Homo sapien
acatctctctcagagatgttgctctctcttcct

SEQ ID NO: 677203 - DNA, 33 bp, Homo sapien
tgctgaccattcatccacccattgggatagccc

SEQ ID NO: 677204 - DNA, 33 bp, Homo sapien
tgctgaccattcatccgcccattgggatagccc

SEQ ID NO: 677205 - DNA, 33 bp, Homo sapien
gatctctggcaagttaccaaacttctctgtgcc

SEQ ID NO: 677206 - DNA, 33 bp, Homo sapien
gatctctggcaagttagcaaacttctctgtgcc

SEQ ID NO: 677207 - DNA, 33 bp, Homo sapien
ctactctacgaaacacaaagttctatggtctcg

SEQ ID NO: 677208 - DNA, 33 bp, Homo sapien
ctactctacgaaacacgaagttctatggtctcg

SEQ ID NO: 677209 - DNA, 33 bp, Homo sapien
ttccttttctttgacaaggttagctgtctgaaa

SEQ ID NO: 677210 - DNA, 33 bp, Homo sapien
ttccttttctttgacacggttagctgtctgaaa

SEQ ID NO: 677211 - DNA, 33 bp, Homo sapien
aaagcttacaagtcaaacagcgtgggtataaat

SEQ ID NO: 677212 - DNA, 33 bp, Homo sapien
aaagcttacaagtcaaccagcgtgggtataaat

SEQ ID NO: 677213 - DNA, 33 bp, Homo sapien
cactcttcttgcatccaaattggttaccagaac

SEQ ID NO: 677214 - DNA, 33 bp, Homo sapien
cactcttcttgcatccgaattggttaccagaac

SEQ ID NO: 677215 - DNA, 33 bp, Homo sapien
cctgtctttctgttcaagtgtctcagtggagtt

SEQ ID NO: 677216 - DNA, 33 bp, Homo sapien
cctgtctttctgttcatgtgtctcagtggagtt

SEQ ID NO: 677217 - DNA, 33 bp, Homo sapien
gtcattctctacaacccattcgcccagtcacct

SEQ ID NO: 677218 - DNA, 33 bp, Homo sapien
gtcattctctacaacctattcgcccagtcacct

SEQ ID NO: 677219 - DNA, 33 bp, Homo sapien
gctgtttacagtaacacaaggagtcacggtaac

SEQ ID NO: 677220 - DNA, 33 bp, Homo sapien
gctgtttacagtaacataaggagtcacggtaac

SEQ ID NO: 677221 - DNA, 33 bp, Homo sapien
gaatcccatcccttcacagcgagcgctctttct

SEQ ID NO: 677222 - DNA, 33 bp, Homo sapien
gaatcccatcccttcatagcgagcgctctttct

SEQ ID NO: 677223 - DNA, 33 bp, Homo sapien
tccctcttttccctaaaccagctttctccttat

SEQ ID NO: 677224 - DNA, 33 bp, Homo sapien
tccctcttttccctaatccagctttctccttat

SEQ ID NO: 677225 - DNA, 33 bp, Homo sapien
ctggaaggtttaagatgatcagtggcttccaag

SEQ ID NO: 677226 - DNA, 33 bp, Homo sapien
ctggaaggtttaagattatcagtggcttccaag

SEQ ID NO: 677227 - DNA, 33 bp, Homo sapien
acattcaagccatgacaatgagttttgatcttt

SEQ ID NO: 677228 - DNA, 33 bp, Homo sapien
acattcaagccatgactatgagttttgatcttt

SEQ ID NO: 677229 - DNA, 33 bp, Homo sapien
attcctataccagtcacacaaaataaactcctt

SEQ ID NO: 677230 - DNA, 33 bp, Homo sapien
attcctataccagtcagacaaaataaactcctt

SEQ ID NO: 677231 - DNA, 33 bp, Homo sapien
atgctccagaaacggcagagtctgaagttatca

SEQ ID NO: 677232 - DNA, 33 bp, Homo sapien
atgctccagaaacggcggagtctgaagttatca

SEQ ID NO: 677233 - DNA, 33 bp, Homo sapien
agttcactccgtaagtaaccatttcacctgacg

SEQ ID NO: 677234 - DNA, 33 bp, Homo sapien
agttcactccgtaagttaccatttcacctgacg

SEQ ID NO: 677235 - DNA, 33 bp, Homo sapien
ccgtgggcctccaggcaatactccaagaaggac

SEQ ID NO: 677236 - DNA, 33 bp, Homo sapien
ccgtgggcctccaggcgatactccaagaaggac

SEQ ID NO: 677237 - DNA, 33 bp, Homo sapien
ggttagggcttctggcgaagatggcatttgggc

SEQ ID NO: 677238 - DNA, 33 bp, Homo sapien
ggttagggcttctggctaagatggcatttgggc

SEQ ID NO: 677239 - DNA, 33 bp, Homo sapien
aagattcatgtgggaaggtttgtaattcaatag

SEQ ID NO: 677240 - DNA, 33 bp, Homo sapien
aagattcatgtgggaatgtttgtaattcaatag

SEQ ID NO: 677241 - DNA, 33 bp, Homo sapien
gtactatacataattcacaaagaaattccaggg

SEQ ID NO: 677242 - DNA, 33 bp, Homo sapien
gtactatacataattcgcaaagaaattccaggg

SEQ ID NO: 677243 - DNA, 33 bp, Homo sapien
ggggtgtgaagaagaaaacctggaatccgactt

SEQ ID NO: 677244 - DNA, 33 bp, Homo sapien
ggggtgtgaagaagaagacctggaatccgactt

SEQ ID NO: 677245 - DNA, 33 bp, Homo sapien
gtgagatttagacaccactgaaaatccaggttt

SEQ ID NO: 677246 - DNA, 33 bp, Homo sapien
gtgagatttagacaccgctgaaaatccaggttt

SEQ ID NO: 677247 - DNA, 33 bp, Homo sapien
atccaggtttcaccccgagaaatcctgatgtaa

SEQ ID NO: 677248 - DNA, 33 bp, Homo sapien
atccaggtttcacccctagaaatcctgatgtaa

SEQ ID NO: 677249 - DNA, 33 bp, Homo sapien
cccttaggcttcacccaggactagaacaggctg

SEQ ID NO: 677250 - DNA, 33 bp, Homo sapien
cccttaggcttcacccgggactagaacaggctg

SEQ ID NO: 677251 - DNA, 33 bp, Homo sapien
cctcagtggtcaagtccagtctggttgtggagg

SEQ ID NO: 677252 - DNA, 33 bp, Homo sapien
cctcagtggtcaagtctagtctggttgtggagg

SEQ ID NO: 677253 - DNA, 33 bp, Homo sapien
taaaaatgccaaaggaacaaaaagctagagaga

SEQ ID NO: 677254 - DNA, 33 bp, Homo sapien
taaaaatgccaaaggagcaaaaagctagagaga

SEQ ID NO: 677255 - DNA, 33 bp, Homo sapien
gcctgtcattctagtcaaggtcctgcaccaaac

SEQ ID NO: 677256 - DNA, 33 bp, Homo sapien
gcctgtcattctagtctaggtcctgcaccaaac

SEQ ID NO: 677257 - DNA, 33 bp, Homo sapien
atattcactaacaccccaaagggagccaatgtg

SEQ ID NO: 677258 - DNA, 33 bp, Homo sapien
atattcactaacacccgaaagggagccaatgtg

SEQ ID NO: 677259 - DNA, 33 bp, Homo sapien
gaagcagaaaagaataacctttgaaacattcct

SEQ ID NO: 677260 - DNA, 33 bp, Homo sapien
gaagcagaaaagaatatcctttgaaacattcct

SEQ ID NO: 677261 - DNA, 33 bp, Homo sapien
ccccatagaggttttgcatttccagcatggctc

SEQ ID NO: 677262 - DNA, 33 bp, Homo sapien
ccccatagaggttttgtatttccagcatggctc

SEQ ID NO: 677263 - DNA, 33 bp, Homo sapien
tcatattgcagattccaaattctgtttcattac

SEQ ID NO: 677264 - DNA, 33 bp, Homo sapien
tcatattgcagattccgaattctgtttcattac

SEQ ID NO: 677265 - DNA, 33 bp, Homo sapien
aaccaaaacagaggcacgatacctagtgggcct

SEQ ID NO: 677266 - DNA, 33 bp, Homo sapien
aaccaaaacagaggcatgatacctagtgggcct

SEQ ID NO: 677267 - DNA, 33 bp, Homo sapien
tatactcttttgactcaaattttgtaccacatg

SEQ ID NO: 677268 - DNA, 33 bp, Homo sapien
tatactcttttgactcgaattttgtaccacatg

SEQ ID NO: 677269 - DNA, 33 bp, Homo sapien
aaaagttgcattaagcacatttcaatagtcaca

SEQ ID NO: 677270 - DNA, 33 bp, Homo sapien
aaaagttgcattaagcgcatttcaatagtcaca

SEQ ID NO: 677271 - DNA, 33 bp, Homo sapien
agagcatcaaaggagaatatcacccacagcact

SEQ ID NO: 677272 - DNA, 33 bp, Homo sapien
agagcatcaaaggagagtatcacccacagcact

SEQ ID NO: 677273 - DNA, 33 bp, Homo sapien
tagtagcaatgtggcaagatggtaagttcagct

SEQ ID NO: 677274 - DNA, 33 bp, Homo sapien
tagtagcaatgtggcaggatggtaagttcagct

SEQ ID NO: 677275 - DNA, 33 bp, Homo sapien
aggtaaataaacaagacagtacattctgcacac

SEQ ID NO: 677276 - DNA, 33 bp, Homo sapien
aggtaaataaacaagagagtacattctgcacac

SEQ ID NO: 677277 - DNA, 33 bp, Homo sapien
gagaaagcagattacgcaggttatgaacagcct

SEQ ID NO: 677278 - DNA, 33 bp, Homo sapien
gagaaagcagattacgtaggttatgaacagcct

SEQ ID NO: 677279 - DNA, 33 bp, Homo sapien
caggaactggaaaaccggacaagctccagcccc

SEQ ID NO: 677280 - DNA, 33 bp, Homo sapien
caggaactggaaaacctgacaagctccagcccc

SEQ ID NO: 677281 - DNA, 33 bp, Homo sapien
ctcatctgcctggataaagaatatgagacttcc

SEQ ID NO: 677282 - DNA, 33 bp, Homo sapien
ctcatctgcctggatagagaatatgagacttcc

SEQ ID NO: 677283 - DNA, 33 bp, Homo sapien
gagacaaagaaccctcagactcaggcaggacat

SEQ ID NO: 677284 - DNA, 33 bp, Homo sapien
gagacaaagaaccctcggactcaggcaggacat

SEQ ID NO: 677285 - DNA, 33 bp, Homo sapien
tgacttttccttcacaaatcagttcacaaatgg

SEQ ID NO: 677286 - DNA, 33 bp, Homo sapien
tgacttttccttcacagatcagttcacaaatgg

SEQ ID NO: 677287 - DNA, 33 bp, Homo sapien
gtgctcatccactcgaaaaatatttatggaatg

SEQ ID NO: 677288 - DNA, 33 bp, Homo sapien
gtgctcatccactcgagaaatatttatggaatg

SEQ ID NO: 677289 - DNA, 33 bp, Homo sapien
ccattatggggcagcactgaggattttgagatt

SEQ ID NO: 677290 - DNA, 33 bp, Homo sapien
ccattatggggcagcattgaggattttgagatt

SEQ ID NO: 677291 - DNA, 33 bp, Homo sapien
aggattttgagattaagtcagacgtgtgcttct

SEQ ID NO: 677292 - DNA, 33 bp, Homo sapien
aggattttgagattaattcagacgtgtgcttct

SEQ ID NO: 677293 - DNA, 33 bp, Homo sapien
aacctggaaatgagataaggtggcttttctttt

SEQ ID NO: 677294 - DNA, 33 bp, Homo sapien
aacctggaaatgagatgaggtggcttttctttt

SEQ ID NO: 677295 - DNA, 33 bp, Homo sapien
cttcagtattgctgatcaagtcacagaaacaat

SEQ ID NO: 677296 - DNA, 33 bp, Homo sapien
cttcagtattgctgatgaagtcacagaaacaat

SEQ ID NO: 677297 - DNA, 33 bp, Homo sapien
tacagagaatcaacaacgtggagacctacgacc

SEQ ID NO: 677298 - DNA, 33 bp, Homo sapien
tacagagaatcaacaatgtggagacctacgacc

SEQ ID NO: 677299 - DNA, 33 bp, Homo sapien
ggaaatataattcttcaatcaacaagtggattc

SEQ ID NO: 677300 - DNA, 33 bp, Homo sapien
ggaaatataattcttcgatcaacaagtggattc

SEQ ID NO: 677301 - DNA, 33 bp, Homo sapien
gagttggctggtctgactatttgtggctcttgg

SEQ ID NO: 677302 - DNA, 33 bp, Homo sapien
gagttggctggtctgattatttgtggctcttgg

SEQ ID NO: 677303 - DNA, 33 bp, Homo sapien
atggagcaacaataaacgaaccaagtggcaatg

SEQ ID NO: 677304 - DNA, 33 bp, Homo sapien
atggagcaacaataaaggaaccaagtggcaatg

SEQ ID NO: 677305 - DNA, 33 bp, Homo sapien
ttactcagcaatttacaggaaatacagggaaag

SEQ ID NO: 677306 - DNA, 33 bp, Homo sapien
ttactcagcaatttacgggaaatacagggaaag

SEQ ID NO: 677307 - DNA, 33 bp, Homo sapien
gattcattttaggtgcaataatggtttcatgtt

SEQ ID NO: 677308 - DNA, 33 bp, Homo sapien
gattcattttaggtgccataatggtttcatgtt

SEQ ID NO: 677309 - DNA, 33 bp, Homo sapien
gtacttgatttgattcccctctgtggtttcctt

SEQ ID NO: 677310 - DNA, 33 bp, Homo sapien
gtacttgatttgattctcctctgtggtttcctt

SEQ ID NO: 677311 - DNA, 33 bp, Homo sapien
attattcaagacttcaaggtaaattttctgtct

SEQ ID NO: 677312 - DNA, 33 bp, Homo sapien
attattcaagacttcagggtaaattttctgtct

SEQ ID NO: 677313 - DNA, 33 bp, Homo sapien
cgcaggctcacactgagggttctacctagcctg

SEQ ID NO: 677314 - DNA, 33 bp, Homo sapien
cgcaggctcacactgatggttctacctagcctg

SEQ ID NO: 677315 - DNA, 33 bp, Homo sapien
ggtccatccaatgctacgataaaacctacatcc

SEQ ID NO: 677316 - DNA, 33 bp, Homo sapien
ggtccatccaatgctatgataaaacctacatcc

SEQ ID NO: 677317 - DNA, 33 bp, Homo sapien
atatgggaaacaggaaattcagcaggacagggt

SEQ ID NO: 677318 - DNA, 33 bp, Homo sapien
atatgggaaacaggaagttcagcaggacagggt

SEQ ID NO: 677319 - DNA, 33 bp, Homo sapien
gcaaagcattaacttaaaccattggaacatccc

SEQ ID NO: 677320 - DNA, 33 bp, Homo sapien
gcaaagcattaacttagaccattggaacatccc

SEQ ID NO: 677321 - DNA, 33 bp, Homo sapien
cattgttttggatgaaagcatctatctttcgtt

SEQ ID NO: 677322 - DNA, 33 bp, Homo sapien
cattgttttggatgaaggcatctatctttcgtt

SEQ ID NO: 677323 - DNA, 33 bp, Homo sapien
gacaagccttttattacgttgactagaaacatt

SEQ ID NO: 677324 - DNA, 33 bp, Homo sapien
gacaagccttttattatgttgactagaaacatt

SEQ ID NO: 677325 - DNA, 33 bp, Homo sapien
tcaggcagaatctctccgaaatccaagagtaga

SEQ ID NO: 677326 - DNA, 33 bp, Homo sapien
tcaggcagaatctctctgaaatccaagagtaga

SEQ ID NO: 677327 - DNA, 33 bp, Homo sapien
tctaagtcttaataacggcaacctcttcccttt

SEQ ID NO: 677328 - DNA, 33 bp, Homo sapien
tctaagtcttaataactgcaacctcttcccttt

SEQ ID NO: 677329 - DNA, 33 bp, Homo sapien
cagcgtaaacagaatgaaagaaagtgtgaggaa

SEQ ID NO: 677330 - DNA, 33 bp, Homo sapien
cagcgtaaacagaatggaagaaagtgtgaggaa

SEQ ID NO: 677331 - DNA, 33 bp, Homo sapien
gacagttggacttatcaaactgtctctagaacc

SEQ ID NO: 677332 - DNA, 33 bp, Homo sapien
gacagttggacttatcgaactgtctctagaacc

SEQ ID NO: 677333 - DNA, 33 bp, Homo sapien
ctttaaagctcgttccaaggagaggatgttgct

SEQ ID NO: 677334 - DNA, 33 bp, Homo sapien
ctttaaagctcgttccgaggagaggatgttgct

SEQ ID NO: 677335 - DNA, 33 bp, Homo sapien
acttatagcatggccaagaatgaattttatgtc

SEQ ID NO: 677336 - DNA, 33 bp, Homo sapien
acttatagcatggccaggaatgaattttatgtc

SEQ ID NO: 677337 - DNA, 33 bp, Homo sapien
tttgacataattgagcacccattagcttctact

SEQ ID NO: 677338 - DNA, 33 bp, Homo sapien
tttgacataattgagcgcccattagcttctact

SEQ ID NO: 677339 - DNA, 33 bp, Homo sapien
ttcttctaattctaacaacccaatttgtctctc

SEQ ID NO: 677340 - DNA, 33 bp, Homo sapien
ttcttctaattctaactacccaatttgtctctc

SEQ ID NO: 677341 - DNA, 33 bp, Homo sapien
attataataggccataacatggttttctttatg

SEQ ID NO: 677342 - DNA, 33 bp, Homo sapien
attataataggccatagcatggttttctttatg

SEQ ID NO: 677343 - DNA, 33 bp, Homo sapien
tcttggctctctctgtaaaccatttctctatac

SEQ ID NO: 677344 - DNA, 33 bp, Homo sapien
tcttggctctctctgttaaccatttctctatac

SEQ ID NO: 677345 - DNA, 33 bp, Homo sapien
atcagcaggctcccccaaaaaagtttcttctcc

SEQ ID NO: 677346 - DNA, 33 bp, Homo sapien
atcagcaggctccccccaaaaagtttcttctcc

SEQ ID NO: 677347 - DNA, 33 bp, Homo sapien
cgtggcctctctctcacgccaagaccctcgccc

SEQ ID NO: 677348 - DNA, 33 bp, Homo sapien
cgtggcctctctctcatgccaagaccctcgccc

SEQ ID NO: 677349 - DNA, 33 bp, Homo sapien
cttccatattatttccacctctggtcatcagaa

SEQ ID NO: 677350 - DNA, 33 bp, Homo sapien
cttccatattatttccgcctctggtcatcagaa

SEQ ID NO: 677351 - DNA, 33 bp, Homo sapien
aggatgtatcccagcacgaagaatttcttgagc

SEQ ID NO: 677352 - DNA, 33 bp, Homo sapien
aggatgtatcccagcatgaagaatttcttgagc

SEQ ID NO: 677353 - DNA, 33 bp, Homo sapien
gaagaccactgttacacgagctcctgacacatg

SEQ ID NO: 677354 - DNA, 33 bp, Homo sapien
gaagaccactgttacatgagctcctgacacatg

SEQ ID NO: 677355 - DNA, 33 bp, Homo sapien
cacttcagcagcataaataaaagtcaagccctg

SEQ ID NO: 677356 - DNA, 33 bp, Homo sapien
cacttcagcagcataactaaaagtcaagccctg

SEQ ID NO: 677357 - DNA, 33 bp, Homo sapien
tgcaaaaacctgtcacagtataattaactgcct

SEQ ID NO: 677358 - DNA, 33 bp, Homo sapien
tgcaaaaacctgtcacggtataattaactgcct

SEQ ID NO: 677359 - DNA, 33 bp, Homo sapien
gttctgctctcattaactagttttgtaactatt

SEQ ID NO: 677360 - DNA, 33 bp, Homo sapien
gttctgctctcattaattagttttgtaactatt

SEQ ID NO: 677361 - DNA, 33 bp, Homo sapien
ataatatttcagactaaatgtaggagtaagaac

SEQ ID NO: 677362 - DNA, 33 bp, Homo sapien
ataatatttcagactagatgtaggagtaagaac

SEQ ID NO: 677363 - DNA, 33 bp, Homo sapien
taacctgatgtaatgactaatcctagcttggat

SEQ ID NO: 677364 - DNA, 33 bp, Homo sapien
taacctgatgtaatgagtaatcctagcttggat

SEQ ID NO: 677365 - DNA, 33 bp, Homo sapien
atgacagagaaatcccaaaaatgcattatatta

SEQ ID NO: 677366 - DNA, 33 bp, Homo sapien
atgacagagaaatcccgaaaatgcattatatta

SEQ ID NO: 677367 - DNA, 33 bp, Homo sapien
agcagatgcccaatagcaaccgttaatagtaag

SEQ ID NO: 677368 - DNA, 33 bp, Homo sapien
agcagatgcccaatagtaaccgttaatagtaag

SEQ ID NO: 677369 - DNA, 33 bp, Homo sapien
gatttgggatgctcaacgaatataatgaaaata

SEQ ID NO: 677370 - DNA, 33 bp, Homo sapien
gatttgggatgctcaatgaatataatgaaaata

SEQ ID NO: 677371 - DNA, 33 bp, Homo sapien
ctaaattgtaccattcccagtgtgagcagtatt

SEQ ID NO: 677372 - DNA, 33 bp, Homo sapien
ctaaattgtaccattctcagtgtgagcagtatt

SEQ ID NO: 677373 - DNA, 33 bp, Homo sapien
tctcaatacttgaccacatgaggattctcatgc

SEQ ID NO: 677374 - DNA, 33 bp, Homo sapien
tctcaatacttgaccatatgaggattctcatgc

SEQ ID NO: 677375 - DNA, 33 bp, Homo sapien
tcctaatgaccagatcgctcagcttctcgccat

SEQ ID NO: 677376 - DNA, 33 bp, Homo sapien
tcctaatgaccagatctctcagcttctcgccat

SEQ ID NO: 677377 - DNA, 33 bp, Homo sapien
tagaataattagcataacatttttttgtcggta

SEQ ID NO: 677378 - DNA, 33 bp, Homo sapien
tagaataattagcatagcatttttttgtcggta

SEQ ID NO: 677379 - DNA, 33 bp, Homo sapien
gttattgggtctcatcaatatttgtttcagttg

SEQ ID NO: 677380 - DNA, 33 bp, Homo sapien
gttattgggtctcatccatatttgtttcagttg

SEQ ID NO: 677381 - DNA, 33 bp, Homo sapien
cagaccactctccccaatacgcacagtaatatg

SEQ ID NO: 677382 - DNA, 33 bp, Homo sapien
cagaccactctccccagtacgcacagtaatatg

SEQ ID NO: 677383 - DNA, 33 bp, Homo sapien
agagcttttggtggaacattattggagacaagt

SEQ ID NO: 677384 - DNA, 33 bp, Homo sapien
agagcttttggtggaagattattggagacaagt

SEQ ID NO: 677385 - DNA, 33 bp, Homo sapien
cctgtgggtgaaagcccagttggaaaaacaagt

SEQ ID NO: 677386 - DNA, 33 bp, Homo sapien
cctgtgggtgaaagcctagttggaaaaacaagt

SEQ ID NO: 677387 - DNA, 33 bp, Homo sapien
ctcaatattgataccacagtcatctaccacatt

SEQ ID NO: 677388 - DNA, 33 bp, Homo sapien
ctcaatattgataccatagtcatctaccacatt

SEQ ID NO: 677389 - DNA, 33 bp, Homo sapien
aggtatgaggaaaaaacaccaagtgagagtgga

SEQ ID NO: 677390 - DNA, 33 bp, Homo sapien
aggtatgaggaaaaaataccaagtgagagtgga

SEQ ID NO: 677391 - DNA, 33 bp, Homo sapien
ccgtgcctggcttaaacccaaattctaccattg

SEQ ID NO: 677392 - DNA, 33 bp, Homo sapien
ccgtgcctggcttaaatccaaattctaccattg

SEQ ID NO: 677393 - DNA, 33 bp, Homo sapien
gggtctgggtctgtgaagctgaacgtctgaaca

SEQ ID NO: 677394 - DNA, 33 bp, Homo sapien
gggtctgggtctgtgaggctgaacgtctgaaca

SEQ ID NO: 677395 - DNA, 33 bp, Homo sapien
cagttgctcagggcccaaggtgaaagacagtgt

SEQ ID NO: 677396 - DNA, 33 bp, Homo sapien
cagttgctcagggcccgaggtgaaagacagtgt

SEQ ID NO: 677397 - DNA, 33 bp, Homo sapien
tctgatacgcaatcaacactttgaaaggtctgg

SEQ ID NO: 677398 - DNA, 33 bp, Homo sapien
tctgatacgcaatcaatactttgaaaggtctgg

SEQ ID NO: 677399 - DNA, 33 bp, Homo sapien
aagagactggagaaaacaagcgtgagaagactc

SEQ ID NO: 677400 - DNA, 33 bp, Homo sapien
aagagactggagaaaataagcgtgagaagactc

SEQ ID NO: 677401 - DNA, 33 bp, Homo sapien
ggacgctgacaggcagccggagctggaaccact

SEQ ID NO: 677402 - DNA, 33 bp, Homo sapien
ggacgctgacaggcagtcggagctggaaccact

SEQ ID NO: 677403 - DNA, 33 bp, Homo sapien
acgaagacccctcaaacgtgtgaaggcaccagg

SEQ ID NO: 677404 - DNA, 33 bp, Homo sapien
acgaagacccctcaaatgtgtgaaggcaccagg

SEQ ID NO: 677405 - DNA, 33 bp, Homo sapien
gtgggcggggctagcaactgggccaaagatgcc

SEQ ID NO: 677406 - DNA, 33 bp, Homo sapien
gtgggcggggctagcacctgggccaaagatgcc

SEQ ID NO: 677407 - DNA, 33 bp, Homo sapien
cagagtgctaaaaacacgtctgtcattcctttg

SEQ ID NO: 677408 - DNA, 33 bp, Homo sapien
cagagtgctaaaaacatgtctgtcattcctttg

SEQ ID NO: 677409 - DNA, 33 bp, Homo sapien
gatgccagtggaggcgacacagcccaagaggcc

SEQ ID NO: 677410 - DNA, 33 bp, Homo sapien
gatgccagtggaggcggcacagcccaagaggcc

SEQ ID NO: 677411 - DNA, 33 bp, Homo sapien
tgagttcatagggacagtccctctagagcccaa

SEQ ID NO: 677412 - DNA, 33 bp, Homo sapien
tgagttcatagggacattccctctagagcccaa

SEQ ID NO: 677413 - DNA, 33 bp, Homo sapien
aacccaaagcaagccacgttgaggtttcctcac

SEQ ID NO: 677414 - DNA, 33 bp, Homo sapien
aacccaaagcaagccatgttgaggtttcctcac

SEQ ID NO: 677415 - DNA, 33 bp, Homo sapien
acatttctaggtgagcacaaagcttcaaagctt

SEQ ID NO: 677416 - DNA, 33 bp, Homo sapien
acatttctaggtgagcccaaagcttcaaagctt

SEQ ID NO: 677417 - DNA, 33 bp, Homo sapien
tgtaattattacatacacagttccatcatcctt

SEQ ID NO: 677418 - DNA, 33 bp, Homo sapien
tgtaattattacatacgcagttccatcatcctt

SEQ ID NO: 677419 - DNA, 33 bp, Homo sapien
gatcagcaaggaagcaaaagacttcagcagctc

SEQ ID NO: 677420 - DNA, 33 bp, Homo sapien
gatcagcaaggaagcagaagacttcagcagctc

SEQ ID NO: 677421 - DNA, 33 bp, Homo sapien
tttgtagttcttatccaaagctggagtcaactt

SEQ ID NO: 677422 - DNA, 33 bp, Homo sapien
tttgtagttcttatccgaagctggagtcaactt

SEQ ID NO: 677423 - DNA, 33 bp, Homo sapien
tgggtccactcctagacattctcatttgttatg

SEQ ID NO: 677424 - DNA, 33 bp, Homo sapien
tgggtccactcctagagattctcatttgttatg

SEQ ID NO: 677425 - DNA, 33 bp, Homo sapien
aacccaacaaatagaacatggcaaaagcggccg

SEQ ID NO: 677426 - DNA, 33 bp, Homo sapien
aacccaacaaatagaatatggcaaaagcggccg

SEQ ID NO: 677427 - DNA, 33 bp, Homo sapien
tccttgtcataacttacaggcatgtgataagcc

SEQ ID NO: 677428 - DNA, 33 bp, Homo sapien
tccttgtcataacttataggcatgtgataagcc

SEQ ID NO: 677429 - DNA, 33 bp, Homo sapien
ccaggccctgtgccgacgtccacctcaagatca

SEQ ID NO: 677430 - DNA, 33 bp, Homo sapien
ccaggccctgtgccgatgtccacctcaagatca

SEQ ID NO: 677431 - DNA, 33 bp, Homo sapien
gaagtcgtcaacagaaaggttttgctagagcag

SEQ ID NO: 677432 - DNA, 33 bp, Homo sapien
gaagtcgtcaacagaagggttttgctagagcag

SEQ ID NO: 677433 - DNA, 33 bp, Homo sapien
gctggctgctgtccaaatgagaaccatcagagc

SEQ ID NO: 677434 - DNA, 33 bp, Homo sapien
gctggctgctgtccaagtgagaaccatcagagc

SEQ ID NO: 677435 - DNA, 33 bp, Homo sapien
ctatgatggacttctacgtagccgtggaaaatc

SEQ ID NO: 677436 - DNA, 33 bp, Homo sapien
ctatgatggacttctatgtagccgtggaaaatc

SEQ ID NO: 677437 - DNA, 33 bp, Homo sapien
gtaatacactgacttaacccagctgtgtttttc

SEQ ID NO: 677438 - DNA, 33 bp, Homo sapien
gtaatacactgacttaccccagctgtgtttttc

SEQ ID NO: 677439 - DNA, 33 bp, Homo sapien
ctaaagacagataaaaagcttggagaatgcaag

SEQ ID NO: 677440 - DNA, 33 bp, Homo sapien
ctaaagacagataaaaggcttggagaatgcaag

SEQ ID NO: 677441 - DNA, 33 bp, Homo sapien
caaatgagaagaatcccgatagagcagaggaaa

SEQ ID NO: 677442 - DNA, 33 bp, Homo sapien
caaatgagaagaatcctgatagagcagaggaaa

SEQ ID NO: 677443 - DNA, 33 bp, Homo sapien
aagagctctcctttccgcgggcacacaccacag

SEQ ID NO: 677444 - DNA, 33 bp, Homo sapien
aagagctctcctttcctcgggcacacaccacag

SEQ ID NO: 677445 - DNA, 33 bp, Homo sapien
aaccatagtagccacacagaggtagctgccacc

SEQ ID NO: 677446 - DNA, 33 bp, Homo sapien
aaccatagtagccacagagaggtagctgccacc

SEQ ID NO: 677447 - DNA, 33 bp, Homo sapien
ctcttttacgtcagcacaggaagggctcaaaca

SEQ ID NO: 677448 - DNA, 33 bp, Homo sapien
ctcttttacgtcagcagaggaagggctcaaaca

SEQ ID NO: 677449 - DNA, 33 bp, Homo sapien
ataaagaggcttgtgtcaaactttagaaaaata

SEQ ID NO: 677450 - DNA, 33 bp, Homo sapien
ataaagaggcttgtgttaaactttagaaaaata

SEQ ID NO: 677451 - DNA, 33 bp, Homo sapien
catgtgcacacacttacggtgttcccatattca

SEQ ID NO: 677452 - DNA, 33 bp, Homo sapien
catgtgcacacacttatggtgttcccatattca

SEQ ID NO: 677453 - DNA, 33 bp, Homo sapien
catccctaaaccaagacaaatgtctactatcag

SEQ ID NO: 677454 - DNA, 33 bp, Homo sapien
catccctaaaccaagataaatgtctactatcag

SEQ ID NO: 677455 - DNA, 33 bp, Homo sapien
tcagccagcctaaagcagacctaatgacattta

SEQ ID NO: 677456 - DNA, 33 bp, Homo sapien
tcagccagcctaaagcggacctaatgacattta

SEQ ID NO: 677457 - DNA, 33 bp, Homo sapien
taaagtttcatctaccacagagaacatcttctt

SEQ ID NO: 677458 - DNA, 33 bp, Homo sapien
taaagtttcatctaccgcagagaacatcttctt

SEQ ID NO: 677459 - DNA, 33 bp, Homo sapien
ggctggaattccttgacgttgccactgcataga

SEQ ID NO: 677460 - DNA, 33 bp, Homo sapien
ggctggaattccttgatgttgccactgcataga

SEQ ID NO: 677461 - DNA, 33 bp, Homo sapien
agatcataaaactacaaaatcagagagccagaa

SEQ ID NO: 677462 - DNA, 33 bp, Homo sapien
agatcataaaactacagaatcagagagccagaa

SEQ ID NO: 677463 - DNA, 33 bp, Homo sapien
ctttctcagctctaggacagaatcccatgaaat

SEQ ID NO: 677464 - DNA, 33 bp, Homo sapien
ctttctcagctctagggcagaatcccatgaaat

SEQ ID NO: 677465 - DNA, 33 bp, Homo sapien
tgaaaaacaggtaacaatcgattcataagcaga

SEQ ID NO: 677466 - DNA, 33 bp, Homo sapien
tgaaaaacaggtaacattcgattcataagcaga

SEQ ID NO: 677467 - DNA, 33 bp, Homo sapien
tggtgatctagagtgaatatgaaccatccaaag

SEQ ID NO: 677468 - DNA, 33 bp, Homo sapien
tggtgatctagagtgagtatgaaccatccaaag

SEQ ID NO: 677469 - DNA, 33 bp, Homo sapien
atgctcgtgacactgacggctttgtacctcttc

SEQ ID NO: 677470 - DNA, 33 bp, Homo sapien
atgctcgtgacactgatggctttgtacctcttc

SEQ ID NO: 677471 - DNA, 33 bp, Homo sapien
ttccatattaacttcacactagaatatttgtct

SEQ ID NO: 677472 - DNA, 33 bp, Homo sapien
ttccatattaacttcatactagaatatttgtct

SEQ ID NO: 677473 - DNA, 33 bp, Homo sapien
aaaaggagggggttgacctggaaatctgtaatt

SEQ ID NO: 677474 - DNA, 33 bp, Homo sapien
aaaaggagggggttgagctggaaatctgtaatt

SEQ ID NO: 677475 - DNA, 33 bp, Homo sapien
cttgttttcaacaacaaaagaaattaatgccgc

SEQ ID NO: 677476 - DNA, 33 bp, Homo sapien
cttgttttcaacaacagaagaaattaatgccgc

SEQ ID NO: 677477 - DNA, 33 bp, Homo sapien
ttaatgccgctgcccaaacacatatgaattgct

SEQ ID NO: 677478 - DNA, 33 bp, Homo sapien
ttaatgccgctgcccacacacatatgaattgct

SEQ ID NO: 677479 - DNA, 33 bp, Homo sapien
gggccactagggagtaagtatgggcagagaatc

SEQ ID NO: 677480 - DNA, 33 bp, Homo sapien
gggccactagggagtatgtatgggcagagaatc

SEQ ID NO: 677481 - DNA, 33 bp, Homo sapien
tggcttctaatgaggaacaaagactattttttt

SEQ ID NO: 677482 - DNA, 33 bp, Homo sapien
tggcttctaatgaggagcaaagactattttttt

SEQ ID NO: 677483 - DNA, 33 bp, Homo sapien
aagttcctagatgttccactagagagaggtcct

SEQ ID NO: 677484 - DNA, 33 bp, Homo sapien
aagttcctagatgttctactagagagaggtcct

SEQ ID NO: 677485 - DNA, 33 bp, Homo sapien
gggatatgtgatccagaacaaaagctctatcca

SEQ ID NO: 677486 - DNA, 33 bp, Homo sapien
gggatatgtgatccaggacaaaagctctatcca

SEQ ID NO: 677487 - DNA, 33 bp, Homo sapien
gaggttcaaaaaattcaaaagattctcccaggt

SEQ ID NO: 677488 - DNA, 33 bp, Homo sapien
gaggttcaaaaaattccaaagattctcccaggt

SEQ ID NO: 677489 - DNA, 33 bp, Homo sapien
ttgccacatttcaagcacctaataaccatgtgt

SEQ ID NO: 677490 - DNA, 33 bp, Homo sapien
ttgccacatttcaagcgcctaataaccatgtgt

SEQ ID NO: 677491 - DNA, 33 bp, Homo sapien
acctggctctgtcagtaactagctagggaagct

SEQ ID NO: 677492 - DNA, 33 bp, Homo sapien
acctggctctgtcagttactagctagggaagct

SEQ ID NO: 677493 - DNA, 33 bp, Homo sapien
ttccttctcttgagaactggaggattcgaggac

SEQ ID NO: 677494 - DNA, 33 bp, Homo sapien
ttccttctcttgagaattggaggattcgaggac

SEQ ID NO: 677495 - DNA, 33 bp, Homo sapien
atgcaagttacaccaaccaggacagaaatcatt

SEQ ID NO: 677496 - DNA, 33 bp, Homo sapien
atgcaagttacaccaatcaggacagaaatcatt

SEQ ID NO: 677497 - DNA, 33 bp, Homo sapien
acaggaggttcagccaccaaacctgagtcaggt

SEQ ID NO: 677498 - DNA, 33 bp, Homo sapien
acaggaggttcagccatcaaacctgagtcaggt

SEQ ID NO: 677499 - DNA, 33 bp, Homo sapien
gatcattccgataaaccgctgcaccttagaggt

SEQ ID NO: 677500 - DNA, 33 bp, Homo sapien
gatcattccgataaactgctgcaccttagaggt

SEQ ID NO: 677501 - DNA, 33 bp, Homo sapien
tctggcctatgaaaaacaatacatggcctgagg

SEQ ID NO: 677502 - DNA, 33 bp, Homo sapien
tctggcctatgaaaaagaatacatggcctgagg

SEQ ID NO: 677503 - DNA, 33 bp, Homo sapien
acgccaggtaaaagacaccaggcacaaaggtca

SEQ ID NO: 677504 - DNA, 33 bp, Homo sapien
acgccaggtaaaagacgccaggcacaaaggtca

SEQ ID NO: 677505 - DNA, 33 bp, Homo sapien
tgaaaagaaagtgttccatgccttcctgttaga

SEQ ID NO: 677506 - DNA, 33 bp, Homo sapien
tgaaaagaaagtgttctatgccttcctgttaga

SEQ ID NO: 677507 - DNA, 33 bp, Homo sapien
tataatacctaagtaacacctagattgttcaaa

SEQ ID NO: 677508 - DNA, 33 bp, Homo sapien
tataatacctaagtaatacctagattgttcaaa

SEQ ID NO: 677509 - DNA, 33 bp, Homo sapien
atgaaaaggtatcctcacctccaactttgtttc

SEQ ID NO: 677510 - DNA, 33 bp, Homo sapien
atgaaaaggtatcctcgcctccaactttgtttc

SEQ ID NO: 677511 - DNA, 33 bp, Homo sapien
ggaattgcattgaatacacacattaactgggga

SEQ ID NO: 677512 - DNA, 33 bp, Homo sapien
ggaattgcattgaatatacacattaactgggga

SEQ ID NO: 677513 - DNA, 33 bp, Homo sapien
gggatgttacctaacacgcagtattgaattaga

SEQ ID NO: 677514 - DNA, 33 bp, Homo sapien
gggatgttacctaacaggcagtattgaattaga

SEQ ID NO: 677515 - DNA, 33 bp, Homo sapien
ggtagtcataggagaagagatgatatagatgat

SEQ ID NO: 677516 - DNA, 33 bp, Homo sapien
ggtagtcataggagaatagatgatatagatgat

SEQ ID NO: 677517 - DNA, 33 bp, Homo sapien
ggaggagtgagaaccacgggcccgactcgaaag

SEQ ID NO: 677518 - DNA, 33 bp, Homo sapien
ggaggagtgagaaccatgggcccgactcgaaag

SEQ ID NO: 677519 - DNA, 33 bp, Homo sapien
tcactctctatacctcactttgatcacaaagga

SEQ ID NO: 677520 - DNA, 33 bp, Homo sapien
tcactctctatacctcgctttgatcacaaagga

SEQ ID NO: 677521 - DNA, 33 bp, Homo sapien
tagcgctaggacttgaactcggtcctctgagca

SEQ ID NO: 677522 - DNA, 33 bp, Homo sapien
tagcgctaggacttgatctcggtcctctgagca

SEQ ID NO: 677523 - DNA, 33 bp, Homo sapien
cagaagtcattgagataaaccggcctccaggga

SEQ ID NO: 677524 - DNA, 33 bp, Homo sapien
cagaagtcattgagatgaaccggcctccaggga

SEQ ID NO: 677525 - DNA, 33 bp, Homo sapien
caggccccaggaacaacggtctccaggctggct

SEQ ID NO: 677526 - DNA, 33 bp, Homo sapien
caggccccaggaacaatggtctccaggctggct

SEQ ID NO: 677527 - DNA, 33 bp, Homo sapien
tgttgctggtgagggacggttgccaagtaagac

SEQ ID NO: 677528 - DNA, 33 bp, Homo sapien
tgttgctggtgagggatggttgccaagtaagac

SEQ ID NO: 677529 - DNA, 33 bp, Homo sapien
gcacaaaacagactcaaggctcaactcactggc

SEQ ID NO: 677530 - DNA, 33 bp, Homo sapien
gcacaaaacagactcagggctcaactcactggc

SEQ ID NO: 677531 - DNA, 33 bp, Homo sapien
gcaaataggcagtgtccatgaatgaggaagtgg

SEQ ID NO: 677532 - DNA, 33 bp, Homo sapien
gcaaataggcagtgtctatgaatgaggaagtgg

SEQ ID NO: 677533 - DNA, 33 bp, Homo sapien
cacggagtaccgcagacgctcttaattcatctc

SEQ ID NO: 677534 - DNA, 33 bp, Homo sapien
cacggagtaccgcagatgctcttaattcatctc

SEQ ID NO: 677535 - DNA, 33 bp, Homo sapien
tgtgtggggaggaaaagatacactgtatggaaa

SEQ ID NO: 677536 - DNA, 33 bp, Homo sapien
tgtgtggggaggaaaatatacactgtatggaaa

SEQ ID NO: 677537 - DNA, 33 bp, Homo sapien
atagtgattaagggcagctgagttccaaatcta

SEQ ID NO: 677538 - DNA, 33 bp, Homo sapien
atagtgattaagggcatctgagttccaaatcta

SEQ ID NO: 677539 - DNA, 33 bp, Homo sapien
tgtaggtcagagagaacgtcacactcaagacta

SEQ ID NO: 677540 - DNA, 33 bp, Homo sapien
tgtaggtcagagagaatgtcacactcaagacta

SEQ ID NO: 677541 - DNA, 33 bp, Homo sapien
acctcctctattgcccacattgcctaaccacct

SEQ ID NO: 677542 - DNA, 33 bp, Homo sapien
acctcctctattgcccgcattgcctaaccacct

SEQ ID NO: 677543 - DNA, 33 bp, Homo sapien
cgatatccaggagaaacctacctctatccagtc

SEQ ID NO: 677544 - DNA, 33 bp, Homo sapien
cgatatccaggagaaatctacctctatccagtc

SEQ ID NO: 677545 - DNA, 33 bp, Homo sapien
ttcaggcccactcctacaaacgctcacagcagc

SEQ ID NO: 677546 - DNA, 33 bp, Homo sapien
ttcaggcccactcctataaacgctcacagcagc

SEQ ID NO: 677547 - DNA, 33 bp, Homo sapien
ggccgagaaatgataccgcaatactggatgaaa

SEQ ID NO: 677548 - DNA, 33 bp, Homo sapien
ggccgagaaatgatacggcaatactggatgaaa

SEQ ID NO: 677549 - DNA, 33 bp, Homo sapien
tcccatcatccaagcaatatgtctaaaaaacat

SEQ ID NO: 677550 - DNA, 33 bp, Homo sapien
tcccatcatccaagcagtatgtctaaaaaacat

SEQ ID NO: 677551 - DNA, 33 bp, Homo sapien
ggatgtgacagctgagaaaacagctagagcttt

SEQ ID NO: 677552 - DNA, 33 bp, Homo sapien
ggatgtgacagctgagcaaacagctagagcttt

SEQ ID NO: 677553 - DNA, 33 bp, Homo sapien
gccctagcacttcctacgaaaaggatctgagag

SEQ ID NO: 677554 - DNA, 33 bp, Homo sapien
gccctagcacttcctatgaaaaggatctgagag

SEQ ID NO: 677555 - DNA, 33 bp, Homo sapien
cacactctctgacaagaattattcttcacaata

SEQ ID NO: 677556 - DNA, 33 bp, Homo sapien
cacactctctgacaaggattattcttcacaata

SEQ ID NO: 677557 - DNA, 33 bp, Homo sapien
ctcagtgaatcggacacggatttggtgccacct

SEQ ID NO: 677558 - DNA, 33 bp, Homo sapien
ctcagtgaatcggacatggatttggtgccacct

SEQ ID NO: 677559 - DNA, 33 bp, Homo sapien
gctccgagtccactccaacgcccgcgcgacccg

SEQ ID NO: 677560 - DNA, 33 bp, Homo sapien
gctccgagtccactccgacgcccgcgcgacccg

SEQ ID NO: 677561 - DNA, 33 bp, Homo sapien
cccatccaagtggcccaggacctagtatcgtgg

SEQ ID NO: 677562 - DNA, 33 bp, Homo sapien
cccatccaagtggcccgggacctagtatcgtgg

SEQ ID NO: 677563 - DNA, 33 bp, Homo sapien
cttgaggaaggattcacggggcctcgtctagtc

SEQ ID NO: 677564 - DNA, 33 bp, Homo sapien
cttgaggaaggattcatggggcctcgtctagtc

SEQ ID NO: 677565 - DNA, 33 bp, Homo sapien
tgggattatagacgcacatcaccacgcccagct

SEQ ID NO: 677566 - DNA, 33 bp, Homo sapien
tgggattatagacgcatatcaccacgcccagct

SEQ ID NO: 677567 - DNA, 33 bp, Homo sapien
caactgcacagaactacccatacgtgtcagcag

SEQ ID NO: 677568 - DNA, 33 bp, Homo sapien
caactgcacagaactatccatacgtgtcagcag

SEQ ID NO: 677569 - DNA, 33 bp, Homo sapien
cccttcatttcattcaatctccacatttccact

SEQ ID NO: 677570 - DNA, 33 bp, Homo sapien
cccttcatttcattcagtctccacatttccact

SEQ ID NO: 677571 - DNA, 33 bp, Homo sapien
ctaatcctcaaacccacgtcctggacccctaca

SEQ ID NO: 677572 - DNA, 33 bp, Homo sapien
ctaatcctcaaacccatgtcctggacccctaca

SEQ ID NO: 677573 - DNA, 33 bp, Homo sapien
tttctgttgtagtcaacactcatttaaatttat

SEQ ID NO: 677574 - DNA, 33 bp, Homo sapien
tttctgttgtagtcaagactcatttaaatttat

SEQ ID NO: 677575 - DNA, 33 bp, Homo sapien
cttgctaccatagctcacagaagttatggagaa

SEQ ID NO: 677576 - DNA, 33 bp, Homo sapien
cttgctaccatagctcgcagaagttatggagaa

SEQ ID NO: 677577 - DNA, 33 bp, Homo sapien
gtgctatttctttgcaccataattattcagaat

SEQ ID NO: 677578 - DNA, 33 bp, Homo sapien
gtgctatttctttgcatcataattattcagaat

SEQ ID NO: 677579 - DNA, 33 bp, Homo sapien
ctgtgcatatgccaagacttgaatatttgtgcc

SEQ ID NO: 677580 - DNA, 33 bp, Homo sapien
ctgtgcatatgccaaggcttgaatatttgtgcc

SEQ ID NO: 677581 - DNA, 33 bp, Homo sapien
aacctttcctagcagacatcagtgtggaataga

SEQ ID NO: 677582 - DNA, 33 bp, Homo sapien
aacctttcctagcagatatcagtgtggaataga

SEQ ID NO: 677583 - DNA, 33 bp, Homo sapien
gagggtcagcaggaaaagtcattgaggaccctg

SEQ ID NO: 677584 - DNA, 33 bp, Homo sapien
gagggtcagcaggaaaggtcattgaggaccctg

SEQ ID NO: 677585 - DNA, 33 bp, Homo sapien
gggtaggcatgggaaaactttccccagaattag

SEQ ID NO: 677586 - DNA, 33 bp, Homo sapien
gggtaggcatgggaaacctttccccagaattag

SEQ ID NO: 677587 - DNA, 33 bp, Homo sapien
aagtctagcagccagaagatgaggtgaaggcag

SEQ ID NO: 677588 - DNA, 33 bp, Homo sapien
aagtctagcagccagaggatgaggtgaaggcag

SEQ ID NO: 677589 - DNA, 33 bp, Homo sapien
tatgtgaagataagataaggaccagcatctctg

SEQ ID NO: 677590 - DNA, 33 bp, Homo sapien
tatgtgaagataagatgaggaccagcatctctg

SEQ ID NO: 677591 - DNA, 33 bp, Homo sapien
gcagctgggcagcacaactttcctcaaaggagg

SEQ ID NO: 677592 - DNA, 33 bp, Homo sapien
gcagctgggcagcacatctttcctcaaaggagg

SEQ ID NO: 677593 - DNA, 33 bp, Homo sapien
aaggatggaagcagaaagtgtagctcgggtggc

SEQ ID NO: 677594 - DNA, 33 bp, Homo sapien
aaggatggaagcagaaggtgtagctcgggtggc

SEQ ID NO: 677595 - DNA, 33 bp, Homo sapien
aatgtgaggttggacaagctctattatatcccc

SEQ ID NO: 677596 - DNA, 33 bp, Homo sapien
aatgtgaggttggacacgctctattatatcccc

SEQ ID NO: 677597 - DNA, 33 bp, Homo sapien
tccatcatggccaggaactcggttttaaggttt

SEQ ID NO: 677598 - DNA, 33 bp, Homo sapien
tccatcatggccaggagctcggttttaaggttt

SEQ ID NO: 677599 - DNA, 33 bp, Homo sapien
accaacaggaaacagacgaacacacgagctctg

SEQ ID NO: 677600 - DNA, 33 bp, Homo sapien
accaacaggaaacagatgaacacacgagctctg

SEQ ID NO: 677601 - DNA, 33 bp, Homo sapien
ggacagttacaatggacactaattagatgatgc

SEQ ID NO: 677602 - DNA, 33 bp, Homo sapien
ggacagttacaatggagactaattagatgatgc

SEQ ID NO: 677603 - DNA, 33 bp, Homo sapien
catatcccaaacattacctctaatcgaagcacc

SEQ ID NO: 677604 - DNA, 33 bp, Homo sapien
catatcccaaacattatctctaatcgaagcacc

SEQ ID NO: 677605 - DNA, 33 bp, Homo sapien
gcatgatccgcatatcactgagaatttgcaaat

SEQ ID NO: 677606 - DNA, 33 bp, Homo sapien
gcatgatccgcatatcgctgagaatttgcaaat

SEQ ID NO: 677607 - DNA, 33 bp, Homo sapien
ctagacgcctccatccagcagcacagcctctgc

SEQ ID NO: 677608 - DNA, 33 bp, Homo sapien
ctagacgcctccatccggcagcacagcctctgc

SEQ ID NO: 677609 - DNA, 33 bp, Homo sapien
tgagactcaagaagaccaagtaaattccccaca

SEQ ID NO: 677610 - DNA, 33 bp, Homo sapien
tgagactcaagaagacgaagtaaattccccaca

SEQ ID NO: 677611 - DNA, 33 bp, Homo sapien
tatatgtgacataaaactgaccacttttaccac

SEQ ID NO: 677612 - DNA, 33 bp, Homo sapien
tatatgtgacataaaattgaccacttttaccac

SEQ ID NO: 677613 - DNA, 33 bp, Homo sapien
acaggggctgagtcaaattcatatactttccac

SEQ ID NO: 677614 - DNA, 33 bp, Homo sapien
acaggggctgagtcaacttcatatactttccac

SEQ ID NO: 677615 - DNA, 33 bp, Homo sapien
ggtagaatcctgcagaactcaaagaacgttcct

SEQ ID NO: 677616 - DNA, 33 bp, Homo sapien
ggtagaatcctgcagagctcaaagaacgttcct

SEQ ID NO: 677617 - DNA, 33 bp, Homo sapien
gttctctttggttccacgctgtttcttcttaca

SEQ ID NO: 677618 - DNA, 33 bp, Homo sapien
gttctctttggttccatgctgtttcttcttaca

SEQ ID NO: 677619 - DNA, 33 bp, Homo sapien
gccaccataaaaaacaagcagtgataacatctt

SEQ ID NO: 677620 - DNA, 33 bp, Homo sapien
gccaccataaaaaacaggcagtgataacatctt

SEQ ID NO: 677621 - DNA, 33 bp, Homo sapien
tgacatctaattcaagacgtctagtctctgcat

SEQ ID NO: 677622 - DNA, 33 bp, Homo sapien
tgacatctaattcaaggcgtctagtctctgcat

SEQ ID NO: 677623 - DNA, 33 bp, Homo sapien
agaataagacctatcacgtggtagctttcaaac

SEQ ID NO: 677624 - DNA, 33 bp, Homo sapien
agaataagacctatcatgtggtagctttcaaac

SEQ ID NO: 677625 - DNA, 33 bp, Homo sapien
ctttgttacagctatggatcttagaagctaggt

SEQ ID NO: 677626 - DNA, 33 bp, Homo sapien
ctttgttacagctatgtatcttagaagctaggt

SEQ ID NO: 677627 - DNA, 33 bp, Homo sapien
gacaattattatccaaggagaaagatgatctct

SEQ ID NO: 677628 - DNA, 33 bp, Homo sapien
gacaattattatccaatgagaaagatgatctct

SEQ ID NO: 677629 - DNA, 33 bp, Homo sapien
ttgctagtatcattcaaatctatattcttactg

SEQ ID NO: 677630 - DNA, 33 bp, Homo sapien
ttgctagtatcattcagatctatattcttactg

SEQ ID NO: 677631 - DNA, 33 bp, Homo sapien
ttatctgtgtacgatcccagattgtcttgagct

SEQ ID NO: 677632 - DNA, 33 bp, Homo sapien
ttatctgtgtacgatctcagattgtcttgagct

SEQ ID NO: 677633 - DNA, 33 bp, Homo sapien
aaggatttccaactaaacagctttggaaaccta

SEQ ID NO: 677634 - DNA, 33 bp, Homo sapien
aaggatttccaactaagcagctttggaaaccta

SEQ ID NO: 677635 - DNA, 33 bp, Homo sapien
gtccctgtctccaacacgtacctcatgatgcag

SEQ ID NO: 677636 - DNA, 33 bp, Homo sapien
gtccctgtctccaacatgtacctcatgatgcag

SEQ ID NO: 677637 - DNA, 33 bp, Homo sapien
gtcttggcaagccatccgaggcaggcttcctga

SEQ ID NO: 677638 - DNA, 33 bp, Homo sapien
gtcttggcaagccatcggaggcaggcttcctga

SEQ ID NO: 677639 - DNA, 33 bp, Homo sapien
gggccaccaggtcaaaagatgcaaaccccgcac

SEQ ID NO: 677640 - DNA, 33 bp, Homo sapien
gggccaccaggtcaaaggatgcaaaccccgcac

SEQ ID NO: 677641 - DNA, 33 bp, Homo sapien; identical to SEQ ID NO: 677639

SEQ ID NO: 677642 - DNA, 33 bp, Homo sapien; identical to SEQ ID NO: 677640

SEQ ID NO: 677643 - DNA, 33 bp, Homo sapien
tggccacgtcaggcaaacggagtctccaaaccc

SEQ ID NO: 677644 - DNA, 33 bp, Homo sapien
tggccacgtcaggcaagcggagtctccaaaccc

SEQ ID NO: 677645 - DNA, 33 bp, Homo sapien
ggggacaatcaggaacaaggcacaggatctaag

SEQ ID NO: 677646 - DNA, 33 bp, Homo sapien
ggggacaatcaggaaccaggcacaggatctaag

SEQ ID NO: 677647 - DNA, 33 bp, Homo sapien
tgggaataagggagaactggacatggtcatatg

SEQ ID NO: 677648 - DNA, 33 bp, Homo sapien
tgggaataagggagaattggacatggtcatatg

SEQ ID NO: 677649 - DNA, 33 bp, Homo sapien
acatcatatcacagcccctttttacattactaa

SEQ ID NO: 677650 - DNA, 33 bp, Homo sapien
acatcatatcacagcctctttttacattactaa

SEQ ID NO: 677651 - DNA, 33 bp, Homo sapien
tgacacagaaagctccaatgtgtcttgttccca

SEQ ID NO: 677652 - DNA, 33 bp, Homo sapien
tgacacagaaagctccgatgtgtcttgttccca

SEQ ID NO: 677653 - DNA, 33 bp, Homo sapien
agcagtgctacagaaaaaagtaccaagtgccgt

SEQ ID NO: 677654 - DNA, 33 bp, Homo sapien
agcagtgctacagaaataagtaccaagtgccgt

SEQ ID NO: 677655 - DNA, 33 bp, Homo sapien
gaagctgtgttcttcaaaagacaacatgaagag

SEQ ID NO: 677656 - DNA, 33 bp, Homo sapien
gaagctgtgttcttcagaagacaacatgaagag

SEQ ID NO: 677657 - DNA, 33 bp, Homo sapien
atccagctgcctcctgaacaagctagaactgct

SEQ ID NO: 677658 - DNA, 33 bp, Homo sapien
atccagctgcctcctggacaagctagaactgct

SEQ ID NO: 677659 - DNA, 33 bp, Homo sapien
agatcctagccctggaaatccaagaatcaattc

SEQ ID NO: 677660 - DNA, 33 bp, Homo sapien
agatcctagccctggagatccaagaatcaattc

SEQ ID NO: 677661 - DNA, 33 bp, Homo sapien
gaagcctcttggagaaactttcaaaattacaga

SEQ ID NO: 677662 - DNA, 33 bp, Homo sapien
gaagcctcttggagaacctttcaaaattacaga

SEQ ID NO: 677663 - DNA, 33 bp, Homo sapien
agctgtgtgcagaaaaaaaatggttcagagcag

SEQ ID NO: 677664 - DNA, 33 bp, Homo sapien
agctgtgtgcagaaaacaaatggttcagagcag

SEQ ID NO: 677665 - DNA, 33 bp, Homo sapien
accttcctcacagtcccgcagtgttcctgtgca

SEQ ID NO: 677666 - DNA, 33 bp, Homo sapien
accttcctcacagtcctgcagtgttcctgtgca

SEQ ID NO: 677667 - DNA, 33 bp, Homo sapien
aaaccatcgaatctgacccgcactccttcatct

SEQ ID NO: 677668 - DNA, 33 bp, Homo sapien
aaaccatcgaatctgatccgcactccttcatct

SEQ ID NO: 677669 - DNA, 33 bp, Homo sapien
tgctgtgtatcgagcacggtgacggacagccac

SEQ ID NO: 677670 - DNA, 33 bp, Homo sapien
tgctgtgtatcgagcatggtgacggacagccac

SEQ ID NO: 677671 - DNA, 33 bp, Homo sapien
acttggacaagctcacaacataaccagtgagtg

SEQ ID NO: 677672 - DNA, 33 bp, Homo sapien
acttggacaagctcacgacataaccagtgagtg

SEQ ID NO: 677673 - DNA, 33 bp, Homo sapien
tttaacaaactcggcaataacactaagatggcc

SEQ ID NO: 677674 - DNA, 33 bp, Homo sapien
tttaacaaactcggcagtaacactaagatggcc

SEQ ID NO: 677675 - DNA, 33 bp, Homo sapien
aaatccagaaagcaaaatcgaggaagcaacagc

SEQ ID NO: 677676 - DNA, 33 bp, Homo sapien
aaatccagaaagcaaagtcgaggaagcaacagc

SEQ ID NO: 677677 - DNA, 33 bp, Homo sapien
catgttctaacaggaaagttaaagcaccctggg

SEQ ID NO: 677678 - DNA, 33 bp, Homo sapien
catgttctaacaggaaggttaaagcaccctggg

SEQ ID NO: 677679 - DNA, 33 bp, Homo sapien
tctggcgttcctctcactgactgggtattagtg

SEQ ID NO: 677680 - DNA, 33 bp, Homo sapien
tctggcgttcctctcattgactgggtattagtg

SEQ ID NO: 677681 - DNA, 33 bp, Homo sapien
gagcagccgtggaaaagtaaggactcaaccact

SEQ ID NO: 677682 - DNA, 33 bp, Homo sapien
gagcagccgtggaaaattaaggactcaaccact

SEQ ID NO: 677683 - DNA, 33 bp, Homo sapien
cacccactcaactctacccactagttattacaa

SEQ ID NO: 677684 - DNA, 33 bp, Homo sapien
cacccactcaactctatccactagttattacaa

SEQ ID NO: 677685 - DNA, 33 bp, Homo sapien
ccttgccagaactgacgagactccaacagtcct

SEQ ID NO: 677686 - DNA, 33 bp, Homo sapien
ccttgccagaactgactagactccaacagtcct

SEQ ID NO: 677687 - DNA, 33 bp, Homo sapien
attaatattccatctcaacttttcctgtgtaac

SEQ ID NO: 677688 - DNA, 33 bp, Homo sapien
attaatattccatctcgacttttcctgtgtaac

SEQ ID NO: 677689 - DNA, 33 bp, Homo sapien
tgctaggtattaaaaaattaggtctgagaggtc

SEQ ID NO: 677690 - DNA, 33 bp, Homo sapien
tgctaggtattaaaaagttaggtctgagaggtc

SEQ ID NO: 677691 - DNA, 33 bp, Homo sapien
gcagccctctctgtgacggaaacaagacacagg

SEQ ID NO: 677692 - DNA, 33 bp, Homo sapien
gcagccctctctgtgatggaaacaagacacagg

SEQ ID NO: 677693 - DNA, 33 bp, Homo sapien
gcggaggaatgagtgaagatatagcaacagcct

SEQ ID NO: 677694 - DNA, 33 bp, Homo sapien
gcggaggaatgagtgaggatatagcaacagcct

SEQ ID NO: 677695 - DNA, 33 bp, Homo sapien
tctaatccacagtgtacgtgtagtgggtgctgt

SEQ ID NO: 677696 - DNA, 33 bp, Homo sapien
tctaatccacagtgtatgtgtagtgggtgctgt

SEQ ID NO: 677697 - DNA, 33 bp, Homo sapien
tgtggattagagaaacacgtgcccccgccacat

SEQ ID NO: 677698 - DNA, 33 bp, Homo sapien
tgtggattagagaaacgcgtgcccccgccacat

SEQ ID NO: 677699 - DNA, 33 bp, Homo sapien
gtcctcttcgggattcgcagactggattgggac

SEQ ID NO: 677700 - DNA, 33 bp, Homo sapien
gtcctcttcgggattctcagactggattgggac

SEQ ID NO: 677701 - DNA, 33 bp, Homo sapien
attcttcccctcgtaaccttcctgtgttcctac

SEQ ID NO: 677702 - DNA, 33 bp, Homo sapien
attcttcccctcgtaatcttcctgtgttcctac

SEQ ID NO: 677703 - DNA, 33 bp, Homo sapien
aaattaaaatgtttgacgttatgcccaatcgtg

SEQ ID NO: 677704 - DNA, 33 bp, Homo sapien
aaattaaaatgtttgatgttatgcccaatcgtg

SEQ ID NO: 677705 - DNA, 33 bp, Homo sapien
accagattgctcaaaacacagatcacaaaatgg

SEQ ID NO: 677706 - DNA, 33 bp, Homo sapien
accagattgctcaaaatacagatcacaaaatgg

SEQ ID NO: 677707 - DNA, 33 bp, Homo sapien
gttttattgtccaagacgtctgttccaactatc

SEQ ID NO: 677708 - DNA, 33 bp, Homo sapien
gttttattgtccaagatgtctgttccaactatc

SEQ ID NO: 677709 - DNA, 33 bp, Homo sapien
gttccagtttgtctccacgtgcaagttgtgcac

SEQ ID NO: 677710 - DNA, 33 bp, Homo sapien
gttccagtttgtctccgcgtgcaagttgtgcac

SEQ ID NO: 677711 - DNA, 33 bp, Homo sapien
ggggtatcactatatcactaaatccagtgactc

SEQ ID NO: 677712 - DNA, 33 bp, Homo sapien
ggggtatcactatatcgctaaatccagtgactc

SEQ ID NO: 677713 - DNA, 33 bp, Homo sapien
gcactgccagtagtataaaagctaagcacatac

SEQ ID NO: 677714 - DNA, 33 bp, Homo sapien
gcactgccagtagtatcaaagctaagcacatac

SEQ ID NO: 677715 - DNA, 33 bp, Homo sapien
cagcagatgcagggtacataaaacaggcgtgct

SEQ ID NO: 677716 - DNA, 33 bp, Homo sapien
cagcagatgcagggtatataaaacaggcgtgct

SEQ ID NO: 677717 - DNA, 33 bp, Homo sapien
acagactctatttaacaaactctgtagagcttc

SEQ ID NO: 677718 - DNA, 33 bp, Homo sapien
acagactctatttaaccaactctgtagagcttc

SEQ ID NO: 677719 - DNA, 33 bp, Homo sapien
aaactcatctttaccaagtttttctaaatcatc

SEQ ID NO: 677720 - DNA, 33 bp, Homo sapien
aaactcatctttaccaggtttttctaaatcatc

SEQ ID NO: 677721 - DNA, 33 bp, Homo sapien
caagactgatcttcctaaaatgtcactttaatc

SEQ ID NO: 677722 - DNA, 33 bp, Homo sapien
caagactgatcttcctgaaatgtcactttaatc

SEQ ID NO: 677723 - DNA, 33 bp, Homo sapien
gtctttccctttaagtcaccttctgatcccatc

SEQ ID NO: 677724 - DNA, 33 bp, Homo sapien
gtctttccctttaagttaccttctgatcccatc

SEQ ID NO: 677725 - DNA, 33 bp, Homo sapien
aaaagaaaagccagtacggtgagaagcaaacaa

SEQ ID NO: 677726 - DNA, 33 bp, Homo sapien
aaaagaaaagccagtatggtgagaagcaaacaa

SEQ ID NO: 677727 - DNA, 33 bp, Homo sapien
tgtctacaactcattcgccactattctgccatc

SEQ ID NO: 677728 - DNA, 33 bp, Homo sapien
tgtctacaactcattctccactattctgccatc

SEQ ID NO: 677729 - DNA, 33 bp, Homo sapien
aaagcaggcctctgccaaaggcatccagtcaac

SEQ ID NO: 677730 - DNA, 33 bp, Homo sapien
aaagcaggcctctgccgaaggcatccagtcaac

SEQ ID NO: 677731 - DNA, 33 bp, Homo sapien
aagttaagcttcggaactgagtcatgtaaaaaa

SEQ ID NO: 677732 - DNA, 33 bp, Homo sapien
aagttaagcttcggaattgagtcatgtaaaaaa

SEQ ID NO: 677733 - DNA, 33 bp, Homo sapien
gagcaatataagctaccctaagatagatgtaga

SEQ ID NO: 677734 - DNA, 33 bp, Homo sapien
gagcaatataagctactctaagatagatgtaga

SEQ ID NO: 677735 - DNA, 33 bp, Homo sapien
gtaggcagagggctgaatatatagaaaggcctg

SEQ ID NO: 677736 - DNA, 33 bp, Homo sapien
gtaggcagagggctgagtatatagaaaggcctg

SEQ ID NO: 677737 - DNA, 33 bp, Homo sapien
tccatgtttggaaagcagagccatttatctttt

SEQ ID NO: 677738 - DNA, 33 bp, Homo sapien
tccatgtttggaaagcggagccatttatctttt

SEQ ID NO: 677739 - DNA, 33 bp, Homo sapien
tatagttaaaggttaacggcaaatactcatctc

SEQ ID NO: 677740 - DNA, 33 bp, Homo sapien
tatagttaaaggttaatggcaaatactcatctc

SEQ ID NO: 677741 - DNA, 33 bp, Homo sapien
aataagagatttcaacaaaactgctagttctgt

SEQ ID NO: 677742 - DNA, 33 bp, Homo sapien
aataagagatttcaacgaaactgctagttctgt

SEQ ID NO: 677743 - DNA, 33 bp, Homo sapien
tcatttaatgatcttacggtaatctatcaaatg

SEQ ID NO: 677744 - DNA, 33 bp, Homo sapien
tcatttaatgatcttatggtaatctatcaaatg

SEQ ID NO: 677745 - DNA, 33 bp, Homo sapien
aacagaaaatatgccacgatttattgttttcat

SEQ ID NO: 677746 - DNA, 33 bp, Homo sapien
aacagaaaatatgccatgatttattgttttcat

SEQ ID NO: 677747 - DNA, 33 bp, Homo sapien
gaatgttcttaattgaggcataataattataca

SEQ ID NO: 677748 - DNA, 33 bp, Homo sapien
gaatgttcttaattgatgcataataattataca

SEQ ID NO: 677749 - DNA, 33 bp, Homo sapien
caaagtcatcatgagccattacatcacacttct

SEQ ID NO: 677750 - DNA, 33 bp, Homo sapien
caaagtcatcatgagctattacatcacacttct

SEQ ID NO: 677751 - DNA, 33 bp, Homo sapien
ccccctgaaatcttccagaaatgaagacagttg

SEQ ID NO: 677752 - DNA, 33 bp, Homo sapien
ccccctgaaatcttccggaaatgaagacagttg

SEQ ID NO: 677753 - DNA, 33 bp, Homo sapien
tcatcctagtgaattacggaacctcagaggggg

SEQ ID NO: 677754 - DNA, 33 bp, Homo sapien
tcatcctagtgaattatggaacctcagaggggg

SEQ ID NO: 677755 - DNA, 33 bp, Homo sapien
ctatggaacaacttcaagtggccaaatatacat

SEQ ID NO: 677756 - DNA, 33 bp, Homo sapien
ctatggaacaacttcaggtggccaaatatacat

SEQ ID NO: 677757 - DNA, 33 bp, Homo sapien
aacaatattctcaacacggcaatgatttttaat

SEQ ID NO: 677758 - DNA, 33 bp, Homo sapien
aacaatattctcaacatggcaatgatttttaat

SEQ ID NO: 677759 - DNA, 33 bp, Homo sapien
gcccaaagagttaaaaacaatctacgactaaca

SEQ ID NO: 677760 - DNA, 33 bp, Homo sapien
gcccaaagagttaaaagcaatctacgactaaca

SEQ ID NO: 677761 - DNA, 33 bp, Homo sapien
cttgtagtactcagcaataaaggaaatcctgtg

SEQ ID NO: 677762 - DNA, 33 bp, Homo sapien
cttgtagtactcagcattaaaggaaatcctgtg

SEQ ID NO: 677763 - DNA, 33 bp, Homo sapien
tcctgaaaacaatccacgctaccagctattagt

SEQ ID NO: 677764 - DNA, 33 bp, Homo sapien
tcctgaaaacaatccatgctaccagctattagt

SEQ ID NO: 677765 - DNA, 33 bp, Homo sapien
agaaggttgatcccagaagggctttgcttagga

SEQ ID NO: 677766 - DNA, 33 bp, Homo sapien
agaaggttgatcccaggagggctttgcttagga

SEQ ID NO: 677767 - DNA, 33 bp, Homo sapien
caactgagagggttacagaagaaggaagtggca

SEQ ID NO: 677768 - DNA, 33 bp, Homo sapien
caactgagagggttacggaagaaggaagtggca

SEQ ID NO: 677769 - DNA, 33 bp, Homo sapien
aagaaggaagtggcacaaagtggactcttggcc

SEQ ID NO: 677770 - DNA, 33 bp, Homo sapien
aagaaggaagtggcacgaagtggactcttggcc

SEQ ID NO: 677771 - DNA, 33 bp, Homo sapien
gacgctctgggcacagaagcccaatttggaacc

SEQ ID NO: 677772 - DNA, 33 bp, Homo sapien
gacgctctgggcacaggagcccaatttggaacc

SEQ ID NO: 677773 - DNA, 33 bp, Homo sapien
tgcagaacttaaacacagagcatttattgttag

SEQ ID NO: 677774 - DNA, 33 bp, Homo sapien
tgcagaacttaaacacggagcatttattgttag

SEQ ID NO: 677775 - DNA, 33 bp, Homo sapien
gcaaaggtcccagcaacgtgtgggaaaatgctt

SEQ ID NO: 677776 - DNA, 33 bp, Homo sapien
gcaaaggtcccagcaatgtgtgggaaaatgctt

SEQ ID NO: 677777 - DNA, 33 bp, Homo sapien
taaaggacagcaacacacactctgtctcaccaa

SEQ ID NO: 677778 - DNA, 33 bp, Homo sapien
taaaggacagcaacacgcactctgtctcaccaa

SEQ ID NO: 677779 - DNA, 33 bp, Homo sapien
gctggatctgtgcctgaaagtgggttgaggccg

SEQ ID NO: 677780 - DNA, 33 bp, Homo sapien
gctggatctgtgcctggaagtgggttgaggccg

SEQ ID NO: 677781 - DNA, 33 bp, Homo sapien
ggggaaaggctgtggccaaaaaacactgccaga

SEQ ID NO: 677782 - DNA, 33 bp, Homo sapien
ggggaaaggctgtggctaaaaaacactgccaga

SEQ ID NO: 677783 - DNA, 33 bp, Homo sapien
tgcaagttcagtaaaaattctcatgacattatt

SEQ ID NO: 677784 - DNA, 33 bp, Homo sapien
tgcaagttcagtaaaagttctcatgacattatt

SEQ ID NO: 677785 - DNA, 33 bp, Homo sapien
taaataataaagcttaagttggtctttcagtta

SEQ ID NO: 677786 - DNA, 33 bp, Homo sapien
taaataataaagcttatgttggtctttcagtta

SEQ ID NO: 677787 - DNA, 33 bp, Homo sapien
atgatgttcaatctaactgttttgatgagatat

SEQ ID NO: 677788 - DNA, 33 bp, Homo sapien
atgatgttcaatctaagtgttttgatgagatat

SEQ ID NO: 677789 - DNA, 33 bp, Homo sapien
ttctatgtgtatacgagtccctattttttaaga

SEQ ID NO: 677790 - DNA, 33 bp, Homo sapien
ttctatgtgtatacgattccctattttttaaga

SEQ ID NO: 677791 - DNA, 33 bp, Homo sapien
gaatacatctctgacacaaaatctatgcacccc

SEQ ID NO: 677792 - DNA, 33 bp, Homo sapien
gaatacatctctgacataaaatctatgcacccc

SEQ ID NO: 677793 - DNA, 33 bp, Homo sapien
tccataggacagttcacacgtggcagcttgctt

SEQ ID NO: 677794 - DNA, 33 bp, Homo sapien
tccataggacagttcagacgtggcagcttgctt

SEQ ID NO: 677795 - DNA, 33 bp, Homo sapien
attgtggtgctctctccgactcttcttaaagac

SEQ ID NO: 677796 - DNA, 33 bp, Homo sapien
attgtggtgctctctctgactcttcttaaagac

SEQ ID NO: 677797 - DNA, 33 bp, Homo sapien
cagctccatgcaagggaagaagattatatgacg

SEQ ID NO: 677798 - DNA, 33 bp, Homo sapien
cagctccatgcaaggggagaagattatatgacg

SEQ ID NO: 677799 - DNA, 33 bp, Homo sapien
aaatgcaggtcatatccagagctgaattagaaa

SEQ ID NO: 677800 - DNA, 33 bp, Homo sapien
aaatgcaggtcatatcgagagctgaattagaaa

SEQ ID NO: 677801 - DNA, 33 bp, Homo sapien
attcttcttgctattaaccagctgaattgccct

SEQ ID NO: 677802 - DNA, 33 bp, Homo sapien
attcttcttgctattatccagctgaattgccct

SEQ ID NO: 677803 - DNA, 33 bp, Homo sapien
atgattattgattcacactattgtatatttttg

SEQ ID NO: 677804 - DNA, 33 bp, Homo sapien
atgattattgattcacgctattgtatatttttg

SEQ ID NO: 677805 - DNA, 33 bp, Homo sapien
gagttattctgcaaaagtaccctcaagatacgt

SEQ ID NO: 677806 - DNA, 33 bp, Homo sapien
gagttattctgcaaaattaccctcaagatacgt

SEQ ID NO: 677807 - DNA, 33 bp, Homo sapien
aacattcatcagctaacgtaaaggagtaaagag

SEQ ID NO: 677808 - DNA, 33 bp, Homo sapien
aacattcatcagctaatgtaaaggagtaaagag

SEQ ID NO: 677809 - DNA, 33 bp, Homo sapien
tccagattagtagaacaaaaaaacagtgaggca

SEQ ID NO: 677810 - DNA, 33 bp, Homo sapien
tccagattagtagaacgaaaaaacagtgaggca

SEQ ID NO: 677811 - DNA, 33 bp, Homo sapien
agcccagtcaatacacccaatgcaatatcgtaa

SEQ ID NO: 677812 - DNA, 33 bp, Homo sapien
agcccagtcaatacactcaatgcaatatcgtaa

SEQ ID NO: 677813 - DNA, 33 bp, Homo sapien
tgaataatgtcctaaactggtggttctcaactc

SEQ ID NO: 677814 - DNA, 33 bp, Homo sapien
tgaataatgtcctaaattggtggttctcaactc

SEQ ID NO: 677815 - DNA, 33 bp, Homo sapien
aaggtgggatcttttaaaatggctagtctaaga

SEQ ID NO: 677816 - DNA, 33 bp, Homo sapien
aaggtgggatcttttagaatggctagtctaaga

SEQ ID NO: 677817 - DNA, 33 bp, Homo sapien
gatagaaaaccacggactattttgaatacaaga

SEQ ID NO: 677818 - DNA, 33 bp, Homo sapien
gatagaaaaccacggagtattttgaatacaaga

SEQ ID NO: 677819 - DNA, 33 bp, Homo sapien
atgactgcatcagccaccttttgaatacattga

SEQ ID NO: 677820 - DNA, 33 bp, Homo sapien
atgactgcatcagccagcttttgaatacattga

SEQ ID NO: 677821 - DNA, 33 bp, Homo sapien
tttgagaggcctatcgaaaattgtgattatatg

SEQ ID NO: 677822 - DNA, 33 bp, Homo sapien
tttgagaggcctatcggaaattgtgattatatg

SEQ ID NO: 677823 - DNA, 33 bp, Homo sapien
taacctctgtcttggaaaaagaagcctccaaaa

SEQ ID NO: 677824 - DNA, 33 bp, Homo sapien
taacctctgtcttggagaaagaagcctccaaaa

SEQ ID NO: 677825 - DNA, 33 bp, Homo sapien
tttattcaaagtctccacaaccagagggaacag

SEQ ID NO: 677826 - DNA, 33 bp, Homo sapien
tttattcaaagtctccgcaaccagagggaacag

SEQ ID NO: 677827 - DNA, 33 bp, Homo sapien
gctaaagagagactcaacatgcggttcacggaa

SEQ ID NO: 677828 - DNA, 33 bp, Homo sapien
gctaaagagagactcaccatgcggttcacggaa

SEQ ID NO: 677829 - DNA, 33 bp, Homo sapien
tttcttacccttgttccctgtatatcaatggtt

SEQ ID NO: 677830 - DNA, 33 bp, Homo sapien
tttcttacccttgttctctgtatatcaatggtt

SEQ ID NO: 677831 - DNA, 33 bp, Homo sapien
aattataaatttggtaagagaataaatggcaaa

SEQ ID NO: 677832 - DNA, 33 bp, Homo sapien
aattataaatttggtaggagaataaatggcaaa

SEQ ID NO: 677833 - DNA, 33 bp, Homo sapien
attgtggccatggttacacaactgtaaacaact

SEQ ID NO: 677834 - DNA, 33 bp, Homo sapien
attgtggccatggttatacaactgtaaacaact

SEQ ID NO: 677835 - DNA, 33 bp, Homo sapien
gatactgttaatcaagcctattcacagcaactt

SEQ ID NO: 677836 - DNA, 33 bp, Homo sapien
gatactgttaatcaagtctattcacagcaactt

SEQ ID NO: 677837 - DNA, 33 bp, Homo sapien
gagatgggtgactatcagaagaaaaatgaattc

SEQ ID NO: 677838 - DNA, 33 bp, Homo sapien
gagatgggtgactatcggaagaaaaatgaattc

SEQ ID NO: 677839 - DNA, 33 bp, Homo sapien
acttgagtgagaatgaataacactgtggagaaa

SEQ ID NO: 677840 - DNA, 33 bp, Homo sapien
acttgagtgagaatgagtaacactgtggagaaa

SEQ ID NO: 677841 - DNA, 33 bp, Homo sapien
gctttattgagaagtagctacagtttttatcca

SEQ ID NO: 677842 - DNA, 33 bp, Homo sapien
gctttattgagaagtatctacagtttttatcca

SEQ ID NO: 677843 - DNA, 33 bp, Homo sapien
gtgctttcactttgaccgcttaaaattgacacc

SEQ ID NO: 677844 - DNA, 33 bp, Homo sapien
gtgctttcactttgactgcttaaaattgacacc

SEQ ID NO: 677845 - DNA, 33 bp, Homo sapien
cttttcctttggtagactcattcagtcttggtt

SEQ ID NO: 677846 - DNA, 33 bp, Homo sapien
cttttcctttggtagattcattcagtcttggtt

SEQ ID NO: 677847 - DNA, 33 bp, Homo sapien
aatgctactctgcatacggggtaccctgctctg

SEQ ID NO: 677848 - DNA, 33 bp, Homo sapien
aatgctactctgcatatggggtaccctgctctg

SEQ ID NO: 677849 - DNA, 33 bp, Homo sapien
agggtatcagatgataactattggtcatatatt

SEQ ID NO: 677850 - DNA, 33 bp, Homo sapien
agggtatcagatgatagctattggtcatatatt

SEQ ID NO: 677851 - DNA, 33 bp, Homo sapien
cgccagtgatcggaaacccatgacccccagcca

SEQ ID NO: 677852 - DNA, 33 bp, Homo sapien
cgccagtgatcggaaatccatgacccccagcca

SEQ ID NO: 677853 - DNA, 33 bp, Homo sapien
aaagtagaggatatgtaaaggagtagagttttt

SEQ ID NO: 677854 - DNA, 33 bp, Homo sapien
aaagtagaggatatgtgaaggagtagagttttt

SEQ ID NO: 677855 - DNA, 33 bp, Homo sapien
ttttttaaaaatgtgcaaatcccagcaaaaaat

SEQ ID NO: 677856 - DNA, 33 bp, Homo sapien
ttttttaaaaatgtgccaatcccagcaaaaaat

SEQ ID NO: 677857 - DNA, 33 bp, Homo sapien
aactgaacctacaataacttccaccactgctca

SEQ ID NO: 677858 - DNA, 33 bp, Homo sapien
aactgaacctacaatagcttccaccactgctca

SEQ ID NO: 677859 - DNA, 33 bp, Homo sapien
aaaattggaactgatacccgagcttctatcttc

SEQ ID NO: 677860 - DNA, 33 bp, Homo sapien
aaaattggaactgatatccgagcttctatcttc

SEQ ID NO: 677861 - DNA, 33 bp, Homo sapien
agaaaatcttgcactccacttctgagaaacatt

SEQ ID NO: 677862 - DNA, 33 bp, Homo sapien
agaaaatcttgcactctacttctgagaaacatt

SEQ ID NO: 677863 - DNA, 33 bp, Homo sapien
ataataaatgagactcaatagcaaaatagtggt

SEQ ID NO: 677864 - DNA, 33 bp, Homo sapien
ataataaatgagactcgatagcaaaatagtggt

SEQ ID NO: 677865 - DNA, 33 bp, Homo sapien
aaaatggaatgtaatgccagaataaatataaaa

SEQ ID NO: 677866 - DNA, 33 bp, Homo sapien
aaaatggaatgtaatgtcagaataaatataaaa

SEQ ID NO: 677867 - DNA, 33 bp, Homo sapien
cagagactgtatgagaaaataaatgttagttgc

SEQ ID NO: 677868 - DNA, 33 bp, Homo sapien
cagagactgtatgagataataaatgttagttgc

SEQ ID NO: 677869 - DNA, 33 bp, Homo sapien
gcccaacacagagtaccgccttaatcgtatttt

SEQ ID NO: 677870 - DNA, 33 bp, Homo sapien
gcccaacacagagtactgccttaatcgtatttt

SEQ ID NO: 677871 - DNA, 33 bp, Homo sapien
tttattcatatgttaaaaaaaggaagacagagt

SEQ ID NO: 677872 - DNA, 33 bp, Homo sapien
tttattcatatgttaagaaaaggaagacagagt

SEQ ID NO: 677873 - DNA, 33 bp, Homo sapien
tcaggacagatagacaactttgattcattagaa

SEQ ID NO: 677874 - DNA, 33 bp, Homo sapien
tcaggacagatagacagctttgattcattagaa

SEQ ID NO: 677875 - DNA, 33 bp, Homo sapien
ctcttcctagaccagacgatagccgatacttac

SEQ ID NO: 677876 - DNA, 33 bp, Homo sapien
ctcttcctagaccagatgatagccgatacttac

SEQ ID NO: 677877 - DNA, 33 bp, Homo sapien
tttttcttccatatccacttttgatacatcatg

SEQ ID NO: 677878 - DNA, 33 bp, Homo sapien
tttttcttccatatcctcttttgatacatcatg

SEQ ID NO: 677879 - DNA, 33 bp, Homo sapien
ggtccagagtaggcccagccaataggcttcagg

SEQ ID NO: 677880 - DNA, 33 bp, Homo sapien
ggtccagagtaggcccggccaataggcttcagg

SEQ ID NO: 677881 - DNA, 33 bp, Homo sapien
aattctttacattgacaaatagttatggacttg

SEQ ID NO: 677882 - DNA, 33 bp, Homo sapien
aattctttacattgacgaatagttatggacttg

SEQ ID NO: 677883 - DNA, 33 bp, Homo sapien
cccagccttctagccagcagaatcatgaatcaa

SEQ ID NO: 677884 - DNA, 33 bp, Homo sapien
cccagccttctagccatcagaatcatgaatcaa

SEQ ID NO: 677885 - DNA, 33 bp, Homo sapien
agaactcactgatccgaaaggaagagcattagt

SEQ ID NO: 677886 - DNA, 33 bp, Homo sapien
agaactcactgatccgcaaggaagagcattagt

SEQ ID NO: 677887 - DNA, 33 bp, Homo sapien
agaatgggattgtgtacagaaatttggaaggct

SEQ ID NO: 677888 - DNA, 33 bp, Homo sapien
agaatgggattgtgtagagaaatttggaaggct

SEQ ID NO: 677889 - DNA, 33 bp, Homo sapien
tatagaatgaaagacgcatatgttggattatgg

SEQ ID NO: 677890 - DNA, 33 bp, Homo sapien
tatagaatgaaagacgtatatgttggattatgg

SEQ ID NO: 677891 - DNA, 33 bp, Homo sapien
tcagagttacaccagtaaagaacgagtgaagga

SEQ ID NO: 677892 - DNA, 33 bp, Homo sapien
tcagagttacaccagtgaagaacgagtgaagga

SEQ ID NO: 677893 - DNA, 33 bp, Homo sapien
tagggcatccattcaacctcagaagacgaaaat

SEQ ID NO: 677894 - DNA, 33 bp, Homo sapien
tagggcatccattcaatctcagaagacgaaaat

SEQ ID NO: 677895 - DNA, 33 bp, Homo sapien
ctcacagactacttacagaactaataattacac

SEQ ID NO: 677896 - DNA, 33 bp, Homo sapien
ctcacagactacttacggaactaataattacac

SEQ ID NO: 677897 - DNA, 33 bp, Homo sapien
cccaatatatacacacaagtttctgctttgaga

SEQ ID NO: 677898 - DNA, 33 bp, Homo sapien
cccaatatatacacaccagtttctgctttgaga

SEQ ID NO: 677899 - DNA, 33 bp, Homo sapien
caatgtcaaacattcacctttcttaacctaatg

SEQ ID NO: 677900 - DNA, 33 bp, Homo sapien
caatgtcaaacattcagctttcttaacctaatg

SEQ ID NO: 677901 - DNA, 33 bp, Homo sapien
cacagactcttgaaaacaatcactttgtgaaat

SEQ ID NO: 677902 - DNA, 33 bp, Homo sapien
cacagactcttgaaaataatcactttgtgaaat

SEQ ID NO: 677903 - DNA, 33 bp, Homo sapien
cagaaattctaggttcaagtcctagccccatga

SEQ ID NO: 677904 - DNA, 33 bp, Homo sapien
cagaaattctaggttcgagtcctagccccatga

SEQ ID NO: 677905 - DNA, 33 bp, Homo sapien
actccaaattcccgtacagcttcttatatttct

SEQ ID NO: 677906 - DNA, 33 bp, Homo sapien
actccaaattcccgtatagcttcttatatttct

SEQ ID NO: 677907 - DNA, 33 bp, Homo sapien
ttacggaaatgacctacaaaagtctggtgacca

SEQ ID NO: 677908 - DNA, 33 bp, Homo sapien
ttacggaaatgacctagaaaagtctggtgacca

SEQ ID NO: 677909 - DNA, 33 bp, Homo sapien
ttgtggttaggtctccaaatgaacctccttacc

SEQ ID NO: 677910 - DNA, 33 bp, Homo sapien
ttgtggttaggtctccgaatgaacctccttacc

SEQ ID NO: 677911 - DNA, 33 bp, Homo sapien
ggtgctttaaatgataggacaaggatgctttct

SEQ ID NO: 677912 - DNA, 33 bp, Homo sapien
ggtgctttaaatgatatgacaaggatgctttct

SEQ ID NO: 677913 - DNA, 33 bp, Homo sapien
agacttttctcccagaaaccttcattactattg

SEQ ID NO: 677914 - DNA, 33 bp, Homo sapien
agacttttctcccagacaccttcattactattg

SEQ ID NO: 677915 - DNA, 33 bp, Homo sapien
aatcagcttgccaaatcatccaaagctttcttt

SEQ ID NO: 677916 - DNA, 33 bp, Homo sapien
aatcagcttgccaaattatccaaagctttcttt

SEQ ID NO: 677917 - DNA, 33 bp, Homo sapien
caaattgaaggtaaggcatatcactggagaggt

SEQ ID NO: 677918 - DNA, 33 bp, Homo sapien
caaattgaaggtaaggtatatcactggagaggt

SEQ ID NO: 677919 - DNA, 33 bp, Homo sapien
atccagtgaaactaacaactctgatttgttgag

SEQ ID NO: 677920 - DNA, 33 bp, Homo sapien
atccagtgaaactaacgactctgatttgttgag

SEQ ID NO: 677921 - DNA, 33 bp, Homo sapien
actgctgaaatagaacaatcagaaacactatcg

SEQ ID NO: 677922 - DNA, 33 bp, Homo sapien
actgctgaaatagaaccatcagaaacactatcg

SEQ ID NO: 677923 - DNA, 33 bp, Homo sapien
tgcaacatggatcaaaggggctagcatatatga

SEQ ID NO: 677924 - DNA, 33 bp, Homo sapien
tgcaacatggatcaaatgggctagcatatatga

SEQ ID NO: 677925 - DNA, 33 bp, Homo sapien
actataaacctaatacacttcagtccccaggca

SEQ ID NO: 677926 - DNA, 33 bp, Homo sapien
actataaacctaatacgcttcagtccccaggca

SEQ ID NO: 677927 - DNA, 33 bp, Homo sapien
tacaaacttttcctcaacaagacatagagttag

SEQ ID NO: 677928 - DNA, 33 bp, Homo sapien
tacaaacttttcctcaccaagacatagagttag

SEQ ID NO: 677929 - DNA, 33 bp, Homo sapien
tgatcagcctgagctcacaaaaagcaggagaat

SEQ ID NO: 677930 - DNA, 33 bp, Homo sapien
tgatcagcctgagctcgcaaaaagcaggagaat

SEQ ID NO: 677931 - DNA, 33 bp, Homo sapien
caggacaagttttaataatcaggcgagtttgaa

SEQ ID NO: 677932 - DNA, 33 bp, Homo sapien
caggacaagttttaatcatcaggcgagtttgaa

SEQ ID NO: 677933 - DNA, 33 bp, Homo sapien
ctgtcttactttctcacaagtttccccaattac

SEQ ID NO: 677934 - DNA, 33 bp, Homo sapien
ctgtcttactttctcagaagtttccccaattac

SEQ ID NO: 677935 - DNA, 33 bp, Homo sapien
gttgttgtgttgcaccacagggctatcaagtgt

SEQ ID NO: 677936 - DNA, 33 bp, Homo sapien
gttgttgtgttgcaccgcagggctatcaagtgt

SEQ ID NO: 677937 - DNA, 33 bp, Homo sapien
ttgtgagtcttgacaaattaaaccttaggtctt

SEQ ID NO: 677938 - DNA, 33 bp, Homo sapien
ttgtgagtcttgacaagttaaaccttaggtctt

SEQ ID NO: 677939 - DNA, 33 bp, Homo sapien
gaagccaggtatggaaaggagtctgagaaattt

SEQ ID NO: 677940 - DNA, 33 bp, Homo sapien
gaagccaggtatggaagggagtctgagaaattt

SEQ ID NO: 677941 - DNA, 33 bp, Homo sapien
attactgatacagagaagatggtcggaatcaga

SEQ ID NO: 677942 - DNA, 33 bp, Homo sapien
attactgatacagagacgatggtcggaatcaga

SEQ ID NO: 677943 - DNA, 33 bp, Homo sapien
tttaggtgaattcttacagtagctatttttttg

SEQ ID NO: 677944 - DNA, 33 bp, Homo sapien
tttaggtgaattcttatagtagctatttttttg

SEQ ID NO: 677945 - DNA, 33 bp, Homo sapien
agaactgctctgaagaagcccctcaaaataata

SEQ ID NO: 677946 - DNA, 33 bp, Homo sapien
agaactgctctgaagatgcccctcaaaataata

SEQ ID NO: 677947 - DNA, 33 bp, Homo sapien
gtgtctgggctgcaaaaatgaagaggagaccac

SEQ ID NO: 677948 - DNA, 33 bp, Homo sapien
gtgtctgggctgcaaacatgaagaggagaccac

SEQ ID NO: 677949 - DNA, 33 bp, Homo sapien
cagctttcagtaatgacggtggttgccaagaat

SEQ ID NO: 677950 - DNA, 33 bp, Homo sapien
cagctttcagtaatgatggtggttgccaagaat

SEQ ID NO: 677951 - DNA, 33 bp, Homo sapien
attcaaagctttcagaacagcaggatgtcttgg

SEQ ID NO: 677952 - DNA, 33 bp, Homo sapien
attcaaagctttcagaccagcaggatgtcttgg

SEQ ID NO: 677953 - DNA, 33 bp, Homo sapien
tttcacagttccaatacgttaaagatgaaacca

SEQ ID NO: 677954 - DNA, 33 bp, Homo sapien
tttcacagttccaatatgttaaagatgaaacca

SEQ ID NO: 677955 - DNA, 33 bp, Homo sapien
acttgtggctaatagaccatatgcctgaaaact

SEQ ID NO: 677956 - DNA, 33 bp, Homo sapien
acttgtggctaatagatcatatgcctgaaaact

SEQ ID NO: 677957 - DNA, 33 bp, Homo sapien
gaagattccggttaacaaaaccaaattgtgttt

SEQ ID NO: 677958 - DNA, 33 bp, Homo sapien
gaagattccggttaacgaaaccaaattgtgttt

SEQ ID NO: 677959 - DNA, 33 bp, Homo sapien
atgtttatgattccatcaaatccagtcggccac

SEQ ID NO: 677960 - DNA, 33 bp, Homo sapien
atgtttatgattccattaaatccagtcggccac

SEQ ID NO: 677961 - DNA, 33 bp, Homo sapien
gttgtaagctttctagaactgcaactagacaag

SEQ ID NO: 677962 - DNA, 33 bp, Homo sapien
gttgtaagctttctaggactgcaactagacaag

SEQ ID NO: 677963 - DNA, 33 bp, Homo sapien
agggttctgtgagtgacagtgttctagtgttct

SEQ ID NO: 677964 - DNA, 33 bp, Homo sapien
agggttctgtgagtgatagtgttctagtgttct

SEQ ID NO: 677965 - DNA, 33 bp, Homo sapien
aaatacaaattaatgcgaaacatcacaaaaagc

SEQ ID NO: 677966 - DNA, 33 bp, Homo sapien
aaatacaaattaatgctaaacatcacaaaaagc

SEQ ID NO: 677967 - DNA, 33 bp, Homo sapien
ttctcataaaaccaaccactgtgagtgtcagaa

SEQ ID NO: 677968 - DNA, 33 bp, Homo sapien
ttctcataaaaccaactactgtgagtgtcagaa

SEQ ID NO: 677969 - DNA, 33 bp, Homo sapien
aaacatggtgttaggcgccaacgaaaggataca

SEQ ID NO: 677970 - DNA, 33 bp, Homo sapien
aaacatggtgttaggctccaacgaaaggataca

SEQ ID NO: 677971 - DNA, 33 bp, Homo sapien
aaaggaaattcgtgtcacttggtctagctgtca

SEQ ID NO: 677972 - DNA, 33 bp, Homo sapien
aaaggaaattcgtgtcccttggtctagctgtca

SEQ ID NO: 677973 - DNA, 33 bp, Homo sapien
aataataaaaacgccagtccaagcactaataaa

SEQ ID NO: 677974 - DNA, 33 bp, Homo sapien
aataataaaaacgccattccaagcactaataaa

SEQ ID NO: 677975 - DNA, 33 bp, Homo sapien
caaaagcagacaaatactatgtatccatctccc

SEQ ID NO: 677976 - DNA, 33 bp, Homo sapien
caaaagcagacaaatagtatgtatccatctccc

SEQ ID NO: 677977 - DNA, 33 bp, Homo sapien
gaagactagaatagaagcagtagccaaccacat

SEQ ID NO: 677978 - DNA, 33 bp, Homo sapien
gaagactagaatagaatcagtagccaaccacat

SEQ ID NO: 677979 - DNA, 33 bp, Homo sapien
ggatggacagtagattgaagatactgattgtgt

SEQ ID NO: 677980 - DNA, 33 bp, Homo sapien
ggatggacagtagatttaagatactgattgtgt

SEQ ID NO: 677981 - DNA, 33 bp, Homo sapien
ttaagaaaatgaagccagaagcagtgggtcagt

SEQ ID NO: 677982 - DNA, 33 bp, Homo sapien
ttaagaaaatgaagccggaagcagtgggtcagt

SEQ ID NO: 677983 - DNA, 33 bp, Homo sapien
attgagtctagcaaacgacatttgtcagaaata

SEQ ID NO: 677984 - DNA, 33 bp, Homo sapien
attgagtctagcaaactacatttgtcagaaata

SEQ ID NO: 677985 - DNA, 33 bp, Homo sapien
tgctcttccctttaccacaactagcttgaatca

SEQ ID NO: 677986 - DNA, 33 bp, Homo sapien
tgctcttccctttaccgcaactagcttgaatca

SEQ ID NO: 677987 - DNA, 33 bp, Homo sapien
tcttgataggcaggatgaactcgtatggatctt

SEQ ID NO: 677988 - DNA, 33 bp, Homo sapien
tcttgataggcaggattaactcgtatggatctt

SEQ ID NO: 677989 - DNA, 33 bp, Homo sapien
gatgtaggagtaacaaaggcagggtctaaactt

SEQ ID NO: 677990 - DNA, 33 bp, Homo sapien
gatgtaggagtaacaagggcagggtctaaactt

SEQ ID NO: 677991 - DNA, 33 bp, Homo sapien
tggaccaggtttcatacgggccaaaggaaattc

SEQ ID NO: 677992 - DNA, 33 bp, Homo sapien
tggaccaggtttcatatgggccaaaggaaattc

SEQ ID NO: 677993 - DNA, 33 bp, Homo sapien
agtagcttccccaaaacgggcatgtctgaattc

SEQ ID NO: 677994 - DNA, 33 bp, Homo sapien
agtagcttccccaaaatgggcatgtctgaattc

SEQ ID NO: 677995 - DNA, 33 bp, Homo sapien
gttccctttgctgaagaatcatggtgctgtgtt

SEQ ID NO: 677996 - DNA, 33 bp, Homo sapien
gttccctttgctgaaggatcatggtgctgtgtt

SEQ ID NO: 677997 - DNA, 33 bp, Homo sapien
ccaggactctctagcaaaagaggtagtagtaac

SEQ ID NO: 677998 - DNA, 33 bp, Homo sapien
ccaggactctctagcagaagaggtagtagtaac

SEQ ID NO: 677999 - DNA, 33 bp, Homo sapien
tttcctgagaagtttcacaaaagcctagtataa

SEQ ID NO: 678000 - DNA, 33 bp, Homo sapien
tttcctgagaagtttcgcaaaagcctagtataa

SEQ ID NO: 678001 - DNA, 33 bp, Homo sapien
aggcttttatatgccaatacaaacaatccattt

SEQ ID NO: 678002 - DNA, 33 bp, Homo sapien
aggcttttatatgccagtacaaacaatccattt

SEQ ID NO: 678003 - DNA, 33 bp, Homo sapien
ttttaccaagttgagacagactgagaagtagtg

SEQ ID NO: 678004 - DNA, 33 bp, Homo sapien
ttttaccaagttgagatagactgagaagtagtg

SEQ ID NO: 678005 - DNA, 33 bp, Homo sapien
agtacataatgattagaccaaacactgcttaga

SEQ ID NO: 678006 - DNA, 33 bp, Homo sapien
agtacataatgattagcccaaacactgcttaga

SEQ ID NO: 678007 - DNA, 33 bp, Homo sapien
aggtttcttgataaaagaatccatgggcttgga

SEQ ID NO: 678008 - DNA, 33 bp, Homo sapien
aggtttcttgataaaataatccatgggcttgga

SEQ ID NO: 678009 - DNA, 33 bp, Homo sapien
caattaaaccttgcacgcagctgggcacagtga

SEQ ID NO: 678010 - DNA, 33 bp, Homo sapien
caattaaaccttgcactcagctgggcacagtga

SEQ ID NO: 678011 - DNA, 33 bp, Homo sapien
tgacataggtgagaaacactaaaggcttgaaca

SEQ ID NO: 678012 - DNA, 33 bp, Homo sapien
tgacataggtgagaaatactaaaggcttgaaca

SEQ ID NO: 678013 - DNA, 33 bp, Homo sapien
aaatgagacttataccaaccagttagccccatg

SEQ ID NO: 678014 - DNA, 33 bp, Homo sapien
aaatgagacttatacccaccagttagccccatg

SEQ ID NO: 678015 - DNA, 33 bp, Homo sapien
aataaaatggttccagaaaactgaacaaaccaa

SEQ ID NO: 678016 - DNA, 33 bp, Homo sapien
aataaaatggttccaggaaactgaacaaaccaa

SEQ ID NO: 678017 - DNA, 33 bp, Homo sapien
ccaagacttgccaatgaaagaattgaaacagaa

SEQ ID NO: 678018 - DNA, 33 bp, Homo sapien
ccaagacttgccaatggaagaattgaaacagaa

SEQ ID NO: 678019 - DNA, 33 bp, Homo sapien
cttctcttaactcttcaaagcaaagctgatgcc

SEQ ID NO: 678020 - DNA, 33 bp, Homo sapien
cttctcttaactcttccaagcaaagctgatgcc

SEQ ID NO: 678021 - DNA, 33 bp, Homo sapien
tgtcaggattcccacactccaatagatcttcat

SEQ ID NO: 678022 - DNA, 33 bp, Homo sapien
tgtcaggattcccacattccaatagatcttcat

SEQ ID NO: 678023 - DNA, 33 bp, Homo sapien
aaattcccacactcaccgaaaataggccttgaa

SEQ ID NO: 678024 - DNA, 33 bp, Homo sapien
aaattcccacactcactgaaaataggccttgaa

SEQ ID NO: 678025 - DNA, 33 bp, Homo sapien
aaagaaagaggcatcaaaaggcacaacaggggc

SEQ ID NO: 678026 - DNA, 33 bp, Homo sapien
aaagaaagaggcatcagaaggcacaacaggggc

SEQ ID NO: 678027 - DNA, 33 bp, Homo sapien
gtacaaactttttggaagaaatctggcagaatg

SEQ ID NO: 678028 - DNA, 33 bp, Homo sapien
gtacaaactttttggaggaaatctggcagaatg

SEQ ID NO: 678029 - DNA, 33 bp, Homo sapien
cctaatggtattgcacacctaatagactataaa

SEQ ID NO: 678030 - DNA, 33 bp, Homo sapien
cctaatggtattgcacccctaatagactataaa

SEQ ID NO: 678031 - DNA, 33 bp, Homo sapien
gcagggaaatatctacagcctaaaacttttata

SEQ ID NO: 678032 - DNA, 33 bp, Homo sapien
gcagggaaatatctacggcctaaaacttttata

SEQ ID NO: 678033 - DNA, 33 bp, Homo sapien
atttgaaacttttaacagccctgtgacataggc

SEQ ID NO: 678034 - DNA, 33 bp, Homo sapien
atttgaaacttttaaccgccctgtgacataggc

SEQ ID NO: 678035 - DNA, 33 bp, Homo sapien
acaaaggcagtaggaacagaatttggtaataca

SEQ ID NO: 678036 - DNA, 33 bp, Homo sapien
acaaaggcagtaggaatagaatttggtaataca

SEQ ID NO: 678037 - DNA, 33 bp, Homo sapien
atcccaggaatccaaaactccttccttctcagg

SEQ ID NO: 678038 - DNA, 33 bp, Homo sapien
atcccaggaatccaaacctccttccttctcagg

SEQ ID NO: 678039 - DNA, 33 bp, Homo sapien
aaaacatggcaggaacaagaatggaaagtttca

SEQ ID NO: 678040 - DNA, 33 bp, Homo sapien
aaaacatggcaggaacgagaatggaaagtttca

SEQ ID NO: 678041 - DNA, 33 bp, Homo sapien
tccaggtcacactcaactgtcattatcctctta

SEQ ID NO: 678042 - DNA, 33 bp, Homo sapien
tccaggtcacactcaattgtcattatcctctta

SEQ ID NO: 678043 - DNA, 33 bp, Homo sapien
agtcttgagctccccccggagtttggagtgccc

SEQ ID NO: 678044 - DNA, 33 bp, Homo sapien
agtcttgagctccccctggagtttggagtgccc

SEQ ID NO: 678045 - DNA, 33 bp, Homo sapien
attgctcagtaccagaagtttgagtacggtcgt

SEQ ID NO: 678046 - DNA, 33 bp, Homo sapien
attgctcagtaccagaggtttgagtacggtcgt

SEQ ID NO: 678047 - DNA, 33 bp, Homo sapien
ccagcacaaacctccaaattcccagaatcagag

SEQ ID NO: 678048 - DNA, 33 bp, Homo sapien
ccagcacaaacctccatattcccagaatcagag

SEQ ID NO: 678049 - DNA, 33 bp, Homo sapien
ggttgcctgccttatacggtaacttgcttttgg

SEQ ID NO: 678050 - DNA, 33 bp, Homo sapien
ggttgcctgccttatatggtaacttgcttttgg

SEQ ID NO: 678051 - DNA, 33 bp, Homo sapien
tcattggattgaaaaagacaaggcacattgggt

SEQ ID NO: 678052 - DNA, 33 bp, Homo sapien
tcattggattgaaaaatacaaggcacattgggt

SEQ ID NO: 678053 - DNA, 33 bp, Homo sapien
ttccattttgtcatgtcaacttctgcctatcct

SEQ ID NO: 678054 - DNA, 33 bp, Homo sapien
ttccattttgtcatgttaacttctgcctatcct

SEQ ID NO: 678055 - DNA, 33 bp, Homo sapien
ctcctatttgccgctcacaacaacccggtgaag

SEQ ID NO: 678056 - DNA, 33 bp, Homo sapien
ctcctatttgccgctcgcaacaacccggtgaag

SEQ ID NO: 678057 - DNA, 33 bp, Homo sapien
agtgattccgccaaacaaaagaaaagcaggcaa

SEQ ID NO: 678058 - DNA, 33 bp, Homo sapien
agtgattccgccaaaccaaagaaaagcaggcaa

SEQ ID NO: 678059 - DNA, 33 bp, Homo sapien
aacctctgggaagcagaatgaggcgctcgtttt

SEQ ID NO: 678060 - DNA, 33 bp, Homo sapien
aacctctgggaagcagcatgaggcgctcgtttt

SEQ ID NO: 678061 - DNA, 33 bp, Homo sapien
aaatacagctttccacagcctttctgcctcttc

SEQ ID NO: 678062 - DNA, 33 bp, Homo sapien
aaatacagctttccacggcctttctgcctcttc

SEQ ID NO: 678063 - DNA, 33 bp, Homo sapien
ttatgctctgagagccagaggccgttttgtctc

SEQ ID NO: 678064 - DNA, 33 bp, Homo sapien
ttatgctctgagagccggaggccgttttgtctc

SEQ ID NO: 678065 - DNA, 33 bp, Homo sapien
tttgaatggacttaggacccatgaggttgtggc

SEQ ID NO: 678066 - DNA, 33 bp, Homo sapien
tttgaatggacttagggcccatgaggttgtggc

SEQ ID NO: 678067 - DNA, 33 bp, Homo sapien
gattgctcttcaccacaagattctagctgcatt

SEQ ID NO: 678068 - DNA, 33 bp, Homo sapien
gattgctcttcaccacgagattctagctgcatt

SEQ ID NO: 678069 - DNA, 33 bp, Homo sapien
cacaagaaactggggaagcaccatccaagcctc

SEQ ID NO: 678070 - DNA, 33 bp, Homo sapien
cacaagaaactggggaggcaccatccaagcctc

SEQ ID NO: 678071 - DNA, 33 bp, Homo sapien
catgttgagctcttaccgggaggggtatgcatc

SEQ ID NO: 678072 - DNA, 33 bp, Homo sapien
catgttgagctcttactgggaggggtatgcatc

SEQ ID NO: 678073 - DNA, 33 bp, Homo sapien
ctgcaaagaggcctgacagctcccactcacctg

SEQ ID NO: 678074 - DNA, 33 bp, Homo sapien
ctgcaaagaggcctgatagctcccactcacctg

SEQ ID NO: 678075 - DNA, 33 bp, Homo sapien
gtaacaaggccagtgaagagactaatgcagaat

SEQ ID NO: 678076 - DNA, 33 bp, Homo sapien
gtaacaaggccagtgaggagactaatgcagaat

SEQ ID NO: 678077 - DNA, 33 bp, Homo sapien
tgtagatagtagattgccaactacttgaggcct

SEQ ID NO: 678078 - DNA, 33 bp, Homo sapien
tgtagatagtagattgtcaactacttgaggcct

SEQ ID NO: 678079 - DNA, 33 bp, Homo sapien
cttgtctcctcctctgcagacttggagcacctt

SEQ ID NO: 678080 - DNA, 33 bp, Homo sapien
cttgtctcctcctctgtagacttggagcacctt

SEQ ID NO: 678081 - DNA, 33 bp, Homo sapien
attcaaatatagcttacaggacttgcaattgag

SEQ ID NO: 678082 - DNA, 33 bp, Homo sapien
attcaaatatagcttagaggacttgcaattgag

SEQ ID NO: 678083 - DNA, 33 bp, Homo sapien
aagtttaatgtgctacaacaaaggctgggctag

SEQ ID NO: 678084 - DNA, 33 bp, Homo sapien
aagtttaatgtgctacgacaaaggctgggctag

SEQ ID NO: 678085 - DNA, 33 bp, Homo sapien
gggaaattacccaaccaccctaagtctcagctt

SEQ ID NO: 678086 - DNA, 33 bp, Homo sapien
gggaaattacccaaccgccctaagtctcagctt

SEQ ID NO: 678087 - DNA, 33 bp, Homo sapien
aagaaaacaaaactccactgacatcaaggcggg

SEQ ID NO: 678088 - DNA, 33 bp, Homo sapien
aagaaaacaaaactccgctgacatcaaggcggg

SEQ ID NO: 678089 - DNA, 33 bp, Homo sapien
acgagtcagcatatccacagagcatggagtcct

SEQ ID NO: 678090 - DNA, 33 bp, Homo sapien
acgagtcagcatatccgcagagcatggagtcct

SEQ ID NO: 678091 - DNA, 33 bp, Homo sapien
ttctatgttctttttcacttcaaacgttgtcta

SEQ ID NO: 678092 - DNA, 33 bp, Homo sapien
ttctatgttctttttcgcttcaaacgttgtcta

SEQ ID NO: 678093 - DNA, 33 bp, Homo sapien
atattaatatccaacactgatgtgccaggcatt

SEQ ID NO: 678094 - DNA, 33 bp, Homo sapien
atattaatatccaacattgatgtgccaggcatt

SEQ ID NO: 678095 - DNA, 33 bp, Homo sapien
cctaaactgcccatcaactcttttatgcccgtt

SEQ ID NO: 678096 - DNA, 33 bp, Homo sapien
cctaaactgcccatcagctcttttatgcccgtt

SEQ ID NO: 678097 - DNA, 33 bp, Homo sapien
tgatcacagctgaaggaaatccatacctgaaca

SEQ ID NO: 678098 - DNA, 33 bp, Homo sapien
tgatcacagctgaaggtaatccatacctgaaca

SEQ ID NO: 678099 - DNA, 33 bp, Homo sapien
tccagtgggtcaataccagaggcagtggtgtgc

SEQ ID NO: 678100 - DNA, 33 bp, Homo sapien
tccagtgggtcaatactagaggcagtggtgtgc

SEQ ID NO: 678101 - DNA, 33 bp, Homo sapien
aagcgccatattgaacagcttttgtgtgttctg

SEQ ID NO: 678102 - DNA, 33 bp, Homo sapien
aagcgccatattgaaccgcttttgtgtgttctg

SEQ ID NO: 678103 - DNA, 33 bp, Homo sapien
agcaacggtcctccaacaagggctaagagtaaa

SEQ ID NO: 678104 - DNA, 33 bp, Homo sapien
agcaacggtcctccaataagggctaagagtaaa

SEQ ID NO: 678105 - DNA, 33 bp, Homo sapien
tggtagcaataacaccactaataacccagcaaa

SEQ ID NO: 678106 - DNA, 33 bp, Homo sapien
tggtagcaataacaccgctaataacccagcaaa

SEQ ID NO: 678107 - DNA, 33 bp, Homo sapien
tttccatgtgtgagaaattaactgtaaaatcac

SEQ ID NO: 678108 - DNA, 33 bp, Homo sapien
tttccatgtgtgagaagttaactgtaaaatcac

SEQ ID NO: 678109 - DNA, 33 bp, Homo sapien
gaaaaaagtcttactcaatatggcacccatggt

SEQ ID NO: 678110 - DNA, 33 bp, Homo sapien
gaaaaaagtcttactcgatatggcacccatggt

SEQ ID NO: 678111 - DNA, 33 bp, Homo sapien
attagcatattcagtcacccatattttctttaa

SEQ ID NO: 678112 - DNA, 33 bp, Homo sapien
attagcatattcagtcgcccatattttctttaa

SEQ ID NO: 678113 - DNA, 33 bp, Homo sapien
ggatcaataatacttaaacttggtgagttgtgc

SEQ ID NO: 678114 - DNA, 33 bp, Homo sapien
ggatcaataatacttacacttggtgagttgtgc

SEQ ID NO: 678115 - DNA, 33 bp, Homo sapien
gtcctgtagaatccaaaccaaccaaagtggtgc

SEQ ID NO: 678116 - DNA, 33 bp, Homo sapien
gtcctgtagaatccaatccaaccaaagtggtgc

SEQ ID NO: 678117 - DNA, 33 bp, Homo sapien
tcagctgagtaaaataagccttgtttgataatg

SEQ ID NO: 678118 - DNA, 33 bp, Homo sapien
tcagctgagtaaaataggccttgtttgataatg

SEQ ID NO: 678119 - DNA, 33 bp, Homo sapien
caaagttcttcataggaagcgttcggtgacctt

SEQ ID NO: 678120 - DNA, 33 bp, Homo sapien
caaagttcttcatagggagcgttcggtgacctt

SEQ ID NO: 678121 - DNA, 33 bp, Homo sapien
tcactgtgatctgtagaactgtttttccttctc

SEQ ID NO: 678122 - DNA, 33 bp, Homo sapien
tcactgtgatctgtaggactgtttttccttctc

SEQ ID NO: 678123 - DNA, 33 bp, Homo sapien
gccaacatatgacataaatagagcaatcatcca

SEQ ID NO: 678124 - DNA, 33 bp, Homo sapien
gccaacatatgacatacatagagcaatcatcca

SEQ ID NO: 678125 - DNA, 33 bp, Homo sapien
gaaggaagcaaatgtacgaaaagatacgaagga

SEQ ID NO: 678126 - DNA, 33 bp, Homo sapien
gaaggaagcaaatgtatgaaaagatacgaagga

SEQ ID NO: 678127 - DNA, 33 bp, Homo sapien
actctcagtctccccaaagggcaaaggctttcc

SEQ ID NO: 678128 - DNA, 33 bp, Homo sapien
actctcagtctccccagagggcaaaggctttcc

SEQ ID NO: 678129 - DNA, 33 bp, Homo sapien
gttatggaaaaaccaaagacaatcagaactgca

SEQ ID NO: 678130 - DNA, 33 bp, Homo sapien
gttatggaaaaaccaaggacaatcagaactgca

SEQ ID NO: 678131 - DNA, 33 bp, Homo sapien
tctgttctgaaggcagcagatgggaattacaaa

SEQ ID NO: 678132 - DNA, 33 bp, Homo sapien
tctgttctgaaggcaggagatgggaattacaaa

SEQ ID NO: 678133 - DNA, 33 bp, Homo sapien
tctgcctttctccctaccctcatccttctgcac

SEQ ID NO: 678134 - DNA, 33 bp, Homo sapien
tctgcctttctccctagcctcatccttctgcac

SEQ ID NO: 678135 - DNA, 33 bp, Homo sapien
ttctcatggtgcttaccgactgtccagtgggac

SEQ ID NO: 678136 - DNA, 33 bp, Homo sapien
ttctcatggtgcttactgactgtccagtgggac

SEQ ID NO: 678137 - DNA, 33 bp, Homo sapien
acaggttagtgacccaaagagaaaaaagcagaa

SEQ ID NO: 678138 - DNA, 33 bp, Homo sapien
acaggttagtgacccacagagaaaaaagcagaa

SEQ ID NO: 678139 - DNA, 33 bp, Homo sapien
gggctatttgtattgacgccaaaactctggact

SEQ ID NO: 678140 - DNA, 33 bp, Homo sapien
gggctatttgtattgatgccaaaactctggact

SEQ ID NO: 678141 - DNA, 33 bp, Homo sapien
tatttccttcaattcaccatgtaggcaacagac

SEQ ID NO: 678142 - DNA, 33 bp, Homo sapien
tatttccttcaattcagcatgtaggcaacagac

SEQ ID NO: 678143 - DNA, 33 bp, Homo sapien
gaacgctgtgtgtccaaaaacattcctggttgt

SEQ ID NO: 678144 - DNA, 33 bp, Homo sapien
gaacgctgtgtgtccagaaacattcctggttgt

SEQ ID NO: 678145 - DNA, 33 bp, Homo sapien
ctttgttcagaagtgaaatcatctgcatctact

SEQ ID NO: 678146 - DNA, 33 bp, Homo sapien
ctttgttcagaagtgagatcatctgcatctact

SEQ ID NO: 678147 - DNA, 33 bp, Homo sapien
cagttactgtattctccacctatttaccaagtg

SEQ ID NO: 678148 - DNA, 33 bp, Homo sapien
cagttactgtattctctacctatttaccaagtg

SEQ ID NO: 678149 - DNA, 33 bp, Homo sapien
ttctgctccagactgcccaacagacgtgccatg

SEQ ID NO: 678150 - DNA, 33 bp, Homo sapien
ttctgctccagactgcgcaacagacgtgccatg

SEQ ID NO: 678151 - DNA, 33 bp, Homo sapien
cacaaatacttacaaaccaaggcagatttctcc

SEQ ID NO: 678152 - DNA, 33 bp, Homo sapien
cacaaatacttacaaatcaaggcagatttctcc

SEQ ID NO: 678153 - DNA, 33 bp, Homo sapien
tggccatctgagtacgaccctcaggtaccacca

SEQ ID NO: 678154 - DNA, 33 bp, Homo sapien
tggccatctgagtacgtccctcaggtaccacca

SEQ ID NO: 678155 - DNA, 33 bp, Homo sapien
gccactatggatcaaaaagcaggatggggaaag

SEQ ID NO: 678156 - DNA, 33 bp, Homo sapien
gccactatggatcaaagagcaggatggggaaag

SEQ ID NO: 678157 - DNA, 33 bp, Homo sapien
aggtaaatgaaaagaaaatgctggagatgcaat

SEQ ID NO: 678158 - DNA, 33 bp, Homo sapien
aggtaaatgaaaagaacatgctggagatgcaat

SEQ ID NO: 678159 - DNA, 33 bp, Homo sapien
aagtcacgtgggagccaatgaagggaatgctta

SEQ ID NO: 678160 - DNA, 33 bp, Homo sapien
aagtcacgtgggagccgatgaagggaatgctta

SEQ ID NO: 678161 - DNA, 33 bp, Homo sapien
ccttgagagctgttaactggctggtgagtcttt

SEQ ID NO: 678162 - DNA, 33 bp, Homo sapien
ccttgagagctgttaattggctggtgagtcttt

SEQ ID NO: 678163 - DNA, 33 bp, Homo sapien
gactcagataattcatcaaacatggtgttttcg

SEQ ID NO: 678164 - DNA, 33 bp, Homo sapien
gactcagataattcatgaaacatggtgttttcg

SEQ ID NO: 678165 - DNA, 33 bp, Homo sapien
attgaaatacaacaggaaaatgcttctgttgcc

SEQ ID NO: 678166 - DNA, 33 bp, Homo sapien
attgaaatacaacagggaaatgcttctgttgcc

SEQ ID NO: 678167 - DNA, 33 bp, Homo sapien
ttgtccatgtccatcgcaaaccatagtgaccat

SEQ ID NO: 678168 - DNA, 33 bp, Homo sapien
ttgtccatgtccatcgtaaaccatagtgaccat

SEQ ID NO: 678169 - DNA, 33 bp, Homo sapien
gagaatacggccatccacaagccaaaaacacag

SEQ ID NO: 678170 - DNA, 33 bp, Homo sapien
gagaatacggccatccgcaagccaaaaacacag

SEQ ID NO: 678171 - DNA, 33 bp, Homo sapien
ttgatagtatcacttacaagtcacttaatttac

SEQ ID NO: 678172 - DNA, 33 bp, Homo sapien
ttgatagtatcacttataagtcacttaatttac

SEQ ID NO: 678173 - DNA, 33 bp, Homo sapien
aattgtggagcaacaacattttggggcagttag

SEQ ID NO: 678174 - DNA, 33 bp, Homo sapien
aattgtggagcaacaagattttggggcagttag

SEQ ID NO: 678175 - DNA, 33 bp, Homo sapien
tctatttttttctggcacaactcaatcttttca

SEQ ID NO: 678176 - DNA, 33 bp, Homo sapien
tctatttttttctggctcaactcaatcttttca

SEQ ID NO: 678177 - DNA, 33 bp, Homo sapien
aatacaaaaacagggacaacacgcaagcaagac

SEQ ID NO: 678178 - DNA, 33 bp, Homo sapien
aatacaaaaacagggataacacgcaagcaagac

SEQ ID NO: 678179 - DNA, 33 bp, Homo sapien
gactctgaatcacataacaagagtgcaaaattt

SEQ ID NO: 678180 - DNA, 33 bp, Homo sapien
gactctgaatcacatatcaagagtgcaaaattt

SEQ ID NO: 678181 - DNA, 33 bp, Homo sapien
atcatttgtaaagtcaatattgttcatcggttt

SEQ ID NO: 678182 - DNA, 33 bp, Homo sapien
atcatttgtaaagtcagtattgttcatcggttt

SEQ ID NO: 678183 - DNA, 33 bp, Homo sapien
tacagcacttgtcaaccaactgaactgtattct

SEQ ID NO: 678184 - DNA, 33 bp, Homo sapien
tacagcacttgtcaactaactgaactgtattct

SEQ ID NO: 678185 - DNA, 33 bp, Homo sapien
ttttattgcttccaaggattgcccgttgtccaa

SEQ ID NO: 678186 - DNA, 33 bp, Homo sapien
ttttattgcttccaagtattgcccgttgtccaa

SEQ ID NO: 678187 - DNA, 33 bp, Homo sapien
atttgcaaaggaaaataataggaagcactaaag

SEQ ID NO: 678188 - DNA, 33 bp, Homo sapien
atttgcaaaggaaaatgataggaagcactaaag

SEQ ID NO: 678189 - DNA, 33 bp, Homo sapien
atggtatggtaggatcaatgctgtactagtaaa

SEQ ID NO: 678190 - DNA, 33 bp, Homo sapien
atggtatggtaggatctatgctgtactagtaaa

SEQ ID NO: 678191 - DNA, 33 bp, Homo sapien
tgcatcagccttaggaaaacccaccatctgaaa

SEQ ID NO: 678192 - DNA, 33 bp, Homo sapien
tgcatcagccttaggagaacccaccatctgaaa

SEQ ID NO: 678193 - DNA, 33 bp, Homo sapien
cttccccacaaaaacacgtgtggttcatactcc

SEQ ID NO: 678194 - DNA, 33 bp, Homo sapien
cttccccacaaaaacatgtgtggttcatactcc

SEQ ID NO: 678195 - DNA, 33 bp, Homo sapien
ttgtttgttttgtcaagttcaatgccttcaaaa

SEQ ID NO: 678196 - DNA, 33 bp, Homo sapien
ttgtttgttttgtcaatttcaatgccttcaaaa

SEQ ID NO: 678197 - DNA, 33 bp, Homo sapien
cagacaaaaactcttcaccctccaaagccacta

SEQ ID NO: 678198 - DNA, 33 bp, Homo sapien
cagacaaaaactcttcgccctccaaagccacta

SEQ ID NO: 678199 - DNA, 33 bp, Homo sapien
gtacatattttgcaaacctcacaactctacaag

SEQ ID NO: 678200 - DNA, 33 bp, Homo sapien
gtacatattttgcaaagctcacaactctacaag

SEQ ID NO: 678201 - DNA, 33 bp, Homo sapien
atttcttgaatagaaaatcctttcctcgttgct

SEQ ID NO: 678202 - DNA, 33 bp, Homo sapien
atttcttgaatagaaagtcctttcctcgttgct

SEQ ID NO: 678203 - DNA, 33 bp, Homo sapien
agtaccaaacagattacgtgaaaaatggtatct

SEQ ID NO: 678204 - DNA, 33 bp, Homo sapien
agtaccaaacagattatgtgaaaaatggtatct

SEQ ID NO: 678205 - DNA, 33 bp, Homo sapien
cctaaccagactgttacgacttttacttgtgca

SEQ ID NO: 678206 - DNA, 33 bp, Homo sapien
cctaaccagactgttatgacttttacttgtgca

SEQ ID NO: 678207 - DNA, 33 bp, Homo sapien
atttaggttcttgtgaagtaactgtgattagcg

SEQ ID NO: 678208 - DNA, 33 bp, Homo sapien
atttaggttcttgtgaggtaactgtgattagcg

SEQ ID NO: 678209 - DNA, 33 bp, Homo sapien
ttgccatcctgcactaagttactttaataactc

SEQ ID NO: 678210 - DNA, 33 bp, Homo sapien
ttgccatcctgcactaggttactttaataactc

SEQ ID NO: 678211 - DNA, 33 bp, Homo sapien
gcagtaaaaaaggtaactaaggccctgctcaag

SEQ ID NO: 678212 - DNA, 33 bp, Homo sapien
gcagtaaaaaaggtaattaaggccctgctcaag

SEQ ID NO: 678213 - DNA, 33 bp, Homo sapien
agtcagagaggtaacacgactgagtgaagagac

SEQ ID NO: 678214 - DNA, 33 bp, Homo sapien
agtcagagaggtaacatgactgagtgaagagac

SEQ ID NO: 678215 - DNA, 33 bp, Homo sapien
ctttatgcattcttaccgagcaaagctttgtgg

SEQ ID NO: 678216 - DNA, 33 bp, Homo sapien
ctttatgcattcttactgagcaaagctttgtgg

SEQ ID NO: 678217 - DNA, 33 bp, Homo sapien
atcacttttgacactcactttaaaacacaagag

SEQ ID NO: 678218 - DNA, 33 bp, Homo sapien
atcacttttgacactcgctttaaaacacaagag

SEQ ID NO: 678219 - DNA, 33 bp, Homo sapien
ctgatgatgtagagaaagagaaggttgctaatg

SEQ ID NO: 678220 - DNA, 33 bp, Homo sapien
ctgatgatgtagagaatgagaaggttgctaatg

SEQ ID NO: 678221 - DNA, 33 bp, Homo sapien
ttagccattggcattacagctttaaaagcagct

SEQ ID NO: 678222 - DNA, 33 bp, Homo sapien
ttagccattggcattagagctttaaaagcagct

SEQ ID NO: 678223 - DNA, 33 bp, Homo sapien
tgctgtcactctactcaatcacgtgatcttaac

SEQ ID NO: 678224 - DNA, 33 bp, Homo sapien
tgctgtcactctactcgatcacgtgatcttaac

SEQ ID NO: 678225 - DNA, 33 bp, Homo sapien
catcagtactactgacacacttgtgaaatttgt

SEQ ID NO: 678226 - DNA, 33 bp, Homo sapien
catcagtactactgacccacttgtgaaatttgt

SEQ ID NO: 678227 - DNA, 33 bp, Homo sapien
aataatttcacacttacggaaaagttacaaaag

SEQ ID NO: 678228 - DNA, 33 bp, Homo sapien
aataatttcacacttatggaaaagttacaaaag

SEQ ID NO: 678229 - DNA, 33 bp, Homo sapien
acaatacttagttaccagcttaaccaaagtgat

SEQ ID NO: 678230 - DNA, 33 bp, Homo sapien
acaatacttagttacctgcttaaccaaagtgat

SEQ ID NO: 678231 - DNA, 33 bp, Homo sapien
atgaaagtgatgtggtaaagcttagagaaaatt

SEQ ID NO: 678232 - DNA, 33 bp, Homo sapien
atgaaagtgatgtggttaagcttagagaaaatt

SEQ ID NO: 678233 - DNA, 33 bp, Homo sapien
tggcctttgtctataaatggcaggatttctcat

SEQ ID NO: 678234 - DNA, 33 bp, Homo sapien
tggcctttgtctataactggcaggatttctcat

SEQ ID NO: 678235 - DNA, 33 bp, Homo sapien
cccttaaaaattatgaagtattggccaggtgcg

SEQ ID NO: 678236 - DNA, 33 bp, Homo sapien
cccttaaaaattatgaggtattggccaggtgcg

SEQ ID NO: 678237 - DNA, 33 bp, Homo sapien
atgcagaagggaagcaagaaggtaagacagcaa

SEQ ID NO: 678238 - DNA, 33 bp, Homo sapien
atgcagaagggaagcaggaaggtaagacagcaa

SEQ ID NO: 678239 - DNA, 33 bp, Homo sapien
tacatgttggaaaagcaccagttggcatgaggt

SEQ ID NO: 678240 - DNA, 33 bp, Homo sapien
tacatgttggaaaagcgccagttggcatgaggt

SEQ ID NO: 678241 - DNA, 33 bp, Homo sapien
ccctcacatctataaacccaggtgtccttaaag

SEQ ID NO: 678242 - DNA, 33 bp, Homo sapien
ccctcacatctataaatccaggtgtccttaaag

SEQ ID NO: 678243 - DNA, 33 bp, Homo sapien
catggctgcttaatgacgggctaagagaagaac

SEQ ID NO: 678244 - DNA, 33 bp, Homo sapien
catggctgcttaatgatgggctaagagaagaac

SEQ ID NO: 678245 - DNA, 33 bp, Homo sapien
ggctgtggaaagtgtacctacatttcgtgcttt

SEQ ID NO: 678246 - DNA, 33 bp, Homo sapien
ggctgtggaaagtgtatctacatttcgtgcttt

SEQ ID NO: 678247 - DNA, 33 bp, Homo sapien
acagtaagccatcagcagctgagtagtaataca

SEQ ID NO: 678248 - DNA, 33 bp, Homo sapien
acagtaagccatcagctgctgagtagtaataca

SEQ ID NO: 678249 - DNA, 33 bp, Homo sapien
gcttcacgctttctcaatctctccccatatgag

SEQ ID NO: 678250 - DNA, 33 bp, Homo sapien
gcttcacgctttctcagtctctccccatatgag

SEQ ID NO: 678251 - DNA, 33 bp, Homo sapien
atccctggttccaacacaaactcacactctaat

SEQ ID NO: 678252 - DNA, 33 bp, Homo sapien
atccctggttccaacagaaactcacactctaat

SEQ ID NO: 678253 - DNA, 33 bp, Homo sapien
ggcccagagaggggaaagcgtttgtataggttg

SEQ ID NO: 678254 - DNA, 33 bp, Homo sapien
ggcccagagaggggaaggcgtttgtataggttg

SEQ ID NO: 678255 - DNA, 33 bp, Homo sapien
ctgtctcacctcctcacctcctgagcacaactc

SEQ ID NO: 678256 - DNA, 33 bp, Homo sapien
ctgtctcacctcctcatctcctgagcacaactc

SEQ ID NO: 678257 - DNA, 33 bp, Homo sapien
tctccatattgttcacagagttcggaacactcc

SEQ ID NO: 678258 - DNA, 33 bp, Homo sapien
tctccatattgttcacggagttcggaacactcc

SEQ ID NO: 678259 - DNA, 33 bp, Homo sapien
cagtactttactactcagaaacagtactaatat

SEQ ID NO: 678260 - DNA, 33 bp, Homo sapien
cagtactttactactcggaaacagtactaatat

SEQ ID NO: 678261 - DNA, 33 bp, Homo sapien
ttctgaggtcacttccagaaattatgcctctaa

SEQ ID NO: 678262 - DNA, 33 bp, Homo sapien
ttctgaggtcacttccggaaattatgcctctaa

SEQ ID NO: 678263 - DNA, 33 bp, Homo sapien
tagttgcaaagtaacaaaatgataagaatcctc

SEQ ID NO: 678264 - DNA, 33 bp, Homo sapien
tagttgcaaagtaacagaatgataagaatcctc

SEQ ID NO: 678265 - DNA, 33 bp, Homo sapien
tcatgtgacctcccagcatttcagcggtgttgt

SEQ ID NO: 678266 - DNA, 33 bp, Homo sapien
tcatgtgacctcccagtatttcagcggtgttgt

SEQ ID NO: 678267 - DNA, 33 bp, Homo sapien
aaagatcatgagttggcaatatccagttaaggc

SEQ ID NO: 678268 - DNA, 33 bp, Homo sapien
aaagatcatgagttggtaatatccagttaaggc

SEQ ID NO: 678269 - DNA, 33 bp, Homo sapien
aattgtactgttcatcaaaagtttctgaactag

SEQ ID NO: 678270 - DNA, 33 bp, Homo sapien
aattgtactgttcatccaaagtttctgaactag

SEQ ID NO: 678271 - DNA, 33 bp, Homo sapien
actgatttaactgatacggttggctagatggaa

SEQ ID NO: 678272 - DNA, 33 bp, Homo sapien
actgatttaactgatatggttggctagatggaa

SEQ ID NO: 678273 - DNA, 33 bp, Homo sapien
cagtaatcagagcaaacattttatagcacttac

SEQ ID NO: 678274 - DNA, 33 bp, Homo sapien
cagtaatcagagcaaatattttatagcacttac

SEQ ID NO: 678275 - DNA, 33 bp, Homo sapien
gcatacctgtgtggacaagataaagaaatatgg

SEQ ID NO: 678276 - DNA, 33 bp, Homo sapien
gcatacctgtgtggacgagataaagaaatatgg

SEQ ID NO: 678277 - DNA, 33 bp, Homo sapien
ccttctctgtttattgcatagactgttgaaaca

SEQ ID NO: 678278 - DNA, 33 bp, Homo sapien
ccttctctgtttattggatagactgttgaaaca

SEQ ID NO: 678279 - DNA, 33 bp, Homo sapien
actcagtgcacagataccatgttgtcttttatt

SEQ ID NO: 678280 - DNA, 33 bp, Homo sapien
actcagtgcacagatatcatgttgtcttttatt

SEQ ID NO: 678281 - DNA, 33 bp, Homo sapien
ctaggtccaggaaggaaacacacttaattgaca

SEQ ID NO: 678282 - DNA, 33 bp, Homo sapien
ctaggtccaggaaggagacacacttaattgaca

SEQ ID NO: 678283 - DNA, 33 bp, Homo sapien
gattgtaaagaggggcagcagcattatctcttg

SEQ ID NO: 678284 - DNA, 33 bp, Homo sapien
gattgtaaagaggggcggcagcattatctcttg

SEQ ID NO: 678285 - DNA, 33 bp, Homo sapien
ggttgctgcttcttaaatgttgtgctctaggcc

SEQ ID NO: 678286 - DNA, 33 bp, Homo sapien
ggttgctgcttcttaagtgttgtgctctaggcc

SEQ ID NO: 678287 - DNA, 33 bp, Homo sapien
gaacatataaagggaacagtaaggcctggacta

SEQ ID NO: 678288 - DNA, 33 bp, Homo sapien
gaacatataaagggaagagtaaggcctggacta

SEQ ID NO: 678289 - DNA, 33 bp, Homo sapien
ccctcaatggcttacacagggcagttgctatgg

SEQ ID NO: 678290 - DNA, 33 bp, Homo sapien
ccctcaatggcttacatagggcagttgctatgg

SEQ ID NO: 678291 - DNA, 33 bp, Homo sapien
attgcatttccaaataccttcaggatttcctca

SEQ ID NO: 678292 - DNA, 33 bp, Homo sapien
attgcatttccaaatatcttcaggatttcctca

SEQ ID NO: 678293 - DNA, 33 bp, Homo sapien
ctctaaatgatgcatacctggagacagcattat

SEQ ID NO: 678294 - DNA, 33 bp, Homo sapien
ctctaaatgatgcatatctggagacagcattat

SEQ ID NO: 678295 - DNA, 33 bp, Homo sapien
aatgttaagaaagtacagagcagcattaataca

SEQ ID NO: 678296 - DNA, 33 bp, Homo sapien
aatgttaagaaagtaccgagcagcattaataca

SEQ ID NO: 678297 - DNA, 33 bp, Homo sapien
cgcaggatgggaacagaaacagagagaaagtcc

SEQ ID NO: 678298 - DNA, 33 bp, Homo sapien
cgcaggatgggaacaggaacagagagaaagtcc

SEQ ID NO: 678299 - DNA, 33 bp, Homo sapien
gggcatcaaaagccacactccggagagcccttc

SEQ ID NO: 678300 - DNA, 33 bp, Homo sapien
gggcatcaaaagccacgctccggagagcccttc

SEQ ID NO: 678301 - DNA, 33 bp, Homo sapien
tacactggtgtgtataagaaccaaggtataatg

SEQ ID NO: 678302 - DNA, 33 bp, Homo sapien
tacactggtgtgtatatgaaccaaggtataatg

SEQ ID NO: 678303 - DNA, 33 bp, Homo sapien
gtcattcttgatccctcaccctttcttgctgcc

SEQ ID NO: 678304 - DNA, 33 bp, Homo sapien
gtcattcttgatcccttaccctttcttgctgcc

SEQ ID NO: 678305 - DNA, 33 bp, Homo sapien
tagtatgctatgcaaaacattacagcacagaag

SEQ ID NO: 678306 - DNA, 33 bp, Homo sapien
tagtatgctatgcaaatcattacagcacagaag

SEQ ID NO: 678307 - DNA, 33 bp, Homo sapien
gttgtaaaatggtccacgatcagtcacatttga

SEQ ID NO: 678308 - DNA, 33 bp, Homo sapien
gttgtaaaatggtccatgatcagtcacatttga

SEQ ID NO: 678309 - DNA, 33 bp, Homo sapien
gagccttcattttcccaaatccataaaattcaa

SEQ ID NO: 678310 - DNA, 33 bp, Homo sapien
gagccttcattttccctaatccataaaattcaa

SEQ ID NO: 678311 - DNA, 33 bp, Homo sapien
gtcctgcctttccccaaagaaaaagcacgcact

SEQ ID NO: 678312 - DNA, 33 bp, Homo sapien
gtcctgcctttccccagagaaaaagcacgcact

SEQ ID NO: 678313 - DNA, 33 bp, Homo sapien
gggcattagttgctcacgcctcccggtgttagg

SEQ ID NO: 678314 - DNA, 33 bp, Homo sapien
gggcattagttgctcatgcctcccggtgttagg

SEQ ID NO: 678315 - DNA, 33 bp, Homo sapien
ggtcttgctcagcaccgaggatatacactgagg

SEQ ID NO: 678316 - DNA, 33 bp, Homo sapien
ggtcttgctcagcacctaggatatacactgagg

SEQ ID NO: 678317 - DNA, 33 bp, Homo sapien
cctctaaagccagacaatcagccctttcctcaa

SEQ ID NO: 678318 - DNA, 33 bp, Homo sapien
cctctaaagccagacattcagccctttcctcaa

SEQ ID NO: 678319 - DNA, 33 bp, Homo sapien
cctggacagcttggcacggtgtgagatcctaga

SEQ ID NO: 678320 - DNA, 33 bp, Homo sapien
cctggacagcttggcatggtgtgagatcctaga

SEQ ID NO: 678321 - DNA, 33 bp, Homo sapien
aggaatgtctgtacacaagccatggacatgact

SEQ ID NO: 678322 - DNA, 33 bp, Homo sapien
aggaatgtctgtacactagccatggacatgact

SEQ ID NO: 678323 - DNA, 33 bp, Homo sapien
acttgcttaggatctcacagtcagtaaatgtgg

SEQ ID NO: 678324 - DNA, 33 bp, Homo sapien
acttgcttaggatctcgcagtcagtaaatgtgg

SEQ ID NO: 678325 - DNA, 33 bp, Homo sapien
agtcttcactggaaacacttgctggtcagccgc

SEQ ID NO: 678326 - DNA, 33 bp, Homo sapien
agtcttcactggaaacgcttgctggtcagccgc

SEQ ID NO: 678327 - DNA, 33 bp, Homo sapien
gatcctaacagcaacaaaacttcaatcttttat

SEQ ID NO: 678328 - DNA, 33 bp, Homo sapien
gatcctaacagcaacagaacttcaatcttttat

SEQ ID NO: 678329 - DNA, 33 bp, Homo sapien
gtactacagaggacaaacagagcaatttaccct

SEQ ID NO: 678330 - DNA, 33 bp, Homo sapien
gtactacagaggacaagcagagcaatttaccct

SEQ ID NO: 678331 - DNA, 33 bp, Homo sapien
agtccagataaaacaacgaatcagaacagccac

SEQ ID NO: 678332 - DNA, 33 bp, Homo sapien
agtccagataaaacaatgaatcagaacagccac

SEQ ID NO: 678333 - DNA, 33 bp, Homo sapien
tgccagcgtggccacactggttgtttatggatg

SEQ ID NO: 678334 - DNA, 33 bp, Homo sapien
tgccagcgtggccacattggttgtttatggatg

SEQ ID NO: 678335 - DNA, 33 bp, Homo sapien
ggcagaggcctatcaaagttctaattccagtcc

SEQ ID NO: 678336 - DNA, 33 bp, Homo sapien
ggcagaggcctatcaaggttctaattccagtcc

SEQ ID NO: 678337 - DNA, 33 bp, Homo sapien
gtatggctgaatgtaccgggtttaacagcaacg

SEQ ID NO: 678338 - DNA, 33 bp, Homo sapien
gtatggctgaatgtactgggtttaacagcaacg

SEQ ID NO: 678339 - DNA, 33 bp, Homo sapien
ttgagatcaccatgaaacagaatttctcacatg

SEQ ID NO: 678340 - DNA, 33 bp, Homo sapien
ttgagatcaccatgaagcagaatttctcacatg

SEQ ID NO: 678341 - DNA, 33 bp, Homo sapien
ctttatcctgatggaacagtatctgtcacttag

SEQ ID NO: 678342 - DNA, 33 bp, Homo sapien
ctttatcctgatggaatagtatctgtcacttag

SEQ ID NO: 678343 - DNA, 33 bp, Homo sapien
gctgcaagtcctttgagctagtaattctgcttc

SEQ ID NO: 678344 - DNA, 33 bp, Homo sapien
gctgcaagtcctttgatctagtaattctgcttc

SEQ ID NO: 678345 - DNA, 33 bp, Homo sapien
gtttgtatgcgttccacgagtagtctgaagctg

SEQ ID NO: 678346 - DNA, 33 bp, Homo sapien
gtttgtatgcgttccatgagtagtctgaagctg

SEQ ID NO: 678347 - DNA, 33 bp, Homo sapien
acattttcaataggaaagtgcgagtaactccaa

SEQ ID NO: 678348 - DNA, 33 bp, Homo sapien
acattttcaataggaaggtgcgagtaactccaa

SEQ ID NO: 678349 - DNA, 33 bp, Homo sapien
aatggggagtaactctcacacttctgtgctgat

SEQ ID NO: 678350 - DNA, 33 bp, Homo sapien
aatggggagtaactcttacacttctgtgctgat

SEQ ID NO: 678351 - DNA, 33 bp, Homo sapien
attgtaaactaagataacattgccagatctcag

SEQ ID NO: 678352 - DNA, 33 bp, Homo sapien
attgtaaactaagatagcattgccagatctcag

SEQ ID NO: 678353 - DNA, 33 bp, Homo sapien
tgtcgtcgagtccaacccacattcctcacattg

SEQ ID NO: 678354 - DNA, 33 bp, Homo sapien
tgtcgtcgagtccaacgcacattcctcacattg

SEQ ID NO: 678355 - DNA, 33 bp, Homo sapien
tgtcaataaactgaaacttaccagatcactgca

SEQ ID NO: 678356 - DNA, 33 bp, Homo sapien
tgtcaataaactgaaatttaccagatcactgca

SEQ ID NO: 678357 - DNA, 33 bp, Homo sapien
agacatacatggaaacaacttaccatgcctgcg

SEQ ID NO: 678358 - DNA, 33 bp, Homo sapien
agacatacatggaaacgacttaccatgcctgcg

SEQ ID NO: 678359 - DNA, 33 bp, Homo sapien
ccctgtggacaaagtacaggctgaactcaaagt

SEQ ID NO: 678360 - DNA, 33 bp, Homo sapien
ccctgtggacaaagtataggctgaactcaaagt

SEQ ID NO: 678361 - DNA, 33 bp, Homo sapien
ttgtagacagtgaggaatcattaggaatggatg

SEQ ID NO: 678362 - DNA, 33 bp, Homo sapien
ttgtagacagtgaggactcattaggaatggatg

SEQ ID NO: 678363 - DNA, 33 bp, Homo sapien
tatattgaattctggtcaattttgaataactaa

SEQ ID NO: 678364 - DNA, 33 bp, Homo sapien
tatattgaattctggttaattttgaataactaa

SEQ ID NO: 678365 - DNA, 33 bp, Homo sapien
tttctgaaacagaaccactccaatagaaataag

SEQ ID NO: 678366 - DNA, 33 bp, Homo sapien
tttctgaaacagaaccgctccaatagaaataag

SEQ ID NO: 678367 - DNA, 33 bp, Homo sapien
ccatctctacaaaaaaatcaagtaattagccag

SEQ ID NO: 678368 - DNA, 33 bp, Homo sapien
ccatctctacaaaaaactcaagtaattagccag

SEQ ID NO: 678369 - DNA, 33 bp, Homo sapien
aagggcgtttttcctccctaagacattacgaaa

SEQ ID NO: 678370 - DNA, 33 bp, Homo sapien
aagggcgtttttcctctctaagacattacgaaa

SEQ ID NO: 678371 - DNA, 33 bp, Homo sapien
gctcaagcataaggtaagaccaacaattgtgga

SEQ ID NO: 678372 - DNA, 33 bp, Homo sapien
gctcaagcataaggtacgaccaacaattgtgga

SEQ ID NO: 678373 - DNA, 33 bp, Homo sapien
aaacacatggacacaaaaacatcactaaaagct

SEQ ID NO: 678374 - DNA, 33 bp, Homo sapien
aaacacatggacacaagaacatcactaaaagct

SEQ ID NO: 678375 - DNA, 33 bp, Homo sapien
atctcagaattgttaacgtgaatatatctggat

SEQ ID NO: 678376 - DNA, 33 bp, Homo sapien
atctcagaattgttaatgtgaatatatctggat

SEQ ID NO: 678377 - DNA, 33 bp, Homo sapien
atttaagaaattagcacccttcaggtagttaaa

SEQ ID NO: 678378 - DNA, 33 bp, Homo sapien
atttaagaaattagcatccttcaggtagttaaa

SEQ ID NO: 678379 - DNA, 33 bp, Homo sapien
tgacatgtgcaaagtacctacttacggcaagtt

SEQ ID NO: 678380 - DNA, 33 bp, Homo sapien
tgacatgtgcaaagtatctacttacggcaagtt

SEQ ID NO: 678381 - DNA, 33 bp, Homo sapien
tggtgttgtgaatacaaactaaacactagctgt

SEQ ID NO: 678382 - DNA, 33 bp, Homo sapien
tggtgttgtgaatacagactaaacactagctgt

SEQ ID NO: 678383 - DNA, 33 bp, Homo sapien
ctgtatgttcatcgcaatattattcgcaatagc

SEQ ID NO: 678384 - DNA, 33 bp, Homo sapien
ctgtatgttcatcgcagtattattcgcaatagc

SEQ ID NO: 678385 - DNA, 33 bp, Homo sapien
tttctctatatcctcaacaatactcaattctgt

SEQ ID NO: 678386 - DNA, 33 bp, Homo sapien
tttctctatatcctcaccaatactcaattctgt

SEQ ID NO: 678387 - DNA, 33 bp, Homo sapien
tacagagcgaactgggcaaaattcagaatggtt

SEQ ID NO: 678388 - DNA, 33 bp, Homo sapien
tacagagcgaactgggtaaaattcagaatggtt

SEQ ID NO: 678389 - DNA, 33 bp, Homo sapien
aacaaccaggatgcctcagaaacagcactcact

SEQ ID NO: 678390 - DNA, 33 bp, Homo sapien
aacaaccaggatgccttagaaacagcactcact

SEQ ID NO: 678391 - DNA, 33 bp, Homo sapien
tgtataaaagggcataacttaactaccctcatc

SEQ ID NO: 678392 - DNA, 33 bp, Homo sapien
tgtataaaagggcataccttaactaccctcatc

SEQ ID NO: 678393 - DNA, 33 bp, Homo sapien
cacagattgctccattcaatgctaaccagcttc

SEQ ID NO: 678394 - DNA, 33 bp, Homo sapien
cacagattgctccatttaatgctaaccagcttc

SEQ ID NO: 678395 - DNA, 33 bp, Homo sapien
accataagcaacctgaagtgatttggggttggt

SEQ ID NO: 678396 - DNA, 33 bp, Homo sapien
accataagcaacctgaggtgatttggggttggt

SEQ ID NO: 678397 - DNA, 33 bp, Homo sapien
ctctgttggtggttaccacaagaaagtctactc

SEQ ID NO: 678398 - DNA, 33 bp, Homo sapien
ctctgttggtggttactacaagaaagtctactc

SEQ ID NO: 678399 - DNA, 33 bp, Homo sapien
aggtccacggtgagtacattttctctatgctcc

SEQ ID NO: 678400 - DNA, 33 bp, Homo sapien
aggtccacggtgagtatattttctctatgctcc

SEQ ID NO: 678401 - DNA, 33 bp, Homo sapien
ctccatctctaagtgccgaactcatccctgttc

SEQ ID NO: 678402 - DNA, 33 bp, Homo sapien
ctccatctctaagtgctgaactcatccctgttc

SEQ ID NO: 678403 - DNA, 33 bp, Homo sapien
taattctgggtagatacgggattcaagagattg

SEQ ID NO: 678404 - DNA, 33 bp, Homo sapien
taattctgggtagatatgggattcaagagattg

SEQ ID NO: 678405 - DNA, 33 bp, Homo sapien
ggtataaagtttttgaaaggcaatttggcaata

SEQ ID NO: 678406 - DNA, 33 bp, Homo sapien
ggtataaagtttttgagaggcaatttggcaata

SEQ ID NO: 678407 - DNA, 33 bp, Homo sapien
cctgtcaccggaccacaatttatgcctttctat

SEQ ID NO: 678408 - DNA, 33 bp, Homo sapien
cctgtcaccggaccacgatttatgcctttctat

SEQ ID NO: 678409 - DNA, 33 bp, Homo sapien
aatattttatgagagaggccacataacacacag

SEQ ID NO: 678410 - DNA, 33 bp, Homo sapien
aatattttatgagagatgccacataacacacag

SEQ ID NO: 678411 - DNA, 33 bp, Homo sapien
acataattttcatttacaacaatccacttgcaa

SEQ ID NO: 678412 - DNA, 33 bp, Homo sapien
acataattttcatttagaacaatccacttgcaa

SEQ ID NO: 678413 - DNA, 33 bp, Homo sapien
aaaccaattaggaaaaagtgggtatatgtaaaa

SEQ ID NO: 678414 - DNA, 33 bp, Homo sapien
aaaccaattaggaaaaggtgggtatatgtaaaa

SEQ ID NO: 678415 - DNA, 33 bp, Homo sapien
cttgctgtgtcacaaacagacagggtggaagga

SEQ ID NO: 678416 - DNA, 33 bp, Homo sapien
cttgctgtgtcacaaatagacagggtggaagga

SEQ ID NO: 678417 - DNA, 33 bp, Homo sapien
actataggtcaaaggacactgtgaacaagcttg

SEQ ID NO: 678418 - DNA, 33 bp, Homo sapien
actataggtcaaaggagactgtgaacaagcttg

SEQ ID NO: 678419 - DNA, 33 bp, Homo sapien
gattataaaggtaataggtgctcatagaatgat

SEQ ID NO: 678420 - DNA, 33 bp, Homo sapien
gattataaaggtaatatgtgctcatagaatgat

SEQ ID NO: 678421 - DNA, 33 bp, Homo sapien
cccacagcctggggtaaggtaagccctgaaacc

SEQ ID NO: 678422 - DNA, 33 bp, Homo sapien
cccacagcctggggtagggtaagccctgaaacc

SEQ ID NO: 678423 - DNA, 33 bp, Homo sapien
catcagctgaatgagaagactacactatagcac

SEQ ID NO: 678424 - DNA, 33 bp, Homo sapien
catcagctgaatgagaggactacactatagcac

SEQ ID NO: 678425 - DNA, 33 bp, Homo sapien
gatgggagtctctacaatgcagtcaaggttact

SEQ ID NO: 678426 - DNA, 33 bp, Homo sapien
gatgggagtctctacagtgcagtcaaggttact

SEQ ID NO: 678427 - DNA, 33 bp, Homo sapien
tgaatggacactcttcactgactgaacttgggt

SEQ ID NO: 678428 - DNA, 33 bp, Homo sapien
tgaatggacactcttcgctgactgaacttgggt

SEQ ID NO: 678429 - DNA, 33 bp, Homo sapien
ttccgcaaactctggcaaacagtctaaaatgac

SEQ ID NO: 678430 - DNA, 33 bp, Homo sapien
ttccgcaaactctggccaacagtctaaaatgac

SEQ ID NO: 678431 - DNA, 33 bp, Homo sapien
tctgaaattccagatacgtaactgaggttcaga

SEQ ID NO: 678432 - DNA, 33 bp, Homo sapien
tctgaaattccagatatgtaactgaggttcaga

SEQ ID NO: 678433 - DNA, 33 bp, Homo sapien
ggcaagtttaagaaacactatattgtgccttcc

SEQ ID NO: 678434 - DNA, 33 bp, Homo sapien
ggcaagtttaagaaacgctatattgtgccttcc

SEQ ID NO: 678435 - DNA, 33 bp, Homo sapien
tgagaacagaaaagcaaattagacgtggtcctt

SEQ ID NO: 678436 - DNA, 33 bp, Homo sapien
tgagaacagaaaagcacattagacgtggtcctt

SEQ ID NO: 678437 - DNA, 33 bp, Homo sapien
ccactatctatctaggccagatattttccactg

SEQ ID NO: 678438 - DNA, 33 bp, Homo sapien
ccactatctatctaggtcagatattttccactg

SEQ ID NO: 678439 - DNA, 33 bp, Homo sapien
ttcttcctggattgacagcagctagatcctgtg

SEQ ID NO: 678440 - DNA, 33 bp, Homo sapien
ttcttcctggattgacggcagctagatcctgtg

SEQ ID NO: 678441 - DNA, 33 bp, Homo sapien
taaatcttctgagtaacgctgtgggttgattat

SEQ ID NO: 678442 - DNA, 33 bp, Homo sapien
taaatcttctgagtaatgctgtgggttgattat

SEQ ID NO: 678443 - DNA, 33 bp, Homo sapien
attcaaattaggatccagataaaatccaagtgc

SEQ ID NO: 678444 - DNA, 33 bp, Homo sapien
attcaaattaggatccggataaaatccaagtgc

SEQ ID NO: 678445 - DNA, 33 bp, Homo sapien
acagagtctatttgaacgaccagtatattgaat

SEQ ID NO: 678446 - DNA, 33 bp, Homo sapien
acagagtctatttgaaggaccagtatattgaat

SEQ ID NO: 678447 - DNA, 33 bp, Homo sapien
tatctagccataggaacaagcaaaattgtgatc

SEQ ID NO: 678448 - DNA, 33 bp, Homo sapien
tatctagccataggaataagcaaaattgtgatc

SEQ ID NO: 678449 - DNA, 33 bp, Homo sapien
actgttctaaaaagcagctggggaagtacgcac

SEQ ID NO: 678450 - DNA, 33 bp, Homo sapien
actgttctaaaaagcatctggggaagtacgcac

SEQ ID NO: 678451 - DNA, 33 bp, Homo sapien
gcacctttctgccaacaatggcctcacctgaca

SEQ ID NO: 678452 - DNA, 33 bp, Homo sapien
gcacctttctgccaacgatggcctcacctgaca

SEQ ID NO: 678453 - DNA, 33 bp, Homo sapien
gcacccagaaagtgcaaatataaaatgttcttc

SEQ ID NO: 678454 - DNA, 33 bp, Homo sapien
gcacccagaaagtgcagatataaaatgttcttc

SEQ ID NO: 678455 - DNA, 33 bp, Homo sapien
cttcctccttaccacacctgaagaacattttat

SEQ ID NO: 678456 - DNA, 33 bp, Homo sapien
cttcctccttaccacatctgaagaacattttat

SEQ ID NO: 678457 - DNA, 33 bp, Homo sapien
tctgcagtctggttcacagtaggcaatcagcat

SEQ ID NO: 678458 - DNA, 33 bp, Homo sapien
tctgcagtctggttcatagtaggcaatcagcat

SEQ ID NO: 678459 - DNA, 33 bp, Homo sapien
gctttaaattactccaagaaaaatcgaagcagt

SEQ ID NO: 678460 - DNA, 33 bp, Homo sapien
gctttaaattactccaggaaaaatcgaagcagt

SEQ ID NO: 678461 - DNA, 33 bp, Homo sapien
gttctataaagcaatacgcacacaaagaagaaa

SEQ ID NO: 678462 - DNA, 33 bp, Homo sapien
gttctataaagcaatatgcacacaaagaagaaa

SEQ ID NO: 678463 - DNA, 33 bp, Homo sapien
tcaaaggatcatataaattaatgtaacctttct

SEQ ID NO: 678464 - DNA, 33 bp, Homo sapien
tcaaaggatcatataagttaatgtaacctttct

SEQ ID NO: 678465 - DNA, 33 bp, Homo sapien
ctggcttggaggtaaacagggagtaattaggtc

SEQ ID NO: 678466 - DNA, 33 bp, Homo sapien
ctggcttggaggtaaatagggagtaattaggtc

SEQ ID NO: 678467 - DNA, 33 bp, Homo sapien
gccagcaattaaacaacctgttcttcccaggtt

SEQ ID NO: 678468 - DNA, 33 bp, Homo sapien
gccagcaattaaacaatctgttcttcccaggtt

SEQ ID NO: 678469 - DNA, 33 bp, Homo sapien
tttaaagaaatcaacacggaataggctaaagcc

SEQ ID NO: 678470 - DNA, 33 bp, Homo sapien
tttaaagaaatcaacatggaataggctaaagcc

SEQ ID NO: 678471 - DNA, 33 bp, Homo sapien
ggggaaatagcaatagacgggcactccagaaag

SEQ ID NO: 678472 - DNA, 33 bp, Homo sapien
ggggaaatagcaatagccgggcactccagaaag

SEQ ID NO: 678473 - DNA, 33 bp, Homo sapien
tagtctgggttagatacgctgatagcttgcaca

SEQ ID NO: 678474 - DNA, 33 bp, Homo sapien
tagtctgggttagatatgctgatagcttgcaca

SEQ ID NO: 678475 - DNA, 33 bp, Homo sapien
tgctgatgctcatcacaaataattgcattaatg

SEQ ID NO: 678476 - DNA, 33 bp, Homo sapien
tgctgatgctcatcacgaataattgcattaatg

SEQ ID NO: 678477 - DNA, 33 bp, Homo sapien
gatttactaagcagaacgcgcagatctgcaaca

SEQ ID NO: 678478 - DNA, 33 bp, Homo sapien
gatttactaagcagaaggcgcagatctgcaaca

SEQ ID NO: 678479 - DNA, 33 bp, Homo sapien
tgcggctggaagagaaacctgtagtctgctgca

SEQ ID NO: 678480 - DNA, 33 bp, Homo sapien
tgcggctggaagagaagcctgtagtctgctgca

SEQ ID NO: 678481 - DNA, 33 bp, Homo sapien
agtctgctgcaagaaaagggctgtgcctcagga

SEQ ID NO: 678482 - DNA, 33 bp, Homo sapien
agtctgctgcaagaaacgggctgtgcctcagga

SEQ ID NO: 678483 - DNA, 33 bp, Homo sapien
aaatagaaactccagaaggaaagctctccaaat

SEQ ID NO: 678484 - DNA, 33 bp, Homo sapien
aaatagaaactccagagggaaagctctccaaat

SEQ ID NO: 678485 - DNA, 33 bp, Homo sapien
ccaagcgcaagactgacgtgtgctactactacc

SEQ ID NO: 678486 - DNA, 33 bp, Homo sapien
ccaagcgcaagactgatgtgtgctactactacc

SEQ ID NO: 678487 - DNA, 33 bp, Homo sapien
gctccgcgcctccagaaaaaagttgctcccgag

SEQ ID NO: 678488 - DNA, 33 bp, Homo sapien
gctccgcgcctccagagaaaagttgctcccgag

SEQ ID NO: 678489 - DNA, 33 bp, Homo sapien
gagcccaaacattagacccccttgagcacatgg

SEQ ID NO: 678490 - DNA, 33 bp, Homo sapien
gagcccaaacattagatccccttgagcacatgg

SEQ ID NO: 678491 - DNA, 33 bp, Homo sapien
ggtgttccaaggaggacagttgttgtctcccaa

SEQ ID NO: 678492 - DNA, 33 bp, Homo sapien
ggtgttccaaggaggatagttgttgtctcccaa

SEQ ID NO: 678493 - DNA, 33 bp, Homo sapien
cagatgtaattagtgaagatgatgaggtcatat

SEQ ID NO: 678494 - DNA, 33 bp, Homo sapien
cagatgtaattagtgacgatgatgaggtcatat

SEQ ID NO: 678495 - DNA, 33 bp, Homo sapien
cagacagaccaggggtgaaaccgaaggcagcat

SEQ ID NO: 678496 - DNA, 33 bp, Homo sapien
cagacagaccaggggttaaaccgaaggcagcat

SEQ ID NO: 678497 - DNA, 33 bp, Homo sapien
gggtagcttgaagttacggctcttcccatcagt

SEQ ID NO: 678498 - DNA, 33 bp, Homo sapien
gggtagcttgaagttatggctcttcccatcagt

SEQ ID NO: 678499 - DNA, 33 bp, Homo sapien
cctgttccatccaataacattcttgtctctttt

SEQ ID NO: 678500 - DNA, 33 bp, Homo sapien
cctgttccatccaataccattcttgtctctttt

SEQ ID NO: 678501 - DNA, 33 bp, Homo sapien
gagccctcgctgtggcactaaagatcctctttc

SEQ ID NO: 678502 - DNA, 33 bp, Homo sapien
gagccctcgctgtggctctaaagatcctctttc

SEQ ID NO: 678503 - DNA, 33 bp, Homo sapien
agccataagacagaaaccaagataatagcttgg

SEQ ID NO: 678504 - DNA, 33 bp, Homo sapien
agccataagacagaaagcaagataatagcttgg

SEQ ID NO: 678505 - DNA, 33 bp, Homo sapien
aaccctaatatccaaacttcagacacttctgag

SEQ ID NO: 678506 - DNA, 33 bp, Homo sapien
aaccctaatatccaaatttcagacacttctgag

SEQ ID NO: 678507 - DNA, 33 bp, Homo sapien
actgcagcaggccttccatttatgatcacttaa

SEQ ID NO: 678508 - DNA, 33 bp, Homo sapien
actgcagcaggccttctatttatgatcacttaa

SEQ ID NO: 678509 - DNA, 33 bp, Homo sapien
atacctacatcccagaaaacaaaacacatggga

SEQ ID NO: 678510 - DNA, 33 bp, Homo sapien
atacctacatcccagacaacaaaacacatggga

SEQ ID NO: 678511 - DNA, 33 bp, Homo sapien
ggtggcagagtgaaaaaaaaagtgctttagagt

SEQ ID NO: 678512 - DNA, 33 bp, Homo sapien
ggtggcagagtgaaaacaaaagtgctttagagt

SEQ ID NO: 678513 - DNA, 33 bp, Homo sapien
tgcccagcctataaaagcacttcttgagacatc

SEQ ID NO: 678514 - DNA, 33 bp, Homo sapien
tgcccagcctataaaatcacttcttgagacatc

SEQ ID NO: 678515 - DNA, 33 bp, Homo sapien
aaagccatcttttcccagaagctttcctgattc

SEQ ID NO: 678516 - DNA, 33 bp, Homo sapien
aaagccatcttttcccggaagctttcctgattc

SEQ ID NO: 678517 - DNA, 33 bp, Homo sapien
gcataatccgggaacccgagttgattctgctct

SEQ ID NO: 678518 - DNA, 33 bp, Homo sapien
gcataatccgggaacctgagttgattctgctct

SEQ ID NO: 678519 - DNA, 33 bp, Homo sapien
cccagctccctgaccactccgccaccaggcttt

SEQ ID NO: 678520 - DNA, 33 bp, Homo sapien
cccagctccctgaccattccgccaccaggcttt

SEQ ID NO: 678521 - DNA, 33 bp, Homo sapien
tcacattgactacataatatcctttccacaact

SEQ ID NO: 678522 - DNA, 33 bp, Homo sapien
tcacattgactacatagtatcctttccacaact

SEQ ID NO: 678523 - DNA, 33 bp, Homo sapien
tcaaccacagtaagacagtctgataatgtacag

SEQ ID NO: 678524 - DNA, 33 bp, Homo sapien
tcaaccacagtaagacggtctgataatgtacag

SEQ ID NO: 678525 - DNA, 33 bp, Homo sapien
taaaacatgatcacaaactttaagaaattgacc

SEQ ID NO: 678526 - DNA, 33 bp, Homo sapien
taaaacatgatcacaagctttaagaaattgacc

SEQ ID NO: 678527 - DNA, 33 bp, Homo sapien
tctacaatttagagaaggccaattcagacatct

SEQ ID NO: 678528 - DNA, 33 bp, Homo sapien
tctacaatttagagaatgccaattcagacatct

SEQ ID NO: 678529 - DNA, 33 bp, Homo sapien
ggtgctcctcttctgcacttctataatcagctt

SEQ ID NO: 678530 - DNA, 33 bp, Homo sapien
ggtgctcctcttctgcgcttctataatcagctt

SEQ ID NO: 678531 - DNA, 33 bp, Homo sapien
aataactgtgcaatagaatccatgctgcaatgg

SEQ ID NO: 678532 - DNA, 33 bp, Homo sapien
aataactgtgcaataggatccatgctgcaatgg

SEQ ID NO: 678533 - DNA, 33 bp, Homo sapien
gatggtctgaagctcaatctctggtcaggtccc

SEQ ID NO: 678534 - DNA, 33 bp, Homo sapien
gatggtctgaagctcagtctctggtcaggtccc

SEQ ID NO: 678535 - DNA, 33 bp, Homo sapien
tacttgaagtagggacagcgttttgtttttatt

SEQ ID NO: 678536 - DNA, 33 bp, Homo sapien
tacttgaagtagggacggcgttttgtttttatt

SEQ ID NO: 678537 - DNA, 33 bp, Homo sapien
caagttggccatctccactggtgaagggttgtt

SEQ ID NO: 678538 - DNA, 33 bp, Homo sapien
caagttggccatctccgctggtgaagggttgtt

SEQ ID NO: 678539 - DNA, 33 bp, Homo sapien
gtttgggttgatgaaaaggttctggagataaac

SEQ ID NO: 678540 - DNA, 33 bp, Homo sapien
gtttgggttgatgaaacggttctggagataaac

SEQ ID NO: 678541 - DNA, 33 bp, Homo sapien
ggtgggatccgatgcaaaagtggtctagatagc

SEQ ID NO: 678542 - DNA, 33 bp, Homo sapien
ggtgggatccgatgcagaagtggtctagatagc

SEQ ID NO: 678543 - DNA, 33 bp, Homo sapien
caaccccatgttcaatcagtcgctgagctgctg

SEQ ID NO: 678544 - DNA, 33 bp, Homo sapien
caaccccatgttcaattagtcgctgagctgctg

SEQ ID NO: 678545 - DNA, 33 bp, Homo sapien
aataagagcttatttacgctttgcactttatgg

SEQ ID NO: 678546 - DNA, 33 bp, Homo sapien
aataagagcttatttatgctttgcactttatgg

SEQ ID NO: 678547 - DNA, 33 bp, Homo sapien
cccgctccctgccaagcctggtcaagaggatca

SEQ ID NO: 678548 - DNA, 33 bp, Homo sapien
cccgctccctgccaagtctggtcaagaggatca

SEQ ID NO: 678549 - DNA, 33 bp, Homo sapien
aaggatgaatggtagacaactccatagcctttc

SEQ ID NO: 678550 - DNA, 33 bp, Homo sapien
aaggatgaatggtagataactccatagcctttc

SEQ ID NO: 678551 - DNA, 33 bp, Homo sapien
gtacatctgcatgagacagatccatcagatagc

SEQ ID NO: 678552 - DNA, 33 bp, Homo sapien
gtacatctgcatgagatagatccatcagatagc

SEQ ID NO: 678553 - DNA, 33 bp, Homo sapien
ccctggaattcctgaaatgggcggtcaggtgga

SEQ ID NO: 678554 - DNA, 33 bp, Homo sapien
ccctggaattcctgaactgggcggtcaggtgga

SEQ ID NO: 678555 - DNA, 33 bp, Homo sapien
gattagcaagcaaagcagaaacagtttatgcag

SEQ ID NO: 678556 - DNA, 33 bp, Homo sapien
gattagcaagcaaagcggaaacagtttatgcag

SEQ ID NO: 678557 - DNA, 33 bp, Homo sapien
agcactggcgggatccaagcagagcatgcaagg

SEQ ID NO: 678558 - DNA, 33 bp, Homo sapien
agcactggcgggatccgagcagagcatgcaagg

SEQ ID NO: 678559 - DNA, 33 bp, Homo sapien
ggcctgatgaaggtgaataaaacatggaactgg

SEQ ID NO: 678560 - DNA, 33 bp, Homo sapien
ggcctgatgaaggtgagtaaaacatggaactgg

SEQ ID NO: 678561 - DNA, 33 bp, Homo sapien
aaactgagtcaggagaaagcacgtgccttggtc

SEQ ID NO: 678562 - DNA, 33 bp, Homo sapien
aaactgagtcaggagagagcacgtgccttggtc

SEQ ID NO: 678563 - DNA, 33 bp, Homo sapien
caagagccattgtaaactataaaagagagaatg

SEQ ID NO: 678564 - DNA, 33 bp, Homo sapien
caagagccattgtaaattataaaagagagaatg

SEQ ID NO: 678565 - DNA, 33 bp, Homo sapien
aaaacagacaaacgccactttgtgttgagagat

SEQ ID NO: 678566 - DNA, 33 bp, Homo sapien
aaaacagacaaacgccgctttgtgttgagagat

SEQ ID NO: 678567 - DNA, 33 bp, Homo sapien
gtcaggaccactcttaggaatattcacagctcc

SEQ ID NO: 678568 - DNA, 33 bp, Homo sapien
gtcaggaccactcttatgaatattcacagctcc

SEQ ID NO: 678569 - DNA, 33 bp, Homo sapien
ctgactcagttttccaaatagccaaagctttac

SEQ ID NO: 678570 - DNA, 33 bp, Homo sapien
ctgactcagttttccagatagccaaagctttac

SEQ ID NO: 678571 - DNA, 33 bp, Homo sapien
aggcacatctgataagaagaagccaagaggctt

SEQ ID NO: 678572 - DNA, 33 bp, Homo sapien
aggcacatctgataaggagaagccaagaggctt

SEQ ID NO: 678573 - DNA, 33 bp, Homo sapien
tgccttaaatcttctacgtcttaacaaatgatt

SEQ ID NO: 678574 - DNA, 33 bp, Homo sapien
tgccttaaatcttctaggtcttaacaaatgatt

SEQ ID NO: 678575 - DNA, 33 bp, Homo sapien
tctcaaagttttatcccattagccgttcaggct

SEQ ID NO: 678576 - DNA, 33 bp, Homo sapien
tctcaaagttttatcctattagccgttcaggct

SEQ ID NO: 678577 - DNA, 33 bp, Homo sapien
agtatactgcttttaacgcatcgtatacttgtt

SEQ ID NO: 678578 - DNA, 33 bp, Homo sapien
agtatactgcttttaatgcatcgtatacttgtt

SEQ ID NO: 678579 - DNA, 33 bp, Homo sapien
tccagttgacagggcacgtttaccttctctatt

SEQ ID NO: 678580 - DNA, 33 bp, Homo sapien
tccagttgacagggcatgtttaccttctctatt

SEQ ID NO: 678581 - DNA, 33 bp, Homo sapien
tactgattccacttagaccctcatgtcattcaa

SEQ ID NO: 678582 - DNA, 33 bp, Homo sapien
tactgattccacttagtccctcatgtcattcaa

SEQ ID NO: 678583 - DNA, 33 bp, Homo sapien
tgactaaattctcctcacaggcctacataggag

SEQ ID NO: 678584 - DNA, 33 bp, Homo sapien
tgactaaattctcctcccaggcctacataggag

SEQ ID NO: 678585 - DNA, 33 bp, Homo sapien
aaaccacaacttaagacgagatgcgtccccaga

SEQ ID NO: 678586 - DNA, 33 bp, Homo sapien
aaaccacaacttaagatgagatgcgtccccaga

SEQ ID NO: 678587 - DNA, 33 bp, Homo sapien
tacatctggtaagtgacggattaaggtctcaaa

SEQ ID NO: 678588 - DNA, 33 bp, Homo sapien
tacatctggtaagtgatggattaaggtctcaaa

SEQ ID NO: 678589 - DNA, 33 bp, Homo sapien
actaagtctactctccagagcaatgtttctgta

SEQ ID NO: 678590 - DNA, 33 bp, Homo sapien
actaagtctactctccggagcaatgtttctgta

SEQ ID NO: 678591 - DNA, 33 bp, Homo sapien
ggaagaccaaaagttcaaggttgcacattgggt

SEQ ID NO: 678592 - DNA, 33 bp, Homo sapien
ggaagaccaaaagttccaggttgcacattgggt

SEQ ID NO: 678593 - DNA, 33 bp, Homo sapien
ttactgcacctttcacaacacatttgtacgaag

SEQ ID NO: 678594 - DNA, 33 bp, Homo sapien
ttactgcacctttcacgacacatttgtacgaag

SEQ ID NO: 678595 - DNA, 33 bp, Homo sapien
agatcagatgatatcaaaagcacggaaacacct

SEQ ID NO: 678596 - DNA, 33 bp, Homo sapien
agatcagatgatatcagaagcacggaaacacct

SEQ ID NO: 678597 - DNA, 33 bp, Homo sapien
attcatagacttcctaatactgagccataacct

SEQ ID NO: 678598 - DNA, 33 bp, Homo sapien
attcatagacttcctagtactgagccataacct

SEQ ID NO: 678599 - DNA, 33 bp, Homo sapien
attatatctcaataaaactattacacatttttt

SEQ ID NO: 678600 - DNA, 33 bp, Homo sapien
attatatctcaataaagctattacacatttttt

SEQ ID NO: 678601 - DNA, 33 bp, Homo sapien
tactatggaaatggcacgaggaagtctccagaa

SEQ ID NO: 678602 - DNA, 33 bp, Homo sapien
tactatggaaatggcatgaggaagtctccagaa

SEQ ID NO: 678603 - DNA, 33 bp, Homo sapien
agcctcttttgcctcagctgactggttcttggc

SEQ ID NO: 678604 - DNA, 33 bp, Homo sapien
agcctcttttgcctcatctgactggttcttggc

SEQ ID NO: 678605 - DNA, 33 bp, Homo sapien
acactggtttcctagccatcctctgaaaacagt

SEQ ID NO: 678606 - DNA, 33 bp, Homo sapien
acactggtttcctagctatcctctgaaaacagt

SEQ ID NO: 678607 - DNA, 33 bp, Homo sapien
cttatccacccggacaatatgaaataatctaac

SEQ ID NO: 678608 - DNA, 33 bp, Homo sapien
cttatccacccggacagtatgaaataatctaac

SEQ ID NO: 678609 - DNA, 33 bp, Homo sapien
gtctgctatcagcaaccggcatagacattctgt

SEQ ID NO: 678610 - DNA, 33 bp, Homo sapien
gtctgctatcagcaactggcatagacattctgt

SEQ ID NO: 678611 - DNA, 33 bp, Homo sapien
ggattgtcataaactacacatggtatcaattcc

SEQ ID NO: 678612 - DNA, 33 bp, Homo sapien
ggattgtcataaactatacatggtatcaattcc

SEQ ID NO: 678613 - DNA, 33 bp, Homo sapien
gaggtagtcagtgaaaccaccagaaaatggtac

SEQ ID NO: 678614 - DNA, 33 bp, Homo sapien
gaggtagtcagtgaaagcaccagaaaatggtac

SEQ ID NO: 678615 - DNA, 33 bp, Homo sapien
aggatactttgatatcggaagaaatcctctacc

SEQ ID NO: 678616 - DNA, 33 bp, Homo sapien
aggatactttgatatctgaagaaatcctctacc

SEQ ID NO: 678617 - DNA, 33 bp, Homo sapien
gatggggcagagaacaagaaaggaggttcagga

SEQ ID NO: 678618 - DNA, 33 bp, Homo sapien
gatggggcagagaacatgaaaggaggttcagga

SEQ ID NO: 678619 - DNA, 33 bp, Homo sapien
ctgaggccaaaaggcaaggctgatttccactta

SEQ ID NO: 678620 - DNA, 33 bp, Homo sapien
ctgaggccaaaaggcacggctgatttccactta

SEQ ID NO: 678621 - DNA, 33 bp, Homo sapien
gtctttccagttaaaacggtgtattgaggccgg

SEQ ID NO: 678622 - DNA, 33 bp, Homo sapien
gtctttccagttaaaatggtgtattgaggccgg

SEQ ID NO: 678623 - DNA, 33 bp, Homo sapien
ttgttttgtcccttcaaaattatcaaagaagga

SEQ ID NO: 678624 - DNA, 33 bp, Homo sapien
ttgttttgtcccttcagaattatcaaagaagga

SEQ ID NO: 678625 - DNA, 33 bp, Homo sapien
actaagaactgaggaccgcacacttccttgtaa

SEQ ID NO: 678626 - DNA, 33 bp, Homo sapien
actaagaactgaggactgcacacttccttgtaa

SEQ ID NO: 678627 - DNA, 33 bp, Homo sapien
agtggctcctgccatcagaagaacattattcta

SEQ ID NO: 678628 - DNA, 33 bp, Homo sapien
agtggctcctgccatcggaagaacattattcta

SEQ ID NO: 678629 - DNA, 33 bp, Homo sapien
gcaaggattttcccaacgaacctgaagcccagg

SEQ ID NO: 678630 - DNA, 33 bp, Homo sapien
gcaaggattttcccaatgaacctgaagcccagg

SEQ ID NO: 678631 - DNA, 33 bp, Homo sapien
tgcggtggttgcttcaactaggccttgtctttg

SEQ ID NO: 678632 - DNA, 33 bp, Homo sapien
tgcggtggttgcttcagctaggccttgtctttg

SEQ ID NO: 678633 - DNA, 33 bp, Homo sapien
tgtttggaaatccataactgaacacaacttaga

SEQ ID NO: 678634 - DNA, 33 bp, Homo sapien
tgtttggaaatccatagctgaacacaacttaga

SEQ ID NO: 678635 - DNA, 33 bp, Homo sapien
tattacactgttgtcacagagattgcaaaattt

SEQ ID NO: 678636 - DNA, 33 bp, Homo sapien
tattacactgttgtcagagagattgcaaaattt

SEQ ID NO: 678637 - DNA, 33 bp, Homo sapien
aatagtgctgtggtaaacatatgtatgcatgta

SEQ ID NO: 678638 - DNA, 33 bp, Homo sapien
aatagtgctgtggtaatcatatgtatgcatgta

SEQ ID NO: 678639 - DNA, 33 bp, Homo sapien
caagtcttctttttcaatctgtatgcttggcat

SEQ ID NO: 678640 - DNA, 33 bp, Homo sapien
caagtcttctttttcagtctgtatgcttggcat

SEQ ID NO: 678641 - DNA, 33 bp, Homo sapien
gagttataaggcataactgtaaagtctttttat

SEQ ID NO: 678642 - DNA, 33 bp, Homo sapien
gagttataaggcataattgtaaagtctttttat

SEQ ID NO: 678643 - DNA, 33 bp, Homo sapien
ccctcttactgcctgcaacagatctgtcactaa

SEQ ID NO: 678644 - DNA, 33 bp, Homo sapien
ccctcttactgcctgcgacagatctgtcactaa

SEQ ID NO: 678645 - DNA, 33 bp, Homo sapien
cctattctgaagataaaatgacagatttattga

SEQ ID NO: 678646 - DNA, 33 bp, Homo sapien
cctattctgaagataacatgacagatttattga

SEQ ID NO: 678647 - DNA, 33 bp, Homo sapien
gcataagcaggatggcaactgaagggcagaatt

SEQ ID NO: 678648 - DNA, 33 bp, Homo sapien
gcataagcaggatggcgactgaagggcagaatt

SEQ ID NO: 678649 - DNA, 33 bp, Homo sapien
ttcagatcataacaaaaaatggatcattgtttt

SEQ ID NO: 678650 - DNA, 33 bp, Homo sapien
ttcagatcataacaaataatggatcattgtttt

SEQ ID NO: 678651 - DNA, 33 bp, Homo sapien
ctgtcagcaccaactgcaatacctgacactcag

SEQ ID NO: 678652 - DNA, 33 bp, Homo sapien
ctgtcagcaccaactgtaatacctgacactcag

SEQ ID NO: 678653 - DNA, 33 bp, Homo sapien
cttagcctgatttactcagatggatgttggaga

SEQ ID NO: 678654 - DNA, 33 bp, Homo sapien
cttagcctgatttactgagatggatgttggaga

SEQ ID NO: 678655 - DNA, 33 bp, Homo sapien
gaaaaggaattatcacactgattgtgctatccg

SEQ ID NO: 678656 - DNA, 33 bp, Homo sapien
gaaaaggaattatcacgctgattgtgctatccg

SEQ ID NO: 678657 - DNA, 33 bp, Homo sapien
tgggtgctttgtgagaatacagtctctgcagat

SEQ ID NO: 678658 - DNA, 33 bp, Homo sapien
tgggtgctttgtgagagtacagtctctgcagat

SEQ ID NO: 678659 - DNA, 33 bp, Homo sapien
tagaacaaagaggcaactgagaagaggaagctg

SEQ ID NO: 678660 - DNA, 33 bp, Homo sapien
tagaacaaagaggcaagtgagaagaggaagctg

SEQ ID NO: 678661 - DNA, 33 bp, Homo sapien
ctccaatgagctccctcaagaaatgtgaggttg

SEQ ID NO: 678662 - DNA, 33 bp, Homo sapien
ctccaatgagctcccttaagaaatgtgaggttg

SEQ ID NO: 678663 - DNA, 33 bp, Homo sapien
cttcttccttggctgacgataaggtttaattag

SEQ ID NO: 678664 - DNA, 33 bp, Homo sapien
cttcttccttggctgatgataaggtttaattag

SEQ ID NO: 678665 - DNA, 33 bp, Homo sapien
gtgtttcaactgtgctaaaagctagaagcatca

SEQ ID NO: 678666 - DNA, 33 bp, Homo sapien
gtgtttcaactgtgctgaaagctagaagcatca

SEQ ID NO: 678667 - DNA, 33 bp, Homo sapien
gtcatttagtattcgcaaagcaccttcacttcg

SEQ ID NO: 678668 - DNA, 33 bp, Homo sapien
gtcatttagtattcgccaagcaccttcacttcg

SEQ ID NO: 678669 - DNA, 33 bp, Homo sapien
ccctgaaccacagagccgaaaggaaatacaaaa

SEQ ID NO: 678670 - DNA, 33 bp, Homo sapien
ccctgaaccacagagctgaaaggaaatacaaaa

SEQ ID NO: 678671 - DNA, 33 bp, Homo sapien
ctaacctcacatcttacgacatttaatctttgt

SEQ ID NO: 678672 - DNA, 33 bp, Homo sapien
ctaacctcacatcttatgacatttaatctttgt

SEQ ID NO: 678673 - DNA, 33 bp, Homo sapien
tgattctctaatagcactaacctcacatgttat

SEQ ID NO: 678674 - DNA, 33 bp, Homo sapien
tgattctctaatagcattaacctcacatgttat

SEQ ID NO: 678675 - DNA, 33 bp, Homo sapien
agtactgtaaagaagcagagtttgaacagttgt

SEQ ID NO: 678676 - DNA, 33 bp, Homo sapien
agtactgtaaagaagccgagtttgaacagttgt

SEQ ID NO: 678677 - DNA, 33 bp, Homo sapien
tatatatgagtgaactaaggccaagagagggtc

SEQ ID NO: 678678 - DNA, 33 bp, Homo sapien
tatatatgagtgaactgaggccaagagagggtc

SEQ ID NO: 678679 - DNA, 33 bp, Homo sapien
catgttgttgcaagtacctgagtcaacatcacc

SEQ ID NO: 678680 - DNA, 33 bp, Homo sapien
catgttgttgcaagtagctgagtcaacatcacc

SEQ ID NO: 678681 - DNA, 33 bp, Homo sapien
aaagccttattttgtaccagtaacatggagata

SEQ ID NO: 678682 - DNA, 33 bp, Homo sapien
aaagccttattttgtatcagtaacatggagata

SEQ ID NO: 678683 - DNA, 33 bp, Homo sapien
gcagtaatggctcttacgtgaggcttggggttt

SEQ ID NO: 678684 - DNA, 33 bp, Homo sapien
gcagtaatggctcttatgtgaggcttggggttt

SEQ ID NO: 678685 - DNA, 33 bp, Homo sapien
caggtattgagatttacggtcaactgactttct

SEQ ID NO: 678686 - DNA, 33 bp, Homo sapien
caggtattgagatttatggtcaactgactttct

SEQ ID NO: 678687 - DNA, 33 bp, Homo sapien
ttcctaaactaacctacagattcgaggcaattc

SEQ ID NO: 678688 - DNA, 33 bp, Homo sapien
ttcctaaactaacctatagattcgaggcaattc

SEQ ID NO: 678689 - DNA, 33 bp, Homo sapien
gaagggcatccaagtcaataaagaggaagtcaa

SEQ ID NO: 678690 - DNA, 33 bp, Homo sapien
gaagggcatccaagtcgataaagaggaagtcaa

SEQ ID NO: 678691 - DNA, 33 bp, Homo sapien; identical to SEQ ID NO: 678689

SEQ ID NO: 678692 - DNA, 33 bp, Homo sapien; identical to SEQ ID NO: 678690

SEQ ID NO: 678693 - DNA, 33 bp, Homo sapien
cccaggtctgtaaacaatcagcaatgaacacat

SEQ ID NO: 678694 - DNA, 33 bp, Homo sapien
cccaggtctgtaaacattcagcaatgaacacat

SEQ ID NO: 678695 - DNA, 33 bp, Homo sapien
aaagtctcctctttcaataacaaatcttcctcg

SEQ ID NO: 678696 - DNA, 33 bp, Homo sapien
aaagtctcctctttcagtaacaaatcttcctcg

SEQ ID NO: 678697 - DNA, 33 bp, Homo sapien
gtaaagttagaatgaaccatgtgtgacaaaagg

SEQ ID NO: 678698 - DNA, 33 bp, Homo sapien
gtaaagttagaatgaatcatgtgtgacaaaagg

SEQ ID NO: 678699 - DNA, 33 bp, Homo sapien
aaggactagcaaacacagtatctaaaaacctct

SEQ ID NO: 678700 - DNA, 33 bp, Homo sapien
aaggactagcaaacacggtatctaaaaacctct

SEQ ID NO: 678701 - DNA, 33 bp, Homo sapien
aatttacaaacatgcacatggtagacaatttcc

SEQ ID NO: 678702 - DNA, 33 bp, Homo sapien
aatttacaaacatgcatatggtagacaatttcc

SEQ ID NO: 678703 - DNA, 33 bp, Homo sapien
acatcattaaggaaaaataaaatgcagtttatc

SEQ ID NO: 678704 - DNA, 33 bp, Homo sapien
acatcattaaggaaaactaaaatgcagtttatc

SEQ ID NO: 678705 - DNA, 33 bp, Homo sapien
aatgacaaaactgtcccggaagatccacaccgt

SEQ ID NO: 678706 - DNA, 33 bp, Homo sapien
aatgacaaaactgtcctggaagatccacaccgt

SEQ ID NO: 678707 - DNA, 33 bp, Homo sapien
tgaagcattcggtcaacgtttagtaggtacgag

SEQ ID NO: 678708 - DNA, 33 bp, Homo sapien
tgaagcattcggtcaatgtttagtaggtacgag

SEQ ID NO: 678709 - DNA, 33 bp, Homo sapien
tgtctagctctcctaaacttttatcttgctggc

SEQ ID NO: 678710 - DNA, 33 bp, Homo sapien
tgtctagctctcctaatcttttatcttgctggc

SEQ ID NO: 678711 - DNA, 33 bp, Homo sapien
tgtaatttgggattgacgggaactgactcacat

SEQ ID NO: 678712 - DNA, 33 bp, Homo sapien
tgtaatttgggattgatgggaactgactcacat

SEQ ID NO: 678713 - DNA, 33 bp, Homo sapien
gcgtagaatgtgagtgaacagagatcttttgta

SEQ ID NO: 678714 - DNA, 33 bp, Homo sapien
gcgtagaatgtgagtgcacagagatcttttgta

SEQ ID NO: 678715 - DNA, 33 bp, Homo sapien
actggttcctggagtacaaccaagtccctgaaa

SEQ ID NO: 678716 - DNA, 33 bp, Homo sapien
actggttcctggagtataaccaagtccctgaaa

SEQ ID NO: 678717 - DNA, 33 bp, Homo sapien
cagtgttgtagtgaggaaaccttcacagaggaa

SEQ ID NO: 678718 - DNA, 33 bp, Homo sapien
cagtgttgtagtgaggcaaccttcacagaggaa

SEQ ID NO: 678719 - DNA, 33 bp, Homo sapien
taaggtaggtggcataaatacctgagaggtggg

SEQ ID NO: 678720 - DNA, 33 bp, Homo sapien
taaggtaggtggcatagatacctgagaggtggg

SEQ ID NO: 678721 - DNA, 33 bp, Homo sapien
gaaagactaggaattcacttcatccaacagtcc

SEQ ID NO: 678722 - DNA, 33 bp, Homo sapien
gaaagactaggaattcgcttcatccaacagtcc

SEQ ID NO: 678723 - DNA, 33 bp, Homo sapien
ctattacattccagacactgttctatgtactgt

SEQ ID NO: 678724 - DNA, 33 bp, Homo sapien
ctattacattccagacgctgttctatgtactgt

SEQ ID NO: 678725 - DNA, 33 bp, Homo sapien
ctgtcctggtctgcaactgggcttggagtgttt

SEQ ID NO: 678726 - DNA, 33 bp, Homo sapien
ctgtcctggtctgcaattgggcttggagtgttt

SEQ ID NO: 678727 - DNA, 33 bp, Homo sapien
ctgtagtatagattagccaagaggattggtgga

SEQ ID NO: 678728 - DNA, 33 bp, Homo sapien
ctgtagtatagattaggcaagaggattggtgga

SEQ ID NO: 678729 - DNA, 33 bp, Homo sapien
cttgatcccaaaaagaactttcatcatggaact

SEQ ID NO: 678730 - DNA, 33 bp, Homo sapien
cttgatcccaaaaagacctttcatcatggaact

SEQ ID NO: 678731 - DNA, 33 bp, Homo sapien
ttcactagtagcactcacttaccacccataaca

SEQ ID NO: 678732 - DNA, 33 bp, Homo sapien
ttcactagtagcactcgcttaccacccataaca

SEQ ID NO: 678733 - DNA, 33 bp, Homo sapien
tgatcttgggaataaaccacctaagtatcactt

SEQ ID NO: 678734 - DNA, 33 bp, Homo sapien
tgatcttgggaataaatcacctaagtatcactt

SEQ ID NO: 678735 - DNA, 33 bp, Homo sapien
cagactttctccataaagtagcaatacggctgt

SEQ ID NO: 678736 - DNA, 33 bp, Homo sapien
cagactttctccataaggtagcaatacggctgt

SEQ ID NO: 678737 - DNA, 33 bp, Homo sapien
cagatttttaaaatcaagtagcgctaagtggta

SEQ ID NO: 678738 - DNA, 33 bp, Homo sapien
cagatttttaaaatcaggtagcgctaagtggta

SEQ ID NO: 678739 - DNA, 33 bp, Homo sapien
ggttgacatctagaagacccctccatctaaaac

SEQ ID NO: 678740 - DNA, 33 bp, Homo sapien
ggttgacatctagaagccccctccatctaaaac

SEQ ID NO: 678741 - DNA, 33 bp, Homo sapien
catcatgcaccttcaaaaggctgcataaccaac

SEQ ID NO: 678742 - DNA, 33 bp, Homo sapien
catcatgcaccttcaagaggctgcataaccaac

SEQ ID NO: 678743 - DNA, 33 bp, Homo sapien
aatctcatcttcactccatggtcctccaggaat

SEQ ID NO: 678744 - DNA, 33 bp, Homo sapien
aatctcatcttcactctatggtcctccaggaat

SEQ ID NO: 678745 - DNA, 33 bp, Homo sapien
aattttaatgggcttaactttactggatcttgg

SEQ ID NO: 678746 - DNA, 33 bp, Homo sapien
aattttaatgggcttagctttactggatcttgg

SEQ ID NO: 678747 - DNA, 33 bp, Homo sapien
aatctagtaccctaaagacttcattctgcctca

SEQ ID NO: 678748 - DNA, 33 bp, Homo sapien
aatctagtaccctaaatacttcattctgcctca

SEQ ID NO: 678749 - DNA, 33 bp, Homo sapien
gtgaaaccttgcaaagaactttatcttcactta

SEQ ID NO: 678750 - DNA, 33 bp, Homo sapien
gtgaaaccttgcaaagtactttatcttcactta

SEQ ID NO: 678751 - DNA, 33 bp, Homo sapien
catgtttgcttgtgtaaatccatccaaagtttg

SEQ ID NO: 678752 - DNA, 33 bp, Homo sapien
catgtttgcttgtgtagatccatccaaagtttg

SEQ ID NO: 678753 - DNA, 33 bp, Homo sapien
gttttgttgtctctcaggaagcctgtcaaagtg

SEQ ID NO: 678754 - DNA, 33 bp, Homo sapien
gttttgttgtctctcatgaagcctgtcaaagtg

SEQ ID NO: 678755 - DNA, 33 bp, Homo sapien
agagacaactaagacacggatcccgcagaatgg

SEQ ID NO: 678756 - DNA, 33 bp, Homo sapien
agagacaactaagacatggatcccgcagaatgg

SEQ ID NO: 678757 - DNA, 33 bp, Homo sapien
gttagttttctgcatgcacacacatatatgttt

SEQ ID NO: 678758 - DNA, 33 bp, Homo sapien
gttagttttctgcatgtacacacatatatgttt

SEQ ID NO: 678759 - DNA, 33 bp, Homo sapien
ggaattagcaagaatcaatttaactagttggct

SEQ ID NO: 678760 - DNA, 33 bp, Homo sapien
ggaattagcaagaatccatttaactagttggct

SEQ ID NO: 678761 - DNA, 33 bp, Homo sapien
gaccatgaccctgacaatgactatgaccatggc

SEQ ID NO: 678762 - DNA, 33 bp, Homo sapien
gaccatgaccctgacagtgactatgaccatggc

SEQ ID NO: 678763 - DNA, 33 bp, Homo sapien
cagtggagtgtgtaaacgctcttcagactgtgg

SEQ ID NO: 678764 - DNA, 33 bp, Homo sapien
cagtggagtgtgtaaatgctcttcagactgtgg

SEQ ID NO: 678765 - DNA, 33 bp, Homo sapien
ctcttacaagtgggaactgagacccaggaagca

SEQ ID NO: 678766 - DNA, 33 bp, Homo sapien
ctcttacaagtgggaattgagacccaggaagca

SEQ ID NO: 678767 - DNA, 33 bp, Homo sapien
gaaaattacaaagatgaaaagatgggcatgata

SEQ ID NO: 678768 - DNA, 33 bp, Homo sapien
gaaaattacaaagatggaaagatgggcatgata

SEQ ID NO: 678769 - DNA, 33 bp, Homo sapien
aaatttcccactgtcagtaaggtagaagtgaga

SEQ ID NO: 678770 - DNA, 33 bp, Homo sapien
aaatttcccactgtcattaaggtagaagtgaga

SEQ ID NO: 678771 - DNA, 33 bp, Homo sapien
catagctgaaggtggaccagtttcacttatgca

SEQ ID NO: 678772 - DNA, 33 bp, Homo sapien
catagctgaaggtggatcagtttcacttatgca

SEQ ID NO: 678773 - DNA, 33 bp, Homo sapien
aggccctattatgggcaaggcactgttcaagac

SEQ ID NO: 678774 - DNA, 33 bp, Homo sapien
aggccctattatgggcgaggcactgttcaagac

SEQ ID NO: 678775 - DNA, 33 bp, Homo sapien
ctagagctagaaagcacaggataatgttataat

SEQ ID NO: 678776 - DNA, 33 bp, Homo sapien
ctagagctagaaagcataggataatgttataat

SEQ ID NO: 678777 - DNA, 33 bp, Homo sapien
taatttgtcatggaaacggatgaatctggacct

SEQ ID NO: 678778 - DNA, 33 bp, Homo sapien
taatttgtcatggaaatggatgaatctggacct

SEQ ID NO: 678779 - DNA, 33 bp, Homo sapien
ttcccattcattcttgaaattctctgaacacat

SEQ ID NO: 678780 - DNA, 33 bp, Homo sapien
ttcccattcattcttgcaattctctgaacacat

SEQ ID NO: 678781 - DNA, 33 bp, Homo sapien
ggggagtctggaaagacgggttaactggctatg

SEQ ID NO: 678782 - DNA, 33 bp, Homo sapien
ggggagtctggaaagatgggttaactggctatg

SEQ ID NO: 678783 - DNA, 33 bp, Homo sapien
tttttgtaaggatccaatagagaagataagaaa

SEQ ID NO: 678784 - DNA, 33 bp, Homo sapien
tttttgtaaggatccagtagagaagataagaaa

SEQ ID NO: 678785 - DNA, 33 bp, Homo sapien
tcagatgtttagacccaacctcagcaacagtga

SEQ ID NO: 678786 - DNA, 33 bp, Homo sapien
tcagatgtttagacccgacctcagcaacagtga

SEQ ID NO: 678787 - DNA, 33 bp, Homo sapien
cacctgagaagtaaaaaggcacacaaagccaaa

SEQ ID NO: 678788 - DNA, 33 bp, Homo sapien
cacctgagaagtaaaagggcacacaaagccaaa

SEQ ID NO: 678789 - DNA, 33 bp, Homo sapien
gcaggaagttcagaaaacatcaataggtttagg

SEQ ID NO: 678790 - DNA, 33 bp, Homo sapien
gcaggaagttcagaaatcatcaataggtttagg

SEQ ID NO: 678791 - DNA, 33 bp, Homo sapien
aatttctgttagtaaagttgggtaagtgggttc

SEQ ID NO: 678792 - DNA, 33 bp, Homo sapien
aatttctgttagtaaatttgggtaagtgggttc

SEQ ID NO: 678793 - DNA, 33 bp, Homo sapien
ccactgagtaggaaacaaggatttttccaaagc

SEQ ID NO: 678794 - DNA, 33 bp, Homo sapien
ccactgagtaggaaacgaggatttttccaaagc

SEQ ID NO: 678795 - DNA, 33 bp, Homo sapien
gcatctctgagtcaggaaatcatgaagctttct

SEQ ID NO: 678796 - DNA, 33 bp, Homo sapien
gcatctctgagtcagggaatcatgaagctttct

SEQ ID NO: 678797 - DNA, 33 bp, Homo sapien
aaggcatccaggcctcacctctttcatgtgcag

SEQ ID NO: 678798 - DNA, 33 bp, Homo sapien
aaggcatccaggcctcgcctctttcatgtgcag

SEQ ID NO: 678799 - DNA, 33 bp, Homo sapien
ttggagtgactacctgccaatataaggagtaga

SEQ ID NO: 678800 - DNA, 33 bp, Homo sapien
ttggagtgactacctggcaatataaggagtaga

SEQ ID NO: 678801 - DNA, 33 bp, Homo sapien
ggtctcttgactcccaatacagacactttctcc

SEQ ID NO: 678802 - DNA, 33 bp, Homo sapien
ggtctcttgactcccagtacagacactttctcc

SEQ ID NO: 678803 - DNA, 33 bp, Homo sapien
aacctgtgacattttacggactgctaagcattt

SEQ ID NO: 678804 - DNA, 33 bp, Homo sapien
aacctgtgacattttatggactgctaagcattt

SEQ ID NO: 678805 - DNA, 33 bp, Homo sapien
gctggcagacaaggaaacatgaagagggagact

SEQ ID NO: 678806 - DNA, 33 bp, Homo sapien
gctggcagacaaggaaccatgaagagggagact

SEQ ID NO: 678807 - DNA, 33 bp, Homo sapien
gtgcttaacattttcagaatcactgaggaggaa

SEQ ID NO: 678808 - DNA, 33 bp, Homo sapien
gtgcttaacattttcataatcactgaggaggaa

SEQ ID NO: 678809 - DNA, 33 bp, Homo sapien
ttcatattgattggaaagccaagggaggaaaga

SEQ ID NO: 678810 - DNA, 33 bp, Homo sapien
ttcatattgattggaaggccaagggaggaaaga

SEQ ID NO: 678811 - DNA, 33 bp, Homo sapien
ttgtggctgtccaggacattgcttctgtgcctg

SEQ ID NO: 678812 - DNA, 33 bp, Homo sapien
ttgtggctgtccaggatattgcttctgtgcctg

SEQ ID NO: 678813 - DNA, 33 bp, Homo sapien
gcccagaactgaggacaattccctgatccacag

SEQ ID NO: 678814 - DNA, 33 bp, Homo sapien
gcccagaactgaggacgattccctgatccacag

SEQ ID NO: 678815 - DNA, 33 bp, Homo sapien
agtgatgttcttacaaaatgattttgacatatc

SEQ ID NO: 678816 - DNA, 33 bp, Homo sapien
agtgatgttcttacaatatgattttgacatatc

SEQ ID NO: 678817 - DNA, 33 bp, Homo sapien
tcttacctgtaaaaaacggcacggccagccatt

SEQ ID NO: 678818 - DNA, 33 bp, Homo sapien
tcttacctgtaaaaaatggcacggccagccatt

SEQ ID NO: 678819 - DNA, 33 bp, Homo sapien
cctccttcaaactgtaaccttttctgagaaatc

SEQ ID NO: 678820 - DNA, 33 bp, Homo sapien
cctccttcaaactgtacccttttctgagaaatc

SEQ ID NO: 678821 - DNA, 33 bp, Homo sapien
tggcaaagggacaagcccagctttagtcatgct

SEQ ID NO: 678822 - DNA, 33 bp, Homo sapien
tggcaaagggacaagctcagctttagtcatgct

SEQ ID NO: 678823 - DNA, 33 bp, Homo sapien
tagaattcatgaggtcaccctgttgcttctatc

SEQ ID NO: 678824 - DNA, 33 bp, Homo sapien
tagaattcatgaggtcgccctgttgcttctatc

SEQ ID NO: 678825 - DNA, 33 bp, Homo sapien
gacctgcaagagcaaaaaactaggcaatctgga

SEQ ID NO: 678826 - DNA, 33 bp, Homo sapien
gacctgcaagagcaaagaactaggcaatctgga

SEQ ID NO: 678827 - DNA, 33 bp, Homo sapien
agtgtcatctgaacccagctcatgagtcaaact

SEQ ID NO: 678828 - DNA, 33 bp, Homo sapien
agtgtcatctgaacccggctcatgagtcaaact

SEQ ID NO: 678829 - DNA, 33 bp, Homo sapien
agcaggtggtcaataaatgtttatgtattcaga

SEQ ID NO: 678830 - DNA, 33 bp, Homo sapien
agcaggtggtcaataactgtttatgtattcaga

SEQ ID NO: 678831 - DNA, 33 bp, Homo sapien
ttgccgtgaattctaaactgcttagctccttgc

SEQ ID NO: 678832 - DNA, 33 bp, Homo sapien
ttgccgtgaattctaatctgcttagctccttgc

SEQ ID NO: 678833 - DNA, 33 bp, Homo sapien
acaaagaggatatggaactttcatttaatagtt

SEQ ID NO: 678834 - DNA, 33 bp, Homo sapien
acaaagaggatatggagctttcatttaatagtt

SEQ ID NO: 678835 - DNA, 33 bp, Homo sapien
taaaccattcgttgagaccgcagagttctaatt

SEQ ID NO: 678836 - DNA, 33 bp, Homo sapien
taaaccattcgttgaggccgcagagttctaatt

SEQ ID NO: 678837 - DNA, 33 bp, Homo sapien
gatgggaggaacattcactttccaactgggtac

SEQ ID NO: 678838 - DNA, 33 bp, Homo sapien
gatgggaggaacattcgctttccaactgggtac

SEQ ID NO: 678839 - DNA, 33 bp, Homo sapien
ttaacggcaaagctccagaatgaggtctgcaga

SEQ ID NO: 678840 - DNA, 33 bp, Homo sapien
ttaacggcaaagctccggaatgaggtctgcaga

SEQ ID NO: 678841 - DNA, 33 bp, Homo sapien
agctagcgttgtgcaaatgtccgttccctgctt

SEQ ID NO: 678842 - DNA, 33 bp, Homo sapien
agctagcgttgtgcaagtgtccgttccctgctt

SEQ ID NO: 678843 - DNA, 33 bp, Homo sapien
ctattagaggtgtggaatcagtgcctatagatt

SEQ ID NO: 678844 - DNA, 33 bp, Homo sapien
ctattagaggtgtggagtcagtgcctatagatt

SEQ ID NO: 678845 - DNA, 33 bp, Homo sapien
tgctcaacagcctcaaccagaatgccaaaccag

SEQ ID NO: 678846 - DNA, 33 bp, Homo sapien
tgctcaacagcctcaatcagaatgccaaaccag

SEQ ID NO: 678847 - DNA, 33 bp, Homo sapien
gtgacataaaaggtgaataagatagcccctata

SEQ ID NO: 678848 - DNA, 33 bp, Homo sapien
gtgacataaaaggtgagtaagatagcccctata

SEQ ID NO: 678849 - DNA, 33 bp, Homo sapien
ttctcaactgtagaaccggtaagccgaaagatg

SEQ ID NO: 678850 - DNA, 33 bp, Homo sapien
ttctcaactgtagaactggtaagccgaaagatg

SEQ ID NO: 678851 - DNA, 33 bp, Homo sapien
aaattggtggcagagccgattcccatcaccagt

SEQ ID NO: 678852 - DNA, 33 bp, Homo sapien
aaattggtggcagagctgattcccatcaccagt

SEQ ID NO: 678853 - DNA, 33 bp, Homo sapien
catacaggaaaaatcaatgaatgagtatatgca

SEQ ID NO: 678854 - DNA, 33 bp, Homo sapien
catacaggaaaaatcagtgaatgagtatatgca

SEQ ID NO: 678855 - DNA, 33 bp, Homo sapien
acttaatcattcttcacccaacattctttcttc

SEQ ID NO: 678856 - DNA, 33 bp, Homo sapien
acttaatcattcttcatccaacattctttcttc

SEQ ID NO: 678857 - DNA, 33 bp, Homo sapien
taaaaaaagaataaagccgagaaaagcgttcat

SEQ ID NO: 678858 - DNA, 33 bp, Homo sapien
taaaaaaagaataaaggcgagaaaagcgttcat

SEQ ID NO: 678859 - DNA, 33 bp, Homo sapien
taaaaggcttcaattacggctttttatttcttg

SEQ ID NO: 678860 - DNA, 33 bp, Homo sapien
taaaaggcttcaattagggctttttatttcttg

SEQ ID NO: 678861 - DNA, 33 bp, Homo sapien
attcaatgagtctaaccgtctagtcccattttt

SEQ ID NO: 678862 - DNA, 33 bp, Homo sapien
attcaatgagtctaactgtctagtcccattttt

SEQ ID NO: 678863 - DNA, 33 bp, Homo sapien
ccaaagaattcagttcagaaatcacaaatacag

SEQ ID NO: 678864 - DNA, 33 bp, Homo sapien
ccaaagaattcagttcggaaatcacaaatacag

SEQ ID NO: 678865 - DNA, 33 bp, Homo sapien
atgcattaaatatgagaaacacaccaataaata

SEQ ID NO: 678866 - DNA, 33 bp, Homo sapien
atgcattaaatatgaggaacacaccaataaata

SEQ ID NO: 678867 - DNA, 33 bp, Homo sapien
aaagcacctaagcgaaataatatatcccatctt

SEQ ID NO: 678868 - DNA, 33 bp, Homo sapien
aaagcacctaagcgaagtaatatatcccatctt

SEQ ID NO: 678869 - DNA, 33 bp, Homo sapien
aggagacaagggcttacagagtagctctgaggt

SEQ ID NO: 678870 - DNA, 33 bp, Homo sapien
aggagacaagggcttatagagtagctctgaggt

SEQ ID NO: 678871 - DNA, 33 bp, Homo sapien
cttgttctctgcctcaatgaatagtgattgtgc

SEQ ID NO: 678872 - DNA, 33 bp, Homo sapien
cttgttctctgcctcagtgaatagtgattgtgc

SEQ ID NO: 678873 - DNA, 33 bp, Homo sapien
tggttaattctcttcaactcttggatcagtttt

SEQ ID NO: 678874 - DNA, 33 bp, Homo sapien
tggttaattctcttcacctcttggatcagtttt

SEQ ID NO: 678875 - DNA, 33 bp, Homo sapien
ggaagacgggtcaggagtcctactttaattgtc

SEQ ID NO: 678876 - DNA, 33 bp, Homo sapien
ggaagacgggtcaggattcctactttaattgtc

SEQ ID NO: 678877 - DNA, 33 bp, Homo sapien
gagaccaagtggcagacaagaggtgttgcctaa

SEQ ID NO: 678878 - DNA, 33 bp, Homo sapien
gagaccaagtggcagataagaggtgttgcctaa

SEQ ID NO: 678879 - DNA, 33 bp, Homo sapien
gggatgacgtttgctcagtcttatttcatgcct

SEQ ID NO: 678880 - DNA, 33 bp, Homo sapien
gggatgacgtttgctcggtcttatttcatgcct

SEQ ID NO: 678881 - DNA, 33 bp, Homo sapien
atatgatatttatcaacaagctgatgtgaaaac

SEQ ID NO: 678882 - DNA, 33 bp, Homo sapien
atatgatatttatcaataagctgatgtgaaaac

SEQ ID NO: 678883 - DNA, 33 bp, Homo sapien
cccatgccaagcaggcagaaaggtagcaaatag

SEQ ID NO: 678884 - DNA, 33 bp, Homo sapien
cccatgccaagcaggcggaaaggtagcaaatag

SEQ ID NO: 678885 - DNA, 33 bp, Homo sapien
ttcacatttgaacgaaagtgtagctggatatga

SEQ ID NO: 678886 - DNA, 33 bp, Homo sapien
ttcacatttgaacgaaggtgtagctggatatga

SEQ ID NO: 678887 - DNA, 33 bp, Homo sapien
taatgcaaaaaatggcaaaatctgaatagagtg

SEQ ID NO: 678888 - DNA, 33 bp, Homo sapien
taatgcaaaaaatggcgaaatctgaatagagtg

SEQ ID NO: 678889 - DNA, 33 bp, Homo sapien
attggtaagaatttgccatttggaaaaaaatag

SEQ ID NO: 678890 - DNA, 33 bp, Homo sapien
attggtaagaatttgctatttggaaaaaaatag

SEQ ID NO: 678891 - DNA, 33 bp, Homo sapien
tatttaggggtagaaaccatcattccataccat

SEQ ID NO: 678892 - DNA, 33 bp, Homo sapien
tatttaggggtagaaatcatcattccataccat

SEQ ID NO: 678893 - DNA, 33 bp, Homo sapien
tacagaattttgagacaggtaaatttagttctc

SEQ ID NO: 678894 - DNA, 33 bp, Homo sapien
tacagaattttgagaccggtaaatttagttctc

SEQ ID NO: 678895 - DNA, 33 bp, Homo sapien
aggagcttttacagaccaaacactattaccatg

SEQ ID NO: 678896 - DNA, 33 bp, Homo sapien
aggagcttttacagactaaacactattaccatg

SEQ ID NO: 678897 - DNA, 33 bp, Homo sapien
gctgagattctattcagctggtttttttgaact

SEQ ID NO: 678898 - DNA, 33 bp, Homo sapien
gctgagattctattcatctggtttttttgaact

SEQ ID NO: 678899 - DNA, 33 bp, Homo sapien
caggaaactacactcaaaaagttacctatccta

SEQ ID NO: 678900 - DNA, 33 bp, Homo sapien
caggaaactacactcagaaagttacctatccta

SEQ ID NO: 678901 - DNA, 33 bp, Homo sapien
cccatcagcaataaacaaaagttcctccggctc

SEQ ID NO: 678902 - DNA, 33 bp, Homo sapien
cccatcagcaataaacgaaagttcctccggctc

SEQ ID NO: 678903 - DNA, 33 bp, Homo sapien
taatttgtcttgaccccccactttgaatctact

SEQ ID NO: 678904 - DNA, 33 bp, Homo sapien
taatttgtcttgaccctccactttgaatctact

SEQ ID NO: 678905 - DNA, 33 bp, Homo sapien
taagcttgaacttccaatatggaccccaaaata

SEQ ID NO: 678906 - DNA, 33 bp, Homo sapien
taagcttgaacttccagtatggaccccaaaata

SEQ ID NO: 678907 - DNA, 33 bp, Homo sapien
cataagctgtgcagaactagaaaggtcagctcc

SEQ ID NO: 678908 - DNA, 33 bp, Homo sapien
cataagctgtgcagaattagaaaggtcagctcc

SEQ ID NO: 678909 - DNA, 33 bp, Homo sapien
ggtagtaaaggtgctacagagctccctgagatc

SEQ ID NO: 678910 - DNA, 33 bp, Homo sapien
ggtagtaaaggtgctagagagctccctgagatc

SEQ ID NO: 678911 - DNA, 33 bp, Homo sapien
acacatactcacaccaatgaaaaccctcttgat

SEQ ID NO: 678912 - DNA, 33 bp, Homo sapien
acacatactcacaccactgaaaaccctcttgat

SEQ ID NO: 678913 - DNA, 33 bp, Homo sapien
cttcttatctaatccacgacagtgttgtgaggc

SEQ ID NO: 678914 - DNA, 33 bp, Homo sapien
cttcttatctaatccatgacagtgttgtgaggc

SEQ ID NO: 678915 - DNA, 33 bp, Homo sapien
atattcaacttggagaagaaaatgttcactggg

SEQ ID NO: 678916 - DNA, 33 bp, Homo sapien
atattcaacttggagaggaaaatgttcactggg

SEQ ID NO: 678917 - DNA, 33 bp, Homo sapien
ccaggctgcctctggagggagtgagcaccgccc

SEQ ID NO: 678918 - DNA, 33 bp, Homo sapien
ccaggctgcctctggatggagtgagcaccgccc

SEQ ID NO: 678919 - DNA, 33 bp, Homo sapien
tgtttggagcccataggaggaagttcccacaag

SEQ ID NO: 678920 - DNA, 33 bp, Homo sapien
tgtttggagcccatagtaggaagttcccacaag

SEQ ID NO: 678921 - DNA, 33 bp, Homo sapien
tgagtaaatgtatgaaaagactcaagtttcaga

SEQ ID NO: 678922 - DNA, 33 bp, Homo sapien
tgagtaaatgtatgaagagactcaagtttcaga

SEQ ID NO: 678923 - DNA, 33 bp, Homo sapien
tttccaccccatggaccgaagaaccctagatgg

SEQ ID NO: 678924 - DNA, 33 bp, Homo sapien
tttccaccccatggactgaagaaccctagatgg

SEQ ID NO: 678925 - DNA, 33 bp, Homo sapien
gacatagaaggtatacaatgtggaaactatgta

SEQ ID NO: 678926 - DNA, 33 bp, Homo sapien
gacatagaaggtatacgatgtggaaactatgta

SEQ ID NO: 678927 - DNA, 33 bp, Homo sapien
cttaataattctttcacgggacagatagaaatc

SEQ ID NO: 678928 - DNA, 33 bp, Homo sapien
cttaataattctttcatgggacagatagaaatc

SEQ ID NO: 678929 - DNA, 33 bp, Homo sapien
tctgtttttcaagagacagtgattgatttctat

SEQ ID NO: 678930 - DNA, 33 bp, Homo sapien
tctgtttttcaagagagagtgattgatttctat

SEQ ID NO: 678931 - DNA, 33 bp, Homo sapien
aggtcgcaagttgatcaagtgggagaatgagca

SEQ ID NO: 678932 - DNA, 33 bp, Homo sapien
aggtcgcaagttgatctagtgggagaatgagca

SEQ ID NO: 678933 - DNA, 33 bp, Homo sapien
tgtaagctgttattccaagctattataattact

SEQ ID NO: 678934 - DNA, 33 bp, Homo sapien
tgtaagctgttattccgagctattataattact

SEQ ID NO: 678935 - DNA, 33 bp, Homo sapien
tgcacagaaatagttaaaataccaggtagatgg

SEQ ID NO: 678936 - DNA, 33 bp, Homo sapien
tgcacagaaatagttacaataccaggtagatgg

SEQ ID NO: 678937 - DNA, 33 bp, Homo sapien
cctattaaaataaaaacgcttgctgtactttgg

SEQ ID NO: 678938 - DNA, 33 bp, Homo sapien
cctattaaaataaaaatgcttgctgtactttgg

SEQ ID NO: 678939 - DNA, 33 bp, Homo sapien
cagacttgaggtgttacatatctgtttttaggg

SEQ ID NO: 678940 - DNA, 33 bp, Homo sapien
cagacttgaggtgttatatatctgtttttaggg

SEQ ID NO: 678941 - DNA, 33 bp, Homo sapien
ctccaggaacttacaactcattgttgggagacc

SEQ ID NO: 678942 - DNA, 33 bp, Homo sapien
ctccaggaacttacaattcattgttgggagacc

SEQ ID NO: 678943 - DNA, 33 bp, Homo sapien
agtaatctcagacatcactctgggcaacctctg

SEQ ID NO: 678944 - DNA, 33 bp, Homo sapien
agtaatctcagacatcgctctgggcaacctctg

SEQ ID NO: 678945 - DNA, 33 bp, Homo sapien
gatttctagatgcctgaagatggacaggcccag

SEQ ID NO: 678946 - DNA, 33 bp, Homo sapien
gatttctagatgcctggagatggacaggcccag

SEQ ID NO: 678947 - DNA, 33 bp, Homo sapien
tctcccttttatgcaaatcaacatactactgga

SEQ ID NO: 678948 - DNA, 33 bp, Homo sapien
tctcccttttatgcaagtcaacatactactgga

SEQ ID NO: 678949 - DNA, 33 bp, Homo sapien
caagaaggcttgcaaagttcattatagggtcct

SEQ ID NO: 678950 - DNA, 33 bp, Homo sapien
caagaaggcttgcaaatttcattatagggtcct

SEQ ID NO: 678951 - DNA, 33 bp, Homo sapien
ctaacatccttagtaacgttcttttcaaatctg

SEQ ID NO: 678952 - DNA, 33 bp, Homo sapien
ctaacatccttagtaatgttcttttcaaatctg

SEQ ID NO: 678953 - DNA, 33 bp, Homo sapien
accctagccttaaatacggcctcaaagttggtt

SEQ ID NO: 678954 - DNA, 33 bp, Homo sapien
accctagccttaaatatggcctcaaagttggtt

SEQ ID NO: 678955 - DNA, 33 bp, Homo sapien
ggattgattgattacaagaagcgtgtaaatttt

SEQ ID NO: 678956 - DNA, 33 bp, Homo sapien
ggattgattgattacaggaagcgtgtaaatttt

SEQ ID NO: 678957 - DNA, 33 bp, Homo sapien
cgattgtgtggtgaaagcaaaagaaccaggtgt

SEQ ID NO: 678958 - DNA, 33 bp, Homo sapien
cgattgtgtggtgaaatcaaaagaaccaggtgt

SEQ ID NO: 678959 - DNA, 33 bp, Homo sapien
cttttgtttctatccactgaggctgagtaggca

SEQ ID NO: 678960 - DNA, 33 bp, Homo sapien
cttttgtttctatccattgaggctgagtaggca

SEQ ID NO: 678961 - DNA, 33 bp, Homo sapien
ttttcccagtttctacagaacagtctagactcc

SEQ ID NO: 678962 - DNA, 33 bp, Homo sapien
ttttcccagtttctacggaacagtctagactcc

SEQ ID NO: 678963 - DNA, 33 bp, Homo sapien
gtttggtaatgatttaacctattctattgttaa

SEQ ID NO: 678964 - DNA, 33 bp, Homo sapien
gtttggtaatgatttatcctattctattgttaa

SEQ ID NO: 678965 - DNA, 33 bp, Homo sapien
gtccatgagtcccagaacaacctccagtttggt

SEQ ID NO: 678966 - DNA, 33 bp, Homo sapien
gtccatgagtcccagatcaacctccagtttggt

SEQ ID NO: 678967 - DNA, 33 bp, Homo sapien
gaattctttatggtaacagtgtaaagcactgat

SEQ ID NO: 678968 - DNA, 33 bp, Homo sapien
gaattctttatggtaagagtgtaaagcactgat

SEQ ID NO: 678969 - DNA, 33 bp, Homo sapien
gccatttctcatttccaatatgccagagctggg

SEQ ID NO: 678970 - DNA, 33 bp, Homo sapien
gccatttctcatttccgatatgccagagctggg

SEQ ID NO: 678971 - DNA, 33 bp, Homo sapien
gcagctatgaagaatgcaagctgtttcacttct

SEQ ID NO: 678972 - DNA, 33 bp, Homo sapien
gcagctatgaagaatgtaagctgtttcacttct

SEQ ID NO: 678973 - DNA, 33 bp, Homo sapien
cctacagaatgcaaaacacttctcaccacccca

SEQ ID NO: 678974 - DNA, 33 bp, Homo sapien
cctacagaatgcaaaagacttctcaccacccca

SEQ ID NO: 678975 - DNA, 33 bp, Homo sapien
gatctcaagtactacaagggctcaagttattag

SEQ ID NO: 678976 - DNA, 33 bp, Homo sapien
gatctcaagtactacaggggctcaagttattag

SEQ ID NO: 678977 - DNA, 33 bp, Homo sapien
aaaaaccaatacaagcactaaaagacaaagcta

SEQ ID NO: 678978 - DNA, 33 bp, Homo sapien
aaaaaccaatacaagcgctaaaagacaaagcta

SEQ ID NO: 678979 - DNA, 33 bp, Homo sapien
acagaagtgccacagacaacgtaggtcataatt

SEQ ID NO: 678980 - DNA, 33 bp, Homo sapien
acagaagtgccacagataacgtaggtcataatt

SEQ ID NO: 678981 - DNA, 33 bp, Homo sapien
ccctaatctcctaatccagcatgacttcggtac

SEQ ID NO: 678982 - DNA, 33 bp, Homo sapien
ccctaatctcctaatctagcatgacttcggtac

SEQ ID NO: 678983 - DNA, 33 bp, Homo sapien
ctcgtacacatttgtcaaggaacttcactgtgg

SEQ ID NO: 678984 - DNA, 33 bp, Homo sapien
ctcgtacacatttgtcgaggaacttcactgtgg

SEQ ID NO: 678985 - DNA, 33 bp, Homo sapien
aacaggctttctacccaaacattcctcttctca

SEQ ID NO: 678986 - DNA, 33 bp, Homo sapien
aacaggctttctacccgaacattcctcttctca

SEQ ID NO: 678987 - DNA, 33 bp, Homo sapien
tgatttttcaattttcaaaatgatatgataatc

SEQ ID NO: 678988 - DNA, 33 bp, Homo sapien
tgatttttcaattttcgaaatgatatgataatc

SEQ ID NO: 678989 - DNA, 33 bp, Homo sapien
ctggcacatagaagacactgtttaactgggcac

SEQ ID NO: 678990 - DNA, 33 bp, Homo sapien
ctggcacatagaagacgctgtttaactgggcac

SEQ ID NO: 678991 - DNA, 33 bp, Homo sapien
cattctgcaaggaaaaacatgttcaccttcttc

SEQ ID NO: 678992 - DNA, 33 bp, Homo sapien
cattctgcaaggaaaagcatgttcaccttcttc

SEQ ID NO: 678993 - DNA, 33 bp, Homo sapien
aagtgtccaatccatacgttggcatgggaaata

SEQ ID NO: 678994 - DNA, 33 bp, Homo sapien
aagtgtccaatccatatgttggcatgggaaata

SEQ ID NO: 678995 - DNA, 33 bp, Homo sapien
aaggtgctttctacaaacgtttaccaaatgcat

SEQ ID NO: 678996 - DNA, 33 bp, Homo sapien
aaggtgctttctacaaccgtttaccaaatgcat

SEQ ID NO: 678997 - DNA, 33 bp, Homo sapien
tctggaatcataataacaatgaaagtgctatag

SEQ ID NO: 678998 - DNA, 33 bp, Homo sapien
tctggaatcataataagaatgaaagtgctatag

SEQ ID NO: 678999 - DNA, 33 bp, Homo sapien
ctctttgcctcataaagaacagaaagagaaatt

SEQ ID NO: 679000 - DNA, 33 bp, Homo sapien
ctctttgcctcataaataacagaaagagaaatt

SEQ ID NO: 679001 - DNA, 33 bp, Homo sapien
taggcttgcttcagaacgaatggtttccttgta

SEQ ID NO: 679002 - DNA, 33 bp, Homo sapien
taggcttgcttcagaatgaatggtttccttgta

SEQ ID NO: 679003 - DNA, 33 bp, Homo sapien
tttcctactttgggaaaatggaaaatttgataa

SEQ ID NO: 679004 - DNA, 33 bp, Homo sapien
tttcctactttgggaagatggaaaatttgataa

SEQ ID NO: 679005 - DNA, 33 bp, Homo sapien
ggattcagactccatagtagttggttatctctt

SEQ ID NO: 679006 - DNA, 33 bp, Homo sapien
ggattcagactccatattagttggttatctctt

SEQ ID NO: 679007 - DNA, 33 bp, Homo sapien
tgttgtgaggtttaaaaacacaatgcaggcccg

SEQ ID NO: 679008 - DNA, 33 bp, Homo sapien
tgttgtgaggtttaaatacacaatgcaggcccg

SEQ ID NO: 679009 - DNA, 33 bp, Homo sapien
gtgtgaggaaagctaccgacttagtttccactg

SEQ ID NO: 679010 - DNA, 33 bp, Homo sapien
gtgtgaggaaagctactgacttagtttccactg

SEQ ID NO: 679011 - DNA, 33 bp, Homo sapien
catttgcagctcagacgctaagaaggaaataac

SEQ ID NO: 679012 - DNA, 33 bp, Homo sapien
catttgcagctcagactctaagaaggaaataac

SEQ ID NO: 679013 - DNA, 33 bp, Homo sapien
tgatggctgctccctacgacactctccccaacc

SEQ ID NO: 679014 - DNA, 33 bp, Homo sapien
tgatggctgctccctatgacactctccccaacc

SEQ ID NO: 679015 - DNA, 33 bp, Homo sapien
ccctgccctgcaatccagctaccctacttagcc

SEQ ID NO: 679016 - DNA, 33 bp, Homo sapien
ccctgccctgcaatccggctaccctacttagcc

SEQ ID NO: 679017 - DNA, 33 bp, Homo sapien
tcagagataggataagcaggggtctttaaactg

SEQ ID NO: 679018 - DNA, 33 bp, Homo sapien
tcagagataggataaggaggggtctttaaactg

SEQ ID NO: 679019 - DNA, 33 bp, Homo sapien
ctaatgaactaaggtcacggtagcatgaatgtg

SEQ ID NO: 679020 - DNA, 33 bp, Homo sapien
ctaatgaactaaggtcgcggtagcatgaatgtg

SEQ ID NO: 679021 - DNA, 33 bp, Homo sapien
agtggaagagacagaaagaacaggtcctcagtg

SEQ ID NO: 679022 - DNA, 33 bp, Homo sapien
agtggaagagacagaaggaacaggtcctcagtg

SEQ ID NO: 679023 - DNA, 33 bp, Homo sapien
taactaagatcactaaatgagagatggcatggc

SEQ ID NO: 679024 - DNA, 33 bp, Homo sapien
taactaagatcactaagtgagagatggcatggc

SEQ ID NO: 679025 - DNA, 33 bp, Homo sapien
gctgtcttttgcttcggcattatattcctatgc

SEQ ID NO: 679026 - DNA, 33 bp, Homo sapien
gctgtcttttgcttcgtcattatattcctatgc

SEQ ID NO: 679027 - DNA, 33 bp, Homo sapien
tatgccactttctttcccaccaggcaaggtcgt

SEQ ID NO: 679028 - DNA, 33 bp, Homo sapien
tatgccactttctttctcaccaggcaaggtcgt

SEQ ID NO: 679029 - DNA, 33 bp, Homo sapien
actggcaaagtctttacggctactcctttagaa

SEQ ID NO: 679030 - DNA, 33 bp, Homo sapien
actggcaaagtctttatggctactcctttagaa

SEQ ID NO: 679031 - DNA, 33 bp, Homo sapien
gaattccagtaaagaaaatgagctgctttcatt

SEQ ID NO: 679032 - DNA, 33 bp, Homo sapien
gaattccagtaaagaagatgagctgctttcatt

SEQ ID NO: 679033 - DNA, 33 bp, Homo sapien
accatctctgcagctccattgaatctccatttt

SEQ ID NO: 679034 - DNA, 33 bp, Homo sapien
accatctctgcagctctattgaatctccatttt

SEQ ID NO: 679035 - DNA, 33 bp, Homo sapien
tttattccaaatcataagaagcattgtacagtt

SEQ ID NO: 679036 - DNA, 33 bp, Homo sapien
tttattccaaatcatatgaagcattgtacagtt

SEQ ID NO: 679037 - DNA, 33 bp, Homo sapien
aacaacttgaagccaaaagcgttctctctgagc

SEQ ID NO: 679038 - DNA, 33 bp, Homo sapien
aacaacttgaagccaagagcgttctctctgagc

SEQ ID NO: 679039 - DNA, 33 bp, Homo sapien
tatcctacattgggcaacttgcctcctcagatc

SEQ ID NO: 679040 - DNA, 33 bp, Homo sapien
tatcctacattgggcagcttgcctcctcagatc

SEQ ID NO: 679041 - DNA, 33 bp, Homo sapien
gtctgttggttggggccgagattttctagctct

SEQ ID NO: 679042 - DNA, 33 bp, Homo sapien
gtctgttggttggggctgagattttctagctct

SEQ ID NO: 679043 - DNA, 33 bp, Homo sapien
ttgatccaaattttgccagttctgttgcctcct

SEQ ID NO: 679044 - DNA, 33 bp, Homo sapien
ttgatccaaattttgctagttctgttgcctcct

SEQ ID NO: 679045 - DNA, 33 bp, Homo sapien
acattcatttaggaagcctgatgatacattctt

SEQ ID NO: 679046 - DNA, 33 bp, Homo sapien
acattcatttaggaagtctgatgatacattctt

SEQ ID NO: 679047 - DNA, 33 bp, Homo sapien
ttaacatggtaaatagcagtgcaggcttgtaat

SEQ ID NO: 679048 - DNA, 33 bp, Homo sapien
ttaacatggtaaatagtagtgcaggcttgtaat

SEQ ID NO: 679049 - DNA, 33 bp, Homo sapien
taaaatattaaaactgacacttatgcttagtta

SEQ ID NO: 679050 - DNA, 33 bp, Homo sapien
taaaatattaaaactgtcacttatgcttagtta

SEQ ID NO: 679051 - DNA, 33 bp, Homo sapien
ctaaattactgtgcaaccttttggcaagtcact

SEQ ID NO: 679052 - DNA, 33 bp, Homo sapien
ctaaattactgtgcaagcttttggcaagtcact

SEQ ID NO: 679053 - DNA, 33 bp, Homo sapien
tcataaacgacatgatgaacaattttatcagat

SEQ ID NO: 679054 - DNA, 33 bp, Homo sapien
tcataaacgacatgattaacaattttatcagat

SEQ ID NO: 679055 - DNA, 33 bp, Homo sapien
tttggctgctcttcaccgagaaggctcaccctc

SEQ ID NO: 679056 - DNA, 33 bp, Homo sapien
tttggctgctcttcactgagaaggctcaccctc

SEQ ID NO: 679057 - DNA, 33 bp, Homo sapien
actttatgaccctaacggcctctctacaagaat

SEQ ID NO: 679058 - DNA, 33 bp, Homo sapien
actttatgaccctaactgcctctctacaagaat

SEQ ID NO: 679059 - DNA, 33 bp, Homo sapien
agctctttgaaatacaaatccaacaaggccctc

SEQ ID NO: 679060 - DNA, 33 bp, Homo sapien
agctctttgaaatacagatccaacaaggccctc

SEQ ID NO: 679061 - DNA, 33 bp, Homo sapien
tatcttaggcttgaaacttgcgcttcatactta

SEQ ID NO: 679062 - DNA, 33 bp, Homo sapien
tatcttaggcttgaaatttgcgcttcatactta

SEQ ID NO: 679063 - DNA, 33 bp, Homo sapien
actatgctcatttgcaaaagttaaggaacaaga

SEQ ID NO: 679064 - DNA, 33 bp, Homo sapien
actatgctcatttgcagaagttaaggaacaaga

SEQ ID NO: 679065 - DNA, 33 bp, Homo sapien
acataaatcatcaagaaagtatgtagaagtata

SEQ ID NO: 679066 - DNA, 33 bp, Homo sapien
acataaatcatcaagacagtatgtagaagtata

SEQ ID NO: 679067 - DNA, 33 bp, Homo sapien
atgccctctagtcggccacttgctggctgtctg

SEQ ID NO: 679068 - DNA, 33 bp, Homo sapien
atgccctctagtcggctacttgctggctgtctg

SEQ ID NO: 679069 - DNA, 33 bp, Homo sapien
aagagttgcaccaccaacccacatcatgccctc

SEQ ID NO: 679070 - DNA, 33 bp, Homo sapien
aagagttgcaccaccagcccacatcatgccctc

SEQ ID NO: 679071 - DNA, 33 bp, Homo sapien
gggtgagtagtatatgaaaattccctgtacaat

SEQ ID NO: 679072 - DNA, 33 bp, Homo sapien
gggtgagtagtatatggaaattccctgtacaat

SEQ ID NO: 679073 - DNA, 33 bp, Homo sapien
ccatgacagtgtctgacacagaggggacagtga

SEQ ID NO: 679074 - DNA, 33 bp, Homo sapien
ccatgacagtgtctgatacagaggggacagtga

SEQ ID NO: 679075 - DNA, 33 bp, Homo sapien
gataactctcttttcccctacataccctggctg

SEQ ID NO: 679076 - DNA, 33 bp, Homo sapien
gataactctcttttcctctacataccctggctg

SEQ ID NO: 679077 - DNA, 33 bp, Homo sapien
aggtcaacaattacccacaccatgagagaacga

SEQ ID NO: 679078 - DNA, 33 bp, Homo sapien
aggtcaacaattacccgcaccatgagagaacga

SEQ ID NO: 679079 - DNA, 33 bp, Homo sapien
cctttgccatcttcagaagagtttggatttgat

SEQ ID NO: 679080 - DNA, 33 bp, Homo sapien
cctttgccatcttcaggagagtttggatttgat

SEQ ID NO: 679081 - DNA, 33 bp, Homo sapien
ttacatctctactttggaggcaagctctatcca

SEQ ID NO: 679082 - DNA, 33 bp, Homo sapien
ttacatctctactttgtaggcaagctctatcca

SEQ ID NO: 679083 - DNA, 33 bp, Homo sapien
cttccctcaagaactacagaagttgtggtcaac

SEQ ID NO: 679084 - DNA, 33 bp, Homo sapien
cttccctcaagaactatagaagttgtggtcaac

SEQ ID NO: 679085 - DNA, 33 bp, Homo sapien
gcaaaccagaaaacagacctcactgggctctgt

SEQ ID NO: 679086 - DNA, 33 bp, Homo sapien
gcaaaccagaaaacagtcctcactgggctctgt

SEQ ID NO: 679087 - DNA, 33 bp, Homo sapien
actacatgggccttgaaggcgaacagtgccatc

SEQ ID NO: 679088 - DNA, 33 bp, Homo sapien
actacatgggccttgacggcgaacagtgccatc

SEQ ID NO: 679089 - DNA, 33 bp, Homo sapien
agagaaattcagcaaggcttcccatctgagcct

SEQ ID NO: 679090 - DNA, 33 bp, Homo sapien
agagaaattcagcaagtcttcccatctgagcct

SEQ ID NO: 679091 - DNA, 33 bp, Homo sapien
gccagtgcacagaggacggtggcttcctgcctt

SEQ ID NO: 679092 - DNA, 33 bp, Homo sapien
gccagtgcacagaggatggtggcttcctgcctt

SEQ ID NO: 679093 - DNA, 33 bp, Homo sapien
agctgtatacatattaccgtttccattttacaa

SEQ ID NO: 679094 - DNA, 33 bp, Homo sapien
agctgtatacatattatcgtttccattttacaa

SEQ ID NO: 679095 - DNA, 33 bp, Homo sapien
gtcggcaattgtaaaccggtatcaacagaggga

SEQ ID NO: 679096 - DNA, 33 bp, Homo sapien
gtcggcaattgtaaactggtatcaacagaggga

SEQ ID NO: 679097 - DNA, 33 bp, Homo sapien
tacaaaggtctctctacccattcaaacttcaga

SEQ ID NO: 679098 - DNA, 33 bp, Homo sapien
tacaaaggtctctctatccattcaaacttcaga

SEQ ID NO: 679099 - DNA, 33 bp, Homo sapien
aggattcagtgactaacgtgacagtcttcctac

SEQ ID NO: 679100 - DNA, 33 bp, Homo sapien
aggattcagtgactaatgtgacagtcttcctac

SEQ ID NO: 679101 - DNA, 33 bp, Homo sapien
ataagagtacagataaagggtttctaacaaggg

SEQ ID NO: 679102 - DNA, 33 bp, Homo sapien
ataagagtacagataacgggtttctaacaaggg

SEQ ID NO: 679103 - DNA, 33 bp, Homo sapien
ggagagtgaaagcatacgagaggtatctgagct

SEQ ID NO: 679104 - DNA, 33 bp, Homo sapien
ggagagtgaaagcatatgagaggtatctgagct

SEQ ID NO: 679105 - DNA, 33 bp, Homo sapien
cctgaaaagaaacgtacaaatcatcttcaaaaa

SEQ ID NO: 679106 - DNA, 33 bp, Homo sapien
cctgaaaagaaacgtagaaatcatcttcaaaaa

SEQ ID NO: 679107 - DNA, 33 bp, Homo sapien
atgcactgggaaccaagaattttgtgtgactcg

SEQ ID NO: 679108 - DNA, 33 bp, Homo sapien
atgcactgggaaccaataattttgtgtgactcg

SEQ ID NO: 679109 - DNA, 33 bp, Homo sapien
caggcgtttatacccactcatgcaggatcagct

SEQ ID NO: 679110 - DNA, 33 bp, Homo sapien
caggcgtttatacccagtcatgcaggatcagct

SEQ ID NO: 679111 - DNA, 33 bp, Homo sapien
aatacacaccaggtaccggagatacaaaactgt

SEQ ID NO: 679112 - DNA, 33 bp, Homo sapien
aatacacaccaggtactggagatacaaaactgt

SEQ ID NO: 679113 - DNA, 33 bp, Homo sapien
tttcctgataaaataaaaagcattcacagacaa

SEQ ID NO: 679114 - DNA, 33 bp, Homo sapien
tttcctgataaaataagaagcattcacagacaa

SEQ ID NO: 679115 - DNA, 33 bp, Homo sapien
aagtctttgcatacacaagtattagttttgaca

SEQ ID NO: 679116 - DNA, 33 bp, Homo sapien
aagtctttgcatacacgagtattagttttgaca

SEQ ID NO: 679117 - DNA, 33 bp, Homo sapien
gtggaaattgagcaaaagtgagagataaaatga

SEQ ID NO: 679118 - DNA, 33 bp, Homo sapien
gtggaaattgagcaaaggtgagagataaaatga

SEQ ID NO: 679119 - DNA, 33 bp, Homo sapien
gaagtaaatgttgggcaaagggagcgaaagggt

SEQ ID NO: 679120 - DNA, 33 bp, Homo sapien
gaagtaaatgttgggcgaagggagcgaaagggt

SEQ ID NO: 679121 - DNA, 33 bp, Homo sapien
atctatattttgacaaagaagaaagctccctgc

SEQ ID NO: 679122 - DNA, 33 bp, Homo sapien
atctatattttgacaaggaagaaagctccctgc

SEQ ID NO: 679123 - DNA, 33 bp, Homo sapien
ttctaaaagtgaaataacactcaggttgcaaac

SEQ ID NO: 679124 - DNA, 33 bp, Homo sapien
ttctaaaagtgaaatagcactcaggttgcaaac

SEQ ID NO: 679125 - DNA, 33 bp, Homo sapien
attcagttatatctaacgaactgtggtgctttt

SEQ ID NO: 679126 - DNA, 33 bp, Homo sapien
attcagttatatctaatgaactgtggtgctttt

SEQ ID NO: 679127 - DNA, 33 bp, Homo sapien
ctctcaaaagcctggaaatccctagaaggactt

SEQ ID NO: 679128 - DNA, 33 bp, Homo sapien
ctctcaaaagcctggagatccctagaaggactt

SEQ ID NO: 679129 - DNA, 33 bp, Homo sapien
aaacattcaccagccaggtaatacttaaaagga

SEQ ID NO: 679130 - DNA, 33 bp, Homo sapien
aaacattcaccagccatgtaatacttaaaagga

SEQ ID NO: 679131 - DNA, 33 bp, Homo sapien
gtaactaataaaaaacgattccaaagcactctg

SEQ ID NO: 679132 - DNA, 33 bp, Homo sapien
gtaactaataaaaaactattccaaagcactctg

SEQ ID NO: 679133 - DNA, 33 bp, Homo sapien
attggttgagactgacccttgtcactgttttgt

SEQ ID NO: 679134 - DNA, 33 bp, Homo sapien
attggttgagactgactcttgtcactgttttgt

SEQ ID NO: 679135 - DNA, 33 bp, Homo sapien
tttgtactttcagagacactttcatacaccacc

SEQ ID NO: 679136 - DNA, 33 bp, Homo sapien
tttgtactttcagagatactttcatacaccacc

SEQ ID NO: 679137 - DNA, 33 bp, Homo sapien
ggcacaatatggtttacatccttctaaaatcag

SEQ ID NO: 679138 - DNA, 33 bp, Homo sapien
ggcacaatatggtttatatccttctaaaatcag

SEQ ID NO: 679139 - DNA, 33 bp, Homo sapien
aggaaatcctcaaaccaaagtgatacttaatgc

SEQ ID NO: 679140 - DNA, 33 bp, Homo sapien
aggaaatcctcaaaccgaagtgatacttaatgc

SEQ ID NO: 679141 - DNA, 33 bp, Homo sapien
tctaatattaagcctgaaccatttcaagcatat

SEQ ID NO: 679142 - DNA, 33 bp, Homo sapien
tctaatattaagcctggaccatttcaagcatat

SEQ ID NO: 679143 - DNA, 33 bp, Homo sapien
tagtttttacacctccactttgccactcaactg

SEQ ID NO: 679144 - DNA, 33 bp, Homo sapien
tagtttttacacctccgctttgccactcaactg

SEQ ID NO: 679145 - DNA, 33 bp, Homo sapien
tgttcttggttttgacagaatattctagaacag

SEQ ID NO: 679146 - DNA, 33 bp, Homo sapien
tgttcttggttttgactgaatattctagaacag

SEQ ID NO: 679147 - DNA, 33 bp, Homo sapien
agacattgtctatgtcaaacaggtgaagaaatt

SEQ ID NO: 679148 - DNA, 33 bp, Homo sapien
agacattgtctatgtcgaacaggtgaagaaatt

SEQ ID NO: 679149 - DNA, 33 bp, Homo sapien
tgaagatggaagatgactattggtccatcacca

SEQ ID NO: 679150 - DNA, 33 bp, Homo sapien
tgaagatggaagatgattattggtccatcacca

SEQ ID NO: 679151 - DNA, 33 bp, Homo sapien
cttaccacattttcaccgctctttttctcacag

SEQ ID NO: 679152 - DNA, 33 bp, Homo sapien
cttaccacattttcactgctctttttctcacag

SEQ ID NO: 679153 - DNA, 33 bp, Homo sapien
ttcttttttatttccactcctagattatttgcc

SEQ ID NO: 679154 - DNA, 33 bp, Homo sapien
ttcttttttatttccattcctagattatttgcc

SEQ ID NO: 679155 - DNA, 33 bp, Homo sapien
ttgaagaagcatataagtggagcagtagtggag

SEQ ID NO: 679156 - DNA, 33 bp, Homo sapien
ttgaagaagcatataattggagcagtagtggag

SEQ ID NO: 679157 - DNA, 33 bp, Homo sapien
tggctagaaaaaaacaaatgtagaagtctcagg

SEQ ID NO: 679158 - DNA, 33 bp, Homo sapien
tggctagaaaaaaacatatgtagaagtctcagg

SEQ ID NO: 679159 - DNA, 33 bp, Homo sapien
catttatattaggctcacaaattgcatagtgat

SEQ ID NO: 679160 - DNA, 33 bp, Homo sapien
catttatattaggctcgcaaattgcatagtgat

SEQ ID NO: 679161 - DNA, 33 bp, Homo sapien
gacctgctgatgaatcacacatcattttcaact

SEQ ID NO: 679162 - DNA, 33 bp, Homo sapien
gacctgctgatgaatcgcacatcattttcaact

SEQ ID NO: 679163 - DNA, 33 bp, Homo sapien
cttaaggagccagataaacacgtagttaacgaa

SEQ ID NO: 679164 - DNA, 33 bp, Homo sapien
cttaaggagccagatagacacgtagttaacgaa

SEQ ID NO: 679165 - DNA, 33 bp, Homo sapien
aaggtactgccattgacaaactccgaggcgtct

SEQ ID NO: 679166 - DNA, 33 bp, Homo sapien
aaggtactgccattgagaaactccgaggcgtct

SEQ ID NO: 679167 - DNA, 33 bp, Homo sapien
gctgggttgtgggtgacaactgttcattccctg

SEQ ID NO: 679168 - DNA, 33 bp, Homo sapien
gctgggttgtgggtgataactgttcattccctg

SEQ ID NO: 679169 - DNA, 33 bp, Homo sapien
ctggctggggccatcaaaacgtgtgctggcatc

SEQ ID NO: 679170 - DNA, 33 bp, Homo sapien
ctggctggggccatcagaacgtgtgctggcatc

SEQ ID NO: 679171 - DNA, 33 bp, Homo sapien
agttgccacttggaaacggttggaaactgtaga

SEQ ID NO: 679172 - DNA, 33 bp, Homo sapien
agttgccacttggaaatggttggaaactgtaga

SEQ ID NO: 679173 - DNA, 33 bp, Homo sapien
caaaaaacatccgcgccataagttaaagtttca

SEQ ID NO: 679174 - DNA, 33 bp, Homo sapien
caaaaaacatccgcgctataagttaaagtttca

SEQ ID NO: 679175 - DNA, 33 bp, Homo sapien
caacttgaacttttcactccattgctttccatc

SEQ ID NO: 679176 - DNA, 33 bp, Homo sapien
caacttgaacttttcattccattgctttccatc

SEQ ID NO: 679177 - DNA, 33 bp, Homo sapien
agggagagagtggttaagtctatagttttatga

SEQ ID NO: 679178 - DNA, 33 bp, Homo sapien
agggagagagtggttacgtctatagttttatga

SEQ ID NO: 679179 - DNA, 33 bp, Homo sapien
gtgttgtctcgccttcactagttgatatacttc

SEQ ID NO: 679180 - DNA, 33 bp, Homo sapien
gtgttgtctcgccttctctagttgatatacttc

SEQ ID NO: 679181 - DNA, 33 bp, Homo sapien
gatatccagtaaagaacaagacaaacacaaaaa

SEQ ID NO: 679182 - DNA, 33 bp, Homo sapien
gatatccagtaaagaagaagacaaacacaaaaa

SEQ ID NO: 679183 - DNA, 33 bp, Homo sapien
tcctacaccgttgcctcactctcactgccatac

SEQ ID NO: 679184 - DNA, 33 bp, Homo sapien
tcctacaccgttgccttactctcactgccatac

SEQ ID NO: 679185 - DNA, 33 bp, Homo sapien
agacgttaatcattgacaccaccagcagcaaat

SEQ ID NO: 679186 - DNA, 33 bp, Homo sapien
agacgttaatcattgataccaccagcagcaaat

SEQ ID NO: 679187 - DNA, 33 bp, Homo sapien
tgatcatgatagattgcacctgtatctgggtaa

SEQ ID NO: 679188 - DNA, 33 bp, Homo sapien
tgatcatgatagattgtacctgtatctgggtaa

SEQ ID NO: 679189 - DNA, 33 bp, Homo sapien
gggaagtttgagtgtccatctaccatatccacc

SEQ ID NO: 679190 - DNA, 33 bp, Homo sapien
gggaagtttgagtgtcgatctaccatatccacc

SEQ ID NO: 679191 - DNA, 33 bp, Homo sapien
tgaagagagggaaacgacattgttgatggtgaa

SEQ ID NO: 679192 - DNA, 33 bp, Homo sapien
tgaagagagggaaacggcattgttgatggtgaa

SEQ ID NO: 679193 - DNA, 33 bp, Homo sapien
ttataataagttttcaagattctgaacccttgc

SEQ ID NO: 679194 - DNA, 33 bp, Homo sapien
ttataataagttttcatgattctgaacccttgc

SEQ ID NO: 679195 - DNA, 33 bp, Homo sapien
cttgaaaaacaataaacgaagcctttggtgctg

SEQ ID NO: 679196 - DNA, 33 bp, Homo sapien
cttgaaaaacaataaatgaagcctttggtgctg

SEQ ID NO: 679197 - DNA, 33 bp, Homo sapien
acacaggaatggaaagcagccatctttttatag

SEQ ID NO: 679198 - DNA, 33 bp, Homo sapien
acacaggaatggaaaggagccatctttttatag

SEQ ID NO: 679199 - DNA, 33 bp, Homo sapien
tccggtaaaatgctgaaggaacaaataaattta

SEQ ID NO: 679200 - DNA, 33 bp, Homo sapien
tccggtaaaatgctgagggaacaaataaattta

SEQ ID NO: 679201 - DNA, 33 bp, Homo sapien
ccctgctaatatagaaaaggttacgctaatgtt

SEQ ID NO: 679202 - DNA, 33 bp, Homo sapien
ccctgctaatatagaagaggttacgctaatgtt

SEQ ID NO: 679203 - DNA, 33 bp, Homo sapien
aaacagtttctcagtccacagtgcaatcaaatt

SEQ ID NO: 679204 - DNA, 33 bp, Homo sapien
aaacagtttctcagtctacagtgcaatcaaatt

SEQ ID NO: 679205 - DNA, 33 bp, Homo sapien
acacaaactctttcaacgtgctcttaaacagaa

SEQ ID NO: 679206 - DNA, 33 bp, Homo sapien
acacaaactctttcaatgtgctcttaaacagaa

SEQ ID NO: 679207 - DNA, 33 bp, Homo sapien
actagctcttctaacaagctctcattcaataaa

SEQ ID NO: 679208 - DNA, 33 bp, Homo sapien
actagctcttctaacaggctctcattcaataaa

SEQ ID NO: 679209 - DNA, 33 bp, Homo sapien
ggtgtaatgtttttgaatacttagcatatccta

SEQ ID NO: 679210 - DNA, 33 bp, Homo sapien
ggtgtaatgtttttgactacttagcatatccta

SEQ ID NO: 679211 - DNA, 33 bp, Homo sapien
actatccattaagtcaaaggggataggctattt

SEQ ID NO: 679212 - DNA, 33 bp, Homo sapien
actatccattaagtcacaggggataggctattt

SEQ ID NO: 679213 - DNA, 33 bp, Homo sapien
atagttcagtagaataaaactttgtggaaattt

SEQ ID NO: 679214 - DNA, 33 bp, Homo sapien
atagttcagtagaatataactttgtggaaattt

SEQ ID NO: 679215 - DNA, 33 bp, Homo sapien
tgtgcgtgtgtgtgtaggtattccaatccagtc

SEQ ID NO: 679216 - DNA, 33 bp, Homo sapien
tgtgcgtgtgtgtgtatgtattccaatccagtc

SEQ ID NO: 679217 - DNA, 33 bp, Homo sapien
ggaacctagatcaaacacagactctgattcagg

SEQ ID NO: 679218 - DNA, 33 bp, Homo sapien
ggaacctagatcaaacgcagactctgattcagg

SEQ ID NO: 679219 - DNA, 33 bp, Homo sapien
gaactgtatatgagacacaaaaagggctgctat

SEQ ID NO: 679220 - DNA, 33 bp, Homo sapien
gaactgtatatgagacgcaaaaagggctgctat

SEQ ID NO: 679221 - DNA, 33 bp, Homo sapien
tactttagacccacaaaattggaaaggttcaat

SEQ ID NO: 679222 - DNA, 33 bp, Homo sapien
tactttagacccacaagattggaaaggttcaat

SEQ ID NO: 679223 - DNA, 33 bp, Homo sapien
ttaataaagtgattgccgaagtgtcactacaaa

SEQ ID NO: 679224 - DNA, 33 bp, Homo sapien
ttaataaagtgattgctgaagtgtcactacaaa

SEQ ID NO: 679225 - DNA, 33 bp, Homo sapien
tccaaaattctgagacacgtgacttctttgtaa

SEQ ID NO: 679226 - DNA, 33 bp, Homo sapien
tccaaaattctgagacgcgtgacttctttgtaa

SEQ ID NO: 679227 - DNA, 33 bp, Homo sapien
atgtgatacaatcaacaaggggtttgtcagaaa

SEQ ID NO: 679228 - DNA, 33 bp, Homo sapien
atgtgatacaatcaacgaggggtttgtcagaaa

SEQ ID NO: 679229 - DNA, 33 bp, Homo sapien
tatagtactttgaaaccctagtgtcttaggaag

SEQ ID NO: 679230 - DNA, 33 bp, Homo sapien
tatagtactttgaaactctagtgtcttaggaag

SEQ ID NO: 679231 - DNA, 33 bp, Homo sapien
tttccacctagacaaccattgcactgccaccat

SEQ ID NO: 679232 - DNA, 33 bp, Homo sapien
tttccacctagacaacgattgcactgccaccat

SEQ ID NO: 679233 - DNA, 33 bp, Homo sapien
tgaaggcaggatcacaacccatatttctgtatc

SEQ ID NO: 679234 - DNA, 33 bp, Homo sapien
tgaaggcaggatcacagcccatatttctgtatc

SEQ ID NO: 679235 - DNA, 33 bp, Homo sapien
gttctgaaatggagtcacatggttgaaaacatg

SEQ ID NO: 679236 - DNA, 33 bp, Homo sapien
gttctgaaatggagtcgcatggttgaaaacatg

SEQ ID NO: 679237 - DNA, 33 bp, Homo sapien
tgcacttcagattatgaaaatgtattccccctt

SEQ ID NO: 679238 - DNA, 33 bp, Homo sapien
tgcacttcagattatggaaatgtattccccctt

SEQ ID NO: 679239 - DNA, 33 bp, Homo sapien
ccttggatttggggtgaaaattaacagtagata

SEQ ID NO: 679240 - DNA, 33 bp, Homo sapien
ccttggatttggggtggaaattaacagtagata

SEQ ID NO: 679241 - DNA, 33 bp, Homo sapien
cttaggccattatcaacagtctgattttgaatg

SEQ ID NO: 679242 - DNA, 33 bp, Homo sapien
cttaggccattatcaagagtctgattttgaatg

SEQ ID NO: 679243 - DNA, 33 bp, Homo sapien
aggaccacaaaaatcccatgaataaaccattcg

SEQ ID NO: 679244 - DNA, 33 bp, Homo sapien
aggaccacaaaaatcctatgaataaaccattcg

SEQ ID NO: 679245 - DNA, 33 bp, Homo sapien
acaagttccagtctaacgctgtgtgattttgca

SEQ ID NO: 679246 - DNA, 33 bp, Homo sapien
acaagttccagtctaatgctgtgtgattttgca

SEQ ID NO: 679247 - DNA, 33 bp, Homo sapien
tactgtgcttgagagaaatcaggcccaggaagg

SEQ ID NO: 679248 - DNA, 33 bp, Homo sapien
tactgtgcttgagagagatcaggcccaggaagg

SEQ ID NO: 679249 - DNA, 33 bp, Homo sapien
tgtcacaatttactaaacctatcattggcctat

SEQ ID NO: 679250 - DNA, 33 bp, Homo sapien
tgtcacaatttactaaccctatcattggcctat

SEQ ID NO: 679251 - DNA, 33 bp, Homo sapien
acaagaataacttacaccaataggccaatgata

SEQ ID NO: 679252 - DNA, 33 bp, Homo sapien
acaagaataacttacatcaataggccaatgata

SEQ ID NO: 679253 - DNA, 33 bp, Homo sapien
caatataaactctgtaaggaactagtgaaatgt

SEQ ID NO: 679254 - DNA, 33 bp, Homo sapien
caatataaactctgtatggaactagtgaaatgt

SEQ ID NO: 679255 - DNA, 33 bp, Homo sapien
gtgggttaacaattaaatcgcaaatgccaagta

SEQ ID NO: 679256 - DNA, 33 bp, Homo sapien
gtgggttaacaattaattcgcaaatgccaagta

SEQ ID NO: 679257 - DNA, 33 bp, Homo sapien
cagagtccccagctacagaacacaactgatgta

SEQ ID NO: 679258 - DNA, 33 bp, Homo sapien
cagagtccccagctacggaacacaactgatgta

SEQ ID NO: 679259 - DNA, 33 bp, Homo sapien
tagtttagaggtgatacgacacatagattatgg

SEQ ID NO: 679260 - DNA, 33 bp, Homo sapien
tagtttagaggtgatatgacacatagattatgg

SEQ ID NO: 679261 - DNA, 33 bp, Homo sapien
gaaataagggctgcaaactttttaaaccataat

SEQ ID NO: 679262 - DNA, 33 bp, Homo sapien
gaaataagggctgcaacctttttaaaccataat

SEQ ID NO: 679263 - DNA, 33 bp, Homo sapien
tatgggttaggcagcacagataccattgaatac

SEQ ID NO: 679264 - DNA, 33 bp, Homo sapien
tatgggttaggcagcagagataccattgaatac

SEQ ID NO: 679265 - DNA, 33 bp, Homo sapien
actgactaccactaaactagatttgaggttatc

SEQ ID NO: 679266 - DNA, 33 bp, Homo sapien
actgactaccactaaagtagatttgaggttatc

SEQ ID NO: 679267 - DNA, 33 bp, Homo sapien
gagtttgtaagtcttaagcccccaccatcaaaa

SEQ ID NO: 679268 - DNA, 33 bp, Homo sapien
gagtttgtaagtcttatgcccccaccatcaaaa

SEQ ID NO: 679269 - DNA, 33 bp, Homo sapien
ttattactattacaaacttattgacactgttct

SEQ ID NO: 679270 - DNA, 33 bp, Homo sapien
ttattactattacaaagttattgacactgttct

SEQ ID NO: 679271 - DNA, 33 bp, Homo sapien
tgttaatagggagccaaaattattacctttctc

SEQ ID NO: 679272 - DNA, 33 bp, Homo sapien
tgttaatagggagccagaattattacctttctc

SEQ ID NO: 679273 - DNA, 33 bp, Homo sapien
ttagggaagaaactcaataagaggaactcacat

SEQ ID NO: 679274 - DNA, 33 bp, Homo sapien
ttagggaagaaactcagtaagaggaactcacat

SEQ ID NO: 679275 - DNA, 33 bp, Homo sapien
tagatagctttctggtaaactaggttgatccag

SEQ ID NO: 679276 - DNA, 33 bp, Homo sapien
tagatagctttctggtgaactaggttgatccag

SEQ ID NO: 679277 - DNA, 33 bp, Homo sapien
cagatggcaatacaacaagtaaaaggcagataa

SEQ ID NO: 679278 - DNA, 33 bp, Homo sapien
cagatggcaatacaaccagtaaaaggcagataa

SEQ ID NO: 679279 - DNA, 33 bp, Homo sapien
agttgacaaatgttgaatatcaatggttgtagg

SEQ ID NO: 679280 - DNA, 33 bp, Homo sapien
agttgacaaatgttgactatcaatggttgtagg

SEQ ID NO: 679281 - DNA, 33 bp, Homo sapien
aataggacctggtaaacggtgggacttgggata

SEQ ID NO: 679282 - DNA, 33 bp, Homo sapien
aataggacctggtaaatggtgggacttgggata

SEQ ID NO: 679283 - DNA, 33 bp, Homo sapien
aataaaaagagcatataaaatacgcagaatcca

SEQ ID NO: 679284 - DNA, 33 bp, Homo sapien
aataaaaagagcatatcaaatacgcagaatcca

SEQ ID NO: 679285 - DNA, 33 bp, Homo sapien
attggacagagctgcaatgaggttttggtttta

SEQ ID NO: 679286 - DNA, 33 bp, Homo sapien
attggacagagctgcagtgaggttttggtttta

SEQ ID NO: 679287 - DNA, 33 bp, Homo sapien
gggacagcctacaaaacgaattcagactggaaa

SEQ ID NO: 679288 - DNA, 33 bp, Homo sapien
gggacagcctacaaaaggaattcagactggaaa

SEQ ID NO: 679289 - DNA, 33 bp, Homo sapien
gactcattcctacccaaatggactttagatgaa

SEQ ID NO: 679290 - DNA, 33 bp, Homo sapien
gactcattcctacccatatggactttagatgaa

SEQ ID NO: 679291 - DNA, 33 bp, Homo sapien
acagcgtatgggacaaagttttgacataagacc

SEQ ID NO: 679292 - DNA, 33 bp, Homo sapien
acagcgtatgggacaatgttttgacataagacc

SEQ ID NO: 679293 - DNA, 33 bp, Homo sapien
tcagatatcttgttcactaattcactgggcccc

SEQ ID NO: 679294 - DNA, 33 bp, Homo sapien
tcagatatcttgttcattaattcactgggcccc

SEQ ID NO: 679295 - DNA, 33 bp, Homo sapien
cttctacttacgtgtaaaccctattccagacca

SEQ ID NO: 679296 - DNA, 33 bp, Homo sapien
cttctacttacgtgtacaccctattccagacca

SEQ ID NO: 679297 - DNA, 33 bp, Homo sapien
tggtgaaggccatggactatagagtcatactgg

SEQ ID NO: 679298 - DNA, 33 bp, Homo sapien
tggtgaaggccatggattatagagtcatactgg

SEQ ID NO: 679299 - DNA, 33 bp, Homo sapien
tgattagaaatattaaatgttgctggtctttag

SEQ ID NO: 679300 - DNA, 33 bp, Homo sapien
tgattagaaatattaactgttgctggtctttag

SEQ ID NO: 679301 - DNA, 33 bp, Homo sapien
gaaatttacctcgccacggaaagtgatgtgcca

SEQ ID NO: 679302 - DNA, 33 bp, Homo sapien
gaaatttacctcgccatggaaagtgatgtgcca

SEQ ID NO: 679303 - DNA, 33 bp, Homo sapien
gattgtgatattatgagtaatttgagtttttct

SEQ ID NO: 679304 - DNA, 33 bp, Homo sapien
gattgtgatattatgattaatttgagtttttct

SEQ ID NO: 679305 - DNA, 33 bp, Homo sapien
tataattctggctcgcccgcctatttatttttt

SEQ ID NO: 679306 - DNA, 33 bp, Homo sapien
tataattctggctcgcgcgcctatttatttttt

SEQ ID NO: 679307 - DNA, 33 bp, Homo sapien
aataataactagcttacactgttgttttaagaa

SEQ ID NO: 679308 - DNA, 33 bp, Homo sapien
aataataactagcttatactgttgttttaagaa

SEQ ID NO: 679309 - DNA, 33 bp, Homo sapien
ctggaaatatctgacagtagatttttaagcata

SEQ ID NO: 679310 - DNA, 33 bp, Homo sapien
ctggaaatatctgacattagatttttaagcata

SEQ ID NO: 679311 - DNA, 33 bp, Homo sapien
cagtgctggatgcctgaaacaatatctaacaac

SEQ ID NO: 679312 - DNA, 33 bp, Homo sapien
cagtgctggatgcctggaacaatatctaacaac

SEQ ID NO: 679313 - DNA, 33 bp, Homo sapien
ttagtaaagtgagcaccagatttggagtcagga

SEQ ID NO: 679314 - DNA, 33 bp, Homo sapien
ttagtaaagtgagcactagatttggagtcagga

SEQ ID NO: 679315 - DNA, 33 bp, Homo sapien
tgaaacttggttattacgattgtagcaatattt

SEQ ID NO: 679316 - DNA, 33 bp, Homo sapien
tgaaacttggttattatgattgtagcaatattt

SEQ ID NO: 679317 - DNA, 33 bp, Homo sapien
gtcaacaattatgaggaccatttgtgttagaca

SEQ ID NO: 679318 - DNA, 33 bp, Homo sapien
gtcaacaattatgaggcccatttgtgttagaca

SEQ ID NO: 679319 - DNA, 33 bp, Homo sapien
cattgggatggatgacaatcttcacaggtcatc

SEQ ID NO: 679320 - DNA, 33 bp, Homo sapien
cattgggatggatgacgatcttcacaggtcatc

SEQ ID NO: 679321 - DNA, 33 bp, Homo sapien
tttgcaaaaaatgataccagcagttggcagtgc

SEQ ID NO: 679322 - DNA, 33 bp, Homo sapien
tttgcaaaaaatgatatcagcagttggcagtgc

SEQ ID NO: 679323 - DNA, 33 bp, Homo sapien
taacatcaagcaaactaaggtgcaaattttagc

SEQ ID NO: 679324 - DNA, 33 bp, Homo sapien
taacatcaagcaaactgaggtgcaaattttagc

SEQ ID NO: 679325 - DNA, 33 bp, Homo sapien
agggagatgatcataactgccttaaatacttgg

SEQ ID NO: 679326 - DNA, 33 bp, Homo sapien
agggagatgatcataattgccttaaatacttgg

SEQ ID NO: 679327 - DNA, 33 bp, Homo sapien
ataccccgggacaaacgactcttggtggaacac

SEQ ID NO: 679328 - DNA, 33 bp, Homo sapien
ataccccgggacaaactactcttggtggaacac

SEQ ID NO: 679329 - DNA, 33 bp, Homo sapien
atttgcttagcttagaacttcaggtgaggtggt

SEQ ID NO: 679330 - DNA, 33 bp, Homo sapien
atttgcttagcttagaccttcaggtgaggtggt

SEQ ID NO: 679331 - DNA, 33 bp, Homo sapien
ttgtctaaggctacagaagagccatatgataaa

SEQ ID NO: 679332 - DNA, 33 bp, Homo sapien
ttgtctaaggctacagcagagccatatgataaa

SEQ ID NO: 679333 - DNA, 33 bp, Homo sapien
aatctataaaacagtacagaagagtctttcttc

SEQ ID NO: 679334 - DNA, 33 bp, Homo sapien
aatctataaaacagtagagaagagtctttcttc

SEQ ID NO: 679335 - DNA, 33 bp, Homo sapien
ctgtctatatgatttcaagctaacaagggttga

SEQ ID NO: 679336 - DNA, 33 bp, Homo sapien
ctgtctatatgatttctagctaacaagggttga

SEQ ID NO: 679337 - DNA, 33 bp, Homo sapien
tcttccattcatacagccccttacattttataa

SEQ ID NO: 679338 - DNA, 33 bp, Homo sapien
tcttccattcatacaggcccttacattttataa

SEQ ID NO: 679339 - DNA, 33 bp, Homo sapien
attctttataaaacctgaacacattgcttttag

SEQ ID NO: 679340 - DNA, 33 bp, Homo sapien
attctttataaaaccttaacacattgcttttag

SEQ ID NO: 679341 - DNA, 33 bp, Homo sapien
ttaaaggtgacctccccgcagtcaggagatcga

SEQ ID NO: 679342 - DNA, 33 bp, Homo sapien
ttaaaggtgacctccctgcagtcaggagatcga

SEQ ID NO: 679343 - DNA, 33 bp, Homo sapien
tgactgtggggagacacagtgctagagtgacac

SEQ ID NO: 679344 - DNA, 33 bp, Homo sapien
tgactgtggggagacatagtgctagagtgacac

SEQ ID NO: 679345 - DNA, 33 bp, Homo sapien
tagcacacgcaaggacccttcaaactcatcaca

SEQ ID NO: 679346 - DNA, 33 bp, Homo sapien
tagcacacgcaaggacgcttcaaactcatcaca

SEQ ID NO: 679347 - DNA, 33 bp, Homo sapien
caggatacgagttaacaacttaacgcccttcaa

SEQ ID NO: 679348 - DNA, 33 bp, Homo sapien
caggatacgagttaacgacttaacgcccttcaa

SEQ ID NO: 679349 - DNA, 33 bp, Homo sapien
gctctccaaaagtgaaaccaaatttattctttt

SEQ ID NO: 679350 - DNA, 33 bp, Homo sapien
gctctccaaaagtgaacccaaatttattctttt

SEQ ID NO: 679351 - DNA, 33 bp, Homo sapien
ttacaaaaaagccacaataaggacatagcttag

SEQ ID NO: 679352 - DNA, 33 bp, Homo sapien
ttacaaaaaagccacagtaaggacatagcttag

SEQ ID NO: 679353 - DNA, 33 bp, Homo sapien
aaggcagagaaaataacgtgagcaaagacagtg

SEQ ID NO: 679354 - DNA, 33 bp, Homo sapien
aaggcagagaaaataaggtgagcaaagacagtg

SEQ ID NO: 679355 - DNA, 33 bp, Homo sapien
taggaccattccagatcacatagtgagtgatta

SEQ ID NO: 679356 - DNA, 33 bp, Homo sapien
taggaccattccagatgacatagtgagtgatta

SEQ ID NO: 679357 - DNA, 33 bp, Homo sapien
ggggtatagagataaacgagaggtggtctttgc

SEQ ID NO: 679358 - DNA, 33 bp, Homo sapien
ggggtatagagataaatgagaggtggtctttgc

SEQ ID NO: 679359 - DNA, 33 bp, Homo sapien
gggacaccacgtatgaggatttaggtaatcagt

SEQ ID NO: 679360 - DNA, 33 bp, Homo sapien
gggacaccacgtatgatgatttaggtaatcagt

SEQ ID NO: 679361 - DNA, 33 bp, Homo sapien
tactcagaagacacaacggtgtatcactagaag

SEQ ID NO: 679362 - DNA, 33 bp, Homo sapien
tactcagaagacacaatggtgtatcactagaag

SEQ ID NO: 679363 - DNA, 33 bp, Homo sapien
cttttctattctgccacagcatatttcgaagac

SEQ ID NO: 679364 - DNA, 33 bp, Homo sapien
cttttctattctgccagagcatatttcgaagac

SEQ ID NO: 679365 - DNA, 33 bp, Homo sapien
aaacacaataaatgtacaggtatctgacctcag

SEQ ID NO: 679366 - DNA, 33 bp, Homo sapien
aaacacaataaatgtataggtatctgacctcag

SEQ ID NO: 679367 - DNA, 33 bp, Homo sapien
aatttctgtcacctcaatctcccaagcaccttt

SEQ ID NO: 679368 - DNA, 33 bp, Homo sapien
aatttctgtcacctcactctcccaagcaccttt

SEQ ID NO: 679369 - DNA, 33 bp, Homo sapien
agaaatgttgaatgtacaagggagctggtttga

SEQ ID NO: 679370 - DNA, 33 bp, Homo sapien
agaaatgttgaatgtagaagggagctggtttga

SEQ ID NO: 679371 - DNA, 33 bp, Homo sapien
attttctcatttcaccaaaatggttatctttaa

SEQ ID NO: 679372 - DNA, 33 bp, Homo sapien
attttctcatttcacctaaatggttatctttaa

SEQ ID NO: 679373 - DNA, 33 bp, Homo sapien
tgttatttctgtaggaccaacttctctgatcaa

SEQ ID NO: 679374 - DNA, 33 bp, Homo sapien
tgttatttctgtaggagcaacttctctgatcaa

SEQ ID NO: 679375 - DNA, 33 bp, Homo sapien
gcttgctgaactgttacgtagagcaacttctag

SEQ ID NO: 679376 - DNA, 33 bp, Homo sapien
gcttgctgaactgttatgtagagcaacttctag

SEQ ID NO: 679377 - DNA, 33 bp, Homo sapien
aggatatagcaaacaacgaaaggagtgaaatga

SEQ ID NO: 679378 - DNA, 33 bp, Homo sapien
aggatatagcaaacaatgaaaggagtgaaatga

SEQ ID NO: 679379 - DNA, 33 bp, Homo sapien
aaatatcatttcttctcattaaatctcctgcat

SEQ ID NO: 679380 - DNA, 33 bp, Homo sapien
aaatatcatttcttctgattaaatctcctgcat

SEQ ID NO: 679381 - DNA, 33 bp, Homo sapien
ctttctgcctctcccaatcaatctggtggcagc

SEQ ID NO: 679382 - DNA, 33 bp, Homo sapien
ctttctgcctctcccagtcaatctggtggcagc

SEQ ID NO: 679383 - DNA, 33 bp, Homo sapien
ctatttacgttgtaacaggatcttctgtatgtg

SEQ ID NO: 679384 - DNA, 33 bp, Homo sapien
ctatttacgttgtaacgggatcttctgtatgtg

SEQ ID NO: 679385 - DNA, 33 bp, Homo sapien
ctgcagatcgagaagacgaggcaaagagagcta

SEQ ID NO: 679386 - DNA, 33 bp, Homo sapien
ctgcagatcgagaagatgaggcaaagagagcta

SEQ ID NO: 679387 - DNA, 33 bp, Homo sapien
gacagcaaccacagaacgaattcctaaacaacc

SEQ ID NO: 679388 - DNA, 33 bp, Homo sapien
gacagcaaccacagaatgaattcctaaacaacc

SEQ ID NO: 679389 - DNA, 33 bp, Homo sapien
atgcagacatcactcacagttgcacactcaaag

SEQ ID NO: 679390 - DNA, 33 bp, Homo sapien
atgcagacatcactcatagttgcacactcaaag

SEQ ID NO: 679391 - DNA, 33 bp, Homo sapien
attgcaaataatcataaggatctttcaaatttt

SEQ ID NO: 679392 - DNA, 33 bp, Homo sapien
attgcaaataatcatagggatctttcaaatttt

SEQ ID NO: 679393 - DNA, 33 bp, Homo sapien
tgtgtagacaagggaaaagcccaggtcacctag

SEQ ID NO: 679394 - DNA, 33 bp, Homo sapien
tgtgtagacaagggaagagcccaggtcacctag

SEQ ID NO: 679395 - DNA, 33 bp, Homo sapien
tgacagacactggcaacaaacaagccaaaagta

SEQ ID NO: 679396 - DNA, 33 bp, Homo sapien
tgacagacactggcaagaaacaagccaaaagta

SEQ ID NO: 679397 - DNA, 33 bp, Homo sapien
actctggaaaagataagctcatatccatcattt

SEQ ID NO: 679398 - DNA, 33 bp, Homo sapien
actctggaaaagataatctcatatccatcattt

SEQ ID NO: 679399 - DNA, 33 bp, Homo sapien
gctagtctcattgccaacttacaaataacaaaa

SEQ ID NO: 679400 - DNA, 33 bp, Homo sapien
gctagtctcattgccaccttacaaataacaaaa

SEQ ID NO: 679401 - DNA, 33 bp, Homo sapien
gcagtgcaagacacttaaacagactggagtgct

SEQ ID NO: 679402 - DNA, 33 bp, Homo sapien
gcagtgcaagacactttaacagactggagtgct

SEQ ID NO: 679403 - DNA, 33 bp, Homo sapien
ggttccattgtagatacagactgagacagacag

SEQ ID NO: 679404 - DNA, 33 bp, Homo sapien
ggttccattgtagatagagactgagacagacag

SEQ ID NO: 679405 - DNA, 33 bp, Homo sapien
taccacactattagtcaaccgtgcaattgaaga

SEQ ID NO: 679406 - DNA, 33 bp, Homo sapien
taccacactattagtcgaccgtgcaattgaaga

SEQ ID NO: 679407 - DNA, 33 bp, Homo sapien
cttgacaacaactcaacgatatgtggaacatgc

SEQ ID NO: 679408 - DNA, 33 bp, Homo sapien
cttgacaacaactcaatgatatgtggaacatgc

SEQ ID NO: 679409 - DNA, 33 bp, Homo sapien
atgcgtcactttagcaacctcctaataatatcc

SEQ ID NO: 679410 - DNA, 33 bp, Homo sapien
atgcgtcactttagcagcctcctaataatatcc

SEQ ID NO: 679411 - DNA, 33 bp, Homo sapien
tggagtttataggccaacgtaaaagatgaaaca

SEQ ID NO: 679412 - DNA, 33 bp, Homo sapien
tggagtttataggccagcgtaaaagatgaaaca

SEQ ID NO: 679413 - DNA, 33 bp, Homo sapien
attgtggtgaacaatgaagaagaagggaattta

SEQ ID NO: 679414 - DNA, 33 bp, Homo sapien
attgtggtgaacaatggagaagaagggaattta

SEQ ID NO: 679415 - DNA, 33 bp, Homo sapien
atttagtaaatgctaaaatgtagatctcaaggc

SEQ ID NO: 679416 - DNA, 33 bp, Homo sapien
atttagtaaatgctaagatgtagatctcaaggc

SEQ ID NO: 679417 - DNA, 33 bp, Homo sapien
atacatgctcagataaatacatttcttactcag

SEQ ID NO: 679418 - DNA, 33 bp, Homo sapien
atacatgctcagataagtacatttcttactcag

SEQ ID NO: 679419 - DNA, 33 bp, Homo sapien
gttatggaactcaggaccttttgctggtgctct

SEQ ID NO: 679420 - DNA, 33 bp, Homo sapien
gttatggaactcaggatcttttgctggtgctct

SEQ ID NO: 679421 - DNA, 33 bp, Homo sapien
ccacctggaatcagccccttggtgacatagaaa

SEQ ID NO: 679422 - DNA, 33 bp, Homo sapien
ccacctggaatcagcctcttggtgacatagaaa

SEQ ID NO: 679423 - DNA, 33 bp, Homo sapien
gatttattcaagaaaaatgagatggagcttcac

SEQ ID NO: 679424 - DNA, 33 bp, Homo sapien
gatttattcaagaaaagtgagatggagcttcac

SEQ ID NO: 679425 - DNA, 33 bp, Homo sapien
cctactggcaagtgaaagtcttaagttaaaata

SEQ ID NO: 679426 - DNA, 33 bp, Homo sapien
cctactggcaagtgaatgtcttaagttaaaata

SEQ ID NO: 679427 - DNA, 33 bp, Homo sapien
gctgccttattatcaccgaaacagctttggcct

SEQ ID NO: 679428 - DNA, 33 bp, Homo sapien
gctgccttattatcactgaaacagctttggcct

SEQ ID NO: 679429 - DNA, 33 bp, Homo sapien
cgaaaagcacggctccaatcttgacattcagca

SEQ ID NO: 679430 - DNA, 33 bp, Homo sapien
cgaaaagcacggctccgatcttgacattcagca

SEQ ID NO: 679431 - DNA, 33 bp, Homo sapien
ctctggggaaatttatcaacggtgccatccctt

SEQ ID NO: 679432 - DNA, 33 bp, Homo sapien
ctctggggaaatttatgaacggtgccatccctt

SEQ ID NO: 679433 - DNA, 33 bp, Homo sapien
aaacactaagtttatgccaaggttagtgtcaca

SEQ ID NO: 679434 - DNA, 33 bp, Homo sapien
aaacactaagtttatgtcaaggttagtgtcaca

SEQ ID NO: 679435 - DNA, 33 bp, Homo sapien
tgcttttacaagctgcaattaccctctggcagg

SEQ ID NO: 679436 - DNA, 33 bp, Homo sapien
tgcttttacaagctgcgattaccctctggcagg

SEQ ID NO: 679437 - DNA, 33 bp, Homo sapien
aggatcgttctgttaaacattaggagccacatc

SEQ ID NO: 679438 - DNA, 33 bp, Homo sapien
aggatcgttctgttaagcattaggagccacatc

SEQ ID NO: 679439 - DNA, 33 bp, Homo sapien
cttcgtttgctctagacgtatcatacaattgag

SEQ ID NO: 679440 - DNA, 33 bp, Homo sapien
cttcgtttgctctagatgtatcatacaattgag

SEQ ID NO: 679441 - DNA, 33 bp, Homo sapien
ttgttgctattgaacaactctttatatattaag

SEQ ID NO: 679442 - DNA, 33 bp, Homo sapien
ttgttgctattgaacagctctttatatattaag

SEQ ID NO: 679443 - DNA, 33 bp, Homo sapien
ctagtgtctttacacaaattctttaccatgacc

SEQ ID NO: 679444 - DNA, 33 bp, Homo sapien
ctagtgtctttacacagattctttaccatgacc

SEQ ID NO: 679445 - DNA, 33 bp, Homo sapien
ggataaatggataaaaagtgtggtacacataca

SEQ ID NO: 679446 - DNA, 33 bp, Homo sapien
ggataaatggataaaacgtgtggtacacataca

SEQ ID NO: 679447 - DNA, 33 bp, Homo sapien
atcaatatacaagccacagctctacaactagat

SEQ ID NO: 679448 - DNA, 33 bp, Homo sapien
atcaatatacaagccagagctctacaactagat

SEQ ID NO: 679449 - DNA, 33 bp, Homo sapien
cacctcagtgccgagtaaagtgtgatacaaagt

SEQ ID NO: 679450 - DNA, 33 bp, Homo sapien
cacctcagtgccgagtgaagtgtgatacaaagt

SEQ ID NO: 679451 - DNA, 33 bp, Homo sapien
gcggtctctgtagcaacgactcaagtctgccat

SEQ ID NO: 679452 - DNA, 33 bp, Homo sapien
gcggtctctgtagcaatgactcaagtctgccat

SEQ ID NO: 679453 - DNA, 33 bp, Homo sapien
agaatttttacttatccaatttcgcaggccctc

SEQ ID NO: 679454 - DNA, 33 bp, Homo sapien
agaatttttacttatctaatttcgcaggccctc

SEQ ID NO: 679455 - DNA, 33 bp, Homo sapien
tcaaaactactttccacgctagatgcactaatt

SEQ ID NO: 679456 - DNA, 33 bp, Homo sapien
tcaaaactactttccatgctagatgcactaatt

SEQ ID NO: 679457 - DNA, 33 bp, Homo sapien
ctctcaaaataccaccgcaggccattgcttggc

SEQ ID NO: 679458 - DNA, 33 bp, Homo sapien
ctctcaaaataccacctcaggccattgcttggc

SEQ ID NO: 679459 - DNA, 33 bp, Homo sapien
aaatggcaccaaacacacaacctaattaattct

SEQ ID NO: 679460 - DNA, 33 bp, Homo sapien
aaatggcaccaaacacgcaacctaattaattct

SEQ ID NO: 679461 - DNA, 33 bp, Homo sapien
gctacgttccctttcaagaatcaagacgagagg

SEQ ID NO: 679462 - DNA, 33 bp, Homo sapien
gctacgttccctttcacgaatcaagacgagagg

SEQ ID NO: 679463 - DNA, 33 bp, Homo sapien
tgactttttatctatcaccagagccagcttctt

SEQ ID NO: 679464 - DNA, 33 bp, Homo sapien
tgactttttatctatctccagagccagcttctt

SEQ ID NO: 679465 - DNA, 33 bp, Homo sapien
atggcaattattcagacgtgaagggatgagggc

SEQ ID NO: 679466 - DNA, 33 bp, Homo sapien
atggcaattattcagatgtgaagggatgagggc

SEQ ID NO: 679467 - DNA, 33 bp, Homo sapien
ggaattacagacgaagcaccaaaataaaccaca

SEQ ID NO: 679468 - DNA, 33 bp, Homo sapien
ggaattacagacgaagtaccaaaataaaccaca

SEQ ID NO: 679469 - DNA, 33 bp, Homo sapien
ttgattggcagaaataggtaccaggtgctctgg

SEQ ID NO: 679470 - DNA, 33 bp, Homo sapien
ttgattggcagaaatatgtaccaggtgctctgg

SEQ ID NO: 679471 - DNA, 33 bp, Homo sapien
gtttgtcagggaaatgcaaatcgaaaacacaat

SEQ ID NO: 679472 - DNA, 33 bp, Homo sapien
gtttgtcagggaaatgtaaatcgaaaacacaat

SEQ ID NO: 679473 - DNA, 33 bp, Homo sapien
gttagtttgagctagaagaaaacttacagatca

SEQ ID NO: 679474 - DNA, 33 bp, Homo sapien
gttagtttgagctagaggaaaacttacagatca

SEQ ID NO: 679475 - DNA, 33 bp, Homo sapien
gctaaccagaagtacacaaagatgagtgtgatg

SEQ ID NO: 679476 - DNA, 33 bp, Homo sapien
gctaaccagaagtacagaaagatgagtgtgatg

SEQ ID NO: 679477 - DNA, 33 bp, Homo sapien
gaatctcttagtatgccacttatggctggaatc

SEQ ID NO: 679478 - DNA, 33 bp, Homo sapien
gaatctcttagtatgctacttatggctggaatc

SEQ ID NO: 679479 - DNA, 33 bp, Homo sapien
gaatctgtggagaagaagcaatgaggcaaaatt

SEQ ID NO: 679480 - DNA, 33 bp, Homo sapien
gaatctgtggagaagaggcaatgaggcaaaatt

SEQ ID NO: 679481 - DNA, 33 bp, Homo sapien
gctgtttccttacagcaagactgattcacccta

SEQ ID NO: 679482 - DNA, 33 bp, Homo sapien
gctgtttccttacagcgagactgattcacccta

SEQ ID NO: 679483 - DNA, 33 bp, Homo sapien
tgacaacctagaagagacctcactttgagcacg

SEQ ID NO: 679484 - DNA, 33 bp, Homo sapien
tgacaacctagaagaggcctcactttgagcacg

SEQ ID NO: 679485 - DNA, 33 bp, Homo sapien
caacagcagaacaaaaccaagcacaaggccctt

SEQ ID NO: 679486 - DNA, 33 bp, Homo sapien
caacagcagaacaaaatcaagcacaaggccctt

SEQ ID NO: 679487 - DNA, 33 bp, Homo sapien
tccaggaggggcacaaacagtaggagtaatgcc

SEQ ID NO: 679488 - DNA, 33 bp, Homo sapien
tccaggaggggcacaagcagtaggagtaatgcc

SEQ ID NO: 679489 - DNA, 33 bp, Homo sapien
tagagcctagtagaagaattaatgacttaagga

SEQ ID NO: 679490 - DNA, 33 bp, Homo sapien
tagagcctagtagaagcattaatgacttaagga

SEQ ID NO: 679491 - DNA, 33 bp, Homo sapien
tatgtgagataaacacgaaatggaagttttcac

SEQ ID NO: 679492 - DNA, 33 bp, Homo sapien
tatgtgagataaacactaaatggaagttttcac

SEQ ID NO: 679493 - DNA, 33 bp, Homo sapien
aggaccagccttcgtaccctgggcaaatttcca

SEQ ID NO: 679494 - DNA, 33 bp, Homo sapien
aggaccagccttcgtagcctgggcaaatttcca

SEQ ID NO: 679495 - DNA, 33 bp, Homo sapien
tcaagatacctatcccagacggggtgttgaact

SEQ ID NO: 679496 - DNA, 33 bp, Homo sapien
tcaagatacctatcccggacggggtgttgaact

SEQ ID NO: 679497 - DNA, 33 bp, Homo sapien
gctattagcattcttaccatagacgtaggaggc

SEQ ID NO: 679498 - DNA, 33 bp, Homo sapien
gctattagcattcttatcatagacgtaggaggc

SEQ ID NO: 679499 - DNA, 33 bp, Homo sapien
tggtgtcttagctgctcagacacccctcttcct

SEQ ID NO: 679500 - DNA, 33 bp, Homo sapien
tggtgtcttagctgctgagacacccctcttcct

SEQ ID NO: 679501 - DNA, 33 bp, Homo sapien
tgccccctgtggcccacacggctactgcaatac

SEQ ID NO: 679502 - DNA, 33 bp, Homo sapien
tgccccctgtggcccatacggctactgcaatac

SEQ ID NO: 679503 - DNA, 33 bp, Homo sapien
aagttagaggtgtggaataaggcacctcagagc

SEQ ID NO: 679504 - DNA, 33 bp, Homo sapien
aagttagaggtgtggagtaaggcacctcagagc

SEQ ID NO: 679505 - DNA, 33 bp, Homo sapien
ctttaaaagatcacctaaaagctcagagacatc

SEQ ID NO: 679506 - DNA, 33 bp, Homo sapien
ctttaaaagatcacctgaaagctcagagacatc

SEQ ID NO: 679507 - DNA, 33 bp, Homo sapien
gtcaggtacatttccaaagttaggataaaaacc

SEQ ID NO: 679508 - DNA, 33 bp, Homo sapien
gtcaggtacatttccagagttaggataaaaacc

SEQ ID NO: 679509 - DNA, 33 bp, Homo sapien
aaggctagaaaggtaaccatctttgtggtggta

SEQ ID NO: 679510 - DNA, 33 bp, Homo sapien
aaggctagaaaggtaatcatctttgtggtggta

SEQ ID NO: 679511 - DNA, 33 bp, Homo sapien
cccatcacgtatgggacagaatctaagctcttt

SEQ ID NO: 679512 - DNA, 33 bp, Homo sapien
cccatcacgtatgggatagaatctaagctcttt

SEQ ID NO: 679513 - DNA, 33 bp, Homo sapien
tacatctataaagacaagatagtgtttatttcc

SEQ ID NO: 679514 - DNA, 33 bp, Homo sapien
tacatctataaagacaggatagtgtttatttcc

SEQ ID NO: 679515 - DNA, 33 bp, Homo sapien
ctctgccccactgatacatatttcttacttgga

SEQ ID NO: 679516 - DNA, 33 bp, Homo sapien
ctctgccccactgatagatatttcttacttgga

SEQ ID NO: 679517 - DNA, 33 bp, Homo sapien
gttacaatataatactcaggcacgtgtggaatc

SEQ ID NO: 679518 - DNA, 33 bp, Homo sapien
gttacaatataatactgaggcacgtgtggaatc

SEQ ID NO: 679519 - DNA, 33 bp, Homo sapien
tcacacttccacttacggcaccaaatccaagag

SEQ ID NO: 679520 - DNA, 33 bp, Homo sapien
tcacacttccacttactgcaccaaatccaagag

SEQ ID NO: 679521 - DNA, 33 bp, Homo sapien
aggcttgtggatgtaacagacgtatatggaagc

SEQ ID NO: 679522 - DNA, 33 bp, Homo sapien
aggcttgtggatgtaatagacgtatatggaagc

SEQ ID NO: 679523 - DNA, 33 bp, Homo sapien
gcactttgtgaagaagacactccttgaggcagg

SEQ ID NO: 679524 - DNA, 33 bp, Homo sapien
gcactttgtgaagaaggcactccttgaggcagg

SEQ ID NO: 679525 - DNA, 33 bp, Homo sapien
gtagtgagaatgaatacgctttccttgttccaa

SEQ ID NO: 679526 - DNA, 33 bp, Homo sapien
gtagtgagaatgaatatgctttccttgttccaa

SEQ ID NO: 679527 - DNA, 33 bp, Homo sapien
ggatagtgaaatcatgaaagttgaaatcattaa

SEQ ID NO: 679528 - DNA, 33 bp, Homo sapien
ggatagtgaaatcatggaagttgaaatcattaa

SEQ ID NO: 679529 - DNA, 33 bp, Homo sapien
tgggagatagagtccaagttgatattttggtgg

SEQ ID NO: 679530 - DNA, 33 bp, Homo sapien
tgggagatagagtccaggttgatattttggtgg

SEQ ID NO: 679531 - DNA, 33 bp, Homo sapien
agtccttgggaaatgacggtagagctgggtttc

SEQ ID NO: 679532 - DNA, 33 bp, Homo sapien
agtccttgggaaatgatggtagagctgggtttc

SEQ ID NO: 679533 - DNA, 33 bp, Homo sapien
tctgcctttcctatacacgctgatgccccaatc

SEQ ID NO: 679534 - DNA, 33 bp, Homo sapien
tctgcctttcctatacgcgctgatgccccaatc

SEQ ID NO: 679535 - DNA, 33 bp, Homo sapien
gagaaaggatcagatacgtgagatgaggatgtg

SEQ ID NO: 679536 - DNA, 33 bp, Homo sapien
gagaaaggatcagataggtgagatgaggatgtg

SEQ ID NO: 679537 - DNA, 33 bp, Homo sapien
caggattgatggctcacggagggcagcagggcc

SEQ ID NO: 679538 - DNA, 33 bp, Homo sapien
caggattgatggctcatggagggcagcagggcc

SEQ ID NO: 679539 - DNA, 33 bp, Homo sapien
tgtaagggttgtgtaagtaaaggtgacacagaa

SEQ ID NO: 679540 - DNA, 33 bp, Homo sapien
tgtaagggttgtgtaattaaaggtgacacagaa

SEQ ID NO: 679541 - DNA, 33 bp, Homo sapien
agtgagtatattctacaaaccacaggtgaaact

SEQ ID NO: 679542 - DNA, 33 bp, Homo sapien
agtgagtatattctaccaaccacaggtgaaact

SEQ ID NO: 679543 - DNA, 33 bp, Homo sapien
gatttcctgtcttcaaagtacttaatgctattt

SEQ ID NO: 679544 - DNA, 33 bp, Homo sapien
gatttcctgtcttcaatgtacttaatgctattt

SEQ ID NO: 679545 - DNA, 33 bp, Homo sapien
aaccccagctaaaaggccccatagttataaaat

SEQ ID NO: 679546 - DNA, 33 bp, Homo sapien
aaccccagctaaaaggtcccatagttataaaat

SEQ ID NO: 679547 - DNA, 33 bp, Homo sapien
aatgccagtgtctgccaaagtatgactctagca

SEQ ID NO: 679548 - DNA, 33 bp, Homo sapien
aatgccagtgtctgccgaagtatgactctagca

SEQ ID NO: 679549 - DNA, 33 bp, Homo sapien
taccaaaaatggtcacagaatctcccaaactga

SEQ ID NO: 679550 - DNA, 33 bp, Homo sapien
taccaaaaatggtcacggaatctcccaaactga

SEQ ID NO: 679551 - DNA, 33 bp, Homo sapien
agagcagaatttagatcaagtgagagtgaataa

SEQ ID NO: 679552 - DNA, 33 bp, Homo sapien
agagcagaatttagattaagtgagagtgaataa

SEQ ID NO: 679553 - DNA, 33 bp, Homo sapien
atataattacgttcaaattaaagtttacgctat

SEQ ID NO: 679554 - DNA, 33 bp, Homo sapien
atataattacgttcaagttaaagtttacgctat

SEQ ID NO: 679555 - DNA, 33 bp, Homo sapien
tatttcatccactttgcatttgcaacttatagc

SEQ ID NO: 679556 - DNA, 33 bp, Homo sapien
tatttcatccactttgtatttgcaacttatagc

SEQ ID NO: 679557 - DNA, 33 bp, Homo sapien
ttcttggtaatccagaatattgctcatcatgta

SEQ ID NO: 679558 - DNA, 33 bp, Homo sapien
ttcttggtaatccagagtattgctcatcatgta

SEQ ID NO: 679559 - DNA, 33 bp, Homo sapien
ttgacatcctctcctcaaagcctcaggtacctg

SEQ ID NO: 679560 - DNA, 33 bp, Homo sapien
ttgacatcctctcctcgaagcctcaggtacctg

SEQ ID NO: 679561 - DNA, 33 bp, Homo sapien
tgttgatgtttaagttaaaattccagccaactt

SEQ ID NO: 679562 - DNA, 33 bp, Homo sapien
tgttgatgtttaagttgaaattccagccaactt

SEQ ID NO: 679563 - DNA, 33 bp, Homo sapien
cattagattgtagctaaggtgatgagatcctgc

SEQ ID NO: 679564 - DNA, 33 bp, Homo sapien
cattagattgtagctagggtgatgagatcctgc

SEQ ID NO: 679565 - DNA, 33 bp, Homo sapien
atgcttaaacttctgtaaaaccactgccttttt

SEQ ID NO: 679566 - DNA, 33 bp, Homo sapien
atgcttaaacttctgtgaaaccactgccttttt

SEQ ID NO: 679567 - DNA, 33 bp, Homo sapien
ctacatgatttttagtaacctatccagctcaat

SEQ ID NO: 679568 - DNA, 33 bp, Homo sapien
ctacatgatttttagtgacctatccagctcaat

SEQ ID NO: 679569 - DNA, 33 bp, Homo sapien
tcattgaatccttaacgctatccttaaccactc

SEQ ID NO: 679570 - DNA, 33 bp, Homo sapien
tcattgaatccttaactctatccttaaccactc

SEQ ID NO: 679571 - DNA, 33 bp, Homo sapien
catttgaataattcaaaaactgtgttactataa

SEQ ID NO: 679572 - DNA, 33 bp, Homo sapien
catttgaataattcaagaactgtgttactataa

SEQ ID NO: 679573 - DNA, 33 bp, Homo sapien
ttttctcatggtctaaggagtccacatcacttt

SEQ ID NO: 679574 - DNA, 33 bp, Homo sapien
ttttctcatggtctaatgagtccacatcacttt

SEQ ID NO: 679575 - DNA, 33 bp, Homo sapien
gacctgaggaactgtccccgccccttttcatct

SEQ ID NO: 679576 - DNA, 33 bp, Homo sapien
gacctgaggaactgtctccgccccttttcatct

SEQ ID NO: 679577 - DNA, 33 bp, Homo sapien
agagtaatagtattagaaaaatgtgtcggttgc

SEQ ID NO: 679578 - DNA, 33 bp, Homo sapien
agagtaatagtattagtaaaatgtgtcggttgc

SEQ ID NO: 679579 - DNA, 33 bp, Homo sapien
cctgtatgaccaatgactaaaaataatgtcaag

SEQ ID NO: 679580 - DNA, 33 bp, Homo sapien
cctgtatgaccaatgattaaaaataatgtcaag

SEQ ID NO: 679581 - DNA, 33 bp, Homo sapien
ccttgtgtagttacttcaaatattgtgtaagtt

SEQ ID NO: 679582 - DNA, 33 bp, Homo sapien
ccttgtgtagttacttgaaatattgtgtaagtt

SEQ ID NO: 679583 - DNA, 33 bp, Homo sapien
catgcaggattgcaacagaaagatttagctttg

SEQ ID NO: 679584 - DNA, 33 bp, Homo sapien
catgcaggattgcaacggaaagatttagctttg

SEQ ID NO: 679585 - DNA, 33 bp, Homo sapien
cacacaattatgtacacggatggtttatagaag

SEQ ID NO: 679586 - DNA, 33 bp, Homo sapien
cacacaattatgtacatggatggtttatagaag

SEQ ID NO: 679587 - DNA, 33 bp, Homo sapien
gggccaccaaatacaacataacaaacttaaaac

SEQ ID NO: 679588 - DNA, 33 bp, Homo sapien
gggccaccaaatacaatataacaaacttaaaac

SEQ ID NO: 679589 - DNA, 33 bp, Homo sapien
tgatactcttgagtacagccatgtccttactga

SEQ ID NO: 679590 - DNA, 33 bp, Homo sapien
tgatactcttgagtacggccatgtccttactga

SEQ ID NO: 679591 - DNA, 33 bp, Homo sapien
ataattatagagctacaatcgcaataatcaaat

SEQ ID NO: 679592 - DNA, 33 bp, Homo sapien
ataattatagagctacgatcgcaataatcaaat

SEQ ID NO: 679593 - DNA, 33 bp, Homo sapien
attatgaaaaccagaactgcactcagaactcat

SEQ ID NO: 679594 - DNA, 33 bp, Homo sapien
attatgaaaaccagaattgcactcagaactcat

SEQ ID NO: 679595 - DNA, 33 bp, Homo sapien
tgatgtgtttgattcaactgattataaggtacc

SEQ ID NO: 679596 - DNA, 33 bp, Homo sapien
tgatgtgtttgattcagctgattataaggtacc

SEQ ID NO: 679597 - DNA, 33 bp, Homo sapien
ttacacaaatattccactctacacaaccaagta

SEQ ID NO: 679598 - DNA, 33 bp, Homo sapien
ttacacaaatattccagtctacacaaccaagta

SEQ ID NO: 679599 - DNA, 33 bp, Homo sapien
aatacctcttgcaaaaatgaataaatgcatgaa

SEQ ID NO: 679600 - DNA, 33 bp, Homo sapien
aatacctcttgcaaaagtgaataaatgcatgaa

SEQ ID NO: 679601 - DNA, 33 bp, Homo sapien
catatcctgccagaaactgcagtagtaagagag

SEQ ID NO: 679602 - DNA, 33 bp, Homo sapien
catatcctgccagaaattgcagtagtaagagag

SEQ ID NO: 679603 - DNA, 33 bp, Homo sapien
cacaacatttacacaaagattttagatgcagta

SEQ ID NO: 679604 - DNA, 33 bp, Homo sapien
cacaacatttacacaaggattttagatgcagta

SEQ ID NO: 679605 - DNA, 33 bp, Homo sapien
agatgaaggaataagacgtgatgcttaaacaaa

SEQ ID NO: 679606 - DNA, 33 bp, Homo sapien
agatgaaggaataagatgtgatgcttaaacaaa

SEQ ID NO: 679607 - DNA, 33 bp, Homo sapien
ctctcaatgggttaaccgcttggacatctggtg

SEQ ID NO: 679608 - DNA, 33 bp, Homo sapien
ctctcaatgggttaactgcttggacatctggtg

SEQ ID NO: 679609 - DNA, 33 bp, Homo sapien
cctttagcattcatcaaaagtggctgtgaggct

SEQ ID NO: 679610 - DNA, 33 bp, Homo sapien
cctttagcattcatcagaagtggctgtgaggct

SEQ ID NO: 679611 - DNA, 33 bp, Homo sapien
tagtatacatcgtatccaatatataggattttt

SEQ ID NO: 679612 - DNA, 33 bp, Homo sapien
tagtatacatcgtatctaatatataggattttt

SEQ ID NO: 679613 - DNA, 33 bp, Homo sapien
ttctttagctgcatccaacaagttttgatatgc

SEQ ID NO: 679614 - DNA, 33 bp, Homo sapien
ttctttagctgcatcccacaagttttgatatgc

SEQ ID NO: 679615 - DNA, 33 bp, Homo sapien
cattgacacgtaatcaagaatattcacactgca

SEQ ID NO: 679616 - DNA, 33 bp, Homo sapien
cattgacacgtaatcaggaatattcacactgca

SEQ ID NO: 679617 - DNA, 33 bp, Homo sapien
acatcatcaatcccctaaactccatgcttccta

SEQ ID NO: 679618 - DNA, 33 bp, Homo sapien
acatcatcaatcccctgaactccatgcttccta

SEQ ID NO: 679619 - DNA, 33 bp, Homo sapien
gggagaagtctgcttacagagaaatttctgaga

SEQ ID NO: 679620 - DNA, 33 bp, Homo sapien
gggagaagtctgcttatagagaaatttctgaga

SEQ ID NO: 679621 - DNA, 33 bp, Homo sapien
ctcatgtgttgagagacggtttgtcctgagaca

SEQ ID NO: 679622 - DNA, 33 bp, Homo sapien
ctcatgtgttgagagatggtttgtcctgagaca

SEQ ID NO: 679623 - DNA, 33 bp, Homo sapien
tagtcactgtcttaaacatgcctgaatttataa

SEQ ID NO: 679624 - DNA, 33 bp, Homo sapien
tagtcactgtcttaaatatgcctgaatttataa

SEQ ID NO: 679625 - DNA, 33 bp, Homo sapien
ctctaagagaaatacgaatctgtaatttactgt

SEQ ID NO: 679626 - DNA, 33 bp, Homo sapien
ctctaagagaaatacggatctgtaatttactgt

SEQ ID NO: 679627 - DNA, 33 bp, Homo sapien
taaacacttatacctccactttgaagtcatttg

SEQ ID NO: 679628 - DNA, 33 bp, Homo sapien
taaacacttatacctcgactttgaagtcatttg

SEQ ID NO: 679629 - DNA, 33 bp, Homo sapien
aagaaaacctgattgcacagaagaggggtaaaa

SEQ ID NO: 679630 - DNA, 33 bp, Homo sapien
aagaaaacctgattgcgcagaagaggggtaaaa

SEQ ID NO: 679631 - DNA, 33 bp, Homo sapien
aattttgaaagtggctcaaacttgtttatttac

SEQ ID NO: 679632 - DNA, 33 bp, Homo sapien
aattttgaaagtggctgaaacttgtttatttac

SEQ ID NO: 679633 - DNA, 33 bp, Homo sapien
tcctacgagagatcaactaagcaggagtagtgt

SEQ ID NO: 679634 - DNA, 33 bp, Homo sapien
tcctacgagagatcaagtaagcaggagtagtgt

SEQ ID NO: 679635 - DNA, 33 bp, Homo sapien
gttcctccactctgccccattacaattgtagcc

SEQ ID NO: 679636 - DNA, 33 bp, Homo sapien
gttcctccactctgccgcattacaattgtagcc

SEQ ID NO: 679637 - DNA, 33 bp, Homo sapien
attcaagtaaaatgcaaccatagaatgtttata

SEQ ID NO: 679638 - DNA, 33 bp, Homo sapien
attcaagtaaaatgcatccatagaatgtttata

SEQ ID NO: 679639 - DNA, 33 bp, Homo sapien
gagcataaggacgaccactggattgaattcgga

SEQ ID NO: 679640 - DNA, 33 bp, Homo sapien
gagcataaggacgaccgctggattgaattcgga

SEQ ID NO: 679641 - DNA, 33 bp, Homo sapien
ccagaagtacttccgaacatttcttggaaatgt

SEQ ID NO: 679642 - DNA, 33 bp, Homo sapien
ccagaagtacttccgagcatttcttggaaatgt

SEQ ID NO: 679643 - DNA, 33 bp, Homo sapien
gctaatcctcagggaaaagatctgacaggtgtg

SEQ ID NO: 679644 - DNA, 33 bp, Homo sapien
gctaatcctcagggaagagatctgacaggtgtg

SEQ ID NO: 679645 - DNA, 33 bp, Homo sapien
taatcacagtgctcccagaatcagaactcttca

SEQ ID NO: 679646 - DNA, 33 bp, Homo sapien
taatcacagtgctcccggaatcagaactcttca

SEQ ID NO: 679647 - DNA, 33 bp, Homo sapien
accagcagaatatagcacacatttgaagacatg

SEQ ID NO: 679648 - DNA, 33 bp, Homo sapien
accagcagaatatagcgcacatttgaagacatg

SEQ ID NO: 679649 - DNA, 33 bp, Homo sapien
tccagtattttgcttagagacacccataacatt

SEQ ID NO: 679650 - DNA, 33 bp, Homo sapien
tccagtattttgcttatagacacccataacatt

SEQ ID NO: 679651 - DNA, 33 bp, Homo sapien
tgcattagcaaaataaaaagtgtaccaggatcc

SEQ ID NO: 679652 - DNA, 33 bp, Homo sapien
tgcattagcaaaataagaagtgtaccaggatcc

SEQ ID NO: 679653 - DNA, 33 bp, Homo sapien
ttgagtccctgcctaaaacatcttaggagaagc

SEQ ID NO: 679654 - DNA, 33 bp, Homo sapien
ttgagtccctgcctaacacatcttaggagaagc

SEQ ID NO: 679655 - DNA, 33 bp, Homo sapien
acaaaataaaatcatacgcaagaatctttattt

SEQ ID NO: 679656 - DNA, 33 bp, Homo sapien
acaaaataaaatcatatgcaagaatctttattt

SEQ ID NO: 679657 - DNA, 33 bp, Homo sapien
gcagggaagagcatcaatgaaagtcaaaaattg

SEQ ID NO: 679658 - DNA, 33 bp, Homo sapien
gcagggaagagcatcagtgaaagtcaaaaattg

SEQ ID NO: 679659 - DNA, 33 bp, Homo sapien
agagaaagcttataacaaaagtccagaagtgtg

SEQ ID NO: 679660 - DNA, 33 bp, Homo sapien
agagaaagcttataacgaaagtccagaagtgtg

SEQ ID NO: 679661 - DNA, 33 bp, Homo sapien
tgctccaattgcattgctccatagctgttctca

SEQ ID NO: 679662 - DNA, 33 bp, Homo sapien
tgctccaattgcattgttccatagctgttctca

SEQ ID NO: 679663 - DNA, 33 bp, Homo sapien
aacaaagtatttgagacgtctggaactacataa

SEQ ID NO: 679664 - DNA, 33 bp, Homo sapien
aacaaagtatttgagatgtctggaactacataa

SEQ ID NO: 679665 - DNA, 33 bp, Homo sapien
gtgtaaactaagagtcacatcacaaggcctcca

SEQ ID NO: 679666 - DNA, 33 bp, Homo sapien
gtgtaaactaagagtcgcatcacaaggcctcca

SEQ ID NO: 679667 - DNA, 33 bp, Homo sapien
ccaagcaaggcagggggccatggaggcagtcta

SEQ ID NO: 679668 - DNA, 33 bp, Homo sapien
ccaagcaaggcaggggtccatggaggcagtcta

SEQ ID NO: 679669 - DNA, 33 bp, Homo sapien
tctggtggaaagagtacggtggccacataaaag

SEQ ID NO: 679670 - DNA, 33 bp, Homo sapien
tctggtggaaagagtatggtggccacataaaag

SEQ ID NO: 679671 - DNA, 33 bp, Homo sapien
gaggtcatgatgtccaaccctgctacaaacaat

SEQ ID NO: 679672 - DNA, 33 bp, Homo sapien
gaggtcatgatgtccagccctgctacaaacaat

SEQ ID NO: 679673 - DNA, 33 bp, Homo sapien
ttcaaagagatttatccgagcagcttatcttta

SEQ ID NO: 679674 - DNA, 33 bp, Homo sapien
ttcaaagagatttatctgagcagcttatcttta

SEQ ID NO: 679675 - DNA, 33 bp, Homo sapien
ataacaatactaaaaccgccacaaccaatataa

SEQ ID NO: 679676 - DNA, 33 bp, Homo sapien
ataacaatactaaaactgccacaaccaatataa

SEQ ID NO: 679677 - DNA, 33 bp, Homo sapien
gaaatagaatctccgaagaaaagaccacagatt

SEQ ID NO: 679678 - DNA, 33 bp, Homo sapien
gaaatagaatctccgatgaaaagaccacagatt

SEQ ID NO: 679679 - DNA, 33 bp, Homo sapien
ttattccagaactgccacaagaaatgtacaaga

SEQ ID NO: 679680 - DNA, 33 bp, Homo sapien
ttattccagaactgccgcaagaaatgtacaaga

SEQ ID NO: 679681 - DNA, 33 bp, Homo sapien
aactaattgattaatacacatagccaaaagaaa

SEQ ID NO: 679682 - DNA, 33 bp, Homo sapien
aactaattgattaatagacatagccaaaagaaa

SEQ ID NO: 679683 - DNA, 33 bp, Homo sapien
tatataaacttcttgtaaatgtagtcatatttg

SEQ ID NO: 679684 - DNA, 33 bp, Homo sapien
tatataaacttcttgtcaatgtagtcatatttg

SEQ ID NO: 679685 - DNA, 33 bp, Homo sapien
aaaatgatgcatgccaaattcagacagtgattt

SEQ ID NO: 679686 - DNA, 33 bp, Homo sapien
aaaatgatgcatgccacattcagacagtgattt

SEQ ID NO: 679687 - DNA, 33 bp, Homo sapien
tgtatgaatatgtaacagaaacattctggcaga

SEQ ID NO: 679688 - DNA, 33 bp, Homo sapien
tgtatgaatatgtaacggaaacattctggcaga

SEQ ID NO: 679689 - DNA, 33 bp, Homo sapien
tttggtgttttccaaaattccttctgttattga

SEQ ID NO: 679690 - DNA, 33 bp, Homo sapien
tttggtgttttccaaagttccttctgttattga

SEQ ID NO: 679691 - DNA, 33 bp, Homo sapien
cggtgtggaaatggaaagagagactgactaatt

SEQ ID NO: 679692 - DNA, 33 bp, Homo sapien
cggtgtggaaatggaaggagagactgactaatt

SEQ ID NO: 679693 - DNA, 33 bp, Homo sapien
cattgccctgtagtcaaaattccaacattgaag

SEQ ID NO: 679694 - DNA, 33 bp, Homo sapien
cattgccctgtagtcagaattccaacattgaag

SEQ ID NO: 679695 - DNA, 33 bp, Homo sapien
cagtttttcctggtcacgtctcctatcttctgc

SEQ ID NO: 679696 - DNA, 33 bp, Homo sapien
cagtttttcctggtcatgtctcctatcttctgc

SEQ ID NO: 679697 - DNA, 33 bp, Homo sapien
taagaagaggctaaagaactttgaaatgaagat

SEQ ID NO: 679698 - DNA, 33 bp, Homo sapien
taagaagaggctaaaggactttgaaatgaagat

SEQ ID NO: 679699 - DNA, 33 bp, Homo sapien
tgaatcagcattttcaaagaggagaccaagtaa

SEQ ID NO: 679700 - DNA, 33 bp, Homo sapien
tgaatcagcattttcagagaggagaccaagtaa

SEQ ID NO: 679701 - DNA, 33 bp, Homo sapien
gtggctagggacggtaaccttcaagatcacaca

SEQ ID NO: 679702 - DNA, 33 bp, Homo sapien
gtggctagggacggtatccttcaagatcacaca

SEQ ID NO: 679703 - DNA, 33 bp, Homo sapien
ctcaatagattctgtacagccggaaacggtaaa

SEQ ID NO: 679704 - DNA, 33 bp, Homo sapien
ctcaatagattctgtatagccggaaacggtaaa

SEQ ID NO: 679705 - DNA, 33 bp, Homo sapien
ttatattctgtaatcaccttctccagcacaggt

SEQ ID NO: 679706 - DNA, 33 bp, Homo sapien
ttatattctgtaatcagcttctccagcacaggt

SEQ ID NO: 679707 - DNA, 33 bp, Homo sapien
agtccagtttggaaatcagcaagatcgtgttca

SEQ ID NO: 679708 - DNA, 33 bp, Homo sapien
agtccagtttggaaattagcaagatcgtgttca

SEQ ID NO: 679709 - DNA, 33 bp, Homo sapien
cttgcaaggcctcttacgttctaaccttgcaag

SEQ ID NO: 679710 - DNA, 33 bp, Homo sapien
cttgcaaggcctcttatgttctaaccttgcaag

SEQ ID NO: 679711 - DNA, 33 bp, Homo sapien
ttctactatttgtcagaccttatgcaagtggtt

SEQ ID NO: 679712 - DNA, 33 bp, Homo sapien
ttctactatttgtcaggccttatgcaagtggtt

SEQ ID NO: 679713 - DNA, 33 bp, Homo sapien
aaggcagtagcgacaaccaagtcacaaaaatcg

SEQ ID NO: 679714 - DNA, 33 bp, Homo sapien
aaggcagtagcgacaagcaagtcacaaaaatcg

SEQ ID NO: 679715 - DNA, 33 bp, Homo sapien
atctgattaacattccagctcagtaggtcctta

SEQ ID NO: 679716 - DNA, 33 bp, Homo sapien
atctgattaacattccggctcagtaggtcctta

SEQ ID NO: 679717 - DNA, 33 bp, Homo sapien
gaactatctaacaatacgataggtcagctcaaa

SEQ ID NO: 679718 - DNA, 33 bp, Homo sapien
gaactatctaacaatatgataggtcagctcaaa

SEQ ID NO: 679719 - DNA, 33 bp, Homo sapien
attcttctggaaaggacgaattagaggtaataa

SEQ ID NO: 679720 - DNA, 33 bp, Homo sapien
attcttctggaaaggatgaattagaggtaataa

SEQ ID NO: 679721 - DNA, 33 bp, Homo sapien
tgtttaaatttccatcaagatagcagaagtgtg

SEQ ID NO: 679722 - DNA, 33 bp, Homo sapien
tgtttaaatttccatcgagatagcagaagtgtg

SEQ ID NO: 679723 - DNA, 33 bp, Homo sapien
tatttagtataacatcagactgagtaaagagga

SEQ ID NO: 679724 - DNA, 33 bp, Homo sapien
tatttagtataacatcggactgagtaaagagga

SEQ ID NO: 679725 - DNA, 33 bp, Homo sapien
aattgagccaggacctcaccctactttgtgaat

SEQ ID NO: 679726 - DNA, 33 bp, Homo sapien
aattgagccaggacctgaccctactttgtgaat

SEQ ID NO: 679727 - DNA, 33 bp, Homo sapien
cacaaaaatatccacacatcctctcatcctagc

SEQ ID NO: 679728 - DNA, 33 bp, Homo sapien
cacaaaaatatccacatatcctctcatcctagc

SEQ ID NO: 679729 - DNA, 33 bp, Homo sapien
tccatgtaaatgatgcccctctaccctcaagaa

SEQ ID NO: 679730 - DNA, 33 bp, Homo sapien
tccatgtaaatgatgctcctctaccctcaagaa

SEQ ID NO: 679731 - DNA, 33 bp, Homo sapien
gctagttggaagggtaacaggatcactaagttc

SEQ ID NO: 679732 - DNA, 33 bp, Homo sapien
gctagttggaagggtagcaggatcactaagttc

SEQ ID NO: 679733 - DNA, 33 bp, Homo sapien
ttttagtcccctcaatcaagtacctgcaaaaat

SEQ ID NO: 679734 - DNA, 33 bp, Homo sapien
ttttagtcccctcaatgaagtacctgcaaaaat

SEQ ID NO: 679735 - DNA, 33 bp, Homo sapien
tcgtagaaacttgacacagagatgttgctgtaa

SEQ ID NO: 679736 - DNA, 33 bp, Homo sapien
tcgtagaaacttgacatagagatgttgctgtaa

SEQ ID NO: 679737 - DNA, 33 bp, Homo sapien
ctgacatttatgaccacatttttgcttttgact

SEQ ID NO: 679738 - DNA, 33 bp, Homo sapien
ctgacatttatgaccatatttttgcttttgact

SEQ ID NO: 679739 - DNA, 33 bp, Homo sapien
atttcacacaggaagacatagttggtgactctg

SEQ ID NO: 679740 - DNA, 33 bp, Homo sapien
atttcacacaggaagagatagttggtgactctg

SEQ ID NO: 679741 - DNA, 33 bp, Homo sapien
tccatttcatgtgtgacgaagctaagactcaga

SEQ ID NO: 679742 - DNA, 33 bp, Homo sapien
tccatttcatgtgtgaggaagctaagactcaga

SEQ ID NO: 679743 - DNA, 33 bp, Homo sapien
cgcatgacagttgagaagttgcaatgagatact

SEQ ID NO: 679744 - DNA, 33 bp, Homo sapien
cgcatgacagttgagatgttgcaatgagatact

SEQ ID NO: 679745 - DNA, 33 bp, Homo sapien
ccttaagggagtgtcccaaggaaagagggcatg

SEQ ID NO: 679746 - DNA, 33 bp, Homo sapien
ccttaagggagtgtccgaaggaaagagggcatg

SEQ ID NO: 679747 - DNA, 33 bp, Homo sapien
agttagcaggatcctccccatgacagaactttg

SEQ ID NO: 679748 - DNA, 33 bp, Homo sapien
agttagcaggatcctctccatgacagaactttg

SEQ ID NO: 679749 - DNA, 33 bp, Homo sapien
ttactcccagacctcaagcaggtagcctactct

SEQ ID NO: 679750 - DNA, 33 bp, Homo sapien
ttactcccagacctcaggcaggtagcctactct

SEQ ID NO: 679751 - DNA, 33 bp, Homo sapien
agctaaacaaacaaacaagagatccacaggttc

SEQ ID NO: 679752 - DNA, 33 bp, Homo sapien
agctaaacaaacaaacgagagatccacaggttc

SEQ ID NO: 679753 - DNA, 33 bp, Homo sapien
tgcatttgtatagtaaacttagtcccctaagag

SEQ ID NO: 679754 - DNA, 33 bp, Homo sapien
tgcatttgtatagtaaccttagtcccctaagag

SEQ ID NO: 679755 - DNA, 33 bp, Homo sapien
ctcttgaggcagtaaactgaaacagtgattctt

SEQ ID NO: 679756 - DNA, 33 bp, Homo sapien
ctcttgaggcagtaaattgaaacagtgattctt

SEQ ID NO: 679757 - DNA, 33 bp, Homo sapien
taaagaattcaccatgaaaaagtcctcaagcaa

SEQ ID NO: 679758 - DNA, 33 bp, Homo sapien
taaagaattcaccatggaaaagtcctcaagcaa

SEQ ID NO: 679759 - DNA, 33 bp, Homo sapien
ctacacctacagagaagaccaaaattaacaaga

SEQ ID NO: 679760 - DNA, 33 bp, Homo sapien
ctacacctacagagaataccaaaattaacaaga

SEQ ID NO: 679761 - DNA, 33 bp, Homo sapien
aaatggttttacatgacaaagtcctaaacgact

SEQ ID NO: 679762 - DNA, 33 bp, Homo sapien
aaatggttttacatgataaagtcctaaacgact

SEQ ID NO: 679763 - DNA, 33 bp, Homo sapien
atgtaataacaacaagactatttgattagattc

SEQ ID NO: 679764 - DNA, 33 bp, Homo sapien
atgtaataacaacaaggctatttgattagattc

SEQ ID NO: 679765 - DNA, 33 bp, Homo sapien
tattaaaaggaccatacagttactcatgttctt

SEQ ID NO: 679766 - DNA, 33 bp, Homo sapien
tattaaaaggaccatatagttactcatgttctt

SEQ ID NO: 679767 - DNA, 33 bp, Homo sapien
tgttcttggtccagaaaatacatatgccaggac

SEQ ID NO: 679768 - DNA, 33 bp, Homo sapien
tgttcttggtccagaacatacatatgccaggac

SEQ ID NO: 679769 - DNA, 33 bp, Homo sapien
ttttcagatatgctaaagttataatggcttttt

SEQ ID NO: 679770 - DNA, 33 bp, Homo sapien
ttttcagatatgctaatgttataatggcttttt

SEQ ID NO: 679771 - DNA, 33 bp, Homo sapien
tgcattttagggctaaacaagaagtctcctaaa

SEQ ID NO: 679772 - DNA, 33 bp, Homo sapien
tgcattttagggctaaccaagaagtctcctaaa

SEQ ID NO: 679773 - DNA, 33 bp, Homo sapien
aacagttttctttcagaccaattaaggataaaa

SEQ ID NO: 679774 - DNA, 33 bp, Homo sapien
aacagttttctttcaggccaattaaggataaaa

SEQ ID NO: 679775 - DNA, 33 bp, Homo sapien
tatgttctttgttcccaatctcccatacatacc

SEQ ID NO: 679776 - DNA, 33 bp, Homo sapien
tatgttctttgttccccatctcccatacatacc

SEQ ID NO: 679777 - DNA, 33 bp, Homo sapien
tcaacagtgacaattcaagtagatagtatgtag

SEQ ID NO: 679778 - DNA, 33 bp, Homo sapien
tcaacagtgacaattcgagtagatagtatgtag

SEQ ID NO: 679779 - DNA, 33 bp, Homo sapien
aaatccataacgctaagtctaatcatgagaaaa

SEQ ID NO: 679780 - DNA, 33 bp, Homo sapien
aaatccataacgctaattctaatcatgagaaaa

SEQ ID NO: 679781 - DNA, 33 bp, Homo sapien
aaactgttgtaactaacagccaaatgagatatg

SEQ ID NO: 679782 - DNA, 33 bp, Homo sapien
aaactgttgtaactaagagccaaatgagatatg

SEQ ID NO: 679783 - DNA, 33 bp, Homo sapien
tatcaggtttgaacacaagattataatgttgaa

SEQ ID NO: 679784 - DNA, 33 bp, Homo sapien
tatcaggtttgaacacgagattataatgttgaa

SEQ ID NO: 679785 - DNA, 33 bp, Homo sapien
aatgggacttaccacaagaatcacaaggattgt

SEQ ID NO: 679786 - DNA, 33 bp, Homo sapien
aatgggacttaccacaggaatcacaaggattgt

SEQ ID NO: 679787 - DNA, 33 bp, Homo sapien
tcttcctcaacagccactgaatcagttccatcc

SEQ ID NO: 679788 - DNA, 33 bp, Homo sapien
tcttcctcaacagccagtgaatcagttccatcc

SEQ ID NO: 679789 - DNA, 33 bp, Homo sapien
tgaagctgcagatgtccagggtgtaatcaaacc

SEQ ID NO: 679790 - DNA, 33 bp, Homo sapien
tgaagctgcagatgtcgagggtgtaatcaaacc

SEQ ID NO: 679791 - DNA, 33 bp, Homo sapien
ttttttgaggcatgacccttttgaatacctaat

SEQ ID NO: 679792 - DNA, 33 bp, Homo sapien
ttttttgaggcatgactcttttgaatacctaat

SEQ ID NO: 679793 - DNA, 33 bp, Homo sapien
tgactgtgtatggcaactcaggatttctcaacc

SEQ ID NO: 679794 - DNA, 33 bp, Homo sapien
tgactgtgtatggcaattcaggatttctcaacc

SEQ ID NO: 679795 - DNA, 33 bp, Homo sapien
atatgtggttgacacaacttgggaagcagaagt

SEQ ID NO: 679796 - DNA, 33 bp, Homo sapien
atatgtggttgacacagcttgggaagcagaagt

SEQ ID NO: 679797 - DNA, 33 bp, Homo sapien
cttccagactattaaacagcggaacagaaatgt

SEQ ID NO: 679798 - DNA, 33 bp, Homo sapien
cttccagactattaaagagcggaacagaaatgt

SEQ ID NO: 679799 - DNA, 33 bp, Homo sapien
ggaccgtctttaccagaagtcgtgaatagattt

SEQ ID NO: 679800 - DNA, 33 bp, Homo sapien
ggaccgtctttaccaggagtcgtgaatagattt

SEQ ID NO: 679801 - DNA, 33 bp, Homo sapien
caggaaaacaaacctacagtaaatgtgttagca

SEQ ID NO: 679802 - DNA, 33 bp, Homo sapien
caggaaaacaaacctatagtaaatgtgttagca

SEQ ID NO: 679803 - DNA, 33 bp, Homo sapien
tttggtgtggattatgcattctgggtctgccgc

SEQ ID NO: 679804 - DNA, 33 bp, Homo sapien
tttggtgtggattatggattctgggtctgccgc

SEQ ID NO: 679805 - DNA, 33 bp, Homo sapien
ggcaagccaattttggaagtcccaggtggcttg

SEQ ID NO: 679806 - DNA, 33 bp, Homo sapien
ggcaagccaattttgggagtcccaggtggcttg

SEQ ID NO: 679807 - DNA, 33 bp, Homo sapien
atatattttcaaagtacataaaggagaggactt

SEQ ID NO: 679808 - DNA, 33 bp, Homo sapien
atatattttcaaagtagataaaggagaggactt

SEQ ID NO: 679809 - DNA, 33 bp, Homo sapien
tctcggattttctctacgcttataaaggacacc

SEQ ID NO: 679810 - DNA, 33 bp, Homo sapien
tctcggattttctctatgcttataaaggacacc

SEQ ID NO: 679811 - DNA, 33 bp, Homo sapien
tcctttctgggcctgacgttctcggattttctc

SEQ ID NO: 679812 - DNA, 33 bp, Homo sapien
tcctttctgggcctgatgttctcggattttctc

SEQ ID NO: 679813 - DNA, 33 bp, Homo sapien
tttgtgacatcaggaacccgtggataatcccac

SEQ ID NO: 679814 - DNA, 33 bp, Homo sapien
tttgtgacatcaggaatccgtggataatcccac

SEQ ID NO: 679815 - DNA, 33 bp, Homo sapien
aaataccataaggagcagacatctgatgtaaag

SEQ ID NO: 679816 - DNA, 33 bp, Homo sapien
aaataccataaggagcggacatctgatgtaaag

SEQ ID NO: 679817 - DNA, 33 bp, Homo sapien
gttttcaacctgttaactggatttagtgtcatt

SEQ ID NO: 679818 - DNA, 33 bp, Homo sapien
gttttcaacctgttaattggatttagtgtcatt

SEQ ID NO: 679819 - DNA, 33 bp, Homo sapien
cattatccattcagcaaaagagactaactcaaa

SEQ ID NO: 679820 - DNA, 33 bp, Homo sapien
cattatccattcagcagaagagactaactcaaa

SEQ ID NO: 679821 - DNA, 33 bp, Homo sapien
acttcgtaaagctccacggtctctgaattaggg

SEQ ID NO: 679822 - DNA, 33 bp, Homo sapien
acttcgtaaagctccatggtctctgaattaggg

SEQ ID NO: 679823 - DNA, 33 bp, Homo sapien
aatatcagtgccctgaaaaaagggatacactgt

SEQ ID NO: 679824 - DNA, 33 bp, Homo sapien
aatatcagtgccctgacaaaagggatacactgt

SEQ ID NO: 679825 - DNA, 33 bp, Homo sapien
tgagaaagaggatgagaatggagaaacctactc

SEQ ID NO: 679826 - DNA, 33 bp, Homo sapien
tgagaaagaggatgaggatggagaaacctactc

SEQ ID NO: 679827 - DNA, 33 bp, Homo sapien
tatcacaaccttttcacgtaacaaatcactttg

SEQ ID NO: 679828 - DNA, 33 bp, Homo sapien
tatcacaaccttttcatgtaacaaatcactttg

SEQ ID NO: 679829 - DNA, 33 bp, Homo sapien
gaatgataagtacagaaactgtggcaaaagagc

SEQ ID NO: 679830 - DNA, 33 bp, Homo sapien
gaatgataagtacagagactgtggcaaaagagc

SEQ ID NO: 679831 - DNA, 33 bp, Homo sapien
gcagtacccaggcaacactctaattctttccct

SEQ ID NO: 679832 - DNA, 33 bp, Homo sapien
gcagtacccaggcaacgctctaattctttccct

SEQ ID NO: 679833 - DNA, 33 bp, Homo sapien
ttagttggttatattacctgtagtacaactcaa

SEQ ID NO: 679834 - DNA, 33 bp, Homo sapien
ttagttggttatattagctgtagtacaactcaa

SEQ ID NO: 679835 - DNA, 33 bp, Homo sapien
tgataggaagtctgacgcgtgagccaaatcttg

SEQ ID NO: 679836 - DNA, 33 bp, Homo sapien
tgataggaagtctgactcgtgagccaaatcttg

SEQ ID NO: 679837 - DNA, 33 bp, Homo sapien
gtaagccgaccttaacacgagtacctgctgtat

SEQ ID NO: 679838 - DNA, 33 bp, Homo sapien
gtaagccgaccttaacgcgagtacctgctgtat

SEQ ID NO: 679839 - DNA, 33 bp, Homo sapien
ttaattttgtataggcagagtcttcttgtattg

SEQ ID NO: 679840 - DNA, 33 bp, Homo sapien
ttaattttgtataggccgagtcttcttgtattg

SEQ ID NO: 679841 - DNA, 33 bp, Homo sapien
aagcaacacaggatgggatctctatctggttct

SEQ ID NO: 679842 - DNA, 33 bp, Homo sapien
aagcaacacaggatggtatctctatctggttct

SEQ ID NO: 679843 - DNA, 33 bp, Homo sapien
ttgtagcaaggatttaaagcacaaaggacaagc

SEQ ID NO: 679844 - DNA, 33 bp, Homo sapien
ttgtagcaaggatttagagcacaaaggacaagc

SEQ ID NO: 679845 - DNA, 33 bp, Homo sapien
cgcagacttaaaaaaaactgtgaaatgccttga

SEQ ID NO: 679846 - DNA, 33 bp, Homo sapien
cgcagacttaaaaaaacctgtgaaatgccttga

SEQ ID NO: 679847 - DNA, 33 bp, Homo sapien
ttctcactggctctgacggctgacgtcccactt

SEQ ID NO: 679848 - DNA, 33 bp, Homo sapien
ttctcactggctctgagggctgacgtcccactt

SEQ ID NO: 679849 - DNA, 33 bp, Homo sapien
tttatgtattcttccccaccatccttccacctc

SEQ ID NO: 679850 - DNA, 33 bp, Homo sapien
tttatgtattcttccctaccatccttccacctc

SEQ ID NO: 679851 - DNA, 33 bp, Homo sapien
agaaaatgactacaaacccaatcaaactgggca

SEQ ID NO: 679852 - DNA, 33 bp, Homo sapien
agaaaatgactacaaagccaatcaaactgggca

SEQ ID NO: 679853 - DNA, 33 bp, Homo sapien
agaatacatatctacactcttacctacataata

SEQ ID NO: 679854 - DNA, 33 bp, Homo sapien
agaatacatatctacagtcttacctacataata

SEQ ID NO: 679855 - DNA, 33 bp, Homo sapien
gagtttctcaatggaacctcatcaaatgtaaag

SEQ ID NO: 679856 - DNA, 33 bp, Homo sapien
gagtttctcaatggaatctcatcaaatgtaaag

SEQ ID NO: 679857 - DNA, 33 bp, Homo sapien
ttcaacattacagtaaactcacatagctagata

SEQ ID NO: 679858 - DNA, 33 bp, Homo sapien
ttcaacattacagtaatctcacatagctagata

SEQ ID NO: 679859 - DNA, 33 bp, Homo sapien
cacatttgacaaaagcacaaaggcaataggatg

SEQ ID NO: 679860 - DNA, 33 bp, Homo sapien
cacatttgacaaaagcgcaaaggcaataggatg

SEQ ID NO: 679861 - DNA, 33 bp, Homo sapien
gtatatgccttcattcgcagtgattacaaggtg

SEQ ID NO: 679862 - DNA, 33 bp, Homo sapien
gtatatgccttcattctcagtgattacaaggtg

SEQ ID NO: 679863 - DNA, 33 bp, Homo sapien
agatgtttacattcaagtctctctgctgaaaac

SEQ ID NO: 679864 - DNA, 33 bp, Homo sapien
agatgtttacattcaattctctctgctgaaaac

SEQ ID NO: 679865 - DNA, 33 bp, Homo sapien
aaggcaggctaatttcaaattggttttgtattg

SEQ ID NO: 679866 - DNA, 33 bp, Homo sapien
aaggcaggctaatttcgaattggttttgtattg

SEQ ID NO: 679867 - DNA, 33 bp, Homo sapien
gttgtttcttaaatgacgagtatgatatggagt

SEQ ID NO: 679868 - DNA, 33 bp, Homo sapien
gttgtttcttaaatgatgagtatgatatggagt

SEQ ID NO: 679869 - DNA, 33 bp, Homo sapien
atattattgttttgaacgcttatgacacagagc

SEQ ID NO: 679870 - DNA, 33 bp, Homo sapien
atattattgttttgaatgcttatgacacagagc

SEQ ID NO: 679871 - DNA, 33 bp, Homo sapien
tttctggaaagatataaccctgcaggtccatag

SEQ ID NO: 679872 - DNA, 33 bp, Homo sapien
tttctggaaagatatagccctgcaggtccatag

SEQ ID NO: 679873 - DNA, 33 bp, Homo sapien
tctgtgaagataaagcaaacatttgggagaaca

SEQ ID NO: 679874 - DNA, 33 bp, Homo sapien
tctgtgaagataaagcgaacatttgggagaaca

SEQ ID NO: 679875 - DNA, 33 bp, Homo sapien
ctctctcggtaaagaccaacatcgctcacctat

SEQ ID NO: 679876 - DNA, 33 bp, Homo sapien
ctctctcggtaaagactaacatcgctcacctat

SEQ ID NO: 679877 - DNA, 33 bp, Homo sapien
tccactagttagaataaaattcgcatttcccaa

SEQ ID NO: 679878 - DNA, 33 bp, Homo sapien
tccactagttagaatacaattcgcatttcccaa

SEQ ID NO: 679879 - DNA, 33 bp, Homo sapien
taagatgtttggagtcaccaagaaacaaagaaa

SEQ ID NO: 679880 - DNA, 33 bp, Homo sapien
taagatgtttggagtcgccaagaaacaaagaaa

SEQ ID NO: 679881 - DNA, 33 bp, Homo sapien
aattcataataagcataagaatcggccagctct

SEQ ID NO: 679882 - DNA, 33 bp, Homo sapien
aattcataataagcatgagaatcggccagctct

SEQ ID NO: 679883 - DNA, 33 bp, Homo sapien
gttagtagtttgtaacaatcaatagatgatctc

SEQ ID NO: 679884 - DNA, 33 bp, Homo sapien
gttagtagtttgtaacgatcaatagatgatctc

SEQ ID NO: 679885 - DNA, 33 bp, Homo sapien
cacctaccttgtatccagatgctttgctagtgc

SEQ ID NO: 679886 - DNA, 33 bp, Homo sapien
cacctaccttgtatccggatgctttgctagtgc

SEQ ID NO: 679887 - DNA, 33 bp, Homo sapien
cccccattggaatatgacacactcctctagcac

SEQ ID NO: 679888 - DNA, 33 bp, Homo sapien
cccccattggaatatggcacactcctctagcac

SEQ ID NO: 679889 - DNA, 33 bp, Homo sapien
ccagtaggaataatacaaaatactaaacactga

SEQ ID NO: 679890 - DNA, 33 bp, Homo sapien
ccagtaggaataatacgaaatactaaacactga

SEQ ID NO: 679891 - DNA, 33 bp, Homo sapien
gagtttggggcctgcaaattaagctctataaaa

SEQ ID NO: 679892 - DNA, 33 bp, Homo sapien
gagtttggggcctgcagattaagctctataaaa

SEQ ID NO: 679893 - DNA, 33 bp, Homo sapien
acctagaagctcatcaaatcttgttgttcaaga

SEQ ID NO: 679894 - DNA, 33 bp, Homo sapien
acctagaagctcatcacatcttgttgttcaaga

SEQ ID NO: 679895 - DNA, 33 bp, Homo sapien
catcaacgtgtctacaaaggtcagcattaaaca

SEQ ID NO: 679896 - DNA, 33 bp, Homo sapien
catcaacgtgtctacagaggtcagcattaaaca

SEQ ID NO: 679897 - DNA, 33 bp, Homo sapien
aaatacaatgttgtgaactatttgaaaacaagg

SEQ ID NO: 679898 - DNA, 33 bp, Homo sapien
aaatacaatgttgtgacctatttgaaaacaagg

SEQ ID NO: 679899 - DNA, 33 bp, Homo sapien
tgtacactttttataccccacagtccactttac

SEQ ID NO: 679900 - DNA, 33 bp, Homo sapien
tgtacactttttatactccacagtccactttac

SEQ ID NO: 679901 - DNA, 33 bp, Homo sapien
attgtcctaaattaggaataaaactggcttttt

SEQ ID NO: 679902 - DNA, 33 bp, Homo sapien
attgtcctaaattaggtataaaactggcttttt

SEQ ID NO: 679903 - DNA, 33 bp, Homo sapien
ataaaataagagtatcagaaaggttcagagagg

SEQ ID NO: 679904 - DNA, 33 bp, Homo sapien
ataaaataagagtatcggaaaggttcagagagg

SEQ ID NO: 679905 - DNA, 33 bp, Homo sapien
aagatttacttcaaaaattatttccaaacactc

SEQ ID NO: 679906 - DNA, 33 bp, Homo sapien
aagatttacttcaaaagttatttccaaacactc

SEQ ID NO: 679907 - DNA, 33 bp, Homo sapien
gccacaaaaataacagaactgatgctactcgat

SEQ ID NO: 679908 - DNA, 33 bp, Homo sapien
gccacaaaaataacaggactgatgctactcgat

SEQ ID NO: 679909 - DNA, 33 bp, Homo sapien
agtttcaagtcatataccctttcccacagtact

SEQ ID NO: 679910 - DNA, 33 bp, Homo sapien
agtttcaagtcatatagcctttcccacagtact

SEQ ID NO: 679911 - DNA, 33 bp, Homo sapien
catttctgtcttacaccggaaatcacaccctta

SEQ ID NO: 679912 - DNA, 33 bp, Homo sapien
catttctgtcttacactggaaatcacaccctta

SEQ ID NO: 679913 - DNA, 33 bp, Homo sapien
tgccttcagagccacaaaaacttccttactaga

SEQ ID NO: 679914 - DNA, 33 bp, Homo sapien
tgccttcagagccacagaaacttccttactaga

SEQ ID NO: 679915 - DNA, 33 bp, Homo sapien
tgagtaaggcttgttagacactgaagcatgctt

SEQ ID NO: 679916 - DNA, 33 bp, Homo sapien
tgagtaaggcttgttatacactgaagcatgctt

SEQ ID NO: 679917 - DNA, 33 bp, Homo sapien
tctcctctggtacttgcatcttctgcagagttc

SEQ ID NO: 679918 - DNA, 33 bp, Homo sapien
tctcctctggtacttggatcttctgcagagttc

SEQ ID NO: 679919 - DNA, 33 bp, Homo sapien
gaggccaaagagcatacacatggatgcaaaaga

SEQ ID NO: 679920 - DNA, 33 bp, Homo sapien
gaggccaaagagcatatacatggatgcaaaaga

SEQ ID NO: 679921 - DNA, 33 bp, Homo sapien
caaatatatttaccacactgttactggctccat

SEQ ID NO: 679922 - DNA, 33 bp, Homo sapien
caaatatatttaccacgctgttactggctccat

SEQ ID NO: 679923 - DNA, 33 bp, Homo sapien
cagcatcagccatactcagcaactcggcacatg

SEQ ID NO: 679924 - DNA, 33 bp, Homo sapien
cagcatcagccatacttagcaactcggcacatg

SEQ ID NO: 679925 - DNA, 33 bp, Homo sapien
tgaggctaagatcaaaatgatgttttccaaatg

SEQ ID NO: 679926 - DNA, 33 bp, Homo sapien
tgaggctaagatcaaagtgatgttttccaaatg

SEQ ID NO: 679927 - DNA, 33 bp, Homo sapien
gaaatatgtatgtcacaaatcttagcttaaatt

SEQ ID NO: 679928 - DNA, 33 bp, Homo sapien
gaaatatgtatgtcacgaatcttagcttaaatt

SEQ ID NO: 679929 - DNA, 33 bp, Homo sapien
agtaaaaattcaacatgaaagttttggtaacat

SEQ ID NO: 679930 - DNA, 33 bp, Homo sapien
agtaaaaattcaacattaaagttttggtaacat

SEQ ID NO: 679931 - DNA, 33 bp, Homo sapien
gaagagaaggatgagaaagaggaaaaggatagg

SEQ ID NO: 679932 - DNA, 33 bp, Homo sapien
gaagagaaggatgagagagaggaaaaggatagg

SEQ ID NO: 679933 - DNA, 33 bp, Homo sapien
gggccacagacttgtacgggtccgtgacctggg

SEQ ID NO: 679934 - DNA, 33 bp, Homo sapien
gggccacagacttgtatgggtccgtgacctggg

SEQ ID NO: 679935 - DNA, 33 bp, Homo sapien
gtaacttaacaattgagaacataacctgtatgt

SEQ ID NO: 679936 - DNA, 33 bp, Homo sapien
gtaacttaacaattgataacataacctgtatgt

SEQ ID NO: 679937 - DNA, 33 bp, Homo sapien
ttcattctgaatatggaaaaatgggaaaccaaa

SEQ ID NO: 679938 - DNA, 33 bp, Homo sapien
ttcattctgaatatggcaaaatgggaaaccaaa

SEQ ID NO: 679939 - DNA, 33 bp, Homo sapien
gagaattttgctcttaactaatgatgcattcca

SEQ ID NO: 679940 - DNA, 33 bp, Homo sapien
gagaattttgctcttacctaatgatgcattcca

SEQ ID NO: 679941 - DNA, 33 bp, Homo sapien
gtgatttgacattagagtatgagttttaatttc

SEQ ID NO: 679942 - DNA, 33 bp, Homo sapien
gtgatttgacattagattatgagttttaatttc

SEQ ID NO: 679943 - DNA, 33 bp, Homo sapien
gagaagaaaactttaccgcctactcagcaaaat

SEQ ID NO: 679944 - DNA, 33 bp, Homo sapien
gagaagaaaactttactgcctactcagcaaaat

SEQ ID NO: 679945 - DNA, 33 bp, Homo sapien
gcctttcaggttgcaaagtagctattattctcc

SEQ ID NO: 679946 - DNA, 33 bp, Homo sapien
gcctttcaggttgcaaggtagctattattctcc

SEQ ID NO: 679947 - DNA, 33 bp, Homo sapien
gattcctaataccatacactttctgctgtcagt

SEQ ID NO: 679948 - DNA, 33 bp, Homo sapien
gattcctaataccatatactttctgctgtcagt

SEQ ID NO: 679949 - DNA, 33 bp, Homo sapien
gatttgttgctttggcacttaaaggatgacaac

SEQ ID NO: 679950 - DNA, 33 bp, Homo sapien
gatttgttgctttggcgcttaaaggatgacaac

SEQ ID NO: 679951 - DNA, 33 bp, Homo sapien
attgatctttatcccccctcactttattgaggt

SEQ ID NO: 679952 - DNA, 33 bp, Homo sapien
attgatctttatcccctctcactttattgaggt

SEQ ID NO: 679953 - DNA, 33 bp, Homo sapien
ggtgtgcaatatgctaactaaaaatgaagtaaa

SEQ ID NO: 679954 - DNA, 33 bp, Homo sapien
ggtgtgcaatatgctacctaaaaatgaagtaaa

SEQ ID NO: 679955 - DNA, 33 bp, Homo sapien
acaaaagcacaagtaaaagaatgaataggtgtc

SEQ ID NO: 679956 - DNA, 33 bp, Homo sapien
acaaaagcacaagtaagagaatgaataggtgtc

SEQ ID NO: 679957 - DNA, 33 bp, Homo sapien
gagtggtgagaaggcaatgagcatctgggaaac

SEQ ID NO: 679958 - DNA, 33 bp, Homo sapien
gagtggtgagaaggcattgagcatctgggaaac

SEQ ID NO: 679959 - DNA, 33 bp, Homo sapien
gcataatcctaacacacgacacattagtttcag

SEQ ID NO: 679960 - DNA, 33 bp, Homo sapien
gcataatcctaacacatgacacattagtttcag

SEQ ID NO: 679961 - DNA, 33 bp, Homo sapien
acttttagccaaggcacattctctgggctctca

SEQ ID NO: 679962 - DNA, 33 bp, Homo sapien
acttttagccaaggcatattctctgggctctca

SEQ ID NO: 679963 - DNA, 33 bp, Homo sapien
atgtagccagaaaatacaatggtacaagctagg

SEQ ID NO: 679964 - DNA, 33 bp, Homo sapien
atgtagccagaaaatataatggtacaagctagg

SEQ ID NO: 679965 - DNA, 33 bp, Homo sapien
aataaatagaggcatcacaattcactttccaag

SEQ ID NO: 679966 - DNA, 33 bp, Homo sapien
aataaatagaggcatcgcaattcactttccaag

SEQ ID NO: 679967 - DNA, 33 bp, Homo sapien
cccctgccatttaggcaaaaagccaatttcttg

SEQ ID NO: 679968 - DNA, 33 bp, Homo sapien
cccctgccatttaggcgaaaagccaatttcttg

SEQ ID NO: 679969 - DNA, 33 bp, Homo sapien
tgtgtatctatgtagccgagggtgggttttaag

SEQ ID NO: 679970 - DNA, 33 bp, Homo sapien
tgtgtatctatgtagctgagggtgggttttaag

SEQ ID NO: 679971 - DNA, 33 bp, Homo sapien
aaatatgcttcagaacacacattgggaaatgca

SEQ ID NO: 679972 - DNA, 33 bp, Homo sapien
aaatatgcttcagaactcacattgggaaatgca

SEQ ID NO: 679973 - DNA, 33 bp, Homo sapien
ggggaatgcatatgccaaaattcatcaaattat

SEQ ID NO: 679974 - DNA, 33 bp, Homo sapien
ggggaatgcatatgccgaaattcatcaaattat

SEQ ID NO: 679975 - DNA, 33 bp, Homo sapien
agtactcgggaatataacggtgaaccaaatgaa

SEQ ID NO: 679976 - DNA, 33 bp, Homo sapien
agtactcgggaatatagcggtgaaccaaatgaa

SEQ ID NO: 679977 - DNA, 33 bp, Homo sapien
tgggtttatttcaaaacgcaatgcttatacata

SEQ ID NO: 679978 - DNA, 33 bp, Homo sapien
tgggtttatttcaaaatgcaatgcttatacata

SEQ ID NO: 679979 - DNA, 33 bp, Homo sapien
tcaacagacttaccagaactaatttgacgtgaa

SEQ ID NO: 679980 - DNA, 33 bp, Homo sapien
tcaacagacttaccaggactaatttgacgtgaa

SEQ ID NO: 679981 - DNA, 33 bp, Homo sapien
atgatactcaaggatcacagcacttcttatctg

SEQ ID NO: 679982 - DNA, 33 bp, Homo sapien
atgatactcaaggatcgcagcacttcttatctg

SEQ ID NO: 679983 - DNA, 33 bp, Homo sapien
gaagagatgcaactacacaagcctgtgaaaaag

SEQ ID NO: 679984 - DNA, 33 bp, Homo sapien
gaagagatgcaactacgcaagcctgtgaaaaag

SEQ ID NO: 679985 - DNA, 33 bp, Homo sapien
acaaattcaatagtcacggctatgaaattggtc

SEQ ID NO: 679986 - DNA, 33 bp, Homo sapien
acaaattcaatagtcagggctatgaaattggtc

SEQ ID NO: 679987 - DNA, 33 bp, Homo sapien
tggccaaaactcttaccatggcactcaaggtcc

SEQ ID NO: 679988 - DNA, 33 bp, Homo sapien
tggccaaaactcttactatggcactcaaggtcc

SEQ ID NO: 679989 - DNA, 33 bp, Homo sapien
acctgaatctacacatcaagttaggactcaaat

SEQ ID NO: 679990 - DNA, 33 bp, Homo sapien
acctgaatctacacatgaagttaggactcaaat

SEQ ID NO: 679991 - DNA, 33 bp, Homo sapien
agagcaagaatttcccaaataatttctcaccat

SEQ ID NO: 679992 - DNA, 33 bp, Homo sapien
agagcaagaatttcccgaataatttctcaccat

SEQ ID NO: 679993 - DNA, 33 bp, Homo sapien
gggtttggaaagtccgacatgacaaccagcact

SEQ ID NO: 679994 - DNA, 33 bp, Homo sapien
gggtttggaaagtccggcatgacaaccagcact

SEQ ID NO: 679995 - DNA, 33 bp, Homo sapien
tctcaggtagttcatacatagcagtgtgaaaat

SEQ ID NO: 679996 - DNA, 33 bp, Homo sapien
tctcaggtagttcatatatagcagtgtgaaaat

SEQ ID NO: 679997 - DNA, 33 bp, Homo sapien
tggtggtgttctacaccgtagttcatttctcaa

SEQ ID NO: 679998 - DNA, 33 bp, Homo sapien
tggtggtgttctacactgtagttcatttctcaa

SEQ ID NO: 679999 - DNA, 33 bp, Homo sapien
acagaataaactaggcaatgttcaagagagaca

SEQ ID NO: 680000 - DNA, 33 bp, Homo sapien
acagaataaactaggccatgttcaagagagaca

SEQ ID NO: 680001 - DNA, 33 bp, Homo sapien
ttactttgatcaactcaattctcttttgagctt

SEQ ID NO: 680002 - DNA, 33 bp, Homo sapien
ttactttgatcaactcgattctcttttgagctt

SEQ ID NO: 680003 - DNA, 33 bp, Homo sapien
tatcaaaaagtagatacctatgacggtttatca

SEQ ID NO: 680004 - DNA, 33 bp, Homo sapien
tatcaaaaagtagatatctatgacggtttatca

SEQ ID NO: 680005 - DNA, 33 bp, Homo sapien
ctagctgtattaaaataaaagccattgagcctt

SEQ ID NO: 680006 - DNA, 33 bp, Homo sapien
ctagctgtattaaaatgaaagccattgagcctt

SEQ ID NO: 680007 - DNA, 33 bp, Homo sapien
agaaggcttttatgtgcaatcaccactacgctg

SEQ ID NO: 680008 - DNA, 33 bp, Homo sapien
agaaggcttttatgtggaatcaccactacgctg

SEQ ID NO: 680009 - DNA, 33 bp, Homo sapien
aactcagcttgttagacgatataatgtgtatag

SEQ ID NO: 680010 - DNA, 33 bp, Homo sapien
aactcagcttgttagatgatataatgtgtatag

SEQ ID NO: 680011 - DNA, 33 bp, Homo sapien
tccctgttgcaagctccaggaactgagtctggc

SEQ ID NO: 680012 - DNA, 33 bp, Homo sapien
tccctgttgcaagctctaggaactgagtctggc

SEQ ID NO: 680013 - DNA, 33 bp, Homo sapien
tatacgacttgcatcactgaaagtaaggagtca

SEQ ID NO: 680014 - DNA, 33 bp, Homo sapien
tatacgacttgcatcattgaaagtaaggagtca

SEQ ID NO: 680015 - DNA, 33 bp, Homo sapien
agaaacctgtacacaaatattgatagcagtttt

SEQ ID NO: 680016 - DNA, 33 bp, Homo sapien
agaaacctgtacacaattattgatagcagtttt

SEQ ID NO: 680017 - DNA, 33 bp, Homo sapien
aaacacacacaaaacaccattgcgttatgtggc

SEQ ID NO: 680018 - DNA, 33 bp, Homo sapien
aaacacacacaaaacatcattgcgttatgtggc

SEQ ID NO: 680019 - DNA, 33 bp, Homo sapien
cacgttttcagtttcccgctactcccacagccc

SEQ ID NO: 680020 - DNA, 33 bp, Homo sapien
cacgttttcagtttcctgctactcccacagccc

SEQ ID NO: 680021 - DNA, 33 bp, Homo sapien
ggatccagtccaggtacagctgttggtcgtgct

SEQ ID NO: 680022 - DNA, 33 bp, Homo sapien
ggatccagtccaggtatagctgttggtcgtgct

SEQ ID NO: 680023 - DNA, 33 bp, Homo sapien
gtaagtattatatgcaatgaccaaccacaacaa

SEQ ID NO: 680024 - DNA, 33 bp, Homo sapien
gtaagtattatatgcagtgaccaaccacaacaa

SEQ ID NO: 680025 - DNA, 33 bp, Homo sapien
gctctcccccattcccaaacatcctactctttc

SEQ ID NO: 680026 - DNA, 33 bp, Homo sapien
gctctcccccattcccgaacatcctactctttc

SEQ ID NO: 680027 - DNA, 33 bp, Homo sapien
acagatgtacatctcaataaaataatgctgttg

SEQ ID NO: 680028 - DNA, 33 bp, Homo sapien
acagatgtacatctcagtaaaataatgctgttg

SEQ ID NO: 680029 - DNA, 33 bp, Homo sapien
aggatgattgaattgacgtgaatctggagaaag

SEQ ID NO: 680030 - DNA, 33 bp, Homo sapien
aggatgattgaattgatgtgaatctggagaaag

SEQ ID NO: 680031 - DNA, 33 bp, Homo sapien
caaaacaatcagaaaaattgggtacaaaactgc

SEQ ID NO: 680032 - DNA, 33 bp, Homo sapien
caaaacaatcagaaaagttgggtacaaaactgc

SEQ ID NO: 680033 - DNA, 33 bp, Homo sapien
ctagatacagagtgtccattgatgcagtcacaa

SEQ ID NO: 680034 - DNA, 33 bp, Homo sapien
ctagatacagagtgtcgattgatgcagtcacaa

SEQ ID NO: 680035 - DNA, 33 bp, Homo sapien
aagataatgtgtaggaactttttctatcagctg

SEQ ID NO: 680036 - DNA, 33 bp, Homo sapien
aagataatgtgtaggatctttttctatcagctg

SEQ ID NO: 680037 - DNA, 33 bp, Homo sapien
cattccacggatgaagaaaacagtttcaagaga

SEQ ID NO: 680038 - DNA, 33 bp, Homo sapien
cattccacggatgaaggaaacagtttcaagaga

SEQ ID NO: 680039 - DNA, 33 bp, Homo sapien
gaccacagcatgaggcagacaaacagaaaacaa

SEQ ID NO: 680040 - DNA, 33 bp, Homo sapien
gaccacagcatgaggccgacaaacagaaaacaa

SEQ ID NO: 680041 - DNA, 33 bp, Homo sapien
aactaatggaatccccagccttggcgttttggc

SEQ ID NO: 680042 - DNA, 33 bp, Homo sapien
aactaatggaatcccccgccttggcgttttggc

SEQ ID NO: 680043 - DNA, 33 bp, Homo sapien
tgcctagtatatacaacagtcaatcaacagtga

SEQ ID NO: 680044 - DNA, 33 bp, Homo sapien
tgcctagtatatacaatagtcaatcaacagtga

SEQ ID NO: 680045 - DNA, 33 bp, Homo sapien
aggccctgtccagcaacgaggaataggaccaga

SEQ ID NO: 680046 - DNA, 33 bp, Homo sapien
aggccctgtccagcaaggaggaataggaccaga

SEQ ID NO: 680047 - DNA, 33 bp, Homo sapien
cggtcaacatagaacaagccccagaaaggtggt

SEQ ID NO: 680048 - DNA, 33 bp, Homo sapien
cggtcaacatagaacaggccccagaaaggtggt

SEQ ID NO: 680049 - DNA, 33 bp, Homo sapien
gtcattgccctataaccaacttcttgtgtgatc

SEQ ID NO: 680050 - DNA, 33 bp, Homo sapien
gtcattgccctataactaacttcttgtgtgatc

SEQ ID NO: 680051 - DNA, 33 bp, Homo sapien
cagtttttgcatacaacactttcacaattatct

SEQ ID NO: 680052 - DNA, 33 bp, Homo sapien
cagtttttgcatacaatactttcacaattatct

SEQ ID NO: 680053 - DNA, 33 bp, Homo sapien
gaatctcaaacttgaacaggctaggcatacaaa

SEQ ID NO: 680054 - DNA, 33 bp, Homo sapien
gaatctcaaacttgaataggctaggcatacaaa

SEQ ID NO: 680055 - DNA, 33 bp, Homo sapien
aaaatacctgtggaaaccctcaatgagtagata

SEQ ID NO: 680056 - DNA, 33 bp, Homo sapien
aaaatacctgtggaaatcctcaatgagtagata

SEQ ID NO: 680057 - DNA, 33 bp, Homo sapien
ttataaaatgcatttaactgttgcactgtcatt

SEQ ID NO: 680058 - DNA, 33 bp, Homo sapien
ttataaaatgcatttagctgttgcactgtcatt

SEQ ID NO: 680059 - DNA, 33 bp, Homo sapien
aagaattgcattgaaaggttcctgggatttaga

SEQ ID NO: 680060 - DNA, 33 bp, Homo sapien
aagaattgcattgaaatgttcctgggatttaga

SEQ ID NO: 680061 - DNA, 33 bp, Homo sapien
ccatttgactggggaacgtttctcttaaagtta

SEQ ID NO: 680062 - DNA, 33 bp, Homo sapien
ccatttgactggggaatgtttctcttaaagtta

SEQ ID NO: 680063 - DNA, 33 bp, Homo sapien
ttgcttgtcatgtttacagaaactgtgaattga

SEQ ID NO: 680064 - DNA, 33 bp, Homo sapien
ttgcttgtcatgtttagagaaactgtgaattga

SEQ ID NO: 680065 - DNA, 33 bp, Homo sapien
tgtgaattgaagagtacggcagtattacctaga

SEQ ID NO: 680066 - DNA, 33 bp, Homo sapien
tgtgaattgaagagtatggcagtattacctaga

SEQ ID NO: 680067 - DNA, 33 bp, Homo sapien
aaactggcctgtttgaggacttggctattatct

SEQ ID NO: 680068 - DNA, 33 bp, Homo sapien
aaactggcctgtttgatgacttggctattatct

SEQ ID NO: 680069 - DNA, 33 bp, Homo sapien
gttctctactgtgataccctgtttttggcttgt

SEQ ID NO: 680070 - DNA, 33 bp, Homo sapien
gttctctactgtgatatcctgtttttggcttgt

SEQ ID NO: 680071 - DNA, 33 bp, Homo sapien
tgaggctggaggctaacctctttatgcaggtgt

SEQ ID NO: 680072 - DNA, 33 bp, Homo sapien
tgaggctggaggctaatctctttatgcaggtgt

SEQ ID NO: 680073 - DNA, 33 bp, Homo sapien
ccaccaccattgtagagctggaacactggctga

SEQ ID NO: 680074 - DNA, 33 bp, Homo sapien
ccaccaccattgtagatctggaacactggctga

SEQ ID NO: 680075 - DNA, 33 bp, Homo sapien
accacatcgggcctgaccatttaaatactggtg

SEQ ID NO: 680076 - DNA, 33 bp, Homo sapien
accacatcgggcctgatcatttaaatactggtg

SEQ ID NO: 680077 - DNA, 33 bp, Homo sapien
ttctcaggatagaaagcatcatcaatatggcga

SEQ ID NO: 680078 - DNA, 33 bp, Homo sapien
ttctcaggatagaaaggatcatcaatatggcga

SEQ ID NO: 680079 - DNA, 33 bp, Homo sapien
atctgaccagttgtcagaggtaagttggttttt

SEQ ID NO: 680080 - DNA, 33 bp, Homo sapien
atctgaccagttgtcataggtaagttggttttt

SEQ ID NO: 680081 - DNA, 33 bp, Homo sapien
cttttcaaaatagaagccgaagcaagtatcctc

SEQ ID NO: 680082 - DNA, 33 bp, Homo sapien
cttttcaaaatagaagtcgaagcaagtatcctc

SEQ ID NO: 680083 - DNA, 33 bp, Homo sapien
ccccattttctctgccactagtttagtctaagc

SEQ ID NO: 680084 - DNA, 33 bp, Homo sapien
ccccattttctctgccgctagtttagtctaagc

SEQ ID NO: 680085 - DNA, 33 bp, Homo sapien
ggaaaatatgacctcaacaagcaggcaaaataa

SEQ ID NO: 680086 - DNA, 33 bp, Homo sapien
ggaaaatatgacctcatcaagcaggcaaaataa

SEQ ID NO: 680087 - DNA, 33 bp, Homo sapien
ctgtgagtccaataaacatcttttctttaaaat

SEQ ID NO: 680088 - DNA, 33 bp, Homo sapien
ctgtgagtccaataaatatcttttctttaaaat

SEQ ID NO: 680089 - DNA, 33 bp, Homo sapien
tggattaatgatggtcaccaattgatctaataa

SEQ ID NO: 680090 - DNA, 33 bp, Homo sapien
tggattaatgatggtcgccaattgatctaataa

SEQ ID NO: 680091 - DNA, 33 bp, Homo sapien
acttcctaatgcccccgctgtatttactcatta

SEQ ID NO: 680092 - DNA, 33 bp, Homo sapien
acttcctaatgccccctctgtatttactcatta

SEQ ID NO: 680093 - DNA, 33 bp, Homo sapien
tgtggctcacgtgtaaagtctctgaatttcctt

SEQ ID NO: 680094 - DNA, 33 bp, Homo sapien
tgtggctcacgtgtaatgtctctgaatttcctt

SEQ ID NO: 680095 - DNA, 33 bp, Homo sapien
tacttaaccagttagaagaggtagtgtgaatat

SEQ ID NO: 680096 - DNA, 33 bp, Homo sapien
tacttaaccagttagatgaggtagtgtgaatat

SEQ ID NO: 680097 - DNA, 33 bp, Homo sapien
tatatacatatgtaacagtcaaatatcatttac

SEQ ID NO: 680098 - DNA, 33 bp, Homo sapien
tatatacatatgtaacggtcaaatatcatttac

SEQ ID NO: 680099 - DNA, 33 bp, Homo sapien
aagatttctgaacatacacgccaaagaatgttt

SEQ ID NO: 680100 - DNA, 33 bp, Homo sapien
aagatttctgaacatatacgccaaagaatgttt

SEQ ID NO: 680101 - DNA, 33 bp, Homo sapien
atcagagctttgaacagatgatccattggtccc

SEQ ID NO: 680102 - DNA, 33 bp, Homo sapien
atcagagctttgaacatatgatccattggtccc

SEQ ID NO: 680103 - DNA, 33 bp, Homo sapien
tctataagttataaggccaagtctaaatcctga

SEQ ID NO: 680104 - DNA, 33 bp, Homo sapien
tctataagttataaggtcaagtctaaatcctga

SEQ ID NO: 680105 - DNA, 33 bp, Homo sapien
tatttgtgccaagataacataaaaaagtataaa

SEQ ID NO: 680106 - DNA, 33 bp, Homo sapien
tatttgtgccaagatatcataaaaaagtataaa

SEQ ID NO: 680107 - DNA, 33 bp, Homo sapien
ggtcttgaacttgtgacgcttactcctaagaga

SEQ ID NO: 680108 - DNA, 33 bp, Homo sapien
ggtcttgaacttgtgatgcttactcctaagaga

SEQ ID NO: 680109 - DNA, 33 bp, Homo sapien
cttgctcaagatagcacagtttgttaaagctaa

SEQ ID NO: 680110 - DNA, 33 bp, Homo sapien
cttgctcaagatagcatagtttgttaaagctaa

SEQ ID NO: 680111 - DNA, 33 bp, Homo sapien
taaaacacttctatgacgtgaaggtattcatct

SEQ ID NO: 680112 - DNA, 33 bp, Homo sapien
taaaacacttctatgatgtgaaggtattcatct

SEQ ID NO: 680113 - DNA, 33 bp, Homo sapien
ttaagaggtgagaaaaagaatatgtttgttcct

SEQ ID NO: 680114 - DNA, 33 bp, Homo sapien
ttaagaggtgagaaaaggaatatgtttgttcct

SEQ ID NO: 680115 - DNA, 33 bp, Homo sapien
tctcaccgaaccctgaaattctgtaatttgttt

SEQ ID NO: 680116 - DNA, 33 bp, Homo sapien
tctcaccgaaccctgagattctgtaatttgttt

SEQ ID NO: 680117 - DNA, 33 bp, Homo sapien
aacttttaggaagctcacgccaattttatgtgc

SEQ ID NO: 680118 - DNA, 33 bp, Homo sapien
aacttttaggaagctcgcgccaattttatgtgc

SEQ ID NO: 680119 - DNA, 33 bp, Homo sapien
aacaaggcgagaggtacaggtgaatcaagaaaa

SEQ ID NO: 680120 - DNA, 33 bp, Homo sapien
aacaaggcgagaggtagaggtgaatcaagaaaa

SEQ ID NO: 680121 - DNA, 33 bp, Homo sapien
attaaaacttcgggggaatctcaagcagcttct

SEQ ID NO: 680122 - DNA, 33 bp, Homo sapien
attaaaacttcggggggatctcaagcagcttct

SEQ ID NO: 680123 - DNA, 33 bp, Homo sapien
cttatgcctgggcgtccctttcctcaaaccagg

SEQ ID NO: 680124 - DNA, 33 bp, Homo sapien
cttatgcctgggcgtcgctttcctcaaaccagg

SEQ ID NO: 680125 - DNA, 33 bp, Homo sapien
caagcatacatgaaacagtacttattatttcaa

SEQ ID NO: 680126 - DNA, 33 bp, Homo sapien
caagcatacatgaaacggtacttattatttcaa

SEQ ID NO: 680127 - DNA, 33 bp, Homo sapien
atgaacaacataagtacgtgaggtggcagaatg

SEQ ID NO: 680128 - DNA, 33 bp, Homo sapien
atgaacaacataagtatgtgaggtggcagaatg

SEQ ID NO: 680129 - DNA, 33 bp, Homo sapien
tgagtaatagtgcatacacttaaagtactttaa

SEQ ID NO: 680130 - DNA, 33 bp, Homo sapien
tgagtaatagtgcatatacttaaagtactttaa

SEQ ID NO: 680131 - DNA, 33 bp, Homo sapien
taacagtacaattgctaaagtgttggagatgcc

SEQ ID NO: 680132 - DNA, 33 bp, Homo sapien
taacagtacaattgctcaagtgttggagatgcc

SEQ ID NO: 680133 - DNA, 33 bp, Homo sapien
gacactgtaaaagctacggcatctccaacactt

SEQ ID NO: 680134 - DNA, 33 bp, Homo sapien
gacactgtaaaagctatggcatctccaacactt

SEQ ID NO: 680135 - DNA, 33 bp, Homo sapien
agttgtgacaagagcaaaacttcagaaaagcct

SEQ ID NO: 680136 - DNA, 33 bp, Homo sapien
agttgtgacaagagcagaacttcagaaaagcct

SEQ ID NO: 680137 - DNA, 33 bp, Homo sapien
ccttattatggcatccagagtcttacctaggca

SEQ ID NO: 680138 - DNA, 33 bp, Homo sapien
ccttattatggcatcccgagtcttacctaggca

SEQ ID NO: 680139 - DNA, 33 bp, Homo sapien
aaatggcttaaaagaacgctatacacatggtca

SEQ ID NO: 680140 - DNA, 33 bp, Homo sapien
aaatggcttaaaagaaggctatacacatggtca

SEQ ID NO: 680141 - DNA, 33 bp, Homo sapien
cttggatcttcttgtcactaatatgaaaacatt

SEQ ID NO: 680142 - DNA, 33 bp, Homo sapien
cttggatcttcttgtccctaatatgaaaacatt

SEQ ID NO: 680143 - DNA, 33 bp, Homo sapien
aaactaagaagaactcaccattacgtgttaacc

SEQ ID NO: 680144 - DNA, 33 bp, Homo sapien
aaactaagaagaactcgccattacgtgttaacc

SEQ ID NO: 680145 - DNA, 33 bp, Homo sapien
aataatcaggaaaatacatcataagcaactata

SEQ ID NO: 680146 - DNA, 33 bp, Homo sapien
aataatcaggaaaatagatcataagcaactata

SEQ ID NO: 680147 - DNA, 33 bp, Homo sapien
caatgtcaaggaagacagcaagactgcaatgtg

SEQ ID NO: 680148 - DNA, 33 bp, Homo sapien
caatgtcaaggaagacggcaagactgcaatgtg

SEQ ID NO: 680149 - DNA, 33 bp, Homo sapien
acacgctggtatattacgcagccatgaaaaaga

SEQ ID NO: 680150 - DNA, 33 bp, Homo sapien
acacgctggtatattatgcagccatgaaaaaga

SEQ ID NO: 680151 - DNA, 33 bp, Homo sapien
tattttgcacctacccagatagattcatcctca

SEQ ID NO: 680152 - DNA, 33 bp, Homo sapien
tattttgcacctacccggatagattcatcctca

SEQ ID NO: 680153 - DNA, 33 bp, Homo sapien
tgaaattgctagggacaaagggccacattacac

SEQ ID NO: 680154 - DNA, 33 bp, Homo sapien
tgaaattgctagggaccaagggccacattacac

SEQ ID NO: 680155 - DNA, 33 bp, Homo sapien
tgcttttgtgagcctgaatctttagctccatgg

SEQ ID NO: 680156 - DNA, 33 bp, Homo sapien
tgcttttgtgagcctgcatctttagctccatgg

SEQ ID NO: 680157 - DNA, 33 bp, Homo sapien
gtccagtggaaattacaaaagccaatgtagatg

SEQ ID NO: 680158 - DNA, 33 bp, Homo sapien
gtccagtggaaattacgaaagccaatgtagatg

SEQ ID NO: 680159 - DNA, 33 bp, Homo sapien
acctctcaaggactagaatgagttcttccaacc

SEQ ID NO: 680160 - DNA, 33 bp, Homo sapien
acctctcaaggactaggatgagttcttccaacc

SEQ ID NO: 680161 - DNA, 33 bp, Homo sapien
ataaaagagttgataaaccaaaatgttgaagcc

SEQ ID NO: 680162 - DNA, 33 bp, Homo sapien
ataaaagagttgataagccaaaatgttgaagcc

SEQ ID NO: 680163 - DNA, 33 bp, Homo sapien
cctccatcctcacaacaccctacacatttctta

SEQ ID NO: 680164 - DNA, 33 bp, Homo sapien
cctccatcctcacaacgccctacacatttctta

SEQ ID NO: 680165 - DNA, 33 bp, Homo sapien
aaagagggtatcagaagtccatctttgctacaa

SEQ ID NO: 680166 - DNA, 33 bp, Homo sapien
aaagagggtatcagaattccatctttgctacaa

SEQ ID NO: 680167 - DNA, 33 bp, Homo sapien
catttatcactttctaccctgaaatcccacagg

SEQ ID NO: 680168 - DNA, 33 bp, Homo sapien
catttatcactttctatcctgaaatcccacagg

SEQ ID NO: 680169 - DNA, 33 bp, Homo sapien
ctgcctctctcgtgaacgctggctacttggttc

SEQ ID NO: 680170 - DNA, 33 bp, Homo sapien
ctgcctctctcgtgaatgctggctacttggttc

SEQ ID NO: 680171 - DNA, 33 bp, Homo sapien
ctgtgttacacaggatcagataatcctccagaa

SEQ ID NO: 680172 - DNA, 33 bp, Homo sapien
ctgtgttacacaggatgagataatcctccagaa

SEQ ID NO: 680173 - DNA, 33 bp, Homo sapien
taaatgatgctccttacattgtaaaaagattac

SEQ ID NO: 680174 - DNA, 33 bp, Homo sapien
taaatgatgctccttatattgtaaaaagattac

SEQ ID NO: 680175 - DNA, 33 bp, Homo sapien
tcttctgcttattgaacaacaaaatatttagtt

SEQ ID NO: 680176 - DNA, 33 bp, Homo sapien
tcttctgcttattgaagaacaaaatatttagtt

SEQ ID NO: 680177 - DNA, 33 bp, Homo sapien
ggatcttgtgtttgccactattccaggtaacta

SEQ ID NO: 680178 - DNA, 33 bp, Homo sapien
ggatcttgtgtttgccgctattccaggtaacta

SEQ ID NO: 680179 - DNA, 33 bp, Homo sapien
agtgaatgaatgtataacacaaatggttgagcc

SEQ ID NO: 680180 - DNA, 33 bp, Homo sapien
agtgaatgaatgtataccacaaatggttgagcc

SEQ ID NO: 680181 - DNA, 33 bp, Homo sapien
tagagattcttttccaacctgttagttcagcta

SEQ ID NO: 680182 - DNA, 33 bp, Homo sapien
tagagattcttttccatcctgttagttcagcta

SEQ ID NO: 680183 - DNA, 33 bp, Homo sapien
gaattacattttaacaataaacatccaaaccat

SEQ ID NO: 680184 - DNA, 33 bp, Homo sapien
gaattacattttaacagtaaacatccaaaccat

SEQ ID NO: 680185 - DNA, 33 bp, Homo sapien
ttttgtgccattaccaatatcattcacccttcc

SEQ ID NO: 680186 - DNA, 33 bp, Homo sapien
ttttgtgccattaccagtatcattcacccttcc

SEQ ID NO: 680187 - DNA, 33 bp, Homo sapien
gttctcccatagcaccgggtatagtaactcttc

SEQ ID NO: 680188 - DNA, 33 bp, Homo sapien
gttctcccatagcacctggtatagtaactcttc

SEQ ID NO: 680189 - DNA, 33 bp, Homo sapien
gttcatgctcatgtcacgcagctgctgtcaaca

SEQ ID NO: 680190 - DNA, 33 bp, Homo sapien
gttcatgctcatgtcaggcagctgctgtcaaca

SEQ ID NO: 680191 - DNA, 33 bp, Homo sapien
gcatattgaagtacataaacataaagaattgta

SEQ ID NO: 680192 - DNA, 33 bp, Homo sapien
gcatattgaagtacatcaacataaagaattgta

SEQ ID NO: 680193 - DNA, 33 bp, Homo sapien
agctctacatatatgagtagtgcagttttatgt

SEQ ID NO: 680194 - DNA, 33 bp, Homo sapien
agctctacatatatgattagtgcagttttatgt

SEQ ID NO: 680195 - DNA, 33 bp, Homo sapien
atgtggcagatgttggaagaaatggttagaaaa

SEQ ID NO: 680196 - DNA, 33 bp, Homo sapien
atgtggcagatgttgggagaaatggttagaaaa

SEQ ID NO: 680197 - DNA, 33 bp, Homo sapien
agttaaaatatagtaacatcggggtattgagga

SEQ ID NO: 680198 - DNA, 33 bp, Homo sapien
agttaaaatatagtaatatcggggtattgagga

SEQ ID NO: 680199 - DNA, 33 bp, Homo sapien
tctcaaatccaaccacactattcctcttctcca

SEQ ID NO: 680200 - DNA, 33 bp, Homo sapien
tctcaaatccaaccacgctattcctcttctcca

SEQ ID NO: 680201 - DNA, 33 bp, Homo sapien
cttttgaatttgagcaactcttttataataaga

SEQ ID NO: 680202 - DNA, 33 bp, Homo sapien
cttttgaatttgagcagctcttttataataaga

SEQ ID NO: 680203 - DNA, 33 bp, Homo sapien
tgtaacacagctgcaacttccaactttgtcttc

SEQ ID NO: 680204 - DNA, 33 bp, Homo sapien
tgtaacacagctgcaatttccaactttgtcttc

SEQ ID NO: 680205 - DNA, 33 bp, Homo sapien
aagtttgtgtccagaaaggtttgcatttagcag

SEQ ID NO: 680206 - DNA, 33 bp, Homo sapien
aagtttgtgtccagaagggtttgcatttagcag

SEQ ID NO: 680207 - DNA, 33 bp, Homo sapien
gtagatagtagtaaatcattgcatgaagttcat

SEQ ID NO: 680208 - DNA, 33 bp, Homo sapien
gtagatagtagtaaattattgcatgaagttcat

SEQ ID NO: 680209 - DNA, 33 bp, Homo sapien
tccaaagtgcattctgcatatatgatactcctt

SEQ ID NO: 680210 - DNA, 33 bp, Homo sapien
tccaaagtgcattctgtatatatgatactcctt

SEQ ID NO: 680211 - DNA, 33 bp, Homo sapien
tcttcctaactctagaataaaatgcgtagatga

SEQ ID NO: 680212 - DNA, 33 bp, Homo sapien
tcttcctaactctagagtaaaatgcgtagatga

SEQ ID NO: 680213 - DNA, 33 bp, Homo sapien
tgattatttgcaaaaaactgtcattttcaacca

SEQ ID NO: 680214 - DNA, 33 bp, Homo sapien
tgattatttgcaaaaatctgtcattttcaacca

SEQ ID NO: 680215 - DNA, 33 bp, Homo sapien
ttgacaaaggaaaccaaatgaggctataagagt

SEQ ID NO: 680216 - DNA, 33 bp, Homo sapien
ttgacaaaggaaaccagatgaggctataagagt

SEQ ID NO: 680217 - DNA, 33 bp, Homo sapien
atgggctataatttacagaaaggcaattatatt

SEQ ID NO: 680218 - DNA, 33 bp, Homo sapien
atgggctataatttaccgaaaggcaattatatt

SEQ ID NO: 680219 - DNA, 33 bp, Homo sapien
tacaagataaaaaagcacattactgagactata

SEQ ID NO: 680220 - DNA, 33 bp, Homo sapien
tacaagataaaaaagcgcattactgagactata

SEQ ID NO: 680221 - DNA, 33 bp, Homo sapien
ccgactgatgacaaagaccaaagcaatttgctc

SEQ ID NO: 680222 - DNA, 33 bp, Homo sapien
ccgactgatgacaaagcccaaagcaatttgctc

SEQ ID NO: 680223 - DNA, 33 bp, Homo sapien
taccacactgcaaacaagaaggctgtaaaagcc

SEQ ID NO: 680224 - DNA, 33 bp, Homo sapien
taccacactgcaaacaggaaggctgtaaaagcc

SEQ ID NO: 680225 - DNA, 33 bp, Homo sapien
aaatcagaacataagacaccatccagaaaaagt

SEQ ID NO: 680226 - DNA, 33 bp, Homo sapien
aaatcagaacataagataccatccagaaaaagt

SEQ ID NO: 680227 - DNA, 33 bp, Homo sapien
aaatatcaggagactcaaattaagtaggtacat

SEQ ID NO: 680228 - DNA, 33 bp, Homo sapien
aaatatcaggagactcgaattaagtaggtacat

SEQ ID NO: 680229 - DNA, 33 bp, Homo sapien
cctgttgtcttaaatacgctttaaccaacgaaa

SEQ ID NO: 680230 - DNA, 33 bp, Homo sapien
cctgttgtcttaaatatgctttaaccaacgaaa

SEQ ID NO: 680231 - DNA, 33 bp, Homo sapien
tttaaactgtcaaaaaggctccataaatcattt

SEQ ID NO: 680232 - DNA, 33 bp, Homo sapien
tttaaactgtcaaaaatgctccataaatcattt

SEQ ID NO: 680233 - DNA, 33 bp, Homo sapien
tttagaaaaagaactacagaagattttgttgga

SEQ ID NO: 680234 - DNA, 33 bp, Homo sapien
tttagaaaaagaactatagaagattttgttgga

SEQ ID NO: 680235 - DNA, 33 bp, Homo sapien
agacaataaaagaagacgaaacacaagaggtga

SEQ ID NO: 680236 - DNA, 33 bp, Homo sapien
agacaataaaagaagatgaaacacaagaggtga

SEQ ID NO: 680237 - DNA, 33 bp, Homo sapien
attgtaaagtattccaactagaaatagaccaag

SEQ ID NO: 680238 - DNA, 33 bp, Homo sapien
attgtaaagtattccatctagaaatagaccaag

SEQ ID NO: 680239 - DNA, 33 bp, Homo sapien
cttctaaatgcctttgcactatcttttgagttg

SEQ ID NO: 680240 - DNA, 33 bp, Homo sapien
cttctaaatgcctttgtactatcttttgagttg

SEQ ID NO: 680241 - DNA, 33 bp, Homo sapien
cacaagtatatctgagcacggagttattaaagc

SEQ ID NO: 680242 - DNA, 33 bp, Homo sapien
cacaagtatatctgagtacggagttattaaagc

SEQ ID NO: 680243 - DNA, 33 bp, Homo sapien
ttttatttgcaacacgaaaaatcacatactaga

SEQ ID NO: 680244 - DNA, 33 bp, Homo sapien
ttttatttgcaacacgcaaaatcacatactaga

SEQ ID NO: 680245 - DNA, 33 bp, Homo sapien
agactgaagcaaatcaccttgaaattttatttg

SEQ ID NO: 680246 - DNA, 33 bp, Homo sapien
agactgaagcaaatcatcttgaaattttatttg

SEQ ID NO: 680247 - DNA, 33 bp, Homo sapien
atataatagctccttgcattctgatgacattaa

SEQ ID NO: 680248 - DNA, 33 bp, Homo sapien
atataatagctccttgtattctgatgacattaa

SEQ ID NO: 680249 - DNA, 33 bp, Homo sapien
agtttcaaatctttgccaatttttccattaaaa

SEQ ID NO: 680250 - DNA, 33 bp, Homo sapien
agtttcaaatctttgcgaatttttccattaaaa

SEQ ID NO: 680251 - DNA, 33 bp, Homo sapien
aagaagctcaagttaacgagtgacaaaatagat

SEQ ID NO: 680252 - DNA, 33 bp, Homo sapien
aagaagctcaagttaatgagtgacaaaatagat

SEQ ID NO: 680253 - DNA, 33 bp, Homo sapien
agctcagtactacagaacatagtaagctagtta

SEQ ID NO: 680254 - DNA, 33 bp, Homo sapien
agctcagtactacagagcatagtaagctagtta

SEQ ID NO: 680255 - DNA, 33 bp, Homo sapien
gttgaaggaagaagtactaatttaacacatgca

SEQ ID NO: 680256 - DNA, 33 bp, Homo sapien
gttgaaggaagaagtattaatttaacacatgca

SEQ ID NO: 680257 - DNA, 33 bp, Homo sapien
atatgtttattgcatacagaaatgaagaaaggc

SEQ ID NO: 680258 - DNA, 33 bp, Homo sapien
atatgtttattgcatagagaaatgaagaaaggc

SEQ ID NO: 680259 - DNA, 33 bp, Homo sapien
atgataatgtgaactgcatctagcacacagtgt

SEQ ID NO: 680260 - DNA, 33 bp, Homo sapien
atgataatgtgaactgtatctagcacacagtgt

SEQ ID NO: 680261 - DNA, 33 bp, Homo sapien
agaggcccggagagatcaggtggtttagacgta

SEQ ID NO: 680262 - DNA, 33 bp, Homo sapien
agaggcccggagagattaggtggtttagacgta

SEQ ID NO: 680263 - DNA, 33 bp, Homo sapien
cagccaatattccacgcaaaattacaaagtcaa

SEQ ID NO: 680264 - DNA, 33 bp, Homo sapien
cagccaatattccacgtaaaattacaaagtcaa

SEQ ID NO: 680265 - DNA, 33 bp, Homo sapien
agactggaacagacaacgttaatactgagccaa

SEQ ID NO: 680266 - DNA, 33 bp, Homo sapien
agactggaacagacaatgttaatactgagccaa

SEQ ID NO: 680267 - DNA, 33 bp, Homo sapien
ggcctgtattttctggaactctaatgataacat

SEQ ID NO: 680268 - DNA, 33 bp, Homo sapien
ggcctgtattttctgggactctaatgataacat

SEQ ID NO: 680269 - DNA, 33 bp, Homo sapien
tttttggttgtggaaactgaggttcaaaatggt

SEQ ID NO: 680270 - DNA, 33 bp, Homo sapien
tttttggttgtggaaagtgaggttcaaaatggt

SEQ ID NO: 680271 - DNA, 33 bp, Homo sapien
ttaaccagtttgctctcaccttcagttctctct

SEQ ID NO: 680272 - DNA, 33 bp, Homo sapien
ttaaccagtttgctcttaccttcagttctctct

SEQ ID NO: 680273 - DNA, 33 bp, Homo sapien
gaaatgtctaaaatcacgtatgtgtgttgcatt

SEQ ID NO: 680274 - DNA, 33 bp, Homo sapien
gaaatgtctaaaatcatgtatgtgtgttgcatt

SEQ ID NO: 680275 - DNA, 33 bp, Homo sapien
acttctaaaaactgaggcctctccacagaatag

SEQ ID NO: 680276 - DNA, 33 bp, Homo sapien
acttctaaaaactgagtcctctccacagaatag

SEQ ID NO: 680277 - DNA, 33 bp, Homo sapien
aagaggtgacaatctgaaagttgataaataaca

SEQ ID NO: 680278 - DNA, 33 bp, Homo sapien
aagaggtgacaatctggaagttgataaataaca

SEQ ID NO: 680279 - DNA, 33 bp, Homo sapien
ttactgaggaaatgtcgaatctgagaatgacct

SEQ ID NO: 680280 - DNA, 33 bp, Homo sapien
ttactgaggaaatgtctaatctgagaatgacct

SEQ ID NO: 680281 - DNA, 33 bp, Homo sapien
aaagatgacttgtgacaacgctcagaaggtggc

SEQ ID NO: 680282 - DNA, 33 bp, Homo sapien
aaagatgacttgtgaccacgctcagaaggtggc

SEQ ID NO: 680283 - DNA, 33 bp, Homo sapien
tgttatgttatagatacgtacgcttatcctctg

SEQ ID NO: 680284 - DNA, 33 bp, Homo sapien
tgttatgttatagatatgtacgcttatcctctg

SEQ ID NO: 680285 - DNA, 33 bp, Homo sapien
ttaatgttttccttgccgatatggctctggatg

SEQ ID NO: 680286 - DNA, 33 bp, Homo sapien
ttaatgttttccttgctgatatggctctggatg

SEQ ID NO: 680287 - DNA, 33 bp, Homo sapien
accgaaataatttgaacctaattgcaatggttt

SEQ ID NO: 680288 - DNA, 33 bp, Homo sapien
accgaaataatttgaatctaattgcaatggttt

SEQ ID NO: 680289 - DNA, 33 bp, Homo sapien
tgaagtgttgtagagaagtgtgttttgtaaagt

SEQ ID NO: 680290 - DNA, 33 bp, Homo sapien
tgaagtgttgtagagaggtgtgttttgtaaagt

SEQ ID NO: 680291 - DNA, 33 bp, Homo sapien
gccagtcaagcctggacggatgttaccctgtta

SEQ ID NO: 680292 - DNA, 33 bp, Homo sapien
gccagtcaagcctggatggatgttaccctgtta

SEQ ID NO: 680293 - DNA, 33 bp, Homo sapien
ttgcacaaaggccagcacgattcttaaacaaat

SEQ ID NO: 680294 - DNA, 33 bp, Homo sapien
ttgcacaaaggccagcgcgattcttaaacaaat

SEQ ID NO: 680295 - DNA, 33 bp, Homo sapien
gtcagctttccatgaacaactacatacctcttt

SEQ ID NO: 680296 - DNA, 33 bp, Homo sapien
gtcagctttccatgaataactacatacctcttt

SEQ ID NO: 680297 - DNA, 33 bp, Homo sapien
actcttaaattgtgaaatgtccgttttttctct

SEQ ID NO: 680298 - DNA, 33 bp, Homo sapien
actcttaaattgtgaattgtccgttttttctct

SEQ ID NO: 680299 - DNA, 33 bp, Homo sapien
tctcggtcattaagcaagctctctattggcatt

SEQ ID NO: 680300 - DNA, 33 bp, Homo sapien
tctcggtcattaagcaggctctctattggcatt

SEQ ID NO: 680301 - DNA, 33 bp, Homo sapien
ttgatgtatattcaagaaccttcagttggaaga

SEQ ID NO: 680302 - DNA, 33 bp, Homo sapien
ttgatgtatattcaaggaccttcagttggaaga

SEQ ID NO: 680303 - DNA, 33 bp, Homo sapien
gtattacctcttaacaaccctaattggaactcc

SEQ ID NO: 680304 - DNA, 33 bp, Homo sapien
gtattacctcttaacagccctaattggaactcc

SEQ ID NO: 680305 - DNA, 33 bp, Homo sapien
agccagcccaacaaaacggttagtaacaaaatt

SEQ ID NO: 680306 - DNA, 33 bp, Homo sapien
agccagcccaacaaaatggttagtaacaaaatt

SEQ ID NO: 680307 - DNA, 33 bp, Homo sapien
tacaggaaggtaccacactttgacgttcagtat

SEQ ID NO: 680308 - DNA, 33 bp, Homo sapien
tacaggaaggtaccacgctttgacgttcagtat

SEQ ID NO: 680309 - DNA, 33 bp, Homo sapien
gggaactctgccacaaaattgattctaccatcg

SEQ ID NO: 680310 - DNA, 33 bp, Homo sapien
gggaactctgccacaagattgattctaccatcg

SEQ ID NO: 680311 - DNA, 33 bp, Homo sapien
tatgccactcaatcggacagtcatttagcttat

SEQ ID NO: 680312 - DNA, 33 bp, Homo sapien
tatgccactcaatcgggcagtcatttagcttat

SEQ ID NO: 680313 - DNA, 33 bp, Homo sapien
tgatgtaggtacgagacgagtcaaggatgattc

SEQ ID NO: 680314 - DNA, 33 bp, Homo sapien
tgatgtaggtacgagatgagtcaaggatgattc

SEQ ID NO: 680315 - DNA, 33 bp, Homo sapien
gcataccttatggatactagcaattcagttcca

SEQ ID NO: 680316 - DNA, 33 bp, Homo sapien
gcataccttatggatattagcaattcagttcca

SEQ ID NO: 680317 - DNA, 33 bp, Homo sapien
tgttcttgagtcaatcaatggaacaaactttat

SEQ ID NO: 680318 - DNA, 33 bp, Homo sapien
tgttcttgagtcaatcgatggaacaaactttat

SEQ ID NO: 680319 - DNA, 33 bp, Homo sapien
tgaggttgaaaggtaaaggcccttcagttcttg

SEQ ID NO: 680320 - DNA, 33 bp, Homo sapien
tgaggttgaaaggtaagggcccttcagttcttg

SEQ ID NO: 680321 - DNA, 33 bp, Homo sapien
cttggaacaagtcaaagtaagcagagagatgca

SEQ ID NO: 680322 - DNA, 33 bp, Homo sapien
cttggaacaagtcaaattaagcagagagatgca

SEQ ID NO: 680323 - DNA, 33 bp, Homo sapien
ttcagtatgattgtgacggatagttccctgcac

SEQ ID NO: 680324 - DNA, 33 bp, Homo sapien
ttcagtatgattgtgatggatagttccctgcac

SEQ ID NO: 680325 - DNA, 33 bp, Homo sapien
ctcacagatctagaaacgaagttaaatttttgc

SEQ ID NO: 680326 - DNA, 33 bp, Homo sapien
ctcacagatctagaaatgaagttaaatttttgc

SEQ ID NO: 680327 - DNA, 33 bp, Homo sapien
cttggaaattgtcaccaaatactaacaagaagt

SEQ ID NO: 680328 - DNA, 33 bp, Homo sapien
cttggaaattgtcaccgaatactaacaagaagt

SEQ ID NO: 680329 - DNA, 33 bp, Homo sapien
taaaactactcatctcaaaatttgtgaggccct

SEQ ID NO: 680330 - DNA, 33 bp, Homo sapien
taaaactactcatctcgaaatttgtgaggccct

SEQ ID NO: 680331 - DNA, 33 bp, Homo sapien
cacaagagaagccaaaaatagagatgtgtttat

SEQ ID NO: 680332 - DNA, 33 bp, Homo sapien
cacaagagaagccaaatatagagatgtgtttat

SEQ ID NO: 680333 - DNA, 33 bp, Homo sapien
gactgtatcttcaacaatctgctggcacatctc

SEQ ID NO: 680334 - DNA, 33 bp, Homo sapien
gactgtatcttcaacagtctgctggcacatctc

SEQ ID NO: 680335 - DNA, 33 bp, Homo sapien
atgttaagaaggggcaagatgagtaagaagtac

SEQ ID NO: 680336 - DNA, 33 bp, Homo sapien
atgttaagaaggggcaggatgagtaagaagtac

SEQ ID NO: 680337 - DNA, 33 bp, Homo sapien
tagatgtctagcaccaaactgtcttgatatcta

SEQ ID NO: 680338 - DNA, 33 bp, Homo sapien
tagatgtctagcaccagactgtcttgatatcta

SEQ ID NO: 680339 - DNA, 33 bp, Homo sapien
tttggtgttgggataacagggaaatgcatgatc

SEQ ID NO: 680340 - DNA, 33 bp, Homo sapien
tttggtgttgggataatagggaaatgcatgatc

SEQ ID NO: 680341 - DNA, 33 bp, Homo sapien
acctggagagatacagaccaatgcatgaggagt

SEQ ID NO: 680342 - DNA, 33 bp, Homo sapien
acctggagagatacaggccaatgcatgaggagt

SEQ ID NO: 680343 - DNA, 33 bp, Homo sapien
gtatctctccaggttagccagtccgttctctgg

SEQ ID NO: 680344 - DNA, 33 bp, Homo sapien
gtatctctccaggttatccagtccgttctctgg

SEQ ID NO: 680345 - DNA, 33 bp, Homo sapien
gagttttgaaagtgtcaaaggatttatggctga

SEQ ID NO: 680346 - DNA, 33 bp, Homo sapien
gagttttgaaagtgtcgaaggatttatggctga

SEQ ID NO: 680347 - DNA, 33 bp, Homo sapien
tatctaagtggttaaacctaagcgacaaacgtc

SEQ ID NO: 680348 - DNA, 33 bp, Homo sapien
tatctaagtggttaaatctaagcgacaaacgtc

SEQ ID NO: 680349 - DNA, 33 bp, Homo sapien
aaagggtttgcaaatgacaatggagaaagtagt

SEQ ID NO: 680350 - DNA, 33 bp, Homo sapien
aaagggtttgcaaatggcaatggagaaagtagt

SEQ ID NO: 680351 - DNA, 33 bp, Homo sapien
caggaaattccatatactaaataacttgcattt

SEQ ID NO: 680352 - DNA, 33 bp, Homo sapien
caggaaattccatatagtaaataacttgcattt

SEQ ID NO: 680353 - DNA, 33 bp, Homo sapien
cattatatcataccaaactatcaggaaattcca

SEQ ID NO: 680354 - DNA, 33 bp, Homo sapien
cattatatcataccaagctatcaggaaattcca

SEQ ID NO: 680355 - DNA, 33 bp, Homo sapien
tttctgtatgccatgacgtagactgaaagcaac

SEQ ID NO: 680356 - DNA, 33 bp, Homo sapien
tttctgtatgccatgatgtagactgaaagcaac

SEQ ID NO: 680357 - DNA, 33 bp, Homo sapien
aactattaagactttcaagataatgacagcaga

SEQ ID NO: 680358 - DNA, 33 bp, Homo sapien
aactattaagactttcgagataatgacagcaga

SEQ ID NO: 680359 - DNA, 33 bp, Homo sapien
ccccttctgagcttgacgccctatgtgaatgca

SEQ ID NO: 680360 - DNA, 33 bp, Homo sapien
ccccttctgagcttgaggccctatgtgaatgca

SEQ ID NO: 680361 - DNA, 33 bp, Homo sapien
ccttgcccaagggtcactattacgcagatactt

SEQ ID NO: 680362 - DNA, 33 bp, Homo sapien
ccttgcccaagggtcagtattacgcagatactt

SEQ ID NO: 680363 - DNA, 33 bp, Homo sapien
atgcaatagagaaataacattaaagcaaggaca

SEQ ID NO: 680364 - DNA, 33 bp, Homo sapien
atgcaatagagaaatagcattaaagcaaggaca

SEQ ID NO: 680365 - DNA, 33 bp, Homo sapien
cagcctttccagccacaccagtattaatcacct

SEQ ID NO: 680366 - DNA, 33 bp, Homo sapien
cagcctttccagccacgccagtattaatcacct

SEQ ID NO: 680367 - DNA, 33 bp, Homo sapien
gtcttcataattcggaaactagagatagccaca

SEQ ID NO: 680368 - DNA, 33 bp, Homo sapien
gtcttcataattcggacactagagatagccaca

SEQ ID NO: 680369 - DNA, 33 bp, Homo sapien
tcaccaataggtcaaaaaaggtactcatatgta

SEQ ID NO: 680370 - DNA, 33 bp, Homo sapien
tcaccaataggtcaaagaaggtactcatatgta

SEQ ID NO: 680371 - DNA, 33 bp, Homo sapien
atgagttaaaatcccaaaactcatcttgaatgc

SEQ ID NO: 680372 - DNA, 33 bp, Homo sapien
atgagttaaaatcccacaactcatcttgaatgc

SEQ ID NO: 680373 - DNA, 33 bp, Homo sapien
ctagacccaaaagctacaggagacaagaagcag

SEQ ID NO: 680374 - DNA, 33 bp, Homo sapien
ctagacccaaaagctataggagacaagaagcag

SEQ ID NO: 680375 - DNA, 33 bp, Homo sapien
tggcttgcaaaactcaataaaattccacctatg

SEQ ID NO: 680376 - DNA, 33 bp, Homo sapien
tggcttgcaaaactcagtaaaattccacctatg

SEQ ID NO: 680377 - DNA, 33 bp, Homo sapien
cctaggggatcatcgaccagtaatcaggggtct

SEQ ID NO: 680378 - DNA, 33 bp, Homo sapien
cctaggggatcatcgagcagtaatcaggggtct

SEQ ID NO: 680379 - DNA, 33 bp, Homo sapien
taaaagtagaaacaaacagtgaggatataaaga

SEQ ID NO: 680380 - DNA, 33 bp, Homo sapien
taaaagtagaaacaaagagtgaggatataaaga

SEQ ID NO: 680381 - DNA, 33 bp, Homo sapien
ttactaacctcatttacggatacagaaaatgaa

SEQ ID NO: 680382 - DNA, 33 bp, Homo sapien
ttactaacctcatttatggatacagaaaatgaa

SEQ ID NO: 680383 - DNA, 33 bp, Homo sapien
catgtttcttttttccacattctataaggacat

SEQ ID NO: 680384 - DNA, 33 bp, Homo sapien
catgtttcttttttccgcattctataaggacat

SEQ ID NO: 680385 - DNA, 33 bp, Homo sapien
gtcctaaatttgttcaacttgacggattttaga

SEQ ID NO: 680386 - DNA, 33 bp, Homo sapien
gtcctaaatttgttcagcttgacggattttaga

SEQ ID NO: 680387 - DNA, 33 bp, Homo sapien
aaatctttacattctgaacaaagtttatgtttt

SEQ ID NO: 680388 - DNA, 33 bp, Homo sapien
aaatctttacattctggacaaagtttatgtttt

SEQ ID NO: 680389 - DNA, 33 bp, Homo sapien
ttacaatgcattaccacatctaaagacttctac

SEQ ID NO: 680390 - DNA, 33 bp, Homo sapien
ttacaatgcattaccatatctaaagacttctac

SEQ ID NO: 680391 - DNA, 33 bp, Homo sapien
tggtcgttgcaacagacaatcctcctggatatg

SEQ ID NO: 680392 - DNA, 33 bp, Homo sapien
tggtcgttgcaacagagaatcctcctggatatg

SEQ ID NO: 680393 - DNA, 33 bp, Homo sapien
acacacagtctttccacacgtccaggcaggggc

SEQ ID NO: 680394 - DNA, 33 bp, Homo sapien
acacacagtctttccatacgtccaggcaggggc

SEQ ID NO: 680395 - DNA, 33 bp, Homo sapien
tttttatatagggataactttgctgagatttaa

SEQ ID NO: 680396 - DNA, 33 bp, Homo sapien
tttttatatagggatagctttgctgagatttaa

SEQ ID NO: 680397 - DNA, 33 bp, Homo sapien
gaatcttcctcccacactgatgttttgattatg

SEQ ID NO: 680398 - DNA, 33 bp, Homo sapien
gaatcttcctcccacattgatgttttgattatg

SEQ ID NO: 680399 - DNA, 33 bp, Homo sapien
ttcatacctttgtgaaatgatgttaaaaatagt

SEQ ID NO: 680400 - DNA, 33 bp, Homo sapien
ttcatacctttgtgaagtgatgttaaaaatagt

SEQ ID NO: 680401 - DNA, 33 bp, Homo sapien
tcggtgttattagcaacggctactgaaattttt

SEQ ID NO: 680402 - DNA, 33 bp, Homo sapien
tcggtgttattagcaatggctactgaaattttt

SEQ ID NO: 680403 - DNA, 33 bp, Homo sapien
aggtctctgaaatgcactgaagcccttttgccc

SEQ ID NO: 680404 - DNA, 33 bp, Homo sapien
aggtctctgaaatgcattgaagcccttttgccc

SEQ ID NO: 680405 - DNA, 33 bp, Homo sapien
caggagaaatctggaaagcgactctcctaaacc

SEQ ID NO: 680406 - DNA, 33 bp, Homo sapien
caggagaaatctggaacgcgactctcctaaacc

SEQ ID NO: 680407 - DNA, 33 bp, Homo sapien
aacaaatagctccaaacattcaggtgtacattt

SEQ ID NO: 680408 - DNA, 33 bp, Homo sapien
aacaaatagctccaaatattcaggtgtacattt

SEQ ID NO: 680409 - DNA, 33 bp, Homo sapien
agagtctgagacaaaacttaaacacatataaac

SEQ ID NO: 680410 - DNA, 33 bp, Homo sapien
agagtctgagacaaaagttaaacacatataaac

SEQ ID NO: 680411 - DNA, 33 bp, Homo sapien
tcctagttattgtgaacaattagtcccaggcta

SEQ ID NO: 680412 - DNA, 33 bp, Homo sapien
tcctagttattgtgaataattagtcccaggcta

SEQ ID NO: 680413 - DNA, 33 bp, Homo sapien
ttaatcaacacatcaaccacaacaaatgcttta

SEQ ID NO: 680414 - DNA, 33 bp, Homo sapien
ttaatcaacacatcaatcacaacaaatgcttta

SEQ ID NO: 680415 - DNA, 33 bp, Homo sapien
tcttgttttgatagcaagagatgataaaatgat

SEQ ID NO: 680416 - DNA, 33 bp, Homo sapien
tcttgttttgatagcatgagatgataaaatgat

SEQ ID NO: 680417 - DNA, 33 bp, Homo sapien
atgtagttctctatctaaacagcttcttataag

SEQ ID NO: 680418 - DNA, 33 bp, Homo sapien
atgtagttctctatctgaacagcttcttataag

SEQ ID NO: 680419 - DNA, 33 bp, Homo sapien
tcacatggcattttaaccagtttgcaacacttg

SEQ ID NO: 680420 - DNA, 33 bp, Homo sapien
tcacatggcattttaagcagtttgcaacacttg

SEQ ID NO: 680421 - DNA, 33 bp, Homo sapien
ttttacttttccaacaaacttcatgtgctaatt

SEQ ID NO: 680422 - DNA, 33 bp, Homo sapien
ttttacttttccaacagacttcatgtgctaatt

SEQ ID NO: 680423 - DNA, 33 bp, Homo sapien
tagcatgagaacagacacttatggagtacatga

SEQ ID NO: 680424 - DNA, 33 bp, Homo sapien
tagcatgagaacagacgcttatggagtacatga

SEQ ID NO: 680425 - DNA, 33 bp, Homo sapien
atctacataatgttcacggagggataggaaaac

SEQ ID NO: 680426 - DNA, 33 bp, Homo sapien
atctacataatgttcatggagggataggaaaac

SEQ ID NO: 680427 - DNA, 33 bp, Homo sapien
tctatatttgtatgaaaagcacccaattttatt

SEQ ID NO: 680428 - DNA, 33 bp, Homo sapien
tctatatttgtatgaagagcacccaattttatt

SEQ ID NO: 680429 - DNA, 33 bp, Homo sapien
tcatgttcctcaaaccaaatgtaagccattttt

SEQ ID NO: 680430 - DNA, 33 bp, Homo sapien
tcatgttcctcaaaccgaatgtaagccattttt

SEQ ID NO: 680431 - DNA, 33 bp, Homo sapien
agcaggtagactttacaacataggactacccct

SEQ ID NO: 680432 - DNA, 33 bp, Homo sapien
agcaggtagactttacgacataggactacccct

SEQ ID NO: 680433 - DNA, 33 bp, Homo sapien
aatggaattacgcacaacttcctacgtgctctc

SEQ ID NO: 680434 - DNA, 33 bp, Homo sapien
aatggaattacgcacaccttcctacgtgctctc

SEQ ID NO: 680435 - DNA, 33 bp, Homo sapien
ttgctctggcacaaagactggagagcaatggtg

SEQ ID NO: 680436 - DNA, 33 bp, Homo sapien
ttgctctggcacaaagcctggagagcaatggtg

SEQ ID NO: 680437 - DNA, 33 bp, Homo sapien
gtgagagaaatatacacacaaacaactgtacat

SEQ ID NO: 680438 - DNA, 33 bp, Homo sapien
gtgagagaaatatacatacaaacaactgtacat

SEQ ID NO: 680439 - DNA, 33 bp, Homo sapien
gaattggcttaatcaaatatggagactgacaag

SEQ ID NO: 680440 - DNA, 33 bp, Homo sapien
gaattggcttaatcaattatggagactgacaag

SEQ ID NO: 680441 - DNA, 33 bp, Homo sapien
aaagtggcctaagtaactgatatgttttggctc

SEQ ID NO: 680442 - DNA, 33 bp, Homo sapien
aaagtggcctaagtaattgatatgttttggctc

SEQ ID NO: 680443 - DNA, 33 bp, Homo sapien
gatgtatctcacaaaggattcagtgggttccca

SEQ ID NO: 680444 - DNA, 33 bp, Homo sapien
gatgtatctcacaaagtattcagtgggttccca

SEQ ID NO: 680445 - DNA, 33 bp, Homo sapien
cagggtctttagctaacaaaggtttgagagaga

SEQ ID NO: 680446 - DNA, 33 bp, Homo sapien
cagggtctttagctaataaaggtttgagagaga

SEQ ID NO: 680447 - DNA, 33 bp, Homo sapien
aaaaggagtgttgacaaaatcaaaatatttgtt

SEQ ID NO: 680448 - DNA, 33 bp, Homo sapien
aaaaggagtgttgacagaatcaaaatatttgtt

SEQ ID NO: 680449 - DNA, 33 bp, Homo sapien
tgtggatggaaactaactaacttctagcaaagg

SEQ ID NO: 680450 - DNA, 33 bp, Homo sapien
tgtggatggaaactaagtaacttctagcaaagg

SEQ ID NO: 680451 - DNA, 33 bp, Homo sapien
cagcacctttgggaataacaaaagcacacagga

SEQ ID NO: 680452 - DNA, 33 bp, Homo sapien
cagcacctttgggaatgacaaaagcacacagga

SEQ ID NO: 680453 - DNA, 33 bp, Homo sapien
actctgtgcactgaacaatggttaaatgtgtct

SEQ ID NO: 680454 - DNA, 33 bp, Homo sapien
actctgtgcactgaactatggttaaatgtgtct

SEQ ID NO: 680455 - DNA, 33 bp, Homo sapien
aaagataaaattgtccaaagactccctaaagtt

SEQ ID NO: 680456 - DNA, 33 bp, Homo sapien
aaagataaaattgtccgaagactccctaaagtt

SEQ ID NO: 680457 - DNA, 33 bp, Homo sapien
cattaatgtgaatggacagaaaaaatgattcct

SEQ ID NO: 680458 - DNA, 33 bp, Homo sapien
cattaatgtgaatggatagaaaaaatgattcct

SEQ ID NO: 680459 - DNA, 33 bp, Homo sapien
tcttagttctgtccacccagaagactcagtagc

SEQ ID NO: 680460 - DNA, 33 bp, Homo sapien
tcttagttctgtccactcagaagactcagtagc

SEQ ID NO: 680461 - DNA, 33 bp, Homo sapien
gacacagaaaacattaccaagcagtgtcctcag

SEQ ID NO: 680462 - DNA, 33 bp, Homo sapien
gacacagaaaacattatcaagcagtgtcctcag

SEQ ID NO: 680463 - DNA, 33 bp, Homo sapien
agaagaatgagttttaccagttttaaatggaat

SEQ ID NO: 680464 - DNA, 33 bp, Homo sapien
agaagaatgagttttatcagttttaaatggaat

SEQ ID NO: 680465 - DNA, 33 bp, Homo sapien
atttgtatgtcatctacgcttttcaattccatt

SEQ ID NO: 680466 - DNA, 33 bp, Homo sapien
atttgtatgtcatctatgcttttcaattccatt

SEQ ID NO: 680467 - DNA, 33 bp, Homo sapien
aatggtgtgtatttaaccggaaagacctatacc

SEQ ID NO: 680468 - DNA, 33 bp, Homo sapien
aatggtgtgtatttaatcggaaagacctatacc

SEQ ID NO: 680469 - DNA, 33 bp, Homo sapien
atgagaaagacaagaaagatgatcattcctgtt

SEQ ID NO: 680470 - DNA, 33 bp, Homo sapien
atgagaaagacaagaaggatgatcattcctgtt

SEQ ID NO: 680471 - DNA, 33 bp, Homo sapien
aagtgttgtaagtttacaaatcagttttaccct

SEQ ID NO: 680472 - DNA, 33 bp, Homo sapien
aagtgttgtaagtttataaatcagttttaccct

SEQ ID NO: 680473 - DNA, 33 bp, Homo sapien
ttcttgtcgagcagaaaaccagttgagaccact

SEQ ID NO: 680474 - DNA, 33 bp, Homo sapien
ttcttgtcgagcagaagaccagttgagaccact

SEQ ID NO: 680475 - DNA, 33 bp, Homo sapien
tcttaaacacatagtacggattcaagccaatga

SEQ ID NO: 680476 - DNA, 33 bp, Homo sapien
tcttaaacacatagtatggattcaagccaatga

SEQ ID NO: 680477 - DNA, 33 bp, Homo sapien
aggtgctgtgtagaaacagaaacagttgctatc

SEQ ID NO: 680478 - DNA, 33 bp, Homo sapien
aggtgctgtgtagaaatagaaacagttgctatc

SEQ ID NO: 680479 - DNA, 33 bp, Homo sapien
ttggaaaaccacacaaatattatgctgacgtta

SEQ ID NO: 680480 - DNA, 33 bp, Homo sapien
ttggaaaaccacacaagtattatgctgacgtta

SEQ ID NO: 680481 - DNA, 33 bp, Homo sapien
aatatttaggactttaaaatctgagtttacctg

SEQ ID NO: 680482 - DNA, 33 bp, Homo sapien
aatatttaggactttataatctgagtttacctg

SEQ ID NO: 680483 - DNA, 33 bp, Homo sapien
ctgtgaatgtgtggacacttacaacattttatg

SEQ ID NO: 680484 - DNA, 33 bp, Homo sapien
ctgtgaatgtgtggacccttacaacattttatg

SEQ ID NO: 680485 - DNA, 33 bp, Homo sapien
cagtccttgaagatgcaaaacgtctttggaata

SEQ ID NO: 680486 - DNA, 33 bp, Homo sapien
cagtccttgaagatgcgaaacgtctttggaata

SEQ ID NO: 680487 - DNA, 33 bp, Homo sapien
ttaaagaaaaagacaccgcacctctttaaagga

SEQ ID NO: 680488 - DNA, 33 bp, Homo sapien
ttaaagaaaaagacactgcacctctttaaagga

SEQ ID NO: 680489 - DNA, 33 bp, Homo sapien
ttgacaacatttacagacaacttcctgagtggt

SEQ ID NO: 680490 - DNA, 33 bp, Homo sapien
ttgacaacatttacagtcaacttcctgagtggt

SEQ ID NO: 680491 - DNA, 33 bp, Homo sapien
gcaattaaaatagcaaaacaaagtgtttaacta

SEQ ID NO: 680492 - DNA, 33 bp, Homo sapien
gcaattaaaatagcaatacaaagtgtttaacta

SEQ ID NO: 680493 - DNA, 33 bp, Homo sapien
acttaaaagactgagaaatatgcaatttggaaa

SEQ ID NO: 680494 - DNA, 33 bp, Homo sapien
acttaaaagactgagagatatgcaatttggaaa

SEQ ID NO: 680495 - DNA, 33 bp, Homo sapien
aacaactaaaatgctgcagaaaatatatatttg

SEQ ID NO: 680496 - DNA, 33 bp, Homo sapien
aacaactaaaatgctggagaaaatatatatttg

SEQ ID NO: 680497 - DNA, 33 bp, Homo sapien
ccatgaacatttattgaataacttccatgtact

SEQ ID NO: 680498 - DNA, 33 bp, Homo sapien
ccatgaacatttattgtataacttccatgtact

SEQ ID NO: 680499 - DNA, 33 bp, Homo sapien
ctaatgccacttattacagagacctttattgac

SEQ ID NO: 680500 - DNA, 33 bp, Homo sapien
ctaatgccacttattagagagacctttattgac

SEQ ID NO: 680501 - DNA, 33 bp, Homo sapien
cttttccaagtctttgaatctctgacacatatt

SEQ ID NO: 680502 - DNA, 33 bp, Homo sapien
cttttccaagtctttggatctctgacacatatt

SEQ ID NO: 680503 - DNA, 33 bp, Homo sapien
attaaaaatcctaaaacgtgagcaatatttctt

SEQ ID NO: 680504 - DNA, 33 bp, Homo sapien
attaaaaatcctaaaatgtgagcaatatttctt

SEQ ID NO: 680505 - DNA, 33 bp, Homo sapien
gacacttagactgaaactattgcccaagacttg

SEQ ID NO: 680506 - DNA, 33 bp, Homo sapien
gacacttagactgaaattattgcccaagacttg

SEQ ID NO: 680507 - DNA, 33 bp, Homo sapien
acgttgctgggctggaaatctacttggagcagt

SEQ ID NO: 680508 - DNA, 33 bp, Homo sapien
acgttgctgggctggagatctacttggagcagt

SEQ ID NO: 680509 - DNA, 33 bp, Homo sapien
cagaagtctacctgagaacacactgttataagc

SEQ ID NO: 680510 - DNA, 33 bp, Homo sapien
cagaagtctacctgaggacacactgttataagc

SEQ ID NO: 680511 - DNA, 33 bp, Homo sapien
catcctgtacattgaccgctcaaagtagtatga

SEQ ID NO: 680512 - DNA, 33 bp, Homo sapien
catcctgtacattgactgctcaaagtagtatga

SEQ ID NO: 680513 - DNA, 33 bp, Homo sapien
gtaggttagttcaagacatgattattggtagtt

SEQ ID NO: 680514 - DNA, 33 bp, Homo sapien
gtaggttagttcaagatatgattattggtagtt

SEQ ID NO: 680515 - DNA, 33 bp, Homo sapien
tggcgcacagtgtatacgcaattcatgattgtg

SEQ ID NO: 680516 - DNA, 33 bp, Homo sapien
tggcgcacagtgtatatgcaattcatgattgtg

SEQ ID NO: 680517 - DNA, 33 bp, Homo sapien
ccaggaatacctttgcacatagtgtttactcat

SEQ ID NO: 680518 - DNA, 33 bp, Homo sapien
ccaggaatacctttgcgcatagtgtttactcat

SEQ ID NO: 680519 - DNA, 33 bp, Homo sapien
agatctcacgctaacactaagtatgtgcacaca

SEQ ID NO: 680520 - DNA, 33 bp, Homo sapien
agatctcacgctaacattaagtatgtgcacaca

SEQ ID NO: 680521 - DNA, 33 bp, Homo sapien
atcaatcctactatgacaaagagatacagacaa

SEQ ID NO: 680522 - DNA, 33 bp, Homo sapien
atcaatcctactatgagaaagagatacagacaa

SEQ ID NO: 680523 - DNA, 33 bp, Homo sapien
gacactattccttcacaatgatgaaagttgata

SEQ ID NO: 680524 - DNA, 33 bp, Homo sapien
gacactattccttcaccatgatgaaagttgata

SEQ ID NO: 680525 - DNA, 33 bp, Homo sapien
tatccaccctactacaccaatggcactgagaag

SEQ ID NO: 680526 - DNA, 33 bp, Homo sapien
tatccaccctactacatcaatggcactgagaag

SEQ ID NO: 680527 - DNA, 33 bp, Homo sapien
tactaaagttaatatgacagctagtggtaaagc

SEQ ID NO: 680528 - DNA, 33 bp, Homo sapien
tactaaagttaatatgccagctagtggtaaagc

SEQ ID NO: 680529 - DNA, 33 bp, Homo sapien
acacgatgttcacatcacattctcttcaaatta

SEQ ID NO: 680530 - DNA, 33 bp, Homo sapien
acacgatgttcacatctcattctcttcaaatta

SEQ ID NO: 680531 - DNA, 33 bp, Homo sapien
atgcatttacacatgacagaaaaattccattac

SEQ ID NO: 680532 - DNA, 33 bp, Homo sapien
atgcatttacacatgatagaaaaattccattac

SEQ ID NO: 680533 - DNA, 33 bp, Homo sapien
tagtcactagtataagaacaattacatggttaa

SEQ ID NO: 680534 - DNA, 33 bp, Homo sapien
tagtcactagtataaggacaattacatggttaa

SEQ ID NO: 680535 - DNA, 33 bp, Homo sapien
gtgaagggggtcgtgaaattccacattaacttc

SEQ ID NO: 680536 - DNA, 33 bp, Homo sapien
gtgaagggggtcgtgatattccacattaacttc

SEQ ID NO: 680537 - DNA, 33 bp, Homo sapien
tatcggctggccgttccatacataggcaacttt

SEQ ID NO: 680538 - DNA, 33 bp, Homo sapien
tatcggctggccgttctatacataggcaacttt

SEQ ID NO: 680539 - DNA, 33 bp, Homo sapien
ctacaatgccaccttaaagaaagattccattat

SEQ ID NO: 680540 - DNA, 33 bp, Homo sapien
ctacaatgccaccttagagaaagattccattat

SEQ ID NO: 680541 - DNA, 33 bp, Homo sapien
tttgagaatctttcagaacagaggtatagcaaa

SEQ ID NO: 680542 - DNA, 33 bp, Homo sapien
tttgagaatctttcagtacagaggtatagcaaa

SEQ ID NO: 680543 - DNA, 33 bp, Homo sapien
aaagctacactagaaaataaaatcatcatttga

SEQ ID NO: 680544 - DNA, 33 bp, Homo sapien
aaagctacactagaaagtaaaatcatcatttga

SEQ ID NO: 680545 - DNA, 33 bp, Homo sapien
agttgaccatgttgaaatatccaggagccaaat

SEQ ID NO: 680546 - DNA, 33 bp, Homo sapien
agttgaccatgttgaactatccaggagccaaat

SEQ ID NO: 680547 - DNA, 33 bp, Homo sapien
atcatggatacagtaactctaaaactattcatt

SEQ ID NO: 680548 - DNA, 33 bp, Homo sapien
atcatggatacagtaattctaaaactattcatt

SEQ ID NO: 680549 - DNA, 33 bp, Homo sapien
agtaaccaagattgcaagattcatggatgatca

SEQ ID NO: 680550 - DNA, 33 bp, Homo sapien
agtaaccaagattgcaggattcatggatgatca

SEQ ID NO: 680551 - DNA, 33 bp, Homo sapien
ttgaaaaacacagactaaattaaaagctaccta

SEQ ID NO: 680552 - DNA, 33 bp, Homo sapien
ttgaaaaacacagactgaattaaaagctaccta

SEQ ID NO: 680553 - DNA, 33 bp, Homo sapien
atatactgccatttaaacaagatttctgctgta

SEQ ID NO: 680554 - DNA, 33 bp, Homo sapien
atatactgccatttaagcaagatttctgctgta

SEQ ID NO: 680555 - DNA, 33 bp, Homo sapien
tatagttggtacttgaagaaaggagctgtgaaa

SEQ ID NO: 680556 - DNA, 33 bp, Homo sapien
tatagttggtacttgaggaaaggagctgtgaaa

SEQ ID NO: 680557 - DNA, 33 bp, Homo sapien
cagtccatcacattacagcattgttacagcttc

SEQ ID NO: 680558 - DNA, 33 bp, Homo sapien
cagtccatcacattacggcattgttacagcttc

SEQ ID NO: 680559 - DNA, 33 bp, Homo sapien
ttgccataactagagactaaccactgtgaataa

SEQ ID NO: 680560 - DNA, 33 bp, Homo sapien
ttgccataactagagagtaaccactgtgaataa

SEQ ID NO: 680561 - DNA, 33 bp, Homo sapien
aagctgttgcagatgccagttttagcacttatt

SEQ ID NO: 680562 - DNA, 33 bp, Homo sapien
aagctgttgcagatgcgagttttagcacttatt

SEQ ID NO: 680563 - DNA, 33 bp, Homo sapien
cctctgagatttagatcacaactgttaacacct

SEQ ID NO: 680564 - DNA, 33 bp, Homo sapien
cctctgagatttagattacaactgttaacacct

SEQ ID NO: 680565 - DNA, 33 bp, Homo sapien
tatcctgtaattgatacatagactgagttatta

SEQ ID NO: 680566 - DNA, 33 bp, Homo sapien
tatcctgtaattgatatatagactgagttatta

SEQ ID NO: 680567 - DNA, 33 bp, Homo sapien
ctataagaaactattacctacttgaaagtcaca

SEQ ID NO: 680568 - DNA, 33 bp, Homo sapien
ctataagaaactattagctacttgaaagtcaca

SEQ ID NO: 680569 - DNA, 33 bp, Homo sapien
ataatccacagttcaaatccaaaagacacacac

SEQ ID NO: 680570 - DNA, 33 bp, Homo sapien
ataatccacagttcaagtccaaaagacacacac

SEQ ID NO: 680571 - DNA, 33 bp, Homo sapien
tatattgcagaagaaaaaattgcctggtggctt

SEQ ID NO: 680572 - DNA, 33 bp, Homo sapien
tatattgcagaagaaagaattgcctggtggctt

SEQ ID NO: 680573 - DNA, 33 bp, Homo sapien
accctatggaattcacaatcagttactcacaaa

SEQ ID NO: 680574 - DNA, 33 bp, Homo sapien
accctatggaattcactatcagttactcacaaa

SEQ ID NO: 680575 - DNA, 33 bp, Homo sapien
acactctttttgcacccggaattagaggagaga

SEQ ID NO: 680576 - DNA, 33 bp, Homo sapien
acactctttttgcacctggaattagaggagaga

SEQ ID NO: 680577 - DNA, 33 bp, Homo sapien
ttgttctgtagatgcgaaagattcatttctgat

SEQ ID NO: 680578 - DNA, 33 bp, Homo sapien
ttgttctgtagatgcgtaagattcatttctgat

SEQ ID NO: 680579 - DNA, 33 bp, Homo sapien
gtaaattcagttatcacgtggcaacttaaaata

SEQ ID NO: 680580 - DNA, 33 bp, Homo sapien
gtaaattcagttatcatgtggcaacttaaaata

SEQ ID NO: 680581 - DNA, 33 bp, Homo sapien
aaatctcggcatactacagtagatggaggaaaa

SEQ ID NO: 680582 - DNA, 33 bp, Homo sapien
aaatctcggcatactagagtagatggaggaaaa

SEQ ID NO: 680583 - DNA, 33 bp, Homo sapien
ctcacaggtctttgtaacgcttctggagctggg

SEQ ID NO: 680584 - DNA, 33 bp, Homo sapien
ctcacaggtctttgtagcgcttctggagctggg

SEQ ID NO: 680585 - DNA, 33 bp, Homo sapien
acctttgatataaacaatctccttggtcctcag

SEQ ID NO: 680586 - DNA, 33 bp, Homo sapien
acctttgatataaacagtctccttggtcctcag

SEQ ID NO: 680587 - DNA, 33 bp, Homo sapien
tatataactacaaaccaatgaatttaataagta

SEQ ID NO: 680588 - DNA, 33 bp, Homo sapien
tatataactacaaaccgatgaatttaataagta

SEQ ID NO: 680589 - DNA, 33 bp, Homo sapien
caaggctggaggagaggagaggcttctttctat

SEQ ID NO: 680590 - DNA, 33 bp, Homo sapien
caaggctggaggagagtagaggcttctttctat

SEQ ID NO: 680591 - DNA, 33 bp, Homo sapien
gtcagagtttaaaagaagctaagctgtcaaggc

SEQ ID NO: 680592 - DNA, 33 bp, Homo sapien
gtcagagtttaaaagaggctaagctgtcaaggc

SEQ ID NO: 680593 - DNA, 33 bp, Homo sapien
ctaacaaatagaaggtcaagctaggtggaaaaa

SEQ ID NO: 680594 - DNA, 33 bp, Homo sapien
ctaacaaatagaaggttaagctaggtggaaaaa

SEQ ID NO: 680595 - DNA, 33 bp, Homo sapien
aaaaccctgtattgtacgaattctctccctatt

SEQ ID NO: 680596 - DNA, 33 bp, Homo sapien
aaaaccctgtattgtatgaattctctccctatt

SEQ ID NO: 680597 - DNA, 33 bp, Homo sapien
ctaaagcagcaaattcaaagtcaaaagagagtg

SEQ ID NO: 680598 - DNA, 33 bp, Homo sapien
ctaaagcagcaaattccaagtcaaaagagagtg

SEQ ID NO: 680599 - DNA, 33 bp, Homo sapien
aaacaaaatttcatgaccaaagttcctttatcc

SEQ ID NO: 680600 - DNA, 33 bp, Homo sapien
aaacaaaatttcatgagcaaagttcctttatcc

SEQ ID NO: 680601 - DNA, 33 bp, Homo sapien
ttttgcagatgaggaaattaatatgagaaacta

SEQ ID NO: 680602 - DNA, 33 bp, Homo sapien
ttttgcagatgaggaagttaatatgagaaacta

SEQ ID NO: 680603 - DNA, 33 bp, Homo sapien
tctaataaaatacttacgtctaacagtggtttg

SEQ ID NO: 680604 - DNA, 33 bp, Homo sapien
tctaataaaatacttatgtctaacagtggtttg

SEQ ID NO: 680605 - DNA, 33 bp, Homo sapien
gtgtcctttcatttcaacctgaaggtctacctt

SEQ ID NO: 680606 - DNA, 33 bp, Homo sapien
gtgtcctttcatttcagcctgaaggtctacctt

SEQ ID NO: 680607 - DNA, 33 bp, Homo sapien
agtggtttattacttaccgataggcagcaaagg

SEQ ID NO: 680608 - DNA, 33 bp, Homo sapien
agtggtttattacttatcgataggcagcaaagg

SEQ ID NO: 680609 - DNA, 33 bp, Homo sapien
ccttttctgatatttaccacggctttcttttgg

SEQ ID NO: 680610 - DNA, 33 bp, Homo sapien
ccttttctgatatttatcacggctttcttttgg

SEQ ID NO: 680611 - DNA, 33 bp, Homo sapien
ggaatattttgaaaaactggacaaatgaacttt

SEQ ID NO: 680612 - DNA, 33 bp, Homo sapien
ggaatattttgaaaaattggacaaatgaacttt

SEQ ID NO: 680613 - DNA, 33 bp, Homo sapien
attttgatttctcaccaaatacaacctcttgtc

SEQ ID NO: 680614 - DNA, 33 bp, Homo sapien
attttgatttctcaccgaatacaacctcttgtc

SEQ ID NO: 680615 - DNA, 33 bp, Homo sapien
ctactgtagtgcctgacacatagagctcaaaaa

SEQ ID NO: 680616 - DNA, 33 bp, Homo sapien
ctactgtagtgcctgatacatagagctcaaaaa

SEQ ID NO: 680617 - DNA, 33 bp, Homo sapien
ttgagaagctaaaccacacacatagctgtaaag

SEQ ID NO: 680618 - DNA, 33 bp, Homo sapien
ttgagaagctaaaccagacacatagctgtaaag

SEQ ID NO: 680619 - DNA, 33 bp, Homo sapien
tcaatttttggagatcactggtctctaacttat

SEQ ID NO: 680620 - DNA, 33 bp, Homo sapien
tcaatttttggagatcgctggtctctaacttat

SEQ ID NO: 680621 - DNA, 33 bp, Homo sapien
tccagccagggtaagacagccagactctgtcta

SEQ ID NO: 680622 - DNA, 33 bp, Homo sapien
tccagccagggtaagagagccagactctgtcta

SEQ ID NO: 680623 - DNA, 33 bp, Homo sapien
tgggcacacatgtaaaattacggacaacgatgt

SEQ ID NO: 680624 - DNA, 33 bp, Homo sapien
tgggcacacatgtaaacttacggacaacgatgt

SEQ ID NO: 680625 - DNA, 33 bp, Homo sapien
ctacaaagtggacaaaataaggtgccagagact

SEQ ID NO: 680626 - DNA, 33 bp, Homo sapien
ctacaaagtggacaaagtaaggtgccagagact

SEQ ID NO: 680627 - DNA, 33 bp, Homo sapien
ccttgccaaaaagccacattaatcttagacctt

SEQ ID NO: 680628 - DNA, 33 bp, Homo sapien
ccttgccaaaaagccatattaatcttagacctt

SEQ ID NO: 680629 - DNA, 33 bp, Homo sapien
atctctgtatagatgacgtagttttctgaatgc

SEQ ID NO: 680630 - DNA, 33 bp, Homo sapien
atctctgtatagatgatgtagttttctgaatgc

SEQ ID NO: 680631 - DNA, 33 bp, Homo sapien
tcagcagtgaacctgacagtaaccctgtggtgc

SEQ ID NO: 680632 - DNA, 33 bp, Homo sapien
tcagcagtgaacctgagagtaaccctgtggtgc

SEQ ID NO: 680633 - DNA, 33 bp, Homo sapien
tgtatgtggcatgaaagagaggtccaactttat

SEQ ID NO: 680634 - DNA, 33 bp, Homo sapien
tgtatgtggcatgaaatagaggtccaactttat

SEQ ID NO: 680635 - DNA, 33 bp, Homo sapien
tttgaaaagatgaatcaaacgcatctgtctggg

SEQ ID NO: 680636 - DNA, 33 bp, Homo sapien
tttgaaaagatgaatcgaacgcatctgtctggg

SEQ ID NO: 680637 - DNA, 33 bp, Homo sapien
aggcccatgaagccacactaaaaatagtaacaa

SEQ ID NO: 680638 - DNA, 33 bp, Homo sapien
aggcccatgaagccacgctaaaaatagtaacaa

SEQ ID NO: 680639 - DNA, 33 bp, Homo sapien
gtccttttcacctaaacattcatctctgtgcta

SEQ ID NO: 680640 - DNA, 33 bp, Homo sapien
gtccttttcacctaaatattcatctctgtgcta

SEQ ID NO: 680641 - DNA, 33 bp, Homo sapien
gtgactgcaatcaacaataatttactgtatatt

SEQ ID NO: 680642 - DNA, 33 bp, Homo sapien
gtgactgcaatcaacactaatttactgtatatt

SEQ ID NO: 680643 - DNA, 33 bp, Homo sapien
gatcttttaataggaaaaatgtagatgaccttg

SEQ ID NO: 680644 - DNA, 33 bp, Homo sapien
gatcttttaataggaagaatgtagatgaccttg

SEQ ID NO: 680645 - DNA, 33 bp, Homo sapien
tttgtggctttactacgaccaccattactagct

SEQ ID NO: 680646 - DNA, 33 bp, Homo sapien
tttgtggctttactactaccaccattactagct

SEQ ID NO: 680647 - DNA, 33 bp, Homo sapien
gctccatgtgcaaaacagcattatatacctgat

SEQ ID NO: 680648 - DNA, 33 bp, Homo sapien
gctccatgtgcaaaacggcattatatacctgat

SEQ ID NO: 680649 - DNA, 33 bp, Homo sapien
attttgagtttacacactatctcatttattcta

SEQ ID NO: 680650 - DNA, 33 bp, Homo sapien
attttgagtttacacattatctcatttattcta

SEQ ID NO: 680651 - DNA, 33 bp, Homo sapien
tgatctttattgcaaaaggcactcactctatca

SEQ ID NO: 680652 - DNA, 33 bp, Homo sapien
tgatctttattgcaaatggcactcactctatca

SEQ ID NO: 680653 - DNA, 33 bp, Homo sapien
gcttctgctgtatgagacagtgacgggagaatt

SEQ ID NO: 680654 - DNA, 33 bp, Homo sapien
gcttctgctgtatgaggcagtgacgggagaatt

SEQ ID NO: 680655 - DNA, 33 bp, Homo sapien
caataataagcagcacagtatccatgcattttc

SEQ ID NO: 680656 - DNA, 33 bp, Homo sapien
caataataagcagcacggtatccatgcattttc

SEQ ID NO: 680657 - DNA, 33 bp, Homo sapien
tgtgatcacttactaaagttggttcatcttcct

SEQ ID NO: 680658 - DNA, 33 bp, Homo sapien
tgtgatcacttactaatgttggttcatcttcct

SEQ ID NO: 680659 - DNA, 33 bp, Homo sapien
ggagagttggtgccgcaagagcttgtgacattt

SEQ ID NO: 680660 - DNA, 33 bp, Homo sapien
ggagagttggtgccgcgagagcttgtgacattt

SEQ ID NO: 680661 - DNA, 33 bp, Homo sapien
tctcccccttggctaactcagagttaactgatt

SEQ ID NO: 680662 - DNA, 33 bp, Homo sapien
tctcccccttggctaattcagagttaactgatt

SEQ ID NO: 680663 - DNA, 33 bp, Homo sapien
aagagtcatttgccacaggatcaagtccatatt

SEQ ID NO: 680664 - DNA, 33 bp, Homo sapien
aagagtcatttgccacgggatcaagtccatatt

SEQ ID NO: 680665 - DNA, 33 bp, Homo sapien
taaatcttgggtagctcaaaaggctcttagagt

SEQ ID NO: 680666 - DNA, 33 bp, Homo sapien
taaatcttgggtagcttaaaaggctcttagagt

SEQ ID NO: 680667 - DNA, 33 bp, Homo sapien
tatgagctatatatcagaatcaagcccctctgc

SEQ ID NO: 680668 - DNA, 33 bp, Homo sapien
tatgagctatatatcataatcaagcccctctgc

SEQ ID NO: 680669 - DNA, 33 bp, Homo sapien
aggctatctatattgtcaaccaactcttgacaa

SEQ ID NO: 680670 - DNA, 33 bp, Homo sapien
aggctatctatattgtgaaccaactcttgacaa

SEQ ID NO: 680671 - DNA, 33 bp, Homo sapien
gaagctggtatatacaacctgaattctacagac

SEQ ID NO: 680672 - DNA, 33 bp, Homo sapien
gaagctggtatatacagcctgaattctacagac

SEQ ID NO: 680673 - DNA, 33 bp, Homo sapien
tcacacaatggcattaagtcaaacatctatact

SEQ ID NO: 680674 - DNA, 33 bp, Homo sapien
tcacacaatggcattaggtcaaacatctatact

SEQ ID NO: 680675 - DNA, 33 bp, Homo sapien
cctaattaagttgatacgaccagttgtagaaat

SEQ ID NO: 680676 - DNA, 33 bp, Homo sapien
cctaattaagttgatatgaccagttgtagaaat

SEQ ID NO: 680677 - DNA, 33 bp, Homo sapien
tgctattgagagaatacaaacccatcacagtcc

SEQ ID NO: 680678 - DNA, 33 bp, Homo sapien
tgctattgagagaatagaaacccatcacagtcc

SEQ ID NO: 680679 - DNA, 33 bp, Homo sapien
cctgttgagtcagtagacctttcaaaattcatg

SEQ ID NO: 680680 - DNA, 33 bp, Homo sapien
cctgttgagtcagtaggcctttcaaaattcatg

SEQ ID NO: 680681 - DNA, 33 bp, Homo sapien
tgaaagctttccagacactcaaggtgccataag

SEQ ID NO: 680682 - DNA, 33 bp, Homo sapien
tgaaagctttccagactctcaaggtgccataag

SEQ ID NO: 680683 - DNA, 33 bp, Homo sapien
tggagaaaagttcatccgacacattgactgttt

SEQ ID NO: 680684 - DNA, 33 bp, Homo sapien
tggagaaaagttcatctgacacattgactgttt

SEQ ID NO: 680685 - DNA, 33 bp, Homo sapien
atactgaagtaagtggacaaaaatgtagttcta

SEQ ID NO: 680686 - DNA, 33 bp, Homo sapien
atactgaagtaagtgggcaaaaatgtagttcta

SEQ ID NO: 680687 - DNA, 33 bp, Homo sapien
gtgcatgatcgccgaagaaataccatgtgagga

SEQ ID NO: 680688 - DNA, 33 bp, Homo sapien
gtgcatgatcgccgaataaataccatgtgagga

SEQ ID NO: 680689 - DNA, 33 bp, Homo sapien
aattatgatggctctagactatcactttcatga

SEQ ID NO: 680690 - DNA, 33 bp, Homo sapien
aattatgatggctctatactatcactttcatga

SEQ ID NO: 680691 - DNA, 33 bp, Homo sapien
tcccaaatatctatagaagtaaaggaggctgag

SEQ ID NO: 680692 - DNA, 33 bp, Homo sapien
tcccaaatatctataggagtaaaggaggctgag

SEQ ID NO: 680693 - DNA, 33 bp, Homo sapien
gaatttgaagagagcaatgcagaacatggcttc

SEQ ID NO: 680694 - DNA, 33 bp, Homo sapien
gaatttgaagagagcagtgcagaacatggcttc

SEQ ID NO: 680695 - DNA, 33 bp, Homo sapien
agatccaaaaagatacaaaatgtcaaaatattt

SEQ ID NO: 680696 - DNA, 33 bp, Homo sapien
agatccaaaaagatacgaaatgtcaaaatattt

SEQ ID NO: 680697 - DNA, 33 bp, Homo sapien
aaagatgtactcttcaacaacactgatactagg

SEQ ID NO: 680698 - DNA, 33 bp, Homo sapien
aaagatgtactcttcagcaacactgatactagg

SEQ ID NO: 680699 - DNA, 33 bp, Homo sapien
tatcacaaaaatatacagtaggtcaatatgccc

SEQ ID NO: 680700 - DNA, 33 bp, Homo sapien
tatcacaaaaatatacggtaggtcaatatgccc

SEQ ID NO: 680701 - DNA, 33 bp, Homo sapien
atcttagaaagagataaaacagggatcattatc

SEQ ID NO: 680702 - DNA, 33 bp, Homo sapien
atcttagaaagagatagaacagggatcattatc

SEQ ID NO: 680703 - DNA, 33 bp, Homo sapien
ctagatatgtgaattacgcaaaatttaatttct

SEQ ID NO: 680704 - DNA, 33 bp, Homo sapien
ctagatatgtgaattatgcaaaatttaatttct

SEQ ID NO: 680705 - DNA, 33 bp, Homo sapien
tctggctttgctttaccgagctccattgcttag

SEQ ID NO: 680706 - DNA, 33 bp, Homo sapien
tctggctttgctttactgagctccattgcttag

SEQ ID NO: 680707 - DNA, 33 bp, Homo sapien
accctgggtcctcttaaaacagtctttgggagc

SEQ ID NO: 680708 - DNA, 33 bp, Homo sapien
accctgggtcctcttagaacagtctttgggagc

SEQ ID NO: 680709 - DNA, 33 bp, Homo sapien
ggatattttgttagtaagctgctttgatgctgt

SEQ ID NO: 680710 - DNA, 33 bp, Homo sapien
ggatattttgttagtatgctgctttgatgctgt

SEQ ID NO: 680711 - DNA, 33 bp, Homo sapien
gcaacaggaaaagtacggcctattcaataaatg

SEQ ID NO: 680712 - DNA, 33 bp, Homo sapien
gcaacaggaaaagtactgcctattcaataaatg

SEQ ID NO: 680713 - DNA, 33 bp, Homo sapien
ggtggctgacagtgccaagtgatagagacacgg

SEQ ID NO: 680714 - DNA, 33 bp, Homo sapien
ggtggctgacagtgccgagtgatagagacacgg

SEQ ID NO: 680715 - DNA, 33 bp, Homo sapien
acaaagagggagtcaaagagaaaaagaaaggaa

SEQ ID NO: 680716 - DNA, 33 bp, Homo sapien
acaaagagggagtcaaggagaaaaagaaaggaa

SEQ ID NO: 680717 - DNA, 33 bp, Homo sapien
tttaaataattgaaaccatagcaatacatgagt

SEQ ID NO: 680718 - DNA, 33 bp, Homo sapien
tttaaataattgaaacgatagcaatacatgagt

SEQ ID NO: 680719 - DNA, 33 bp, Homo sapien
ccagatgttcagaaacaacttttctctactggg

SEQ ID NO: 680720 - DNA, 33 bp, Homo sapien
ccagatgttcagaaacgacttttctctactggg

SEQ ID NO: 680721 - DNA, 33 bp, Homo sapien
tggctctcaaagagaaccatctggctgattggg

SEQ ID NO: 680722 - DNA, 33 bp, Homo sapien
tggctctcaaagagaagcatctggctgattggg

SEQ ID NO: 680723 - DNA, 33 bp, Homo sapien
ataagttatgacaacacatacaaagtgatatcc

SEQ ID NO: 680724 - DNA, 33 bp, Homo sapien
ataagttatgacaacatatacaaagtgatatcc

SEQ ID NO: 680725 - DNA, 33 bp, Homo sapien
aagccactatgtttgaagtgatttgctacatta

SEQ ID NO: 680726 - DNA, 33 bp, Homo sapien
aagccactatgtttgaggtgatttgctacatta

SEQ ID NO: 680727 - DNA, 33 bp, Homo sapien
tgtttctcatctcttgaaattctgggtctttca

SEQ ID NO: 680728 - DNA, 33 bp, Homo sapien
tgtttctcatctcttgcaattctgggtctttca

SEQ ID NO: 680729 - DNA, 33 bp, Homo sapien
ttcagttcagagtatcaaagcgccgtattttga

SEQ ID NO: 680730 - DNA, 33 bp, Homo sapien
ttcagttcagagtatccaagcgccgtattttga

SEQ ID NO: 680731 - DNA, 33 bp, Homo sapien
aatatccataatctacaaaaaacttaaacagat

SEQ ID NO: 680732 - DNA, 33 bp, Homo sapien
aatatccataatctaccaaaaacttaaacagat

SEQ ID NO: 680733 - DNA, 33 bp, Homo sapien
ctctctgctggatcaaagaagtagaccccctgt

SEQ ID NO: 680734 - DNA, 33 bp, Homo sapien
ctctctgctggatcaaggaagtagaccccctgt

SEQ ID NO: 680735 - DNA, 33 bp, Homo sapien
caatttaaaactgctgaaagtctttccattttg

SEQ ID NO: 680736 - DNA, 33 bp, Homo sapien
caatttaaaactgctggaagtctttccattttg

SEQ ID NO: 680737 - DNA, 33 bp, Homo sapien
tagtctagctatgtgcaaaggagagaaaaaggt

SEQ ID NO: 680738 - DNA, 33 bp, Homo sapien
tagtctagctatgtgccaaggagagaaaaaggt

SEQ ID NO: 680739 - DNA, 33 bp, Homo sapien
ggagcagtgagagtgacagcagctaaagataga

SEQ ID NO: 680740 - DNA, 33 bp, Homo sapien
ggagcagtgagagtgagagcagctaaagataga

SEQ ID NO: 680741 - DNA, 33 bp, Homo sapien
tataggacatcaggaccaaagctaaaaaacaag

SEQ ID NO: 680742 - DNA, 33 bp, Homo sapien
tataggacatcaggactaaagctaaaaaacaag

SEQ ID NO: 680743 - DNA, 33 bp, Homo sapien
ttattttatgctccaacggtcaagacaataaaa

SEQ ID NO: 680744 - DNA, 33 bp, Homo sapien
ttattttatgctccaatggtcaagacaataaaa

SEQ ID NO: 680745 - DNA, 33 bp, Homo sapien
ggtaaggaggaacataactggcatgcaagtaat

SEQ ID NO: 680746 - DNA, 33 bp, Homo sapien
ggtaaggaggaacatatctggcatgcaagtaat

SEQ ID NO: 680747 - DNA, 33 bp, Homo sapien
tccctgagtctacagacaactgctttggcagaa

SEQ ID NO: 680748 - DNA, 33 bp, Homo sapien
tccctgagtctacagataactgctttggcagaa

SEQ ID NO: 680749 - DNA, 33 bp, Homo sapien
tgtagacattccatccaaggattgagaaccatg

SEQ ID NO: 680750 - DNA, 33 bp, Homo sapien
tgtagacattccatccgaggattgagaaccatg

SEQ ID NO: 680751 - DNA, 33 bp, Homo sapien
cagtaagtacacttgaaggtcattttaaacagc

SEQ ID NO: 680752 - DNA, 33 bp, Homo sapien
cagtaagtacacttgagggtcattttaaacagc

SEQ ID NO: 680753 - DNA, 33 bp, Homo sapien
actcagagtccacaaacgattacttacataata

SEQ ID NO: 680754 - DNA, 33 bp, Homo sapien
actcagagtccacaaatgattacttacataata

SEQ ID NO: 680755 - DNA, 33 bp, Homo sapien
agaagaaagagttcacagatagaaagtttgatc

SEQ ID NO: 680756 - DNA, 33 bp, Homo sapien
agaagaaagagttcacggatagaaagtttgatc

SEQ ID NO: 680757 - DNA, 33 bp, Homo sapien
tacatcttactctaataacttgcacagaggtag

SEQ ID NO: 680758 - DNA, 33 bp, Homo sapien
tacatcttactctaatcacttgcacagaggtag

SEQ ID NO: 680759 - DNA, 33 bp, Homo sapien
aataatgaacagaacaatcagataaaaggtaag

SEQ ID NO: 680760 - DNA, 33 bp, Homo sapien
aataatgaacagaacactcagataaaaggtaag

SEQ ID NO: 680761 - DNA, 33 bp, Homo sapien
agagtgttttttgtaacgtctcttggttctagt

SEQ ID NO: 680762 - DNA, 33 bp, Homo sapien
agagtgttttttgtaatgtctcttggttctagt

SEQ ID NO: 680763 - DNA, 33 bp, Homo sapien
atggcagactcatagaagtattgctttggtggt

SEQ ID NO: 680764 - DNA, 33 bp, Homo sapien
atggcagactcatagaggtattgctttggtggt

SEQ ID NO: 680765 - DNA, 33 bp, Homo sapien
gctgttttggagtacaatagcatggtagtttaa

SEQ ID NO: 680766 - DNA, 33 bp, Homo sapien
gctgttttggagtacagtagcatggtagtttaa

SEQ ID NO: 680767 - DNA, 33 bp, Homo sapien
atacaagggtctagagaagttgcatttgttcct

SEQ ID NO: 680768 - DNA, 33 bp, Homo sapien
atacaagggtctagaggagttgcatttgttcct

SEQ ID NO: 680769 - DNA, 33 bp, Homo sapien
acagtcccagtaagaccccatgttcaaaaactt

SEQ ID NO: 680770 - DNA, 33 bp, Homo sapien
acagtcccagtaagactccatgttcaaaaactt

SEQ ID NO: 680771 - DNA, 33 bp, Homo sapien
tttgtagcttgtaaagacactttaactacaagc

SEQ ID NO: 680772 - DNA, 33 bp, Homo sapien
tttgtagcttgtaaaggcactttaactacaagc

SEQ ID NO: 680773 - DNA, 33 bp, Homo sapien
tttgcaagctagagaaacaggaaagtaacctgg

SEQ ID NO: 680774 - DNA, 33 bp, Homo sapien
tttgcaagctagagaaccaggaaagtaacctgg

SEQ ID NO: 680775 - DNA, 33 bp, Homo sapien
ttatattatgtatgtacctaatcctttgctctt

SEQ ID NO: 680776 - DNA, 33 bp, Homo sapien
ttatattatgtatgtatctaatcctttgctctt

SEQ ID NO: 680777 - DNA, 33 bp, Homo sapien
attgccactgggtacacggcctactacagaaga

SEQ ID NO: 680778 - DNA, 33 bp, Homo sapien
attgccactgggtacatggcctactacagaaga

SEQ ID NO: 680779 - DNA, 33 bp, Homo sapien
tttctgcaaatgtctcaagagtttactgatgat

SEQ ID NO: 680780 - DNA, 33 bp, Homo sapien
tttctgcaaatgtctcgagagtttactgatgat

SEQ ID NO: 680781 - DNA, 33 bp, Homo sapien
ttgattgtcattagtaacagcaaagccaatcga

SEQ ID NO: 680782 - DNA, 33 bp, Homo sapien
ttgattgtcattagtatcagcaaagccaatcga

SEQ ID NO: 680783 - DNA, 33 bp, Homo sapien
tggactaaaacagtcaacatcattaaaatggcc

SEQ ID NO: 680784 - DNA, 33 bp, Homo sapien
tggactaaaacagtcagcatcattaaaatggcc

SEQ ID NO: 680785 - DNA, 33 bp, Homo sapien
aacagacacatgaaccaatgaaatagaatagaa

SEQ ID NO: 680786 - DNA, 33 bp, Homo sapien
aacagacacatgaaccgatgaaatagaatagaa

SEQ ID NO: 680787 - DNA, 33 bp, Homo sapien
cagaggattgtaagtagaaggcttcatttctga

SEQ ID NO: 680788 - DNA, 33 bp, Homo sapien
cagaggattgtaagtataaggcttcatttctga

SEQ ID NO: 680789 - DNA, 33 bp, Homo sapien
aaaatgtacaatttgacgagtgttaatgtacat

SEQ ID NO: 680790 - DNA, 33 bp, Homo sapien
aaaatgtacaatttgatgagtgttaatgtacat

SEQ ID NO: 680791 - DNA, 33 bp, Homo sapien
aggttactatataatacctggaaggctttcaac

SEQ ID NO: 680792 - DNA, 33 bp, Homo sapien
aggttactatataatagctggaaggctttcaac

SEQ ID NO: 680793 - DNA, 33 bp, Homo sapien
gtttgctttttccaggccatattcttttgactc

SEQ ID NO: 680794 - DNA, 33 bp, Homo sapien
gtttgctttttccaggtcatattcttttgactc

SEQ ID NO: 680795 - DNA, 33 bp, Homo sapien
tactatatttcaaatgccatgctggtcatttaa

SEQ ID NO: 680796 - DNA, 33 bp, Homo sapien
tactatatttcaaatgtcatgctggtcatttaa

SEQ ID NO: 680797 - DNA, 33 bp, Homo sapien
gcctgatatatgtgtgacaagcattgtggagaa

SEQ ID NO: 680798 - DNA, 33 bp, Homo sapien
gcctgatatatgtgtggcaagcattgtggagaa

SEQ ID NO: 680799 - DNA, 33 bp, Homo sapien
aaagacaccattgatacggccagcgggtaagcc

SEQ ID NO: 680800 - DNA, 33 bp, Homo sapien
aaagacaccattgatatggccagcgggtaagcc

SEQ ID NO: 680801 - DNA, 33 bp, Homo sapien
tcctgtcactgtaaaccaattcatcgtgtggct

SEQ ID NO: 680802 - DNA, 33 bp, Homo sapien
tcctgtcactgtaaactaattcatcgtgtggct

SEQ ID NO: 680803 - DNA, 33 bp, Homo sapien
ccactcttacgacccaccatttctacttggaga

SEQ ID NO: 680804 - DNA, 33 bp, Homo sapien
ccactcttacgacccatcatttctacttggaga

SEQ ID NO: 680805 - DNA, 33 bp, Homo sapien
atgagcatggagtctacacattcaccaaagaca

SEQ ID NO: 680806 - DNA, 33 bp, Homo sapien
atgagcatggagtctatacattcaccaaagaca

SEQ ID NO: 680807 - DNA, 33 bp, Homo sapien
acatttcaatgcatgacgtctactttggtttta

SEQ ID NO: 680808 - DNA, 33 bp, Homo sapien
acatttcaatgcatgatgtctactttggtttta

SEQ ID NO: 680809 - DNA, 33 bp, Homo sapien
agaaaaggtggcatacagcctttaacacaatga

SEQ ID NO: 680810 - DNA, 33 bp, Homo sapien
agaaaaggtggcatacggcctttaacacaatga

SEQ ID NO: 680811 - DNA, 33 bp, Homo sapien
aaagaaatctgttcacagtcgagaggaaatcat

SEQ ID NO: 680812 - DNA, 33 bp, Homo sapien
aaagaaatctgttcacggtcgagaggaaatcat

SEQ ID NO: 680813 - DNA, 33 bp, Homo sapien
tttgaaagcccgacaaacttccattactggccc

SEQ ID NO: 680814 - DNA, 33 bp, Homo sapien
tttgaaagcccgacaagcttccattactggccc

SEQ ID NO: 680815 - DNA, 33 bp, Homo sapien
gccattctcaaattcaataattcactaggagga

SEQ ID NO: 680816 - DNA, 33 bp, Homo sapien
gccattctcaaattcagtaattcactaggagga

SEQ ID NO: 680817 - DNA, 33 bp, Homo sapien
cataggattctgcataataattgtattcatggc

SEQ ID NO: 680818 - DNA, 33 bp, Homo sapien
cataggattctgcatactaattgtattcatggc

SEQ ID NO: 680819 - DNA, 33 bp, Homo sapien
ttccagacactcagaagaaaagcctgctttcaa

SEQ ID NO: 680820 - DNA, 33 bp, Homo sapien
ttccagacactcagaataaaagcctgctttcaa

SEQ ID NO: 680821 - DNA, 33 bp, Homo sapien
caggaacagaaaaatacggaggatactgcaggg

SEQ ID NO: 680822 - DNA, 33 bp, Homo sapien
caggaacagaaaaatatggaggatactgcaggg

SEQ ID NO: 680823 - DNA, 33 bp, Homo sapien
atcaccataactaacaagatctaattaatgtta

SEQ ID NO: 680824 - DNA, 33 bp, Homo sapien
atcaccataactaacaggatctaattaatgtta

SEQ ID NO: 680825 - DNA, 33 bp, Homo sapien
acaaactacagtagaacggtcttttgatgagtc

SEQ ID NO: 680826 - DNA, 33 bp, Homo sapien
acaaactacagtagaatggtcttttgatgagtc

SEQ ID NO: 680827 - DNA, 33 bp, Homo sapien
cgatgtagaatataaaatgctgtattaatctac

SEQ ID NO: 680828 - DNA, 33 bp, Homo sapien
cgatgtagaatataaagtgctgtattaatctac

SEQ ID NO: 680829 - DNA, 33 bp, Homo sapien
catttcaaggctgtaacatagaaaaacattttt

SEQ ID NO: 680830 - DNA, 33 bp, Homo sapien
catttcaaggctgtaatatagaaaaacattttt

SEQ ID NO: 680831 - DNA, 33 bp, Homo sapien
atagcattggtgttccccagccttataccttaa

SEQ ID NO: 680832 - DNA, 33 bp, Homo sapien
atagcattggtgttcctcagccttataccttaa

SEQ ID NO: 680833 - DNA, 33 bp, Homo sapien
cgcttatagagtcagcaaaatagaagaataggt

SEQ ID NO: 680834 - DNA, 33 bp, Homo sapien
cgcttatagagtcagcgaaatagaagaataggt

SEQ ID NO: 680835 - DNA, 33 bp, Homo sapien
tacgaatctaaagccactataccagagatacaa

SEQ ID NO: 680836 - DNA, 33 bp, Homo sapien
tacgaatctaaagccattataccagagatacaa

SEQ ID NO: 680837 - DNA, 33 bp, Homo sapien
actccacagatgggataagcacaaaagccctat

SEQ ID NO: 680838 - DNA, 33 bp, Homo sapien
actccacagatgggatgagcacaaaagccctat

SEQ ID NO: 680839 - DNA, 33 bp, Homo sapien
ccaagctaaggacactcacagagttcatttcat

SEQ ID NO: 680840 - DNA, 33 bp, Homo sapien
ccaagctaaggacacttacagagttcatttcat

SEQ ID NO: 680841 - DNA, 33 bp, Homo sapien
agattcagaagaaaaaaaacaatcactacagtt

SEQ ID NO: 680842 - DNA, 33 bp, Homo sapien
agattcagaagaaaaataacaatcactacagtt

SEQ ID NO: 680843 - DNA, 33 bp, Homo sapien
acagtatacccgtttacagaacattctacccaa

SEQ ID NO: 680844 - DNA, 33 bp, Homo sapien
acagtatacccgtttatagaacattctacccaa

SEQ ID NO: 680845 - DNA, 33 bp, Homo sapien
ttctgtttgaccaggacggagaagaatgcaaga

SEQ ID NO: 680846 - DNA, 33 bp, Homo sapien
ttctgtttgaccaggatggagaagaatgcaaga

SEQ ID NO: 680847 - DNA, 33 bp, Homo sapien
taatgattgaagaaccaaaggtgaaaaatagta

SEQ ID NO: 680848 - DNA, 33 bp, Homo sapien
taatgattgaagaaccgaaggtgaaaaatagta

SEQ ID NO: 680849 - DNA, 33 bp, Homo sapien
gtattttgtaggtcagcaacagacaatagactt

SEQ ID NO: 680850 - DNA, 33 bp, Homo sapien
gtattttgtaggtcaggaacagacaatagactt

SEQ ID NO: 680851 - DNA, 33 bp, Homo sapien
ctcatctgtaaagataaatttttcaagacctca

SEQ ID NO: 680852 - DNA, 33 bp, Homo sapien
ctcatctgtaaagatatatttttcaagacctca

SEQ ID NO: 680853 - DNA, 33 bp, Homo sapien
attgttaatatcttaactgatcattgtcagcat

SEQ ID NO: 680854 - DNA, 33 bp, Homo sapien
attgttaatatcttaattgatcattgtcagcat

SEQ ID NO: 680855 - DNA, 33 bp, Homo sapien
gtgtgtgtgtgtccagaccaacaccaggcataa

SEQ ID NO: 680856 - DNA, 33 bp, Homo sapien
gtgtgtgtgtgtccagtccaacaccaggcataa

SEQ ID NO: 680857 - DNA, 33 bp, Homo sapien
tgcaagtggtcagaccaaatagttaagatttaa

SEQ ID NO: 680858 - DNA, 33 bp, Homo sapien
tgcaagtggtcagacccaatagttaagatttaa

SEQ ID NO: 680859 - DNA, 33 bp, Homo sapien
tagcagtacagttgtccaatgtttcagtgatag

SEQ ID NO: 680860 - DNA, 33 bp, Homo sapien
tagcagtacagttgtctaatgtttcagtgatag

SEQ ID NO: 680861 - DNA, 33 bp, Homo sapien
ggaattgaactgtgataaagttgtaacagagaa

SEQ ID NO: 680862 - DNA, 33 bp, Homo sapien
ggaattgaactgtgatgaagttgtaacagagaa

SEQ ID NO: 680863 - DNA, 33 bp, Homo sapien
gtaatataagatatcaacatcggtggaaactag

SEQ ID NO: 680864 - DNA, 33 bp, Homo sapien
gtaatataagatatcaccatcggtggaaactag

SEQ ID NO: 680865 - DNA, 33 bp, Homo sapien
ttaaaattcatgtgaccgggcataagtttaact

SEQ ID NO: 680866 - DNA, 33 bp, Homo sapien
ttaaaattcatgtgactgggcataagtttaact

SEQ ID NO: 680867 - DNA, 33 bp, Homo sapien
gggatgaggatgcctacgatgttctgatgcagt

SEQ ID NO: 680868 - DNA, 33 bp, Homo sapien
gggatgaggatgcctatgatgttctgatgcagt

SEQ ID NO: 680869 - DNA, 33 bp, Homo sapien
acatcttagtgttgacaaagcgtctttctccta

SEQ ID NO: 680870 - DNA, 33 bp, Homo sapien
acatcttagtgttgacgaagcgtctttctccta

SEQ ID NO: 680871 - DNA, 33 bp, Homo sapien
gggacctcgaagccacaaagaaaaggactgaag

SEQ ID NO: 680872 - DNA, 33 bp, Homo sapien
gggacctcgaagccacgaagaaaaggactgaag

SEQ ID NO: 680873 - DNA, 33 bp, Homo sapien
aatgttgaggcgaaaaaagtggctaggtagtga

SEQ ID NO: 680874 - DNA, 33 bp, Homo sapien
aatgttgaggcgaaaagagtggctaggtagtga

SEQ ID NO: 680875 - DNA, 33 bp, Homo sapien
gccttttcttttctctaacttgaacgcttttga

SEQ ID NO: 680876 - DNA, 33 bp, Homo sapien
gccttttcttttctctcacttgaacgcttttga

SEQ ID NO: 680877 - DNA, 33 bp, Homo sapien
tatggagaacggtaagaatcagatttttcactt

SEQ ID NO: 680878 - DNA, 33 bp, Homo sapien
tatggagaacggtaagcatcagatttttcactt

SEQ ID NO: 680879 - DNA, 33 bp, Homo sapien
ctgcacatatatactcaaaatggacaattaagc

SEQ ID NO: 680880 - DNA, 33 bp, Homo sapien
ctgcacatatatactcgaaatggacaattaagc

SEQ ID NO: 680881 - DNA, 33 bp, Homo sapien
atattagtctatactccatctccagtaacctgt

SEQ ID NO: 680882 - DNA, 33 bp, Homo sapien
atattagtctatactcgatctccagtaacctgt

SEQ ID NO: 680883 - DNA, 33 bp, Homo sapien
aggaaaacgacgtacaaatagatacagatactt

SEQ ID NO: 680884 - DNA, 33 bp, Homo sapien
aggaaaacgacgtacagatagatacagatactt

SEQ ID NO: 680885 - DNA, 33 bp, Homo sapien
acaaggaatttataaactatgacattagcaaat

SEQ ID NO: 680886 - DNA, 33 bp, Homo sapien
acaaggaatttataaagtatgacattagcaaat

SEQ ID NO: 680887 - DNA, 33 bp, Homo sapien
ttctgattgaaatgtacaagaagagtaatgttt

SEQ ID NO: 680888 - DNA, 33 bp, Homo sapien
ttctgattgaaatgtataagaagagtaatgttt

SEQ ID NO: 680889 - DNA, 33 bp, Homo sapien
caattgttgtggatacaagagcagaagcaattc

SEQ ID NO: 680890 - DNA, 33 bp, Homo sapien
caattgttgtggatacgagagcagaagcaattc

SEQ ID NO: 680891 - DNA, 33 bp, Homo sapien
ttgcaatggttgtgaacgtggttttagaattgc

SEQ ID NO: 680892 - DNA, 33 bp, Homo sapien
ttgcaatggttgtgaatgtggttttagaattgc

SEQ ID NO: 680893 - DNA, 33 bp, Homo sapien
tggagggaggatacacaagacgtttttctactg

SEQ ID NO: 680894 - DNA, 33 bp, Homo sapien
tggagggaggatacacgagacgtttttctactg

SEQ ID NO: 680895 - DNA, 33 bp, Homo sapien
acactggaagacaccaatgaagtactcatccag

SEQ ID NO: 680896 - DNA, 33 bp, Homo sapien
acactggaagacaccagtgaagtactcatccag

SEQ ID NO: 680897 - DNA, 33 bp, Homo sapien
atagatgtgatttgaccatttgcatttgatgta

SEQ ID NO: 680898 - DNA, 33 bp, Homo sapien
atagatgtgatttgacgatttgcatttgatgta

SEQ ID NO: 680899 - DNA, 33 bp, Homo sapien
accttcagcaggaggacgtactagacaatggaa

SEQ ID NO: 680900 - DNA, 33 bp, Homo sapien
accttcagcaggaggatgtactagacaatggaa

SEQ ID NO: 680901 - DNA, 33 bp, Homo sapien
actgccataaaccataagaacaaacaaaaacat

SEQ ID NO: 680902 - DNA, 33 bp, Homo sapien
actgccataaaccataggaacaaacaaaaacat

SEQ ID NO: 680903 - DNA, 33 bp, Homo sapien
ctctacacaccttgaaaatttagtgtattactg

SEQ ID NO: 680904 - DNA, 33 bp, Homo sapien
ctctacacaccttgaacatttagtgtattactg

SEQ ID NO: 680905 - DNA, 33 bp, Homo sapien
tgtggtaaggtacaaacgcaaatgcaatttgcg

SEQ ID NO: 680906 - DNA, 33 bp, Homo sapien
tgtggtaaggtacaaaggcaaatgcaatttgcg

SEQ ID NO: 680907 - DNA, 33 bp, Homo sapien
tctccgtttcaatctacgatagctctagaaaag

SEQ ID NO: 680908 - DNA, 33 bp, Homo sapien
tctccgtttcaatctatgatagctctagaaaag

SEQ ID NO: 680909 - DNA, 33 bp, Homo sapien
gccagtgcgataagtagcatatggcagttacca

SEQ ID NO: 680910 - DNA, 33 bp, Homo sapien
gccagtgcgataagtatcatatggcagttacca

SEQ ID NO: 680911 - DNA, 33 bp, Homo sapien
tttgtaactttttctcaatttttctgtgagcct

SEQ ID NO: 680912 - DNA, 33 bp, Homo sapien
tttgtaactttttctccatttttctgtgagcct

SEQ ID NO: 680913 - DNA, 33 bp, Homo sapien
cattcatttgcacatacccttattgaaaagtat

SEQ ID NO: 680914 - DNA, 33 bp, Homo sapien
cattcatttgcacatatccttattgaaaagtat

SEQ ID NO: 680915 - DNA, 33 bp, Homo sapien
tggctagcgagtgatcccagcaccatttactga

SEQ ID NO: 680916 - DNA, 33 bp, Homo sapien
tggctagcgagtgatctcagcaccatttactga

SEQ ID NO: 680917 - DNA, 33 bp, Homo sapien
ggctgcaggcgagtacacatcagtagggggagg

SEQ ID NO: 680918 - DNA, 33 bp, Homo sapien
ggctgcaggcgagtacgcatcagtagggggagg

SEQ ID NO: 680919 - DNA, 33 bp, Homo sapien
tgtaatggtagacagaaagtgatgatagtaaat

SEQ ID NO: 680920 - DNA, 33 bp, Homo sapien
tgtaatggtagacagagagtgatgatagtaaat

SEQ ID NO: 680921 - DNA, 33 bp, Homo sapien
aagtctcaatttgagccccaaaacagttgttaa

SEQ ID NO: 680922 - DNA, 33 bp, Homo sapien
aagtctcaatttgagcgccaaaacagttgttaa

SEQ ID NO: 680923 - DNA, 33 bp, Homo sapien
ctctcttcctaaggccaccatattgcatattga

SEQ ID NO: 680924 - DNA, 33 bp, Homo sapien
ctctcttcctaaggcctccatattgcatattga

SEQ ID NO: 680925 - DNA, 33 bp, Homo sapien
ctgcatcataagataacagttgtattggaattt

SEQ ID NO: 680926 - DNA, 33 bp, Homo sapien
ctgcatcataagataagagttgtattggaattt

SEQ ID NO: 680927 - DNA, 33 bp, Homo sapien
tatagggttttatctgcatcagatgtaggccaa

SEQ ID NO: 680928 - DNA, 33 bp, Homo sapien
tatagggttttatctggatcagatgtaggccaa

SEQ ID NO: 680929 - DNA, 33 bp, Homo sapien
ggcctggtctacctgaaaacctcaacttcaaac

SEQ ID NO: 680930 - DNA, 33 bp, Homo sapien
ggcctggtctacctgacaacctcaacttcaaac

SEQ ID NO: 680931 - DNA, 33 bp, Homo sapien
tatagttatggtgatacatgaaaacaaatcgga

SEQ ID NO: 680932 - DNA, 33 bp, Homo sapien
tatagttatggtgatatatgaaaacaaatcgga

SEQ ID NO: 680933 - DNA, 33 bp, Homo sapien
tttctactgaaaaaccactaggtcctgactcca

SEQ ID NO: 680934 - DNA, 33 bp, Homo sapien
tttctactgaaaaaccgctaggtcctgactcca

SEQ ID NO: 680935 - DNA, 33 bp, Homo sapien
ccacactctcatccacaatcaggccctaactgt

SEQ ID NO: 680936 - DNA, 33 bp, Homo sapien
ccacactctcatccacgatcaggccctaactgt

SEQ ID NO: 680937 - DNA, 33 bp, Homo sapien
gaataagtgttttacaacttgaagaaaaatgat

SEQ ID NO: 680938 - DNA, 33 bp, Homo sapien
gaataagtgttttacagcttgaagaaaaatgat

SEQ ID NO: 680939 - DNA, 33 bp, Homo sapien
atttaatggcttttcaatatcaaagtagacaaa

SEQ ID NO: 680940 - DNA, 33 bp, Homo sapien
atttaatggcttttcagtatcaaagtagacaaa

SEQ ID NO: 680941 - DNA, 33 bp, Homo sapien
ttactaattcactaaacgtctagatgttgatgt

SEQ ID NO: 680942 - DNA, 33 bp, Homo sapien
ttactaattcactaaatgtctagatgttgatgt

SEQ ID NO: 680943 - DNA, 33 bp, Homo sapien
agacacagcttcacaacgaaaacatggattcca

SEQ ID NO: 680944 - DNA, 33 bp, Homo sapien
agacacagcttcacaatgaaaacatggattcca

SEQ ID NO: 680945 - DNA, 33 bp, Homo sapien
ataaggagatagttccaagaaggaaaatgccca

SEQ ID NO: 680946 - DNA, 33 bp, Homo sapien
ataaggagatagttccgagaaggaaaatgccca

SEQ ID NO: 680947 - DNA, 33 bp, Homo sapien
gaatatgctgggacacccttgaagccagcacag

SEQ ID NO: 680948 - DNA, 33 bp, Homo sapien
gaatatgctgggacacgcttgaagccagcacag

SEQ ID NO: 680949 - DNA, 33 bp, Homo sapien
gcttggtgtaccctcaaacagctcctgagcatc

SEQ ID NO: 680950 - DNA, 33 bp, Homo sapien
gcttggtgtaccctcagacagctcctgagcatc

SEQ ID NO: 680951 - DNA, 33 bp, Homo sapien
ctgcgtatctttttagaatggaacagaattctt

SEQ ID NO: 680952 - DNA, 33 bp, Homo sapien
ctgcgtatctttttaggatggaacagaattctt

SEQ ID NO: 680953 - DNA, 33 bp, Homo sapien
tgatgcctctatcaaccgattcaactagacttc

SEQ ID NO: 680954 - DNA, 33 bp, Homo sapien
tgatgcctctatcaactgattcaactagacttc

SEQ ID NO: 680955 - DNA, 33 bp, Homo sapien
ctgcacctctttttggacaagttctttatgtgt

SEQ ID NO: 680956 - DNA, 33 bp, Homo sapien
ctgcacctctttttgggcaagttctttatgtgt

SEQ ID NO: 680957 - DNA, 33 bp, Homo sapien
ctatttcaagtatagacggaacaaatttcatac

SEQ ID NO: 680958 - DNA, 33 bp, Homo sapien
ctatttcaagtatagatggaacaaatttcatac

SEQ ID NO: 680959 - DNA, 33 bp, Homo sapien
ttacttttgagatcacaaaatgagcataaacag

SEQ ID NO: 680960 - DNA, 33 bp, Homo sapien
ttacttttgagatcacgaaatgagcataaacag

SEQ ID NO: 680961 - DNA, 33 bp, Homo sapien
tacattttttggtgcaatatcattggacaggat

SEQ ID NO: 680962 - DNA, 33 bp, Homo sapien
tacattttttggtgcagtatcattggacaggat

SEQ ID NO: 680963 - DNA, 33 bp, Homo sapien
ccttcctacttaggtacgagcagaaaacatcac

SEQ ID NO: 680964 - DNA, 33 bp, Homo sapien
ccttcctacttaggtatgagcagaaaacatcac

SEQ ID NO: 680965 - DNA, 33 bp, Homo sapien
ccactccacagtattacagttgaatttttacaa

SEQ ID NO: 680966 - DNA, 33 bp, Homo sapien
ccactccacagtattatagttgaatttttacaa

SEQ ID NO: 680967 - DNA, 33 bp, Homo sapien
cccttgacattgagaccgaatctggaacacata

SEQ ID NO: 680968 - DNA, 33 bp, Homo sapien
cccttgacattgagactgaatctggaacacata

SEQ ID NO: 680969 - DNA, 33 bp, Homo sapien
tctccagtctttccaccgtactaacttgtcagg

SEQ ID NO: 680970 - DNA, 33 bp, Homo sapien
tctccagtctttccactgtactaacttgtcagg

SEQ ID NO: 680971 - DNA, 33 bp, Homo sapien
ttgaagaggtcaaaaacgctagggagaaaacaa

SEQ ID NO: 680972 - DNA, 33 bp, Homo sapien
ttgaagaggtcaaaaatgctagggagaaaacaa

SEQ ID NO: 680973 - DNA, 33 bp, Homo sapien
aaaatctggaagttaaactgaatggttgtttgt

SEQ ID NO: 680974 - DNA, 33 bp, Homo sapien
aaaatctggaagttaagctgaatggttgtttgt

SEQ ID NO: 680975 - DNA, 33 bp, Homo sapien
agtcgttaaagcctgtaaatgattgtttgtttt

SEQ ID NO: 680976 - DNA, 33 bp, Homo sapien
agtcgttaaagcctgtgaatgattgtttgtttt

SEQ ID NO: 680977 - DNA, 33 bp, Homo sapien
ttttctatgaagctaacattttccagtttatat

SEQ ID NO: 680978 - DNA, 33 bp, Homo sapien
ttttctatgaagctaatattttccagtttatat

SEQ ID NO: 680979 - DNA, 33 bp, Homo sapien
agtgatatttcgaaacaggcctatgatgcatag

SEQ ID NO: 680980 - DNA, 33 bp, Homo sapien
agtgatatttcgaaacgggcctatgatgcatag

SEQ ID NO: 680981 - DNA, 33 bp, Homo sapien
tgagaactctgtactaccttcacatctctataa

SEQ ID NO: 680982 - DNA, 33 bp, Homo sapien
tgagaactctgtactatcttcacatctctataa

SEQ ID NO: 680983 - DNA, 33 bp, Homo sapien
tcctactagaatgcacactttatgttttatcct

SEQ ID NO: 680984 - DNA, 33 bp, Homo sapien
tcctactagaatgcacgctttatgttttatcct

SEQ ID NO: 680985 - DNA, 33 bp, Homo sapien
ctaggctaactataaaatggtacttcatcttta

SEQ ID NO: 680986 - DNA, 33 bp, Homo sapien
ctaggctaactataaagtggtacttcatcttta

SEQ ID NO: 680987 - DNA, 33 bp, Homo sapien
tatcaaataatgcaaacggctaaaaactcaaat

SEQ ID NO: 680988 - DNA, 33 bp, Homo sapien
tatcaaataatgcaaatggctaaaaactcaaat

SEQ ID NO: 680989 - DNA, 33 bp, Homo sapien
gcattctggaaaaaaaattcatcatcttctagc

SEQ ID NO: 680990 - DNA, 33 bp, Homo sapien
gcattctggaaaaaaatttcatcatcttctagc

SEQ ID NO: 680991 - DNA, 33 bp, Homo sapien
taatagatggaaaacactgagtgagattttaag

SEQ ID NO: 680992 - DNA, 33 bp, Homo sapien
taatagatggaaaacattgagtgagattttaag

SEQ ID NO: 680993 - DNA, 33 bp, Homo sapien
gctttcatctccaattcaatcattttctcttct

SEQ ID NO: 680994 - DNA, 33 bp, Homo sapien
gctttcatctccaatttaatcattttctcttct

SEQ ID NO: 680995 - DNA, 33 bp, Homo sapien
atactacaagaggccaatacaaaagctttccat

SEQ ID NO: 680996 - DNA, 33 bp, Homo sapien
atactacaagaggccagtacaaaagctttccat

SEQ ID NO: 680997 - DNA, 33 bp, Homo sapien
gagcaagtaatcaaacaaaagagattggttcta

SEQ ID NO: 680998 - DNA, 33 bp, Homo sapien
gagcaagtaatcaaacgaaagagattggttcta

SEQ ID NO: 680999 - DNA, 33 bp, Homo sapien
tttgcatctttgttagcacttaggacagctcct

SEQ ID NO: 681000 - DNA, 33 bp, Homo sapien
tttgcatctttgttagtacttaggacagctcct

SEQ ID NO: 681001 - DNA, 33 bp, Homo sapien
catattcatggtctcccacttatgtcgaagggg

SEQ ID NO: 681002 - DNA, 33 bp, Homo sapien
catattcatggtctcctacttatgtcgaagggg

SEQ ID NO: 681003 - DNA, 33 bp, Homo sapien
ccagtatatgcaactacgtccatagagttagcg

SEQ ID NO: 681004 - DNA, 33 bp, Homo sapien
ccagtatatgcaactaggtccatagagttagcg

SEQ ID NO: 681005 - DNA, 33 bp, Homo sapien
cattacatggagaaaaatttgatgttcttttca

SEQ ID NO: 681006 - DNA, 33 bp, Homo sapien
cattacatggagaaaagtttgatgttcttttca

SEQ ID NO: 681007 - DNA, 33 bp, Homo sapien
gagaggaaagtcagggaagctttatggaagaag

SEQ ID NO: 681008 - DNA, 33 bp, Homo sapien
gagaggaaagtcaggggagctttatggaagaag

SEQ ID NO: 681009 - DNA, 33 bp, Homo sapien
acggatgtgttgagctaaatgaactgtgtgttt

SEQ ID NO: 681010 - DNA, 33 bp, Homo sapien
acggatgtgttgagctgaatgaactgtgtgttt

SEQ ID NO: 681011 - DNA, 33 bp, Homo sapien
tgttctatagtgctcaccatttttgatatcaca

SEQ ID NO: 681012 - DNA, 33 bp, Homo sapien
tgttctatagtgctcatcatttttgatatcaca

SEQ ID NO: 681013 - DNA, 33 bp, Homo sapien
tggtaatggactccaacatccagactgacttct

SEQ ID NO: 681014 - DNA, 33 bp, Homo sapien
tggtaatggactccaatatccagactgacttct

SEQ ID NO: 681015 - DNA, 33 bp, Homo sapien
cattcaactcttcaagcagtagggtgaccaatg

SEQ ID NO: 681016 - DNA, 33 bp, Homo sapien
cattcaactcttcaaggagtagggtgaccaatg

SEQ ID NO: 681017 - DNA, 33 bp, Homo sapien
gtgctaagaaatatgcacaggtaagctccaaag

SEQ ID NO: 681018 - DNA, 33 bp, Homo sapien
gtgctaagaaatatgcgcaggtaagctccaaag

SEQ ID NO: 681019 - DNA, 33 bp, Homo sapien
gttttgtcgacatttacgttttcaagcaggctt

SEQ ID NO: 681020 - DNA, 33 bp, Homo sapien
gttttgtcgacatttatgttttcaagcaggctt

SEQ ID NO: 681021 - DNA, 33 bp, Homo sapien
cctccagcaccagtcacgtctagcgatgttttt

SEQ ID NO: 681022 - DNA, 33 bp, Homo sapien
cctccagcaccagtcaggtctagcgatgttttt

SEQ ID NO: 681023 - DNA, 33 bp, Homo sapien
aatctgctgttcagcccatctagtgaatttatt

SEQ ID NO: 681024 - DNA, 33 bp, Homo sapien
aatctgctgttcagcctatctagtgaatttatt

SEQ ID NO: 681025 - DNA, 33 bp, Homo sapien
gagtatattataatcaaagtgctgaaagataat

SEQ ID NO: 681026 - DNA, 33 bp, Homo sapien
gagtatattataatcacagtgctgaaagataat

SEQ ID NO: 681027 - DNA, 33 bp, Homo sapien
aacacattcatcaagacatacaacatttcactt

SEQ ID NO: 681028 - DNA, 33 bp, Homo sapien
aacacattcatcaagatatacaacatttcactt

SEQ ID NO: 681029 - DNA, 33 bp, Homo sapien
tcagctatcttatctccctcattagttttgaga

SEQ ID NO: 681030 - DNA, 33 bp, Homo sapien
tcagctatcttatctctctcattagttttgaga

SEQ ID NO: 681031 - DNA, 33 bp, Homo sapien
cattatcgttgagctacaaagctagatgctgct

SEQ ID NO: 681032 - DNA, 33 bp, Homo sapien
cattatcgttgagctataaagctagatgctgct

SEQ ID NO: 681033 - DNA, 33 bp, Homo sapien
cataatatgtagataccgggatcctaaggtata

SEQ ID NO: 681034 - DNA, 33 bp, Homo sapien
cataatatgtagatactgggatcctaaggtata

SEQ ID NO: 681035 - DNA, 33 bp, Homo sapien
attggacataatatacacagtgagaagggaatg

SEQ ID NO: 681036 - DNA, 33 bp, Homo sapien
attggacataatatactcagtgagaagggaatg

SEQ ID NO: 681037 - DNA, 33 bp, Homo sapien
ctgacttcatcctacccacaattgaagagcaac

SEQ ID NO: 681038 - DNA, 33 bp, Homo sapien
ctgacttcatcctacctacaattgaagagcaac

SEQ ID NO: 681039 - DNA, 33 bp, Homo sapien
gaaagcatgactgtctcacaaatatacagtgaa

SEQ ID NO: 681040 - DNA, 33 bp, Homo sapien
gaaagcatgactgtcttacaaatatacagtgaa

SEQ ID NO: 681041 - DNA, 33 bp, Homo sapien
gtcatgctttctttcagcttttggaaaattata

SEQ ID NO: 681042 - DNA, 33 bp, Homo sapien
gtcatgctttctttcatcttttggaaaattata

SEQ ID NO: 681043 - DNA, 33 bp, Homo sapien
gaactcaaaggctcaccgaggccaagaaggaca

SEQ ID NO: 681044 - DNA, 33 bp, Homo sapien
gaactcaaaggctcactgaggccaagaaggaca

SEQ ID NO: 681045 - DNA, 33 bp, Homo sapien
ttctcaagtagagtagacatcatgagaaatgct

SEQ ID NO: 681046 - DNA, 33 bp, Homo sapien
ttctcaagtagagtaggcatcatgagaaatgct

SEQ ID NO: 681047 - DNA, 33 bp, Homo sapien
gaaaactagattaaaaatgccatgaggatttag

SEQ ID NO: 681048 - DNA, 33 bp, Homo sapien
gaaaactagattaaaagtgccatgaggatttag

SEQ ID NO: 681049 - DNA, 33 bp, Homo sapien
aatacattactcacaaattacagaaagcatcta

SEQ ID NO: 681050 - DNA, 33 bp, Homo sapien
aatacattactcacaagttacagaaagcatcta

SEQ ID NO: 681051 - DNA, 33 bp, Homo sapien
cgtgaacgattcaataaaattttgaggatgtag

SEQ ID NO: 681052 - DNA, 33 bp, Homo sapien
cgtgaacgattcaatagaattttgaggatgtag

SEQ ID NO: 681053 - DNA, 33 bp, Homo sapien
ttcccagttctatgcacactataattatgtata

SEQ ID NO: 681054 - DNA, 33 bp, Homo sapien
ttcccagttctatgcagactataattatgtata

SEQ ID NO: 681055 - DNA, 33 bp, Homo sapien
gagaaagagaagaaaaatcggagaaactggcca

SEQ ID NO: 681056 - DNA, 33 bp, Homo sapien
gagaaagagaagaaaagtcggagaaactggcca

SEQ ID NO: 681057 - DNA, 33 bp, Homo sapien
acaaatgcctgacatacagcacgctttcaaaaa

SEQ ID NO: 681058 - DNA, 33 bp, Homo sapien
acaaatgcctgacatatagcacgctttcaaaaa

SEQ ID NO: 681059 - DNA, 33 bp, Homo sapien
atatttaatgcagaagaagtgcatggtcagttc

SEQ ID NO: 681060 - DNA, 33 bp, Homo sapien
atatttaatgcagaagtagtgcatggtcagttc

SEQ ID NO: 681061 - DNA, 33 bp, Homo sapien
acaatagaaatgaatacgggctggtccagttaa

SEQ ID NO: 681062 - DNA, 33 bp, Homo sapien
acaatagaaatgaatatgggctggtccagttaa

SEQ ID NO: 681063 - DNA, 33 bp, Homo sapien
ataatctctactaaaactcttctacctggtggt

SEQ ID NO: 681064 - DNA, 33 bp, Homo sapien
ataatctctactaaaattcttctacctggtggt

SEQ ID NO: 681065 - DNA, 33 bp, Homo sapien
agttgctaataaggatcacctagggagcgtgtt

SEQ ID NO: 681066 - DNA, 33 bp, Homo sapien
agttgctaataaggattacctagggagcgtgtt

SEQ ID NO: 681067 - DNA, 33 bp, Homo sapien
gaaggatataaatcaacttctgggtatgtctaa

SEQ ID NO: 681068 - DNA, 33 bp, Homo sapien
gaaggatataaatcaagttctgggtatgtctaa

SEQ ID NO: 681069 - DNA, 33 bp, Homo sapien
atacaagcaaatccacaataacaaatttacgtt

SEQ ID NO: 681070 - DNA, 33 bp, Homo sapien
atacaagcaaatccacgataacaaatttacgtt

SEQ ID NO: 681071 - DNA, 33 bp, Homo sapien
tttaatagcactctacacctttcctttctggaa

SEQ ID NO: 681072 - DNA, 33 bp, Homo sapien
tttaatagcactctacgcctttcctttctggaa

SEQ ID NO: 681073 - DNA, 33 bp, Homo sapien
ttcatcatgttcatgaaaatcagagacagcctc

SEQ ID NO: 681074 - DNA, 33 bp, Homo sapien
ttcatcatgttcatgagaatcagagacagcctc

SEQ ID NO: 681075 - DNA, 33 bp, Homo sapien
ctcctccctcttcaaggcctagctaaatgccag

SEQ ID NO: 681076 - DNA, 33 bp, Homo sapien
ctcctccctcttcaagtcctagctaaatgccag

SEQ ID NO: 681077 - DNA, 33 bp, Homo sapien
gttcttaaggatattccgaagccaagagcaagt

SEQ ID NO: 681078 - DNA, 33 bp, Homo sapien
gttcttaaggatattctgaagccaagagcaagt

SEQ ID NO: 681079 - DNA, 33 bp, Homo sapien
ggctaactttgtatgcgcatgtaagagaagctt

SEQ ID NO: 681080 - DNA, 33 bp, Homo sapien
ggctaactttgtatgctcatgtaagagaagctt

SEQ ID NO: 681081 - DNA, 33 bp, Homo sapien
agctatgacttatttcccgtcaccactcctagc

SEQ ID NO: 681082 - DNA, 33 bp, Homo sapien
agctatgacttatttctcgtcaccactcctagc

SEQ ID NO: 681083 - DNA, 33 bp, Homo sapien
cctgtatgtcctgtataaaaaccttgaagcaaa

SEQ ID NO: 681084 - DNA, 33 bp, Homo sapien
cctgtatgtcctgtatgaaaaccttgaagcaaa

SEQ ID NO: 681085 - DNA, 33 bp, Homo sapien
tcaacattggagagagaatgccataatcttgaa

SEQ ID NO: 681086 - DNA, 33 bp, Homo sapien
tcaacattggagagagtatgccataatcttgaa

SEQ ID NO: 681087 - DNA, 33 bp, Homo sapien
accttaacaagcgtaccatttcatgtatttact

SEQ ID NO: 681088 - DNA, 33 bp, Homo sapien
accttaacaagcgtactatttcatgtatttact

SEQ ID NO: 681089 - DNA, 33 bp, Homo sapien
ggagagtgggtagagaataaaaaaataaattag

SEQ ID NO: 681090 - DNA, 33 bp, Homo sapien
ggagagtgggtagagagtaaaaaaataaattag

SEQ ID NO: 681091 - DNA, 33 bp, Homo sapien
atccaaaaggcaataaaagaaatgcataagaaa

SEQ ID NO: 681092 - DNA, 33 bp, Homo sapien
atccaaaaggcaataagagaaatgcataagaaa

SEQ ID NO: 681093 - DNA, 33 bp, Homo sapien
agatgagtaaattggaaaggacagaaaggaagg

SEQ ID NO: 681094 - DNA, 33 bp, Homo sapien
agatgagtaaattggagaggacagaaaggaagg

SEQ ID NO: 681095 - DNA, 33 bp, Homo sapien
tcctattggctggacaaggcagttcacacctgt

SEQ ID NO: 681096 - DNA, 33 bp, Homo sapien
tcctattggctggacacggcagttcacacctgt

SEQ ID NO: 681097 - DNA, 33 bp, Homo sapien
agagccctctaaataacggatcctattggctgg

SEQ ID NO: 681098 - DNA, 33 bp, Homo sapien
agagccctctaaataatggatcctattggctgg

SEQ ID NO: 681099 - DNA, 33 bp, Homo sapien
ctaagcaatccattaaacttctcctggctacta

SEQ ID NO: 681100 - DNA, 33 bp, Homo sapien
ctaagcaatccattaatcttctcctggctacta

SEQ ID NO: 681101 - DNA, 33 bp, Homo sapien
accaaagagtcctttaacaagcaggcaggaaga

SEQ ID NO: 681102 - DNA, 33 bp, Homo sapien
accaaagagtcctttaccaagcaggcaggaaga

SEQ ID NO: 681103 - DNA, 33 bp, Homo sapien
tattgacatagatcctaaaaaaatcctaccgtg

SEQ ID NO: 681104 - DNA, 33 bp, Homo sapien
tattgacatagatccttaaaaaatcctaccgtg

SEQ ID NO: 681105 - DNA, 33 bp, Homo sapien
ctcaattatgaatccaccgataagctccaagat

SEQ ID NO: 681106 - DNA, 33 bp, Homo sapien
ctcaattatgaatccatcgataagctccaagat

SEQ ID NO: 681107 - DNA, 33 bp, Homo sapien
tcagttgcgtagtgaactgtgatgagttttttg

SEQ ID NO: 681108 - DNA, 33 bp, Homo sapien
tcagttgcgtagtgaagtgtgatgagttttttg

SEQ ID NO: 681109 - DNA, 33 bp, Homo sapien
aataagtacttccaaaagcaatacctaatcatt

SEQ ID NO: 681110 - DNA, 33 bp, Homo sapien
aataagtacttccaaacgcaatacctaatcatt

SEQ ID NO: 681111 - DNA, 33 bp, Homo sapien
gatggaagagaagtaaatcatcagttttggaat

SEQ ID NO: 681112 - DNA, 33 bp, Homo sapien
gatggaagagaagtaactcatcagttttggaat

SEQ ID NO: 681113 - DNA, 33 bp, Homo sapien
ttggctttatggccacaaaaaaaaagctttttc

SEQ ID NO: 681114 - DNA, 33 bp, Homo sapien
ttggctttatggccaccaaaaaaaagctttttc

SEQ ID NO: 681115 - DNA, 33 bp, Homo sapien
ttcttgtgctttgaaagtttaatcttcctattc

SEQ ID NO: 681116 - DNA, 33 bp, Homo sapien
ttcttgtgctttgaaattttaatcttcctattc

SEQ ID NO: 681117 - DNA, 33 bp, Homo sapien
gaagaagatgggttgacgtggcaaaactacgtg

SEQ ID NO: 681118 - DNA, 33 bp, Homo sapien
gaagaagatgggttgatgtggcaaaactacgtg

SEQ ID NO: 681119 - DNA, 33 bp, Homo sapien
agaagcgattggatagactaaataagaagtttg

SEQ ID NO: 681120 - DNA, 33 bp, Homo sapien
agaagcgattggataggctaaataagaagtttg

SEQ ID NO: 681121 - DNA, 33 bp, Homo sapien
ttcatcaacatgtggaagtaaagtgtagtaaag

SEQ ID NO: 681122 - DNA, 33 bp, Homo sapien
ttcatcaacatgtggatgtaaagtgtagtaaag

SEQ ID NO: 681123 - DNA, 33 bp, Homo sapien
tccacatgttgatgaaatgcaaagtatttaagt

SEQ ID NO: 681124 - DNA, 33 bp, Homo sapien
tccacatgttgatgaagtgcaaagtatttaagt

SEQ ID NO: 681125 - DNA, 33 bp, Homo sapien
ataggttgaagtaaaaaaatagtattctactag

SEQ ID NO: 681126 - DNA, 33 bp, Homo sapien
ataggttgaagtaaaacaatagtattctactag

SEQ ID NO: 681127 - DNA, 33 bp, Homo sapien
tattctactaggccccactaataccactcaact

SEQ ID NO: 681128 - DNA, 33 bp, Homo sapien
tattctactaggcccctctaataccactcaact

SEQ ID NO: 681129 - DNA, 33 bp, Homo sapien
cagagcagcaaactcaaggataataatcctcat

SEQ ID NO: 681130 - DNA, 33 bp, Homo sapien
cagagcagcaaactcagggataataatcctcat

SEQ ID NO: 681131 - DNA, 33 bp, Homo sapien
caatgaagataagcaaaaggtgctgtgggaatt

SEQ ID NO: 681132 - DNA, 33 bp, Homo sapien
caatgaagataagcaacaggtgctgtgggaatt

SEQ ID NO: 681133 - DNA, 33 bp, Homo sapien
gagacctcattacaacactcaaggatctgtccc

SEQ ID NO: 681134 - DNA, 33 bp, Homo sapien
gagacctcattacaaccctcaaggatctgtccc

SEQ ID NO: 681135 - DNA, 33 bp, Homo sapien
ttgacagttttccaagaagaattaaggtttcca

SEQ ID NO: 681136 - DNA, 33 bp, Homo sapien
ttgacagttttccaagcagaattaaggtttcca

SEQ ID NO: 681137 - DNA, 33 bp, Homo sapien
gtaattgtcctcaaatcagagaacactgggtgg

SEQ ID NO: 681138 - DNA, 33 bp, Homo sapien
gtaattgtcctcaaattagagaacactgggtgg

SEQ ID NO: 681139 - DNA, 33 bp, Homo sapien
gatcatttaaaagaggacaaagctgcagtgttt

SEQ ID NO: 681140 - DNA, 33 bp, Homo sapien
gatcatttaaaagagggcaaagctgcagtgttt

SEQ ID NO: 681141 - DNA, 33 bp, Homo sapien
gttctggaggctggaaatctaagttcaaggtgt

SEQ ID NO: 681142 - DNA, 33 bp, Homo sapien
gttctggaggctggaagtctaagttcaaggtgt

SEQ ID NO: 681143 - DNA, 33 bp, Homo sapien
tacttactctggtcaacagatgctgacatagtt

SEQ ID NO: 681144 - DNA, 33 bp, Homo sapien
tacttactctggtcaagagatgctgacatagtt

SEQ ID NO: 681145 - DNA, 33 bp, Homo sapien
aacaccacaggtaggacaggtttagcagaaaga

SEQ ID NO: 681146 - DNA, 33 bp, Homo sapien
aacaccacaggtaggataggtttagcagaaaga

SEQ ID NO: 681147 - DNA, 33 bp, Homo sapien
tggtttgaggcagtaacttacagtcgcttgcac

SEQ ID NO: 681148 - DNA, 33 bp, Homo sapien
tggtttgaggcagtaagttacagtcgcttgcac

SEQ ID NO: 681149 - DNA, 33 bp, Homo sapien
aacattccaagagatacgaagtggaagctgcca

SEQ ID NO: 681150 - DNA, 33 bp, Homo sapien
aacattccaagagatatgaagtggaagctgcca

SEQ ID NO: 681151 - DNA, 33 bp, Homo sapien
gctctgcccatcgcgtatatcaactcatccaca

SEQ ID NO: 681152 - DNA, 33 bp, Homo sapien
gctctgcccatcgcgtctatcaactcatccaca

SEQ ID NO: 681153 - DNA, 33 bp, Homo sapien
gtggctctctttccaccgatgtcaccagcacca

SEQ ID NO: 681154 - DNA, 33 bp, Homo sapien
gtggctctctttccactgatgtcaccagcacca

SEQ ID NO: 681155 - DNA, 33 bp, Homo sapien
aaataataggcctaaaatcgaatcaaccatcgg

SEQ ID NO: 681156 - DNA, 33 bp, Homo sapien
aaataataggcctaaagtcgaatcaaccatcgg

SEQ ID NO: 681157 - DNA, 33 bp, Homo sapien
gaagtaaatatgaaggaaagttgggtgtggtgg

SEQ ID NO: 681158 - DNA, 33 bp, Homo sapien
gaagtaaatatgaagggaagttgggtgtggtgg

SEQ ID NO: 681159 - DNA, 33 bp, Homo sapien
ccatgaactgctaacaagatactgggccagtag

SEQ ID NO: 681160 - DNA, 33 bp, Homo sapien
ccatgaactgctaacaggatactgggccagtag

SEQ ID NO: 681161 - DNA, 33 bp, Homo sapien
gaatggtcaacagggtcaagttggagaagaatg

SEQ ID NO: 681162 - DNA, 33 bp, Homo sapien
gaatggtcaacagggtgaagttggagaagaatg

SEQ ID NO: 681163 - DNA, 33 bp, Homo sapien
tgcatttttattcaagcctcagacactctttaa

SEQ ID NO: 681164 - DNA, 33 bp, Homo sapien
tgcatttttattcaaggctcagacactctttaa

SEQ ID NO: 681165 - DNA, 33 bp, Homo sapien
gtaagcagaattagaaatcatggtccagaaagt

SEQ ID NO: 681166 - DNA, 33 bp, Homo sapien
gtaagcagaattagaagtcatggtccagaaagt

SEQ ID NO: 681167 - DNA, 33 bp, Homo sapien
gtgttaagaatttgtacggagcactgctttatt

SEQ ID NO: 681168 - DNA, 33 bp, Homo sapien
gtgttaagaatttgtagggagcactgctttatt

SEQ ID NO: 681169 - DNA, 33 bp, Homo sapien
aggaatagtacttccacgtaaagaaggcggaaa

SEQ ID NO: 681170 - DNA, 33 bp, Homo sapien
aggaatagtacttccaggtaaagaaggcggaaa

SEQ ID NO: 681171 - DNA, 33 bp, Homo sapien
ctctctgtttcatctgcaaatgtgctaacagct

SEQ ID NO: 681172 - DNA, 33 bp, Homo sapien
ctctctgtttcatctgtaaatgtgctaacagct

SEQ ID NO: 681173 - DNA, 33 bp, Homo sapien
ctgcttcatgaatagccctttgtcttcagaaat

SEQ ID NO: 681174 - DNA, 33 bp, Homo sapien
ctgcttcatgaatagctctttgtcttcagaaat

SEQ ID NO: 681175 - DNA, 33 bp, Homo sapien
agcaaggagagtattgaaagtgctaatcagaag

SEQ ID NO: 681176 - DNA, 33 bp, Homo sapien
agcaaggagagtattgcaagtgctaatcagaag

SEQ ID NO: 681177 - DNA, 33 bp, Homo sapien
gataagatttctactacggtaagatttctacct

SEQ ID NO: 681178 - DNA, 33 bp, Homo sapien
gataagatttctactatggtaagatttctacct

SEQ ID NO: 681179 - DNA, 33 bp, Homo sapien
ggccacggagttaaggacaaggtggggtgtgcg

SEQ ID NO: 681180 - DNA, 33 bp, Homo sapien
ggccacggagttaaggtcaaggtggggtgtgcg

SEQ ID NO: 681181 - DNA, 33 bp, Homo sapien
tcatctgtttccatgagtacagccccttccact

SEQ ID NO: 681182 - DNA, 33 bp, Homo sapien
tcatctgtttccatgattacagccccttccact

SEQ ID NO: 681183 - DNA, 33 bp, Homo sapien
gccattggatctaaaaaaggtgaggcatcttct

SEQ ID NO: 681184 - DNA, 33 bp, Homo sapien
gccattggatctaaaagaggtgaggcatcttct

SEQ ID NO: 681185 - DNA, 33 bp, Homo sapien
tttgagggggaaatgacggtaactgtttcttcc

SEQ ID NO: 681186 - DNA, 33 bp, Homo sapien
tttgagggggaaatgatggtaactgtttcttcc

SEQ ID NO: 681187 - DNA, 33 bp, Homo sapien
gactaaaactattccccaacgtaggcagctctt

SEQ ID NO: 681188 - DNA, 33 bp, Homo sapien
gactaaaactattccctaacgtaggcagctctt

SEQ ID NO: 681189 - DNA, 33 bp, Homo sapien
tggtgtttctgcaggaagatgattgttgcagtg

SEQ ID NO: 681190 - DNA, 33 bp, Homo sapien
tggtgtttctgcaggaggatgattgttgcagtg

SEQ ID NO: 681191 - DNA, 33 bp, Homo sapien
ctcaagacatttaacaatcaaactcccagccag

SEQ ID NO: 681192 - DNA, 33 bp, Homo sapien
ctcaagacatttaacagtcaaactcccagccag

SEQ ID NO: 681193 - DNA, 33 bp, Homo sapien
gggagagcctcattcaagggaacatcatctatc

SEQ ID NO: 681194 - DNA, 33 bp, Homo sapien
gggagagcctcattcaggggaacatcatctatc

SEQ ID NO: 681195 - DNA, 33 bp, Homo sapien
agcatatacagaacaacggatttttataactca

SEQ ID NO: 681196 - DNA, 33 bp, Homo sapien
agcatatacagaacaatggatttttataactca

SEQ ID NO: 681197 - DNA, 33 bp, Homo sapien
gctttgctgagtgatacataagcagcctttgaa

SEQ ID NO: 681198 - DNA, 33 bp, Homo sapien
gctttgctgagtgatatataagcagcctttgaa

SEQ ID NO: 681199 - DNA, 33 bp, Homo sapien
atcttgattaatagcaatccaggaaaattttag

SEQ ID NO: 681200 - DNA, 33 bp, Homo sapien
atcttgattaatagcagtccaggaaaattttag

SEQ ID NO: 681201 - DNA, 33 bp, Homo sapien
aagaattatgagtccaaaatgtcttcctaccta

SEQ ID NO: 681202 - DNA, 33 bp, Homo sapien
aagaattatgagtccacaatgtcttcctaccta

SEQ ID NO: 681203 - DNA, 33 bp, Homo sapien
ggatgatacttagagacgttttaagaatatgtg

SEQ ID NO: 681204 - DNA, 33 bp, Homo sapien
ggatgatacttagagatgttttaagaatatgtg

SEQ ID NO: 681205 - DNA, 33 bp, Homo sapien
agaagctgggctcaaactgattgcattaatttt

SEQ ID NO: 681206 - DNA, 33 bp, Homo sapien
agaagctgggctcaaattgattgcattaatttt

SEQ ID NO: 681207 - DNA, 33 bp, Homo sapien
tctgctgctatgtccacgtgaccttggaaaagt

SEQ ID NO: 681208 - DNA, 33 bp, Homo sapien
tctgctgctatgtccatgtgaccttggaaaagt

SEQ ID NO: 681209 - DNA, 33 bp, Homo sapien
atttgatcctcgatcacgttaggtctagattct

SEQ ID NO: 681210 - DNA, 33 bp, Homo sapien
atttgatcctcgatcatgttaggtctagattct

SEQ ID NO: 681211 - DNA, 33 bp, Homo sapien
ccttggaatctagtaacgctgagaaacctgaga

SEQ ID NO: 681212 - DNA, 33 bp, Homo sapien
ccttggaatctagtaatgctgagaaacctgaga

SEQ ID NO: 681213 - DNA, 33 bp, Homo sapien
tcccgtgtgatatagtaaacgttgaataacacc

SEQ ID NO: 681214 - DNA, 33 bp, Homo sapien
tcccgtgtgatatagtcaacgttgaataacacc

SEQ ID NO: 681215 - DNA, 33 bp, Homo sapien
gtgatgaaacgtgtccactatgaagtacagtcc

SEQ ID NO: 681216 - DNA, 33 bp, Homo sapien
gtgatgaaacgtgtccgctatgaagtacagtcc

SEQ ID NO: 681217 - DNA, 33 bp, Homo sapien
tgtagtctctgttctccgaaactttagttttgc

SEQ ID NO: 681218 - DNA, 33 bp, Homo sapien
tgtagtctctgttctctgaaactttagttttgc

SEQ ID NO: 681219 - DNA, 33 bp, Homo sapien
cagacaaaagactccacacattgctgctgagtg

SEQ ID NO: 681220 - DNA, 33 bp, Homo sapien
cagacaaaagactccatacattgctgctgagtg

SEQ ID NO: 681221 - DNA, 33 bp, Homo sapien
tccagctgaggatacccgagaatcttcacgaac

SEQ ID NO: 681222 - DNA, 33 bp, Homo sapien
tccagctgaggatacctgagaatcttcacgaac

SEQ ID NO: 681223 - DNA, 33 bp, Homo sapien
cgtgcagcacttcaaaatctctcagcctcattt

SEQ ID NO: 681224 - DNA, 33 bp, Homo sapien
cgtgcagcacttcaaagtctctcagcctcattt

SEQ ID NO: 681225 - DNA, 33 bp, Homo sapien
gcccaggacatgggaaccatttcacagatgtgt

SEQ ID NO: 681226 - DNA, 33 bp, Homo sapien
gcccaggacatgggaagcatttcacagatgtgt

SEQ ID NO: 681227 - DNA, 33 bp, Homo sapien
catgagaaggttacacactggattaataagaac

SEQ ID NO: 681228 - DNA, 33 bp, Homo sapien
catgagaaggttacacgctggattaataagaac

SEQ ID NO: 681229 - DNA, 33 bp, Homo sapien
aatatagtcaacaccactacacttggattactt

SEQ ID NO: 681230 - DNA, 33 bp, Homo sapien
aatatagtcaacaccattacacttggattactt

SEQ ID NO: 681231 - DNA, 33 bp, Homo sapien
gacagagaacagcttcagaaatagatttgggta

SEQ ID NO: 681232 - DNA, 33 bp, Homo sapien
gacagagaacagcttcggaaatagatttgggta

SEQ ID NO: 681233 - DNA, 33 bp, Homo sapien
atttgggtagacatccaaggcaagtttctacca

SEQ ID NO: 681234 - DNA, 33 bp, Homo sapien
atttgggtagacatcccaggcaagtttctacca

SEQ ID NO: 681235 - DNA, 33 bp, Homo sapien
tgcatcaaagaagctcaacactgaagagtatac

SEQ ID NO: 681236 - DNA, 33 bp, Homo sapien
tgcatcaaagaagctcgacactgaagagtatac

SEQ ID NO: 681237 - DNA, 33 bp, Homo sapien
aatctgcagtctgggcacaatcacaggcttcat

SEQ ID NO: 681238 - DNA, 33 bp, Homo sapien
aatctgcagtctgggcgcaatcacaggcttcat

SEQ ID NO: 681239 - DNA, 33 bp, Homo sapien
attccctccaaacctcagaacaacactgtataa

SEQ ID NO: 681240 - DNA, 33 bp, Homo sapien
attccctccaaacctcggaacaacactgtataa

SEQ ID NO: 681241 - DNA, 33 bp, Homo sapien
tggaagcaattacataatatccaaagaataagg

SEQ ID NO: 681242 - DNA, 33 bp, Homo sapien
tggaagcaattacatagtatccaaagaataagg

SEQ ID NO: 681243 - DNA, 33 bp, Homo sapien
ggttagtattgacatacatggatttgatcatgt

SEQ ID NO: 681244 - DNA, 33 bp, Homo sapien
ggttagtattgacatatatggatttgatcatgt

SEQ ID NO: 681245 - DNA, 33 bp, Homo sapien
gtcgaggtcaagggaacgatcccgtctcaatac

SEQ ID NO: 681246 - DNA, 33 bp, Homo sapien
gtcgaggtcaagggaatgatcccgtctcaatac

SEQ ID NO: 681247 - DNA, 33 bp, Homo sapien
tgtcctcaatctggacaatggaggagagagtgt

SEQ ID NO: 681248 - DNA, 33 bp, Homo sapien
tgtcctcaatctggacgatggaggagagagtgt

SEQ ID NO: 681249 - DNA, 33 bp, Homo sapien
cagattgaggacacacagatcgcagcacagtgc

SEQ ID NO: 681250 - DNA, 33 bp, Homo sapien
cagattgaggacacacggatcgcagcacagtgc

SEQ ID NO: 681251 - DNA, 33 bp, Homo sapien
gtcacctcatgcctggaaaacttacaccaggac

SEQ ID NO: 681252 - DNA, 33 bp, Homo sapien
gtcacctcatgcctggcaaacttacaccaggac

SEQ ID NO: 681253 - DNA, 33 bp, Homo sapien
tataaaatgctattaacggtcacaaatggatca

SEQ ID NO: 681254 - DNA, 33 bp, Homo sapien
tataaaatgctattaatggtcacaaatggatca

SEQ ID NO: 681255 - DNA, 33 bp, Homo sapien
ttactatttctaattcaaaggaatcactttatt

SEQ ID NO: 681256 - DNA, 33 bp, Homo sapien
ttactatttctaattccaaggaatcactttatt

SEQ ID NO: 681257 - DNA, 33 bp, Homo sapien
cctccacggctgctacaacacctgtgactctca

SEQ ID NO: 681258 - DNA, 33 bp, Homo sapien
cctccacggctgctacgacacctgtgactctca

SEQ ID NO: 681259 - DNA, 33 bp, Homo sapien
gtaaaatggcagcccaagtagcttcccatcacc

SEQ ID NO: 681260 - DNA, 33 bp, Homo sapien
gtaaaatggcagcccaggtagcttcccatcacc

SEQ ID NO: 681261 - DNA, 33 bp, Homo sapien
ggaatcctcagagagcaattcctgcagtggttc

SEQ ID NO: 681262 - DNA, 33 bp, Homo sapien
ggaatcctcagagagcgattcctgcagtggttc

SEQ ID NO: 681263 - DNA, 33 bp, Homo sapien
agtattcagggccttacaaatgagaggatccgg

SEQ ID NO: 681264 - DNA, 33 bp, Homo sapien
agtattcagggccttataaatgagaggatccgg

SEQ ID NO: 681265 - DNA, 33 bp, Homo sapien
tgtcctctcgtgcaaacagcctttctgccattc

SEQ ID NO: 681266 - DNA, 33 bp, Homo sapien
tgtcctctcgtgcaaagagcctttctgccattc

SEQ ID NO: 681267 - DNA, 33 bp, Homo sapien
aagagatagcaatggaaacatccatcaagtaag

SEQ ID NO: 681268 - DNA, 33 bp, Homo sapien
aagagatagcaatggagacatccatcaagtaag

SEQ ID NO: 681269 - DNA, 33 bp, Homo sapien
aaagacagcaattacagaaggcatttcatttca

SEQ ID NO: 681270 - DNA, 33 bp, Homo sapien
aaagacagcaattacataaggcatttcatttca

SEQ ID NO: 681271 - DNA, 33 bp, Homo sapien
gcagcttgatggtaccaaactgccttgctttct

SEQ ID NO: 681272 - DNA, 33 bp, Homo sapien
gcagcttgatggtaccgaactgccttgctttct

SEQ ID NO: 681273 - DNA, 33 bp, Homo sapien
ctcgcagttgatgatacacttccacttccatct

SEQ ID NO: 681274 - DNA, 33 bp, Homo sapien
ctcgcagttgatgatatacttccacttccatct

SEQ ID NO: 681275 - DNA, 33 bp, Homo sapien
gggctagatgactacacagttttctaggaaaag

SEQ ID NO: 681276 - DNA, 33 bp, Homo sapien
gggctagatgactacagagttttctaggaaaag

SEQ ID NO: 681277 - DNA, 33 bp, Homo sapien
cacctgtcttgtcacaactactgtaggttgcaa

SEQ ID NO: 681278 - DNA, 33 bp, Homo sapien
cacctgtcttgtcacagctactgtaggttgcaa

SEQ ID NO: 681279 - DNA, 33 bp, Homo sapien
gtctggacagaatttcacacaaatttctacagt

SEQ ID NO: 681280 - DNA, 33 bp, Homo sapien
gtctggacagaatttcgcacaaatttctacagt

SEQ ID NO: 681281 - DNA, 33 bp, Homo sapien
tttgcttccttacccccatgctgaactctctaa

SEQ ID NO: 681282 - DNA, 33 bp, Homo sapien
tttgcttccttacccctatgctgaactctctaa

SEQ ID NO: 681283 - DNA, 33 bp, Homo sapien
ttatactagggagagaaaagttagcaattgtag

SEQ ID NO: 681284 - DNA, 33 bp, Homo sapien
ttatactagggagagagaagttagcaattgtag

SEQ ID NO: 681285 - DNA, 33 bp, Homo sapien
ggttatctgaggcaaactggcctgtgatggacc

SEQ ID NO: 681286 - DNA, 33 bp, Homo sapien
ggttatctgaggcaaattggcctgtgatggacc

SEQ ID NO: 681287 - DNA, 33 bp, Homo sapien
gttaagtaatctgccaacatcacacttctacac

SEQ ID NO: 681288 - DNA, 33 bp, Homo sapien
gttaagtaatctgccagcatcacacttctacac

SEQ ID NO: 681289 - DNA, 33 bp, Homo sapien
ggaatataaaaccaggcagtcagtcctgcttac

SEQ ID NO: 681290 - DNA, 33 bp, Homo sapien
ggaatataaaaccaggtagtcagtcctgcttac

SEQ ID NO: 681291 - DNA, 33 bp, Homo sapien
tttttggaatgatgaaatgtttcaaaattgtga

SEQ ID NO: 681292 - DNA, 33 bp, Homo sapien
tttttggaatgatgaagtgtttcaaaattgtga

SEQ ID NO: 681293 - DNA, 33 bp, Homo sapien
tgatgatagattgcaaattatagtcaaataaga

SEQ ID NO: 681294 - DNA, 33 bp, Homo sapien
tgatgatagattgcaagttatagtcaaataaga

SEQ ID NO: 681295 - DNA, 33 bp, Homo sapien
ctagagatgacaaaggccagatatcatgatcat

SEQ ID NO: 681296 - DNA, 33 bp, Homo sapien
ctagagatgacaaaggtcagatatcatgatcat

SEQ ID NO: 681297 - DNA, 33 bp, Homo sapien
gatcacttgttctaaacggagtgccagacaaag

SEQ ID NO: 681298 - DNA, 33 bp, Homo sapien
gatcacttgttctaaatggagtgccagacaaag

SEQ ID NO: 681299 - DNA, 33 bp, Homo sapien
tttctgaaggtgaagaaagagcatggaagagac

SEQ ID NO: 681300 - DNA, 33 bp, Homo sapien
tttctgaaggtgaagacagagcatggaagagac

SEQ ID NO: 681301 - DNA, 33 bp, Homo sapien
gttgtttttctcttgacaacctgagactcttca

SEQ ID NO: 681302 - DNA, 33 bp, Homo sapien
gttgtttttctcttgataacctgagactcttca

SEQ ID NO: 681303 - DNA, 33 bp, Homo sapien
cggtcttagctattaacgcagtaacaggttttc

SEQ ID NO: 681304 - DNA, 33 bp, Homo sapien
cggtcttagctattaatgcagtaacaggttttc

SEQ ID NO: 681305 - DNA, 33 bp, Homo sapien
aagacttctcagatgacaattgtggtggttaag

SEQ ID NO: 681306 - DNA, 33 bp, Homo sapien
aagacttctcagatgagaattgtggtggttaag

SEQ ID NO: 681307 - DNA, 33 bp, Homo sapien
gacattaatttatttcaagcaaatttattgagc

SEQ ID NO: 681308 - DNA, 33 bp, Homo sapien
gacattaatttatttccagcaaatttattgagc

SEQ ID NO: 681309 - DNA, 33 bp, Homo sapien
cattcctctgttgcagcatttatcactttagct

SEQ ID NO: 681310 - DNA, 33 bp, Homo sapien
cattcctctgttgcagtatttatcactttagct

SEQ ID NO: 681311 - DNA, 33 bp, Homo sapien
actaataataacgaaacgctaacaaaactttat

SEQ ID NO: 681312 - DNA, 33 bp, Homo sapien
actaataataacgaaatgctaacaaaactttat

SEQ ID NO: 681313 - DNA, 33 bp, Homo sapien
atcactttcaaattccaaaaactgttcagagcc

SEQ ID NO: 681314 - DNA, 33 bp, Homo sapien
atcactttcaaattccgaaaactgttcagagcc

SEQ ID NO: 681315 - DNA, 33 bp, Homo sapien
gacaagactttgaataccaggctaaggggtttg

SEQ ID NO: 681316 - DNA, 33 bp, Homo sapien
gacaagactttgaatatcaggctaaggggtttg

SEQ ID NO: 681317 - DNA, 33 bp, Homo sapien
agacaaaaaggacaagaatggagagtagaaggc

SEQ ID NO: 681318 - DNA, 33 bp, Homo sapien
agacaaaaaggacaaggatggagagtagaaggc

SEQ ID NO: 681319 - DNA, 33 bp, Homo sapien
tggggacaacagaagacatcattgcttgtccca

SEQ ID NO: 681320 - DNA, 33 bp, Homo sapien
tggggacaacagaagagatcattgcttgtccca

SEQ ID NO: 681321 - DNA, 33 bp, Homo sapien
tttactttttaagaagactggtgacatttcttt

SEQ ID NO: 681322 - DNA, 33 bp, Homo sapien
tttactttttaagaaggctggtgacatttcttt

SEQ ID NO: 681323 - DNA, 33 bp, Homo sapien
ctaccagaatgtggcaaactccataatcctaaa

SEQ ID NO: 681324 - DNA, 33 bp, Homo sapien
ctaccagaatgtggcagactccataatcctaaa

SEQ ID NO: 681325 - DNA, 33 bp, Homo sapien
atgttgccatagtatccgacctgtaaacctcaa

SEQ ID NO: 681326 - DNA, 33 bp, Homo sapien
atgttgccatagtatctgacctgtaaacctcaa

SEQ ID NO: 681327 - DNA, 33 bp, Homo sapien
gcccctttttagtcaactgaaaattccgaaaga

SEQ ID NO: 681328 - DNA, 33 bp, Homo sapien
gcccctttttagtcaattgaaaattccgaaaga

SEQ ID NO: 681329 - DNA, 33 bp, Homo sapien
agtctggggaactgtacggatgaaatcatctct

SEQ ID NO: 681330 - DNA, 33 bp, Homo sapien
agtctggggaactgtatggatgaaatcatctct

SEQ ID NO: 681331 - DNA, 33 bp, Homo sapien
ctctttctaatccttcacataaaggcctactca

SEQ ID NO: 681332 - DNA, 33 bp, Homo sapien
ctctttctaatccttctcataaaggcctactca

SEQ ID NO: 681333 - DNA, 33 bp, Homo sapien
ctttcattttcattgcacaacttgactaaatct

SEQ ID NO: 681334 - DNA, 33 bp, Homo sapien
ctttcattttcattgcgcaacttgactaaatct

SEQ ID NO: 681335 - DNA, 33 bp, Homo sapien
actgaacatttgtgtcccctctaaattcatagg

SEQ ID NO: 681336 - DNA, 33 bp, Homo sapien
actgaacatttgtgtctcctctaaattcatagg

SEQ ID NO: 681337 - DNA, 33 bp, Homo sapien
ctaatagttgagactacgttattggcttccaga

SEQ ID NO: 681338 - DNA, 33 bp, Homo sapien
ctaatagttgagactatgttattggcttccaga

SEQ ID NO: 681339 - DNA, 33 bp, Homo sapien
tggaaaaaccaaatgacagctaatggttcagta

SEQ ID NO: 681340 - DNA, 33 bp, Homo sapien
tggaaaaaccaaatgatagctaatggttcagta

SEQ ID NO: 681341 - DNA, 33 bp, Homo sapien
ggatagatatgtagaacgtgatggttgtgtaga

SEQ ID NO: 681342 - DNA, 33 bp, Homo sapien
ggatagatatgtagaatgtgatggttgtgtaga

SEQ ID NO: 681343 - DNA, 33 bp, Homo sapien
gaatggactaatgtaacaccttggctcgtgttt

SEQ ID NO: 681344 - DNA, 33 bp, Homo sapien
gaatggactaatgtaataccttggctcgtgttt

SEQ ID NO: 681345 - DNA, 33 bp, Homo sapien
cttccaatggtcccccaaagtcttaattcattc

SEQ ID NO: 681346 - DNA, 33 bp, Homo sapien
cttccaatggtcccccgaagtcttaattcattc

SEQ ID NO: 681347 - DNA, 33 bp, Homo sapien
ctgtgtcactctcctacgttgtttttcctgaat

SEQ ID NO: 681348 - DNA, 33 bp, Homo sapien
ctgtgtcactctcctatgttgtttttcctgaat

SEQ ID NO: 681349 - DNA, 33 bp, Homo sapien
ttaaatgagtagttccaaagggtaggcaaaggg

SEQ ID NO: 681350 - DNA, 33 bp, Homo sapien
ttaaatgagtagttccgaagggtaggcaaaggg

SEQ ID NO: 681351 - DNA, 33 bp, Homo sapien
tacagcctcattttcacggttctttgctctttc

SEQ ID NO: 681352 - DNA, 33 bp, Homo sapien
tacagcctcattttcatggttctttgctctttc

SEQ ID NO: 681353 - DNA, 33 bp, Homo sapien
caatgtatccaaaatacgggtctatctgtgctt

SEQ ID NO: 681354 - DNA, 33 bp, Homo sapien
caatgtatccaaaatatgggtctatctgtgctt

SEQ ID NO: 681355 - DNA, 33 bp, Homo sapien
aatagtggtttcttaaagctggaaagaatagag

SEQ ID NO: 681356 - DNA, 33 bp, Homo sapien
aatagtggtttcttaaggctggaaagaatagag

SEQ ID NO: 681357 - DNA, 33 bp, Homo sapien
atccaaactcagtaacaaaaccagttcggtgct

SEQ ID NO: 681358 - DNA, 33 bp, Homo sapien
atccaaactcagtaaccaaaccagttcggtgct

SEQ ID NO: 681359 - DNA, 33 bp, Homo sapien
ccaaaactactgagaccgtaaaagatcacagtg

SEQ ID NO: 681360 - DNA, 33 bp, Homo sapien
ccaaaactactgagacggtaaaagatcacagtg

SEQ ID NO: 681361 - DNA, 33 bp, Homo sapien
aaagatatagtttatcggagagcaatagaacta

SEQ ID NO: 681362 - DNA, 33 bp, Homo sapien
aaagatatagtttatctgagagcaatagaacta

SEQ ID NO: 681363 - DNA, 33 bp, Homo sapien
cttgtatctatatgggacaagtattatagaatc

SEQ ID NO: 681364 - DNA, 33 bp, Homo sapien
cttgtatctatatggggcaagtattatagaatc

SEQ ID NO: 681365 - DNA, 33 bp, Homo sapien
atgataagaataaggaggaaacacacatacctt

SEQ ID NO: 681366 - DNA, 33 bp, Homo sapien
atgataagaataaggatgaaacacacatacctt

SEQ ID NO: 681367 - DNA, 33 bp, Homo sapien
tggaacagacaggacaataagttgagaaattta

SEQ ID NO: 681368 - DNA, 33 bp, Homo sapien
tggaacagacaggacagtaagttgagaaattta

SEQ ID NO: 681369 - DNA, 33 bp, Homo sapien
atctcaaatccagatacctcttttcagttgcag

SEQ ID NO: 681370 - DNA, 33 bp, Homo sapien
atctcaaatccagatatctcttttcagttgcag

SEQ ID NO: 681371 - DNA, 33 bp, Homo sapien
tagtattaggcccacacattaacctcctataga

SEQ ID NO: 681372 - DNA, 33 bp, Homo sapien
tagtattaggcccacatattaacctcctataga

SEQ ID NO: 681373 - DNA, 33 bp, Homo sapien
aataattatgtgtgtacagctatttttgagatc

SEQ ID NO: 681374 - DNA, 33 bp, Homo sapien
aataattatgtgtgtagagctatttttgagatc

SEQ ID NO: 681375 - DNA, 33 bp, Homo sapien
tatcactacaggtgcaaagactaactgtttctg

SEQ ID NO: 681376 - DNA, 33 bp, Homo sapien
tatcactacaggtgcagagactaactgtttctg

SEQ ID NO: 681377 - DNA, 33 bp, Homo sapien
tgtgggaaattatttcaatgttgttaaaactca

SEQ ID NO: 681378 - DNA, 33 bp, Homo sapien
tgtgggaaattatttcgatgttgttaaaactca

SEQ ID NO: 681379 - DNA, 33 bp, Homo sapien
cccagggctacaaatacaatgaaagtgtgatat

SEQ ID NO: 681380 - DNA, 33 bp, Homo sapien
cccagggctacaaatataatgaaagtgtgatat

SEQ ID NO: 681381 - DNA, 33 bp, Homo sapien
atccccgttcagcaccaggtctgttctcccagt

SEQ ID NO: 681382 - DNA, 33 bp, Homo sapien
atccccgttcagcaccgggtctgttctcccagt

SEQ ID NO: 681383 - DNA, 33 bp, Homo sapien
taattgcagtaaaaaacagacacttctcttcca

SEQ ID NO: 681384 - DNA, 33 bp, Homo sapien
taattgcagtaaaaaatagacacttctcttcca

SEQ ID NO: 681385 - DNA, 33 bp, Homo sapien
accactcagcggtgcaaagtttctgggtatatg

SEQ ID NO: 681386 - DNA, 33 bp, Homo sapien
accactcagcggtgcatagtttctgggtatatg

SEQ ID NO: 681387 - DNA, 33 bp, Homo sapien
catcaccacccgtagtaaaggaaggaaagtagg

SEQ ID NO: 681388 - DNA, 33 bp, Homo sapien
catcaccacccgtagtgaaggaaggaaagtagg

SEQ ID NO: 681389 - DNA, 33 bp, Homo sapien
tctgtggcctaaggcaacagcgatagtcacttg

SEQ ID NO: 681390 - DNA, 33 bp, Homo sapien
tctgtggcctaaggcatcagcgatagtcacttg

SEQ ID NO: 681391 - DNA, 33 bp, Homo sapien
tactaagcataaggaactattttctaggcacgt

SEQ ID NO: 681392 - DNA, 33 bp, Homo sapien
tactaagcataaggaattattttctaggcacgt

SEQ ID NO: 681393 - DNA, 33 bp, Homo sapien
caggagaaatgttggcaattcaaggctcttctg

SEQ ID NO: 681394 - DNA, 33 bp, Homo sapien
caggagaaatgttggccattcaaggctcttctg

SEQ ID NO: 681395 - DNA, 33 bp, Homo sapien
tgccttggggatgttaacaggagaaatgttggc

SEQ ID NO: 681396 - DNA, 33 bp, Homo sapien
tgccttggggatgttagcaggagaaatgttggc

SEQ ID NO: 681397 - DNA, 33 bp, Homo sapien
aagtctggaaaacataacataaaccgagaatgc

SEQ ID NO: 681398 - DNA, 33 bp, Homo sapien
aagtctggaaaacatatcataaaccgagaatgc

SEQ ID NO: 681399 - DNA, 33 bp, Homo sapien
accattcaactgtcaacgtacagctgcatacaa

SEQ ID NO: 681400 - DNA, 33 bp, Homo sapien
accattcaactgtcaatgtacagctgcatacaa

SEQ ID NO: 681401 - DNA, 33 bp, Homo sapien
tgctgatccacttggaccgagaccattcaactg

SEQ ID NO: 681402 - DNA, 33 bp, Homo sapien
tgctgatccacttggagcgagaccattcaactg

SEQ ID NO: 681403 - DNA, 33 bp, Homo sapien
ggagatacagtaggtgaacagtttttgtatgag

SEQ ID NO: 681404 - DNA, 33 bp, Homo sapien
ggagatacagtaggtggacagtttttgtatgag

SEQ ID NO: 681405 - DNA, 33 bp, Homo sapien
caatggggtatcagtacgttcttgtaatagttt

SEQ ID NO: 681406 - DNA, 33 bp, Homo sapien
caatggggtatcagtatgttcttgtaatagttt

SEQ ID NO: 681407 - DNA, 33 bp, Homo sapien
caagccaatttccttacgatgacctatttaata

SEQ ID NO: 681408 - DNA, 33 bp, Homo sapien
caagccaatttccttatgatgacctatttaata

SEQ ID NO: 681409 - DNA, 33 bp, Homo sapien
tcagctagtgctggaaccatcaagatacgcaat

SEQ ID NO: 681410 - DNA, 33 bp, Homo sapien
tcagctagtgctggaatcatcaagatacgcaat

SEQ ID NO: 681411 - DNA, 33 bp, Homo sapien
tgaataagtgcaagtaaagattaattccacctc

SEQ ID NO: 681412 - DNA, 33 bp, Homo sapien
tgaataagtgcaagtatagattaattccacctc

SEQ ID NO: 681413 - DNA, 33 bp, Homo sapien
gtaaatggtgttgataatagtagctgttttgta

SEQ ID NO: 681414 - DNA, 33 bp, Homo sapien
gtaaatggtgttgatagtagtagctgttttgta

SEQ ID NO: 681415 - DNA, 33 bp, Homo sapien
taaagaaggcttcctacgttggtttatacagta

SEQ ID NO: 681416 - DNA, 33 bp, Homo sapien
taaagaaggcttcctatgttggtttatacagta

SEQ ID NO: 681417 - DNA, 33 bp, Homo sapien
ccagcagaattactgcactaaatcataatctat

SEQ ID NO: 681418 - DNA, 33 bp, Homo sapien
ccagcagaattactgcgctaaatcataatctat

SEQ ID NO: 681419 - DNA, 33 bp, Homo sapien
tcatctgccacgggtacgtgaaaaattgatagt

SEQ ID NO: 681420 - DNA, 33 bp, Homo sapien
tcatctgccacgggtatgtgaaaaattgatagt

SEQ ID NO: 681421 - DNA, 33 bp, Homo sapien
tactttcttccttaacagcctctttaagtttat

SEQ ID NO: 681422 - DNA, 33 bp, Homo sapien
tactttcttccttaacggcctctttaagtttat

SEQ ID NO: 681423 - DNA, 33 bp, Homo sapien
cagtgttaacagcaacaaaaaaagtaataaggt

SEQ ID NO: 681424 - DNA, 33 bp, Homo sapien
cagtgttaacagcaacgaaaaaagtaataaggt

SEQ ID NO: 681425 - DNA, 33 bp, Homo sapien
cactttgaggggcaccaattttatctgaaagtt

SEQ ID NO: 681426 - DNA, 33 bp, Homo sapien
cactttgaggggcacctattttatctgaaagtt

SEQ ID NO: 681427 - DNA, 33 bp, Homo sapien
attaattgttgctgaaaaattttaatcagtaag

SEQ ID NO: 681428 - DNA, 33 bp, Homo sapien
attaattgttgctgaagaattttaatcagtaag

SEQ ID NO: 681429 - DNA, 33 bp, Homo sapien
ataaaacaaacatacactgaattcctggtttcg

SEQ ID NO: 681430 - DNA, 33 bp, Homo sapien
ataaaacaaacatacattgaattcctggtttcg

SEQ ID NO: 681431 - DNA, 33 bp, Homo sapien
tattcaactagaataaccttgtgcaaaacctga

SEQ ID NO: 681432 - DNA, 33 bp, Homo sapien
tattcaactagaataatcttgtgcaaaacctga

SEQ ID NO: 681433 - DNA, 33 bp, Homo sapien
agggagaagtagggtcaagaaacgcagagtgtt

SEQ ID NO: 681434 - DNA, 33 bp, Homo sapien
agggagaagtagggtcgagaaacgcagagtgtt

SEQ ID NO: 681435 - DNA, 33 bp, Homo sapien
acacagttacggaattaaaaaagagaagaatgt

SEQ ID NO: 681436 - DNA, 33 bp, Homo sapien
acacagttacggaattgaaaaagagaagaatgt

SEQ ID NO: 681437 - DNA, 33 bp, Homo sapien
gaggccaggttttctacatctgtgtcagccaaa

SEQ ID NO: 681438 - DNA, 33 bp, Homo sapien
gaggccaggttttctatatctgtgtcagccaaa

SEQ ID NO: 681439 - DNA, 33 bp, Homo sapien
ctgctatcaagccagacattaaaaagaattgca

SEQ ID NO: 681440 - DNA, 33 bp, Homo sapien
ctgctatcaagccagagattaaaaagaattgca

SEQ ID NO: 681441 - DNA, 33 bp, Homo sapien
ctaggatctggctataatacagaggctaagcca

SEQ ID NO: 681442 - DNA, 33 bp, Homo sapien
ctaggatctggctatactacagaggctaagcca

SEQ ID NO: 681443 - DNA, 33 bp, Homo sapien
cgaaggccgccaggaccgaatccgcttctctaa

SEQ ID NO: 681444 - DNA, 33 bp, Homo sapien
cgaaggccgccaggactgaatccgcttctctaa

SEQ ID NO: 681445 - DNA, 33 bp, Homo sapien
tgtcctgggtgctcaacacaaggctgtggcagt

SEQ ID NO: 681446 - DNA, 33 bp, Homo sapien
tgtcctgggtgctcaatacaaggctgtggcagt

SEQ ID NO: 681447 - DNA, 33 bp, Homo sapien
cctataacctgagcacacaagctgggtcacaat

SEQ ID NO: 681448 - DNA, 33 bp, Homo sapien
cctataacctgagcacgcaagctgggtcacaat

SEQ ID NO: 681449 - DNA, 33 bp, Homo sapien
ctaggaagagaaaggtaaaagacaagcaggatg

SEQ ID NO: 681450 - DNA, 33 bp, Homo sapien
ctaggaagagaaaggtgaaagacaagcaggatg

SEQ ID NO: 681451 - DNA, 33 bp, Homo sapien
gtgtatttttgttgccacatggagtaggaagga

SEQ ID NO: 681452 - DNA, 33 bp, Homo sapien
gtgtatttttgttgccgcatggagtaggaagga

SEQ ID NO: 681453 - DNA, 33 bp, Homo sapien
tgacccaatgagttatcagccttctccagggtc

SEQ ID NO: 681454 - DNA, 33 bp, Homo sapien
tgacccaatgagttattagccttctccagggtc

SEQ ID NO: 681455 - DNA, 33 bp, Homo sapien
cagaaatagatcttcacggatcacttgagcccc

SEQ ID NO: 681456 - DNA, 33 bp, Homo sapien
cagaaatagatcttcatggatcacttgagcccc

SEQ ID NO: 681457 - DNA, 33 bp, Homo sapien
ttacaatatcgagtccacctatccgtgaatgta

SEQ ID NO: 681458 - DNA, 33 bp, Homo sapien
ttacaatatcgagtccgcctatccgtgaatgta

SEQ ID NO: 681459 - DNA, 33 bp, Homo sapien
acagaggttaggagtacaggaaagccaccatgt

SEQ ID NO: 681460 - DNA, 33 bp, Homo sapien
acagaggttaggagtataggaaagccaccatgt

SEQ ID NO: 681461 - DNA, 33 bp, Homo sapien
aatgtgatttgggagacaagtgaactatatgac

SEQ ID NO: 681462 - DNA, 33 bp, Homo sapien
aatgtgatttgggagagaagtgaactatatgac

SEQ ID NO: 681463 - DNA, 33 bp, Homo sapien
tcctaagtaagtttgaaatttccagagaaatga

SEQ ID NO: 681464 - DNA, 33 bp, Homo sapien
tcctaagtaagtttgacatttccagagaaatga

SEQ ID NO: 681465 - DNA, 33 bp, Homo sapien
gttgacaatgatgtaacagagaaggggaaattg

SEQ ID NO: 681466 - DNA, 33 bp, Homo sapien
gttgacaatgatgtaatagagaaggggaaattg

SEQ ID NO: 681467 - DNA, 33 bp, Homo sapien
ggtagactgatagcaaaaactggaagagaaaca

SEQ ID NO: 681468 - DNA, 33 bp, Homo sapien
ggtagactgatagcaacaactggaagagaaaca

SEQ ID NO: 681469 - DNA, 33 bp, Homo sapien
caggacaactaggaacgcatcaaggcacagctc

SEQ ID NO: 681470 - DNA, 33 bp, Homo sapien
caggacaactaggaactcatcaaggcacagctc

SEQ ID NO: 681471 - DNA, 33 bp, Homo sapien
tcttttgccatgctcaaaatgtacagctgatat

SEQ ID NO: 681472 - DNA, 33 bp, Homo sapien
tcttttgccatgctcagaatgtacagctgatat

SEQ ID NO: 681473 - DNA, 33 bp, Homo sapien
tttgagtctttattcacgctttttcgtagccct

SEQ ID NO: 681474 - DNA, 33 bp, Homo sapien
tttgagtctttattcatgctttttcgtagccct

SEQ ID NO: 681475 - DNA, 33 bp, Homo sapien
tgcggtcaattttccaatgacaaggcttcttaa

SEQ ID NO: 681476 - DNA, 33 bp, Homo sapien
tgcggtcaattttccagtgacaaggcttcttaa

SEQ ID NO: 681477 - DNA, 33 bp, Homo sapien
aggaggtcttgtgtaccgaacgctttagaaaga

SEQ ID NO: 681478 - DNA, 33 bp, Homo sapien
aggaggtcttgtgtactgaacgctttagaaaga

SEQ ID NO: 681479 - DNA, 33 bp, Homo sapien
ggagaagctctcttataaacaacagtcacagtt

SEQ ID NO: 681480 - DNA, 33 bp, Homo sapien
ggagaagctctcttatgaacaacagtcacagtt

SEQ ID NO: 681481 - DNA, 33 bp, Homo sapien
caaaaaccaccctggacctaatctcgaggctca

SEQ ID NO: 681482 - DNA, 33 bp, Homo sapien
caaaaaccaccctggagctaatctcgaggctca

SEQ ID NO: 681483 - DNA, 33 bp, Homo sapien
aggcccagtctgtgcaactacttttcagcatct

SEQ ID NO: 681484 - DNA, 33 bp, Homo sapien
aggcccagtctgtgcagctacttttcagcatct

SEQ ID NO: 681485 - DNA, 33 bp, Homo sapien
ctccttcatccttccacacttgaacaatgcctc

SEQ ID NO: 681486 - DNA, 33 bp, Homo sapien
ctccttcatccttccatacttgaacaatgcctc

SEQ ID NO: 681487 - DNA, 33 bp, Homo sapien
tgtccaaaggcatgaccagaactatgactgcaa

SEQ ID NO: 681488 - DNA, 33 bp, Homo sapien
tgtccaaaggcatgactagaactatgactgcaa

SEQ ID NO: 681489 - DNA, 33 bp, Homo sapien
gtcaaaaattaccaacagcacggaaagatttgc

SEQ ID NO: 681490 - DNA, 33 bp, Homo sapien
gtcaaaaattaccaaccgcacggaaagatttgc

SEQ ID NO: 681491 - DNA, 33 bp, Homo sapien
gcagacaagggattgccagatgaaggcccacgc

SEQ ID NO: 681492 - DNA, 33 bp, Homo sapien
gcagacaagggattgctagatgaaggcccacgc

SEQ ID NO: 681493 - DNA, 33 bp, Homo sapien
gacttggaatcaggacacgtgggttctctctct

SEQ ID NO: 681494 - DNA, 33 bp, Homo sapien
gacttggaatcaggacgcgtgggttctctctct

SEQ ID NO: 681495 - DNA, 33 bp, Homo sapien
acagcttgtaacctgacgtccataaagcttttt

SEQ ID NO: 681496 - DNA, 33 bp, Homo sapien
acagcttgtaacctgatgtccataaagcttttt

SEQ ID NO: 681497 - DNA, 33 bp, Homo sapien
gctgagcatactgaccgaatatgtgcatgactg

SEQ ID NO: 681498 - DNA, 33 bp, Homo sapien
gctgagcatactgacctaatatgtgcatgactg

SEQ ID NO: 681499 - DNA, 33 bp, Homo sapien
cacaacccctctgaaaagcactgtgctgagaaa

SEQ ID NO: 681500 - DNA, 33 bp, Homo sapien
cacaacccctctgaaaggcactgtgctgagaaa

SEQ ID NO: 681501 - DNA, 33 bp, Homo sapien
acagccctaaaggtacaatttcaatgtctgttc

SEQ ID NO: 681502 - DNA, 33 bp, Homo sapien
acagccctaaaggtacgatttcaatgtctgttc

SEQ ID NO: 681503 - DNA, 33 bp, Homo sapien
ttataggtctagaagcaatgagaagaattgaga

SEQ ID NO: 681504 - DNA, 33 bp, Homo sapien
ttataggtctagaagctatgagaagaattgaga

SEQ ID NO: 681505 - DNA, 33 bp, Homo sapien
gtatatgacagtttcaaatggatcacactttaa

SEQ ID NO: 681506 - DNA, 33 bp, Homo sapien
gtatatgacagtttcacatggatcacactttaa

SEQ ID NO: 681507 - DNA, 33 bp, Homo sapien
tatcttcctctttccccgattcaacatcattaa

SEQ ID NO: 681508 - DNA, 33 bp, Homo sapien
tatcttcctctttccctgattcaacatcattaa

SEQ ID NO: 681509 - DNA, 33 bp, Homo sapien
ttctgattgtctttgacctccatatgatgtttt

SEQ ID NO: 681510 - DNA, 33 bp, Homo sapien
ttctgattgtctttgatctccatatgatgtttt

SEQ ID NO: 681511 - DNA, 33 bp, Homo sapien
gacactgtaaactgcacagcgtggaaggaatat

SEQ ID NO: 681512 - DNA, 33 bp, Homo sapien
gacactgtaaactgcatagcgtggaaggaatat

SEQ ID NO: 681513 - DNA, 33 bp, Homo sapien
aagtgagaaaggatgaatcacaaaagaacaaaa

SEQ ID NO: 681514 - DNA, 33 bp, Homo sapien
aagtgagaaaggatgagtcacaaaagaacaaaa

SEQ ID NO: 681515 - DNA, 33 bp, Homo sapien
gagaagagagttgacacgcagaaagagttaggg

SEQ ID NO: 681516 - DNA, 33 bp, Homo sapien
gagaagagagttgacatgcagaaagagttaggg

SEQ ID NO: 681517 - DNA, 33 bp, Homo sapien
atgacactctgtcccacgttgtggatctatttt

SEQ ID NO: 681518 - DNA, 33 bp, Homo sapien
atgacactctgtcccatgttgtggatctatttt

SEQ ID NO: 681519 - DNA, 33 bp, Homo sapien
ttcttgatacgggcaaaaggatgttgagtccag

SEQ ID NO: 681520 - DNA, 33 bp, Homo sapien
ttcttgatacgggcaagaggatgttgagtccag

SEQ ID NO: 681521 - DNA, 33 bp, Homo sapien
cttgctcaatgtctggcaaagaagtcttccttt

SEQ ID NO: 681522 - DNA, 33 bp, Homo sapien
cttgctcaatgtctggtaaagaagtcttccttt

SEQ ID NO: 681523 - DNA, 33 bp, Homo sapien
gtgttccctgagtcacacaacagctatatagta

SEQ ID NO: 681524 - DNA, 33 bp, Homo sapien
gtgttccctgagtcacgcaacagctatatagta

SEQ ID NO: 681525 - DNA, 33 bp, Homo sapien
cagtttctgtaatctgcatgacctatcttgacc

SEQ ID NO: 681526 - DNA, 33 bp, Homo sapien
cagtttctgtaatctgtatgacctatcttgacc

SEQ ID NO: 681527 - DNA, 33 bp, Homo sapien
ccttcaccccagtatcccggtagctgacctcag

SEQ ID NO: 681528 - DNA, 33 bp, Homo sapien
ccttcaccccagtatctcggtagctgacctcag

SEQ ID NO: 681529 - DNA, 33 bp, Homo sapien
ccagagctttagagccacacctgggagctctga

SEQ ID NO: 681530 - DNA, 33 bp, Homo sapien
ccagagctttagagccgcacctgggagctctga

SEQ ID NO: 681531 - DNA, 33 bp, Homo sapien
attcactgggtttggcgcattcccttgtgggct

SEQ ID NO: 681532 - DNA, 33 bp, Homo sapien
attcactgggtttggctcattcccttgtgggct

SEQ ID NO: 681533 - DNA, 33 bp, Homo sapien
ttgggtgctctgtagacctgagttaacttgatc

SEQ ID NO: 681534 - DNA, 33 bp, Homo sapien
ttgggtgctctgtagatctgagttaacttgatc

SEQ ID NO: 681535 - DNA, 33 bp, Homo sapien
tttgtcatcctgaggccagagttccttcaaggg

SEQ ID NO: 681536 - DNA, 33 bp, Homo sapien
tttgtcatcctgaggcgagagttccttcaaggg

SEQ ID NO: 681537 - DNA, 33 bp, Homo sapien
acataaggttatatgaagcaatcctcaaagcag

SEQ ID NO: 681538 - DNA, 33 bp, Homo sapien
acataaggttatatgaggcaatcctcaaagcag

SEQ ID NO: 681539 - DNA, 33 bp, Homo sapien
ctcccattagtttaagacactgcaagcatcttc

SEQ ID NO: 681540 - DNA, 33 bp, Homo sapien
ctcccattagtttaaggcactgcaagcatcttc

SEQ ID NO: 681541 - DNA, 33 bp, Homo sapien
atcaatttgcagcataaagattggattattaca

SEQ ID NO: 681542 - DNA, 33 bp, Homo sapien
atcaatttgcagcatagagattggattattaca

SEQ ID NO: 681543 - DNA, 33 bp, Homo sapien
ctcaccctgggctgtacggtgtccacattttag

SEQ ID NO: 681544 - DNA, 33 bp, Homo sapien
ctcaccctgggctgtagggtgtccacattttag

SEQ ID NO: 681545 - DNA, 33 bp, Homo sapien
acatcagtgaatgaaacagatacagatccctgc

SEQ ID NO: 681546 - DNA, 33 bp, Homo sapien
acatcagtgaatgaaagagatacagatccctgc

SEQ ID NO: 681547 - DNA, 33 bp, Homo sapien
gaagtagcaagaccacaacatgcctcacgatgt

SEQ ID NO: 681548 - DNA, 33 bp, Homo sapien
gaagtagcaagaccacgacatgcctcacgatgt

SEQ ID NO: 681549 - DNA, 33 bp, Homo sapien
gtgagccctcgatatgacactattcctgagggt

SEQ ID NO: 681550 - DNA, 33 bp, Homo sapien
gtgagccctcgatatggcactattcctgagggt

SEQ ID NO: 681551 - DNA, 33 bp, Homo sapien
tattctgtataggttaataacagattgtatgat

SEQ ID NO: 681552 - DNA, 33 bp, Homo sapien
tattctgtataggttagtaacagattgtatgat

SEQ ID NO: 681553 - DNA, 33 bp, Homo sapien
tacataggatgatcagaagggttttctctgagg

SEQ ID NO: 681554 - DNA, 33 bp, Homo sapien
tacataggatgatcaggagggttttctctgagg

SEQ ID NO: 681555 - DNA, 33 bp, Homo sapien
cacaccgcaaattccacgccttaggaaaaagga

SEQ ID NO: 681556 - DNA, 33 bp, Homo sapien
cacaccgcaaattccatgccttaggaaaaagga

SEQ ID NO: 681557 - DNA, 33 bp, Homo sapien
tcaaaaatgtcaatcacgaaagaactgctgtct

SEQ ID NO: 681558 - DNA, 33 bp, Homo sapien
tcaaaaatgtcaatcatgaaagaactgctgtct

SEQ ID NO: 681559 - DNA, 33 bp, Homo sapien
tgtgagatattgggaaaggaaatattttggaca

SEQ ID NO: 681560 - DNA, 33 bp, Homo sapien
tgtgagatattgggaatggaaatattttggaca

SEQ ID NO: 681561 - DNA, 33 bp, Homo sapien
acatggaaagcagggaaaatagaccctttgctc

SEQ ID NO: 681562 - DNA, 33 bp, Homo sapien
acatggaaagcagggagaatagaccctttgctc

SEQ ID NO: 681563 - DNA, 33 bp, Homo sapien
tatttagggagcactcactttatagtacacctc

SEQ ID NO: 681564 - DNA, 33 bp, Homo sapien
tatttagggagcactctctttatagtacacctc

SEQ ID NO: 681565 - DNA, 33 bp, Homo sapien
ccctgcaactgatgagaagaccagtagtgtcga

SEQ ID NO: 681566 - DNA, 33 bp, Homo sapien
ccctgcaactgatgaggagaccagtagtgtcga

SEQ ID NO: 681567 - DNA, 33 bp, Homo sapien
tgtcctagacgttcagcagaaaaagatctcctc

SEQ ID NO: 681568 - DNA, 33 bp, Homo sapien
tgtcctagacgttcagtagaaaaagatctcctc

SEQ ID NO: 681569 - DNA, 33 bp, Homo sapien
aacatgattgtaaagccctggtccatttccaca

SEQ ID NO: 681570 - DNA, 33 bp, Homo sapien
aacatgattgtaaagctctggtccatttccaca

SEQ ID NO: 681571 - DNA, 33 bp, Homo sapien
tctttccccaccgcgacaagccttcgaggtgct

SEQ ID NO: 681572 - DNA, 33 bp, Homo sapien
tctttccccaccgcgataagccttcgaggtgct

SEQ ID NO: 681573 - DNA, 33 bp, Homo sapien
agattctgcagggttacggtgaattcctacctg

SEQ ID NO: 681574 - DNA, 33 bp, Homo sapien
agattctgcagggttatggtgaattcctacctg

SEQ ID NO: 681575 - DNA, 33 bp, Homo sapien
tcatctggaaaattaaaattactccagtcctat

SEQ ID NO: 681576 - DNA, 33 bp, Homo sapien
tcatctggaaaattaacattactccagtcctat

SEQ ID NO: 681577 - DNA, 33 bp, Homo sapien
gttgaatgccttgaaccgattttctcatctgtg

SEQ ID NO: 681578 - DNA, 33 bp, Homo sapien
gttgaatgccttgaactgattttctcatctgtg

SEQ ID NO: 681579 - DNA, 33 bp, Homo sapien
tttagcagtgcctctggagcccacaatagaaaa

SEQ ID NO: 681580 - DNA, 33 bp, Homo sapien
tttagcagtgcctctgtagcccacaatagaaaa

SEQ ID NO: 681581 - DNA, 33 bp, Homo sapien
aatagtctgcttgcaaagttttataccccattt

SEQ ID NO: 681582 - DNA, 33 bp, Homo sapien
aatagtctgcttgcaacgttttataccccattt

SEQ ID NO: 681583 - DNA, 33 bp, Homo sapien
gaaatatactaaaaaaacagcagatgtcatctc

SEQ ID NO: 681584 - DNA, 33 bp, Homo sapien
gaaatatactaaaaaatcagcagatgtcatctc

SEQ ID NO: 681585 - DNA, 33 bp, Homo sapien
aaattgggcatatataacttttatcattatgtg

SEQ ID NO: 681586 - DNA, 33 bp, Homo sapien
aaattgggcatatatagcttttatcattatgtg

SEQ ID NO: 681587 - DNA, 33 bp, Homo sapien
ggattgcttatggtacacgcattcttcacattg

SEQ ID NO: 681588 - DNA, 33 bp, Homo sapien
ggattgcttatggtacgcgcattcttcacattg

SEQ ID NO: 681589 - DNA, 33 bp, Homo sapien
ccagcagcctccacaacagactccgacaactcc

SEQ ID NO: 681590 - DNA, 33 bp, Homo sapien
ccagcagcctccacaatagactccgacaactcc

SEQ ID NO: 681591 - DNA, 33 bp, Homo sapien
taggtacacaataaaccaatttcagtaacagat

SEQ ID NO: 681592 - DNA, 33 bp, Homo sapien
taggtacacaataaactaatttcagtaacagat

SEQ ID NO: 681593 - DNA, 33 bp, Homo sapien
tagacataggtatttcgcatgggcagaccagag

SEQ ID NO: 681594 - DNA, 33 bp, Homo sapien
tagacataggtatttctcatgggcagaccagag

SEQ ID NO: 681595 - DNA, 33 bp, Homo sapien
aataagaagatgatgaaaagattaatgacaatg

SEQ ID NO: 681596 - DNA, 33 bp, Homo sapien
aataagaagatgatgagaagattaatgacaatg

SEQ ID NO: 681597 - DNA, 33 bp, Homo sapien
ccagtgtcaaaatcacacttccctcatcaacta

SEQ ID NO: 681598 - DNA, 33 bp, Homo sapien
ccagtgtcaaaatcacgcttccctcatcaacta

SEQ ID NO: 681599 - DNA, 33 bp, Homo sapien; identical to SEQ ID NO: 681597

SEQ ID NO: 681600 - DNA, 33 bp, Homo sapien; identical to SEQ ID NO: 681598

SEQ ID NO: 681601 - DNA, 33 bp, Homo sapien
gccagaataaagtcagcttgtgaggtaaaaaga

SEQ ID NO: 681602 - DNA, 33 bp, Homo sapien
gccagaataaagtcagtttgtgaggtaaaaaga

SEQ ID NO: 681603 - DNA, 33 bp, Homo sapien
cccacgctcctatggacatacaaatatatactt

SEQ ID NO: 681604 - DNA, 33 bp, Homo sapien
cccacgctcctatggagatacaaatatatactt

SEQ ID NO: 681605 - DNA, 33 bp, Homo sapien
acaaaggaaatggggacgtgctaactgcctgtc

SEQ ID NO: 681606 - DNA, 33 bp, Homo sapien
acaaaggaaatggggatgtgctaactgcctgtc

SEQ ID NO: 681607 - DNA, 33 bp, Homo sapien
atctcagggatggagaaagagaattcagatcag

SEQ ID NO: 681608 - DNA, 33 bp, Homo sapien
atctcagggatggagagagagaattcagatcag

SEQ ID NO: 681609 - DNA, 33 bp, Homo sapien
ctactgagaaatgttacattaggttatctcccc

SEQ ID NO: 681610 - DNA, 33 bp, Homo sapien
ctactgagaaatgttatattaggttatctcccc

SEQ ID NO: 681611 - DNA, 33 bp, Homo sapien
tttctaccagacaaaacgcatgacgtaacttgg

SEQ ID NO: 681612 - DNA, 33 bp, Homo sapien
tttctaccagacaaaatgcatgacgtaacttgg

SEQ ID NO: 681613 - DNA, 33 bp, Homo sapien
ccatcagccttatcaactgagatccataagtga

SEQ ID NO: 681614 - DNA, 33 bp, Homo sapien
ccatcagccttatcaagtgagatccataagtga

SEQ ID NO: 681615 - DNA, 33 bp, Homo sapien
agagggagaatccataagcccttatcaagagtt

SEQ ID NO: 681616 - DNA, 33 bp, Homo sapien
agagggagaatccataggcccttatcaagagtt

SEQ ID NO: 681617 - DNA, 33 bp, Homo sapien
tatttccacagttagcgctgctctgatttggga

SEQ ID NO: 681618 - DNA, 33 bp, Homo sapien
tatttccacagttagctctgctctgatttggga

SEQ ID NO: 681619 - DNA, 33 bp, Homo sapien
aatgagcgagagagaacaccaagataagctttg

SEQ ID NO: 681620 - DNA, 33 bp, Homo sapien
aatgagcgagagagaataccaagataagctttg

SEQ ID NO: 681621 - DNA, 33 bp, Homo sapien
ctatgctgtttaacacagtggcaaccagacaca

SEQ ID NO: 681622 - DNA, 33 bp, Homo sapien
ctatgctgtttaacacggtggcaaccagacaca

SEQ ID NO: 681623 - DNA, 33 bp, Homo sapien
taaaaaaatgtgtaaaacctaaagtatttggtg

SEQ ID NO: 681624 - DNA, 33 bp, Homo sapien
taaaaaaatgtgtaaaccctaaagtatttggtg

SEQ ID NO: 681625 - DNA, 33 bp, Homo sapien
attcagtgataggtaaagccagtctctgtcccc

SEQ ID NO: 681626 - DNA, 33 bp, Homo sapien
attcagtgataggtaatgccagtctctgtcccc

SEQ ID NO: 681627 - DNA, 33 bp, Homo sapien
catcttttgagctctcaagcctgcaattatcaa

SEQ ID NO: 681628 - DNA, 33 bp, Homo sapien
catcttttgagctctcgagcctgcaattatcaa

SEQ ID NO: 681629 - DNA, 33 bp, Homo sapien
cccccatagcaagacccagggaggaactttgca

SEQ ID NO: 681630 - DNA, 33 bp, Homo sapien
cccccatagcaagacctagggaggaactttgca

SEQ ID NO: 681631 - DNA, 33 bp, Homo sapien
gttaaaaaacatcagacaggaaaatgttgccat

SEQ ID NO: 681632 - DNA, 33 bp, Homo sapien
gttaaaaaacatcagagaggaaaatgttgccat

SEQ ID NO: 681633 - DNA, 33 bp, Homo sapien
tctgggcagcagcacacacagtttttaataatt

SEQ ID NO: 681634 - DNA, 33 bp, Homo sapien
tctgggcagcagcacatacagtttttaataatt

SEQ ID NO: 681635 - DNA, 33 bp, Homo sapien
aacacctgtctccataaggctactgagcactta

SEQ ID NO: 681636 - DNA, 33 bp, Homo sapien
aacacctgtctccatatggctactgagcactta

SEQ ID NO: 681637 - DNA, 33 bp, Homo sapien
tgtgagagcctattgaaataaaggtcacagctg

SEQ ID NO: 681638 - DNA, 33 bp, Homo sapien
tgtgagagcctattgagataaaggtcacagctg

SEQ ID NO: 681639 - DNA, 33 bp, Homo sapien
agagtgaaactccataccaaagtatatatatat

SEQ ID NO: 681640 - DNA, 33 bp, Homo sapien
agagtgaaactccatatcaaagtatatatatat

SEQ ID NO: 681641 - DNA, 33 bp, Homo sapien
cagtattgctggtctacctgggtttacagcagt

SEQ ID NO: 681642 - DNA, 33 bp, Homo sapien
cagtattgctggtctatctgggtttacagcagt

SEQ ID NO: 681643 - DNA, 33 bp, Homo sapien
cacggagcgcaagcatgatctctggaccccagc

SEQ ID NO: 681644 - DNA, 33 bp, Homo sapien
cacggagcgcaagcattatctctggaccccagc

SEQ ID NO: 681645 - DNA, 33 bp, Homo sapien
tattttacaatactaacatcttctgcatgagca

SEQ ID NO: 681646 - DNA, 33 bp, Homo sapien
tattttacaatactaatatcttctgcatgagca

SEQ ID NO: 681647 - DNA, 33 bp, Homo sapien
cactcacagataagaccgggagggaatacctgg

SEQ ID NO: 681648 - DNA, 33 bp, Homo sapien
cactcacagataagactgggagggaatacctgg

SEQ ID NO: 681649 - DNA, 33 bp, Homo sapien
ggacttgagtctaagcacgatgggaagcccctg

SEQ ID NO: 681650 - DNA, 33 bp, Homo sapien
ggacttgagtctaagcgcgatgggaagcccctg

SEQ ID NO: 681651 - DNA, 33 bp, Homo sapien
aggaagaaagataaaactgaagctaaagcatac

SEQ ID NO: 681652 - DNA, 33 bp, Homo sapien
aggaagaaagataaaattgaagctaaagcatac

SEQ ID NO: 681653 - DNA, 33 bp, Homo sapien
tcttaaagattcctagactacattttcaatatc

SEQ ID NO: 681654 - DNA, 33 bp, Homo sapien
tcttaaagattcctagcctacattttcaatatc

SEQ ID NO: 681655 - DNA, 33 bp, Homo sapien
gacacggatacatatggacacacattcatgatg

SEQ ID NO: 681656 - DNA, 33 bp, Homo sapien
gacacggatacatatgtacacacattcatgatg

SEQ ID NO: 681657 - DNA, 33 bp, Homo sapien
taaggagaggatgcccacacatactgtcaagta

SEQ ID NO: 681658 - DNA, 33 bp, Homo sapien
taaggagaggatgcccgcacatactgtcaagta

SEQ ID NO: 681659 - DNA, 33 bp, Homo sapien
cagttccttagcaagacgattcagagacaaata

SEQ ID NO: 681660 - DNA, 33 bp, Homo sapien
cagttccttagcaagatgattcagagacaaata

SEQ ID NO: 681661 - DNA, 33 bp, Homo sapien
agatagataattgctcactatagcccagtctct

SEQ ID NO: 681662 - DNA, 33 bp, Homo sapien
agatagataattgctcgctatagcccagtctct

SEQ ID NO: 681663 - DNA, 33 bp, Homo sapien
aaatagtacagtaaaaatgcagtctaaaggatt

SEQ ID NO: 681664 - DNA, 33 bp, Homo sapien
aaatagtacagtaaaagtgcagtctaaaggatt

SEQ ID NO: 681665 - DNA, 33 bp, Homo sapien
gaggaataggaaacacagtgccaaagggtcatg

SEQ ID NO: 681666 - DNA, 33 bp, Homo sapien
gaggaataggaaacacggtgccaaagggtcatg

SEQ ID NO: 681667 - DNA, 33 bp, Homo sapien
ctcctgttaggctcagccagtgagaagccctgg

SEQ ID NO: 681668 - DNA, 33 bp, Homo sapien
ctcctgttaggctcagtcagtgagaagccctgg

SEQ ID NO: 681669 - DNA, 33 bp, Homo sapien
gaggtagaagcatctccaaaaacaggaagcagc

SEQ ID NO: 681670 - DNA, 33 bp, Homo sapien
gaggtagaagcatctctaaaaacaggaagcagc

SEQ ID NO: 681671 - DNA, 33 bp, Homo sapien
aaacaatcaaataagcaacagttctgatcccaa

SEQ ID NO: 681672 - DNA, 33 bp, Homo sapien
aaacaatcaaataagcgacagttctgatcccaa

SEQ ID NO: 681673 - DNA, 33 bp, Homo sapien
tgcccgaggacacataacaaatcacggtgagag

SEQ ID NO: 681674 - DNA, 33 bp, Homo sapien
tgcccgaggacacatagcaaatcacggtgagag

SEQ ID NO: 681675 - DNA, 33 bp, Homo sapien
ccccttgtgccacacaaattctgttgccagaga

SEQ ID NO: 681676 - DNA, 33 bp, Homo sapien
ccccttgtgccacacatattctgttgccagaga

SEQ ID NO: 681677 - DNA, 33 bp, Homo sapien
tgcaaacttctaatcacggtctacaaacctcat

SEQ ID NO: 681678 - DNA, 33 bp, Homo sapien
tgcaaacttctaatcatggtctacaaacctcat

SEQ ID NO: 681679 - DNA, 33 bp, Homo sapien
atagggattttaaaaaactactgcaatttaaaa

SEQ ID NO: 681680 - DNA, 33 bp, Homo sapien
atagggattttaaaaacctactgcaatttaaaa

SEQ ID NO: 681681 - DNA, 33 bp, Homo sapien
cgtctggcttacaagagtagtttttatcttaaa

SEQ ID NO: 681682 - DNA, 33 bp, Homo sapien
cgtctggcttacaagattagtttttatcttaaa

SEQ ID NO: 681683 - DNA, 33 bp, Homo sapien
cctatcttttgagaaacgcacagaaaacagata

SEQ ID NO: 681684 - DNA, 33 bp, Homo sapien
cctatcttttgagaaatgcacagaaaacagata

SEQ ID NO: 681685 - DNA, 33 bp, Homo sapien
attgactgatgcttcaaccttgttggttttccc

SEQ ID NO: 681686 - DNA, 33 bp, Homo sapien
attgactgatgcttcagccttgttggttttccc

SEQ ID NO: 681687 - DNA, 33 bp, Homo sapien
attagatgcaaattacgacatgcttgagcttca

SEQ ID NO: 681688 - DNA, 33 bp, Homo sapien
attagatgcaaattactacatgcttgagcttca

SEQ ID NO: 681689 - DNA, 33 bp, Homo sapien
tggaagttcttttcaacgaagtccaaaggtggg

SEQ ID NO: 681690 - DNA, 33 bp, Homo sapien
tggaagttcttttcaatgaagtccaaaggtggg

SEQ ID NO: 681691 - DNA, 33 bp, Homo sapien
ccagctggagactgtcactgagggcacctttgc

SEQ ID NO: 681692 - DNA, 33 bp, Homo sapien
ccagctggagactgtcgctgagggcacctttgc

SEQ ID NO: 681693 - DNA, 33 bp, Homo sapien
ccgaggagatttccaacgtcatgtggacagaag

SEQ ID NO: 681694 - DNA, 33 bp, Homo sapien
ccgaggagatttccaatgtcatgtggacagaag

SEQ ID NO: 681695 - DNA, 33 bp, Homo sapien
aaaaacagattttctagcatgtactcacaggtc

SEQ ID NO: 681696 - DNA, 33 bp, Homo sapien
aaaaacagattttctatcatgtactcacaggtc

SEQ ID NO: 681697 - DNA, 33 bp, Homo sapien
ttaggaccactgcaagccatgtgaataagtgct

SEQ ID NO: 681698 - DNA, 33 bp, Homo sapien
ttaggaccactgcaaggcatgtgaataagtgct

SEQ ID NO: 681699 - DNA, 33 bp, Homo sapien
agaaagcaatggacctaagatttgaactcatgg

SEQ ID NO: 681700 - DNA, 33 bp, Homo sapien
agaaagcaatggacctcagatttgaactcatgg

SEQ ID NO: 681701 - DNA, 33 bp, Homo sapien
ttttgttcatccctcccgccaggaaaacagggc

SEQ ID NO: 681702 - DNA, 33 bp, Homo sapien
ttttgttcatccctcctgccaggaaaacagggc

SEQ ID NO: 681703 - DNA, 33 bp, Homo sapien
cctcataacatcctcaccaggaaggtagtagtg

SEQ ID NO: 681704 - DNA, 33 bp, Homo sapien
cctcataacatcctcatcaggaaggtagtagtg

SEQ ID NO: 681705 - DNA, 33 bp, Homo sapien
taatccatttggtgtacagaatcaacaataaat

SEQ ID NO: 681706 - DNA, 33 bp, Homo sapien
taatccatttggtgtatagaatcaacaataaat

SEQ ID NO: 681707 - DNA, 33 bp, Homo sapien
tctccctgcagaacaaccgcctcagacagctcc

SEQ ID NO: 681708 - DNA, 33 bp, Homo sapien
tctccctgcagaacaatcgcctcagacagctcc

SEQ ID NO: 681709 - DNA, 33 bp, Homo sapien
aggacctggacgggaacgtcttccgcatgttgg

SEQ ID NO: 681710 - DNA, 33 bp, Homo sapien
aggacctggacgggaatgtcttccgcatgttgg

SEQ ID NO: 681711 - DNA, 33 bp, Homo sapien
acctggccagcccaggacaatcttgagtttccc

SEQ ID NO: 681712 - DNA, 33 bp, Homo sapien
acctggccagcccagggcaatcttgagtttccc

SEQ ID NO: 681713 - DNA, 33 bp, Homo sapien
tttatgtggctttctacgagtctgcactcccca

SEQ ID NO: 681714 - DNA, 33 bp, Homo sapien
tttatgtggctttctaggagtctgcactcccca

SEQ ID NO: 681715 - DNA, 33 bp, Homo sapien
gcttcgaggctaattacgcgtttgctcgtgagt

SEQ ID NO: 681716 - DNA, 33 bp, Homo sapien
gcttcgaggctaattatgcgtttgctcgtgagt

SEQ ID NO: 681717 - DNA, 33 bp, Homo sapien
gaaatccctgaacccacgcagcctggtagttga

SEQ ID NO: 681718 - DNA, 33 bp, Homo sapien
gaaatccctgaacccatgcagcctggtagttga

SEQ ID NO: 681719 - DNA, 33 bp, Homo sapien
gtgttgacccctgtaagctcaacaacaaggctg

SEQ ID NO: 681720 - DNA, 33 bp, Homo sapien
gtgttgacccctgtaatctcaacaacaaggctg

SEQ ID NO: 681721 - DNA, 33 bp, Homo sapien
tcctgaccacgaaggaatcactgctgcttcaga

SEQ ID NO: 681722 - DNA, 33 bp, Homo sapien
tcctgaccacgaaggagtcactgctgcttcaga

SEQ ID NO: 681723 - DNA, 33 bp, Homo sapien
gggttcggggccagggaaagttctggatagatt

SEQ ID NO: 681724 - DNA, 33 bp, Homo sapien
gggttcggggccagggtaagttctggatagatt

SEQ ID NO: 681725 - DNA, 33 bp, Homo sapien
tcaacagtgtgagaccaccgtcatccttaccag

SEQ ID NO: 681726 - DNA, 33 bp, Homo sapien
tcaacagtgtgagaccgccgtcatccttaccag

SEQ ID NO: 681727 - DNA, 33 bp, Homo sapien
gccagaagacggtacgaaacatcagtcatccca

SEQ ID NO: 681728 - DNA, 33 bp, Homo sapien
gccagaagacggtacgtaacatcagtcatccca

SEQ ID NO: 681729 - DNA, 33 bp, Homo sapien
tagagaaagatctagaaagacacatacaaaatt

SEQ ID NO: 681730 - DNA, 33 bp, Homo sapien
tagagaaagatctagagagacacatacaaaatt

SEQ ID NO: 681731 - DNA, 33 bp, Homo sapien
tgaattacatccggtaagtaattagaacaacta

SEQ ID NO: 681732 - DNA, 33 bp, Homo sapien
tgaattacatccggtaggtaattagaacaacta

SEQ ID NO: 681733 - DNA, 33 bp, Homo sapien
cttcagtcaggcagaacattcatatccgagctt

SEQ ID NO: 681734 - DNA, 33 bp, Homo sapien
cttcagtcaggcagaatattcatatccgagctt

SEQ ID NO: 681735 - DNA, 33 bp, Homo sapien
atgtaatcactggaagaactacatatagtgcca

SEQ ID NO: 681736 - DNA, 33 bp, Homo sapien
atgtaatcactggaaggactacatatagtgcca

SEQ ID NO: 681737 - DNA, 33 bp, Homo sapien
gagaattctggcgaaaagattgtgcctctgcac

SEQ ID NO: 681738 - DNA, 33 bp, Homo sapien
gagaattctggcgaaaggattgtgcctctgcac

SEQ ID NO: 681739 - DNA, 33 bp, Homo sapien
gaggccacgcagtgtaaaatgagtgtcttttca

SEQ ID NO: 681740 - DNA, 33 bp, Homo sapien
gaggccacgcagtgtagaatgagtgtcttttca

SEQ ID NO: 681741 - DNA, 33 bp, Homo sapien
agagctgagaacaatgcatggcgtaaagtgata

SEQ ID NO: 681742 - DNA, 33 bp, Homo sapien
agagctgagaacaatgtatggcgtaaagtgata

SEQ ID NO: 681743 - DNA, 33 bp, Homo sapien
aaaggaaaagttaaaaccatgctgagatatctt

SEQ ID NO: 681744 - DNA, 33 bp, Homo sapien
aaaggaaaagttaaaatcatgctgagatatctt

SEQ ID NO: 681745 - DNA, 33 bp, Homo sapien
atgactttataagaaaccttgatacatgcttgg

SEQ ID NO: 681746 - DNA, 33 bp, Homo sapien
atgactttataagaaatcttgatacatgcttgg

SEQ ID NO: 681747 - DNA, 33 bp, Homo sapien
aaataagagatttttaagtattcaaagtatata

SEQ ID NO: 681748 - DNA, 33 bp, Homo sapien
aaataagagatttttacgtattcaaagtatata

SEQ ID NO: 681749 - DNA, 33 bp, Homo sapien
aatttaggaatcttgcaaagttgtaaagcaagg

SEQ ID NO: 681750 - DNA, 33 bp, Homo sapien
aatttaggaatcttgcgaagttgtaaagcaagg

SEQ ID NO: 681751 - DNA, 33 bp, Homo sapien
gggccgcaccagagatgagaaaggattggggcg

SEQ ID NO: 681752 - DNA, 33 bp, Homo sapien
gggccgcaccagagattagaaaggattggggcg

SEQ ID NO: 681753 - DNA, 33 bp, Homo sapien
gaagctaattggcctacggagagagtaaatctg

SEQ ID NO: 681754 - DNA, 33 bp, Homo sapien
gaagctaattggcctatggagagagtaaatctg

SEQ ID NO: 681755 - DNA, 33 bp, Homo sapien
agctacctattatctaacatgatgaacttcttt

SEQ ID NO: 681756 - DNA, 33 bp, Homo sapien
agctacctattatctatcatgatgaacttcttt

SEQ ID NO: 681757 - DNA, 33 bp, Homo sapien
tctatgtaaactcagacagaagcggctctgctt

SEQ ID NO: 681758 - DNA, 33 bp, Homo sapien
tctatgtaaactcagatagaagcggctctgctt

SEQ ID NO: 681759 - DNA, 33 bp, Homo sapien
aggacactagcagtcaaatccagaagcaggaca

SEQ ID NO: 681760 - DNA, 33 bp, Homo sapien
aggacactagcagtcacatccagaagcaggaca

SEQ ID NO: 681761 - DNA, 33 bp, Homo sapien
aagacatggtctttaccgaaggagcaggattga

SEQ ID NO: 681762 - DNA, 33 bp, Homo sapien
aagacatggtctttactgaaggagcaggattga

SEQ ID NO: 681763 - DNA, 33 bp, Homo sapien
tgaacttttctgaagaatcattatcaagaaaat

SEQ ID NO: 681764 - DNA, 33 bp, Homo sapien
tgaacttttctgaagagtcattatcaagaaaat

SEQ ID NO: 681765 - DNA, 33 bp, Homo sapien
attcatggactccaaaaataccatgctctgtat

SEQ ID NO: 681766 - DNA, 33 bp, Homo sapien
attcatggactccaaacataccatgctctgtat

SEQ ID NO: 681767 - DNA, 33 bp, Homo sapien
ggaatgacatttgatccgaggaaatgaacccct

SEQ ID NO: 681768 - DNA, 33 bp, Homo sapien
ggaatgacatttgatctgaggaaatgaacccct

SEQ ID NO: 681769 - DNA, 33 bp, Homo sapien
ttggtatgcattcgacacgtgcattcttcagcc

SEQ ID NO: 681770 - DNA, 33 bp, Homo sapien
ttggtatgcattcgacgcgtgcattcttcagcc

SEQ ID NO: 681771 - DNA, 33 bp, Homo sapien
gtgttgagtgtctgccaattttccaggcacatg

SEQ ID NO: 681772 - DNA, 33 bp, Homo sapien
gtgttgagtgtctgccgattttccaggcacatg

SEQ ID NO: 681773 - DNA, 33 bp, Homo sapien
attagtaagaatccataaagtatttgcttgtaa

SEQ ID NO: 681774 - DNA, 33 bp, Homo sapien
attagtaagaatccatgaagtatttgcttgtaa

SEQ ID NO: 681775 - DNA, 33 bp, Homo sapien
tgttctctgtccttgacatttcctgtaaactag

SEQ ID NO: 681776 - DNA, 33 bp, Homo sapien
tgttctctgtccttgagatttcctgtaaactag

SEQ ID NO: 681777 - DNA, 33 bp, Homo sapien
tacctgaaggccatgaagaattgagacaaaatt

SEQ ID NO: 681778 - DNA, 33 bp, Homo sapien
tacctgaaggccatgacgaattgagacaaaatt

SEQ ID NO: 681779 - DNA, 33 bp, Homo sapien
agtggttttaggaagccgcaaactcgcagttgg

SEQ ID NO: 681780 - DNA, 33 bp, Homo sapien
agtggttttaggaagctgcaaactcgcagttgg

SEQ ID NO: 681781 - DNA, 33 bp, Homo sapien
ggacacccacaataaacagaaatgcattattat

SEQ ID NO: 681782 - DNA, 33 bp, Homo sapien
ggacacccacaataaagagaaatgcattattat

SEQ ID NO: 681783 - DNA, 33 bp, Homo sapien
gaagtctccacaaaaaaatctctaaactacagg

SEQ ID NO: 681784 - DNA, 33 bp, Homo sapien
gaagtctccacaaaaacatctctaaactacagg

SEQ ID NO: 681785 - DNA, 33 bp, Homo sapien
ttccaatcatggcctgaactttctggagatgag

SEQ ID NO: 681786 - DNA, 33 bp, Homo sapien
ttccaatcatggcctggactttctggagatgag

SEQ ID NO: 681787 - DNA, 33 bp, Homo sapien
ttgttgtttaagccagaaacagtattttgttat

SEQ ID NO: 681788 - DNA, 33 bp, Homo sapien
ttgttgtttaagccaggaacagtattttgttat

SEQ ID NO: 681789 - DNA, 33 bp, Homo sapien
tcctgttgggtttgtccaatgggaggcgctggc

SEQ ID NO: 681790 - DNA, 33 bp, Homo sapien
tcctgttgggtttgtctaatgggaggcgctggc

SEQ ID NO: 681791 - DNA, 33 bp, Homo sapien
tgctgcaaacataaaaacctttctcttcaaagc

SEQ ID NO: 681792 - DNA, 33 bp, Homo sapien
tgctgcaaacataaaatcctttctcttcaaagc

SEQ ID NO: 681793 - DNA, 33 bp, Homo sapien
agattgaaaggttgacacttgtccaggtcacac

SEQ ID NO: 681794 - DNA, 33 bp, Homo sapien
agattgaaaggttgacgcttgtccaggtcacac

SEQ ID NO: 681795 - DNA, 33 bp, Homo sapien
aaacaacaccaaatcactattagcagttacggt

SEQ ID NO: 681796 - DNA, 33 bp, Homo sapien
aaacaacaccaaatcattattagcagttacggt

SEQ ID NO: 681797 - DNA, 33 bp, Homo sapien
tgcagatttctgtacaactccatagcagacggc

SEQ ID NO: 681798 - DNA, 33 bp, Homo sapien
tgcagatttctgtacatctccatagcagacggc

SEQ ID NO: 681799 - DNA, 33 bp, Homo sapien
tcttggggcatggaccaactgttttgaatactt

SEQ ID NO: 681800 - DNA, 33 bp, Homo sapien
tcttggggcatggaccgactgttttgaatactt

SEQ ID NO: 681801 - DNA, 33 bp, Homo sapien
ggacgtaaggccctgacatcaatcttatgctct

SEQ ID NO: 681802 - DNA, 33 bp, Homo sapien
ggacgtaaggccctgatatcaatcttatgctct

SEQ ID NO: 681803 - DNA, 33 bp, Homo sapien
gaaatatgtgtacgtgcatttggttgtatgtgt

SEQ ID NO: 681804 - DNA, 33 bp, Homo sapien
gaaatatgtgtacgtggatttggttgtatgtgt

SEQ ID NO: 681805 - DNA, 33 bp, Homo sapien
agtgagttgggatgaaataggaaggtttaaggt

SEQ ID NO: 681806 - DNA, 33 bp, Homo sapien
agtgagttgggatgaattaggaaggtttaaggt

SEQ ID NO: 681807 - DNA, 33 bp, Homo sapien
ttgtcagtgatagaaccggattcagacctgtct

SEQ ID NO: 681808 - DNA, 33 bp, Homo sapien
ttgtcagtgatagaactggattcagacctgtct

SEQ ID NO: 681809 - DNA, 33 bp, Homo sapien
tctcttttttaacggcacgtctcactttctgct

SEQ ID NO: 681810 - DNA, 33 bp, Homo sapien
tctcttttttaacggctcgtctcactttctgct

SEQ ID NO: 681811 - DNA, 33 bp, Homo sapien
tccaaaggctggatcacgtagctgggcatgacg

SEQ ID NO: 681812 - DNA, 33 bp, Homo sapien
tccaaaggctggatcatgtagctgggcatgacg

SEQ ID NO: 681813 - DNA, 33 bp, Homo sapien
attaccaccacctaacacggtgctccagagcct

SEQ ID NO: 681814 - DNA, 33 bp, Homo sapien
attaccaccacctaacgcggtgctccagagcct

SEQ ID NO: 681815 - DNA, 33 bp, Homo sapien
ctccccacatgatgctcaagcgggttcccacat

SEQ ID NO: 681816 - DNA, 33 bp, Homo sapien
ctccccacatgatgctgaagcgggttcccacat

SEQ ID NO: 681817 - DNA, 33 bp, Homo sapien
ctgttgcctgtggaaccgtcccaagacactagc

SEQ ID NO: 681818 - DNA, 33 bp, Homo sapien
ctgttgcctgtggaactgtcccaagacactagc

SEQ ID NO: 681819 - DNA, 33 bp, Homo sapien
ggctacactgctgaaaacaggaaatgaggttct

SEQ ID NO: 681820 - DNA, 33 bp, Homo sapien
ggctacactgctgaaatcaggaaatgaggttct

SEQ ID NO: 681821 - DNA, 33 bp, Homo sapien
agtataaacttgtgcaaatcactagtattttca

SEQ ID NO: 681822 - DNA, 33 bp, Homo sapien
agtataaacttgtgcagatcactagtattttca

SEQ ID NO: 681823 - DNA, 33 bp, Homo sapien
gcaaaataacgtactgccaagagttcagtttaa

SEQ ID NO: 681824 - DNA, 33 bp, Homo sapien
gcaaaataacgtactgtcaagagttcagtttaa

SEQ ID NO: 681825 - DNA, 33 bp, Homo sapien
aaatgaactgcaaatgccaaagtctgcccttgc

SEQ ID NO: 681826 - DNA, 33 bp, Homo sapien
aaatgaactgcaaatggcaaagtctgcccttgc

SEQ ID NO: 681827 - DNA, 33 bp, Homo sapien
acacacccttgagtagaaaatgatttgtacctt

SEQ ID NO: 681828 - DNA, 33 bp, Homo sapien
acacacccttgagtagtaaatgatttgtacctt

SEQ ID NO: 681829 - DNA, 33 bp, Homo sapien
tatgagagcaatagcacgttatgattaagagca

SEQ ID NO: 681830 - DNA, 33 bp, Homo sapien
tatgagagcaatagcatgttatgattaagagca

SEQ ID NO: 681831 - DNA, 33 bp, Homo sapien
gcagattagggattgaatatttagtagactttg

SEQ ID NO: 681832 - DNA, 33 bp, Homo sapien
gcagattagggattgagtatttagtagactttg

SEQ ID NO: 681833 - DNA, 33 bp, Homo sapien
ccatcacgtataagaaagtacagcaataagata

SEQ ID NO: 681834 - DNA, 33 bp, Homo sapien
ccatcacgtataagaaggtacagcaataagata

SEQ ID NO: 681835 - DNA, 33 bp, Homo sapien
ttcagcctctgtgctaaatgttataaaggccca

SEQ ID NO: 681836 - DNA, 33 bp, Homo sapien
ttcagcctctgtgctagatgttataaaggccca

SEQ ID NO: 681837 - DNA, 33 bp, Homo sapien
ggagactctgccgtgaagtagtcatgcatctgt

SEQ ID NO: 681838 - DNA, 33 bp, Homo sapien
ggagactctgccgtgaggtagtcatgcatctgt

SEQ ID NO: 681839 - DNA, 33 bp, Homo sapien
ctaaaaggcttcattaataacaagttgcttcaa

SEQ ID NO: 681840 - DNA, 33 bp, Homo sapien
ctaaaaggcttcattagtaacaagttgcttcaa

SEQ ID NO: 681841 - DNA, 33 bp, Homo sapien
tgtgacagtggcacacacttacttagctccagg

SEQ ID NO: 681842 - DNA, 33 bp, Homo sapien
tgtgacagtggcacacgcttacttagctccagg

SEQ ID NO: 681843 - DNA, 33 bp, Homo sapien
tccagggacatatttaactaaatttagcacacg

SEQ ID NO: 681844 - DNA, 33 bp, Homo sapien
tccagggacatatttacctaaatttagcacacg

SEQ ID NO: 681845 - DNA, 33 bp, Homo sapien
ctcaaagcgttgccaactgcttcacagcttgcc

SEQ ID NO: 681846 - DNA, 33 bp, Homo sapien
ctcaaagcgttgccaattgcttcacagcttgcc

SEQ ID NO: 681847 - DNA, 33 bp, Homo sapien
tccacatcaatggaaacggttcccacatacccc

SEQ ID NO: 681848 - DNA, 33 bp, Homo sapien
tccacatcaatggaaatggttcccacatacccc

SEQ ID NO: 681849 - DNA, 33 bp, Homo sapien
tgctaaatgttggttcgcggtaccctcaactat

SEQ ID NO: 681850 - DNA, 33 bp, Homo sapien
tgctaaatgttggttctcggtaccctcaactat

SEQ ID NO: 681851 - DNA, 33 bp, Homo sapien
taaactaagtcctaacgacacacgagcattaga

SEQ ID NO: 681852 - DNA, 33 bp, Homo sapien
taaactaagtcctaactacacacgagcattaga

SEQ ID NO: 681853 - DNA, 33 bp, Homo sapien
agcccatgtggatatcaagcattttggatggaa

SEQ ID NO: 681854 - DNA, 33 bp, Homo sapien
agcccatgtggatatcgagcattttggatggaa

SEQ ID NO: 681855 - DNA, 33 bp, Homo sapien
gaatttctgcatctggcccaagaatgtcctcca

SEQ ID NO: 681856 - DNA, 33 bp, Homo sapien
gaatttctgcatctggtccaagaatgtcctcca

SEQ ID NO: 681857 - DNA, 33 bp, Homo sapien
aagtatttccttaggaactgcattagtaaaggc

SEQ ID NO: 681858 - DNA, 33 bp, Homo sapien
aagtatttccttaggacctgcattagtaaaggc

SEQ ID NO: 681859 - DNA, 33 bp, Homo sapien
tgcttttctcctaaatgagcattcaccatgatg

SEQ ID NO: 681860 - DNA, 33 bp, Homo sapien
tgcttttctcctaaattagcattcaccatgatg

SEQ ID NO: 681861 - DNA, 33 bp, Homo sapien
atccaatttaaagcaacgtaaaagacgtagaac

SEQ ID NO: 681862 - DNA, 33 bp, Homo sapien
atccaatttaaagcaatgtaaaagacgtagaac

SEQ ID NO: 681863 - DNA, 33 bp, Homo sapien
agatcactcgggaccaccttgtatattggctac

SEQ ID NO: 681864 - DNA, 33 bp, Homo sapien
agatcactcgggaccatcttgtatattggctac

SEQ ID NO: 681865 - DNA, 33 bp, Homo sapien
cacagaacccaacacaagcagtaagttaaaatc

SEQ ID NO: 681866 - DNA, 33 bp, Homo sapien
cacagaacccaacacaggcagtaagttaaaatc

SEQ ID NO: 681867 - DNA, 33 bp, Homo sapien
ttatcactcatagagaatcatgagacatattag

SEQ ID NO: 681868 - DNA, 33 bp, Homo sapien
ttatcactcatagagattcatgagacatattag

SEQ ID NO: 681869 - DNA, 33 bp, Homo sapien
ttccatattcgcttcacatattttttttaagac

SEQ ID NO: 681870 - DNA, 33 bp, Homo sapien
ttccatattcgcttcagatattttttttaagac

SEQ ID NO: 681871 - DNA, 33 bp, Homo sapien
ttccacatttttaacagtaagcccattttatgc

SEQ ID NO: 681872 - DNA, 33 bp, Homo sapien
ttccacatttttaacattaagcccattttatgc

SEQ ID NO: 681873 - DNA, 33 bp, Homo sapien
agctttgttcatgacacacaatgaaattttcaa

SEQ ID NO: 681874 - DNA, 33 bp, Homo sapien
agctttgttcatgacatacaatgaaattttcaa

SEQ ID NO: 681875 - DNA, 33 bp, Homo sapien
ctggaaatgaggaaaccccagctctgcctctga

SEQ ID NO: 681876 - DNA, 33 bp, Homo sapien
ctggaaatgaggaaactccagctctgcctctga

SEQ ID NO: 681877 - DNA, 33 bp, Homo sapien
aatccattcttaatgacgtcttccgtgttcggt

SEQ ID NO: 681878 - DNA, 33 bp, Homo sapien
aatccattcttaatgatgtcttccgtgttcggt

SEQ ID NO: 681879 - DNA, 33 bp, Homo sapien
taaatgtagtgtacccaaagtgtcttgtgttta

SEQ ID NO: 681880 - DNA, 33 bp, Homo sapien
taaatgtagtgtacccgaagtgtcttgtgttta

SEQ ID NO: 681881 - DNA, 33 bp, Homo sapien
tggcaaggactatcgcagcaatgaccactacag

SEQ ID NO: 681882 - DNA, 33 bp, Homo sapien
tggcaaggactatcgcggcaatgaccactacag

SEQ ID NO: 681883 - DNA, 33 bp, Homo sapien
ggccagatcagctgccaagatgccctggaggtc

SEQ ID NO: 681884 - DNA, 33 bp, Homo sapien
ggccagatcagctgccgagatgccctggaggtc

SEQ ID NO: 681885 - DNA, 33 bp, Homo sapien
atccacatgggccgccagactttgccccactct

SEQ ID NO: 681886 - DNA, 33 bp, Homo sapien
atccacatgggccgccggactttgccccactct

SEQ ID NO: 681887 - DNA, 33 bp, Homo sapien
ttcactttgtcccagcaaggctattgtttttaa

SEQ ID NO: 681888 - DNA, 33 bp, Homo sapien
ttcactttgtcccagctaggctattgtttttaa

SEQ ID NO: 681889 - DNA, 33 bp, Homo sapien
ctgtgagagcctagaacgtgtacactggagaaa

SEQ ID NO: 681890 - DNA, 33 bp, Homo sapien
ctgtgagagcctagaatgtgtacactggagaaa

SEQ ID NO: 681891 - DNA, 33 bp, Homo sapien
ctatgtgctttccttacatgatgtgtttaatca

SEQ ID NO: 681892 - DNA, 33 bp, Homo sapien
ctatgtgctttccttatatgatgtgtttaatca

SEQ ID NO: 681893 - DNA, 33 bp, Homo sapien
attacttggaaactacactactgcatacaaaca

SEQ ID NO: 681894 - DNA, 33 bp, Homo sapien
attacttggaaactactctactgcatacaaaca

SEQ ID NO: 681895 - DNA, 33 bp, Homo sapien
aggcccaggaaggatacgatggataaaagggca

SEQ ID NO: 681896 - DNA, 33 bp, Homo sapien
aggcccaggaaggatatgatggataaaagggca

SEQ ID NO: 681897 - DNA, 33 bp, Homo sapien
attactgacaaatcgacacgtgctgctataaga

SEQ ID NO: 681898 - DNA, 33 bp, Homo sapien
attactgacaaatcgagacgtgctgctataaga

SEQ ID NO: 681899 - DNA, 33 bp, Homo sapien
aagcacaccgtaaaaaagagattaaagcgcatg

SEQ ID NO: 681900 - DNA, 33 bp, Homo sapien
aagcacaccgtaaaaaggagattaaagcgcatg

SEQ ID NO: 681901 - DNA, 33 bp, Homo sapien
gagttaagctgtctaaacctcgctttagctatt

SEQ ID NO: 681902 - DNA, 33 bp, Homo sapien
gagttaagctgtctaaccctcgctttagctatt

SEQ ID NO: 681903 - DNA, 33 bp, Homo sapien
taagaatgtattggaacgtactgagttaagaat

SEQ ID NO: 681904 - DNA, 33 bp, Homo sapien
taagaatgtattggaatgtactgagttaagaat

SEQ ID NO: 681905 - DNA, 33 bp, Homo sapien
taggaattcatgcaataactattagataagtag

SEQ ID NO: 681906 - DNA, 33 bp, Homo sapien
taggaattcatgcaatgactattagataagtag

SEQ ID NO: 681907 - DNA, 33 bp, Homo sapien
ggtcctctggagcttaacaaatcacagttcctc

SEQ ID NO: 681908 - DNA, 33 bp, Homo sapien
ggtcctctggagcttaccaaatcacagttcctc

SEQ ID NO: 681909 - DNA, 33 bp, Homo sapien
gcctcctgtgaggatcaaatcagatacagttta

SEQ ID NO: 681910 - DNA, 33 bp, Homo sapien
gcctcctgtgaggatcgaatcagatacagttta

SEQ ID NO: 681911 - DNA, 33 bp, Homo sapien
gcattgtcttagaaacaggaaatcgctggtgca

SEQ ID NO: 681912 - DNA, 33 bp, Homo sapien
gcattgtcttagaaacgggaaatcgctggtgca

SEQ ID NO: 681913 - DNA, 33 bp, Homo sapien
aatgcagatgaatgaacaacgaatcaattgatt

SEQ ID NO: 681914 - DNA, 33 bp, Homo sapien
aatgcagatgaatgaataacgaatcaattgatt

SEQ ID NO: 681915 - DNA, 33 bp, Homo sapien
gttcccaggagatcacagatgcattccttcagc

SEQ ID NO: 681916 - DNA, 33 bp, Homo sapien
gttcccaggagatcacggatgcattccttcagc

SEQ ID NO: 681917 - DNA, 33 bp, Homo sapien
catgtgcccttccaacaaagattagatgtcttt

SEQ ID NO: 681918 - DNA, 33 bp, Homo sapien
catgtgcccttccaaccaagattagatgtcttt

SEQ ID NO: 681919 - DNA, 33 bp, Homo sapien
cagtgagcttcctaaggacagaaattctgctta

SEQ ID NO: 681920 - DNA, 33 bp, Homo sapien
cagtgagcttcctaagtacagaaattctgctta

SEQ ID NO: 681921 - DNA, 33 bp, Homo sapien
gtctctgctccctccacacgccttaagcttccc

SEQ ID NO: 681922 - DNA, 33 bp, Homo sapien
gtctctgctccctccatacgccttaagcttccc

SEQ ID NO: 681923 - DNA, 33 bp, Homo sapien
gctaatgttctaatgggaaacagacattcgaca

SEQ ID NO: 681924 - DNA, 33 bp, Homo sapien
gctaatgttctaatggtaaacagacattcgaca

SEQ ID NO: 681925 - DNA, 33 bp, Homo sapien
caccaccagagtatgacctccttgagggaaagg

SEQ ID NO: 681926 - DNA, 33 bp, Homo sapien
caccaccagagtatgatctccttgagggaaagg

SEQ ID NO: 681927 - DNA, 33 bp, Homo sapien
cctctacttggagtacactctatgtaaacaaag

SEQ ID NO: 681928 - DNA, 33 bp, Homo sapien
cctctacttggagtacgctctatgtaaacaaag

SEQ ID NO: 681929 - DNA, 33 bp, Homo sapien
ccatagggcatacaccaactaaatgactttgta

SEQ ID NO: 681930 - DNA, 33 bp, Homo sapien
ccatagggcatacaccgactaaatgactttgta

SEQ ID NO: 681931 - DNA, 33 bp, Homo sapien
actgaaggccacaaaaactgattccggctgata

SEQ ID NO: 681932 - DNA, 33 bp, Homo sapien
actgaaggccacaaaacctgattccggctgata

SEQ ID NO: 681933 - DNA, 33 bp, Homo sapien
cttaatctttcaggaactgggagaactttgcta

SEQ ID NO: 681934 - DNA, 33 bp, Homo sapien
cttaatctttcaggaattgggagaactttgcta

SEQ ID NO: 681935 - DNA, 33 bp, Homo sapien
catcaccatgcattccacacgaacctgtgttaa

SEQ ID NO: 681936 - DNA, 33 bp, Homo sapien
catcaccatgcattccgcacgaacctgtgttaa

SEQ ID NO: 681937 - DNA, 33 bp, Homo sapien
gacatagggcttggcaaacagtgagtatttaat

SEQ ID NO: 681938 - DNA, 33 bp, Homo sapien
gacatagggcttggcagacagtgagtatttaat

SEQ ID NO: 681939 - DNA, 33 bp, Homo sapien
gtagctacccaacttcacagactctcagctcca

SEQ ID NO: 681940 - DNA, 33 bp, Homo sapien
gtagctacccaacttcgcagactctcagctcca

SEQ ID NO: 681941 - DNA, 33 bp, Homo sapien
gtgcaggctccacatgacaagagaggaggaaaa

SEQ ID NO: 681942 - DNA, 33 bp, Homo sapien
gtgcaggctccacatggcaagagaggaggaaaa

SEQ ID NO: 681943 - DNA, 33 bp, Homo sapien
acatgaaatttggagaaaaaaatatgcaaacta

SEQ ID NO: 681944 - DNA, 33 bp, Homo sapien
acatgaaatttggagacaaaaatatgcaaacta

SEQ ID NO: 681945 - DNA, 33 bp, Homo sapien
ttgaagattaattcacacatgaagtttgctttt

SEQ ID NO: 681946 - DNA, 33 bp, Homo sapien
ttgaagattaattcacgcatgaagtttgctttt

SEQ ID NO: 681947 - DNA, 33 bp, Homo sapien
taaattcagagcctacagtaatccagtacgacc

SEQ ID NO: 681948 - DNA, 33 bp, Homo sapien
taaattcagagcctaccgtaatccagtacgacc

SEQ ID NO: 681949 - DNA, 33 bp, Homo sapien
atgcttttggacatcccgaaactcctccagctg

SEQ ID NO: 681950 - DNA, 33 bp, Homo sapien
atgcttttggacatccggaaactcctccagctg

SEQ ID NO: 681951 - DNA, 33 bp, Homo sapien
cactgttctggacataaccttttagagacacgg

SEQ ID NO: 681952 - DNA, 33 bp, Homo sapien
cactgttctggacatagccttttagagacacgg

SEQ ID NO: 681953 - DNA, 33 bp, Homo sapien
taaaaattgaattgcactgaagtaaaccttcac

SEQ ID NO: 681954 - DNA, 33 bp, Homo sapien
taaaaattgaattgcagtgaagtaaaccttcac

SEQ ID NO: 681955 - DNA, 33 bp, Homo sapien
cactgagagaagtatacagtgtaacatacgccc

SEQ ID NO: 681956 - DNA, 33 bp, Homo sapien
cactgagagaagtatagagtgtaacatacgccc

SEQ ID NO: 681957 - DNA, 33 bp, Homo sapien
attataaagattttgcaaggaaacataagggta

SEQ ID NO: 681958 - DNA, 33 bp, Homo sapien
attataaagattttgcgaggaaacataagggta

SEQ ID NO: 681959 - DNA, 33 bp, Homo sapien
ggacttttcaagccacagtaattagaattagtt

SEQ ID NO: 681960 - DNA, 33 bp, Homo sapien
ggacttttcaagccacggtaattagaattagtt

SEQ ID NO: 681961 - DNA, 33 bp, Homo sapien
ctatcaagtcctgaaaaaggtgtgttgaagtct

SEQ ID NO: 681962 - DNA, 33 bp, Homo sapien
ctatcaagtcctgaaagaggtgtgttgaagtct

SEQ ID NO: 681963 - DNA, 33 bp, Homo sapien
aaggagaaatggacaaaatccactcttgtagtt

SEQ ID NO: 681964 - DNA, 33 bp, Homo sapien
aaggagaaatggacaacatccactcttgtagtt

SEQ ID NO: 681965 - DNA, 33 bp, Homo sapien
cagatgaggaatagaccgataacatttctttga

SEQ ID NO: 681966 - DNA, 33 bp, Homo sapien
cagatgaggaatagactgataacatttctttga

SEQ ID NO: 681967 - DNA, 33 bp, Homo sapien
attggtgtgtgcctcaagacttcatgggcctac

SEQ ID NO: 681968 - DNA, 33 bp, Homo sapien
attggtgtgtgcctcaggacttcatgggcctac

SEQ ID NO: 681969 - DNA, 33 bp, Homo sapien
attgctgattgctggaaaagaagttaacatgat

SEQ ID NO: 681970 - DNA, 33 bp, Homo sapien
attgctgattgctggagaagaagttaacatgat

SEQ ID NO: 681971 - DNA, 33 bp, Homo sapien
tcaagctgctgttgggaacttgtaagatggtta

SEQ ID NO: 681972 - DNA, 33 bp, Homo sapien
tcaagctgctgttgggcacttgtaagatggtta

SEQ ID NO: 681973 - DNA, 33 bp, Homo sapien
gcagttggcaagtccccactgacacagacaggt

SEQ ID NO: 681974 - DNA, 33 bp, Homo sapien
gcagttggcaagtcccgactgacacagacaggt

SEQ ID NO: 681975 - DNA, 33 bp, Homo sapien
gtctgctggataacacacttattccagtgtcta

SEQ ID NO: 681976 - DNA, 33 bp, Homo sapien
gtctgctggataacacgcttattccagtgtcta

SEQ ID NO: 681977 - DNA, 33 bp, Homo sapien
cccaaatgattctcagaacagcccagagagctg

SEQ ID NO: 681978 - DNA, 33 bp, Homo sapien
cccaaatgattctcagcacagcccagagagctg

SEQ ID NO: 681979 - DNA, 33 bp, Homo sapien
cacctggaaacaacccagcatgttattgtccct

SEQ ID NO: 681980 - DNA, 33 bp, Homo sapien
cacctggaaacaacccggcatgttattgtccct

SEQ ID NO: 681981 - DNA, 33 bp, Homo sapien
tcaaatgtcaagagaaagtaggcagaagggtgt

SEQ ID NO: 681982 - DNA, 33 bp, Homo sapien
tcaaatgtcaagagaaggtaggcagaagggtgt

SEQ ID NO: 681983 - DNA, 33 bp, Homo sapien
tgttctttcagatcaccgatttgggccactgat

SEQ ID NO: 681984 - DNA, 33 bp, Homo sapien
tgttctttcagatcactgatttgggccactgat

SEQ ID NO: 681985 - DNA, 33 bp, Homo sapien
cctcaacacggatgaaacttgaaggaagtgaaa

SEQ ID NO: 681986 - DNA, 33 bp, Homo sapien
cctcaacacggatgaaccttgaaggaagtgaaa

SEQ ID NO: 681987 - DNA, 33 bp, Homo sapien
caggactctgtaccaccgtagacaagacattct

SEQ ID NO: 681988 - DNA, 33 bp, Homo sapien
caggactctgtaccacggtagacaagacattct

SEQ ID NO: 681989 - DNA, 33 bp, Homo sapien
ccatgtttatttcgcaaagtcacaaagtgttag

SEQ ID NO: 681990 - DNA, 33 bp, Homo sapien
ccatgtttatttcgcagagtcacaaagtgttag

SEQ ID NO: 681991 - DNA, 33 bp, Homo sapien
tccagtcctcagcaaccacagggaggatccagc

SEQ ID NO: 681992 - DNA, 33 bp, Homo sapien
tccagtcctcagcaactacagggaggatccagc

SEQ ID NO: 681993 - DNA, 33 bp, Homo sapien
agtttgtaagaaatgcactaaacataatgacag

SEQ ID NO: 681994 - DNA, 33 bp, Homo sapien
agtttgtaagaaatgctctaaacataatgacag

SEQ ID NO: 681995 - DNA, 33 bp, Homo sapien
agcaagcaagcacatacgaaaaagactgcaaaa

SEQ ID NO: 681996 - DNA, 33 bp, Homo sapien
agcaagcaagcacatatgaaaaagactgcaaaa

SEQ ID NO: 681997 - DNA, 33 bp, Homo sapien
acatgctctcctactaataaaagcttataatcc

SEQ ID NO: 681998 - DNA, 33 bp, Homo sapien
acatgctctcctactagtaaaagcttataatcc

SEQ ID NO: 681999 - DNA, 33 bp, Homo sapien
ctccctgtccacaacaactccacaaagtttgta

SEQ ID NO: 682000 - DNA, 33 bp, Homo sapien
ctccctgtccacaacacctccacaaagtttgta

SEQ ID NO: 682001 - DNA, 33 bp, Homo sapien
tgcgctgctggagaaccgagacaccctggctga

SEQ ID NO: 682002 - DNA, 33 bp, Homo sapien
tgcgctgctggagaactgagacaccctggctga

SEQ ID NO: 682003 - DNA, 33 bp, Homo sapien
ggggaggggataataaatgtgtcttctctatca

SEQ ID NO: 682004 - DNA, 33 bp, Homo sapien
ggggaggggataataactgtgtcttctctatca

SEQ ID NO: 682005 - DNA, 33 bp, Homo sapien
taaattctctaaagacgatctgggcagcaggtt

SEQ ID NO: 682006 - DNA, 33 bp, Homo sapien
taaattctctaaagactatctgggcagcaggtt

SEQ ID NO: 682007 - DNA, 33 bp, Homo sapien
ggccctgtcaaccagactacttttagccaagat

SEQ ID NO: 682008 - DNA, 33 bp, Homo sapien
ggccctgtcaaccagattacttttagccaagat

SEQ ID NO: 682009 - DNA, 33 bp, Homo sapien
cagtgcctggcacaccaatgttgttcaatgaat

SEQ ID NO: 682010 - DNA, 33 bp, Homo sapien
cagtgcctggcacaccgatgttgttcaatgaat

SEQ ID NO: 682011 - DNA, 33 bp, Homo sapien
tcaaaattaatcaggactcatgggcattaaact

SEQ ID NO: 682012 - DNA, 33 bp, Homo sapien
tcaaaattaatcaggagtcatgggcattaaact

SEQ ID NO: 682013 - DNA, 33 bp, Homo sapien
actgacagacacgcacaaaagaaaccaggcacc

SEQ ID NO: 682014 - DNA, 33 bp, Homo sapien
actgacagacacgcacgaaagaaaccaggcacc

SEQ ID NO: 682015 - DNA, 33 bp, Homo sapien
ccaagatgggtttagacgtggaagagacttctt

SEQ ID NO: 682016 - DNA, 33 bp, Homo sapien
ccaagatgggtttagatgtggaagagacttctt

SEQ ID NO: 682017 - DNA, 33 bp, Homo sapien
gcagtgcctcaggacaaccataggaggggagag

SEQ ID NO: 682018 - DNA, 33 bp, Homo sapien
gcagtgcctcaggacagccataggaggggagag

SEQ ID NO: 682019 - DNA, 33 bp, Homo sapien
atccagaagtccaggaaactaccaaaccaaagc

SEQ ID NO: 682020 - DNA, 33 bp, Homo sapien
atccagaagtccaggacactaccaaaccaaagc

SEQ ID NO: 682021 - DNA, 33 bp, Homo sapien
caatctctccccacaaataccccaagagtaggc

SEQ ID NO: 682022 - DNA, 33 bp, Homo sapien
caatctctccccacaattaccccaagagtaggc

SEQ ID NO: 682023 - DNA, 33 bp, Homo sapien
tggggtagtgaaggaacggaggagtctgtcgca

SEQ ID NO: 682024 - DNA, 33 bp, Homo sapien
tggggtagtgaaggaatggaggagtctgtcgca

SEQ ID NO: 682025 - DNA, 33 bp, Homo sapien
agaatagatatatgtacgccctgctttcccaat

SEQ ID NO: 682026 - DNA, 33 bp, Homo sapien
agaatagatatatgtaggccctgctttcccaat

SEQ ID NO: 682027 - DNA, 33 bp, Homo sapien
ttgtaaatcatcactcagagatcactaatactg

SEQ ID NO: 682028 - DNA, 33 bp, Homo sapien
ttgtaaatcatcactcggagatcactaatactg

SEQ ID NO: 682029 - DNA, 33 bp, Homo sapien
ggaaatgggacctaaacgcttcccaaaatcatc

SEQ ID NO: 682030 - DNA, 33 bp, Homo sapien
ggaaatgggacctaaatgcttcccaaaatcatc

SEQ ID NO: 682031 - DNA, 33 bp, Homo sapien
cattttatgttcatgaataagaagaaccaatgt

SEQ ID NO: 682032 - DNA, 33 bp, Homo sapien
cattttatgttcatgactaagaagaaccaatgt

SEQ ID NO: 682033 - DNA, 33 bp, Homo sapien
tcatctgctctagtgcaagctttaccacttgca

SEQ ID NO: 682034 - DNA, 33 bp, Homo sapien
tcatctgctctagtgccagctttaccacttgca

SEQ ID NO: 682035 - DNA, 33 bp, Homo sapien
gagccctagagaggaaatacgtgctgtgttcca

SEQ ID NO: 682036 - DNA, 33 bp, Homo sapien
gagccctagagaggaagtacgtgctgtgttcca

SEQ ID NO: 682037 - DNA, 33 bp, Homo sapien
ccatccttttaggaaaattcatcttctctccaa

SEQ ID NO: 682038 - DNA, 33 bp, Homo sapien
ccatccttttaggaaatttcatcttctctccaa

SEQ ID NO: 682039 - DNA, 33 bp, Homo sapien
agagcaaatctcttcaacaagcctgcgtgcttt

SEQ ID NO: 682040 - DNA, 33 bp, Homo sapien
agagcaaatctcttcagcaagcctgcgtgcttt

SEQ ID NO: 682041 - DNA, 33 bp, Homo sapien
ccccagttctccaaataaaagcgatctaataat

SEQ ID NO: 682042 - DNA, 33 bp, Homo sapien
ccccagttctccaaatgaaagcgatctaataat

SEQ ID NO: 682043 - DNA, 33 bp, Homo sapien
catgagtgaggatagccaataaatcatctttga

SEQ ID NO: 682044 - DNA, 33 bp, Homo sapien
catgagtgaggatagctaataaatcatctttga

SEQ ID NO: 682045 - DNA, 33 bp, Homo sapien
tcttccacgccctaaacgtcagaactctccaga

SEQ ID NO: 682046 - DNA, 33 bp, Homo sapien
tcttccacgccctaaatgtcagaactctccaga

SEQ ID NO: 682047 - DNA, 33 bp, Homo sapien
aatcagaacatagagacaagctttgtaaagctt

SEQ ID NO: 682048 - DNA, 33 bp, Homo sapien
aatcagaacatagagataagctttgtaaagctt

SEQ ID NO: 682049 - DNA, 33 bp, Homo sapien
taactgtcagaacccaaaggaaaaaaatcactt

SEQ ID NO: 682050 - DNA, 33 bp, Homo sapien
taactgtcagaacccataggaaaaaaatcactt

SEQ ID NO: 682051 - DNA, 33 bp, Homo sapien
tctcttaaactttggtaaatatcctggggacag

SEQ ID NO: 682052 - DNA, 33 bp, Homo sapien
tctcttaaactttggtgaatatcctggggacag

SEQ ID NO: 682053 - DNA, 33 bp, Homo sapien
tagttataattattctgaaaacccacgagacca

SEQ ID NO: 682054 - DNA, 33 bp, Homo sapien
tagttataattattcttaaaacccacgagacca

SEQ ID NO: 682055 - DNA, 33 bp, Homo sapien
ccaatctgggtttcaaatgcagccatgcccctc

SEQ ID NO: 682056 - DNA, 33 bp, Homo sapien
ccaatctgggtttcaactgcagccatgcccctc

SEQ ID NO: 682057 - DNA, 33 bp, Homo sapien
tcctgatggcaggtcaagttcttactcctccag

SEQ ID NO: 682058 - DNA, 33 bp, Homo sapien
tcctgatggcaggtcaggttcttactcctccag

SEQ ID NO: 682059 - DNA, 33 bp, Homo sapien
actagcgtgactacacaatgactgcctcccagc

SEQ ID NO: 682060 - DNA, 33 bp, Homo sapien
actagcgtgactacacgatgactgcctcccagc

SEQ ID NO: 682061 - DNA, 33 bp, Homo sapien
catctctgctcctttaactccttttggccttca

SEQ ID NO: 682062 - DNA, 33 bp, Homo sapien
catctctgctcctttacctccttttggccttca

SEQ ID NO: 682063 - DNA, 33 bp, Homo sapien
gggaggcctagaaacaatagacaaattatcagg

SEQ ID NO: 682064 - DNA, 33 bp, Homo sapien
gggaggcctagaaacactagacaaattatcagg

SEQ ID NO: 682065 - DNA, 33 bp, Homo sapien
ccaaccgggcataaagacttgacattctgcaca

SEQ ID NO: 682066 - DNA, 33 bp, Homo sapien
ccaaccgggcataaaggcttgacattctgcaca

SEQ ID NO: 682067 - DNA, 33 bp, Homo sapien
gtgcatccttaacccacagcgcattcatcctcc

SEQ ID NO: 682068 - DNA, 33 bp, Homo sapien
gtgcatccttaacccatagcgcattcatcctcc

SEQ ID NO: 682069 - DNA, 33 bp, Homo sapien
ttacctggtgtctccacagctaaaggttataaa

SEQ ID NO: 682070 - DNA, 33 bp, Homo sapien
ttacctggtgtctccatagctaaaggttataaa

SEQ ID NO: 682071 - DNA, 33 bp, Homo sapien
tccaagtaagccgagaataaaaccgtggcattc

SEQ ID NO: 682072 - DNA, 33 bp, Homo sapien
tccaagtaagccgagagtaaaaccgtggcattc

SEQ ID NO: 682073 - DNA, 33 bp, Homo sapien
cagatactcagatttacagaaaagctcttattt

SEQ ID NO: 682074 - DNA, 33 bp, Homo sapien
cagatactcagatttatagaaaagctcttattt

SEQ ID NO: 682075 - DNA, 33 bp, Homo sapien
agcagaggtccaaggaaataaataacttattct

SEQ ID NO: 682076 - DNA, 33 bp, Homo sapien
agcagaggtccaaggagataaataacttattct

SEQ ID NO: 682077 - DNA, 33 bp, Homo sapien
cagtatttacagagcacggagaggttaaatgta

SEQ ID NO: 682078 - DNA, 33 bp, Homo sapien
cagtatttacagagcatggagaggttaaatgta

SEQ ID NO: 682079 - DNA, 33 bp, Homo sapien
tatggaagacaaaaacactggatatgttatctc

SEQ ID NO: 682080 - DNA, 33 bp, Homo sapien
tatggaagacaaaaacgctggatatgttatctc

SEQ ID NO: 682081 - DNA, 33 bp, Homo sapien
gttctccccgatccctaaagagctcaccagcag

SEQ ID NO: 682082 - DNA, 33 bp, Homo sapien
gttctccccgatccctgaagagctcaccagcag

SEQ ID NO: 682083 - DNA, 33 bp, Homo sapien
gactcattcttctccaagtggtgctctccagcc

SEQ ID NO: 682084 - DNA, 33 bp, Homo sapien
gactcattcttctccaggtggtgctctccagcc

SEQ ID NO: 682085 - DNA, 33 bp, Homo sapien
ctaggaggtgctcgacactaagtaacattctgg

SEQ ID NO: 682086 - DNA, 33 bp, Homo sapien
ctaggaggtgctcgacgctaagtaacattctgg

SEQ ID NO: 682087 - DNA, 33 bp, Homo sapien
gattcagtgaataaaaatagagtttcatgtccg

SEQ ID NO: 682088 - DNA, 33 bp, Homo sapien
gattcagtgaataaaagtagagtttcatgtccg

SEQ ID NO: 682089 - DNA, 33 bp, Homo sapien
agagactggaaggtaacatctccatcctaaagg

SEQ ID NO: 682090 - DNA, 33 bp, Homo sapien
agagactggaaggtaatatctccatcctaaagg

SEQ ID NO: 682091 - DNA, 33 bp, Homo sapien
ctgagtgaaagtgactaaagagaggtgggaaag

SEQ ID NO: 682092 - DNA, 33 bp, Homo sapien
ctgagtgaaagtgactgaagagaggtgggaaag

SEQ ID NO: 682093 - DNA, 33 bp, Homo sapien
ccaggggtgaccaccacggattccttcctcaga

SEQ ID NO: 682094 - DNA, 33 bp, Homo sapien
ccaggggtgaccaccatggattccttcctcaga

SEQ ID NO: 682095 - DNA, 33 bp, Homo sapien
gggttcactgacctacaatcggttgactcacat

SEQ ID NO: 682096 - DNA, 33 bp, Homo sapien
gggttcactgacctacgatcggttgactcacat

SEQ ID NO: 682097 - DNA, 33 bp, Homo sapien
actcaatttaaaaaaaatctctgagtgctggaa

SEQ ID NO: 682098 - DNA, 33 bp, Homo sapien
actcaatttaaaaaaagtctctgagtgctggaa

SEQ ID NO: 682099 - DNA, 33 bp, Homo sapien
tgaaggggtgggtacaagccaatttgataggtg

SEQ ID NO: 682100 - DNA, 33 bp, Homo sapien
tgaaggggtgggtacaggccaatttgataggtg

SEQ ID NO: 682101 - DNA, 33 bp, Homo sapien
gccactgcccccctacaattgtggatgccgtat

SEQ ID NO: 682102 - DNA, 33 bp, Homo sapien
gccactgcccccctacgattgtggatgccgtat

SEQ ID NO: 682103 - DNA, 33 bp, Homo sapien
agaactgtacagacaccagtaggcttcaaacta

SEQ ID NO: 682104 - DNA, 33 bp, Homo sapien
agaactgtacagacactagtaggcttcaaacta

SEQ ID NO: 682105 - DNA, 33 bp, Homo sapien
tgttttctctcaccataacaatacccgagactg

SEQ ID NO: 682106 - DNA, 33 bp, Homo sapien
tgttttctctcaccatcacaatacccgagactg

SEQ ID NO: 682107 - DNA, 33 bp, Homo sapien
tgaggcttgcgttagaaaagagattcggggaag

SEQ ID NO: 682108 - DNA, 33 bp, Homo sapien
tgaggcttgcgttagacaagagattcggggaag

SEQ ID NO: 682109 - DNA, 33 bp, Homo sapien
cttaattggaattagacaaagagttcatttcct

SEQ ID NO: 682110 - DNA, 33 bp, Homo sapien
cttaattggaattagataaagagttcatttcct

SEQ ID NO: 682111 - DNA, 33 bp, Homo sapien
aaagtgagatttttgaagcaagagatgtcatac

SEQ ID NO: 682112 - DNA, 33 bp, Homo sapien
aaagtgagatttttgaggcaagagatgtcatac

SEQ ID NO: 682113 - DNA, 33 bp, Homo sapien
acaacagcagttatgaagattcaagagtttgct

SEQ ID NO: 682114 - DNA, 33 bp, Homo sapien
acaacagcagttatgatgattcaagagtttgct

SEQ ID NO: 682115 - DNA, 33 bp, Homo sapien
tcataagaaaggacaacaaaaatcttctgacga

SEQ ID NO: 682116 - DNA, 33 bp, Homo sapien
tcataagaaaggacaataaaaatcttctgacga

SEQ ID NO: 682117 - DNA, 33 bp, Homo sapien
ggtggcccagaaggacagacgagaggtacagag

SEQ ID NO: 682118 - DNA, 33 bp, Homo sapien
ggtggcccagaaggacggacgagaggtacagag

SEQ ID NO: 682119 - DNA, 33 bp, Homo sapien
agacacaaatttttcacataaagccagcatttt

SEQ ID NO: 682120 - DNA, 33 bp, Homo sapien
agacacaaatttttcatataaagccagcatttt

SEQ ID NO: 682121 - DNA, 33 bp, Homo sapien
ttctcccaagagactaagttctgtagaggcaga

SEQ ID NO: 682122 - DNA, 33 bp, Homo sapien
ttctcccaagagactaggttctgtagaggcaga

SEQ ID NO: 682123 - DNA, 33 bp, Homo sapien
ccacagcatgagaaatcaatgttgtttcttaga

SEQ ID NO: 682124 - DNA, 33 bp, Homo sapien
ccacagcatgagaaatgaatgttgtttcttaga

SEQ ID NO: 682125 - DNA, 33 bp, Homo sapien
agaaaatttctgagacactgtcaaaaataataa

SEQ ID NO: 682126 - DNA, 33 bp, Homo sapien
agaaaatttctgagacgctgtcaaaaataataa

SEQ ID NO: 682127 - DNA, 33 bp, Homo sapien
gctagataatgcgcaaagcaaatcaaccatcac

SEQ ID NO: 682128 - DNA, 33 bp, Homo sapien
gctagataatgcgcaatgcaaatcaaccatcac

SEQ ID NO: 682129 - DNA, 33 bp, Homo sapien
ttcatcaggttgaagacagttttacaaattact

SEQ ID NO: 682130 - DNA, 33 bp, Homo sapien
ttcatcaggttgaagatagttttacaaattact

SEQ ID NO: 682131 - DNA, 33 bp, Homo sapien
gaagtgactattgaaaccatatacctgttaata

SEQ ID NO: 682132 - DNA, 33 bp, Homo sapien
gaagtgactattgaaatcatatacctgttaata

SEQ ID NO: 682133 - DNA, 33 bp, Homo sapien
ttgctctgcataaagacagtagctatatacagt

SEQ ID NO: 682134 - DNA, 33 bp, Homo sapien
ttgctctgcataaagatagtagctatatacagt

SEQ ID NO: 682135 - DNA, 33 bp, Homo sapien
gtgaagtcatgcgtaacatctggatacagtttt

SEQ ID NO: 682136 - DNA, 33 bp, Homo sapien
gtgaagtcatgcgtaatatctggatacagtttt

SEQ ID NO: 682137 - DNA, 33 bp, Homo sapien
cactagacaatctgacaaagagttctatttgag

SEQ ID NO: 682138 - DNA, 33 bp, Homo sapien
cactagacaatctgaccaagagttctatttgag

SEQ ID NO: 682139 - DNA, 33 bp, Homo sapien
atgcccaagcacacacaagtgaaccacagaagg

SEQ ID NO: 682140 - DNA, 33 bp, Homo sapien
atgcccaagcacacacgagtgaaccacagaagg

SEQ ID NO: 682141 - DNA, 33 bp, Homo sapien
aatagccaaatagtagaaacaattcaaatgccc

SEQ ID NO: 682142 - DNA, 33 bp, Homo sapien
aatagccaaatagtaggaacaattcaaatgccc

SEQ ID NO: 682143 - DNA, 33 bp, Homo sapien
ccacatccagtaggacagctaagataaaaaata

SEQ ID NO: 682144 - DNA, 33 bp, Homo sapien
ccacatccagtaggacggctaagataaaaaata

SEQ ID NO: 682145 - DNA, 33 bp, Homo sapien
atcacttgagcccagaagcaggaagctgaagtg

SEQ ID NO: 682146 - DNA, 33 bp, Homo sapien
atcacttgagcccagacgcaggaagctgaagtg

SEQ ID NO: 682147 - DNA, 33 bp, Homo sapien
tcctcagggcctggcaaatgtaggcgattctta

SEQ ID NO: 682148 - DNA, 33 bp, Homo sapien
tcctcagggcctggcagatgtaggcgattctta

SEQ ID NO: 682149 - DNA, 33 bp, Homo sapien
gtttagctaccatcttcaaccctgtcagatggg

SEQ ID NO: 682150 - DNA, 33 bp, Homo sapien
gtttagctaccatctttaaccctgtcagatggg

SEQ ID NO: 682151 - DNA, 33 bp, Homo sapien
tgatagcatttactgaaacgggcctggagcctg

SEQ ID NO: 682152 - DNA, 33 bp, Homo sapien
tgatagcatttactgagacgggcctggagcctg

SEQ ID NO: 682153 - DNA, 33 bp, Homo sapien
catataagaggaataactgaggcttgtgtccag

SEQ ID NO: 682154 - DNA, 33 bp, Homo sapien
catataagaggaataattgaggcttgtgtccag

SEQ ID NO: 682155 - DNA, 33 bp, Homo sapien
actccatcttggggtaactctttcgctctcctc

SEQ ID NO: 682156 - DNA, 33 bp, Homo sapien
actccatcttggggtatctctttcgctctcctc

SEQ ID NO: 682157 - DNA, 33 bp, Homo sapien
ttccagcatgggtaaccgggctgattaggactg

SEQ ID NO: 682158 - DNA, 33 bp, Homo sapien
ttccagcatgggtaacggggctgattaggactg

SEQ ID NO: 682159 - DNA, 33 bp, Homo sapien
gatgaacactaaatcaataccttttcagccacg

SEQ ID NO: 682160 - DNA, 33 bp, Homo sapien
gatgaacactaaatcagtaccttttcagccacg

SEQ ID NO: 682161 - DNA, 33 bp, Homo sapien
ttactattatccaccacgctgatctgaacgtcc

SEQ ID NO: 682162 - DNA, 33 bp, Homo sapien
ttactattatccaccatgctgatctgaacgtcc

SEQ ID NO: 682163 - DNA, 33 bp, Homo sapien
tataatgtattttaaaatatgacactatattca

SEQ ID NO: 682164 - DNA, 33 bp, Homo sapien
tataatgtattttaaactatgacactatattca

SEQ ID NO: 682165 - DNA, 33 bp, Homo sapien
aaagtggcacaactgccgagtggttggggctgt

SEQ ID NO: 682166 - DNA, 33 bp, Homo sapien
aaagtggcacaactgctgagtggttggggctgt

SEQ ID NO: 682167 - DNA, 33 bp, Homo sapien
ggtccttgccgtgacaacttgcctcgccagctc

SEQ ID NO: 682168 - DNA, 33 bp, Homo sapien
ggtccttgccgtgacagcttgcctcgccagctc

SEQ ID NO: 682169 - DNA, 33 bp, Homo sapien
gttttcctaaacagctaaataatcaatctattg

SEQ ID NO: 682170 - DNA, 33 bp, Homo sapien
gttttcctaaacagctgaataatcaatctattg

SEQ ID NO: 682171 - DNA, 33 bp, Homo sapien
cttctctccccgtgacactccattttctacttc

SEQ ID NO: 682172 - DNA, 33 bp, Homo sapien
cttctctccccgtgaccctccattttctacttc

SEQ ID NO: 682173 - DNA, 33 bp, Homo sapien
gaggtcctgccaggaaaatcagccaaattttgg

SEQ ID NO: 682174 - DNA, 33 bp, Homo sapien
gaggtcctgccaggaacatcagccaaattttgg

SEQ ID NO: 682175 - DNA, 33 bp, Homo sapien
tctgaaacaagagttacggcagaagtgactgcg

SEQ ID NO: 682176 - DNA, 33 bp, Homo sapien
tctgaaacaagagttatggcagaagtgactgcg

SEQ ID NO: 682177 - DNA, 33 bp, Homo sapien
agcacagtgccaggtacacaatagaaagtagaa

SEQ ID NO: 682178 - DNA, 33 bp, Homo sapien
agcacagtgccaggtagacaatagaaagtagaa

SEQ ID NO: 682179 - DNA, 33 bp, Homo sapien
ggaaatctcagcaccacgttcccgtccgggccg

SEQ ID NO: 682180 - DNA, 33 bp, Homo sapien
ggaaatctcagcaccatgttcccgtccgggccg

SEQ ID NO: 682181 - DNA, 33 bp, Homo sapien
tggtaaggtatgaatacagttgcctttaaacag

SEQ ID NO: 682182 - DNA, 33 bp, Homo sapien
tggtaaggtatgaatatagttgcctttaaacag

SEQ ID NO: 682183 - DNA, 33 bp, Homo sapien
ttacaaatatggaaacaagctctggagaggtgg

SEQ ID NO: 682184 - DNA, 33 bp, Homo sapien
ttacaaatatggaaaccagctctggagaggtgg

SEQ ID NO: 682185 - DNA, 33 bp, Homo sapien
agatcagacacatcggaaactgtgtagggctgg

SEQ ID NO: 682186 - DNA, 33 bp, Homo sapien
agatcagacacatcgggaactgtgtagggctgg

SEQ ID NO: 682187 - DNA, 33 bp, Homo sapien
atcagaaccaatcacacgagcaggtccaacttg

SEQ ID NO: 682188 - DNA, 33 bp, Homo sapien
atcagaaccaatcacaggagcaggtccaacttg

SEQ ID NO: 682189 - DNA, 33 bp, Homo sapien
tagcaaaatagttcaaactacttagacgttctt

SEQ ID NO: 682190 - DNA, 33 bp, Homo sapien
tagcaaaatagttcaacctacttagacgttctt

SEQ ID NO: 682191 - DNA, 33 bp, Homo sapien
cagcagtcccacggcacggagagagaatccgtg

SEQ ID NO: 682192 - DNA, 33 bp, Homo sapien
cagcagtcccacggcatggagagagaatccgtg

SEQ ID NO: 682193 - DNA, 33 bp, Homo sapien
aacttttatgtaaaaaagtgcacctttagtttt

SEQ ID NO: 682194 - DNA, 33 bp, Homo sapien
aacttttatgtaaaaacgtgcacctttagtttt

SEQ ID NO: 682195 - DNA, 33 bp, Homo sapien
atgccggccttgtcaacgcacacgagaacctga

SEQ ID NO: 682196 - DNA, 33 bp, Homo sapien
atgccggccttgtcaatgcacacgagaacctga

SEQ ID NO: 682197 - DNA, 33 bp, Homo sapien
tgtgtgtaattttacacgagtggattgctatca

SEQ ID NO: 682198 - DNA, 33 bp, Homo sapien
tgtgtgtaattttacatgagtggattgctatca

SEQ ID NO: 682199 - DNA, 33 bp, Homo sapien
agtatttgtccttttacgtctgacttatttcac

SEQ ID NO: 682200 - DNA, 33 bp, Homo sapien
agtatttgtccttttatgtctgacttatttcac

SEQ ID NO: 682201 - DNA, 33 bp, Homo sapien
aacaacgaactatccaatctgaagagcagagtg

SEQ ID NO: 682202 - DNA, 33 bp, Homo sapien
aacaacgaactatccagtctgaagagcagagtg

SEQ ID NO: 682203 - DNA, 33 bp, Homo sapien
tcaagtgaggctgtaaatctaggtaagtgacac

SEQ ID NO: 682204 - DNA, 33 bp, Homo sapien
tcaagtgaggctgtaactctaggtaagtgacac

SEQ ID NO: 682205 - DNA, 33 bp, Homo sapien
tcagctgtttgtcataaggcagttggaaacggc

SEQ ID NO: 682206 - DNA, 33 bp, Homo sapien
tcagctgtttgtcatagggcagttggaaacggc

SEQ ID NO: 682207 - DNA, 33 bp, Homo sapien
atgacaaacagctgataatcacgtttataatga

SEQ ID NO: 682208 - DNA, 33 bp, Homo sapien
atgacaaacagctgatcatcacgtttataatga

SEQ ID NO: 682209 - DNA, 33 bp, Homo sapien
ggttgaatttacccacccaatgcttaatgccac

SEQ ID NO: 682210 - DNA, 33 bp, Homo sapien
ggttgaatttacccactcaatgcttaatgccac

SEQ ID NO: 682211 - DNA, 33 bp, Homo sapien
ttttaaggacaaatgacgaggattacaaaatta

SEQ ID NO: 682212 - DNA, 33 bp, Homo sapien
ttttaaggacaaatgatgaggattacaaaatta

SEQ ID NO: 682213 - DNA, 33 bp, Homo sapien
ccatctattacaacaaagtgacttgcatacacc

SEQ ID NO: 682214 - DNA, 33 bp, Homo sapien
ccatctattacaacaatgtgacttgcatacacc

SEQ ID NO: 682215 - DNA, 33 bp, Homo sapien
taagagtccagatgaacagccataaactgacac

SEQ ID NO: 682216 - DNA, 33 bp, Homo sapien
taagagtccagatgaatagccataaactgacac

SEQ ID NO: 682217 - DNA, 33 bp, Homo sapien
cagttactgtaagtaaagcaaaacagtgcatga

SEQ ID NO: 682218 - DNA, 33 bp, Homo sapien
cagttactgtaagtaaggcaaaacagtgcatga

SEQ ID NO: 682219 - DNA, 33 bp, Homo sapien
ttaacaactgtgaaaccactctacattgtgctg

SEQ ID NO: 682220 - DNA, 33 bp, Homo sapien
ttaacaactgtgaaactactctacattgtgctg

SEQ ID NO: 682221 - DNA, 33 bp, Homo sapien
caccccacagcttccacgtggcaatgtgtctaa

SEQ ID NO: 682222 - DNA, 33 bp, Homo sapien
caccccacagcttccatgtggcaatgtgtctaa

SEQ ID NO: 682223 - DNA, 33 bp, Homo sapien
gtaacagaccacctcaataacagtggcttaagc

SEQ ID NO: 682224 - DNA, 33 bp, Homo sapien
gtaacagaccacctcactaacagtggcttaagc

SEQ ID NO: 682225 - DNA, 33 bp, Homo sapien
ccaatatctttttttacgtgagctgtcatcaag

SEQ ID NO: 682226 - DNA, 33 bp, Homo sapien
ccaatatctttttttatgtgagctgtcatcaag

SEQ ID NO: 682227 - DNA, 33 bp, Homo sapien
cagcccagaactaagcactgttaacatctgggg

SEQ ID NO: 682228 - DNA, 33 bp, Homo sapien
cagcccagaactaagcgctgttaacatctgggg

SEQ ID NO: 682229 - DNA, 33 bp, Homo sapien
ctcagtaggaaggtccagcattcgtggcggtgt

SEQ ID NO: 682230 - DNA, 33 bp, Homo sapien
ctcagtaggaaggtccggcattcgtggcggtgt

SEQ ID NO: 682231 - DNA, 33 bp, Homo sapien
tgagcaaacgcaggccaagtgcttccccaggcc

SEQ ID NO: 682232 - DNA, 33 bp, Homo sapien
tgagcaaacgcaggccgagtgcttccccaggcc

SEQ ID NO: 682233 - DNA, 33 bp, Homo sapien
cacagttgaatgctaacggaggtccaggcctgg

SEQ ID NO: 682234 - DNA, 33 bp, Homo sapien
cacagttgaatgctaatggaggtccaggcctgg

SEQ ID NO: 682235 - DNA, 33 bp, Homo sapien
gtttttggtgtccgggaaataagctgagcccca

SEQ ID NO: 682236 - DNA, 33 bp, Homo sapien
gtttttggtgtccggggaataagctgagcccca

SEQ ID NO: 682237 - DNA, 33 bp, Homo sapien
ttaatcagttcttataacttgtcagaaactcta

SEQ ID NO: 682238 - DNA, 33 bp, Homo sapien
ttaatcagttcttatatcttgtcagaaactcta

SEQ ID NO: 682239 - DNA, 33 bp, Homo sapien
taacacctagttttccacctgagggtcagaggc

SEQ ID NO: 682240 - DNA, 33 bp, Homo sapien
taacacctagttttccgcctgagggtcagaggc

SEQ ID NO: 682241 - DNA, 33 bp, Homo sapien
aatcctataccaagtcaattgagattagtttcc

SEQ ID NO: 682242 - DNA, 33 bp, Homo sapien
aatcctataccaagtcgattgagattagtttcc

SEQ ID NO: 682243 - DNA, 33 bp, Homo sapien
ttccgttctgaagctaagtggcttgccaagtcc

SEQ ID NO: 682244 - DNA, 33 bp, Homo sapien
ttccgttctgaagctatgtggcttgccaagtcc

SEQ ID NO: 682245 - DNA, 33 bp, Homo sapien
gttccccttagaggccccggtgtcttctccagc

SEQ ID NO: 682246 - DNA, 33 bp, Homo sapien
gttccccttagaggccgcggtgtcttctccagc

SEQ ID NO: 682247 - DNA, 33 bp, Homo sapien
actgtgtgagaaagataaaggcaacaattcaaa

SEQ ID NO: 682248 - DNA, 33 bp, Homo sapien
actgtgtgagaaagatgaaggcaacaattcaaa

SEQ ID NO: 682249 - DNA, 33 bp, Homo sapien
aggagaatgaaattcaataggagcctgacagtg

SEQ ID NO: 682250 - DNA, 33 bp, Homo sapien
aggagaatgaaattcagtaggagcctgacagtg

SEQ ID NO: 682251 - DNA, 33 bp, Homo sapien
cttctgcattcctttaaatctgctgctattctt

SEQ ID NO: 682252 - DNA, 33 bp, Homo sapien
cttctgcattcctttagatctgctgctattctt

SEQ ID NO: 682253 - DNA, 33 bp, Homo sapien
ttactaagttaggggacagataaggcaaacatt

SEQ ID NO: 682254 - DNA, 33 bp, Homo sapien
ttactaagttaggggatagataaggcaaacatt

SEQ ID NO: 682255 - DNA, 33 bp, Homo sapien
tcaaaagatattcacacacttgtacacgactgt

SEQ ID NO: 682256 - DNA, 33 bp, Homo sapien
tcaaaagatattcacatacttgtacacgactgt

SEQ ID NO: 682257 - DNA, 33 bp, Homo sapien
cggagaagtggactccaaaaggtatgggaagaa

SEQ ID NO: 682258 - DNA, 33 bp, Homo sapien
cggagaagtggactccgaaaggtatgggaagaa

SEQ ID NO: 682259 - DNA, 33 bp, Homo sapien
caaccatctgaaagatgaaggtctcttctacaa

SEQ ID NO: 682260 - DNA, 33 bp, Homo sapien
caaccatctgaaagattaaggtctcttctacaa

SEQ ID NO: 682261 - DNA, 33 bp, Homo sapien
gtctaattattaactaggatgctgtttactctg

SEQ ID NO: 682262 - DNA, 33 bp, Homo sapien
gtctaattattaactatgatgctgtttactctg

SEQ ID NO: 682263 - DNA, 33 bp, Homo sapien
cactggatgactccaagaagtgagactcttcca

SEQ ID NO: 682264 - DNA, 33 bp, Homo sapien
cactggatgactccaataagtgagactcttcca

SEQ ID NO: 682265 - DNA, 33 bp, Homo sapien
caaaaccacagtgatacagcatttcatacccat

SEQ ID NO: 682266 - DNA, 33 bp, Homo sapien
caaaaccacagtgatatagcatttcatacccat

SEQ ID NO: 682267 - DNA, 33 bp, Homo sapien
tatagcttactgtttccctagtcctgcagatgt

SEQ ID NO: 682268 - DNA, 33 bp, Homo sapien
tatagcttactgtttctctagtcctgcagatgt

SEQ ID NO: 682269 - DNA, 33 bp, Homo sapien
tccccatgtacggagacgaaagatagtaagaaa

SEQ ID NO: 682270 - DNA, 33 bp, Homo sapien
tccccatgtacggagatgaaagatagtaagaaa

SEQ ID NO: 682271 - DNA, 33 bp, Homo sapien
ttttaatttttatgtacagacaggcatcttact

SEQ ID NO: 682272 - DNA, 33 bp, Homo sapien
ttttaatttttatgtagagacaggcatcttact

SEQ ID NO: 682273 - DNA, 33 bp, Homo sapien
catatgcttacaggctgacacgttcatggcaaa

SEQ ID NO: 682274 - DNA, 33 bp, Homo sapien
catatgcttacaggcttacacgttcatggcaaa

SEQ ID NO: 682275 - DNA, 33 bp, Homo sapien
taggcaactgttactccactttctgtctctgta

SEQ ID NO: 682276 - DNA, 33 bp, Homo sapien
taggcaactgttactctactttctgtctctgta

SEQ ID NO: 682277 - DNA, 33 bp, Homo sapien
gaaactcccccttatagtactagtggaaacaag

SEQ ID NO: 682278 - DNA, 33 bp, Homo sapien
gaaactcccccttatattactagtggaaacaag

SEQ ID NO: 682279 - DNA, 33 bp, Homo sapien
tcgatctggactatcactgaaatgctttccatc

SEQ ID NO: 682280 - DNA, 33 bp, Homo sapien
tcgatctggactatcattgaaatgctttccatc

SEQ ID NO: 682281 - DNA, 33 bp, Homo sapien
caggatggtagagaagcctcttttgtttgtttg

SEQ ID NO: 682282 - DNA, 33 bp, Homo sapien
caggatggtagagaaggctcttttgtttgtttg

SEQ ID NO: 682283 - DNA, 33 bp, Homo sapien
ttgaatacctgtcatcctagagaaaaaacatag

SEQ ID NO: 682284 - DNA, 33 bp, Homo sapien
ttgaatacctgtcatcttagagaaaaaacatag

SEQ ID NO: 682285 - DNA, 33 bp, Homo sapien
cgacccctgttggcaaactagcattaaaaaggg

SEQ ID NO: 682286 - DNA, 33 bp, Homo sapien
cgacccctgttggcaagctagcattaaaaaggg

SEQ ID NO: 682287 - DNA, 33 bp, Homo sapien
gttttaaaggttagcactgaaaagattactttc

SEQ ID NO: 682288 - DNA, 33 bp, Homo sapien
gttttaaaggttagcattgaaaagattactttc

SEQ ID NO: 682289 - DNA, 33 bp, Homo sapien
gaactgtggtggtctcaatttctggaaagtaat

SEQ ID NO: 682290 - DNA, 33 bp, Homo sapien
gaactgtggtggtctcgatttctggaaagtaat

SEQ ID NO: 682291 - DNA, 33 bp, Homo sapien
aactttaacatatcagccaacttgtttagcaac

SEQ ID NO: 682292 - DNA, 33 bp, Homo sapien
aactttaacatatcaggcaacttgtttagcaac

SEQ ID NO: 682293 - DNA, 33 bp, Homo sapien
caagtatcatatcatagcatagacaggacttga

SEQ ID NO: 682294 - DNA, 33 bp, Homo sapien
caagtatcatatcatatcatagacaggacttga

SEQ ID NO: 682295 - DNA, 33 bp, Homo sapien
tctaacctggtcgctaccagcaataaagataat

SEQ ID NO: 682296 - DNA, 33 bp, Homo sapien
tctaacctggtcgctatcagcaataaagataat

SEQ ID NO: 682297 - DNA, 33 bp, Homo sapien
taaagccaacaaaaaacagtgaccagcatattt

SEQ ID NO: 682298 - DNA, 33 bp, Homo sapien
taaagccaacaaaaaatagtgaccagcatattt

SEQ ID NO: 682299 - DNA, 33 bp, Homo sapien
ttggaattcttgtccaacctcattttactcatg

SEQ ID NO: 682300 - DNA, 33 bp, Homo sapien
ttggaattcttgtccagcctcattttactcatg

SEQ ID NO: 682301 - DNA, 33 bp, Homo sapien
tgcagagagcgccggaaggagagagaagctcac

SEQ ID NO: 682302 - DNA, 33 bp, Homo sapien
tgcagagagcgccggacggagagagaagctcac

SEQ ID NO: 682303 - DNA, 33 bp, Homo sapien
ctgcgatgcaactcgacaagtcagctggtcttt

SEQ ID NO: 682304 - DNA, 33 bp, Homo sapien
ctgcgatgcaactcgagaagtcagctggtcttt

SEQ ID NO: 682305 - DNA, 33 bp, Homo sapien
gtcatatcataggaaacagttgccatctgcaag

SEQ ID NO: 682306 - DNA, 33 bp, Homo sapien
gtcatatcataggaaagagttgccatctgcaag

SEQ ID NO: 682307 - DNA, 33 bp, Homo sapien
aatcatctccaacataagattaaggataattgt

SEQ ID NO: 682308 - DNA, 33 bp, Homo sapien
aatcatctccaacataggattaaggataattgt

SEQ ID NO: 682309 - DNA, 33 bp, Homo sapien
gtcctgcaggattgggccacctctcttatagcc

SEQ ID NO: 682310 - DNA, 33 bp, Homo sapien
gtcctgcaggattgggtcacctctcttatagcc

SEQ ID NO: 682311 - DNA, 33 bp, Homo sapien
cttctctagacgacaggagttcctcgagaacag

SEQ ID NO: 682312 - DNA, 33 bp, Homo sapien
cttctctagacgacagtagttcctcgagaacag

SEQ ID NO: 682313 - DNA, 33 bp, Homo sapien
attgttcttcagaaaaagtgtgccaattttctg

SEQ ID NO: 682314 - DNA, 33 bp, Homo sapien
attgttcttcagaaaacgtgtgccaattttctg

SEQ ID NO: 682315 - DNA, 33 bp, Homo sapien
agctaagaaatcaacactggaaaactaagcccc

SEQ ID NO: 682316 - DNA, 33 bp, Homo sapien
agctaagaaatcaacattggaaaactaagcccc

SEQ ID NO: 682317 - DNA, 33 bp, Homo sapien
aaaaatacaaaaatacaggcattgtggtgaaca

SEQ ID NO: 682318 - DNA, 33 bp, Homo sapien
aaaaatacaaaaatacgggcattgtggtgaaca

SEQ ID NO: 682319 - DNA, 33 bp, Homo sapien
gattccagtaaaaaccacacaaaaactatgtgc

SEQ ID NO: 682320 - DNA, 33 bp, Homo sapien
gattccagtaaaaaccgcacaaaaactatgtgc

SEQ ID NO: 682321 - DNA, 33 bp, Homo sapien
aaaaatacatgtaaaaattccttgcgcccacac

SEQ ID NO: 682322 - DNA, 33 bp, Homo sapien
aaaaatacatgtaaaacttccttgcgcccacac

SEQ ID NO: 682323 - DNA, 33 bp, Homo sapien
ctaagtatgtgcattccaagttttaatagatac

SEQ ID NO: 682324 - DNA, 33 bp, Homo sapien
ctaagtatgtgcattctaagttttaatagatac

SEQ ID NO: 682325 - DNA, 33 bp, Homo sapien
catctttgacgagtacagccattgcttcagtgt

SEQ ID NO: 682326 - DNA, 33 bp, Homo sapien
catctttgacgagtacggccattgcttcagtgt

SEQ ID NO: 682327 - DNA, 33 bp, Homo sapien
cattgaatatcaggcaatgaagggcagagatat

SEQ ID NO: 682328 - DNA, 33 bp, Homo sapien
cattgaatatcaggcactgaagggcagagatat

SEQ ID NO: 682329 - DNA, 33 bp, Homo sapien
catatacacataggtcacgtatataatgcctgt

SEQ ID NO: 682330 - DNA, 33 bp, Homo sapien
catatacacataggtcgcgtatataatgcctgt

SEQ ID NO: 682331 - DNA, 33 bp, Homo sapien
ctcagtacctaaattacggaagcaatccaagtg

SEQ ID NO: 682332 - DNA, 33 bp, Homo sapien
ctcagtacctaaattagggaagcaatccaagtg

SEQ ID NO: 682333 - DNA, 33 bp, Homo sapien
tattgctttccacagcacctgtatcacttcacg

SEQ ID NO: 682334 - DNA, 33 bp, Homo sapien
tattgctttccacagcgcctgtatcacttcacg

SEQ ID NO: 682335 - DNA, 33 bp, Homo sapien
aaaacaatgataacataacatgctggaaaagat

SEQ ID NO: 682336 - DNA, 33 bp, Homo sapien
aaaacaatgataacatgacatgctggaaaagat

SEQ ID NO: 682337 - DNA, 33 bp, Homo sapien
taaataattttgtgcacgaaacatggtttgcat

SEQ ID NO: 682338 - DNA, 33 bp, Homo sapien
taaataattttgtgcatgaaacatggtttgcat

SEQ ID NO: 682339 - DNA, 33 bp, Homo sapien
ttaatgcaaggcgataaaacaacatcaacagaa

SEQ ID NO: 682340 - DNA, 33 bp, Homo sapien
ttaatgcaaggcgatagaacaacatcaacagaa

SEQ ID NO: 682341 - DNA, 33 bp, Homo sapien
gtatatggagagaagaaaccaggatgagataag

SEQ ID NO: 682342 - DNA, 33 bp, Homo sapien
gtatatggagagaagagaccaggatgagataag

SEQ ID NO: 682343 - DNA, 33 bp, Homo sapien
tatactaatttgctcaaatcatcccagcattgg

SEQ ID NO: 682344 - DNA, 33 bp, Homo sapien
tatactaatttgctcagatcatcccagcattgg

SEQ ID NO: 682345 - DNA, 33 bp, Homo sapien
attagagatggcaaaagtcttaaggtcattatg

SEQ ID NO: 682346 - DNA, 33 bp, Homo sapien
attagagatggcaaaattcttaaggtcattatg

SEQ ID NO: 682347 - DNA, 33 bp, Homo sapien
ggcctcaactagccaacgaagcttgcatttatt

SEQ ID NO: 682348 - DNA, 33 bp, Homo sapien
ggcctcaactagccaaggaagcttgcatttatt

SEQ ID NO: 682349 - DNA, 33 bp, Homo sapien
taaatcttgagcttccagaatttctacaaggga

SEQ ID NO: 682350 - DNA, 33 bp, Homo sapien
taaatcttgagcttccggaatttctacaaggga

SEQ ID NO: 682351 - DNA, 33 bp, Homo sapien
aaacaatccttccataaagtatttttccttgaa

SEQ ID NO: 682352 - DNA, 33 bp, Homo sapien
aaacaatccttccatacagtatttttccttgaa

SEQ ID NO: 682353 - DNA, 33 bp, Homo sapien
tcatctctcaatacacaaggaacgctcctgctt

SEQ ID NO: 682354 - DNA, 33 bp, Homo sapien
tcatctctcaatacaccaggaacgctcctgctt

SEQ ID NO: 682355 - DNA, 33 bp, Homo sapien
gctagatctctctccaatgctttactctgagca

SEQ ID NO: 682356 - DNA, 33 bp, Homo sapien
gctagatctctctccagtgctttactctgagca

SEQ ID NO: 682357 - DNA, 33 bp, Homo sapien
cagatcacgtctttcacgaggtaatagaatatc

SEQ ID NO: 682358 - DNA, 33 bp, Homo sapien
cagatcacgtctttcatgaggtaatagaatatc

SEQ ID NO: 682359 - DNA, 33 bp, Homo sapien
cactacgaaaaagttacatcggccaagtgtggt

SEQ ID NO: 682360 - DNA, 33 bp, Homo sapien
cactacgaaaaagttatatcggccaagtgtggt

SEQ ID NO: 682361 - DNA, 33 bp, Homo sapien
tactgtcattgcaaagcattcaccttgtttttc

SEQ ID NO: 682362 - DNA, 33 bp, Homo sapien
tactgtcattgcaaagtattcaccttgtttttc

SEQ ID NO: 682363 - DNA, 33 bp, Homo sapien
agtgagacatggatgacacccacacttcactct

SEQ ID NO: 682364 - DNA, 33 bp, Homo sapien
agtgagacatggatgatacccacacttcactct

SEQ ID NO: 682365 - DNA, 33 bp, Homo sapien
ccgtctctacaaagcaaaacgaaaaacaacaaa

SEQ ID NO: 682366 - DNA, 33 bp, Homo sapien
ccgtctctacaaagcacaacgaaaaacaacaaa

SEQ ID NO: 682367 - DNA, 33 bp, Homo sapien
ttgaatttgctgaagaacatcacctaaagtctg

SEQ ID NO: 682368 - DNA, 33 bp, Homo sapien
ttgaatttgctgaagagcatcacctaaagtctg

SEQ ID NO: 682369 - DNA, 33 bp, Homo sapien
cgtcccagcccagctacccaagtagaaggtggg

SEQ ID NO: 682370 - DNA, 33 bp, Homo sapien
cgtcccagcccagctatccaagtagaaggtggg

SEQ ID NO: 682371 - DNA, 33 bp, Homo sapien
acaccctagaaggagacagaaatagtggaaggg

SEQ ID NO: 682372 - DNA, 33 bp, Homo sapien
acaccctagaaggagatagaaatagtggaaggg

SEQ ID NO: 682373 - DNA, 33 bp, Homo sapien
tggtcatactttcctaagtgacaaaacaaattt

SEQ ID NO: 682374 - DNA, 33 bp, Homo sapien
tggtcatactttcctatgtgacaaaacaaattt

SEQ ID NO: 682375 - DNA, 33 bp, Homo sapien
tgggaccacctgtcaagaggcttccgaatggac

SEQ ID NO: 682376 - DNA, 33 bp, Homo sapien
tgggaccacctgtcaataggcttccgaatggac

SEQ ID NO: 682377 - DNA, 33 bp, Homo sapien
gtgcagagctgagcgcaactgtgtgtgacggtg

SEQ ID NO: 682378 - DNA, 33 bp, Homo sapien
gtgcagagctgagcgcgactgtgtgtgacggtg

SEQ ID NO: 682379 - DNA, 33 bp, Homo sapien
gcaggagactctaacagctcgtggtccaattcc

SEQ ID NO: 682380 - DNA, 33 bp, Homo sapien
gcaggagactctaacatctcgtggtccaattcc

SEQ ID NO: 682381 - DNA, 33 bp, Homo sapien
caaatgctctacactacggtcgggaaagtgaca

SEQ ID NO: 682382 - DNA, 33 bp, Homo sapien
caaatgctctacactatggtcgggaaagtgaca

SEQ ID NO: 682383 - DNA, 33 bp, Homo sapien
aatatgcctcttcatacctttttaagttggcaa

SEQ ID NO: 682384 - DNA, 33 bp, Homo sapien
aatatgcctcttcatagctttttaagttggcaa

SEQ ID NO: 682385 - DNA, 33 bp, Homo sapien
gaggactgttacaacacggttccaacctgtgaa

SEQ ID NO: 682386 - DNA, 33 bp, Homo sapien
gaggactgttacaacatggttccaacctgtgaa

SEQ ID NO: 682387 - DNA, 33 bp, Homo sapien
gtgtatctatacgacccagcaattcctttccta

SEQ ID NO: 682388 - DNA, 33 bp, Homo sapien
gtgtatctatacgaccgagcaattcctttccta

SEQ ID NO: 682389 - DNA, 33 bp, Homo sapien
agatgtacagagtaaacttatttgctgagttaa

SEQ ID NO: 682390 - DNA, 33 bp, Homo sapien
agatgtacagagtaaatttatttgctgagttaa

SEQ ID NO: 682391 - DNA, 33 bp, Homo sapien
ttagttgtggactgtaagactagatcaacatag

SEQ ID NO: 682392 - DNA, 33 bp, Homo sapien
ttagttgtggactgtacgactagatcaacatag

SEQ ID NO: 682393 - DNA, 33 bp, Homo sapien
aagccattatgtagagcagagaaaaatagttta

SEQ ID NO: 682394 - DNA, 33 bp, Homo sapien
aagccattatgtagaggagagaaaaatagttta

SEQ ID NO: 682395 - DNA, 33 bp, Homo sapien
agaggatggatactataaattggcctaaagaaa

SEQ ID NO: 682396 - DNA, 33 bp, Homo sapien
agaggatggatactattaattggcctaaagaaa

SEQ ID NO: 682397 - DNA, 33 bp, Homo sapien
gcttatctgagtgttaaaggtgggccccaaaat

SEQ ID NO: 682398 - DNA, 33 bp, Homo sapien
gcttatctgagtgttacaggtgggccccaaaat

SEQ ID NO: 682399 - DNA, 33 bp, Homo sapien
ggtttcatgatttttacggttagcaaaatcctt

SEQ ID NO: 682400 - DNA, 33 bp, Homo sapien
ggtttcatgatttttatggttagcaaaatcctt

SEQ ID NO: 682401 - DNA, 33 bp, Homo sapien
ttcacagaaagggttcaactgctacaaaaagcc

SEQ ID NO: 682402 - DNA, 33 bp, Homo sapien
ttcacagaaagggttcgactgctacaaaaagcc

SEQ ID NO: 682403 - DNA, 33 bp, Homo sapien
ctatgatgcgtctgctaagaagtgaacatgtgc

SEQ ID NO: 682404 - DNA, 33 bp, Homo sapien
ctatgatgcgtctgctgagaagtgaacatgtgc

SEQ ID NO: 682405 - DNA, 33 bp, Homo sapien
agtcaatggaaaagccaaagttaggcaccttag

SEQ ID NO: 682406 - DNA, 33 bp, Homo sapien
agtcaatggaaaagccgaagttaggcaccttag

SEQ ID NO: 682407 - DNA, 33 bp, Homo sapien
actctcatcaactgcccaaatgtgaaaataacc

SEQ ID NO: 682408 - DNA, 33 bp, Homo sapien
actctcatcaactgcctaaatgtgaaaataacc

SEQ ID NO: 682409 - DNA, 33 bp, Homo sapien
agaataaccatctttaaggcaaactacattcat

SEQ ID NO: 682410 - DNA, 33 bp, Homo sapien
agaataaccatctttacggcaaactacattcat

SEQ ID NO: 682411 - DNA, 33 bp, Homo sapien
tccccaaaaaacgaaacagatgaacacaaagag

SEQ ID NO: 682412 - DNA, 33 bp, Homo sapien
tccccaaaaaacgaaatagatgaacacaaagag

SEQ ID NO: 682413 - DNA, 33 bp, Homo sapien
cacagttctcaaaccaaattgagtgtaaaattt

SEQ ID NO: 682414 - DNA, 33 bp, Homo sapien
cacagttctcaaaccagattgagtgtaaaattt

SEQ ID NO: 682415 - DNA, 33 bp, Homo sapien
agtaacggaggtggtaaacaatctataatcaga

SEQ ID NO: 682416 - DNA, 33 bp, Homo sapien
agtaacggaggtggtagacaatctataatcaga

SEQ ID NO: 682417 - DNA, 33 bp, Homo sapien
cattgattcaggattacatgggggaggaactga

SEQ ID NO: 682418 - DNA, 33 bp, Homo sapien
cattgattcaggattatatgggggaggaactga

SEQ ID NO: 682419 - DNA, 33 bp, Homo sapien
tccctgctgccaacacagggcataatctatttt

SEQ ID NO: 682420 - DNA, 33 bp, Homo sapien
tccctgctgccaacacggggcataatctatttt

SEQ ID NO: 682421 - DNA, 33 bp, Homo sapien
ggtcaaatgaggattcaaatttgtcaactttta

SEQ ID NO: 682422 - DNA, 33 bp, Homo sapien
ggtcaaatgaggattcgaatttgtcaactttta

SEQ ID NO: 682423 - DNA, 33 bp, Homo sapien
caagggacctccagtaagtggggttaagcctct

SEQ ID NO: 682424 - DNA, 33 bp, Homo sapien
caagggacctccagtaggtggggttaagcctct

SEQ ID NO: 682425 - DNA, 33 bp, Homo sapien
aaagtaggtgtggctacaaaaaggcctcgagtg

SEQ ID NO: 682426 - DNA, 33 bp, Homo sapien
aaagtaggtgtggctagaaaaaggcctcgagtg

SEQ ID NO: 682427 - DNA, 33 bp, Homo sapien
aaagcagcaacctaaccctaaacaaattcaact

SEQ ID NO: 682428 - DNA, 33 bp, Homo sapien
aaagcagcaacctaacgctaaacaaattcaact

SEQ ID NO: 682429 - DNA, 33 bp, Homo sapien
gattgctcaattttcacaaagccttgactgtta

SEQ ID NO: 682430 - DNA, 33 bp, Homo sapien
gattgctcaattttcagaaagccttgactgtta

SEQ ID NO: 682431 - DNA, 33 bp, Homo sapien
gtattctttaagattgaaaaagtggacagtttt

SEQ ID NO: 682432 - DNA, 33 bp, Homo sapien
gtattctttaagattggaaaagtggacagtttt

SEQ ID NO: 682433 - DNA, 33 bp, Homo sapien
catacataaaatggtacaaatctactgacatgg

SEQ ID NO: 682434 - DNA, 33 bp, Homo sapien
catacataaaatggtagaaatctactgacatgg

SEQ ID NO: 682435 - DNA, 33 bp, Homo sapien
tacacaccttgttttacggaatatgcttgtgag

SEQ ID NO: 682436 - DNA, 33 bp, Homo sapien
tacacaccttgttttatggaatatgcttgtgag

SEQ ID NO: 682437 - DNA, 33 bp, Homo sapien
catgtgtatcagtaaccaattcattcttactgc

SEQ ID NO: 682438 - DNA, 33 bp, Homo sapien
catgtgtatcagtaactaattcattcttactgc

SEQ ID NO: 682439 - DNA, 33 bp, Homo sapien
acaaccaaacaaacaaagtacagggtacaggtt

SEQ ID NO: 682440 - DNA, 33 bp, Homo sapien
acaaccaaacaaacaacgtacagggtacaggtt

SEQ ID NO: 682441 - DNA, 33 bp, Homo sapien
tgggtcaagctgcccaatgattgatgagaaacc

SEQ ID NO: 682442 - DNA, 33 bp, Homo sapien
tgggtcaagctgcccagtgattgatgagaaacc

SEQ ID NO: 682443 - DNA, 33 bp, Homo sapien
ggacaggcttaagacacgaagaattttctttct

SEQ ID NO: 682444 - DNA, 33 bp, Homo sapien
ggacaggcttaagacaggaagaattttctttct

SEQ ID NO: 682445 - DNA, 33 bp, Homo sapien
tgtcacttccagctaaagagacaggcatttctg

SEQ ID NO: 682446 - DNA, 33 bp, Homo sapien
tgtcacttccagctaaggagacaggcatttctg

SEQ ID NO: 682447 - DNA, 33 bp, Homo sapien
tcaaggagaacgttgacgggatgagtagaggaa

SEQ ID NO: 682448 - DNA, 33 bp, Homo sapien
tcaaggagaacgttgatgggatgagtagaggaa

SEQ ID NO: 682449 - DNA, 33 bp, Homo sapien
gacagatacagactcacgggttataaagactgc

SEQ ID NO: 682450 - DNA, 33 bp, Homo sapien
gacagatacagactcatgggttataaagactgc

SEQ ID NO: 682451 - DNA, 33 bp, Homo sapien
gagcaatgattgaggacgagacctctttctcca

SEQ ID NO: 682452 - DNA, 33 bp, Homo sapien
gagcaatgattgaggatgagacctctttctcca

SEQ ID NO: 682453 - DNA, 33 bp, Homo sapien
taaaaccgacattctaaacatcatcatggcaga

SEQ ID NO: 682454 - DNA, 33 bp, Homo sapien
taaaaccgacattctacacatcatcatggcaga

SEQ ID NO: 682455 - DNA, 33 bp, Homo sapien
tagccagtctccaagacggtcctcaacaatctc

SEQ ID NO: 682456 - DNA, 33 bp, Homo sapien
tagccagtctccaagatggtcctcaacaatctc

SEQ ID NO: 682457 - DNA, 33 bp, Homo sapien
tgtctgtgggaacttaaagggcacagccatctc

SEQ ID NO: 682458 - DNA, 33 bp, Homo sapien
tgtctgtgggaacttagagggcacagccatctc

SEQ ID NO: 682459 - DNA, 33 bp, Homo sapien
aaccaaacccagcctaaagaaatggaggcggcg

SEQ ID NO: 682460 - DNA, 33 bp, Homo sapien
aaccaaacccagcctagagaaatggaggcggcg

SEQ ID NO: 682461 - DNA, 33 bp, Homo sapien
ttaagaagatttgcagaagcactttgctgttcc

SEQ ID NO: 682462 - DNA, 33 bp, Homo sapien
ttaagaagatttgcaggagcactttgctgttcc

SEQ ID NO: 682463 - DNA, 33 bp, Homo sapien
ttgcattatagagaccaggaatggaaaaccaaa

SEQ ID NO: 682464 - DNA, 33 bp, Homo sapien
ttgcattatagagaccgggaatggaaaaccaaa

SEQ ID NO: 682465 - DNA, 33 bp, Homo sapien
agctgttctagtcttccatactcccactgtggg

SEQ ID NO: 682466 - DNA, 33 bp, Homo sapien
agctgttctagtcttctatactcccactgtggg

SEQ ID NO: 682467 - DNA, 33 bp, Homo sapien
tccagaggcaaaaatcacaaaatgctttcaccg

SEQ ID NO: 682468 - DNA, 33 bp, Homo sapien
tccagaggcaaaaatcgcaaaatgctttcaccg

SEQ ID NO: 682469 - DNA, 33 bp, Homo sapien
aaatgaaagaatgggaaggcttagaagttggac

SEQ ID NO: 682470 - DNA, 33 bp, Homo sapien
aaatgaaagaatgggagggcttagaagttggac

SEQ ID NO: 682471 - DNA, 33 bp, Homo sapien
tttttctacctgctcaagtagtacaatccctgc

SEQ ID NO: 682472 - DNA, 33 bp, Homo sapien
tttttctacctgctcacgtagtacaatccctgc

SEQ ID NO: 682473 - DNA, 33 bp, Homo sapien
ctccgttcagccagatgagtgtttctgggaggt

SEQ ID NO: 682474 - DNA, 33 bp, Homo sapien
ctccgttcagccagattagtgtttctgggaggt

SEQ ID NO: 682475 - DNA, 33 bp, Homo sapien
catgagcataaaacgtcacgcaaatggccattt

SEQ ID NO: 682476 - DNA, 33 bp, Homo sapien
catgagcataaaacgttacgcaaatggccattt

SEQ ID NO: 682477 - DNA, 33 bp, Homo sapien
tcccatcctcatccctaaatagaagtggtagcc

SEQ ID NO: 682478 - DNA, 33 bp, Homo sapien
tcccatcctcatccctgaatagaagtggtagcc

SEQ ID NO: 682479 - DNA, 33 bp, Homo sapien
tgctctgttagattacaaagccacgtaattgct

SEQ ID NO: 682480 - DNA, 33 bp, Homo sapien
tgctctgttagattaccaagccacgtaattgct

SEQ ID NO: 682481 - DNA, 33 bp, Homo sapien
tattggatcacataaccatttttattgttaatt

SEQ ID NO: 682482 - DNA, 33 bp, Homo sapien
tattggatcacataactatttttattgttaatt

SEQ ID NO: 682483 - DNA, 33 bp, Homo sapien
gaccttcctgaaccctcacaagtcaacaatact

SEQ ID NO: 682484 - DNA, 33 bp, Homo sapien
gaccttcctgaacccttacaagtcaacaatact

SEQ ID NO: 682485 - DNA, 33 bp, Homo sapien
caatgtttaaaaattaagatatttcacatgaat

SEQ ID NO: 682486 - DNA, 33 bp, Homo sapien
caatgtttaaaaattaggatatttcacatgaat

SEQ ID NO: 682487 - DNA, 33 bp, Homo sapien
tggtgagagtgtgaaactaaatggaactcacat

SEQ ID NO: 682488 - DNA, 33 bp, Homo sapien
tggtgagagtgtgaaattaaatggaactcacat

SEQ ID NO: 682489 - DNA, 33 bp, Homo sapien
gaggcccagaacacacaaaagtattggtggtca

SEQ ID NO: 682490 - DNA, 33 bp, Homo sapien
gaggcccagaacacacgaaagtattggtggtca

SEQ ID NO: 682491 - DNA, 33 bp, Homo sapien
tcatcagtgtacttagaagaatcagccatttta

SEQ ID NO: 682492 - DNA, 33 bp, Homo sapien
tcatcagtgtacttagcagaatcagccatttta

SEQ ID NO: 682493 - DNA, 33 bp, Homo sapien
atgttcatttcccaggacacagtaacaaagtac

SEQ ID NO: 682494 - DNA, 33 bp, Homo sapien
atgttcatttcccagggcacagtaacaaagtac

SEQ ID NO: 682495 - DNA, 33 bp, Homo sapien
ggttactttggatgtccctttccagtgagttgc

SEQ ID NO: 682496 - DNA, 33 bp, Homo sapien
ggttactttggatgtctctttccagtgagttgc

SEQ ID NO: 682497 - DNA, 33 bp, Homo sapien
gctgaagatacaaaaacgctgagaaatgatgtg

SEQ ID NO: 682498 - DNA, 33 bp, Homo sapien
gctgaagatacaaaaatgctgagaaatgatgtg

SEQ ID NO: 682499 - DNA, 33 bp, Homo sapien
agcccagctagtgctgaaatctcttgatgtttc

SEQ ID NO: 682500 - DNA, 33 bp, Homo sapien
agcccagctagtgctgcaatctcttgatgtttc

SEQ ID NO: 682501 - DNA, 33 bp, Homo sapien
agctgggctgtcaaaccggaatgacagaaaaaa

SEQ ID NO: 682502 - DNA, 33 bp, Homo sapien
agctgggctgtcaaactggaatgacagaaaaaa

SEQ ID NO: 682503 - DNA, 33 bp, Homo sapien
ccttctggtccaataacgaggttgaactagtcc

SEQ ID NO: 682504 - DNA, 33 bp, Homo sapien
ccttctggtccaataatgaggttgaactagtcc

SEQ ID NO: 682505 - DNA, 33 bp, Homo sapien
aatgtgctgagagcatcacagagcagattcaag

SEQ ID NO: 682506 - DNA, 33 bp, Homo sapien
aatgtgctgagagcattacagagcagattcaag

SEQ ID NO: 682507 - DNA, 33 bp, Homo sapien
gcctgccacttcagcaaaactggtgggaacagg

SEQ ID NO: 682508 - DNA, 33 bp, Homo sapien
gcctgccacttcagcagaactggtgggaacagg

SEQ ID NO: 682509 - DNA, 33 bp, Homo sapien
tccacaggatttcaaacgacctggaattaggtg

SEQ ID NO: 682510 - DNA, 33 bp, Homo sapien
tccacaggatttcaaatgacctggaattaggtg

SEQ ID NO: 682511 - DNA, 33 bp, Homo sapien
atgagttgtttaaatacagtgattttcatcctt

SEQ ID NO: 682512 - DNA, 33 bp, Homo sapien
atgagttgtttaaatatagtgattttcatcctt

SEQ ID NO: 682513 - DNA, 33 bp, Homo sapien
tccgaatgcgccactcacaagtcacccttcctt

SEQ ID NO: 682514 - DNA, 33 bp, Homo sapien
tccgaatgcgccactcgcaagtcacccttcctt

SEQ ID NO: 682515 - DNA, 33 bp, Homo sapien
aggctaagcttcctgagagttacttcaatcata

SEQ ID NO: 682516 - DNA, 33 bp, Homo sapien
aggctaagcttcctgatagttacttcaatcata

SEQ ID NO: 682517 - DNA, 33 bp, Homo sapien
ccccatcaggaatcagaaacaataaccagtaac

SEQ ID NO: 682518 - DNA, 33 bp, Homo sapien
ccccatcaggaatcagcaacaataaccagtaac

SEQ ID NO: 682519 - DNA, 33 bp, Homo sapien
aaaaatctttcgcccaatctcctcccttctgtg

SEQ ID NO: 682520 - DNA, 33 bp, Homo sapien
aaaaatctttcgcccagtctcctcccttctgtg

SEQ ID NO: 682521 - DNA, 33 bp, Homo sapien
gaatatgaaagcttcaaaaatttcaagggtcag

SEQ ID NO: 682522 - DNA, 33 bp, Homo sapien
gaatatgaaagcttcacaaatttcaagggtcag

SEQ ID NO: 682523 - DNA, 33 bp, Homo sapien
tgttttagctgtgagaaattttggccagattag

SEQ ID NO: 682524 - DNA, 33 bp, Homo sapien
tgttttagctgtgagagattttggccagattag

SEQ ID NO: 682525 - DNA, 33 bp, Homo sapien
tgctgtctgacttttacgtgagttgtttccttt

SEQ ID NO: 682526 - DNA, 33 bp, Homo sapien
tgctgtctgacttttatgtgagttgtttccttt

SEQ ID NO: 682527 - DNA, 33 bp, Homo sapien
tgtgggctgtcactgaaagcggtcagcagaaga

SEQ ID NO: 682528 - DNA, 33 bp, Homo sapien
tgtgggctgtcactgagagcggtcagcagaaga

SEQ ID NO: 682529 - DNA, 33 bp, Homo sapien
taggatgcagttgtagcaaggatagttgtgtca

SEQ ID NO: 682530 - DNA, 33 bp, Homo sapien
taggatgcagttgtaggaaggatagttgtgtca

SEQ ID NO: 682531 - DNA, 33 bp, Homo sapien
actactttcagtgtcacccttccttctctcacc

SEQ ID NO: 682532 - DNA, 33 bp, Homo sapien
actactttcagtgtcatccttccttctctcacc

SEQ ID NO: 682533 - DNA, 33 bp, Homo sapien
tttggtatagatggaccatcatttctttaaaca

SEQ ID NO: 682534 - DNA, 33 bp, Homo sapien
tttggtatagatggactatcatttctttaaaca

SEQ ID NO: 682535 - DNA, 33 bp, Homo sapien
ggtatctggagtgcacaaatgagaggctgcaga

SEQ ID NO: 682536 - DNA, 33 bp, Homo sapien
ggtatctggagtgcacgaatgagaggctgcaga

SEQ ID NO: 682537 - DNA, 33 bp, Homo sapien
gcattcaacctgggcgacatcctatgtaatctg

SEQ ID NO: 682538 - DNA, 33 bp, Homo sapien
gcattcaacctgggcgtcatcctatgtaatctg

SEQ ID NO: 682539 - DNA, 33 bp, Homo sapien
gaaccatacaataatccaattcctcccctcttg

SEQ ID NO: 682540 - DNA, 33 bp, Homo sapien
gaaccatacaataatctaattcctcccctcttg

SEQ ID NO: 682541 - DNA, 33 bp, Homo sapien
atatatatttaaacctaactttagccaatgtga

SEQ ID NO: 682542 - DNA, 33 bp, Homo sapien
atatatatttaaacctcactttagccaatgtga

SEQ ID NO: 682543 - DNA, 33 bp, Homo sapien
gaaagtcctctgatccaccacctgcatgggtga

SEQ ID NO: 682544 - DNA, 33 bp, Homo sapien
gaaagtcctctgatccgccacctgcatgggtga

SEQ ID NO: 682545 - DNA, 33 bp, Homo sapien
gcgtcacataaagactaaatcaatacaagttca

SEQ ID NO: 682546 - DNA, 33 bp, Homo sapien
gcgtcacataaagacttaatcaatacaagttca

SEQ ID NO: 682547 - DNA, 33 bp, Homo sapien
gaccgaatcgtttccacgagcgatgaacatctg

SEQ ID NO: 682548 - DNA, 33 bp, Homo sapien
gaccgaatcgtttccaggagcgatgaacatctg

SEQ ID NO: 682549 - DNA, 33 bp, Homo sapien
gtcgtcagcaggggaacagatagcagttgctcc

SEQ ID NO: 682550 - DNA, 33 bp, Homo sapien
gtcgtcagcaggggaagagatagcagttgctcc

SEQ ID NO: 682551 - DNA, 33 bp, Homo sapien
tgaggttaatttggacaatttgatggatgagta

SEQ ID NO: 682552 - DNA, 33 bp, Homo sapien
tgaggttaatttggacgatttgatggatgagta

SEQ ID NO: 682553 - DNA, 33 bp, Homo sapien
aatcttcactcctgtgcagcattaccgaatgga

SEQ ID NO: 682554 - DNA, 33 bp, Homo sapien
aatcttcactcctgtgtagcattaccgaatgga

SEQ ID NO: 682555 - DNA, 33 bp, Homo sapien
acctctgcaaatccatgaaaatggctaaaaaca

SEQ ID NO: 682556 - DNA, 33 bp, Homo sapien
acctctgcaaatccattaaaatggctaaaaaca

SEQ ID NO: 682557 - DNA, 33 bp, Homo sapien
ggtcatgttgcataagcagttttttcctgttct

SEQ ID NO: 682558 - DNA, 33 bp, Homo sapien
ggtcatgttgcataagtagttttttcctgttct

SEQ ID NO: 682559 - DNA, 33 bp, Homo sapien
aattctgataaaaaagaaagatgagcttagagt

SEQ ID NO: 682560 - DNA, 33 bp, Homo sapien
aattctgataaaaaagcaagatgagcttagagt

SEQ ID NO: 682561 - DNA, 33 bp, Homo sapien
ttactgtgcaccagaacgtactccttctgtcta

SEQ ID NO: 682562 - DNA, 33 bp, Homo sapien
ttactgtgcaccagaatgtactccttctgtcta

SEQ ID NO: 682563 - DNA, 33 bp, Homo sapien
atcggtgtatcaaagcaatacctgcactcctct

SEQ ID NO: 682564 - DNA, 33 bp, Homo sapien
atcggtgtatcaaagcgatacctgcactcctct

SEQ ID NO: 682565 - DNA, 33 bp, Homo sapien
tctacattgtgtgaaacgaagtcttttaaaagg

SEQ ID NO: 682566 - DNA, 33 bp, Homo sapien
tctacattgtgtgaaatgaagtcttttaaaagg

SEQ ID NO: 682567 - DNA, 33 bp, Homo sapien
actaggcttacaaaaaagtcatggttctttgag

SEQ ID NO: 682568 - DNA, 33 bp, Homo sapien
actaggcttacaaaaaggtcatggttctttgag

SEQ ID NO: 682569 - DNA, 33 bp, Homo sapien
ttgaaaatcggtgttacggtgatacttatttca

SEQ ID NO: 682570 - DNA, 33 bp, Homo sapien
ttgaaaatcggtgttatggtgatacttatttca

SEQ ID NO: 682571 - DNA, 33 bp, Homo sapien
taaacatgtatctcaacaagcataaagggaata

SEQ ID NO: 682572 - DNA, 33 bp, Homo sapien
taaacatgtatctcaataagcataaagggaata

SEQ ID NO: 682573 - DNA, 33 bp, Homo sapien
cattactcttcctctacgattcagactagtctt

SEQ ID NO: 682574 - DNA, 33 bp, Homo sapien
cattactcttcctctatgattcagactagtctt

SEQ ID NO: 682575 - DNA, 33 bp, Homo sapien; identical to SEQ ID NO: 682573

SEQ ID NO: 682576 - DNA, 33 bp, Homo sapien; identical to SEQ ID NO: 682574

SEQ ID NO: 682577 - DNA, 33 bp, Homo sapien
ctgaggtcaggagttacgtggcaaaaccccatc

SEQ ID NO: 682578 - DNA, 33 bp, Homo sapien
ctgaggtcaggagttatgtggcaaaaccccatc

SEQ ID NO: 682579 - DNA, 33 bp, Homo sapien
tgggaatcacttgataataccttttgtgaaagg

SEQ ID NO: 682580 - DNA, 33 bp, Homo sapien
tgggaatcacttgatagtaccttttgtgaaagg

SEQ ID NO: 682581 - DNA, 33 bp, Homo sapien
cagtcccttctggtaacagtactccaattttcc

SEQ ID NO: 682582 - DNA, 33 bp, Homo sapien
cagtcccttctggtaatagtactccaattttcc

SEQ ID NO: 682583 - DNA, 33 bp, Homo sapien
tattcctttgtgtgaactaccacattgaccata

SEQ ID NO: 682584 - DNA, 33 bp, Homo sapien
tattcctttgtgtgaattaccacattgaccata

SEQ ID NO: 682585 - DNA, 33 bp, Homo sapien
tgagctctggatacacaatgggatttctgcact

SEQ ID NO: 682586 - DNA, 33 bp, Homo sapien
tgagctctggatacacgatgggatttctgcact

SEQ ID NO: 682587 - DNA, 33 bp, Homo sapien
tagccctttttgtgcacgaatccatatagcttc

SEQ ID NO: 682588 - DNA, 33 bp, Homo sapien
tagccctttttgtgcatgaatccatatagcttc

SEQ ID NO: 682589 - DNA, 33 bp, Homo sapien
gctgcaaaacgttaagaaatattaatggcgttg

SEQ ID NO: 682590 - DNA, 33 bp, Homo sapien
gctgcaaaacgttaaggaatattaatggcgttg

SEQ ID NO: 682591 - DNA, 33 bp, Homo sapien
tgtgtccctaacgagacgagcacaatcccgtga

SEQ ID NO: 682592 - DNA, 33 bp, Homo sapien
tgtgtccctaacgagaggagcacaatcccgtga

SEQ ID NO: 682593 - DNA, 33 bp, Homo sapien
atactaacaagcgagcagaagtgctattccgtg

SEQ ID NO: 682594 - DNA, 33 bp, Homo sapien
atactaacaagcgagcggaagtgctattccgtg

SEQ ID NO: 682595 - DNA, 33 bp, Homo sapien
tcatacaaagtagttaagttcacaggctccggt

SEQ ID NO: 682596 - DNA, 33 bp, Homo sapien
tcatacaaagtagttaggttcacaggctccggt

SEQ ID NO: 682597 - DNA, 33 bp, Homo sapien
ggtctatgaagaagtcaactgagttattactgc

SEQ ID NO: 682598 - DNA, 33 bp, Homo sapien
ggtctatgaagaagtcgactgagttattactgc

SEQ ID NO: 682599 - DNA, 33 bp, Homo sapien
ttttttctgatatcctaacagaaggttcaggaa

SEQ ID NO: 682600 - DNA, 33 bp, Homo sapien
ttttttctgatatcctgacagaaggttcaggaa

SEQ ID NO: 682601 - DNA, 33 bp, Homo sapien
ctcatggacaactgcacacgaacaaaaacatcg

SEQ ID NO: 682602 - DNA, 33 bp, Homo sapien
ctcatggacaactgcagacgaacaaaaacatcg

SEQ ID NO: 682603 - DNA, 33 bp, Homo sapien
ctacctgtgctgtagacatcagtaaccctcagg

SEQ ID NO: 682604 - DNA, 33 bp, Homo sapien
ctacctgtgctgtagagatcagtaaccctcagg

SEQ ID NO: 682605 - DNA, 33 bp, Homo sapien
tgagattcttctttgaaccatcgattatttaga

SEQ ID NO: 682606 - DNA, 33 bp, Homo sapien
tgagattcttctttgacccatcgattatttaga

SEQ ID NO: 682607 - DNA, 33 bp, Homo sapien
gtatttggagaatatacgctgtatgatttgagt

SEQ ID NO: 682608 - DNA, 33 bp, Homo sapien
gtatttggagaatatatgctgtatgatttgagt

SEQ ID NO: 682609 - DNA, 33 bp, Homo sapien
cagtgtggctgttctcaagcacttctgggcttc

SEQ ID NO: 682610 - DNA, 33 bp, Homo sapien
cagtgtggctgttctcgagcacttctgggcttc

SEQ ID NO: 682611 - DNA, 33 bp, Homo sapien
taaataataactacacactcccaggtgacatct

SEQ ID NO: 682612 - DNA, 33 bp, Homo sapien
taaataataactacacgctcccaggtgacatct

SEQ ID NO: 682613 - DNA, 33 bp, Homo sapien; identical to SEQ ID NO: 682611

SEQ ID NO: 682614 - DNA, 33 bp, Homo sapien; identical to SEQ ID NO: 682612

SEQ ID NO: 682615 - DNA, 33 bp, Homo sapien
tgaaaggggaaatgaacaagatactgccaacat

SEQ ID NO: 682616 - DNA, 33 bp, Homo sapien
tgaaaggggaaatgaataagatactgccaacat

SEQ ID NO: 682617 - DNA, 33 bp, Homo sapien
aaactgtattatatggccaacaatcaagaaatc

SEQ ID NO: 682618 - DNA, 33 bp, Homo sapien
aaactgtattatatggtcaacaatcaagaaatc

SEQ ID NO: 682619 - DNA, 33 bp, Homo sapien
aagtgtctcatctaccagacggtctcctctgat

SEQ ID NO: 682620 - DNA, 33 bp, Homo sapien
aagtgtctcatctaccggacggtctcctctgat

SEQ ID NO: 682621 - DNA, 33 bp, Homo sapien
gtgatgcacaaggagacggaagcagtatgacct

SEQ ID NO: 682622 - DNA, 33 bp, Homo sapien
gtgatgcacaaggagatggaagcagtatgacct

SEQ ID NO: 682623 - DNA, 33 bp, Homo sapien
ctagaatctgataaccaacaaaggctgtagttt

SEQ ID NO: 682624 - DNA, 33 bp, Homo sapien
ctagaatctgataacccacaaaggctgtagttt

SEQ ID NO: 682625 - DNA, 33 bp, Homo sapien
atcacagatgctgaaacgcaaatgcagtgtgct

SEQ ID NO: 682626 - DNA, 33 bp, Homo sapien
atcacagatgctgaaaggcaaatgcagtgtgct

SEQ ID NO: 682627 - DNA, 33 bp, Homo sapien
ctagagggcagagacaactgtgtgtatttgtgt

SEQ ID NO: 682628 - DNA, 33 bp, Homo sapien
ctagagggcagagacacctgtgtgtatttgtgt

SEQ ID NO: 682629 - DNA, 33 bp, Homo sapien
atatggtcaaaagttaaaggtatgttgggcaaa

SEQ ID NO: 682630 - DNA, 33 bp, Homo sapien
atatggtcaaaagttacaggtatgttgggcaaa

SEQ ID NO: 682631 - DNA, 33 bp, Homo sapien
aaatccactctcagagaccatagatttcctatt

SEQ ID NO: 682632 - DNA, 33 bp, Homo sapien
aaatccactctcagaggccatagatttcctatt

SEQ ID NO: 682633 - DNA, 33 bp, Homo sapien
tactgataacacctacactttttttggaagtgt

SEQ ID NO: 682634 - DNA, 33 bp, Homo sapien
tactgataacacctacgctttttttggaagtgt

SEQ ID NO: 682635 - DNA, 33 bp, Homo sapien
tacttattctttcttaagacgtgaaaacaatag

SEQ ID NO: 682636 - DNA, 33 bp, Homo sapien
tacttattctttcttacgacgtgaaaacaatag

SEQ ID NO: 682637 - DNA, 33 bp, Homo sapien
tatgattcttgggtggccacatcacctgcattt

SEQ ID NO: 682638 - DNA, 33 bp, Homo sapien
tatgattcttgggtggtcacatcacctgcattt

SEQ ID NO: 682639 - DNA, 33 bp, Homo sapien
ttattagccacgtcaaaaataatatttaaagag

SEQ ID NO: 682640 - DNA, 33 bp, Homo sapien
ttattagccacgtcaagaataatatttaaagag

SEQ ID NO: 682641 - DNA, 33 bp, Homo sapien
tgtgctgtttttcaaaggcagacttactcagac

SEQ ID NO: 682642 - DNA, 33 bp, Homo sapien
tgtgctgtttttcaaatgcagacttactcagac

SEQ ID NO: 682643 - DNA, 33 bp, Homo sapien
ttaaatggcatatagcagcattgtttcatttaa

SEQ ID NO: 682644 - DNA, 33 bp, Homo sapien
ttaaatggcatatagcggcattgtttcatttaa

SEQ ID NO: 682645 - DNA, 33 bp, Homo sapien
ttaccagagatttggacagtcatggattctttc

SEQ ID NO: 682646 - DNA, 33 bp, Homo sapien
ttaccagagatttggatagtcatggattctttc

SEQ ID NO: 682647 - DNA, 33 bp, Homo sapien
ctacattaaatttatcgctccacattaaagttt

SEQ ID NO: 682648 - DNA, 33 bp, Homo sapien
ctacattaaatttatctctccacattaaagttt

SEQ ID NO: 682649 - DNA, 33 bp, Homo sapien
atgtcttgaataatacccccacaagcacaggga

SEQ ID NO: 682650 - DNA, 33 bp, Homo sapien
atgtcttgaataatactcccacaagcacaggga

SEQ ID NO: 682651 - DNA, 33 bp, Homo sapien
cctgatgctaaagcacccttcttgtttactttt

SEQ ID NO: 682652 - DNA, 33 bp, Homo sapien
cctgatgctaaagcactcttcttgtttactttt

SEQ ID NO: 682653 - DNA, 33 bp, Homo sapien
tttaaggagacataagacagcaatcgatatatg

SEQ ID NO: 682654 - DNA, 33 bp, Homo sapien
tttaaggagacataaggcagcaatcgatatatg

SEQ ID NO: 682655 - DNA, 33 bp, Homo sapien
attccatgtcaataataactaaaagagtgtagc

SEQ ID NO: 682656 - DNA, 33 bp, Homo sapien
attccatgtcaataatcactaaaagagtgtagc

SEQ ID NO: 682657 - DNA, 33 bp, Homo sapien
ctgcactacctgattccaaaatatactataaag

SEQ ID NO: 682658 - DNA, 33 bp, Homo sapien
ctgcactacctgattcgaaaatatactataaag

SEQ ID NO: 682659 - DNA, 33 bp, Homo sapien
atttaaaaagtggttacactacaggatcaatga

SEQ ID NO: 682660 - DNA, 33 bp, Homo sapien
atttaaaaagtggttatactacaggatcaatga

SEQ ID NO: 682661 - DNA, 33 bp, Homo sapien
tctgtaaatgagttaactgtatgcaacgcctca

SEQ ID NO: 682662 - DNA, 33 bp, Homo sapien
tctgtaaatgagttaattgtatgcaacgcctca

SEQ ID NO: 682663 - DNA, 33 bp, Homo sapien
aatgtggcaaagcctacaacttatcctcaaccc

SEQ ID NO: 682664 - DNA, 33 bp, Homo sapien
aatgtggcaaagcctataacttatcctcaaccc

SEQ ID NO: 682665 - DNA, 33 bp, Homo sapien
tatcctcaacccttacgaaacataagagaattc

SEQ ID NO: 682666 - DNA, 33 bp, Homo sapien
tatcctcaacccttactaaacataagagaattc

SEQ ID NO: 682667 - DNA, 33 bp, Homo sapien
taatcctgtaaaggaaatggatttttgacatca

SEQ ID NO: 682668 - DNA, 33 bp, Homo sapien
taatcctgtaaaggaagtggatttttgacatca

SEQ ID NO: 682669 - DNA, 33 bp, Homo sapien
cagatactgggccaaactgagctgttggaaacc

SEQ ID NO: 682670 - DNA, 33 bp, Homo sapien
cagatactgggccaaattgagctgttggaaacc

SEQ ID NO: 682671 - DNA, 33 bp, Homo sapien
tccacttgaatttttacaaagaatgtcttagtg

SEQ ID NO: 682672 - DNA, 33 bp, Homo sapien
tccacttgaatttttagaaagaatgtcttagtg

SEQ ID NO: 682673 - DNA, 33 bp, Homo sapien
gttttgggctaatttacagatcacaggcaggac

SEQ ID NO: 682674 - DNA, 33 bp, Homo sapien
gttttgggctaatttatagatcacaggcaggac

SEQ ID NO: 682675 - DNA, 33 bp, Homo sapien
ttgcctataaaagttacgtggtatttgcctgta

SEQ ID NO: 682676 - DNA, 33 bp, Homo sapien
ttgcctataaaagttaggtggtatttgcctgta

SEQ ID NO: 682677 - DNA, 33 bp, Homo sapien
tctttccctgacaaagaacaaaacaatgagaca

SEQ ID NO: 682678 - DNA, 33 bp, Homo sapien
tctttccctgacaaaggacaaaacaatgagaca

SEQ ID NO: 682679 - DNA, 33 bp, Homo sapien
atggtgcacagaatgtcaagggtacaggggaac

SEQ ID NO: 682680 - DNA, 33 bp, Homo sapien
atggtgcacagaatgtgaagggtacaggggaac

SEQ ID NO: 682681 - DNA, 33 bp, Homo sapien
cagcctgtccagtgggaatttgagctcagacaa

SEQ ID NO: 682682 - DNA, 33 bp, Homo sapien
cagcctgtccagtggggatttgagctcagacaa

SEQ ID NO: 682683 - DNA, 33 bp, Homo sapien; identical to SEQ ID NO: 682681

SEQ ID NO: 682684 - DNA, 33 bp, Homo sapien; identical to SEQ ID NO: 682682

SEQ ID NO: 682685 - DNA, 33 bp, Homo sapien
gaattccaaaacataagtaagactgtgtactac

SEQ ID NO: 682686 - DNA, 33 bp, Homo sapien
gaattccaaaacataattaagactgtgtactac

SEQ ID NO: 682687 - DNA, 33 bp, Homo sapien
atgtgtctccaaaaaacggaaactggattggga

SEQ ID NO: 682688 - DNA, 33 bp, Homo sapien
atgtgtctccaaaaaatggaaactggattggga

SEQ ID NO: 682689 - DNA, 33 bp, Homo sapien
tgtgaagaacgtgtcaaaatctttacctcatcc

SEQ ID NO: 682690 - DNA, 33 bp, Homo sapien
tgtgaagaacgtgtcagaatctttacctcatcc

SEQ ID NO: 682691 - DNA, 33 bp, Homo sapien; identical to SEQ ID NO: 682689

SEQ ID NO: 682692 - DNA, 33 bp, Homo sapien; identical to SEQ ID NO: 682690

SEQ ID NO: 682693 - DNA, 33 bp, Homo sapien
tgtaatagatgctccacaattagccataaatat

SEQ ID NO: 682694 - DNA, 33 bp, Homo sapien
tgtaatagatgctccataattagccataaatat

SEQ ID NO: 682695 - DNA, 33 bp, Homo sapien
ctcacccttggatgcacattagcctgttgtgca

SEQ ID NO: 682696 - DNA, 33 bp, Homo sapien
ctcacccttggatgcatattagcctgttgtgca

SEQ ID NO: 682697 - DNA, 33 bp, Homo sapien; identical to SEQ ID NO: 682695

SEQ ID NO: 682698 - DNA, 33 bp, Homo sapien; identical to SEQ ID NO: 682696

SEQ ID NO: 682699 - DNA, 33 bp, Homo sapien
tgcaggaaagagagaagggaagattaccaggac

SEQ ID NO: 682700 - DNA, 33 bp, Homo sapien
tgcaggaaagagagaatggaagattaccaggac

SEQ ID NO: 682701 - DNA, 33 bp, Homo sapien
aatccagactgtgagaccctggaatcctccagc

SEQ ID NO: 682702 - DNA, 33 bp, Homo sapien
aatccagactgtgagatcctggaatcctccagc

SEQ ID NO: 682703 - DNA, 33 bp, Homo sapien
gacatacagctcctcaataacacaaatattcca

SEQ ID NO: 682704 - DNA, 33 bp, Homo sapien
gacatacagctcctcagtaacacaaatattcca

SEQ ID NO: 682705 - DNA, 33 bp, Homo sapien
gacatagaacatatcgcaacatatggcatagca

SEQ ID NO: 682706 - DNA, 33 bp, Homo sapien
gacatagaacatatcggaacatatggcatagca

SEQ ID NO: 682707 - DNA, 33 bp, Homo sapien
taaaacatgtatatacggaattccaatacatgc

SEQ ID NO: 682708 - DNA, 33 bp, Homo sapien
taaaacatgtatatactgaattccaatacatgc

SEQ ID NO: 682709 - DNA, 33 bp, Homo sapien
acgtacatgaggaatacaagagaagctgcacaa

SEQ ID NO: 682710 - DNA, 33 bp, Homo sapien
acgtacatgaggaatataagagaagctgcacaa

SEQ ID NO: 682711 - DNA, 33 bp, Homo sapien
ctgaagcgtcaggatacagttttggaaatagat

SEQ ID NO: 682712 - DNA, 33 bp, Homo sapien
ctgaagcgtcaggatatagttttggaaatagat

SEQ ID NO: 682713 - DNA, 33 bp, Homo sapien
ctgggcagaaactcgacgaggataaaagaagag

SEQ ID NO: 682714 - DNA, 33 bp, Homo sapien
ctgggcagaaactcgatgaggataaaagaagag

SEQ ID NO: 682715 - DNA, 33 bp, Homo sapien
tcagagatatgagaaactcctttgcattaggtg

SEQ ID NO: 682716 - DNA, 33 bp, Homo sapien
tcagagatatgagaaattcctttgcattaggtg

SEQ ID NO: 682717 - DNA, 33 bp, Homo sapien
aagcaagcaccatctacaccgggaaattacctc

SEQ ID NO: 682718 - DNA, 33 bp, Homo sapien
aagcaagcaccatctataccgggaaattacctc

SEQ ID NO: 682719 - DNA, 33 bp, Homo sapien
aagtcaatgtggggctcaattaaaataggaata

SEQ ID NO: 682720 - DNA, 33 bp, Homo sapien
aagtcaatgtggggctgaattaaaataggaata

SEQ ID NO: 682721 - DNA, 33 bp, Homo sapien
cagtgttcaaactgggaagagcgtaaactactg

SEQ ID NO: 682722 - DNA, 33 bp, Homo sapien
cagtgttcaaactgggcagagcgtaaactactg

SEQ ID NO: 682723 - DNA, 33 bp, Homo sapien
acgcagagccttgaggcacgggtgatggggttc

SEQ ID NO: 682724 - DNA, 33 bp, Homo sapien
acgcagagccttgagggacgggtgatggggttc

SEQ ID NO: 682725 - DNA, 33 bp, Homo sapien
agttgatcagcccccaatagagctgtcagcctg

SEQ ID NO: 682726 - DNA, 33 bp, Homo sapien
agttgatcagcccccagtagagctgtcagcctg

SEQ ID NO: 682727 - DNA, 33 bp, Homo sapien
cgtaacttcagatcccaaaagccttttgcccaa

SEQ ID NO: 682728 - DNA, 33 bp, Homo sapien
cgtaacttcagatcccgaaagccttttgcccaa

SEQ ID NO: 682729 - DNA, 33 bp, Homo sapien
cattagggaggtgaaacgagcgagccgcctagt

SEQ ID NO: 682730 - DNA, 33 bp, Homo sapien
cattagggaggtgaaatgagcgagccgcctagt

SEQ ID NO: 682731 - DNA, 33 bp, Homo sapien
gacacagggtgttcacaaggaagtaccaggtct

SEQ ID NO: 682732 - DNA, 33 bp, Homo sapien
gacacagggtgttcacgaggaagtaccaggtct

SEQ ID NO: 682733 - DNA, 33 bp, Homo sapien
caaaacgatgtacgtgaaaactggaatagaaca

SEQ ID NO: 682734 - DNA, 33 bp, Homo sapien
caaaacgatgtacgtggaaactggaatagaaca

SEQ ID NO: 682735 - DNA, 33 bp, Homo sapien
acacatatttgggtcacaccatagcttattcag

SEQ ID NO: 682736 - DNA, 33 bp, Homo sapien
acacatatttgggtcataccatagcttattcag

SEQ ID NO: 682737 - DNA, 33 bp, Homo sapien
ctgagtggtccgatgaacatttgaaaacgggca

SEQ ID NO: 682738 - DNA, 33 bp, Homo sapien
ctgagtggtccgatgagcatttgaaaacgggca

SEQ ID NO: 682739 - DNA, 33 bp, Homo sapien
aaactactgggtgttacaagatctaatctctgg

SEQ ID NO: 682740 - DNA, 33 bp, Homo sapien
aaactactgggtgttataagatctaatctctgg

SEQ ID NO: 682741 - DNA, 33 bp, Homo sapien
ctatgaatctggttcagtcactctaatcaatac

SEQ ID NO: 682742 - DNA, 33 bp, Homo sapien
ctatgaatctggttcattcactctaatcaatac

SEQ ID NO: 682743 - DNA, 33 bp, Homo sapien
aaccagcgacagcaaaggaggagccggagtatc

SEQ ID NO: 682744 - DNA, 33 bp, Homo sapien
aaccagcgacagcaaatgaggagccggagtatc

SEQ ID NO: 682745 - DNA, 33 bp, Homo sapien
gagcatttggttgagacatgggggtaggcgcag

SEQ ID NO: 682746 - DNA, 33 bp, Homo sapien
gagcatttggttgagatatgggggtaggcgcag

SEQ ID NO: 682747 - DNA, 33 bp, Homo sapien
tcatgataagcctcaagtgtagttggactttta

SEQ ID NO: 682748 - DNA, 33 bp, Homo sapien
tcatgataagcctcaattgtagttggactttta

SEQ ID NO: 682749 - DNA, 33 bp, Homo sapien
caggggtctcctcagtaaaacgaagagcacagg

SEQ ID NO: 682750 - DNA, 33 bp, Homo sapien
caggggtctcctcagtgaaacgaagagcacagg

SEQ ID NO: 682751 - DNA, 33 bp, Homo sapien
caaggacgtaagtaacccttcaactgaagagga

SEQ ID NO: 682752 - DNA, 33 bp, Homo sapien
caaggacgtaagtaactcttcaactgaagagga

SEQ ID NO: 682753 - DNA, 33 bp, Homo sapien
agactagaggagcagacggagcagagcaggctg

SEQ ID NO: 682754 - DNA, 33 bp, Homo sapien
agactagaggagcagatggagcagagcaggctg

SEQ ID NO: 682755 - DNA, 33 bp, Homo sapien
gagatgttcgggtccaagaaagaggtcacttct

SEQ ID NO: 682756 - DNA, 33 bp, Homo sapien
gagatgttcgggtccaggaaagaggtcacttct

SEQ ID NO: 682757 - DNA, 33 bp, Homo sapien
cctagcgtttcagcaccgagcagagcaggtggt

SEQ ID NO: 682758 - DNA, 33 bp, Homo sapien
cctagcgtttcagcactgagcagagcaggtggt

SEQ ID NO: 682759 - DNA, 33 bp, Homo sapien
ggtgagcctgtggagacggagatcggaaactcg

SEQ ID NO: 682760 - DNA, 33 bp, Homo sapien
ggtgagcctgtggagatggagatcggaaactcg

SEQ ID NO: 682761 - DNA, 33 bp, Homo sapien
tatgcttgacgacttacgtgaaattgataaatt

SEQ ID NO: 682762 - DNA, 33 bp, Homo sapien
tatgcttgacgacttatgtgaaattgataaatt

SEQ ID NO: 682763 - DNA, 33 bp, Homo sapien
ccgtgctctcagacaacacaagacagaggccac

SEQ ID NO: 682764 - DNA, 33 bp, Homo sapien
ccgtgctctcagacaatacaagacagaggccac

SEQ ID NO: 682765 - DNA, 33 bp, Homo sapien
ttttgcaaacttcagcaaatacttggagaaatg

SEQ ID NO: 682766 - DNA, 33 bp, Homo sapien
ttttgcaaacttcagcgaatacttggagaaatg

SEQ ID NO: 682767 - DNA, 33 bp, Homo sapien
tcatcgtcatctatcacgcccggtccactctgg

SEQ ID NO: 682768 - DNA, 33 bp, Homo sapien
tcatcgtcatctatcatgcccggtccactctgg

SEQ ID NO: 682769 - DNA, 33 bp, Homo sapien
gtgcctgccgaggcaacaatggagcccaacaga

SEQ ID NO: 682770 - DNA, 33 bp, Homo sapien
gtgcctgccgaggcaagaatggagcccaacaga

SEQ ID NO: 682771 - DNA, 33 bp, Homo sapien
ggcatgcacgcggtcaatatgggctcacacagg

SEQ ID NO: 682772 - DNA, 33 bp, Homo sapien
ggcatgcacgcggtcagtatgggctcacacagg

SEQ ID NO: 682773 - DNA, 33 bp, Homo sapien
agggttagatgcagacactctccaaccacagcg

SEQ ID NO: 682774 - DNA, 33 bp, Homo sapien
agggttagatgcagacgctctccaaccacagcg

SEQ ID NO: 682775 - DNA, 33 bp, Homo sapien
aaacagaagggttgaactggtgaagaatccgtg

SEQ ID NO: 682776 - DNA, 33 bp, Homo sapien
aaacagaagggttgaattggtgaagaatccgtg

SEQ ID NO: 682777 - DNA, 33 bp, Homo sapien
gcgactggaatgcttacgcacagcttttggaaa

SEQ ID NO: 682778 - DNA, 33 bp, Homo sapien
gcgactggaatgcttatgcacagcttttggaaa

SEQ ID NO: 682779 - DNA, 33 bp, Homo sapien
catagctgtgaggaaactgaacagaccccctga

SEQ ID NO: 682780 - DNA, 33 bp, Homo sapien
catagctgtgaggaaattgaacagaccccctga

SEQ ID NO: 682781 - DNA, 33 bp, Homo sapien
tccgcagttactcatgcacacgctcagagtgaa

SEQ ID NO: 682782 - DNA, 33 bp, Homo sapien
tccgcagttactcatggacacgctcagagtgaa

SEQ ID NO: 682783 - DNA, 33 bp, Homo sapien
caaaccgtgatacaagacagaagtgaaggcagc

SEQ ID NO: 682784 - DNA, 33 bp, Homo sapien
caaaccgtgatacaaggcagaagtgaaggcagc

SEQ ID NO: 682785 - DNA, 33 bp, Homo sapien
tcctatttactcaatgcaaatttttcaagataa

SEQ ID NO: 682786 - DNA, 33 bp, Homo sapien
tcctatttactcaatggaaatttttcaagataa

SEQ ID NO: 682787 - DNA, 33 bp, Homo sapien
ctgctcttcaggatgacgcctggtgtgacttga

SEQ ID NO: 682788 - DNA, 33 bp, Homo sapien
ctgctcttcaggatgatgcctggtgtgacttga

SEQ ID NO: 682789 - DNA, 33 bp, Homo sapien
gagtccatgtgtgtgaagtagtcaagatcgtag

SEQ ID NO: 682790 - DNA, 33 bp, Homo sapien
gagtccatgtgtgtgaggtagtcaagatcgtag

SEQ ID NO: 682791 - DNA, 33 bp, Homo sapien
atcatagcccactgtacggagacacacattgtg

SEQ ID NO: 682792 - DNA, 33 bp, Homo sapien
atcatagcccactgtatggagacacacattgtg

SEQ ID NO: 682793 - DNA, 33 bp, Homo sapien
aaaaatactttgaggaaagctgcatccacagac

SEQ ID NO: 682794 - DNA, 33 bp, Homo sapien
aaaaatactttgaggacagctgcatccacagac

SEQ ID NO: 682795 - DNA, 33 bp, Homo sapien
gcctggcctgagttacaggtggtttcgtaggac

SEQ ID NO: 682796 - DNA, 33 bp, Homo sapien
gcctggcctgagttacgggtggtttcgtaggac

SEQ ID NO: 682797 - DNA, 33 bp, Homo sapien
accattttggtgaatacgtagcctcccatgcac

SEQ ID NO: 682798 - DNA, 33 bp, Homo sapien
accattttggtgaatatgtagcctcccatgcac

SEQ ID NO: 682799 - DNA, 33 bp, Homo sapien
gtgctgtccttccaccaggtgcatgggaggcta

SEQ ID NO: 682800 - DNA, 33 bp, Homo sapien
gtgctgtccttccacccggtgcatgggaggcta

SEQ ID NO: 682801 - DNA, 33 bp, Homo sapien
ggagcagcaaatggaacgtagttcgaagggacg

SEQ ID NO: 682802 - DNA, 33 bp, Homo sapien
ggagcagcaaatggaatgtagttcgaagggacg

SEQ ID NO: 682803 - DNA, 33 bp, Homo sapien
gacaccagcacttgaacgctctgcggagatttt

SEQ ID NO: 682804 - DNA, 33 bp, Homo sapien
gacaccagcacttgaatgctctgcggagatttt

SEQ ID NO: 682805 - DNA, 33 bp, Homo sapien
gagccctttatagatacgaactcagtcgtgtag

SEQ ID NO: 682806 - DNA, 33 bp, Homo sapien
gagccctttatagatatgaactcagtcgtgtag

SEQ ID NO: 682807 - DNA, 33 bp, Homo sapien
actgggaagaggaagacgtttaattgttaccaa

SEQ ID NO: 682808 - DNA, 33 bp, Homo sapien
actgggaagaggaagatgtttaattgttaccaa

SEQ ID NO: 682809 - DNA, 33 bp, Homo sapien
aagtccccttggggccagaagttgcttgagttc

SEQ ID NO: 682810 - DNA, 33 bp, Homo sapien
aagtccccttggggccggaagttgcttgagttc

SEQ ID NO: 682811 - DNA, 33 bp, Homo sapien
tagagaatggacaagccgcaactgagaggactg

SEQ ID NO: 682812 - DNA, 33 bp, Homo sapien
tagagaatggacaagctgcaactgagaggactg

SEQ ID NO: 682813 - DNA, 33 bp, Homo sapien
tctttctctttcagaccgacgcagatatccagg

SEQ ID NO: 682814 - DNA, 33 bp, Homo sapien
tctttctctttcagactgacgcagatatccagg

SEQ ID NO: 682815 - DNA, 33 bp, Homo sapien
gttatttaaaaagcaaatgtaaggaccttaaga

SEQ ID NO: 682816 - DNA, 33 bp, Homo sapien
gttatttaaaaagcaagtgtaaggaccttaaga

SEQ ID NO: 682817 - DNA, 33 bp, Homo sapien
accgctcccgacctacaagacgctgtttcttaa

SEQ ID NO: 682818 - DNA, 33 bp, Homo sapien
accgctcccgacctacgagacgctgtttcttaa

SEQ ID NO: 682819 - DNA, 33 bp, Homo sapien
tagtgttttgtgctaacgtggtcctggctgggg

SEQ ID NO: 682820 - DNA, 33 bp, Homo sapien
tagtgttttgtgctaatgtggtcctggctgggg

SEQ ID NO: 682821 - DNA, 33 bp, Homo sapien
gaatgacaagatgtagaaagaacctcatgcctc

SEQ ID NO: 682822 - DNA, 33 bp, Homo sapien
gaatgacaagatgtaggaagaacctcatgcctc

SEQ ID NO: 682823 - DNA, 33 bp, Homo sapien
atggtggagttaggtgaagaaccagggttgcag

SEQ ID NO: 682824 - DNA, 33 bp, Homo sapien
atggtggagttaggtggagaaccagggttgcag

SEQ ID NO: 682825 - DNA, 33 bp, Homo sapien
cactttcaacaaagaactctgaagtctgtgaaa

SEQ ID NO: 682826 - DNA, 33 bp, Homo sapien
cactttcaacaaagaattctgaagtctgtgaaa

SEQ ID NO: 682827 - DNA, 33 bp, Homo sapien
actaacagcccagcacgaaaataaataataaag

SEQ ID NO: 682828 - DNA, 33 bp, Homo sapien
actaacagcccagcactaaaataaataataaag

SEQ ID NO: 682829 - DNA, 33 bp, Homo sapien
agcagtccaaatcattaaatacctaacagagat

SEQ ID NO: 682830 - DNA, 33 bp, Homo sapien
agcagtccaaatcattgaatacctaacagagat

SEQ ID NO: 682831 - DNA, 33 bp, Homo sapien
aagtgtctcgggcagccaggtgaaaagtagatt

SEQ ID NO: 682832 - DNA, 33 bp, Homo sapien
aagtgtctcgggcagcgaggtgaaaagtagatt

SEQ ID NO: 682833 - DNA, 33 bp, Homo sapien
gtgccactgagttcaacgatgtccttactaatt

SEQ ID NO: 682834 - DNA, 33 bp, Homo sapien
gtgccactgagttcaatgatgtccttactaatt

SEQ ID NO: 682835 - DNA, 33 bp, Homo sapien
ccagatggagataacacaatgtggtagtaaggg

SEQ ID NO: 682836 - DNA, 33 bp, Homo sapien
ccagatggagataacataatgtggtagtaaggg

SEQ ID NO: 682837 - DNA, 33 bp, Homo sapien
agatcttttggctggacacattaggttcttttc

SEQ ID NO: 682838 - DNA, 33 bp, Homo sapien
agatcttttggctggagacattaggttcttttc

SEQ ID NO: 682839 - DNA, 33 bp, Homo sapien
cctgcctgtagcactacattcaaagtgattttc

SEQ ID NO: 682840 - DNA, 33 bp, Homo sapien
cctgcctgtagcactatattcaaagtgattttc

SEQ ID NO: 682841 - DNA, 33 bp, Homo sapien
catttgctggtgaaaacatggtgtcttattctg

SEQ ID NO: 682842 - DNA, 33 bp, Homo sapien
catttgctggtgaaaagatggtgtcttattctg

SEQ ID NO: 682843 - DNA, 33 bp, Homo sapien
ttcaggacccgctggacgatctttcctcccaca

SEQ ID NO: 682844 - DNA, 33 bp, Homo sapien
ttcaggacccgctggatgatctttcctcccaca

SEQ ID NO: 682845 - DNA, 33 bp, Homo sapien
gccaacgtgcagccaacttcaggacccgctgga

SEQ ID NO: 682846 - DNA, 33 bp, Homo sapien
gccaacgtgcagccaatttcaggacccgctgga

SEQ ID NO: 682847 - DNA, 33 bp, Homo sapien
cagggaagacgagggcaagttcaatgggggtca

SEQ ID NO: 682848 - DNA, 33 bp, Homo sapien
cagggaagacgagggcgagttcaatgggggtca

SEQ ID NO: 682849 - DNA, 33 bp, Homo sapien
agtagtcttaagctacccagaggccaaggggaa

SEQ ID NO: 682850 - DNA, 33 bp, Homo sapien
agtagtcttaagctacgcagaggccaaggggaa

SEQ ID NO: 682851 - DNA, 33 bp, Homo sapien
gctcccagcatggacgaagaagaactcactggg

SEQ ID NO: 682852 - DNA, 33 bp, Homo sapien
gctcccagcatggacggagaagaactcactggg

SEQ ID NO: 682853 - DNA, 33 bp, Homo sapien
aagcgcctcttcacgcaagcgttcacctcggtc

SEQ ID NO: 682854 - DNA, 33 bp, Homo sapien
aagcgcctcttcacgcgagcgttcacctcggtc

SEQ ID NO: 682855 - DNA, 33 bp, Homo sapien
aaagcaaagtgaaaacacctcttttgcacccca

SEQ ID NO: 682856 - DNA, 33 bp, Homo sapien
aaagcaaagtgaaaacgcctcttttgcacccca

SEQ ID NO: 682857 - DNA, 33 bp, Homo sapien
ctgggagtgtgggcgccgattactcacactgtg

SEQ ID NO: 682858 - DNA, 33 bp, Homo sapien
ctgggagtgtgggcgctgattactcacactgtg

SEQ ID NO: 682859 - DNA, 33 bp, Homo sapien
ggcacccacatcctcacggggctgagtctcttc

SEQ ID NO: 682860 - DNA, 33 bp, Homo sapien
ggcacccacatcctcatggggctgagtctcttc

SEQ ID NO: 682861 - DNA, 33 bp, Homo sapien
aaacgttccgacttccaataagtccatgtctgt

SEQ ID NO: 682862 - DNA, 33 bp, Homo sapien
aaacgttccgacttccgataagtccatgtctgt

SEQ ID NO: 682863 - DNA, 33 bp, Homo sapien
agatgtccgcagctgacgatgacctcaccttcc

SEQ ID NO: 682864 - DNA, 33 bp, Homo sapien
agatgtccgcagctgatgatgacctcaccttcc

SEQ ID NO: 682865 - DNA, 33 bp, Homo sapien
ttcatctcatgaaaccaggataatctaattcaa

SEQ ID NO: 682866 - DNA, 33 bp, Homo sapien
ttcatctcatgaaaccgggataatctaattcaa

SEQ ID NO: 682867 - DNA, 33 bp, Homo sapien
agaatgctgactcatacgattttgtatgtgaga

SEQ ID NO: 682868 - DNA, 33 bp, Homo sapien
agaatgctgactcatatgattttgtatgtgaga

SEQ ID NO: 682869 - DNA, 33 bp, Homo sapien
ggtcacctggccagtcccaggattagctgcagg

SEQ ID NO: 682870 - DNA, 33 bp, Homo sapien
ggtcacctggccagtctcaggattagctgcagg

SEQ ID NO: 682871 - DNA, 33 bp, Homo sapien
gtgtgacatccgtgcaagcccgtgaggcccacg

SEQ ID NO: 682872 - DNA, 33 bp, Homo sapien
gtgtgacatccgtgcaggcccgtgaggcccacg

SEQ ID NO: 682873 - DNA, 33 bp, Homo sapien
acagctcccgcgaacaaagacctggcacacagc

SEQ ID NO: 682874 - DNA, 33 bp, Homo sapien
acagctcccgcgaacacagacctggcacacagc

SEQ ID NO: 682875 - DNA, 33 bp, Homo sapien
gcttcggcttctccgaacttacctagatgagat

SEQ ID NO: 682876 - DNA, 33 bp, Homo sapien
gcttcggcttctccgagcttacctagatgagat

SEQ ID NO: 682877 - DNA, 33 bp, Homo sapien
ggtatcagtaaaatcccagtcctgaacctgaac

SEQ ID NO: 682878 - DNA, 33 bp, Homo sapien
ggtatcagtaaaatcctagtcctgaacctgaac

SEQ ID NO: 682879 - DNA, 33 bp, Homo sapien
tctggaagattcttcacggtttctcacacgggt

SEQ ID NO: 682880 - DNA, 33 bp, Homo sapien
tctggaagattcttcatggtttctcacacgggt

SEQ ID NO: 682881 - DNA, 33 bp, Homo sapien
tcctttcgcgtatgacccaactaagcctcatcg

SEQ ID NO: 682882 - DNA, 33 bp, Homo sapien
tcctttcgcgtatgacgcaactaagcctcatcg

SEQ ID NO: 682883 - DNA, 33 bp, Homo sapien
gaccaagcagtacccacgaccgttcggccagca

SEQ ID NO: 682884 - DNA, 33 bp, Homo sapien
gaccaagcagtacccaggaccgttcggccagca

SEQ ID NO: 682885 - DNA, 33 bp, Homo sapien
gctcaatgcttatctacactggccagtacgtgc

SEQ ID NO: 682886 - DNA, 33 bp, Homo sapien
gctcaatgcttatctatactggccagtacgtgc

SEQ ID NO: 682887 - DNA, 33 bp, Homo sapien
gagccctctggaatgccgagatagttgcataat

SEQ ID NO: 682888 - DNA, 33 bp, Homo sapien
gagccctctggaatgctgagatagttgcataat

SEQ ID NO: 682889 - DNA, 33 bp, Homo sapien
tctaagaaaaaattccagaaaaatgagcagcaa

SEQ ID NO: 682890 - DNA, 33 bp, Homo sapien
tctaagaaaaaattccggaaaaatgagcagcaa

SEQ ID NO: 682891 - DNA, 33 bp, Homo sapien
ggctgcctgtccatgccgagcagacaggaaagt

SEQ ID NO: 682892 - DNA, 33 bp, Homo sapien
ggctgcctgtccatgctgagcagacaggaaagt

SEQ ID NO: 682893 - DNA, 33 bp, Homo sapien
ccgttggtgttcctcacgtctgctgatcccagg

SEQ ID NO: 682894 - DNA, 33 bp, Homo sapien
ccgttggtgttcctcatgtctgctgatcccagg

SEQ ID NO: 682895 - DNA, 33 bp, Homo sapien
aaatgaacaacacatcacccatcacatgacgga

SEQ ID NO: 682896 - DNA, 33 bp, Homo sapien
aaatgaacaacacatcgcccatcacatgacgga

SEQ ID NO: 682897 - DNA, 33 bp, Homo sapien
catcatgtacttcttacgcatgggacttcctca

SEQ ID NO: 682898 - DNA, 33 bp, Homo sapien
catcatgtacttcttatgcatgggacttcctca

SEQ ID NO: 682899 - DNA, 33 bp, Homo sapien
caacatctgtttgtaaatgtctccagtaaaggc

SEQ ID NO: 682900 - DNA, 33 bp, Homo sapien
caacatctgtttgtaagtgtctccagtaaaggc

SEQ ID NO: 682901 - DNA, 33 bp, Homo sapien
ttcacttggcccatcacgtcatgccaggcccgc

SEQ ID NO: 682902 - DNA, 33 bp, Homo sapien
ttcacttggcccatcatgtcatgccaggcccgc

SEQ ID NO: 682903 - DNA, 33 bp, Homo sapien
cctagaacaaaaagacaacaggatctggcgctg

SEQ ID NO: 682904 - DNA, 33 bp, Homo sapien
cctagaacaaaaagacgacaggatctggcgctg

SEQ ID NO: 682905 - DNA, 33 bp, Homo sapien
ctgaaccttatcaaaactaaaacttctgctctt

SEQ ID NO: 682906 - DNA, 33 bp, Homo sapien
ctgaaccttatcaaaattaaaacttctgctctt

SEQ ID NO: 682907 - DNA, 33 bp, Homo sapien
acaggcaagctgcaataatgggaacgcgggagg

SEQ ID NO: 682908 - DNA, 33 bp, Homo sapien
acaggcaagctgcaatgatgggaacgcgggagg

SEQ ID NO: 682909 - DNA, 33 bp, Homo sapien
aggtcagaatccgacacagagtaagtgaaaata

SEQ ID NO: 682910 - DNA, 33 bp, Homo sapien
aggtcagaatccgacagagagtaagtgaaaata

SEQ ID NO: 682911 - DNA, 33 bp, Homo sapien
cctgagggcaaaagatcacttccaaaggggcaa

SEQ ID NO: 682912 - DNA, 33 bp, Homo sapien
cctgagggcaaaagatgacttccaaaggggcaa

SEQ ID NO: 682913 - DNA, 33 bp, Homo sapien
ggcaacagacagccggacagctgatttctgcac

SEQ ID NO: 682914 - DNA, 33 bp, Homo sapien
ggcaacagacagccgggcagctgatttctgcac

SEQ ID NO: 682915 - DNA, 33 bp, Homo sapien
ggcttcagaaaagaataatcaacatgcaagaaa

SEQ ID NO: 682916 - DNA, 33 bp, Homo sapien
ggcttcagaaaagaatcatcaacatgcaagaaa

SEQ ID NO: 682917 - DNA, 33 bp, Homo sapien
gtgcccggccactagcagagacttgatgctaag

SEQ ID NO: 682918 - DNA, 33 bp, Homo sapien
gtgcccggccactagcggagacttgatgctaag

SEQ ID NO: 682919 - DNA, 33 bp, Homo sapien
ggcctttctgggttgacgtgaaggtttttctct

SEQ ID NO: 682920 - DNA, 33 bp, Homo sapien
ggcctttctgggttgatgtgaaggtttttctct

SEQ ID NO: 682921 - DNA, 33 bp, Homo sapien
cggggtgcgccactccaatgatgactgaccagg

SEQ ID NO: 682922 - DNA, 33 bp, Homo sapien
cggggtgcgccactccgatgatgactgaccagg

SEQ ID NO: 682923 - DNA, 33 bp, Homo sapien
cgaagagttcctccacaatctggaaggctgaga

SEQ ID NO: 682924 - DNA, 33 bp, Homo sapien
cgaagagttcctccacgatctggaaggctgaga

SEQ ID NO: 682925 - DNA, 33 bp, Homo sapien
ggccactggaaacgcaagcctcagggcagctca

SEQ ID NO: 682926 - DNA, 33 bp, Homo sapien
ggccactggaaacgcaggcctcagggcagctca

SEQ ID NO: 682927 - DNA, 33 bp, Homo sapien
gctacccagaggtacacagagattgccttgcag

SEQ ID NO: 682928 - DNA, 33 bp, Homo sapien
gctacccagaggtacagagagattgccttgcag

SEQ ID NO: 682929 - DNA, 33 bp, Homo sapien
acatagcgcagcaaacaggtgtcttgatcttcc

SEQ ID NO: 682930 - DNA, 33 bp, Homo sapien
acatagcgcagcaaacgggtgtcttgatcttcc

SEQ ID NO: 682931 - DNA, 33 bp, Homo sapien
tccatacttcagcttgaaactactgaggccgtg

SEQ ID NO: 682932 - DNA, 33 bp, Homo sapien
tccatacttcagcttgcaactactgaggccgtg

SEQ ID NO: 682933 - DNA, 33 bp, Homo sapien
aattttctaaaaggtacatgtggaccgggtgct

SEQ ID NO: 682934 - DNA, 33 bp, Homo sapien
aattttctaaaaggtagatgtggaccgggtgct

SEQ ID NO: 682935 - DNA, 33 bp, Homo sapien
tctttctcaaaacaaccgtgggagtgaatttga

SEQ ID NO: 682936 - DNA, 33 bp, Homo sapien
tctttctcaaaacaactgtgggagtgaatttga

SEQ ID NO: 682937 - DNA, 33 bp, Homo sapien
gtcaaaaacagaggccaccagagagctcagaca

SEQ ID NO: 682938 - DNA, 33 bp, Homo sapien
gtcaaaaacagaggccgccagagagctcagaca

SEQ ID NO: 682939 - DNA, 33 bp, Homo sapien
gagaagacataaacaaccagactacaaaccaat

SEQ ID NO: 682940 - DNA, 33 bp, Homo sapien
gagaagacataaacaatcagactacaaaccaat

SEQ ID NO: 682941 - DNA, 33 bp, Homo sapien
ataagtgaagagaagacgtaaacaatcagacta

SEQ ID NO: 682942 - DNA, 33 bp, Homo sapien
ataagtgaagagaagatgtaaacaatcagacta

SEQ ID NO: 682943 - DNA, 33 bp, Homo sapien
gacattacataatgacaaaagggtcaattcacc

SEQ ID NO: 682944 - DNA, 33 bp, Homo sapien
gacattacataatgacgaaagggtcaattcacc

SEQ ID NO: 682945 - DNA, 33 bp, Homo sapien
ctgcctcctgatgtcacggctggcagcagggca

SEQ ID NO: 682946 - DNA, 33 bp, Homo sapien
ctgcctcctgatgtcatggctggcagcagggca

SEQ ID NO: 682947 - DNA, 33 bp, Homo sapien
tacagtgactaaagatcagtggttgccgggctc

SEQ ID NO: 682948 - DNA, 33 bp, Homo sapien
tacagtgactaaagatgagtggttgccgggctc

SEQ ID NO: 682949 - DNA, 33 bp, Homo sapien
tctcgccctgtcttcacgacatcttctcagacc

SEQ ID NO: 682950 - DNA, 33 bp, Homo sapien
tctcgccctgtcttcatgacatcttctcagacc

SEQ ID NO: 682951 - DNA, 33 bp, Homo sapien
ctgtctgggagcaacacaggtcctctggtgggc

SEQ ID NO: 682952 - DNA, 33 bp, Homo sapien
ctgtctgggagcaacataggtcctctggtgggc

SEQ ID NO: 682953 - DNA, 33 bp, Homo sapien
gaaatttaaacaccacagagcctgagttgaatt

SEQ ID NO: 682954 - DNA, 33 bp, Homo sapien
gaaatttaaacaccacggagcctgagttgaatt

SEQ ID NO: 682955 - DNA, 33 bp, Homo sapien
gaatatttggctgatgaattgaatgggtttaaa

SEQ ID NO: 682956 - DNA, 33 bp, Homo sapien
gaatatttggctgatgcattgaatgggtttaaa

SEQ ID NO: 682957 - DNA, 33 bp, Homo sapien
tcaagcaaggttgacaacactcatgaggcctgc

SEQ ID NO: 682958 - DNA, 33 bp, Homo sapien
tcaagcaaggttgacatcactcatgaggcctgc

SEQ ID NO: 682959 - DNA, 33 bp, Homo sapien
tctgttgagctatttacggtgtttctgagtaca

SEQ ID NO: 682960 - DNA, 33 bp, Homo sapien
tctgttgagctatttatggtgtttctgagtaca

SEQ ID NO: 682961 - DNA, 33 bp, Homo sapien
accgctgaaagagaaccgtcaacccagaatgct

SEQ ID NO: 682962 - DNA, 33 bp, Homo sapien
accgctgaaagagaactgtcaacccagaatgct

SEQ ID NO: 682963 - DNA, 33 bp, Homo sapien
ccacaactctaaggcaaaaaagcagaggggctg

SEQ ID NO: 682964 - DNA, 33 bp, Homo sapien
ccacaactctaaggcagaaaagcagaggggctg

SEQ ID NO: 682965 - DNA, 33 bp, Homo sapien
tctcatacattgctgcagaacggaacatggtac

SEQ ID NO: 682966 - DNA, 33 bp, Homo sapien
tctcatacattgctgcggaacggaacatggtac

SEQ ID NO: 682967 - DNA, 33 bp, Homo sapien
tgagctaacagcgcccacctcgcttgctcactg

SEQ ID NO: 682968 - DNA, 33 bp, Homo sapien
tgagctaacagcgcccgcctcgcttgctcactg

SEQ ID NO: 682969 - DNA, 33 bp, Homo sapien
agccttttcgaggggcaatcagagaggcccctc

SEQ ID NO: 682970 - DNA, 33 bp, Homo sapien
agccttttcgaggggcgatcagagaggcccctc

SEQ ID NO: 682971 - DNA, 33 bp, Homo sapien
aagaacaaagaggacacaccacctgagctccgg

SEQ ID NO: 682972 - DNA, 33 bp, Homo sapien
aagaacaaagaggacataccacctgagctccgg

SEQ ID NO: 682973 - DNA, 33 bp, Homo sapien
tgttttaatttaattcaatccacatgcagtcag

SEQ ID NO: 682974 - DNA, 33 bp, Homo sapien
tgttttaatttaattcgatccacatgcagtcag

SEQ ID NO: 682975 - DNA, 33 bp, Homo sapien
tggcttaggacagaaacgcactggccagccgtc

SEQ ID NO: 682976 - DNA, 33 bp, Homo sapien
tggcttaggacagaaatgcactggccagccgtc

SEQ ID NO: 682977 - DNA, 33 bp, Homo sapien
caggaaacagaaatagaaagaggctctaatccg

SEQ ID NO: 682978 - DNA, 33 bp, Homo sapien
caggaaacagaaataggaagaggctctaatccg

SEQ ID NO: 682979 - DNA, 33 bp, Homo sapien
tatgtttcttagattgcacgtggggaccacaga

SEQ ID NO: 682980 - DNA, 33 bp, Homo sapien
tatgtttcttagattggacgtggggaccacaga

SEQ ID NO: 682981 - DNA, 33 bp, Homo sapien
ggagttcgatctgtaacggactgaacaagcaac

SEQ ID NO: 682982 - DNA, 33 bp, Homo sapien
ggagttcgatctgtaatggactgaacaagcaac

SEQ ID NO: 682983 - DNA, 33 bp, Homo sapien
agaacacaattgcctacgatcgttatattaaag

SEQ ID NO: 682984 - DNA, 33 bp, Homo sapien
agaacacaattgcctatgatcgttatattaaag

SEQ ID NO: 682985 - DNA, 33 bp, Homo sapien
tgcatcccagagctgaaaagttatgtgcgagaa

SEQ ID NO: 682986 - DNA, 33 bp, Homo sapien
tgcatcccagagctgagaagttatgtgcgagaa

SEQ ID NO: 682987 - DNA, 33 bp, Homo sapien
actcacacctcccacacgtgtctcttggcagag

SEQ ID NO: 682988 - DNA, 33 bp, Homo sapien
actcacacctcccacatgtgtctcttggcagag

SEQ ID NO: 682989 - DNA, 33 bp, Homo sapien
cagacgtgacagctgccgcaaggggcacgacca

SEQ ID NO: 682990 - DNA, 33 bp, Homo sapien
cagacgtgacagctgctgcaaggggcacgacca

SEQ ID NO: 682991 - DNA, 33 bp, Homo sapien
tgtttgattcattctcacttcgtttgaccaaat

SEQ ID NO: 682992 - DNA, 33 bp, Homo sapien
tgtttgattcattctcgcttcgtttgaccaaat

SEQ ID NO: 682993 - DNA, 33 bp, Homo sapien
taggagaaacacaggcagaaataatgattatat

SEQ ID NO: 682994 - DNA, 33 bp, Homo sapien
taggagaaacacaggcggaaataatgattatat

SEQ ID NO: 682995 - DNA, 33 bp, Homo sapien
gtgcatttggtaggaactgatggctgagttgtt

SEQ ID NO: 682996 - DNA, 33 bp, Homo sapien
gtgcatttggtaggaattgatggctgagttgtt

SEQ ID NO: 682997 - DNA, 33 bp, Homo sapien
ccgtcttctctctgaacagatgtttctctttgg

SEQ ID NO: 682998 - DNA, 33 bp, Homo sapien
ccgtcttctctctgaatagatgtttctctttgg

SEQ ID NO: 682999 - DNA, 33 bp, Homo sapien
gcagctgtgcagtagacacatgatccttgcttc

SEQ ID NO: 683000 - DNA, 33 bp, Homo sapien
gcagctgtgcagtagatacatgatccttgcttc

SEQ ID NO: 683001 - DNA, 33 bp, Homo sapien
agactggtgaagaaaaatacgtggaagaatcta

SEQ ID NO: 683002 - DNA, 33 bp, Homo sapien
agactggtgaagaaaagtacgtggaagaatcta

SEQ ID NO: 683003 - DNA, 33 bp, Homo sapien
ctgagggaagctcctcaaccagaaaggaaacag

SEQ ID NO: 683004 - DNA, 33 bp, Homo sapien
ctgagggaagctcctcgaccagaaaggaaacag

SEQ ID NO: 683005 - DNA, 33 bp, Homo sapien
gccagctctgagacacaatttcaggtgtgctcc

SEQ ID NO: 683006 - DNA, 33 bp, Homo sapien
gccagctctgagacacgatttcaggtgtgctcc

SEQ ID NO: 683007 - DNA, 33 bp, Homo sapien
agcaggcagggagaaaaatggggacctgcggcg

SEQ ID NO: 683008 - DNA, 33 bp, Homo sapien
agcaggcagggagaaatatggggacctgcggcg

SEQ ID NO: 683009 - DNA, 33 bp, Homo sapien
ttcacagagaggtaacagtaccagcaactaccc

SEQ ID NO: 683010 - DNA, 33 bp, Homo sapien
ttcacagagaggtaacggtaccagcaactaccc

SEQ ID NO: 683011 - DNA, 33 bp, Homo sapien
gcataaaagcaaaatcaacactaacaggaaaag

SEQ ID NO: 683012 - DNA, 33 bp, Homo sapien
gcataaaagcaaaatcgacactaacaggaaaag

SEQ ID NO: 683013 - DNA, 33 bp, Homo sapien
tgtggttcctactctccagtgtgttccttgagg

SEQ ID NO: 683014 - DNA, 33 bp, Homo sapien
tgtggttcctactctctagtgtgttccttgagg

SEQ ID NO: 683015 - DNA, 33 bp, Homo sapien
taacagccgaatccacaaagcggaacaaaggat

SEQ ID NO: 683016 - DNA, 33 bp, Homo sapien
taacagccgaatccaccaagcggaacaaaggat

SEQ ID NO: 683017 - DNA, 33 bp, Homo sapien
ggatgatttacaagagcacaaaagctaagcgtg

SEQ ID NO: 683018 - DNA, 33 bp, Homo sapien
ggatgatttacaagagtacaaaagctaagcgtg

SEQ ID NO: 683019 - DNA, 33 bp, Homo sapien
gtgcttttcataagaagccatgttttccctttc

SEQ ID NO: 683020 - DNA, 33 bp, Homo sapien
gtgcttttcataagaatccatgttttccctttc

SEQ ID NO: 683021 - DNA, 33 bp, Homo sapien
ccttccccaagcaggacggcttttggctctgtg

SEQ ID NO: 683022 - DNA, 33 bp, Homo sapien
ccttccccaagcaggatggcttttggctctgtg

SEQ ID NO: 683023 - DNA, 33 bp, Homo sapien
aatacattatccaagacagaacacagcagttca

SEQ ID NO: 683024 - DNA, 33 bp, Homo sapien
aatacattatccaagatagaacacagcagttca

SEQ ID NO: 683025 - DNA, 33 bp, Homo sapien
accagaggcccaagaactggtctgcctggaacc

SEQ ID NO: 683026 - DNA, 33 bp, Homo sapien
accagaggcccaagaattggtctgcctggaacc

SEQ ID NO: 683027 - DNA, 33 bp, Homo sapien
tgtcccaggctcaacaaatttgcgactgaactc

SEQ ID NO: 683028 - DNA, 33 bp, Homo sapien
tgtcccaggctcaacacatttgcgactgaactc

SEQ ID NO: 683029 - DNA, 33 bp, Homo sapien
atcaaaaaggtcacaaacagactgtattattat

SEQ ID NO: 683030 - DNA, 33 bp, Homo sapien
atcaaaaaggtcacaagcagactgtattattat

SEQ ID NO: 683031 - DNA, 33 bp, Homo sapien
ttgcttgagtccagcaagcggttgaggctgcag

SEQ ID NO: 683032 - DNA, 33 bp, Homo sapien
ttgcttgagtccagcaggcggttgaggctgcag

SEQ ID NO: 683033 - DNA, 33 bp, Homo sapien
gcataataagtcagaaagaaaatatggatatac

SEQ ID NO: 683034 - DNA, 33 bp, Homo sapien
gcataataagtcagaaggaaaatatggatatac

SEQ ID NO: 683035 - DNA, 33 bp, Homo sapien
ttacctgcctgtattccaaaattatcttgggta

SEQ ID NO: 683036 - DNA, 33 bp, Homo sapien
ttacctgcctgtattctaaaattatcttgggta

SEQ ID NO: 683037 - DNA, 33 bp, Homo sapien
gttaaactccgagaaactgatctttaaaggtca

SEQ ID NO: 683038 - DNA, 33 bp, Homo sapien
gttaaactccgagaaagtgatctttaaaggtca

SEQ ID NO: 683039 - DNA, 33 bp, Homo sapien
tgctgttcactttaaccgtaatggatttttcac

SEQ ID NO: 683040 - DNA, 33 bp, Homo sapien
tgctgttcactttaactgtaatggatttttcac

SEQ ID NO: 683041 - DNA, 33 bp, Homo sapien
cctctcaaattatagacctaaggaccaaagtga

SEQ ID NO: 683042 - DNA, 33 bp, Homo sapien
cctctcaaattatagagctaaggaccaaagtga

SEQ ID NO: 683043 - DNA, 33 bp, Homo sapien
gaggctgccttatcaaaggttctaaattctgga

SEQ ID NO: 683044 - DNA, 33 bp, Homo sapien
gaggctgccttatcaagggttctaaattctgga

SEQ ID NO: 683045 - DNA, 33 bp, Homo sapien
ggtgccagacagcccaatgacaggctggaggag

SEQ ID NO: 683046 - DNA, 33 bp, Homo sapien
ggtgccagacagcccagtgacaggctggaggag

SEQ ID NO: 683047 - DNA, 33 bp, Homo sapien
agacaaacgttcaaggcacattataatacagca

SEQ ID NO: 683048 - DNA, 33 bp, Homo sapien
agacaaacgttcaaggtacattataatacagca

SEQ ID NO: 683049 - DNA, 33 bp, Homo sapien
agcgtggtatctggcacatggtaagtattcagt

SEQ ID NO: 683050 - DNA, 33 bp, Homo sapien
agcgtggtatctggcatatggtaagtattcagt

SEQ ID NO: 683051 - DNA, 33 bp, Homo sapien
gccagataccacgctgaacacttcgcagcattg

SEQ ID NO: 683052 - DNA, 33 bp, Homo sapien
gccagataccacgctggacacttcgcagcattg

SEQ ID NO: 683053 - DNA, 33 bp, Homo sapien
gttgtttaattccacagtataatcaagaggctt

SEQ ID NO: 683054 - DNA, 33 bp, Homo sapien
gttgtttaattccacattataatcaagaggctt

SEQ ID NO: 683055 - DNA, 33 bp, Homo sapien
cttaaaaaagacagagcaagatcttcaacagtt

SEQ ID NO: 683056 - DNA, 33 bp, Homo sapien
cttaaaaaagacagagtaagatcttcaacagtt

SEQ ID NO: 683057 - DNA, 33 bp, Homo sapien
ggcggaaagacaggaaaaataactgccatatac

SEQ ID NO: 683058 - DNA, 33 bp, Homo sapien
ggcggaaagacaggaagaataactgccatatac

SEQ ID NO: 683059 - DNA, 33 bp, Homo sapien
aaaatctctccctgctcaaatgtaaccattaat

SEQ ID NO: 683060 - DNA, 33 bp, Homo sapien
aaaatctctccctgctgaaatgtaaccattaat

SEQ ID NO: 683061 - DNA, 33 bp, Homo sapien
tggtcttgacctgggacaaaggcacgtttcctg

SEQ ID NO: 683062 - DNA, 33 bp, Homo sapien
tggtcttgacctgggataaaggcacgtttcctg

SEQ ID NO: 683063 - DNA, 33 bp, Homo sapien
tcccaggccgagttgacgcctctgggtgagctg

SEQ ID NO: 683064 - DNA, 33 bp, Homo sapien
tcccaggccgagttgatgcctctgggtgagctg

SEQ ID NO: 683065 - DNA, 33 bp, Homo sapien
gccacacacattaacaatacagagccgagaagt

SEQ ID NO: 683066 - DNA, 33 bp, Homo sapien
gccacacacattaacagtacagagccgagaagt

SEQ ID NO: 683067 - DNA, 33 bp, Homo sapien
aatacagcaaatcaacacctcctcgcaaagcac

SEQ ID NO: 683068 - DNA, 33 bp, Homo sapien
aatacagcaaatcaacgcctcctcgcaaagcac

SEQ ID NO: 683069 - DNA, 33 bp, Homo sapien
ctcccacttatcctgtcaaagaatttctgatgg

SEQ ID NO: 683070 - DNA, 33 bp, Homo sapien
ctcccacttatcctgtgaaagaatttctgatgg

SEQ ID NO: 683071 - DNA, 33 bp, Homo sapien
ttggtctcattcagcactatgtgtgtagaactt

SEQ ID NO: 683072 - DNA, 33 bp, Homo sapien
ttggtctcattcagcattatgtgtgtagaactt

SEQ ID NO: 683073 - DNA, 33 bp, Homo sapien
ctgcatagccagtgcccaatggtatttgtggaa

SEQ ID NO: 683074 - DNA, 33 bp, Homo sapien
ctgcatagccagtgccgaatggtatttgtggaa

SEQ ID NO: 683075 - DNA, 33 bp, Homo sapien
gactgaactacaataacgacagctgcaaccaaa

SEQ ID NO: 683076 - DNA, 33 bp, Homo sapien
gactgaactacaataatgacagctgcaaccaaa

SEQ ID NO: 683077 - DNA, 33 bp, Homo sapien
caggctcctacaggccaactgtgggctgctctc

SEQ ID NO: 683078 - DNA, 33 bp, Homo sapien
caggctcctacaggccgactgtgggctgctctc

SEQ ID NO: 683079 - DNA, 33 bp, Homo sapien
actgtggtctcctccacgtcacccaaggaagga

SEQ ID NO: 683080 - DNA, 33 bp, Homo sapien
actgtggtctcctccatgtcacccaaggaagga

SEQ ID NO: 683081 - DNA, 33 bp, Homo sapien
tagaaaaaagcagtgacaattattacccagact

SEQ ID NO: 683082 - DNA, 33 bp, Homo sapien
tagaaaaaagcagtgagaattattacccagact

SEQ ID NO: 683083 - DNA, 33 bp, Homo sapien
gtaaaaagttctccgcaagtgctttgaggtgtg

SEQ ID NO: 683084 - DNA, 33 bp, Homo sapien
gtaaaaagttctccgcgagtgctttgaggtgtg

SEQ ID NO: 683085 - DNA, 33 bp, Homo sapien
tcgacgtcctgttcgcagagtttgagctcaggt

SEQ ID NO: 683086 - DNA, 33 bp, Homo sapien
tcgacgtcctgttcgcggagtttgagctcaggt

SEQ ID NO: 683087 - DNA, 33 bp, Homo sapien
cccacatcaggacctccgaacccgggtggccac

SEQ ID NO: 683088 - DNA, 33 bp, Homo sapien
cccacatcaggacctctgaacccgggtggccac

SEQ ID NO: 683089 - DNA, 33 bp, Homo sapien
tcttctgaccctaagacgtggtctgtgtccctg

SEQ ID NO: 683090 - DNA, 33 bp, Homo sapien
tcttctgaccctaagatgtggtctgtgtccctg

SEQ ID NO: 683091 - DNA, 33 bp, Homo sapien
gcagaaggcagtattacgtacatggatcgtctc

SEQ ID NO: 683092 - DNA, 33 bp, Homo sapien
gcagaaggcagtattatgtacatggatcgtctc

SEQ ID NO: 683093 - DNA, 33 bp, Homo sapien
aatactgtattttagaaccaagttaggttgaaa

SEQ ID NO: 683094 - DNA, 33 bp, Homo sapien
aatactgtattttagatccaagttaggttgaaa

SEQ ID NO: 683095 - DNA, 33 bp, Homo sapien
aaacactgctctgtgaaagtaacagacacaaaa

SEQ ID NO: 683096 - DNA, 33 bp, Homo sapien
aaacactgctctgtgacagtaacagacacaaaa

SEQ ID NO: 683097 - DNA, 33 bp, Homo sapien
gtcacagcagccatacagaatgaagatgcccct

SEQ ID NO: 683098 - DNA, 33 bp, Homo sapien
gtcacagcagccatacggaatgaagatgcccct

SEQ ID NO: 683099 - DNA, 33 bp, Homo sapien
aggatgacctggggaaccaaatgctgctttcgg

SEQ ID NO: 683100 - DNA, 33 bp, Homo sapien
aggatgacctggggaatcaaatgctgctttcgg

SEQ ID NO: 683101 - DNA, 33 bp, Homo sapien
taaaaactggcaatcacgaccatattaaacatg

SEQ ID NO: 683102 - DNA, 33 bp, Homo sapien
taaaaactggcaatcatgaccatattaaacatg

SEQ ID NO: 683103 - DNA, 33 bp, Homo sapien
ttcctgcccatgtgacaactttatttagagaaa

SEQ ID NO: 683104 - DNA, 33 bp, Homo sapien
ttcctgcccatgtgacgactttatttagagaaa

SEQ ID NO: 683105 - DNA, 33 bp, Homo sapien
gaaagacagaggagccagatcggggaatggatg

SEQ ID NO: 683106 - DNA, 33 bp, Homo sapien
gaaagacagaggagccggatcggggaatggatg

SEQ ID NO: 683107 - DNA, 33 bp, Homo sapien
tctcacggccccttccaaaagctaggtggcagc

SEQ ID NO: 683108 - DNA, 33 bp, Homo sapien
tctcacggccccttccgaaagctaggtggcagc

SEQ ID NO: 683109 - DNA, 33 bp, Homo sapien
tgcacacagctggagccatcataacttgtggtt

SEQ ID NO: 683110 - DNA, 33 bp, Homo sapien
tgcacacagctggagcgatcataacttgtggtt

SEQ ID NO: 683111 - DNA, 33 bp, Homo sapien
gtttctcatccaagagcaggcgagcatgcaagg

SEQ ID NO: 683112 - DNA, 33 bp, Homo sapien
gtttctcatccaagagtaggcgagcatgcaagg

SEQ ID NO: 683113 - DNA, 33 bp, Homo sapien
cctggggaggtcttcaaaagtgcgctatgtcct

SEQ ID NO: 683114 - DNA, 33 bp, Homo sapien
cctggggaggtcttcagaagtgcgctatgtcct

SEQ ID NO: 683115 - DNA, 33 bp, Homo sapien
acaatgagaaatggaacagcttcaaaatgctta

SEQ ID NO: 683116 - DNA, 33 bp, Homo sapien
acaatgagaaatggaagagcttcaaaatgctta

SEQ ID NO: 683117 - DNA, 33 bp, Homo sapien
gagggtcatttgtgaacgtttaaactatgctga

SEQ ID NO: 683118 - DNA, 33 bp, Homo sapien
gagggtcatttgtgaatgtttaaactatgctga

SEQ ID NO: 683119 - DNA, 33 bp, Homo sapien
agcttcacgtaattgacatttggactcagcagg

SEQ ID NO: 683120 - DNA, 33 bp, Homo sapien
agcttcacgtaattgatatttggactcagcagg

SEQ ID NO: 683121 - DNA, 33 bp, Homo sapien
acttgatgggcttgtccactgagtgaatggctg

SEQ ID NO: 683122 - DNA, 33 bp, Homo sapien
acttgatgggcttgtctactgagtgaatggctg

SEQ ID NO: 683123 - DNA, 33 bp, Homo sapien
gcaaatcgaggaggagcaagagggccatgccaa

SEQ ID NO: 683124 - DNA, 33 bp, Homo sapien
gcaaatcgaggaggaggaagagggccatgccaa

SEQ ID NO: 683125 - DNA, 33 bp, Homo sapien
gaaataacaagaaaacaccctagaactgaagga

SEQ ID NO: 683126 - DNA, 33 bp, Homo sapien
gaaataacaagaaaacgccctagaactgaagga

SEQ ID NO: 683127 - DNA, 33 bp, Homo sapien
ctcaccaaggaccctccagtgtcagtggtggtt

SEQ ID NO: 683128 - DNA, 33 bp, Homo sapien
ctcaccaaggaccctctagtgtcagtggtggtt

SEQ ID NO: 683129 - DNA, 33 bp, Homo sapien
acagtggtttgtaacagatctcacctctagatc

SEQ ID NO: 683130 - DNA, 33 bp, Homo sapien
acagtggtttgtaacatatctcacctctagatc

SEQ ID NO: 683131 - DNA, 33 bp, Homo sapien
tcatgtgcgggcaaaaattattatctttgcccg

SEQ ID NO: 683132 - DNA, 33 bp, Homo sapien
tcatgtgcgggcaaaatttattatctttgcccg

SEQ ID NO: 683133 - DNA, 33 bp, Homo sapien
gggctctgaggacaagcagtagccaggatgcag

SEQ ID NO: 683134 - DNA, 33 bp, Homo sapien
gggctctgaggacaagtagtagccaggatgcag

SEQ ID NO: 683135 - DNA, 33 bp, Homo sapien
ggctccttttcttcaccgaattggagtttagag

SEQ ID NO: 683136 - DNA, 33 bp, Homo sapien
ggctccttttcttcactgaattggagtttagag

SEQ ID NO: 683137 - DNA, 33 bp, Homo sapien
cagtcaccagttttaaagtactctagcaatggg

SEQ ID NO: 683138 - DNA, 33 bp, Homo sapien
cagtcaccagttttaaggtactctagcaatggg

SEQ ID NO: 683139 - DNA, 33 bp, Homo sapien
aggagttgagtgttgacactagtacagctattc

SEQ ID NO: 683140 - DNA, 33 bp, Homo sapien
aggagttgagtgttgatactagtacagctattc

SEQ ID NO: 683141 - DNA, 33 bp, Homo sapien
agtcccactcagaaaccgtctccggagccctgt

SEQ ID NO: 683142 - DNA, 33 bp, Homo sapien
agtcccactcagaaactgtctccggagccctgt

SEQ ID NO: 683143 - DNA, 33 bp, Homo sapien
taacctcgaaaatggactcaaataacggaatga

SEQ ID NO: 683144 - DNA, 33 bp, Homo sapien
taacctcgaaaatggagtcaaataacggaatga

SEQ ID NO: 683145 - DNA, 33 bp, Homo sapien
gaacgtctatgggaaccgacaagtgaaagacaa

SEQ ID NO: 683146 - DNA, 33 bp, Homo sapien
gaacgtctatgggaactgacaagtgaaagacaa

SEQ ID NO: 683147 - DNA, 33 bp, Homo sapien
aggaatacaatacagtcactgagaatcaataaa

SEQ ID NO: 683148 - DNA, 33 bp, Homo sapien
aggaatacaatacagttactgagaatcaataaa

SEQ ID NO: 683149 - DNA, 33 bp, Homo sapien
agccttaaaagcaggacgggggacagtacagcc

SEQ ID NO: 683150 - DNA, 33 bp, Homo sapien
agccttaaaagcaggatgggggacagtacagcc

SEQ ID NO: 683151 - DNA, 33 bp, Homo sapien
ctacagaacataggtcaaagtctttatatcata

SEQ ID NO: 683152 - DNA, 33 bp, Homo sapien
ctacagaacataggtccaagtctttatatcata

SEQ ID NO: 683153 - DNA, 33 bp, Homo sapien
tgtacctcagatgctacaggccgtcaacatcct

SEQ ID NO: 683154 - DNA, 33 bp, Homo sapien
tgtacctcagatgctagaggccgtcaacatcct

SEQ ID NO: 683155 - DNA, 33 bp, Homo sapien
aggatgtagctaatcaaaacggcttagacttag

SEQ ID NO: 683156 - DNA, 33 bp, Homo sapien
aggatgtagctaatcacaacggcttagacttag

SEQ ID NO: 683157 - DNA, 33 bp, Homo sapien
aggccacagctcagagcctcaggttcttcccac

SEQ ID NO: 683158 - DNA, 33 bp, Homo sapien
aggccacagctcagagtctcaggttcttcccac

SEQ ID NO: 683159 - DNA, 33 bp, Homo sapien
aacatctgttgtctgaaatcctgaattccttgt

SEQ ID NO: 683160 - DNA, 33 bp, Homo sapien
aacatctgttgtctgagatcctgaattccttgt

SEQ ID NO: 683161 - DNA, 33 bp, Homo sapien
tgaaaactgaccatccaatcacaaccacataag

SEQ ID NO: 683162 - DNA, 33 bp, Homo sapien
tgaaaactgaccatcctatcacaaccacataag

SEQ ID NO: 683163 - DNA, 33 bp, Homo sapien
ggagacccagcccagacactgctgatttaggct

SEQ ID NO: 683164 - DNA, 33 bp, Homo sapien
ggagacccagcccagagactgctgatttaggct

SEQ ID NO: 683165 - DNA, 33 bp, Homo sapien
taactcttgacctcgaagcattgacccacctag

SEQ ID NO: 683166 - DNA, 33 bp, Homo sapien
taactcttgacctcgaggcattgacccacctag

SEQ ID NO: 683167 - DNA, 33 bp, Homo sapien
gaaaggttggtatgaaaaaatgtctttcctttt

SEQ ID NO: 683168 - DNA, 33 bp, Homo sapien
gaaaggttggtatgaagaaatgtctttcctttt

SEQ ID NO: 683169 - DNA, 33 bp, Homo sapien
caaccaaacttagaagcagactggacacccacg

SEQ ID NO: 683170 - DNA, 33 bp, Homo sapien
caaccaaacttagaagtagactggacacccacg

SEQ ID NO: 683171 - DNA, 33 bp, Homo sapien
ccatcaccaggagaaaccagtttgagttcatca

SEQ ID NO: 683172 - DNA, 33 bp, Homo sapien
ccatcaccaggagaaagcagtttgagttcatca

SEQ ID NO: 683173 - DNA, 33 bp, Homo sapien
aagactatgacttaacaattcagtttaccaaat

SEQ ID NO: 683174 - DNA, 33 bp, Homo sapien
aagactatgacttaacgattcagtttaccaaat

SEQ ID NO: 683175 - DNA, 33 bp, Homo sapien
caagtgcataggaccccgcctacctttaccaag

SEQ ID NO: 683176 - DNA, 33 bp, Homo sapien
caagtgcataggaccctgcctacctttaccaag

SEQ ID NO: 683177 - DNA, 33 bp, Homo sapien
tcctgggcttcagttgcaggacctgtatctccc

SEQ ID NO: 683178 - DNA, 33 bp, Homo sapien
tcctgggcttcagttgtaggacctgtatctccc

SEQ ID NO: 683179 - DNA, 33 bp, Homo sapien
caactgtaaaggttcaaaattacagtgcttaag

SEQ ID NO: 683180 - DNA, 33 bp, Homo sapien
caactgtaaaggttcacaattacagtgcttaag

SEQ ID NO: 683181 - DNA, 33 bp, Homo sapien
tcacagggaagcatccactatggagggctgtgg

SEQ ID NO: 683182 - DNA, 33 bp, Homo sapien
tcacagggaagcatccgctatggagggctgtgg

SEQ ID NO: 683183 - DNA, 33 bp, Homo sapien
ttcccccttcgccgtgcactcgttctctccccc

SEQ ID NO: 683184 - DNA, 33 bp, Homo sapien
ttcccccttcgccgtgtactcgttctctccccc

SEQ ID NO: 683185 - DNA, 33 bp, Homo sapien
agggacccagtggaaacaactgaagcgtgggga

SEQ ID NO: 683186 - DNA, 33 bp, Homo sapien
agggacccagtggaaataactgaagcgtgggga

SEQ ID NO: 683187 - DNA, 33 bp, Homo sapien
aacatttttaataggccacctgtctgccaattt

SEQ ID NO: 683188 - DNA, 33 bp, Homo sapien
aacatttttaataggctacctgtctgccaattt

SEQ ID NO: 683189 - DNA, 33 bp, Homo sapien
gggtggagagtaccctcaaaactcaggaaggcg

SEQ ID NO: 683190 - DNA, 33 bp, Homo sapien
gggtggagagtaccctgaaaactcaggaaggcg

SEQ ID NO: 683191 - DNA, 33 bp, Homo sapien
gacttttcgtccttgacgtggttcagctgcttt

SEQ ID NO: 683192 - DNA, 33 bp, Homo sapien
gacttttcgtccttgatgtggttcagctgcttt

SEQ ID NO: 683193 - DNA, 33 bp, Homo sapien
acagagaaaccgatccaaaggaaaggaaattaa

SEQ ID NO: 683194 - DNA, 33 bp, Homo sapien
acagagaaaccgatcccaaggaaaggaaattaa

SEQ ID NO: 683195 - DNA, 33 bp, Homo sapien
tcaaaagcttgctgtggaatcctaatggtttgc

SEQ ID NO: 683196 - DNA, 33 bp, Homo sapien
tcaaaagcttgctgtgtaatcctaatggtttgc

SEQ ID NO: 683197 - DNA, 33 bp, Homo sapien
cacagcaagcttttgaacactaaactacaaaga

SEQ ID NO: 683198 - DNA, 33 bp, Homo sapien
cacagcaagcttttgaccactaaactacaaaga

SEQ ID NO: 683199 - DNA, 33 bp, Homo sapien
cacttgtgtgcacgaccagaggttctcctgcat

SEQ ID NO: 683200 - DNA, 33 bp, Homo sapien
cacttgtgtgcacgactagaggttctcctgcat

SEQ ID NO: 683201 - DNA, 33 bp, Homo sapien
gtcacaaaacctgacaatgctaaccgtggcgcc

SEQ ID NO: 683202 - DNA, 33 bp, Homo sapien
gtcacaaaacctgacactgctaaccgtggcgcc

SEQ ID NO: 683203 - DNA, 33 bp, Homo sapien
gtactcacaccatcaaatctgttatagagtgta

SEQ ID NO: 683204 - DNA, 33 bp, Homo sapien
gtactcacaccatcaagtctgttatagagtgta

SEQ ID NO: 683205 - DNA, 33 bp, Homo sapien
aaaataggtgaataaaataagtgtgctttaact

SEQ ID NO: 683206 - DNA, 33 bp, Homo sapien
aaaataggtgaataaagtaagtgtgctttaact

SEQ ID NO: 683207 - DNA, 33 bp, Homo sapien
caggtctcctggggccaataggtccaactgaac

SEQ ID NO: 683208 - DNA, 33 bp, Homo sapien
caggtctcctggggccgataggtccaactgaac

SEQ ID NO: 683209 - DNA, 33 bp, Homo sapien
acttgatgaggagctaaataaacttctcctgga

SEQ ID NO: 683210 - DNA, 33 bp, Homo sapien
acttgatgaggagctacataaacttctcctgga

SEQ ID NO: 683211 - DNA, 33 bp, Homo sapien
ttactggacacccaggaccatcacatctacatg

SEQ ID NO: 683212 - DNA, 33 bp, Homo sapien
ttactggacacccagggccatcacatctacatg

SEQ ID NO: 683213 - DNA, 33 bp, Homo sapien
atgctgaaactcccacagtccttctctctccca

SEQ ID NO: 683214 - DNA, 33 bp, Homo sapien
atgctgaaactcccacggtccttctctctccca

SEQ ID NO: 683215 - DNA, 33 bp, Homo sapien
aatagttcaaatgcccaacttctgagtgagtaa

SEQ ID NO: 683216 - DNA, 33 bp, Homo sapien
aatagttcaaatgcccgacttctgagtgagtaa

SEQ ID NO: 683217 - DNA, 33 bp, Homo sapien
tggtgttccgctcacacgtgttccctggtgtcc

SEQ ID NO: 683218 - DNA, 33 bp, Homo sapien
tggtgttccgctcacatgtgttccctggtgtcc

SEQ ID NO: 683219 - DNA, 33 bp, Homo sapien
aaaccagacagattacaatttctgcaaagacag

SEQ ID NO: 683220 - DNA, 33 bp, Homo sapien
aaaccagacagattactatttctgcaaagacag

SEQ ID NO: 683221 - DNA, 33 bp, Homo sapien
tcctgacctccctgaaagaaagccaggaagagt

SEQ ID NO: 683222 - DNA, 33 bp, Homo sapien
tcctgacctccctgaaggaaagccaggaagagt

SEQ ID NO: 683223 - DNA, 33 bp, Homo sapien
tctaggaggtggaaacagccaagaatggattct

SEQ ID NO: 683224 - DNA, 33 bp, Homo sapien
tctaggaggtggaaacggccaagaatggattct

SEQ ID NO: 683225 - DNA, 33 bp, Homo sapien
acagctcactaaatcgaccagggtccacctgag

SEQ ID NO: 683226 - DNA, 33 bp, Homo sapien
acagctcactaaatcgcccagggtccacctgag

SEQ ID NO: 683227 - DNA, 33 bp, Homo sapien
gaaaaacgtgacttccaaacatctgcatctctg

SEQ ID NO: 683228 - DNA, 33 bp, Homo sapien
gaaaaacgtgacttccgaacatctgcatctctg

SEQ ID NO: 683229 - DNA, 33 bp, Homo sapien
ttgatattatccataacgtgtattgcaaatatc

SEQ ID NO: 683230 - DNA, 33 bp, Homo sapien
ttgatattatccataatgtgtattgcaaatatc

SEQ ID NO: 683231 - DNA, 33 bp, Homo sapien
aaaatgagaaggttgaatagaatcctagtctta

SEQ ID NO: 683232 - DNA, 33 bp, Homo sapien
aaaatgagaaggttgagtagaatcctagtctta

SEQ ID NO: 683233 - DNA, 33 bp, Homo sapien
aaggttcctcaatgtacaaaggccagaataagc

SEQ ID NO: 683234 - DNA, 33 bp, Homo sapien
aaggttcctcaatgtagaaaggccagaataagc

SEQ ID NO: 683235 - DNA, 33 bp, Homo sapien
cagaaaacacctagtacagaaaatagaagacac

SEQ ID NO: 683236 - DNA, 33 bp, Homo sapien
cagaaaacacctagtatagaaaatagaagacac

SEQ ID NO: 683237 - DNA, 33 bp, Homo sapien
tcacagagaaactgacaaatctaccataatgag

SEQ ID NO: 683238 - DNA, 33 bp, Homo sapien
tcacagagaaactgactaatctaccataatgag

SEQ ID NO: 683239 - DNA, 33 bp, Homo sapien
gacaataagcctatgaagtgatcgtagggcgtt

SEQ ID NO: 683240 - DNA, 33 bp, Homo sapien
gacaataagcctatgaggtgatcgtagggcgtt

SEQ ID NO: 683241 - DNA, 33 bp, Homo sapien
attcaatcacaactgacgtccgactgaagagac

SEQ ID NO: 683242 - DNA, 33 bp, Homo sapien
attcaatcacaactgatgtccgactgaagagac

SEQ ID NO: 683243 - DNA, 33 bp, Homo sapien
ggagtagcacagaaaacacagcagagtgagcgc

SEQ ID NO: 683244 - DNA, 33 bp, Homo sapien
ggagtagcacagaaaagacagcagagtgagcgc

SEQ ID NO: 683245 - DNA, 33 bp, Homo sapien
acacattctgagcccaataatcaagattaagca

SEQ ID NO: 683246 - DNA, 33 bp, Homo sapien
acacattctgagcccagtaatcaagattaagca

SEQ ID NO: 683247 - DNA, 33 bp, Homo sapien
tattgtggaaccaataaccaaagaatcagttga

SEQ ID NO: 683248 - DNA, 33 bp, Homo sapien
tattgtggaaccaatagccaaagaatcagttga

SEQ ID NO: 683249 - DNA, 33 bp, Homo sapien
gtttctggatggcaagaaccatattatttatca

SEQ ID NO: 683250 - DNA, 33 bp, Homo sapien
gtttctggatggcaaggaccatattatttatca

SEQ ID NO: 683251 - DNA, 33 bp, Homo sapien
caagatgatttcagaactccagcctatctttta

SEQ ID NO: 683252 - DNA, 33 bp, Homo sapien
caagatgatttcagaattccagcctatctttta

SEQ ID NO: 683253 - DNA, 33 bp, Homo sapien
agtttttgaatctttgaagcctgttactttagg

SEQ ID NO: 683254 - DNA, 33 bp, Homo sapien
agtttttgaatctttggagcctgttactttagg

SEQ ID NO: 683255 - DNA, 33 bp, Homo sapien
aaactagacagcaatcactaatcatagtccatg

SEQ ID NO: 683256 - DNA, 33 bp, Homo sapien
aaactagacagcaatcgctaatcatagtccatg

SEQ ID NO: 683257 - DNA, 33 bp, Homo sapien
agacagtcaatattccagatctcaaaacagggt

SEQ ID NO: 683258 - DNA, 33 bp, Homo sapien
agacagtcaatattcccgatctcaaaacagggt

SEQ ID NO: 683259 - DNA, 33 bp, Homo sapien
ttcagactacaagaaactgaataaggaaggttc

SEQ ID NO: 683260 - DNA, 33 bp, Homo sapien
ttcagactacaagaaagtgaataaggaaggttc

SEQ ID NO: 683261 - DNA, 33 bp, Homo sapien
attgctgtctgcaacaaagtgctgcttgggttg

SEQ ID NO: 683262 - DNA, 33 bp, Homo sapien
attgctgtctgcaacacagtgctgcttgggttg

SEQ ID NO: 683263 - DNA, 33 bp, Homo sapien
tacagaatctttgctacaaacctgcttctatgt

SEQ ID NO: 683264 - DNA, 33 bp, Homo sapien
tacagaatctttgctataaacctgcttctatgt

SEQ ID NO: 683265 - DNA, 33 bp, Homo sapien
acagggaaaaacaggaactgtggaattaataag

SEQ ID NO: 683266 - DNA, 33 bp, Homo sapien
acagggaaaaacaggacctgtggaattaataag

SEQ ID NO: 683267 - DNA, 33 bp, Homo sapien
caacctagtcactcagaccagaatggaagaaat

SEQ ID NO: 683268 - DNA, 33 bp, Homo sapien
caacctagtcactcaggccagaatggaagaaat

SEQ ID NO: 683269 - DNA, 33 bp, Homo sapien
gacgtgtgtaaatgacaatgtggaggactagtg

SEQ ID NO: 683270 - DNA, 33 bp, Homo sapien
gacgtgtgtaaatgacgatgtggaggactagtg

SEQ ID NO: 683271 - DNA, 33 bp, Homo sapien
tgtcttagtatggcgcacagactcttgtgagtg

SEQ ID NO: 683272 - DNA, 33 bp, Homo sapien
tgtcttagtatggcgcgcagactcttgtgagtg

SEQ ID NO: 683273 - DNA, 33 bp, Homo sapien
gctcggccacgcacaaactcgttctcgcgagcc

SEQ ID NO: 683274 - DNA, 33 bp, Homo sapien
gctcggccacgcacaacctcgttctcgcgagcc

SEQ ID NO: 683275 - DNA, 33 bp, Homo sapien
atctgcatgacaacacagcacgaggagtgtgcg

SEQ ID NO: 683276 - DNA, 33 bp, Homo sapien
atctgcatgacaacacggcacgaggagtgtgcg

SEQ ID NO: 683277 - DNA, 33 bp, Homo sapien
atgcttagtgcagtaaccgtacgctctgtatgg

SEQ ID NO: 683278 - DNA, 33 bp, Homo sapien
atgcttagtgcagtaatcgtacgctctgtatgg

SEQ ID NO: 683279 - DNA, 33 bp, Homo sapien
gggccagcccgtcacacggttacctatgatgat

SEQ ID NO: 683280 - DNA, 33 bp, Homo sapien
gggccagcccgtcacatggttacctatgatgat

SEQ ID NO: 683281 - DNA, 33 bp, Homo sapien
ccaagatgctctgaaactgtgggtgttttagca

SEQ ID NO: 683282 - DNA, 33 bp, Homo sapien
ccaagatgctctgaaattgtgggtgttttagca

SEQ ID NO: 683283 - DNA, 33 bp, Homo sapien
gttaacattatttaagaccaaaatttatctgtt

SEQ ID NO: 683284 - DNA, 33 bp, Homo sapien
gttaacattatttaaggccaaaatttatctgtt

SEQ ID NO: 683285 - DNA, 33 bp, Homo sapien
taagatggtgtgtagacagatgcttttatgggc

SEQ ID NO: 683286 - DNA, 33 bp, Homo sapien
taagatggtgtgtagatagatgcttttatgggc

SEQ ID NO: 683287 - DNA, 33 bp, Homo sapien
tagtcagggcaccaaacgctcatgttacaaaag

SEQ ID NO: 683288 - DNA, 33 bp, Homo sapien
tagtcagggcaccaaaggctcatgttacaaaag

SEQ ID NO: 683289 - DNA, 33 bp, Homo sapien
taaaattcccaagggaagcaatctgtcactagc

SEQ ID NO: 683290 - DNA, 33 bp, Homo sapien
taaaattcccaagggatgcaatctgtcactagc

SEQ ID NO: 683291 - DNA, 33 bp, Homo sapien
aagatgaaaataatacggcaaatactgttcttg

SEQ ID NO: 683292 - DNA, 33 bp, Homo sapien
aagatgaaaataatactgcaaatactgttcttg

SEQ ID NO: 683293 - DNA, 33 bp, Homo sapien
gaactgcctgaagagaagtcttcctatcggttg

SEQ ID NO: 683294 - DNA, 33 bp, Homo sapien
gaactgcctgaagagacgtcttcctatcggttg

SEQ ID NO: 683295 - DNA, 33 bp, Homo sapien
actctgtagttcaacaatatatagccaatgatc

SEQ ID NO: 683296 - DNA, 33 bp, Homo sapien
actctgtagttcaacagtatatagccaatgatc

SEQ ID NO: 683297 - DNA, 33 bp, Homo sapien
ttaccatcaactggggaaactgccacattcttc

SEQ ID NO: 683298 - DNA, 33 bp, Homo sapien
ttaccatcaactggggtaactgccacattcttc

SEQ ID NO: 683299 - DNA, 33 bp, Homo sapien
tgccccacctagaagcacattaaagtaaacaca

SEQ ID NO: 683300 - DNA, 33 bp, Homo sapien
tgccccacctagaagcgcattaaagtaaacaca

SEQ ID NO: 683301 - DNA, 33 bp, Homo sapien
acccagaatgcaaggacggttgcactgctgggg

SEQ ID NO: 683302 - DNA, 33 bp, Homo sapien
acccagaatgcaaggatggttgcactgctgggg

SEQ ID NO: 683303 - DNA, 33 bp, Homo sapien
aattgcaccgtaacaactaaaatatccttaatc

SEQ ID NO: 683304 - DNA, 33 bp, Homo sapien
aattgcaccgtaacaattaaaatatccttaatc

SEQ ID NO: 683305 - DNA, 33 bp, Homo sapien
tagacatcttacgatacactctattttgcggtg

SEQ ID NO: 683306 - DNA, 33 bp, Homo sapien
tagacatcttacgatatactctattttgcggtg

SEQ ID NO: 683307 - DNA, 33 bp, Homo sapien
atccttctatattcaacgcattaacacataata

SEQ ID NO: 683308 - DNA, 33 bp, Homo sapien
atccttctatattcaaggcattaacacataata

SEQ ID NO: 683309 - DNA, 33 bp, Homo sapien
aggacagagaagccgcagagaaactgccaggtc

SEQ ID NO: 683310 - DNA, 33 bp, Homo sapien
aggacagagaagccgccgagaaactgccaggtc

SEQ ID NO: 683311 - DNA, 33 bp, Homo sapien
ctttaggtgggaaatacctcaaagtggcatttc

SEQ ID NO: 683312 - DNA, 33 bp, Homo sapien
ctttaggtgggaaatatctcaaagtggcatttc

SEQ ID NO: 683313 - DNA, 33 bp, Homo sapien
cacaaacacacaaaccgaaggaatctcggtgag

SEQ ID NO: 683314 - DNA, 33 bp, Homo sapien
cacaaacacacaaacctaaggaatctcggtgag

SEQ ID NO: 683315 - DNA, 33 bp, Homo sapien
agacaaagtccacagcagaatcacagtgtagac

SEQ ID NO: 683316 - DNA, 33 bp, Homo sapien
agacaaagtccacagcggaatcacagtgtagac

SEQ ID NO: 683317 - DNA, 33 bp, Homo sapien
agccaaatgacatggaaagaaataaatcactat

SEQ ID NO: 683318 - DNA, 33 bp, Homo sapien
agccaaatgacatggagagaaataaatcactat

SEQ ID NO: 683319 - DNA, 33 bp, Homo sapien
ccacctctgaaaccccaaaatttgagaaaggtc

SEQ ID NO: 683320 - DNA, 33 bp, Homo sapien
ccacctctgaaaccccgaaatttgagaaaggtc

SEQ ID NO: 683321 - DNA, 33 bp, Homo sapien
ccaaatgataccaaacgactgtccctgagacct

SEQ ID NO: 683322 - DNA, 33 bp, Homo sapien
ccaaatgataccaaactactgtccctgagacct

SEQ ID NO: 683323 - DNA, 33 bp, Homo sapien
aggtgctgctagttcaccccagtgagaaagatc

SEQ ID NO: 683324 - DNA, 33 bp, Homo sapien
aggtgctgctagttcatcccagtgagaaagatc

SEQ ID NO: 683325 - DNA, 33 bp, Homo sapien
ggacatcataaagataagagcagaagtcagtaa

SEQ ID NO: 683326 - DNA, 33 bp, Homo sapien
ggacatcataaagataggagcagaagtcagtaa

SEQ ID NO: 683327 - DNA, 33 bp, Homo sapien
ctagagtgactctttaacctagctgcgggaaga

SEQ ID NO: 683328 - DNA, 33 bp, Homo sapien
ctagagtgactctttagcctagctgcgggaaga

SEQ ID NO: 683329 - DNA, 33 bp, Homo sapien
gatggagagggtgaaacagtggctggtctcatg

SEQ ID NO: 683330 - DNA, 33 bp, Homo sapien
gatggagagggtgaaatagtggctggtctcatg

SEQ ID NO: 683331 - DNA, 33 bp, Homo sapien
aaaaagcaagcttattcaagccacagacgccaa

SEQ ID NO: 683332 - DNA, 33 bp, Homo sapien
aaaaagcaagcttattgaagccacagacgccaa

SEQ ID NO: 683333 - DNA, 33 bp, Homo sapien
cctccaccttacctaacagcacatttagtagcc

SEQ ID NO: 683334 - DNA, 33 bp, Homo sapien
cctccaccttacctaagagcacatttagtagcc

SEQ ID NO: 683335 - DNA, 33 bp, Homo sapien
gcacctagggttggaaacgagcagcgcagctcc

SEQ ID NO: 683336 - DNA, 33 bp, Homo sapien
gcacctagggttggaaccgagcagcgcagctcc

SEQ ID NO: 683337 - DNA, 33 bp, Homo sapien
tagctaagttttgtagcatacgaaattgtaagt

SEQ ID NO: 683338 - DNA, 33 bp, Homo sapien
tagctaagttttgtaggatacgaaattgtaagt

SEQ ID NO: 683339 - DNA, 33 bp, Homo sapien
gtcatttgaaagagaacgtcccaaggttaatgg

SEQ ID NO: 683340 - DNA, 33 bp, Homo sapien
gtcatttgaaagagaatgtcccaaggttaatgg

SEQ ID NO: 683341 - DNA, 33 bp, Homo sapien
ttaagcttgtatttacggagataaagtattctt

SEQ ID NO: 683342 - DNA, 33 bp, Homo sapien
ttaagcttgtatttactgagataaagtattctt

SEQ ID NO: 683343 - DNA, 33 bp, Homo sapien
ggaggagggtggtctaacacaggtgagtttcat

SEQ ID NO: 683344 - DNA, 33 bp, Homo sapien
ggaggagggtggtctatcacaggtgagtttcat

SEQ ID NO: 683345 - DNA, 33 bp, Homo sapien
atgtgctggtgggcagaaaggactgaacccagt

SEQ ID NO: 683346 - DNA, 33 bp, Homo sapien
atgtgctggtgggcaggaaggactgaacccagt

SEQ ID NO: 683347 - DNA, 33 bp, Homo sapien
gccagtggcacttagaaatgcttcagaccaaaa

SEQ ID NO: 683348 - DNA, 33 bp, Homo sapien
gccagtggcacttagagatgcttcagaccaaaa

SEQ ID NO: 683349 - DNA, 33 bp, Homo sapien
ttcatttatcaagaaacgtgcaagagctatgtg

SEQ ID NO: 683350 - DNA, 33 bp, Homo sapien
ttcatttatcaagaaatgtgcaagagctatgtg

SEQ ID NO: 683351 - DNA, 33 bp, Homo sapien
gcagcttaaagagaccccaaaccttgtaaaata

SEQ ID NO: 683352 - DNA, 33 bp, Homo sapien
gcagcttaaagagacctcaaaccttgtaaaata

SEQ ID NO: 683353 - DNA, 33 bp, Homo sapien
acaagaaaggtaaggcaagactgactaggaaaa

SEQ ID NO: 683354 - DNA, 33 bp, Homo sapien
acaagaaaggtaaggcgagactgactaggaaaa

SEQ ID NO: 683355 - DNA, 33 bp, Homo sapien
aaacattacctgtcaaaaatgtggaattattat

SEQ ID NO: 683356 - DNA, 33 bp, Homo sapien
aaacattacctgtcaagaatgtggaattattat

SEQ ID NO: 683357 - DNA, 33 bp, Homo sapien
agactttatctgcaaaccgggaaactgtctcta

SEQ ID NO: 683358 - DNA, 33 bp, Homo sapien
agactttatctgcaaatcgggaaactgtctcta

SEQ ID NO: 683359 - DNA, 33 bp, Homo sapien
aatcatggactgagccaaaaagtgctgcgctgg

SEQ ID NO: 683360 - DNA, 33 bp, Homo sapien
aatcatggactgagccgaaaagtgctgcgctgg

SEQ ID NO: 683361 - DNA, 33 bp, Homo sapien
ttacatagctggtgtacaggaagctgtcgtttc

SEQ ID NO: 683362 - DNA, 33 bp, Homo sapien
ttacatagctggtgtataggaagctgtcgtttc

SEQ ID NO: 683363 - DNA, 33 bp, Homo sapien
gagggtattcatcccaaagtggtttgcctattt

SEQ ID NO: 683364 - DNA, 33 bp, Homo sapien
gagggtattcatcccacagtggtttgcctattt

SEQ ID NO: 683365 - DNA, 33 bp, Homo sapien
tgtgacctgtcaccacaagagaacaccagcaaa

SEQ ID NO: 683366 - DNA, 33 bp, Homo sapien
tgtgacctgtcaccacgagagaacaccagcaaa

SEQ ID NO: 683367 - DNA, 33 bp, Homo sapien
aagtctacggcaaatacgcaaccttgacttcca

SEQ ID NO: 683368 - DNA, 33 bp, Homo sapien
aagtctacggcaaatatgcaaccttgacttcca

SEQ ID NO: 683369 - DNA, 33 bp, Homo sapien
ttttcaattctagcaacgaaggaaaacggcctg

SEQ ID NO: 683370 - DNA, 33 bp, Homo sapien
ttttcaattctagcaatgaaggaaaacggcctg

SEQ ID NO: 683371 - DNA, 33 bp, Homo sapien
tgctaggttttggatactaagtgaaattgaggc

SEQ ID NO: 683372 - DNA, 33 bp, Homo sapien
tgctaggttttggatagtaagtgaaattgaggc

SEQ ID NO: 683373 - DNA, 33 bp, Homo sapien
tccagcacatagaggacgccgtgcagggctcca

SEQ ID NO: 683374 - DNA, 33 bp, Homo sapien
tccagcacatagaggatgccgtgcagggctcca

SEQ ID NO: 683375 - DNA, 33 bp, Homo sapien
aatatgcagaaacggcacagcgggaaggatgtt

SEQ ID NO: 683376 - DNA, 33 bp, Homo sapien
aatatgcagaaacggcgcagcgggaaggatgtt

SEQ ID NO: 683377 - DNA, 33 bp, Homo sapien
aaaagctcccaaaactcaggcccgcatcagatg

SEQ ID NO: 683378 - DNA, 33 bp, Homo sapien
aaaagctcccaaaactgaggcccgcatcagatg

SEQ ID NO: 683379 - DNA, 33 bp, Homo sapien
ttttcaacgtcctgcccgagcaactggaaggcg

SEQ ID NO: 683380 - DNA, 33 bp, Homo sapien
ttttcaacgtcctgcctgagcaactggaaggcg

SEQ ID NO: 683381 - DNA, 33 bp, Homo sapien
gaagagaggtgctttccagggaaataaggctgt

SEQ ID NO: 683382 - DNA, 33 bp, Homo sapien
gaagagaggtgctttctagggaaataaggctgt

SEQ ID NO: 683383 - DNA, 33 bp, Homo sapien
cttggaattacatttacatcctgcctcgggagc

SEQ ID NO: 683384 - DNA, 33 bp, Homo sapien
cttggaattacatttatatcctgcctcgggagc

SEQ ID NO: 683385 - DNA, 33 bp, Homo sapien
caagtgagatacctgaagaagttcctgccaaat

SEQ ID NO: 683386 - DNA, 33 bp, Homo sapien
caagtgagatacctgaggaagttcctgccaaat

SEQ ID NO: 683387 - DNA, 33 bp, Homo sapien
aagctctgttcagttcactctgttgttcctgtt

SEQ ID NO: 683388 - DNA, 33 bp, Homo sapien
aagctctgttcagttctctctgttgttcctgtt

SEQ ID NO: 683389 - DNA, 33 bp, Homo sapien
ataaggaatgaacagacgggagaatttaagaag

SEQ ID NO: 683390 - DNA, 33 bp, Homo sapien
ataaggaatgaacagatgggagaatttaagaag

SEQ ID NO: 683391 - DNA, 33 bp, Homo sapien
cttttcatcagaaataatagtggtcagaggaca

SEQ ID NO: 683392 - DNA, 33 bp, Homo sapien
cttttcatcagaaatactagtggtcagaggaca

SEQ ID NO: 683393 - DNA, 33 bp, Homo sapien
ctgcacccctggaaccccctcggtcctaggcaa

SEQ ID NO: 683394 - DNA, 33 bp, Homo sapien
ctgcacccctggaacctcctcggtcctaggcaa

SEQ ID NO: 683395 - DNA, 33 bp, Homo sapien
gaagtccagaccttaaaagacacagaagaaggg

SEQ ID NO: 683396 - DNA, 33 bp, Homo sapien
gaagtccagaccttaagagacacagaagaaggg

SEQ ID NO: 683397 - DNA, 33 bp, Homo sapien
ctgcttccttggacaaaacccacagtggcaggt

SEQ ID NO: 683398 - DNA, 33 bp, Homo sapien
ctgcttccttggacaatacccacagtggcaggt

SEQ ID NO: 683399 - DNA, 33 bp, Homo sapien
agtgggtgctggaccccgaaatcctatcagcag

SEQ ID NO: 683400 - DNA, 33 bp, Homo sapien
agtgggtgctggacccggaaatcctatcagcag

SEQ ID NO: 683401 - DNA, 33 bp, Homo sapien
ccattccatcaggcacaagccatacctggcatc

SEQ ID NO: 683402 - DNA, 33 bp, Homo sapien
ccattccatcaggcacgagccatacctggcatc

SEQ ID NO: 683403 - DNA, 33 bp, Homo sapien
cctcgaggctggcacacccacggcccagggcag

SEQ ID NO: 683404 - DNA, 33 bp, Homo sapien
cctcgaggctggcacatccacggcccagggcag

SEQ ID NO: 683405 - DNA, 33 bp, Homo sapien
agctcaggaggctgcacataccgtcttggtcta

SEQ ID NO: 683406 - DNA, 33 bp, Homo sapien
agctcaggaggctgcagataccgtcttggtcta

SEQ ID NO: 683407 - DNA, 33 bp, Homo sapien
gatggtgcgaataaaccgggaagtcatgtcttt

SEQ ID NO: 683408 - DNA, 33 bp, Homo sapien
gatggtgcgaataaactgggaagtcatgtcttt

SEQ ID NO: 683409 - DNA, 33 bp, Homo sapien
gagttgcggccgactccgaaagggatctttgtt

SEQ ID NO: 683410 - DNA, 33 bp, Homo sapien
gagttgcggccgactctgaaagggatctttgtt

SEQ ID NO: 683411 - DNA, 33 bp, Homo sapien
tgcacacagtcgtgcaagatcttcatggtcacc

SEQ ID NO: 683412 - DNA, 33 bp, Homo sapien
tgcacacagtcgtgcatgatcttcatggtcacc

SEQ ID NO: 683413 - DNA, 33 bp, Homo sapien
tcagggttggaaataacggtgtggcggtcactg

SEQ ID NO: 683414 - DNA, 33 bp, Homo sapien
tcagggttggaaataatggtgtggcggtcactg

SEQ ID NO: 683415 - DNA, 33 bp, Homo sapien
tgttgtcctttgccaacgcttttgtcactgccg

SEQ ID NO: 683416 - DNA, 33 bp, Homo sapien
tgttgtcctttgccaatgcttttgtcactgccg

SEQ ID NO: 683417 - DNA, 33 bp, Homo sapien
ccctgctggaaggacaagtggtccatctcttag

SEQ ID NO: 683418 - DNA, 33 bp, Homo sapien
ccctgctggaaggacacgtggtccatctcttag

SEQ ID NO: 683419 - DNA, 33 bp, Homo sapien
cagtgctgtcttttagcccaggccaacagtctc

SEQ ID NO: 683420 - DNA, 33 bp, Homo sapien
cagtgctgtcttttagtccaggccaacagtctc

SEQ ID NO: 683421 - DNA, 33 bp, Homo sapien
acgtttagttgaggaacgagtaagagaaggaat

SEQ ID NO: 683422 - DNA, 33 bp, Homo sapien
acgtttagttgaggaaggagtaagagaaggaat

SEQ ID NO: 683423 - DNA, 33 bp, Homo sapien
accatcagttcggagcaaagaatcattttggcg

SEQ ID NO: 683424 - DNA, 33 bp, Homo sapien
accatcagttcggagcgaagaatcattttggcg

SEQ ID NO: 683425 - DNA, 33 bp, Homo sapien
aggtcagcagctgcagaaaaggacaggctccca

SEQ ID NO: 683426 - DNA, 33 bp, Homo sapien
aggtcagcagctgcaggaaaggacaggctccca

SEQ ID NO: 683427 - DNA, 33 bp, Homo sapien
acgtggtttattcgcaaagcccacaaagcagcc

SEQ ID NO: 683428 - DNA, 33 bp, Homo sapien
acgtggtttattcgcagagcccacaaagcagcc

SEQ ID NO: 683429 - DNA, 33 bp, Homo sapien
aggtaacacaagacacagaaaaaaggcctactc

SEQ ID NO: 683430 - DNA, 33 bp, Homo sapien
aggtaacacaagacacggaaaaaaggcctactc

SEQ ID NO: 683431 - DNA, 33 bp, Homo sapien
atacctgaagaccacacaagtcagtgtgcccct

SEQ ID NO: 683432 - DNA, 33 bp, Homo sapien
atacctgaagaccacataagtcagtgtgcccct

SEQ ID NO: 683433 - DNA, 33 bp, Homo sapien
ttcaggtatgtttgccacagcgggattgtgtcg

SEQ ID NO: 683434 - DNA, 33 bp, Homo sapien
ttcaggtatgtttgccgcagcgggattgtgtcg

SEQ ID NO: 683435 - DNA, 33 bp, Homo sapien
attgtattttaaacagcaaatgatgacctgtct

SEQ ID NO: 683436 - DNA, 33 bp, Homo sapien
attgtattttaaacagtaaatgatgacctgtct

SEQ ID NO: 683437 - DNA, 33 bp, Homo sapien
ccagcctttgttggccaccgagcacaagtaaat

SEQ ID NO: 683438 - DNA, 33 bp, Homo sapien
ccagcctttgttggccgccgagcacaagtaaat

SEQ ID NO: 683439 - DNA, 33 bp, Homo sapien
caaggccaccattcgaggtagatggcgtctaaa

SEQ ID NO: 683440 - DNA, 33 bp, Homo sapien
caaggccaccattcgatgtagatggcgtctaaa

SEQ ID NO: 683441 - DNA, 33 bp, Homo sapien
ctccctgtagggataaacaagtgccaggcgccc

SEQ ID NO: 683442 - DNA, 33 bp, Homo sapien
ctccctgtagggataagcaagtgccaggcgccc

SEQ ID NO: 683443 - DNA, 33 bp, Homo sapien
gcctcgcactgaggagcaaatggaatcagggca

SEQ ID NO: 683444 - DNA, 33 bp, Homo sapien
gcctcgcactgaggaggaaatggaatcagggca

SEQ ID NO: 683445 - DNA, 33 bp, Homo sapien
tgtctacaaatgcagactcacatcctgcacctt

SEQ ID NO: 683446 - DNA, 33 bp, Homo sapien
tgtctacaaatgcagagtcacatcctgcacctt

SEQ ID NO: 683447 - DNA, 33 bp, Homo sapien
acgacggcttctcacaccttccacaagccagcc

SEQ ID NO: 683448 - DNA, 33 bp, Homo sapien
acgacggcttctcacatcttccacaagccagcc

SEQ ID NO: 683449 - DNA, 33 bp, Homo sapien
agagaccacagtgagccgactcctggccaagag

SEQ ID NO: 683450 - DNA, 33 bp, Homo sapien
agagaccacagtgagctgactcctggccaagag

SEQ ID NO: 683451 - DNA, 33 bp, Homo sapien
agctgtaaacgtttcacacgctgcggacagatc

SEQ ID NO: 683452 - DNA, 33 bp, Homo sapien
agctgtaaacgtttcagacgctgcggacagatc

SEQ ID NO: 683453 - DNA, 33 bp, Homo sapien
gatcagcttcctgttcaactgcatcgtccgagg

SEQ ID NO: 683454 - DNA, 33 bp, Homo sapien
gatcagcttcctgttcgactgcatcgtccgagg

SEQ ID NO: 683455 - DNA, 33 bp, Homo sapien
accctaagggcccgacacggctgcagccctgga

SEQ ID NO: 683456 - DNA, 33 bp, Homo sapien
accctaagggcccgacgcggctgcagccctgga

SEQ ID NO: 683457 - DNA, 33 bp, Homo sapien
aaacttataacctcacacgcttgtttcacaaaa

SEQ ID NO: 683458 - DNA, 33 bp, Homo sapien
aaacttataacctcacgcgcttgtttcacaaaa

SEQ ID NO: 683459 - DNA, 33 bp, Homo sapien
tgggaataagattagcaagcgccggctcacctc

SEQ ID NO: 683460 - DNA, 33 bp, Homo sapien
tgggaataagattagcgagcgccggctcacctc

SEQ ID NO: 683461 - DNA, 33 bp, Homo sapien
aggattaaagcaccacacacaggtgacaaatga

SEQ ID NO: 683462 - DNA, 33 bp, Homo sapien
aggattaaagcaccacgcacaggtgacaaatga

SEQ ID NO: 683463 - DNA, 33 bp, Homo sapien
tacacgcagacatacacagacgcacgcaaagac

SEQ ID NO: 683464 - DNA, 33 bp, Homo sapien
tacacgcagacatacagagacgcacgcaaagac

SEQ ID NO: 683465 - DNA, 33 bp, Homo sapien
aaggaagaaactgcgacaatcttgagagagaga

SEQ ID NO: 683466 - DNA, 33 bp, Homo sapien
aaggaagaaactgcgagaatcttgagagagaga

SEQ ID NO: 683467 - DNA, 33 bp, Homo sapien
tccaatgccaccaggaccgccaatggaccacct

SEQ ID NO: 683468 - DNA, 33 bp, Homo sapien
tccaatgccaccaggatcgccaatggaccacct

SEQ ID NO: 683469 - DNA, 33 bp, Homo sapien
ttgcagtcaccattcacgtcagaactaaggact

SEQ ID NO: 683470 - DNA, 33 bp, Homo sapien
ttgcagtcaccattcatgtcagaactaaggact

SEQ ID NO: 683471 - DNA, 33 bp, Homo sapien
ttgagagggaaagtaaatgatttgcagaataag

SEQ ID NO: 683472 - DNA, 33 bp, Homo sapien
ttgagagggaaagtaagtgatttgcagaataag

SEQ ID NO: 683473 - DNA, 33 bp, Homo sapien
tctggaatgtggtcctaactgcaaatgttccag

SEQ ID NO: 683474 - DNA, 33 bp, Homo sapien
tctggaatgtggtcctcactgcaaatgttccag

SEQ ID NO: 683475 - DNA, 33 bp, Homo sapien
gagtcttctgggatcccgcatctgacagtggtg

SEQ ID NO: 683476 - DNA, 33 bp, Homo sapien
gagtcttctgggatcctgcatctgacagtggtg

SEQ ID NO: 683477 - DNA, 33 bp, Homo sapien
ccggtttcccagataactaagcaatattttatt

SEQ ID NO: 683478 - DNA, 33 bp, Homo sapien
ccggtttcccagataagtaagcaatattttatt

SEQ ID NO: 683479 - DNA, 33 bp, Homo sapien
accacctagtgaagaaatacaacctggacacca

SEQ ID NO: 683480 - DNA, 33 bp, Homo sapien
accacctagtgaagaactacaacctggacacca

SEQ ID NO: 683481 - DNA, 33 bp, Homo sapien; identical to SEQ ID NO: 683479

SEQ ID NO: 683482 - DNA, 33 bp, Homo sapien; identical to SEQ ID NO: 683480

SEQ ID NO: 683483 - DNA, 33 bp, Homo sapien
agagaatcctcgcagacgggggtccggggaacg

SEQ ID NO: 683484 - DNA, 33 bp, Homo sapien
agagaatcctcgcagatgggggtccggggaacg

SEQ ID NO: 683485 - DNA, 33 bp, Homo sapien
tgctcgctggatgacactggtccacggagacaa

SEQ ID NO: 683486 - DNA, 33 bp, Homo sapien
tgctcgctggatgacattggtccacggagacaa

SEQ ID NO: 683487 - DNA, 33 bp, Homo sapien
agcatcgcagcctaaacgaatctattggcttct

SEQ ID NO: 683488 - DNA, 33 bp, Homo sapien
agcatcgcagcctaaatgaatctattggcttct

SEQ ID NO: 683489 - DNA, 33 bp, Homo sapien
cactgagtctattacaagctgttagatatagat

SEQ ID NO: 683490 - DNA, 33 bp, Homo sapien
cactgagtctattacaggctgttagatatagat

SEQ ID NO: 683491 - DNA, 33 bp, Homo sapien
acaagcattcctaccacacacgactatcaagct

SEQ ID NO: 683492 - DNA, 33 bp, Homo sapien
acaagcattcctaccatacacgactatcaagct

SEQ ID NO: 683493 - DNA, 33 bp, Homo sapien
tccgatggattggacaccttccggctgcaggat

SEQ ID NO: 683494 - DNA, 33 bp, Homo sapien
tccgatggattggacagcttccggctgcaggat

SEQ ID NO: 683495 - DNA, 33 bp, Homo sapien
aactggctggtccctcacggctcagttcagctg

SEQ ID NO: 683496 - DNA, 33 bp, Homo sapien
aactggctggtccctcgcggctcagttcagctg

SEQ ID NO: 683497 - DNA, 33 bp, Homo sapien
ctcttctgtgtccagcaaggtcagatggcccct

SEQ ID NO: 683498 - DNA, 33 bp, Homo sapien
ctcttctgtgtccagcgaggtcagatggcccct

SEQ ID NO: 683499 - DNA, 33 bp, Homo sapien
caaaagggaacacaataatgcttttagaggaaa

SEQ ID NO: 683500 - DNA, 33 bp, Homo sapien
caaaagggaacacaatcatgcttttagaggaaa

SEQ ID NO: 683501 - DNA, 33 bp, Homo sapien
aggataggcaaattgacgggcagaacctaagag

SEQ ID NO: 683502 - DNA, 33 bp, Homo sapien
aggataggcaaattgatgggcagaacctaagag

SEQ ID NO: 683503 - DNA, 33 bp, Homo sapien
gctggtcccgagaaaccgtgggactgaggaaca

SEQ ID NO: 683504 - DNA, 33 bp, Homo sapien
gctggtcccgagaaactgtgggactgaggaaca

SEQ ID NO: 683505 - DNA, 33 bp, Homo sapien
agccctcattgtgggccctcacgtcactccagg

SEQ ID NO: 683506 - DNA, 33 bp, Homo sapien
agccctcattgtgggctctcacgtcactccagg

SEQ ID NO: 683507 - DNA, 33 bp, Homo sapien
ctggaactttctacaaatcttctccccggcagc

SEQ ID NO: 683508 - DNA, 33 bp, Homo sapien
ctggaactttctacaactcttctccccggcagc

SEQ ID NO: 683509 - DNA, 33 bp, Homo sapien
aggcctggtttctccaaatgacacagccaggcc

SEQ ID NO: 683510 - DNA, 33 bp, Homo sapien
aggcctggtttctccagatgacacagccaggcc

SEQ ID NO: 683511 - DNA, 33 bp, Homo sapien
ctgtggagtccgaccacgtgcctctctgtgata

SEQ ID NO: 683512 - DNA, 33 bp, Homo sapien
ctgtggagtccgaccaggtgcctctctgtgata

SEQ ID NO: 683513 - DNA, 33 bp, Homo sapien
gagggagaggaagtcgcccctaaaccagggatc

SEQ ID NO: 683514 - DNA, 33 bp, Homo sapien
gagggagaggaagtcgtccctaaaccagggatc

SEQ ID NO: 683515 - DNA, 33 bp, Homo sapien
ttcattttggaaggcaatagctctgagaatgct

SEQ ID NO: 683516 - DNA, 33 bp, Homo sapien
ttcattttggaaggcactagctctgagaatgct

SEQ ID NO: 683517 - DNA, 33 bp, Homo sapien
aacaaataaaaaggtcagaattcttgaagctca

SEQ ID NO: 683518 - DNA, 33 bp, Homo sapien
aacaaataaaaaggtctgaattcttgaagctca

SEQ ID NO: 683519 - DNA, 33 bp, Homo sapien
aggctggtgggagcaaaggcaaagtcacatggc

SEQ ID NO: 683520 - DNA, 33 bp, Homo sapien
aggctggtgggagcaacggcaaagtcacatggc

SEQ ID NO: 683521 - DNA, 33 bp, Homo sapien
aatttgttcagtggaaaagaaagtaagcttgct

SEQ ID NO: 683522 - DNA, 33 bp, Homo sapien
aatttgttcagtggaagagaaagtaagcttgct

SEQ ID NO: 683523 - DNA, 33 bp, Homo sapien
caggggctttctgaaccggactcagtgacaagg

SEQ ID NO: 683524 - DNA, 33 bp, Homo sapien
caggggctttctgaactggactcagtgacaagg

SEQ ID NO: 683525 - DNA, 33 bp, Homo sapien
ctgcagcggcggggaccgaaattggctatttgt

SEQ ID NO: 683526 - DNA, 33 bp, Homo sapien
ctgcagcggcggggactgaaattggctatttgt

SEQ ID NO: 683527 - DNA, 33 bp, Homo sapien
tggtttcatcttagcgaacgctgtctgtccccg

SEQ ID NO: 683528 - DNA, 33 bp, Homo sapien
tggtttcatcttagcggacgctgtctgtccccg

SEQ ID NO: 683529 - DNA, 33 bp, Homo sapien
tctctcggtccgtaaggctcctcacaggaggaa

SEQ ID NO: 683530 - DNA, 33 bp, Homo sapien
tctctcggtccgtaagtctcctcacaggaggaa

SEQ ID NO: 683531 - DNA, 33 bp, Homo sapien
cctcctgtttgttctccgaaaacattgttcaaa

SEQ ID NO: 683532 - DNA, 33 bp, Homo sapien
cctcctgtttgttctctgaaaacattgttcaaa

SEQ ID NO: 683533 - DNA, 33 bp, Homo sapien
tttttctgaatgtacaacctttgaatttctaga

SEQ ID NO: 683534 - DNA, 33 bp, Homo sapien
tttttctgaatgtacagcctttgaatttctaga

SEQ ID NO: 683535 - DNA, 33 bp, Homo sapien
taggccttaacagcaaccagcgtaaaagatgaa

SEQ ID NO: 683536 - DNA, 33 bp, Homo sapien
taggccttaacagcaagcagcgtaaaagatgaa

SEQ ID NO: 683537 - DNA, 33 bp, Homo sapien
cagactgcggtagcccgcaagccgaatcccagg

SEQ ID NO: 683538 - DNA, 33 bp, Homo sapien
cagactgcggtagccctcaagccgaatcccagg

SEQ ID NO: 683539 - DNA, 33 bp, Homo sapien
tataactttacagaaaggcttgtgatctaaaag

SEQ ID NO: 683540 - DNA, 33 bp, Homo sapien
tataactttacagaaatgcttgtgatctaaaag

SEQ ID NO: 683541 - DNA, 33 bp, Homo sapien
cacaagagcataacataacaactaaaagtaata

SEQ ID NO: 683542 - DNA, 33 bp, Homo sapien
cacaagagcataacatgacaactaaaagtaata

SEQ ID NO: 683543 - DNA, 33 bp, Homo sapien
ctgtgccaggcaccacacaaggtattgtacctc

SEQ ID NO: 683544 - DNA, 33 bp, Homo sapien
ctgtgccaggcaccacgcaaggtattgtacctc

SEQ ID NO: 683545 - DNA, 33 bp, Homo sapien
ctgctattctgcccggaatgaccagaaccaccc

SEQ ID NO: 683546 - DNA, 33 bp, Homo sapien
ctgctattctgcccggtatgaccagaaccaccc

SEQ ID NO: 683547 - DNA, 33 bp, Homo sapien
tgccagtgttttgcgacgtgacgcacattggca

SEQ ID NO: 683548 - DNA, 33 bp, Homo sapien
tgccagtgttttgcgatgtgacgcacattggca

SEQ ID NO: 683549 - DNA, 33 bp, Homo sapien
gagccacaatgtgtccagatatttggtccaaca

SEQ ID NO: 683550 - DNA, 33 bp, Homo sapien
gagccacaatgtgtccggatatttggtccaaca

SEQ ID NO: 683551 - DNA, 33 bp, Homo sapien
cagggaaaggcagaaacgacgcaggtgactaac

SEQ ID NO: 683552 - DNA, 33 bp, Homo sapien
cagggaaaggcagaaatgacgcaggtgactaac

SEQ ID NO: 683553 - DNA, 33 bp, Homo sapien
gtgcagagatgtttacccaaatacacattacaa

SEQ ID NO: 683554 - DNA, 33 bp, Homo sapien
gtgcagagatgtttactcaaatacacattacaa

SEQ ID NO: 683555 - DNA, 33 bp, Homo sapien
tgcctgagccccgggaataaaaggtctcacttc

SEQ ID NO: 683556 - DNA, 33 bp, Homo sapien
tgcctgagccccgggagtaaaaggtctcacttc

SEQ ID NO: 683557 - DNA, 33 bp, Homo sapien
tggtggaaatggtcaaattctgtcatcagaaaa

SEQ ID NO: 683558 - DNA, 33 bp, Homo sapien
tggtggaaatggtcaagttctgtcatcagaaaa

SEQ ID NO: 683559 - DNA, 33 bp, Homo sapien
ggcagccgacggactcagactggagcttcagca

SEQ ID NO: 683560 - DNA, 33 bp, Homo sapien
ggcagccgacggactcggactggagcttcagca

SEQ ID NO: 683561 - DNA, 33 bp, Homo sapien
cctggattatctgggaaggcctggtctaagcac

SEQ ID NO: 683562 - DNA, 33 bp, Homo sapien
cctggattatctgggagggcctggtctaagcac

SEQ ID NO: 683563 - DNA, 33 bp, Homo sapien
gcagcccaaaatgtcacaagacacaggtggaga

SEQ ID NO: 683564 - DNA, 33 bp, Homo sapien
gcagcccaaaatgtcataagacacaggtggaga

SEQ ID NO: 683565 - DNA, 33 bp, Homo sapien
gcagacgtcattctgaagagtgtgcacagcggc

SEQ ID NO: 683566 - DNA, 33 bp, Homo sapien
gcagacgtcattctgaggagtgtgcacagcggc

SEQ ID NO: 683567 - DNA, 33 bp, Homo sapien
tcataacacctcctcactctctaagcacagttt

SEQ ID NO: 683568 - DNA, 33 bp, Homo sapien
tcataacacctcctcattctctaagcacagttt

SEQ ID NO: 683569 - DNA, 33 bp, Homo sapien
catattaaattatcggacacagtcatttaaaat

SEQ ID NO: 683570 - DNA, 33 bp, Homo sapien
catattaaattatcgggcacagtcatttaaaat

SEQ ID NO: 683571 - DNA, 33 bp, Homo sapien
cagctccacgagtcaaaaaatcacgactaaaat

SEQ ID NO: 683572 - DNA, 33 bp, Homo sapien
cagctccacgagtcaagaaatcacgactaaaat

SEQ ID NO: 683573 - DNA, 33 bp, Homo sapien
gaaacatgatcactaacacataaaggagaggag

SEQ ID NO: 683574 - DNA, 33 bp, Homo sapien
gaaacatgatcactaatacataaaggagaggag

SEQ ID NO: 683575 - DNA, 33 bp, Homo sapien
gtggtcccagcctggaggtcaatatccttccac

SEQ ID NO: 683576 - DNA, 33 bp, Homo sapien
gtggtcccagcctggatgtcaatatccttccac

SEQ ID NO: 683577 - DNA, 33 bp, Homo sapien
tgagagacaagaaagcactattatcttcagttt

SEQ ID NO: 683578 - DNA, 33 bp, Homo sapien
tgagagacaagaaagcgctattatcttcagttt

SEQ ID NO: 683579 - DNA, 33 bp, Homo sapien
cctcacctgctgactcacgccttttatctcttt

SEQ ID NO: 683580 - DNA, 33 bp, Homo sapien
cctcacctgctgactcgcgccttttatctcttt

SEQ ID NO: 683581 - DNA, 33 bp, Homo sapien
tagtcaggggttagtaacgatggaagagacccc

SEQ ID NO: 683582 - DNA, 33 bp, Homo sapien
tagtcaggggttagtagcgatggaagagacccc

SEQ ID NO: 683583 - DNA, 33 bp, Homo sapien; identical to SEQ ID NO: 683581

SEQ ID NO: 683584 - DNA, 33 bp, Homo sapien; identical to SEQ ID NO: 683582

SEQ ID NO: 683585 - DNA, 33 bp, Homo sapien
ccttgcaacttcagccaacaagctttcaagcca

SEQ ID NO: 683586 - DNA, 33 bp, Homo sapien
ccttgcaacttcagccgacaagctttcaagcca

SEQ ID NO: 683587 - DNA, 33 bp, Homo sapien
atatctctccaggataccaaaaatcctatcaca

SEQ ID NO: 683588 - DNA, 33 bp, Homo sapien
atatctctccaggatatcaaaaatcctatcaca

SEQ ID NO: 683589 - DNA, 33 bp, Homo sapien
gatattacgttcaataacgcagtacgtgtacac

SEQ ID NO: 683590 - DNA, 33 bp, Homo sapien
gatattacgttcaatatcgcagtacgtgtacac

SEQ ID NO: 683591 - DNA, 33 bp, Homo sapien
agcatgctattacccccaacatcgcaggaagtg

SEQ ID NO: 683592 - DNA, 33 bp, Homo sapien
agcatgctattacccctaacatcgcaggaagtg

SEQ ID NO: 683593 - DNA, 33 bp, Homo sapien
ctagggtattacagataacgtcacaacgtgtac

SEQ ID NO: 683594 - DNA, 33 bp, Homo sapien
ctagggtattacagatgacgtcacaacgtgtac

SEQ ID NO: 683595 - DNA, 33 bp, Homo sapien
gcaagtgaatagcacagaaatcaatgaagaaag

SEQ ID NO: 683596 - DNA, 33 bp, Homo sapien
gcaagtgaatagcacataaatcaatgaagaaag

SEQ ID NO: 683597 - DNA, 33 bp, Homo sapien; identical to SEQ ID NO: 683595

SEQ ID NO: 683598 - DNA, 33 bp, Homo sapien; identical to SEQ ID NO: 683596

SEQ ID NO: 683599 - DNA, 33 bp, Homo sapien
gcacaccttgcgcccaaccattcgtttggtacc

SEQ ID NO: 683600 - DNA, 33 bp, Homo sapien
gcacaccttgcgcccacccattcgtttggtacc

SEQ ID NO: 683601 - DNA, 33 bp, Homo sapien
tttgtgtcatttatcacgtgactccatacaacc

SEQ ID NO: 683602 - DNA, 33 bp, Homo sapien
tttgtgtcatttatcatgtgactccatacaacc

SEQ ID NO: 683603 - DNA, 33 bp, Homo sapien; identical to SEQ ID NO: 683601

SEQ ID NO: 683604 - DNA, 33 bp, Homo sapien; identical to SEQ ID NO: 683602

SEQ ID NO: 683605 - DNA, 33 bp, Homo sapien
agtttgtacatattcactacagacacaaccaac

SEQ ID NO: 683606 - DNA, 33 bp, Homo sapien
agtttgtacatattcagtacagacacaaccaac

SEQ ID NO: 683607 - DNA, 33 bp, Homo sapien
gactgtttttgtctcacgggatttattgtgact

SEQ ID NO: 683608 - DNA, 33 bp, Homo sapien
gactgtttttgtctcatgggatttattgtgact

SEQ ID NO: 683609 - DNA, 33 bp, Homo sapien
ttttattgcaaccttcaacaagagacagatttt

SEQ ID NO: 683610 - DNA, 33 bp, Homo sapien
ttttattgcaaccttcgacaagagacagatttt

SEQ ID NO: 683611 - DNA, 33 bp, Homo sapien; identical to SEQ ID NO: 683609

SEQ ID NO: 683612 - DNA, 33 bp, Homo sapien; identical to SEQ ID NO: 683610

SEQ ID NO: 683613 - DNA, 33 bp, Homo sapien
aaaattaatgctacgacatagtttttctcagat

SEQ ID NO: 683614 - DNA, 33 bp, Homo sapien
aaaattaatgctacgatatagtttttctcagat

SEQ ID NO: 683615 - DNA, 33 bp, Homo sapien
ctttggagtatttgaagaaatcagtgaccctat

SEQ ID NO: 683616 - DNA, 33 bp, Homo sapien
ctttggagtatttgaataaatcagtgaccctat

SEQ ID NO: 683617 - DNA, 33 bp, Homo sapien
cgtttgtcaaaggctccatataatgcttcccag

SEQ ID NO: 683618 - DNA, 33 bp, Homo sapien
cgtttgtcaaaggctctatataatgcttcccag

SEQ ID NO: 683619 - DNA, 33 bp, Homo sapien
tcatttaattgctcacaacatcctctagggtaa

SEQ ID NO: 683620 - DNA, 33 bp, Homo sapien
tcatttaattgctcacgacatcctctagggtaa

SEQ ID NO: 683621 - DNA, 33 bp, Homo sapien
tcctgagtaagacagtaaatcttaggtaaaaga

SEQ ID NO: 683622 - DNA, 33 bp, Homo sapien
tcctgagtaagacagtgaatcttaggtaaaaga

SEQ ID NO: 683623 - DNA, 33 bp, Homo sapien
gatgtcttcctgtgcccgacgtttttttatctt

SEQ ID NO: 683624 - DNA, 33 bp, Homo sapien
gatgtcttcctgtgcctgacgtttttttatctt

SEQ ID NO: 683625 - DNA, 33 bp, Homo sapien
aattttatgtatataaatgcatgttttaccaca

SEQ ID NO: 683626 - DNA, 33 bp, Homo sapien
aattttatgtatataagtgcatgttttaccaca

SEQ ID NO: 683627 - DNA, 33 bp, Homo sapien
gcaatagcttgagatacaatgttttacttggta

SEQ ID NO: 683628 - DNA, 33 bp, Homo sapien
gcaatagcttgagatagaatgttttacttggta

SEQ ID NO: 683629 - DNA, 33 bp, Homo sapien
aagacatggttgtttcccccaatcaactggggg

SEQ ID NO: 683630 - DNA, 33 bp, Homo sapien
aagacatggttgtttctcccaatcaactggggg

SEQ ID NO: 683631 - DNA, 33 bp, Homo sapien
ttgtcttcaatatggacatacatgtgtctgcct

SEQ ID NO: 683632 - DNA, 33 bp, Homo sapien
ttgtcttcaatatggatatacatgtgtctgcct

SEQ ID NO: 683633 - DNA, 33 bp, Homo sapien
tcagcaacatctgccacgggtctgggtggaaag

SEQ ID NO: 683634 - DNA, 33 bp, Homo sapien
tcagcaacatctgccatgggtctgggtggaaag

SEQ ID NO: 683635 - DNA, 33 bp, Homo sapien
tggctgtcaaagggaaataaatgctgcatttga

SEQ ID NO: 683636 - DNA, 33 bp, Homo sapien
tggctgtcaaagggaactaaatgctgcatttga

SEQ ID NO: 683637 - DNA, 33 bp, Homo sapien
cactctgtgaaactcaggaagcagtacatttac

SEQ ID NO: 683638 - DNA, 33 bp, Homo sapien
cactctgtgaaactcatgaagcagtacatttac

SEQ ID NO: 683639 - DNA, 33 bp, Homo sapien
tggcgagtgagatacaaagctcagattcaacct

SEQ ID NO: 683640 - DNA, 33 bp, Homo sapien
tggcgagtgagatacacagctcagattcaacct

SEQ ID NO: 683641 - DNA, 33 bp, Homo sapien
ggtaatggatggcaagaacagaaatgaagactc

SEQ ID NO: 683642 - DNA, 33 bp, Homo sapien
ggtaatggatggcaaggacagaaatgaagactc

SEQ ID NO: 683643 - DNA, 33 bp, Homo sapien
acagagctgtgactccccagtccagtcccgaag

SEQ ID NO: 683644 - DNA, 33 bp, Homo sapien
acagagctgtgactccgcagtccagtcccgaag

SEQ ID NO: 683645 - DNA, 33 bp, Homo sapien
tttggaaaagataaataacttgcccttagtcac

SEQ ID NO: 683646 - DNA, 33 bp, Homo sapien
tttggaaaagataaatgacttgcccttagtcac

SEQ ID NO: 683647 - DNA, 33 bp, Homo sapien
ttagttaagtagaaaactctctgcattgacgaa

SEQ ID NO: 683648 - DNA, 33 bp, Homo sapien
ttagttaagtagaaaattctctgcattgacgaa

SEQ ID NO: 683649 - DNA, 33 bp, Homo sapien
tacccaagttggaggcactaataccagcatgct

SEQ ID NO: 683650 - DNA, 33 bp, Homo sapien
tacccaagttggaggcgctaataccagcatgct

SEQ ID NO: 683651 - DNA, 33 bp, Homo sapien
agttttaatcaatggaacataccagtttttagt

SEQ ID NO: 683652 - DNA, 33 bp, Homo sapien
agttttaatcaatggaccataccagtttttagt

SEQ ID NO: 683653 - DNA, 33 bp, Homo sapien
gtagtgtacacctaaactgcaatgccttctata

SEQ ID NO: 683654 - DNA, 33 bp, Homo sapien
gtagtgtacacctaaattgcaatgccttctata

SEQ ID NO: 683655 - DNA, 33 bp, Homo sapien
ctacaaaggttaaaatcaggacatgcgcctcag

SEQ ID NO: 683656 - DNA, 33 bp, Homo sapien
ctacaaaggttaaaatgaggacatgcgcctcag

SEQ ID NO: 683657 - DNA, 33 bp, Homo sapien
acaagtcagaaagaaacggaaccaagtccaggt

SEQ ID NO: 683658 - DNA, 33 bp, Homo sapien
acaagtcagaaagaaatggaaccaagtccaggt

SEQ ID NO: 683659 - DNA, 33 bp, Homo sapien
gtatttttgctgtaaaacttataatgtaaaaca

SEQ ID NO: 683660 - DNA, 33 bp, Homo sapien
gtatttttgctgtaaagcttataatgtaaaaca

SEQ ID NO: 683661 - DNA, 33 bp, Homo sapien
ttgacaatatcacacaactttacagtaagcaga

SEQ ID NO: 683662 - DNA, 33 bp, Homo sapien
ttgacaatatcacacatctttacagtaagcaga

SEQ ID NO: 683663 - DNA, 33 bp, Homo sapien
catctcccactccatcaagaaatagaattgtcc

SEQ ID NO: 683664 - DNA, 33 bp, Homo sapien
catctcccactccatccagaaatagaattgtcc

SEQ ID NO: 683665 - DNA, 33 bp, Homo sapien
ggtataatagcattgacgtgcaaattagtaggt

SEQ ID NO: 683666 - DNA, 33 bp, Homo sapien
ggtataatagcattgatgtgcaaattagtaggt

SEQ ID NO: 683667 - DNA, 33 bp, Homo sapien
atctcagaaccaaaccgaagggcatgttatcag

SEQ ID NO: 683668 - DNA, 33 bp, Homo sapien
atctcagaaccaaacctaagggcatgttatcag

SEQ ID NO: 683669 - DNA, 33 bp, Homo sapien
cacttaactttacacaatgcccattatgcgcta

SEQ ID NO: 683670 - DNA, 33 bp, Homo sapien
cacttaactttacacagtgcccattatgcgcta

SEQ ID NO: 683671 - DNA, 33 bp, Homo sapien
atggaatgctgacaaaaggaacagatgtgttcc

SEQ ID NO: 683672 - DNA, 33 bp, Homo sapien
atggaatgctgacaaacggaacagatgtgttcc

SEQ ID NO: 683673 - DNA, 33 bp, Homo sapien
cccccaaacactggagcctatgcttttatgcta

SEQ ID NO: 683674 - DNA, 33 bp, Homo sapien
cccccaaacactggagtctatgcttttatgcta

SEQ ID NO: 683675 - DNA, 33 bp, Homo sapien
cacaggtctgtggtaaatagtcagtaaatgata

SEQ ID NO: 683676 - DNA, 33 bp, Homo sapien
cacaggtctgtggtaagtagtcagtaaatgata

SEQ ID NO: 683677 - DNA, 33 bp, Homo sapien
tcaagccttgcaaacactgatgttccttaaggt

SEQ ID NO: 683678 - DNA, 33 bp, Homo sapien
tcaagccttgcaaacattgatgttccttaaggt

SEQ ID NO: 683679 - DNA, 33 bp, Homo sapien
gtgtggaggagccaccaaaggacagggtgaagc

SEQ ID NO: 683680 - DNA, 33 bp, Homo sapien
gtgtggaggagccaccgaaggacagggtgaagc

SEQ ID NO: 683681 - DNA, 33 bp, Homo sapien
aagcaatgaaagcttcactgatggaaccaggtt

SEQ ID NO: 683682 - DNA, 33 bp, Homo sapien
aagcaatgaaagcttcgctgatggaaccaggtt

SEQ ID NO: 683683 - DNA, 33 bp, Homo sapien
aaccaaaatactttcaatcatcccaaattcatt

SEQ ID NO: 683684 - DNA, 33 bp, Homo sapien
aaccaaaatactttcagtcatcccaaattcatt

SEQ ID NO: 683685 - DNA, 33 bp, Homo sapien
cccacgttgtctactacagcagtaaaacggtat

SEQ ID NO: 683686 - DNA, 33 bp, Homo sapien
cccacgttgtctactagagcagtaaaacggtat

SEQ ID NO: 683687 - DNA, 33 bp, Homo sapien
attattccacgtgaagacaatatcacagactta

SEQ ID NO: 683688 - DNA, 33 bp, Homo sapien
attattccacgtgaaggcaatatcacagactta

SEQ ID NO: 683689 - DNA, 33 bp, Homo sapien
gaaatgggacttggcaactgagtgactagattt

SEQ ID NO: 683690 - DNA, 33 bp, Homo sapien
gaaatgggacttggcagctgagtgactagattt

SEQ ID NO: 683691 - DNA, 33 bp, Homo sapien
aggtggtggaaggtgccacaagccgtgggtctg

SEQ ID NO: 683692 - DNA, 33 bp, Homo sapien
aggtggtggaaggtgctacaagccgtgggtctg

SEQ ID NO: 683693 - DNA, 33 bp, Homo sapien
aggaagacgctgcatacaggtctggtttcaaac

SEQ ID NO: 683694 - DNA, 33 bp, Homo sapien
aggaagacgctgcatataggtctggtttcaaac

SEQ ID NO: 683695 - DNA, 33 bp, Homo sapien
cacaacagagacttacacctatcagtcctaaca

SEQ ID NO: 683696 - DNA, 33 bp, Homo sapien
cacaacagagacttacgcctatcagtcctaaca

SEQ ID NO: 683697 - DNA, 33 bp, Homo sapien
agcttatcacaggctccgaatgtttctgtgtct

SEQ ID NO: 683698 - DNA, 33 bp, Homo sapien
agcttatcacaggctcggaatgtttctgtgtct

SEQ ID NO: 683699 - DNA, 33 bp, Homo sapien
cagctgagtcacaaaaggttgaagcccatggaa

SEQ ID NO: 683700 - DNA, 33 bp, Homo sapien
cagctgagtcacaaaatgttgaagcccatggaa

SEQ ID NO: 683701 - DNA, 33 bp, Homo sapien
ggataataacagtagcaaggacatattgtgtct

SEQ ID NO: 683702 - DNA, 33 bp, Homo sapien
ggataataacagtagctaggacatattgtgtct

SEQ ID NO: 683703 - DNA, 33 bp, Homo sapien
acagggctcttatgaaacttgagttgacttgca

SEQ ID NO: 683704 - DNA, 33 bp, Homo sapien
acagggctcttatgaagcttgagttgacttgca

SEQ ID NO: 683705 - DNA, 33 bp, Homo sapien
aatagtggaactgtccagagttgatatatggaa

SEQ ID NO: 683706 - DNA, 33 bp, Homo sapien
aatagtggaactgtccggagttgatatatggaa

SEQ ID NO: 683707 - DNA, 33 bp, Homo sapien
ggaagggtacattcaacgaacaacacattaagg

SEQ ID NO: 683708 - DNA, 33 bp, Homo sapien
ggaagggtacattcaatgaacaacacattaagg

SEQ ID NO: 683709 - DNA, 33 bp, Homo sapien
ttctacaaaaagtatgacaaattagctgggcat

SEQ ID NO: 683710 - DNA, 33 bp, Homo sapien
ttctacaaaaagtatggcaaattagctgggcat

SEQ ID NO: 683711 - DNA, 33 bp, Homo sapien
ccgaatcctgtgcatacagctcacctgggggtc

SEQ ID NO: 683712 - DNA, 33 bp, Homo sapien
ccgaatcctgtgcatatagctcacctgggggtc

SEQ ID NO: 683713 - DNA, 33 bp, Homo sapien
gcgcagaatcttggcccgccttagagcagatga

SEQ ID NO: 683714 - DNA, 33 bp, Homo sapien
gcgcagaatcttggcctgccttagagcagatga

SEQ ID NO: 683715 - DNA, 33 bp, Homo sapien
gaaccacggcatgggcactgcctggatcctgga

SEQ ID NO: 683716 - DNA, 33 bp, Homo sapien
gaaccacggcatgggcgctgcctggatcctgga

SEQ ID NO: 683717 - DNA, 33 bp, Homo sapien
gtccttcaacatatagcagtttcaatgtgctta

SEQ ID NO: 683718 - DNA, 33 bp, Homo sapien
gtccttcaacatatagtagtttcaatgtgctta

SEQ ID NO: 683719 - DNA, 33 bp, Homo sapien
gcatcatctccttcaactcttatagcagcctca

SEQ ID NO: 683720 - DNA, 33 bp, Homo sapien
gcatcatctccttcaattcttatagcagcctca

SEQ ID NO: 683721 - DNA, 33 bp, Homo sapien
gacattcacagtttccaatggttaggacatggc

SEQ ID NO: 683722 - DNA, 33 bp, Homo sapien
gacattcacagtttccgatggttaggacatggc

SEQ ID NO: 683723 - DNA, 33 bp, Homo sapien
tcctttctcttcctccagcagtgacgctcctct

SEQ ID NO: 683724 - DNA, 33 bp, Homo sapien
tcctttctcttcctccggcagtgacgctcctct

SEQ ID NO: 683725 - DNA, 33 bp, Homo sapien
atttcctgttgctcaccgtcaaacctaatcctg

SEQ ID NO: 683726 - DNA, 33 bp, Homo sapien
atttcctgttgctcactgtcaaacctaatcctg

SEQ ID NO: 683727 - DNA, 33 bp, Homo sapien
ctcactccagagtctacagagttggagggcgga

SEQ ID NO: 683728 - DNA, 33 bp, Homo sapien
ctcactccagagtctagagagttggagggcgga

SEQ ID NO: 683729 - DNA, 33 bp, Homo sapien
gaaattggaactctcagacgttgttgatgggaa

SEQ ID NO: 683730 - DNA, 33 bp, Homo sapien
gaaattggaactctcatacgttgttgatgggaa

SEQ ID NO: 683731 - DNA, 33 bp, Homo sapien
tgaagctaaaaaaaacaaagatagtgacaggga

SEQ ID NO: 683732 - DNA, 33 bp, Homo sapien
tgaagctaaaaaaaactaagatagtgacaggga

SEQ ID NO: 683733 - DNA, 33 bp, Homo sapien
gttgataatgccatgaggtcactaccatgttac

SEQ ID NO: 683734 - DNA, 33 bp, Homo sapien
gttgataatgccatgatgtcactaccatgttac

SEQ ID NO: 683735 - DNA, 33 bp, Homo sapien
ctctcatccggtgctacgacccccaaagccagc

SEQ ID NO: 683736 - DNA, 33 bp, Homo sapien
ctctcatccggtgctatgacccccaaagccagc

SEQ ID NO: 683737 - DNA, 33 bp, Homo sapien
cctataacaccttgacactgctcttgaacacct

SEQ ID NO: 683738 - DNA, 33 bp, Homo sapien
cctataacaccttgaccctgctcttgaacacct

SEQ ID NO: 683739 - DNA, 33 bp, Homo sapien
tgtaaaatggagctataagggcgcctacctcct

SEQ ID NO: 683740 - DNA, 33 bp, Homo sapien
tgtaaaatggagctatgagggcgcctacctcct

SEQ ID NO: 683741 - DNA, 33 bp, Homo sapien
ctttttgtttgtttgcagaaaatggaaattaca

SEQ ID NO: 683742 - DNA, 33 bp, Homo sapien
ctttttgtttgtttgccgaaaatggaaattaca

SEQ ID NO: 683743 - DNA, 33 bp, Homo sapien
actcactcactcactcactgaacgtgcaggagg

SEQ ID NO: 683744 - DNA, 33 bp, Homo sapien
actcactcactcactcgctgaacgtgcaggagg

SEQ ID NO: 683745 - DNA, 33 bp, Homo sapien
cccacatctcatcgccaaagtgggggaaccatg

SEQ ID NO: 683746 - DNA, 33 bp, Homo sapien
cccacatctcatcgccgaagtgggggaaccatg

SEQ ID NO: 683747 - DNA, 33 bp, Homo sapien
ggtccatcgttgacccaaatgctgttatgccgc

SEQ ID NO: 683748 - DNA, 33 bp, Homo sapien
ggtccatcgttgacccgaatgctgttatgccgc

SEQ ID NO: 683749 - DNA, 33 bp, Homo sapien
tttccctgagggatgacgagcagcagatggaga

SEQ ID NO: 683750 - DNA, 33 bp, Homo sapien
tttccctgagggatgatgagcagcagatggaga

SEQ ID NO: 683751 - DNA, 33 bp, Homo sapien
atcgccttgaaagcttcaaactgattccagtga

SEQ ID NO: 683752 - DNA, 33 bp, Homo sapien
atcgccttgaaagcttgaaactgattccagtga

SEQ ID NO: 683753 - DNA, 33 bp, Homo sapien
ggtatgtgctgaatacactccatagactgacac

SEQ ID NO: 683754 - DNA, 33 bp, Homo sapien
ggtatgtgctgaatacgctccatagactgacac

SEQ ID NO: 683755 - DNA, 33 bp, Homo sapien
gctgttaaaagtactgaaaaggctgtatcattc

SEQ ID NO: 683756 - DNA, 33 bp, Homo sapien
gctgttaaaagtactgcaaaggctgtatcattc

SEQ ID NO: 683757 - DNA, 33 bp, Homo sapien
ttgtggaaaaagtccacctaccagaagtggaga

SEQ ID NO: 683758 - DNA, 33 bp, Homo sapien
ttgtggaaaaagtccatctaccagaagtggaga

SEQ ID NO: 683759 - DNA, 33 bp, Homo sapien
aaaaatctcctcaaagcaaaaggctctgctgta

SEQ ID NO: 683760 - DNA, 33 bp, Homo sapien
aaaaatctcctcaaagtaaaaggctctgctgta

SEQ ID NO: 683761 - DNA, 33 bp, Homo sapien
ggccctatttacaaacccaacagcttcagcttt

SEQ ID NO: 683762 - DNA, 33 bp, Homo sapien
ggccctatttacaaacgcaacagcttcagcttt

SEQ ID NO: 683763 - DNA, 33 bp, Homo sapien
ttacagaaatccttcactagacatttgaggtct

SEQ ID NO: 683764 - DNA, 33 bp, Homo sapien
ttacagaaatccttcagtagacatttgaggtct

SEQ ID NO: 683765 - DNA, 33 bp, Homo sapien
atgcctgaaataactacatgatatgcatgggaa

SEQ ID NO: 683766 - DNA, 33 bp, Homo sapien
atgcctgaaataactatatgatatgcatgggaa

SEQ ID NO: 683767 - DNA, 33 bp, Homo sapien
tatgccaaggaggagcacagacttctgttttct

SEQ ID NO: 683768 - DNA, 33 bp, Homo sapien
tatgccaaggaggagcgcagacttctgttttct

SEQ ID NO: 683769 - DNA, 33 bp, Homo sapien
attctgagtccaattacaggatgtttttaactt

SEQ ID NO: 683770 - DNA, 33 bp, Homo sapien
attctgagtccaattataggatgtttttaactt

SEQ ID NO: 683771 - DNA, 33 bp, Homo sapien
ggagaaaatgtccaagaaaaggcaagtgttcat

SEQ ID NO: 683772 - DNA, 33 bp, Homo sapien
ggagaaaatgtccaagcaaaggcaagtgttcat

SEQ ID NO: 683773 - DNA, 33 bp, Homo sapien
aggaggtagaaacttaagatggcccgtgtggat

SEQ ID NO: 683774 - DNA, 33 bp, Homo sapien
aggaggtagaaacttaggatggcccgtgtggat

SEQ ID NO: 683775 - DNA, 33 bp, Homo sapien
ctgcaaggctttatggcacttgttttatgtcta

SEQ ID NO: 683776 - DNA, 33 bp, Homo sapien
ctgcaaggctttatggtacttgttttatgtcta

SEQ ID NO: 683777 - DNA, 33 bp, Homo sapien
gagtcatcaaggatcaactgtattggcacccct

SEQ ID NO: 683778 - DNA, 33 bp, Homo sapien
gagtcatcaaggatcagctgtattggcacccct

SEQ ID NO: 683779 - DNA, 33 bp, Homo sapien
gaaaaatgcagacaaaccctattaaccgctcct

SEQ ID NO: 683780 - DNA, 33 bp, Homo sapien
gaaaaatgcagacaaatcctattaaccgctcct

SEQ ID NO: 683781 - DNA, 33 bp, Homo sapien
atcgcttcaaccaactcaaaaatgcagactggc

SEQ ID NO: 683782 - DNA, 33 bp, Homo sapien
atcgcttcaaccaactgaaaaatgcagactggc

SEQ ID NO: 683783 - DNA, 33 bp, Homo sapien
ctcagagggaagctaaaaaccagaacgctgcca

SEQ ID NO: 683784 - DNA, 33 bp, Homo sapien
ctcagagggaagctaagaaccagaacgctgcca

SEQ ID NO: 683785 - DNA, 33 bp, Homo sapien
attctcatattcagaactgcttacagatacata

SEQ ID NO: 683786 - DNA, 33 bp, Homo sapien
attctcatattcagaagtgcttacagatacata

SEQ ID NO: 683787 - DNA, 33 bp, Homo sapien
tgatagagctagataacgatgaaggtgatgata

SEQ ID NO: 683788 - DNA, 33 bp, Homo sapien
tgatagagctagataatgatgaaggtgatgata

SEQ ID NO: 683789 - DNA, 33 bp, Homo sapien
catcttcctgaattaacgaggtctgggcaaaaa

SEQ ID NO: 683790 - DNA, 33 bp, Homo sapien
catcttcctgaattaatgaggtctgggcaaaaa

SEQ ID NO: 683791 - DNA, 33 bp, Homo sapien
actgtaatagaaactacgatagccctgtcctca

SEQ ID NO: 683792 - DNA, 33 bp, Homo sapien
actgtaatagaaactaggatagccctgtcctca

SEQ ID NO: 683793 - DNA, 33 bp, Homo sapien
gtaaagtcgcatttcaagatggttttgtgtttc

SEQ ID NO: 683794 - DNA, 33 bp, Homo sapien
gtaaagtcgcatttcaggatggttttgtgtttc

SEQ ID NO: 683795 - DNA, 33 bp, Homo sapien
caattccagtggagtacatgatatcgtccacag

SEQ ID NO: 683796 - DNA, 33 bp, Homo sapien
caattccagtggagtatatgatatcgtccacag

SEQ ID NO: 683797 - DNA, 33 bp, Homo sapien
ggaaaacaggagtccacagtgttattaataact

SEQ ID NO: 683798 - DNA, 33 bp, Homo sapien
ggaaaacaggagtccatagtgttattaataact

SEQ ID NO: 683799 - DNA, 33 bp, Homo sapien
gaggttggggtagaagaacatgagatattaagt

SEQ ID NO: 683800 - DNA, 33 bp, Homo sapien
gaggttggggtagaaggacatgagatattaagt

SEQ ID NO: 683801 - DNA, 33 bp, Homo sapien
aactgaggcgtagagaagctacatagtctaagg

SEQ ID NO: 683802 - DNA, 33 bp, Homo sapien
aactgaggcgtagagaggctacatagtctaagg

SEQ ID NO: 683803 - DNA, 33 bp, Homo sapien
agtattagctgccaccactagtcctatcatcct

SEQ ID NO: 683804 - DNA, 33 bp, Homo sapien
agtattagctgccaccgctagtcctatcatcct

SEQ ID NO: 683805 - DNA, 33 bp, Homo sapien
agcaatgggaaacttacacagcctctttctccc

SEQ ID NO: 683806 - DNA, 33 bp, Homo sapien
agcaatgggaaacttatacagcctctttctccc

SEQ ID NO: 683807 - DNA, 33 bp, Homo sapien
gtttccttggaccaaaatcaaagtgtcagcagg

SEQ ID NO: 683808 - DNA, 33 bp, Homo sapien
gtttccttggaccaaagtcaaagtgtcagcagg

SEQ ID NO: 683809 - DNA, 33 bp, Homo sapien
ttctcctccccacatccctttgaggtagataaa

SEQ ID NO: 683810 - DNA, 33 bp, Homo sapien
ttctcctccccacatctctttgaggtagataaa

SEQ ID NO: 683811 - DNA, 33 bp, Homo sapien
cctccaacagaaagtaccatttgtcatgagttt

SEQ ID NO: 683812 - DNA, 33 bp, Homo sapien
cctccaacagaaagtatcatttgtcatgagttt

SEQ ID NO: 683813 - DNA, 33 bp, Homo sapien
caggataaatcttcaccatctctaaaccactct

SEQ ID NO: 683814 - DNA, 33 bp, Homo sapien
caggataaatcttcactatctctaaaccactct

SEQ ID NO: 683815 - DNA, 33 bp, Homo sapien
tgttgctagattttgcacggctgtacatgcctg

SEQ ID NO: 683816 - DNA, 33 bp, Homo sapien
tgttgctagattttgcgcggctgtacatgcctg

SEQ ID NO: 683817 - DNA, 33 bp, Homo sapien
cctaattcctcaggcacgttgttctcgagacac

SEQ ID NO: 683818 - DNA, 33 bp, Homo sapien
cctaattcctcaggcatgttgttctcgagacac

SEQ ID NO: 683819 - DNA, 33 bp, Homo sapien
ttctcctgcttaaaacaccaatgagtctccaaa

SEQ ID NO: 683820 - DNA, 33 bp, Homo sapien
ttctcctgcttaaaacgccaatgagtctccaaa

SEQ ID NO: 683821 - DNA, 33 bp, Homo sapien
aaatggacgaatacagacatcatctctagacaa

SEQ ID NO: 683822 - DNA, 33 bp, Homo sapien
aaatggacgaatacaggcatcatctctagacaa

SEQ ID NO: 683823 - DNA, 33 bp, Homo sapien
cctagcaggagtgtatcaggggttcattttctc

SEQ ID NO: 683824 - DNA, 33 bp, Homo sapien
cctagcaggagtgtattaggggttcattttctc

SEQ ID NO: 683825 - DNA, 33 bp, Homo sapien
ctggcatctgaggacagtaaagtcacttgaagt

SEQ ID NO: 683826 - DNA, 33 bp, Homo sapien
ctggcatctgaggacattaaagtcacttgaagt

SEQ ID NO: 683827 - DNA, 33 bp, Homo sapien
tgtgcagcacttggaacggtgccccccacatgc

SEQ ID NO: 683828 - DNA, 33 bp, Homo sapien
tgtgcagcacttggaatggtgccccccacatgc

SEQ ID NO: 683829 - DNA, 33 bp, Homo sapien
ggaagcaggagcgtcaggtttgaatctctgctc

SEQ ID NO: 683830 - DNA, 33 bp, Homo sapien
ggaagcaggagcgtcatgtttgaatctctgctc

SEQ ID NO: 683831 - DNA, 33 bp, Homo sapien
tccacattccattgaaaaaactggataacactg

SEQ ID NO: 683832 - DNA, 33 bp, Homo sapien
tccacattccattgaacaaactggataacactg

SEQ ID NO: 683833 - DNA, 33 bp, Homo sapien
ccaccactgccatgcacctcttaagtgatcctc

SEQ ID NO: 683834 - DNA, 33 bp, Homo sapien
ccaccactgccatgcatctcttaagtgatcctc

SEQ ID NO: 683835 - DNA, 33 bp, Homo sapien
ctcagtgacgaagaaccgtcccagaagcttccc

SEQ ID NO: 683836 - DNA, 33 bp, Homo sapien
ctcagtgacgaagaactgtcccagaagcttccc

SEQ ID NO: 683837 - DNA, 33 bp, Homo sapien
tcagagaatcctttcacgccagtggtcatacag

SEQ ID NO: 683838 - DNA, 33 bp, Homo sapien
tcagagaatcctttcatgccagtggtcatacag

SEQ ID NO: 683839 - DNA, 33 bp, Homo sapien
tcagttgctcctgttacagcttgagagaggaag

SEQ ID NO: 683840 - DNA, 33 bp, Homo sapien
tcagttgctcctgttatagcttgagagaggaag

SEQ ID NO: 683841 - DNA, 33 bp, Homo sapien
aatattgattgttgaacgcttccgaatattgtg

SEQ ID NO: 683842 - DNA, 33 bp, Homo sapien
aatattgattgttgaatgcttccgaatattgtg

SEQ ID NO: 683843 - DNA, 33 bp, Homo sapien
gttactgagcctggctaaacttaaacatttttg

SEQ ID NO: 683844 - DNA, 33 bp, Homo sapien
gttactgagcctggcttaacttaaacatttttg

SEQ ID NO: 683845 - DNA, 33 bp, Homo sapien
acataaagcaaaatcaaaaaagtctaagcaaat

SEQ ID NO: 683846 - DNA, 33 bp, Homo sapien
acataaagcaaaatcagaaaagtctaagcaaat

SEQ ID NO: 683847 - DNA, 33 bp, Homo sapien
ctttattctggttgtcactgcgcctttatcaga

SEQ ID NO: 683848 - DNA, 33 bp, Homo sapien
ctttattctggttgtcgctgcgcctttatcaga

SEQ ID NO: 683849 - DNA, 33 bp, Homo sapien
caatttcctcatctataaagaatgcagaacaga

SEQ ID NO: 683850 - DNA, 33 bp, Homo sapien
caatttcctcatctatgaagaatgcagaacaga

SEQ ID NO: 683851 - DNA, 33 bp, Homo sapien
tacgtgcatgctgttccctctttccttccatgc

SEQ ID NO: 683852 - DNA, 33 bp, Homo sapien
tacgtgcatgctgttctctctttccttccatgc

SEQ ID NO: 683853 - DNA, 33 bp, Homo sapien
cggcatgaaatagccaatcccaatttggtaata

SEQ ID NO: 683854 - DNA, 33 bp, Homo sapien
cggcatgaaatagccagtcccaatttggtaata

SEQ ID NO: 683855 - DNA, 33 bp, Homo sapien
gctccttcttaggcaacagaaagttctgccatc

SEQ ID NO: 683856 - DNA, 33 bp, Homo sapien
gctccttcttaggcaatagaaagttctgccatc

SEQ ID NO: 683857 - DNA, 33 bp, Homo sapien
actctttacaacagcactatgaagtcggccact

SEQ ID NO: 683858 - DNA, 33 bp, Homo sapien
actctttacaacagcagtatgaagtcggccact

SEQ ID NO: 683859 - DNA, 33 bp, Homo sapien
ctcctcctgttttcacagtctttgccgaccctg

SEQ ID NO: 683860 - DNA, 33 bp, Homo sapien
ctcctcctgttttcacggtctttgccgaccctg

SEQ ID NO: 683861 - DNA, 33 bp, Homo sapien
attgcagagagcttccaaagatgacctcaatga

SEQ ID NO: 683862 - DNA, 33 bp, Homo sapien
attgcagagagcttccgaagatgacctcaatga

SEQ ID NO: 683863 - DNA, 33 bp, Homo sapien
taggaagcaataaatgacaccagggaacttaaa

SEQ ID NO: 683864 - DNA, 33 bp, Homo sapien
taggaagcaataaatgtcaccagggaacttaaa

SEQ ID NO: 683865 - DNA, 33 bp, Homo sapien
agtgtttgcatcagaaaacagattaagaagcct

SEQ ID NO: 683866 - DNA, 33 bp, Homo sapien
agtgtttgcatcagaagacagattaagaagcct

SEQ ID NO: 683867 - DNA, 33 bp, Homo sapien
gcttacagttttgtccaaggtcagtgggccagg

SEQ ID NO: 683868 - DNA, 33 bp, Homo sapien
gcttacagttttgtccgaggtcagtgggccagg

SEQ ID NO: 683869 - DNA, 33 bp, Homo sapien
agctgtcagatcataaaccattcttctgcccta

SEQ ID NO: 683870 - DNA, 33 bp, Homo sapien
agctgtcagatcataagccattcttctgcccta

SEQ ID NO: 683871 - DNA, 33 bp, Homo sapien
atatgaagaaataaaaactggaatatctcaggg

SEQ ID NO: 683872 - DNA, 33 bp, Homo sapien
atatgaagaaataaaagctggaatatctcaggg

SEQ ID NO: 683873 - DNA, 33 bp, Homo sapien
ttgtctcatagctctgaaggctaagagttgaaa

SEQ ID NO: 683874 - DNA, 33 bp, Homo sapien
ttgtctcatagctctggaggctaagagttgaaa

SEQ ID NO: 683875 - DNA, 33 bp, Homo sapien
taataaaaggaaggagaatgtgtactggagagc

SEQ ID NO: 683876 - DNA, 33 bp, Homo sapien
taataaaaggaaggagcatgtgtactggagagc

SEQ ID NO: 683877 - DNA, 33 bp, Homo sapien
atttcctaatctccaactctgaacacacaagag

SEQ ID NO: 683878 - DNA, 33 bp, Homo sapien
atttcctaatctccaattctgaacacacaagag

SEQ ID NO: 683879 - DNA, 33 bp, Homo sapien
tgaaggctttatcatcaattgctattactttta

SEQ ID NO: 683880 - DNA, 33 bp, Homo sapien
tgaaggctttatcatcgattgctattactttta

SEQ ID NO: 683881 - DNA, 33 bp, Homo sapien
atctaatgcaaccttcaagtctgtgttggcaaa

SEQ ID NO: 683882 - DNA, 33 bp, Homo sapien
atctaatgcaaccttcgagtctgtgttggcaaa

SEQ ID NO: 683883 - DNA, 33 bp, Homo sapien
ataaagcagttggtaacgcctggcacataggaa

SEQ ID NO: 683884 - DNA, 33 bp, Homo sapien
ataaagcagttggtaatgcctggcacataggaa

SEQ ID NO: 683885 - DNA, 33 bp, Homo sapien
gtggcccactgcttaacagaagctcaaaatctc

SEQ ID NO: 683886 - DNA, 33 bp, Homo sapien
gtggcccactgcttaatagaagctcaaaatctc

SEQ ID NO: 683887 - DNA, 33 bp, Homo sapien
ttggggttcaggtatcaaattcatggattcaga

SEQ ID NO: 683888 - DNA, 33 bp, Homo sapien
ttggggttcaggtatctaattcatggattcaga

SEQ ID NO: 683889 - DNA, 33 bp, Homo sapien
tattcctttatgccaacgcaacatggactaaga

SEQ ID NO: 683890 - DNA, 33 bp, Homo sapien
tattcctttatgccaatgcaacatggactaaga

SEQ ID NO: 683891 - DNA, 33 bp, Homo sapien
tgctatgctttaatcacgatcagcaagtgttta

SEQ ID NO: 683892 - DNA, 33 bp, Homo sapien
tgctatgctttaatcatgatcagcaagtgttta

SEQ ID NO: 683893 - DNA, 33 bp, Homo sapien
tgaaactgtttgataactaaacaatacaataca

SEQ ID NO: 683894 - DNA, 33 bp, Homo sapien
tgaaactgtttgataagtaaacaatacaataca

SEQ ID NO: 683895 - DNA, 33 bp, Homo sapien
acaccttgctttctcactccacaaaggagtaaa

SEQ ID NO: 683896 - DNA, 33 bp, Homo sapien
acaccttgctttctcattccacaaaggagtaaa

SEQ ID NO: 683897 - DNA, 33 bp, Homo sapien
tgttctatggactgatgaccaatgagagttgtt

SEQ ID NO: 683898 - DNA, 33 bp, Homo sapien
tgttctatggactgattaccaatgagagttgtt

SEQ ID NO: 683899 - DNA, 33 bp, Homo sapien
tacctgcagatcataaccaggtgacctccatct

SEQ ID NO: 683900 - DNA, 33 bp, Homo sapien
tacctgcagatcataatcaggtgacctccatct

SEQ ID NO: 683901 - DNA, 33 bp, Homo sapien
agagaaagcatcaaagactgaaggagaacttgt

SEQ ID NO: 683902 - DNA, 33 bp, Homo sapien
agagaaagcatcaaaggctgaaggagaacttgt

SEQ ID NO: 683903 - DNA, 33 bp, Homo sapien
agagggagtagtgacaacagatggtcttcagat

SEQ ID NO: 683904 - DNA, 33 bp, Homo sapien
agagggagtagtgacagcagatggtcttcagat

SEQ ID NO: 683905 - DNA, 33 bp, Homo sapien
cagaagctttagcagagtcccccatgctgtagg

SEQ ID NO: 683906 - DNA, 33 bp, Homo sapien
cagaagctttagcagattcccccatgctgtagg

SEQ ID NO: 683907 - DNA, 33 bp, Homo sapien
aagtaagaaagtcttaagtgtttagctagctca

SEQ ID NO: 683908 - DNA, 33 bp, Homo sapien
aagtaagaaagtcttacgtgtttagctagctca

SEQ ID NO: 683909 - DNA, 33 bp, Homo sapien
aatctacctatgaccaagaagtgccccccatcc

SEQ ID NO: 683910 - DNA, 33 bp, Homo sapien
aatctacctatgaccaggaagtgccccccatcc

SEQ ID NO: 683911 - DNA, 33 bp, Homo sapien
taaagccttggccttcacaaccccttagtataa

SEQ ID NO: 683912 - DNA, 33 bp, Homo sapien
taaagccttggccttcgcaaccccttagtataa

SEQ ID NO: 683913 - DNA, 33 bp, Homo sapien
taaatagcccttagtcactgatgtggggtagtt

SEQ ID NO: 683914 - DNA, 33 bp, Homo sapien
taaatagcccttagtcgctgatgtggggtagtt

SEQ ID NO: 683915 - DNA, 33 bp, Homo sapien
tcaagtgcagaaagaacacaatgacattctaag

SEQ ID NO: 683916 - DNA, 33 bp, Homo sapien
tcaagtgcagaaagaagacaatgacattctaag

SEQ ID NO: 683917 - DNA, 33 bp, Homo sapien
tcccaaataaaatccgaagactctcagaatcat

SEQ ID NO: 683918 - DNA, 33 bp, Homo sapien
tcccaaataaaatccgcagactctcagaatcat

SEQ ID NO: 683919 - DNA, 33 bp, Homo sapien
gctcagtgacttaaaacaccaatcatgcatctt

SEQ ID NO: 683920 - DNA, 33 bp, Homo sapien
gctcagtgacttaaaataccaatcatgcatctt

SEQ ID NO: 683921 - DNA, 33 bp, Homo sapien
acaggccttgagattcaagtttggggagcatct

SEQ ID NO: 683922 - DNA, 33 bp, Homo sapien
acaggccttgagattccagtttggggagcatct

SEQ ID NO: 683923 - DNA, 33 bp, Homo sapien
atggctttaaatatcaacagatgctccccaaac

SEQ ID NO: 683924 - DNA, 33 bp, Homo sapien
atggctttaaatatcagcagatgctccccaaac

SEQ ID NO: 683925 - DNA, 33 bp, Homo sapien
tcattcaagaccctgaggtaccacaaaaggtaa

SEQ ID NO: 683926 - DNA, 33 bp, Homo sapien
tcattcaagaccctgatgtaccacaaaaggtaa

SEQ ID NO: 683927 - DNA, 33 bp, Homo sapien
agtgctgcaaattatgccaagtaccccaaccca

SEQ ID NO: 683928 - DNA, 33 bp, Homo sapien
agtgctgcaaattatgtcaagtaccccaaccca

SEQ ID NO: 683929 - DNA, 33 bp, Homo sapien
gttatttattaccacaataaagctgcataataa

SEQ ID NO: 683930 - DNA, 33 bp, Homo sapien
gttatttattaccacagtaaagctgcataataa

SEQ ID NO: 683931 - DNA, 33 bp, Homo sapien
tggtcttgaacccttaacctcaggcaatcctgc

SEQ ID NO: 683932 - DNA, 33 bp, Homo sapien
tggtcttgaacccttagcctcaggcaatcctgc

SEQ ID NO: 683933 - DNA, 33 bp, Homo sapien
agtcctaaaccatcacacagacttactatgaca

SEQ ID NO: 683934 - DNA, 33 bp, Homo sapien
agtcctaaaccatcactcagacttactatgaca

SEQ ID NO: 683935 - DNA, 33 bp, Homo sapien
tttacaacatcaaaagaaagcacattcgctaat

SEQ ID NO: 683936 - DNA, 33 bp, Homo sapien
tttacaacatcaaaaggaagcacattcgctaat

SEQ ID NO: 683937 - DNA, 33 bp, Homo sapien
agactggagaatcacaacatgaaatgaacacgg

SEQ ID NO: 683938 - DNA, 33 bp, Homo sapien
agactggagaatcacagcatgaaatgaacacgg

SEQ ID NO: 683939 - DNA, 33 bp, Homo sapien
agctgagacatttcgactcagagaggtgaagta

SEQ ID NO: 683940 - DNA, 33 bp, Homo sapien
agctgagacatttcgattcagagaggtgaagta

SEQ ID NO: 683941 - DNA, 33 bp, Homo sapien
cttgtgctaggagatacgtgctgaagtatttag

SEQ ID NO: 683942 - DNA, 33 bp, Homo sapien
cttgtgctaggagatatgtgctgaagtatttag

SEQ ID NO: 683943 - DNA, 33 bp, Homo sapien
ttctgcagtgagggacaagcattagcaaaggcc

SEQ ID NO: 683944 - DNA, 33 bp, Homo sapien
ttctgcagtgagggaccagcattagcaaaggcc

SEQ ID NO: 683945 - DNA, 33 bp, Homo sapien
agataagacctttgcaaccatttgaaagatgca

SEQ ID NO: 683946 - DNA, 33 bp, Homo sapien
agataagacctttgcacccatttgaaagatgca

SEQ ID NO: 683947 - DNA, 33 bp, Homo sapien
ggatctggagttggtaccattagcatagcttcc

SEQ ID NO: 683948 - DNA, 33 bp, Homo sapien
ggatctggagttggtatcattagcatagcttcc

SEQ ID NO: 683949 - DNA, 33 bp, Homo sapien
tccatgagaacccagactcaaaatcaacatcaa

SEQ ID NO: 683950 - DNA, 33 bp, Homo sapien
tccatgagaacccagagtcaaaatcaacatcaa

SEQ ID NO: 683951 - DNA, 33 bp, Homo sapien
tgcccctgataccagaacatgtgagaaatattg

SEQ ID NO: 683952 - DNA, 33 bp, Homo sapien
tgcccctgataccagaccatgtgagaaatattg

SEQ ID NO: 683953 - DNA, 33 bp, Homo sapien
catggtggcataaaaccgctttgaaggtcctgg

SEQ ID NO: 683954 - DNA, 33 bp, Homo sapien
catggtggcataaaactgctttgaaggtcctgg

SEQ ID NO: 683955 - DNA, 33 bp, Homo sapien
catgcgtattggaggaaggtcataagcaggcat

SEQ ID NO: 683956 - DNA, 33 bp, Homo sapien
catgcgtattggaggagggtcataagcaggcat

SEQ ID NO: 683957 - DNA, 33 bp, Homo sapien
atcatcttgttaaaaccacaaaccttgtctctg

SEQ ID NO: 683958 - DNA, 33 bp, Homo sapien
atcatcttgttaaaactacaaaccttgtctctg

SEQ ID NO: 683959 - DNA, 33 bp, Homo sapien
aacctgcaggaaccacactccactggaacgctg

SEQ ID NO: 683960 - DNA, 33 bp, Homo sapien
aacctgcaggaaccactctccactggaacgctg

SEQ ID NO: 683961 - DNA, 33 bp, Homo sapien
tgttgccagatgcagcacacagaggtttgggat

SEQ ID NO: 683962 - DNA, 33 bp, Homo sapien
tgttgccagatgcagcgcacagaggtttgggat

SEQ ID NO: 683963 - DNA, 33 bp, Homo sapien
gtacggtggtgaacaacggaacaaaggaagaac

SEQ ID NO: 683964 - DNA, 33 bp, Homo sapien
gtacggtggtgaacaatggaacaaaggaagaac

SEQ ID NO: 683965 - DNA, 33 bp, Homo sapien
agtatcagtcatctcagcttgaccgtgagttac

SEQ ID NO: 683966 - DNA, 33 bp, Homo sapien
agtatcagtcatctcatcttgaccgtgagttac

SEQ ID NO: 683967 - DNA, 33 bp, Homo sapien
ataactaagatacgaaatccctgagaacctgta

SEQ ID NO: 683968 - DNA, 33 bp, Homo sapien
ataactaagatacgaagtccctgagaacctgta

SEQ ID NO: 683969 - DNA, 33 bp, Homo sapien
cgggagtggcatttgaactctcctgggccactg

SEQ ID NO: 683970 - DNA, 33 bp, Homo sapien
cgggagtggcatttgagctctcctgggccactg

SEQ ID NO: 683971 - DNA, 33 bp, Homo sapien
ctctgttttgtcgggaatcaggaagtctgtgtc

SEQ ID NO: 683972 - DNA, 33 bp, Homo sapien
ctctgttttgtcgggagtcaggaagtctgtgtc

SEQ ID NO: 683973 - DNA, 33 bp, Homo sapien
agtgctgacataaacactggggaactcgagccg

SEQ ID NO: 683974 - DNA, 33 bp, Homo sapien
agtgctgacataaacattggggaactcgagccg

SEQ ID NO: 683975 - DNA, 33 bp, Homo sapien
gttttgaaatggagaaaaacgttagatttggga

SEQ ID NO: 683976 - DNA, 33 bp, Homo sapien
gttttgaaatggagaagaacgttagatttggga

SEQ ID NO: 683977 - DNA, 33 bp, Homo sapien
catataaatatagatacggttggatagacggat

SEQ ID NO: 683978 - DNA, 33 bp, Homo sapien
catataaatatagatatggttggatagacggat

SEQ ID NO: 683979 - DNA, 33 bp, Homo sapien
agaccatatgacatcaactctttcctcagtttt

SEQ ID NO: 683980 - DNA, 33 bp, Homo sapien
agaccatatgacatcagctctttcctcagtttt

SEQ ID NO: 683981 - DNA, 33 bp, Homo sapien
tgtgctattttggggcaatttaccgggacttct

SEQ ID NO: 683982 - DNA, 33 bp, Homo sapien
tgtgctattttggggctatttaccgggacttct

SEQ ID NO: 683983 - DNA, 33 bp, Homo sapien
gcctaaccatagaggcaaagccaagtaagtgat

SEQ ID NO: 683984 - DNA, 33 bp, Homo sapien
gcctaaccatagaggctaagccaagtaagtgat

SEQ ID NO: 683985 - DNA, 33 bp, Homo sapien
tctcgcatgtgaggaacgtggagaaaattaatg

SEQ ID NO: 683986 - DNA, 33 bp, Homo sapien
tctcgcatgtgaggaatgtggagaaaattaatg

SEQ ID NO: 683987 - DNA, 33 bp, Homo sapien
taggctgacaccttcaacacggactggtgccag

SEQ ID NO: 683988 - DNA, 33 bp, Homo sapien
taggctgacaccttcatcacggactggtgccag

SEQ ID NO: 683989 - DNA, 33 bp, Homo sapien
aactttctccagagtacgcattgccatccaaca

SEQ ID NO: 683990 - DNA, 33 bp, Homo sapien
aactttctccagagtatgcattgccatccaaca

SEQ ID NO: 683991 - DNA, 33 bp, Homo sapien
aagtgaaaatagatccagccttatcagattcag

SEQ ID NO: 683992 - DNA, 33 bp, Homo sapien
aagtgaaaatagatccggccttatcagattcag

SEQ ID NO: 683993 - DNA, 33 bp, Homo sapien
ggacctcagagggggacgaatggctgactacca

SEQ ID NO: 683994 - DNA, 33 bp, Homo sapien
ggacctcagagggggatgaatggctgactacca

SEQ ID NO: 683995 - DNA, 33 bp, Homo sapien
catccctgaaaatcccaagcgccaggagacgtc

SEQ ID NO: 683996 - DNA, 33 bp, Homo sapien
catccctgaaaatcccgagcgccaggagacgtc

SEQ ID NO: 683997 - DNA, 33 bp, Homo sapien
tggttttccctgtaccacgaaggtcagggaggt

SEQ ID NO: 683998 - DNA, 33 bp, Homo sapien
tggttttccctgtaccgcgaaggtcagggaggt

SEQ ID NO: 683999 - DNA, 33 bp, Homo sapien
ttcacagacgagaaaaaggcggtgcagagagat

SEQ ID NO: 684000 - DNA, 33 bp, Homo sapien
ttcacagacgagaaaacggcggtgcagagagat

SEQ ID NO: 684001 - DNA, 33 bp, Homo sapien
gggcctccgaatctccccatttttgtttctgtc

SEQ ID NO: 684002 - DNA, 33 bp, Homo sapien
gggcctccgaatctccgcatttttgtttctgtc

SEQ ID NO: 684003 - DNA, 33 bp, Homo sapien
attccaagagatggacaggctcagggtgatggg

SEQ ID NO: 684004 - DNA, 33 bp, Homo sapien
attccaagagatggaccggctcagggtgatggg

SEQ ID NO: 684005 - DNA, 33 bp, Homo sapien
ctcactggtttgtgacaaggtttacaaggtgag

SEQ ID NO: 684006 - DNA, 33 bp, Homo sapien
ctcactggtttgtgacgaggtttacaaggtgag

SEQ ID NO: 684007 - DNA, 33 bp, Homo sapien
gtttgtgctgggcccaagtgaatcctttcaatc

SEQ ID NO: 684008 - DNA, 33 bp, Homo sapien
gtttgtgctgggcccacgtgaatcctttcaatc

SEQ ID NO: 684009 - DNA, 33 bp, Homo sapien
cagttgcaagaaagtacaggttaagcatcccta

SEQ ID NO: 684010 - DNA, 33 bp, Homo sapien
cagttgcaagaaagtataggttaagcatcccta

SEQ ID NO: 684011 - DNA, 33 bp, Homo sapien
ggtgcctcagcctgtgaaagtgctattttattc

SEQ ID NO: 684012 - DNA, 33 bp, Homo sapien
ggtgcctcagcctgtgcaagtgctattttattc

SEQ ID NO: 684013 - DNA, 33 bp, Homo sapien
tgtaattccaagcctcagagagataaatattgc

SEQ ID NO: 684014 - DNA, 33 bp, Homo sapien
tgtaattccaagcctcggagagataaatattgc

SEQ ID NO: 684015 - DNA, 33 bp, Homo sapien
atcctgagatgttctaaactcatacctttgttg

SEQ ID NO: 684016 - DNA, 33 bp, Homo sapien
atcctgagatgttctacactcatacctttgttg

SEQ ID NO: 684017 - DNA, 33 bp, Homo sapien
ctggatacctgctgaactatgacctggtttcta

SEQ ID NO: 684018 - DNA, 33 bp, Homo sapien
ctggatacctgctgaagtatgacctggtttcta

SEQ ID NO: 684019 - DNA, 33 bp, Homo sapien
ccttaaacctgggtgaaccttgctaggatctgt

SEQ ID NO: 684020 - DNA, 33 bp, Homo sapien
ccttaaacctgggtgacccttgctaggatctgt

SEQ ID NO: 684021 - DNA, 33 bp, Homo sapien
gagaaagaaagagagaaatattgactgtcgagg

SEQ ID NO: 684022 - DNA, 33 bp, Homo sapien
gagaaagaaagagagagatattgactgtcgagg

SEQ ID NO: 684023 - DNA, 33 bp, Homo sapien
tttttcagatacttgacgtctttttcatgttga

SEQ ID NO: 684024 - DNA, 33 bp, Homo sapien
tttttcagatacttgatgtctttttcatgttga

SEQ ID NO: 684025 - DNA, 33 bp, Homo sapien
ttataaactataataacctagcagtttccttaa

SEQ ID NO: 684026 - DNA, 33 bp, Homo sapien
ttataaactataataagctagcagtttccttaa

SEQ ID NO: 684027 - DNA, 33 bp, Homo sapien
agcctgatgtaatcgacagggtccttataggtg

SEQ ID NO: 684028 - DNA, 33 bp, Homo sapien
agcctgatgtaatcgagagggtccttataggtg

SEQ ID NO: 684029 - DNA, 33 bp, Homo sapien
cagacacaggacttaactggaagatagcagaac

SEQ ID NO: 684030 - DNA, 33 bp, Homo sapien
cagacacaggacttaattggaagatagcagaac

SEQ ID NO: 684031 - DNA, 33 bp, Homo sapien
cccagtgaacacagataagactcttagcaattg

SEQ ID NO: 684032 - DNA, 33 bp, Homo sapien
cccagtgaacacagatgagactcttagcaattg

SEQ ID NO: 684033 - DNA, 33 bp, Homo sapien
tgttttcttctcaactcagcttctaaccctgct

SEQ ID NO: 684034 - DNA, 33 bp, Homo sapien
tgttttcttctcaactgagcttctaaccctgct

SEQ ID NO: 684035 - DNA, 33 bp, Homo sapien
atgcagacattagctccagttccttcctgcttt

SEQ ID NO: 684036 - DNA, 33 bp, Homo sapien
atgcagacattagctctagttccttcctgcttt

SEQ ID NO: 684037 - DNA, 33 bp, Homo sapien
cataaaaatgggcctaataatgtctatcttgca

SEQ ID NO: 684038 - DNA, 33 bp, Homo sapien
cataaaaatgggcctagtaatgtctatcttgca

SEQ ID NO: 684039 - DNA, 33 bp, Homo sapien
tgttgctctttaaatgaaagcaaacttgtgtgc

SEQ ID NO: 684040 - DNA, 33 bp, Homo sapien
tgttgctctttaaatggaagcaaacttgtgtgc

SEQ ID NO: 684041 - DNA, 33 bp, Homo sapien
agttgctcacatttaccgggcacataggaggtg

SEQ ID NO: 684042 - DNA, 33 bp, Homo sapien
agttgctcacatttactgggcacataggaggtg

SEQ ID NO: 684043 - DNA, 33 bp, Homo sapien
tgataactcagtcttacaggcaacaagagattt

SEQ ID NO: 684044 - DNA, 33 bp, Homo sapien
tgataactcagtcttagaggcaacaagagattt

SEQ ID NO: 684045 - DNA, 33 bp, Homo sapien
ggagccagaggtctcacggttcaagcactcagt

SEQ ID NO: 684046 - DNA, 33 bp, Homo sapien
ggagccagaggtctcatggttcaagcactcagt

SEQ ID NO: 684047 - DNA, 33 bp, Homo sapien
cttggtagcacaagggccaatctgctccaacac

SEQ ID NO: 684048 - DNA, 33 bp, Homo sapien
cttggtagcacaagggtcaatctgctccaacac

SEQ ID NO: 684049 - DNA, 33 bp, Homo sapien
acggggtgcagaaatgaaaatccactggagaca

SEQ ID NO: 684050 - DNA, 33 bp, Homo sapien
acggggtgcagaaatggaaatccactggagaca

SEQ ID NO: 684051 - DNA, 33 bp, Homo sapien
tgcgattgtttttgataaaggcagcaaggacat

SEQ ID NO: 684052 - DNA, 33 bp, Homo sapien
tgcgattgtttttgattaaggcagcaaggacat

SEQ ID NO: 684053 - DNA, 33 bp, Homo sapien
tatgtgtgacttaaaacgaatggccaagaggga

SEQ ID NO: 684054 - DNA, 33 bp, Homo sapien
tatgtgtgacttaaaatgaatggccaagaggga

SEQ ID NO: 684055 - DNA, 33 bp, Homo sapien
atggcctctgacttgacaccttctctttgttca

SEQ ID NO: 684056 - DNA, 33 bp, Homo sapien
atggcctctgacttgataccttctctttgttca

SEQ ID NO: 684057 - DNA, 33 bp, Homo sapien
ctgctcgtgtgcaggcgctattgtcccatcaga

SEQ ID NO: 684058 - DNA, 33 bp, Homo sapien
ctgctcgtgtgcaggctctattgtcccatcaga

SEQ ID NO: 684059 - DNA, 33 bp, Homo sapien
aattggcatggctgacaggtctcgtgccaggaa

SEQ ID NO: 684060 - DNA, 33 bp, Homo sapien
aattggcatggctgacgggtctcgtgccaggaa

SEQ ID NO: 684061 - DNA, 33 bp, Homo sapien
ccagttcctctaatccagcttcccctgcaatgg

SEQ ID NO: 684062 - DNA, 33 bp, Homo sapien
ccagttcctctaatccggcttcccctgcaatgg

SEQ ID NO: 684063 - DNA, 33 bp, Homo sapien
catgccaagaccctaacgaatagatttaacact

SEQ ID NO: 684064 - DNA, 33 bp, Homo sapien
catgccaagaccctaatgaatagatttaacact

SEQ ID NO: 684065 - DNA, 33 bp, Homo sapien
ccgttggcacaaacacactcttccacctttctc

SEQ ID NO: 684066 - DNA, 33 bp, Homo sapien
ccgttggcacaaacacgctcttccacctttctc

SEQ ID NO: 684067 - DNA, 33 bp, Homo sapien
gtgagattgagtagtacgaggacttacctagtg

SEQ ID NO: 684068 - DNA, 33 bp, Homo sapien
gtgagattgagtagtatgaggacttacctagtg

SEQ ID NO: 684069 - DNA, 33 bp, Homo sapien
aagatatatattacccacaataacactacctaa

SEQ ID NO: 684070 - DNA, 33 bp, Homo sapien
aagatatatattacccgcaataacactacctaa

SEQ ID NO: 684071 - DNA, 33 bp, Homo sapien
gtcagtaggactgtcacataataacctggccag

SEQ ID NO: 684072 - DNA, 33 bp, Homo sapien
gtcagtaggactgtcatataataacctggccag

SEQ ID NO: 684073 - DNA, 33 bp, Homo sapien
ttaatagaggtcttaccaggatacagtaaatga

SEQ ID NO: 684074 - DNA, 33 bp, Homo sapien
ttaatagaggtcttacgaggatacagtaaatga

SEQ ID NO: 684075 - DNA, 33 bp, Homo sapien
ggtcccatgtggacaccgagggctggctttacc

SEQ ID NO: 684076 - DNA, 33 bp, Homo sapien
ggtcccatgtggacactgagggctggctttacc

SEQ ID NO: 684077 - DNA, 33 bp, Homo sapien
gcaattgtaaatacgacggtaaagccagccctc

SEQ ID NO: 684078 - DNA, 33 bp, Homo sapien
gcaattgtaaatacgatggtaaagccagccctc

SEQ ID NO: 684079 - DNA, 33 bp, Homo sapien
tttgaaaatgctggacacatctgtggtcgtcaa

SEQ ID NO: 684080 - DNA, 33 bp, Homo sapien
tttgaaaatgctggacgcatctgtggtcgtcaa

SEQ ID NO: 684081 - DNA, 33 bp, Homo sapien
tggttcagaatgtggactaagacatggagtgcc

SEQ ID NO: 684082 - DNA, 33 bp, Homo sapien
tggttcagaatgtggagtaagacatggagtgcc

SEQ ID NO: 684083 - DNA, 33 bp, Homo sapien
ggtcaaaggcgctacaagaaatattaaaataat

SEQ ID NO: 684084 - DNA, 33 bp, Homo sapien
ggtcaaaggcgctacaggaaatattaaaataat

SEQ ID NO: 684085 - DNA, 33 bp, Homo sapien
acttggtttgcagaaacgaatcatgattttgcc

SEQ ID NO: 684086 - DNA, 33 bp, Homo sapien
acttggtttgcagaaaggaatcatgattttgcc

SEQ ID NO: 684087 - DNA, 33 bp, Homo sapien
ttttgcctgtatccaacagtcattgtggaaggg

SEQ ID NO: 684088 - DNA, 33 bp, Homo sapien
ttttgcctgtatccaatagtcattgtggaaggg

SEQ ID NO: 684089 - DNA, 33 bp, Homo sapien
tcattagttcctggtaataaacattccattttc

SEQ ID NO: 684090 - DNA, 33 bp, Homo sapien
tcattagttcctggtactaaacattccattttc

SEQ ID NO: 684091 - DNA, 33 bp, Homo sapien
gtcaaaatgatttgtgaagctccccatttttcc

SEQ ID NO: 684092 - DNA, 33 bp, Homo sapien
gtcaaaatgatttgtgtagctccccatttttcc

SEQ ID NO: 684093 - DNA, 33 bp, Homo sapien
ctggttccaccattgcactcaacagaaggaaac

SEQ ID NO: 684094 - DNA, 33 bp, Homo sapien
ctggttccaccattgcgctcaacagaaggaaac

SEQ ID NO: 684095 - DNA, 33 bp, Homo sapien
tgtccagacctagacactgcctgttccctgaca

SEQ ID NO: 684096 - DNA, 33 bp, Homo sapien
tgtccagacctagacattgcctgttccctgaca

SEQ ID NO: 684097 - DNA, 33 bp, Homo sapien
ttgggactgggaagaaaccctggcccaagtggc

SEQ ID NO: 684098 - DNA, 33 bp, Homo sapien
ttgggactgggaagaacccctggcccaagtggc

SEQ ID NO: 684099 - DNA, 33 bp, Homo sapien
aattagctgcagagagaaactggcttttcttgg

SEQ ID NO: 684100 - DNA, 33 bp, Homo sapien
aattagctgcagagaggaactggcttttcttgg

SEQ ID NO: 684101 - DNA, 33 bp, Homo sapien
tgtaacaagatgaagaaaagttcatgctcttgg

SEQ ID NO: 684102 - DNA, 33 bp, Homo sapien
tgtaacaagatgaagagaagttcatgctcttgg

SEQ ID NO: 684103 - DNA, 33 bp, Homo sapien
gctcttatcgccacctaacacattctataatta

SEQ ID NO: 684104 - DNA, 33 bp, Homo sapien
gctcttatcgccacctgacacattctataatta

SEQ ID NO: 684105 - DNA, 33 bp, Homo sapien
attttatataagtggactcatctggtgcatatt

SEQ ID NO: 684106 - DNA, 33 bp, Homo sapien
attttatataagtggattcatctggtgcatatt

SEQ ID NO: 684107 - DNA, 33 bp, Homo sapien
gagaggctgccatgcaatcatctacttttctca

SEQ ID NO: 684108 - DNA, 33 bp, Homo sapien
gagaggctgccatgcattcatctacttttctca

SEQ ID NO: 684109 - DNA, 33 bp, Homo sapien
ctgaagttccctgacaatgactttggtttgaag

SEQ ID NO: 684110 - DNA, 33 bp, Homo sapien
ctgaagttccctgacagtgactttggtttgaag

SEQ ID NO: 684111 - DNA, 33 bp, Homo sapien
agaggaaggtgtttcccctttgcacatttcatc

SEQ ID NO: 684112 - DNA, 33 bp, Homo sapien
agaggaaggtgtttccgctttgcacatttcatc

SEQ ID NO: 684113 - DNA, 33 bp, Homo sapien
ctcagttcctgcctctaaaggatagggattcat

SEQ ID NO: 684114 - DNA, 33 bp, Homo sapien
ctcagttcctgcctctgaaggatagggattcat

SEQ ID NO: 684115 - DNA, 33 bp, Homo sapien
gaaatgtgaaaggaacaaaaaggtggccatgtg

SEQ ID NO: 684116 - DNA, 33 bp, Homo sapien
gaaatgtgaaaggaacgaaaaggtggccatgtg

SEQ ID NO: 684117 - DNA, 33 bp, Homo sapien
ggtataagtagtgatacgttttcgatctgtgtc

SEQ ID NO: 684118 - DNA, 33 bp, Homo sapien
ggtataagtagtgatatgttttcgatctgtgtc

SEQ ID NO: 684119 - DNA, 33 bp, Homo sapien
gagataacaccattggaaaaaaacttggtcttg

SEQ ID NO: 684120 - DNA, 33 bp, Homo sapien
gagataacaccattgggaaaaaacttggtcttg

SEQ ID NO: 684121 - DNA, 33 bp, Homo sapien
cctctaatgcatccccactctgaaggggagact

SEQ ID NO: 684122 - DNA, 33 bp, Homo sapien
cctctaatgcatccccgctctgaaggggagact

SEQ ID NO: 684123 - DNA, 33 bp, Homo sapien
gacgctggagaatttacctggggccatagtacc

SEQ ID NO: 684124 - DNA, 33 bp, Homo sapien
gacgctggagaatttatctggggccatagtacc

SEQ ID NO: 684125 - DNA, 33 bp, Homo sapien
aagagagtgattaaaaaaaattggaggacggaa

SEQ ID NO: 684126 - DNA, 33 bp, Homo sapien
aagagagtgattaaaacaaattggaggacggaa

SEQ ID NO: 684127 - DNA, 33 bp, Homo sapien
caaaaaccaaaaccacagtcactccagcttttc

SEQ ID NO: 684128 - DNA, 33 bp, Homo sapien
caaaaaccaaaaccacggtcactccagcttttc

SEQ ID NO: 684129 - DNA, 33 bp, Homo sapien
acagcatggcagaaaactttcatcaacttcaca

SEQ ID NO: 684130 - DNA, 33 bp, Homo sapien
acagcatggcagaaaagtttcatcaacttcaca

SEQ ID NO: 684131 - DNA, 33 bp, Homo sapien
cagaaagcaggaaccacacgtagcagaagtgat

SEQ ID NO: 684132 - DNA, 33 bp, Homo sapien
cagaaagcaggaaccatacgtagcagaagtgat

SEQ ID NO: 684133 - DNA, 33 bp, Homo sapien
tttgtggaaattatcaacatctatcataatatt

SEQ ID NO: 684134 - DNA, 33 bp, Homo sapien
tttgtggaaattatcaccatctatcataatatt

SEQ ID NO: 684135 - DNA, 33 bp, Homo sapien
ggtccacgctgaaaaaccagttctctgctcaag

SEQ ID NO: 684136 - DNA, 33 bp, Homo sapien
ggtccacgctgaaaaatcagttctctgctcaag

SEQ ID NO: 684137 - DNA, 33 bp, Homo sapien
caatttcaaagacacactgtgaataaactaatg

SEQ ID NO: 684138 - DNA, 33 bp, Homo sapien
caatttcaaagacacagtgtgaataaactaatg

SEQ ID NO: 684139 - DNA, 33 bp, Homo sapien
agaggtttggaaatccaaggagaaatgtgaatt

SEQ ID NO: 684140 - DNA, 33 bp, Homo sapien
agaggtttggaaatccgaggagaaatgtgaatt

SEQ ID NO: 684141 - DNA, 33 bp, Homo sapien
aagggagtaggtcttaagtgttcttgccacata

SEQ ID NO: 684142 - DNA, 33 bp, Homo sapien
aagggagtaggtcttacgtgttcttgccacata

SEQ ID NO: 684143 - DNA, 33 bp, Homo sapien
aattggaggtttctaccagattcccatgtaaca

SEQ ID NO: 684144 - DNA, 33 bp, Homo sapien
aattggaggtttctactagattcccatgtaaca

SEQ ID NO: 684145 - DNA, 33 bp, Homo sapien
gtaaggctgtgataaaataaagatgtatattgt

SEQ ID NO: 684146 - DNA, 33 bp, Homo sapien
gtaaggctgtgataaattaaagatgtatattgt

SEQ ID NO: 684147 - DNA, 33 bp, Homo sapien
tgtaaagcactaaacaaatgtctggcacaataa

SEQ ID NO: 684148 - DNA, 33 bp, Homo sapien
tgtaaagcactaaacacatgtctggcacaataa

SEQ ID NO: 684149 - DNA, 33 bp, Homo sapien
gctaatgctgtggaaaatgtatgaaaaagctgt

SEQ ID NO: 684150 - DNA, 33 bp, Homo sapien
gctaatgctgtggaaattgtatgaaaaagctgt

SEQ ID NO: 684151 - DNA, 33 bp, Homo sapien
cagtggccacaatttccagagtagatactgata

SEQ ID NO: 684152 - DNA, 33 bp, Homo sapien
cagtggccacaatttcgagagtagatactgata

SEQ ID NO: 684153 - DNA, 33 bp, Homo sapien
caaggtctatccaaacaaagtcttaaagttgaa

SEQ ID NO: 684154 - DNA, 33 bp, Homo sapien
caaggtctatccaaacgaagtcttaaagttgaa

SEQ ID NO: 684155 - DNA, 33 bp, Homo sapien
ccaacaagaaggagtaaggcaaatgttgatcaa

SEQ ID NO: 684156 - DNA, 33 bp, Homo sapien
ccaacaagaaggagtagggcaaatgttgatcaa

SEQ ID NO: 684157 - DNA, 33 bp, Homo sapien
acctcgaattcaaagtaaagatctagaaataat

SEQ ID NO: 684158 - DNA, 33 bp, Homo sapien
acctcgaattcaaagtgaagatctagaaataat

SEQ ID NO: 684159 - DNA, 33 bp, Homo sapien
caacaccatggaaatcaatcttagttattagga

SEQ ID NO: 684160 - DNA, 33 bp, Homo sapien
caacaccatggaaatcgatcttagttattagga

SEQ ID NO: 684161 - DNA, 33 bp, Homo sapien
ggaaaagggaacgtaaaagtggccattaactaa

SEQ ID NO: 684162 - DNA, 33 bp, Homo sapien
ggaaaagggaacgtaacagtggccattaactaa

SEQ ID NO: 684163 - DNA, 33 bp, Homo sapien
attcatgtttattgaacgaatgaatgatacact

SEQ ID NO: 684164 - DNA, 33 bp, Homo sapien
attcatgtttattgaatgaatgaatgatacact

SEQ ID NO: 684165 - DNA, 33 bp, Homo sapien
cttgtattgagtttaccctttgttcacagtttg

SEQ ID NO: 684166 - DNA, 33 bp, Homo sapien
cttgtattgagtttactctttgttcacagtttg

SEQ ID NO: 684167 - DNA, 33 bp, Homo sapien
aatcttgctggtagacacttcaattcatctatg

SEQ ID NO: 684168 - DNA, 33 bp, Homo sapien
aatcttgctggtagacgcttcaattcatctatg

SEQ ID NO: 684169 - DNA, 33 bp, Homo sapien
aacgctgtggaaattacgctaaacgctgtggga

SEQ ID NO: 684170 - DNA, 33 bp, Homo sapien
aacgctgtggaaattatgctaaacgctgtggga

SEQ ID NO: 684171 - DNA, 33 bp, Homo sapien
caaccagccaactcccagataagtgagcgagcc

SEQ ID NO: 684172 - DNA, 33 bp, Homo sapien
caaccagccaactcccggataagtgagcgagcc

SEQ ID NO: 684173 - DNA, 33 bp, Homo sapien
tgtggtgaattgacagaattaattgccctgatt

SEQ ID NO: 684174 - DNA, 33 bp, Homo sapien
tgtggtgaattgacagtattaattgccctgatt

SEQ ID NO: 684175 - DNA, 33 bp, Homo sapien
atagggtctttgtatacgtaagtagttaagcaa

SEQ ID NO: 684176 - DNA, 33 bp, Homo sapien
atagggtctttgtatatgtaagtagttaagcaa

SEQ ID NO: 684177 - DNA, 33 bp, Homo sapien
acctcacgtgacagtacgattctaggacccatt

SEQ ID NO: 684178 - DNA, 33 bp, Homo sapien
acctcacgtgacagtatgattctaggacccatt

SEQ ID NO: 684179 - DNA, 33 bp, Homo sapien
accacaggccgtgtgcgcaaagtcatctacatc

SEQ ID NO: 684180 - DNA, 33 bp, Homo sapien
accacaggccgtgtgctcaaagtcatctacatc

SEQ ID NO: 684181 - DNA, 33 bp, Homo sapien
gtacctattgaatgccagagatattctgttatg

SEQ ID NO: 684182 - DNA, 33 bp, Homo sapien
gtacctattgaatgccggagatattctgttatg

SEQ ID NO: 684183 - DNA, 33 bp, Homo sapien
ctctgcctggcactcaaactatcccttagaatt

SEQ ID NO: 684184 - DNA, 33 bp, Homo sapien
ctctgcctggcactcacactatcccttagaatt

SEQ ID NO: 684185 - DNA, 33 bp, Homo sapien
gctcattcttacataacacattgggcggacaca

SEQ ID NO: 684186 - DNA, 33 bp, Homo sapien
gctcattcttacataatacattgggcggacaca

SEQ ID NO: 684187 - DNA, 33 bp, Homo sapien
gtgctacactaggaggcacaacttcttccagca

SEQ ID NO: 684188 - DNA, 33 bp, Homo sapien
gtgctacactaggaggtacaacttcttccagca

SEQ ID NO: 684189 - DNA, 33 bp, Homo sapien
tgactaaattctgggacagttgaggcacaccac

SEQ ID NO: 684190 - DNA, 33 bp, Homo sapien
tgactaaattctgggatagttgaggcacaccac

SEQ ID NO: 684191 - DNA, 33 bp, Homo sapien
accttcaccaacaaaacgccatctcttcaccca

SEQ ID NO: 684192 - DNA, 33 bp, Homo sapien
accttcaccaacaaaatgccatctcttcaccca

SEQ ID NO: 684193 - DNA, 33 bp, Homo sapien
attaggcatacccaccaatatggtttggctctg

SEQ ID NO: 684194 - DNA, 33 bp, Homo sapien
attaggcatacccaccgatatggtttggctctg

SEQ ID NO: 684195 - DNA, 33 bp, Homo sapien
gaagccctgctgactacagagttaactcaaagt

SEQ ID NO: 684196 - DNA, 33 bp, Homo sapien
gaagccctgctgactatagagttaactcaaagt

SEQ ID NO: 684197 - DNA, 33 bp, Homo sapien
acttaggatcctctttgaaaacagctccccagt

SEQ ID NO: 684198 - DNA, 33 bp, Homo sapien
acttaggatcctcttttaaaacagctccccagt

SEQ ID NO: 684199 - DNA, 33 bp, Homo sapien
gcttgacacactgtataataaatccccgttttt

SEQ ID NO: 684200 - DNA, 33 bp, Homo sapien
gcttgacacactgtattataaatccccgttttt

SEQ ID NO: 684201 - DNA, 33 bp, Homo sapien
aatcctgtttctactgaaaggcttgacacactg

SEQ ID NO: 684202 - DNA, 33 bp, Homo sapien
aatcctgtttctactgtaaggcttgacacactg

SEQ ID NO: 684203 - DNA, 33 bp, Homo sapien
ttcctctactgtgaaacgggtctacagaaccgg

SEQ ID NO: 684204 - DNA, 33 bp, Homo sapien
ttcctctactgtgaaatgggtctacagaaccgg

SEQ ID NO: 684205 - DNA, 33 bp, Homo sapien
gttattgggttacttacctgtcctcacacagaa

SEQ ID NO: 684206 - DNA, 33 bp, Homo sapien
gttattgggttacttatctgtcctcacacagaa

SEQ ID NO: 684207 - DNA, 33 bp, Homo sapien
aataaatgttagctatcaaaatcatcaccatta

SEQ ID NO: 684208 - DNA, 33 bp, Homo sapien
aataaatgttagctatgaaaatcatcaccatta

SEQ ID NO: 684209 - DNA, 33 bp, Homo sapien
ctgccaaaatttcacaagcatcatctcattcgt

SEQ ID NO: 684210 - DNA, 33 bp, Homo sapien
ctgccaaaatttcacaggcatcatctcattcgt

SEQ ID NO: 684211 - DNA, 33 bp, Homo sapien
ttcttcctgatgcaataaaagttgtttgaaatt

SEQ ID NO: 684212 - DNA, 33 bp, Homo sapien
ttcttcctgatgcaatcaaagttgtttgaaatt

SEQ ID NO: 684213 - DNA, 33 bp, Homo sapien
gagtttactgtgaaaaggtatgcgccagagcaa

SEQ ID NO: 684214 - DNA, 33 bp, Homo sapien
gagtttactgtgaaaatgtatgcgccagagcaa

SEQ ID NO: 684215 - DNA, 33 bp, Homo sapien
gcagttgccccactcaatagtaaaacatggctc

SEQ ID NO: 684216 - DNA, 33 bp, Homo sapien
gcagttgccccactcagtagtaaaacatggctc

SEQ ID NO: 684217 - DNA, 33 bp, Homo sapien
tatgttagtccatactcacaattttctgttacc

SEQ ID NO: 684218 - DNA, 33 bp, Homo sapien
tatgttagtccatacttacaattttctgttacc

SEQ ID NO: 684219 - DNA, 33 bp, Homo sapien
attgtttcctctataccactgcatcttcaaggg

SEQ ID NO: 684220 - DNA, 33 bp, Homo sapien
attgtttcctctatactactgcatcttcaaggg

SEQ ID NO: 684221 - DNA, 33 bp, Homo sapien
cacagacataagcccacaagtagagttcataat

SEQ ID NO: 684222 - DNA, 33 bp, Homo sapien
cacagacataagcccataagtagagttcataat

SEQ ID NO: 684223 - DNA, 33 bp, Homo sapien
gaacttactggacatacaagcaaagaagtgaag

SEQ ID NO: 684224 - DNA, 33 bp, Homo sapien
gaacttactggacatataagcaaagaagtgaag

SEQ ID NO: 684225 - DNA, 33 bp, Homo sapien
agatcctgagggccaacgtatgctgacaaatga

SEQ ID NO: 684226 - DNA, 33 bp, Homo sapien
agatcctgagggccaaggtatgctgacaaatga

SEQ ID NO: 684227 - DNA, 33 bp, Homo sapien; identical to SEQ ID NO: 684225

SEQ ID NO: 684228 - DNA, 33 bp, Homo sapien; identical to SEQ ID NO: 684226

SEQ ID NO: 684229 - DNA, 33 bp, Homo sapien
acaatctccaaaaagcagctagtgacagaaata

SEQ ID NO: 684230 - DNA, 33 bp, Homo sapien
acaatctccaaaaagcggctagtgacagaaata

SEQ ID NO: 684231 - DNA, 33 bp, Homo sapien; identical to SEQ ID NO: 684229

SEQ ID NO: 684232 - DNA, 33 bp, Homo sapien; identical to SEQ ID NO: 684230

SEQ ID NO: 684233 - DNA, 33 bp, Homo sapien
atgaccttttatgtgaatatcttgcacaaacac

SEQ ID NO: 684234 - DNA, 33 bp, Homo sapien
atgaccttttatgtgagtatcttgcacaaacac

SEQ ID NO: 684235 - DNA, 33 bp, Homo sapien
aaggtctgggacagccccaaaagccacattttg

SEQ ID NO: 684236 - DNA, 33 bp, Homo sapien
aaggtctgggacagccgcaaaagccacattttg

SEQ ID NO: 684237 - DNA, 33 bp, Homo sapien
agtagcagagttgattcaaaagagcggccactt

SEQ ID NO: 684238 - DNA, 33 bp, Homo sapien
agtagcagagttgattgaaaagagcggccactt

SEQ ID NO: 684239 - DNA, 33 bp, Homo sapien
ttagcaaggctaataacgcttaacaaggtctcc

SEQ ID NO: 684240 - DNA, 33 bp, Homo sapien
ttagcaaggctaataatgcttaacaaggtctcc

SEQ ID NO: 684241 - DNA, 33 bp, Homo sapien
gttcatattactggggcccagatgtaaagttgg

SEQ ID NO: 684242 - DNA, 33 bp, Homo sapien
gttcatattactggggtccagatgtaaagttgg

SEQ ID NO: 684243 - DNA, 33 bp, Homo sapien
aagatttttaacactcaactttgagccttctta

SEQ ID NO: 684244 - DNA, 33 bp, Homo sapien
aagatttttaacactctactttgagccttctta

SEQ ID NO: 684245 - DNA, 33 bp, Homo sapien
caggattgttgtaacccgctcactgtgcaccat

SEQ ID NO: 684246 - DNA, 33 bp, Homo sapien
caggattgttgtaacctgctcactgtgcaccat

SEQ ID NO: 684247 - DNA, 33 bp, Homo sapien
ggccacaaagagcaagcacaagcccttaggaag

SEQ ID NO: 684248 - DNA, 33 bp, Homo sapien
ggccacaaagagcaaggacaagcccttaggaag

SEQ ID NO: 684249 - DNA, 33 bp, Homo sapien
gtaaatcctgacaaccaaggaagaaaggtctgg

SEQ ID NO: 684250 - DNA, 33 bp, Homo sapien
gtaaatcctgacaacctaggaagaaaggtctgg

SEQ ID NO: 684251 - DNA, 33 bp, Homo sapien
tttgcaagatgcaagcaattcatctttttagac

SEQ ID NO: 684252 - DNA, 33 bp, Homo sapien
tttgcaagatgcaagcgattcatctttttagac

SEQ ID NO: 684253 - DNA, 33 bp, Homo sapien
actatactgaatctaaatggttactttggttgt

SEQ ID NO: 684254 - DNA, 33 bp, Homo sapien
actatactgaatctaagtggttactttggttgt

SEQ ID NO: 684255 - DNA, 33 bp, Homo sapien
tggaagtttgtttgtacctaagctttgtatcta

SEQ ID NO: 684256 - DNA, 33 bp, Homo sapien
tggaagtttgtttgtagctaagctttgtatcta

SEQ ID NO: 684257 - DNA, 33 bp, Homo sapien
atagtaaaattcatacagaaaggcaagagatac

SEQ ID NO: 684258 - DNA, 33 bp, Homo sapien
atagtaaaattcatacggaaaggcaagagatac

SEQ ID NO: 684259 - DNA, 33 bp, Homo sapien
tgaggtgtgttctttcaatggctagttagttga

SEQ ID NO: 684260 - DNA, 33 bp, Homo sapien
tgaggtgtgttctttcgatggctagttagttga

SEQ ID NO: 684261 - DNA, 33 bp, Homo sapien
taatctacactcttccaatgcctcagtttcttc

SEQ ID NO: 684262 - DNA, 33 bp, Homo sapien
taatctacactcttccgatgcctcagtttcttc

SEQ ID NO: 684263 - DNA, 33 bp, Homo sapien
cagaaagttagcgtcactcatttagtcactcat

SEQ ID NO: 684264 - DNA, 33 bp, Homo sapien
cagaaagttagcgtcattcatttagtcactcat

SEQ ID NO: 684265 - DNA, 33 bp, Homo sapien
tgaattcatttatcacccataagagtttttttg

SEQ ID NO: 684266 - DNA, 33 bp, Homo sapien
tgaattcatttatcactcataagagtttttttg

SEQ ID NO: 684267 - DNA, 33 bp, Homo sapien
acaccaggacgtaaacaccacaataattcctgt

SEQ ID NO: 684268 - DNA, 33 bp, Homo sapien
acaccaggacgtaaacgccacaataattcctgt

SEQ ID NO: 684269 - DNA, 33 bp, Homo sapien
ggcctggcaaacagtggagcatccacaaacctt

SEQ ID NO: 684270 - DNA, 33 bp, Homo sapien
ggcctggcaaacagtgtagcatccacaaacctt

SEQ ID NO: 684271 - DNA, 33 bp, Homo sapien
acactccggaatgaaaaagccacaaacgcctga

SEQ ID NO: 684272 - DNA, 33 bp, Homo sapien
acactccggaatgaaagagccacaaacgcctga

SEQ ID NO: 684273 - DNA, 33 bp, Homo sapien
ttgaaactgtgacaggaatattgggaacgtcct

SEQ ID NO: 684274 - DNA, 33 bp, Homo sapien
ttgaaactgtgacagggatattgggaacgtcct

SEQ ID NO: 684275 - DNA, 33 bp, Homo sapien
ttattataccctgtaaatctacaatgaacttga

SEQ ID NO: 684276 - DNA, 33 bp, Homo sapien
ttattataccctgtaagtctacaatgaacttga

SEQ ID NO: 684277 - DNA, 33 bp, Homo sapien
cagtggtgttatgggacatccaagtctaggcct

SEQ ID NO: 684278 - DNA, 33 bp, Homo sapien
cagtggtgttatgggatatccaagtctaggcct

SEQ ID NO: 684279 - DNA, 33 bp, Homo sapien
tggaggctagctcctacgaacagtgacaccatc

SEQ ID NO: 684280 - DNA, 33 bp, Homo sapien
tggaggctagctcctatgaacagtgacaccatc

SEQ ID NO: 684281 - DNA, 33 bp, Homo sapien
tggcactggccctggaatatcttcagaggtacc

SEQ ID NO: 684282 - DNA, 33 bp, Homo sapien
tggcactggccctggagtatcttcagaggtacc

SEQ ID NO: 684283 - DNA, 33 bp, Homo sapien
agacagaggaaataagaatgaggcgtctaaaag

SEQ ID NO: 684284 - DNA, 33 bp, Homo sapien
agacagaggaaataagtatgaggcgtctaaaag

SEQ ID NO: 684285 - DNA, 33 bp, Homo sapien
cactgaactgtttacaaaatgctcatagagtga

SEQ ID NO: 684286 - DNA, 33 bp, Homo sapien
cactgaactgtttacagaatgctcatagagtga

SEQ ID NO: 684287 - DNA, 33 bp, Homo sapien
cctagaagtaagttaccgacgaaatcattatca

SEQ ID NO: 684288 - DNA, 33 bp, Homo sapien
cctagaagtaagttacggacgaaatcattatca

SEQ ID NO: 684289 - DNA, 33 bp, Homo sapien
tgttcactgttttgaacaaagcactgatctaaa

SEQ ID NO: 684290 - DNA, 33 bp, Homo sapien
tgttcactgttttgaataaagcactgatctaaa

SEQ ID NO: 684291 - DNA, 33 bp, Homo sapien
gggtcatcagtactgaaactgttagttaattta

SEQ ID NO: 684292 - DNA, 33 bp, Homo sapien
gggtcatcagtactgagactgttagttaattta

SEQ ID NO: 684293 - DNA, 33 bp, Homo sapien
atatcaggagttaagacagtttgcctttccagg

SEQ ID NO: 684294 - DNA, 33 bp, Homo sapien
atatcaggagttaagatagtttgcctttccagg

SEQ ID NO: 684295 - DNA, 33 bp, Homo sapien
gcggcagcagctgtaagcaggcaacttgggggt

SEQ ID NO: 684296 - DNA, 33 bp, Homo sapien
gcggcagcagctgtaatcaggcaacttgggggt

SEQ ID NO: 684297 - DNA, 33 bp, Homo sapien
tgagtgcctagattaacgaatgaaagattccac

SEQ ID NO: 684298 - DNA, 33 bp, Homo sapien
tgagtgcctagattaatgaatgaaagattccac

SEQ ID NO: 684299 - DNA, 33 bp, Homo sapien
gtcttaatgccttagcactgtcattcaaatcct

SEQ ID NO: 684300 - DNA, 33 bp, Homo sapien
gtcttaatgccttagcgctgtcattcaaatcct

SEQ ID NO: 684301 - DNA, 33 bp, Homo sapien
tttgtgcaaacaattacgacaagatgctgtacc

SEQ ID NO: 684302 - DNA, 33 bp, Homo sapien
tttgtgcaaacaattatgacaagatgctgtacc

SEQ ID NO: 684303 - DNA, 33 bp, Homo sapien
ttgtactttcatgcaactggtggggttgaaggt

SEQ ID NO: 684304 - DNA, 33 bp, Homo sapien
ttgtactttcatgcaattggtggggttgaaggt

SEQ ID NO: 684305 - DNA, 33 bp, Homo sapien
atacacggcaggaggaagtatccagagtctgcg

SEQ ID NO: 684306 - DNA, 33 bp, Homo sapien
atacacggcaggaggacgtatccagagtctgcg

SEQ ID NO: 684307 - DNA, 33 bp, Homo sapien
ctgtgagggttgaagcaataaagggaaagagtg

SEQ ID NO: 684308 - DNA, 33 bp, Homo sapien
ctgtgagggttgaagcgataaagggaaagagtg

SEQ ID NO: 684309 - DNA, 33 bp, Homo sapien
cgttgctgacagtggagatgagacaagataaca

SEQ ID NO: 684310 - DNA, 33 bp, Homo sapien
cgttgctgacagtggatatgagacaagataaca

SEQ ID NO: 684311 - DNA, 33 bp, Homo sapien
gtatatgtgaactgaaaaaaaattcatagaaat

SEQ ID NO: 684312 - DNA, 33 bp, Homo sapien
gtatatgtgaactgaagaaaaattcatagaaat

SEQ ID NO: 684313 - DNA, 33 bp, Homo sapien
tgatgactgttcctcaatattaagaatgagacg

SEQ ID NO: 684314 - DNA, 33 bp, Homo sapien
tgatgactgttcctcagtattaagaatgagacg

SEQ ID NO: 684315 - DNA, 33 bp, Homo sapien
tttttttcctttatgacgtgagttaaatcattt

SEQ ID NO: 684316 - DNA, 33 bp, Homo sapien
tttttttcctttatgatgtgagttaaatcattt

SEQ ID NO: 684317 - DNA, 33 bp, Homo sapien
tgctggttggtggaaacgtctttgagaaacgct

SEQ ID NO: 684318 - DNA, 33 bp, Homo sapien
tgctggttggtggaaatgtctttgagaaacgct

SEQ ID NO: 684319 - DNA, 33 bp, Homo sapien
tggcccacactctccaacagccttgtctctgtg

SEQ ID NO: 684320 - DNA, 33 bp, Homo sapien
tggcccacactctccagcagccttgtctctgtg

SEQ ID NO: 684321 - DNA, 33 bp, Homo sapien
ggtggagggacaaagacggccagcccctagcat

SEQ ID NO: 684322 - DNA, 33 bp, Homo sapien
ggtggagggacaaagatggccagcccctagcat

SEQ ID NO: 684323 - DNA, 33 bp, Homo sapien
atgcagggagatgtgaaaaggtcccctggtccc

SEQ ID NO: 684324 - DNA, 33 bp, Homo sapien
atgcagggagatgtgagaaggtcccctggtccc

SEQ ID NO: 684325 - DNA, 33 bp, Homo sapien
gcttggcatatggtgaaagcttaatgaatacat

SEQ ID NO: 684326 - DNA, 33 bp, Homo sapien
gcttggcatatggtgagagcttaatgaatacat

SEQ ID NO: 684327 - DNA, 33 bp, Homo sapien
aggacaaagcaagaagaaaatgatttgagtagc

SEQ ID NO: 684328 - DNA, 33 bp, Homo sapien
aggacaaagcaagaaggaaatgatttgagtagc

SEQ ID NO: 684329 - DNA, 33 bp, Homo sapien
atctgcggctattttacaactagtgaagggaat

SEQ ID NO: 684330 - DNA, 33 bp, Homo sapien
atctgcggctattttataactagtgaagggaat

SEQ ID NO: 684331 - DNA, 33 bp, Homo sapien
tgtgctaagagccaacacagaagcaatgtgtgt

SEQ ID NO: 684332 - DNA, 33 bp, Homo sapien
tgtgctaagagccaacgcagaagcaatgtgtgt

SEQ ID NO: 684333 - DNA, 33 bp, Homo sapien
cagactgtctagatcacgggctgaattctccca

SEQ ID NO: 684334 - DNA, 33 bp, Homo sapien
cagactgtctagatcatgggctgaattctccca

SEQ ID NO: 684335 - DNA, 33 bp, Homo sapien
tgagtaccgaggagcactgagtacgtgggcccc

SEQ ID NO: 684336 - DNA, 33 bp, Homo sapien
tgagtaccgaggagcattgagtacgtgggcccc

SEQ ID NO: 684337 - DNA, 33 bp, Homo sapien
gtagtaatgcaatgcaatatctacgggtttggg

SEQ ID NO: 684338 - DNA, 33 bp, Homo sapien
gtagtaatgcaatgcagtatctacgggtttggg

SEQ ID NO: 684339 - DNA, 33 bp, Homo sapien
ccactgagtataaggacggaggaatgaaagtga

SEQ ID NO: 684340 - DNA, 33 bp, Homo sapien
ccactgagtataaggatggaggaatgaaagtga

SEQ ID NO: 684341 - DNA, 33 bp, Homo sapien
aaagcctcagccttcaaaatgtttcacttggaa

SEQ ID NO: 684342 - DNA, 33 bp, Homo sapien
aaagcctcagccttcagaatgtttcacttggaa

SEQ ID NO: 684343 - DNA, 33 bp, Homo sapien
tccagagaggggtgaacaattgaggccattaat

SEQ ID NO: 684344 - DNA, 33 bp, Homo sapien
tccagagaggggtgaagaattgaggccattaat

SEQ ID NO: 684345 - DNA, 33 bp, Homo sapien
acttcccaaagaggacaaagactacattcttta

SEQ ID NO: 684346 - DNA, 33 bp, Homo sapien
acttcccaaagaggacgaagactacattcttta

SEQ ID NO: 684347 - DNA, 33 bp, Homo sapien
gtggaaatgtaaacaactgatgatgacccgttg

SEQ ID NO: 684348 - DNA, 33 bp, Homo sapien
gtggaaatgtaaacaattgatgatgacccgttg

SEQ ID NO: 684349 - DNA, 33 bp, Homo sapien
tcactttcaatttccacgaggagggtgcattag

SEQ ID NO: 684350 - DNA, 33 bp, Homo sapien
tcactttcaatttccatgaggagggtgcattag

SEQ ID NO: 684351 - DNA, 33 bp, Homo sapien
tgctaacactaggtccaattccagctcggcctg

SEQ ID NO: 684352 - DNA, 33 bp, Homo sapien
tgctaacactaggtccgattccagctcggcctg

SEQ ID NO: 684353 - DNA, 33 bp, Homo sapien
ttcccacagttgcaaaatccagtagtctgagat

SEQ ID NO: 684354 - DNA, 33 bp, Homo sapien
ttcccacagttgcaaagtccagtagtctgagat

SEQ ID NO: 684355 - DNA, 33 bp, Homo sapien
gaccccaggacttacacgattgatagactagct

SEQ ID NO: 684356 - DNA, 33 bp, Homo sapien
gaccccaggacttacatgattgatagactagct

SEQ ID NO: 684357 - DNA, 33 bp, Homo sapien
ccattagatgaggcccactgggaagtcacagct

SEQ ID NO: 684358 - DNA, 33 bp, Homo sapien
ccattagatgaggcccgctgggaagtcacagct

SEQ ID NO: 684359 - DNA, 33 bp, Homo sapien
acattaatatttctacagcaaaacgtggatatt

SEQ ID NO: 684360 - DNA, 33 bp, Homo sapien
acattaatatttctaccgcaaaacgtggatatt

SEQ ID NO: 684361 - DNA, 33 bp, Homo sapien
ccctccctgtggctgcaatgagtatgtctctat

SEQ ID NO: 684362 - DNA, 33 bp, Homo sapien
ccctccctgtggctgcgatgagtatgtctctat

SEQ ID NO: 684363 - DNA, 33 bp, Homo sapien
acttgtggatgaagctgaagtcacccaaccagg

SEQ ID NO: 684364 - DNA, 33 bp, Homo sapien
acttgtggatgaagcttaagtcacccaaccagg

SEQ ID NO: 684365 - DNA, 33 bp, Homo sapien
tctaatgttttcttcacggtatctcaccttgca

SEQ ID NO: 684366 - DNA, 33 bp, Homo sapien
tctaatgttttcttcatggtatctcaccttgca

SEQ ID NO: 684367 - DNA, 33 bp, Homo sapien
caaagcctaaattccaatctatcttcatgaaca

SEQ ID NO: 684368 - DNA, 33 bp, Homo sapien
caaagcctaaattccattctatcttcatgaaca

SEQ ID NO: 684369 - DNA, 33 bp, Homo sapien
agcccataaaaaccccaaactgagccagactgg

SEQ ID NO: 684370 - DNA, 33 bp, Homo sapien
agcccataaaaaccccgaactgagccagactgg

SEQ ID NO: 684371 - DNA, 33 bp, Homo sapien
aacagacatctgcacaatctgcccgtggaaagg

SEQ ID NO: 684372 - DNA, 33 bp, Homo sapien
aacagacatctgcacagtctgcccgtggaaagg

SEQ ID NO: 684373 - DNA, 33 bp, Homo sapien
ctgggatttcaaaacccgaagtgagatgtttga

SEQ ID NO: 684374 - DNA, 33 bp, Homo sapien
ctgggatttcaaaaccggaagtgagatgtttga

SEQ ID NO: 684375 - DNA, 33 bp, Homo sapien
gaactcaggtgtcacacgcttacatattaattt

SEQ ID NO: 684376 - DNA, 33 bp, Homo sapien
gaactcaggtgtcacatgcttacatattaattt

SEQ ID NO: 684377 - DNA, 33 bp, Homo sapien
attagcatgtagttgaactagaagtagatgctt

SEQ ID NO: 684378 - DNA, 33 bp, Homo sapien
attagcatgtagttgatctagaagtagatgctt

SEQ ID NO: 684379 - DNA, 33 bp, Homo sapien
tcaacatctagcctgcaagctgacagccttcca

SEQ ID NO: 684380 - DNA, 33 bp, Homo sapien
tcaacatctagcctgcgagctgacagccttcca

SEQ ID NO: 684381 - DNA, 33 bp, Homo sapien
tcttagttttggttgcaattgaattagtcatct

SEQ ID NO: 684382 - DNA, 33 bp, Homo sapien
tcttagttttggttgcgattgaattagtcatct

SEQ ID NO: 684383 - DNA, 33 bp, Homo sapien
ttccaaaatttcctgacgttcataaacactctt

SEQ ID NO: 684384 - DNA, 33 bp, Homo sapien
ttccaaaatttcctgatgttcataaacactctt

SEQ ID NO: 684385 - DNA, 33 bp, Homo sapien
ccaagcctttgcttcccgaaatggaggtagtac

SEQ ID NO: 684386 - DNA, 33 bp, Homo sapien
ccaagcctttgcttcctgaaatggaggtagtac

SEQ ID NO: 684387 - DNA, 33 bp, Homo sapien
gtcttggaaaagctaacgtttagagagcatttt

SEQ ID NO: 684388 - DNA, 33 bp, Homo sapien
gtcttggaaaagctaatgtttagagagcatttt

SEQ ID NO: 684389 - DNA, 33 bp, Homo sapien
caatgccaatagttgcaatcttaggggggccat

SEQ ID NO: 684390 - DNA, 33 bp, Homo sapien
caatgccaatagttgcgatcttaggggggccat

SEQ ID NO: 684391 - DNA, 33 bp, Homo sapien
ggaacagctgtattgaaccctggccttaaagtt

SEQ ID NO: 684392 - DNA, 33 bp, Homo sapien
ggaacagctgtattgagccctggccttaaagtt

SEQ ID NO: 684393 - DNA, 33 bp, Homo sapien
taaaagatcttcccatcacggtggctgtttcat

SEQ ID NO: 684394 - DNA, 33 bp, Homo sapien
taaaagatcttcccattacggtggctgtttcat

SEQ ID NO: 684395 - DNA, 33 bp, Homo sapien
gtcagaaaactgactccctggtcagcagtgaga

SEQ ID NO: 684396 - DNA, 33 bp, Homo sapien
gtcagaaaactgactctctggtcagcagtgaga

SEQ ID NO: 684397 - DNA, 33 bp, Homo sapien
ccgtgtactgggcaaccgccaggagtaattgag

SEQ ID NO: 684398 - DNA, 33 bp, Homo sapien
ccgtgtactgggcaactgccaggagtaattgag

SEQ ID NO: 684399 - DNA, 33 bp, Homo sapien
ttgttcattaagcatcagatgagtgaatattta

SEQ ID NO: 684400 - DNA, 33 bp, Homo sapien
ttgttcattaagcatcggatgagtgaatattta

SEQ ID NO: 684401 - DNA, 33 bp, Homo sapien
tttgtacaccatgaacactgtgagtgcaaataa

SEQ ID NO: 684402 - DNA, 33 bp, Homo sapien
tttgtacaccatgaacgctgtgagtgcaaataa

SEQ ID NO: 684403 - DNA, 33 bp, Homo sapien
ggaatatgagggtccacgatgtcgtaggaacca

SEQ ID NO: 684404 - DNA, 33 bp, Homo sapien
ggaatatgagggtccatgatgtcgtaggaacca

SEQ ID NO: 684405 - DNA, 33 bp, Homo sapien
acagcttgaaaacactaaacaattcacaaaggt

SEQ ID NO: 684406 - DNA, 33 bp, Homo sapien
acagcttgaaaacactgaacaattcacaaaggt

SEQ ID NO: 684407 - DNA, 33 bp, Homo sapien
tggactgtcaccaccacgtgatcgagcctacat

SEQ ID NO: 684408 - DNA, 33 bp, Homo sapien
tggactgtcaccaccatgtgatcgagcctacat

SEQ ID NO: 684409 - DNA, 33 bp, Homo sapien
atgccagagttgggaacgaactccccttatctc

SEQ ID NO: 684410 - DNA, 33 bp, Homo sapien
atgccagagttgggaatgaactccccttatctc

SEQ ID NO: 684411 - DNA, 33 bp, Homo sapien
cctccgcaggtgctgaacgaacgctgaccctga

SEQ ID NO: 684412 - DNA, 33 bp, Homo sapien
cctccgcaggtgctgagcgaacgctgaccctga

SEQ ID NO: 684413 - DNA, 33 bp, Homo sapien
tgagacgttcactgtcaccatgctctgggaccc

SEQ ID NO: 684414 - DNA, 33 bp, Homo sapien
tgagacgttcactgtcgccatgctctgggaccc

SEQ ID NO: 684415 - DNA, 33 bp, Homo sapien
acgtgaatgaacgaatcatgatggccaacaggt

SEQ ID NO: 684416 - DNA, 33 bp, Homo sapien
acgtgaatgaacgaatgatgatggccaacaggt

SEQ ID NO: 684417 - DNA, 33 bp, Homo sapien
ccactccattagcccacgaatgacacagtgaca

SEQ ID NO: 684418 - DNA, 33 bp, Homo sapien
ccactccattagcccatgaatgacacagtgaca

SEQ ID NO: 684419 - DNA, 33 bp, Homo sapien
aggaaaataagctcatcaatttcagcccatatt

SEQ ID NO: 684420 - DNA, 33 bp, Homo sapien
aggaaaataagctcatgaatttcagcccatatt

SEQ ID NO: 684421 - DNA, 33 bp, Homo sapien
tctttctttattttgccgactccggtaaactat

SEQ ID NO: 684422 - DNA, 33 bp, Homo sapien
tctttctttattttgctgactccggtaaactat

SEQ ID NO: 684423 - DNA, 33 bp, Homo sapien
gagatagcaaagatagaaaatgccccttaaatt

SEQ ID NO: 684424 - DNA, 33 bp, Homo sapien
gagatagcaaagatagcaaatgccccttaaatt

SEQ ID NO: 684425 - DNA, 33 bp, Homo sapien
ggtctgtgccatctgcaaagtgctttgacattt

SEQ ID NO: 684426 - DNA, 33 bp, Homo sapien
ggtctgtgccatctgcgaagtgctttgacattt

SEQ ID NO: 684427 - DNA, 33 bp, Homo sapien
gactcaataatactgaactgggaaatgttattg

SEQ ID NO: 684428 - DNA, 33 bp, Homo sapien
gactcaataatactgacctgggaaatgttattg

SEQ ID NO: 684429 - DNA, 33 bp, Homo sapien
tggaaaccaaactacaagaagcagagattgtgt

SEQ ID NO: 684430 - DNA, 33 bp, Homo sapien
tggaaaccaaactacatgaagcagagattgtgt

SEQ ID NO: 684431 - DNA, 33 bp, Homo sapien
ggatacgtctcacagagtatatattgcatgtca

SEQ ID NO: 684432 - DNA, 33 bp, Homo sapien
ggatacgtctcacagattatatattgcatgtca

SEQ ID NO: 684433 - DNA, 33 bp, Homo sapien
tttgaccagtgagttacgagggaaagtctgggg

SEQ ID NO: 684434 - DNA, 33 bp, Homo sapien
tttgaccagtgagttatgagggaaagtctgggg

SEQ ID NO: 684435 - DNA, 33 bp, Homo sapien
ttagaatcaaaccacgaacaaagcacagatgct

SEQ ID NO: 684436 - DNA, 33 bp, Homo sapien
ttagaatcaaaccacggacaaagcacagatgct

SEQ ID NO: 684437 - DNA, 33 bp, Homo sapien
attcgaaattaggtccagaacattggaaggagc

SEQ ID NO: 684438 - DNA, 33 bp, Homo sapien
attcgaaattaggtccggaacattggaaggagc

SEQ ID NO: 684439 - DNA, 33 bp, Homo sapien
ggatacctaagaaagtaaagaccctcattgtta

SEQ ID NO: 684440 - DNA, 33 bp, Homo sapien
ggatacctaagaaagtgaagaccctcattgtta

SEQ ID NO: 684441 - DNA, 33 bp, Homo sapien
caacccacacaaaagacagagataagaaaaaca

SEQ ID NO: 684442 - DNA, 33 bp, Homo sapien
caacccacacaaaagatagagataagaaaaaca

SEQ ID NO: 684443 - DNA, 33 bp, Homo sapien
tgaggggcctaataaacgatggaagaaagtagg

SEQ ID NO: 684444 - DNA, 33 bp, Homo sapien
tgaggggcctaataaatgatggaagaaagtagg

SEQ ID NO: 684445 - DNA, 33 bp, Homo sapien
ttattgtggttctagaaacatagtaggtgctca

SEQ ID NO: 684446 - DNA, 33 bp, Homo sapien
ttattgtggttctagacacatagtaggtgctca

SEQ ID NO: 684447 - DNA, 33 bp, Homo sapien
taatagtatcatctaacaggtgctgagaacttg

SEQ ID NO: 684448 - DNA, 33 bp, Homo sapien
taatagtatcatctaataggtgctgagaacttg

SEQ ID NO: 684449 - DNA, 33 bp, Homo sapien
tcctgtgaccttgttacgggaaaataataagcc

SEQ ID NO: 684450 - DNA, 33 bp, Homo sapien
tcctgtgaccttgttatgggaaaataataagcc

SEQ ID NO: 684451 - DNA, 33 bp, Homo sapien
aaatataggccagatacaccaaaaacaaggtag

SEQ ID NO: 684452 - DNA, 33 bp, Homo sapien
aaatataggccagatataccaaaaacaaggtag

SEQ ID NO: 684453 - DNA, 33 bp, Homo sapien
ctacacctgtctcctacacagtgcctggcacat

SEQ ID NO: 684454 - DNA, 33 bp, Homo sapien
ctacacctgtctcctatacagtgcctggcacat

SEQ ID NO: 684455 - DNA, 33 bp, Homo sapien
tatgtgtttgttgacaatcttagactactttta

SEQ ID NO: 684456 - DNA, 33 bp, Homo sapien
tatgtgtttgttgacagtcttagactactttta

SEQ ID NO: 684457 - DNA, 33 bp, Homo sapien
tcttttcattctttcaacggtatcttttgaaga

SEQ ID NO: 684458 - DNA, 33 bp, Homo sapien
tcttttcattctttcagcggtatcttttgaaga

SEQ ID NO: 684459 - DNA, 33 bp, Homo sapien
ttctaaaacgtggacaacatctactgctggcaa

SEQ ID NO: 684460 - DNA, 33 bp, Homo sapien
ttctaaaacgtggacaccatctactgctggcaa

SEQ ID NO: 684461 - DNA, 33 bp, Homo sapien
cctcatgatctaaccacctaccaaaattgccac

SEQ ID NO: 684462 - DNA, 33 bp, Homo sapien
cctcatgatctaaccatctaccaaaattgccac

SEQ ID NO: 684463 - DNA, 33 bp, Homo sapien
gcccaaagcattcaacagcaagaggctagcctg

SEQ ID NO: 684464 - DNA, 33 bp, Homo sapien
gcccaaagcattcaacggcaagaggctagcctg

SEQ ID NO: 684465 - DNA, 33 bp, Homo sapien
ttctccgcatatcacactggatgttcactttgt

SEQ ID NO: 684466 - DNA, 33 bp, Homo sapien
ttctccgcatatcacattggatgttcactttgt

SEQ ID NO: 684467 - DNA, 33 bp, Homo sapien
gaacaggttgagaaaccgagttttgatctgtgg

SEQ ID NO: 684468 - DNA, 33 bp, Homo sapien
gaacaggttgagaaactgagttttgatctgtgg

SEQ ID NO: 684469 - DNA, 33 bp, Homo sapien
gcccatacaagccccaagttcagccaaagctga

SEQ ID NO: 684470 - DNA, 33 bp, Homo sapien
gcccatacaagccccaggttcagccaaagctga

SEQ ID NO: 684471 - DNA, 33 bp, Homo sapien
tggaaagacaagctcacctatagcgtcacagct

SEQ ID NO: 684472 - DNA, 33 bp, Homo sapien
tggaaagacaagctcatctatagcgtcacagct

SEQ ID NO: 684473 - DNA, 33 bp, Homo sapien
taaagaaatagcaaaagatcaaattcaatattt

SEQ ID NO: 684474 - DNA, 33 bp, Homo sapien
taaagaaatagcaaaatatcaaattcaatattt

SEQ ID NO: 684475 - DNA, 33 bp, Homo sapien
aggggcagagtggtctcaaattgctgcaaacca

SEQ ID NO: 684476 - DNA, 33 bp, Homo sapien
aggggcagagtggtcttaaattgctgcaaacca

SEQ ID NO: 684477 - DNA, 33 bp, Homo sapien
ggtaaggagcaaaatcacttctgctgtaagatt

SEQ ID NO: 684478 - DNA, 33 bp, Homo sapien
ggtaaggagcaaaatcgcttctgctgtaagatt

SEQ ID NO: 684479 - DNA, 33 bp, Homo sapien
tattgtccttcttctcaatctttaactaagttt

SEQ ID NO: 684480 - DNA, 33 bp, Homo sapien
tattgtccttcttctcgatctttaactaagttt

SEQ ID NO: 684481 - DNA, 33 bp, Homo sapien
tgctgggcccatgctacagcttcgcacacatct

SEQ ID NO: 684482 - DNA, 33 bp, Homo sapien
tgctgggcccatgctagagcttcgcacacatct

SEQ ID NO: 684483 - DNA, 33 bp, Homo sapien
aaacactattcaagaaacatgacagaagaaaat

SEQ ID NO: 684484 - DNA, 33 bp, Homo sapien
aaacactattcaagaaccatgacagaagaaaat

SEQ ID NO: 684485 - DNA, 33 bp, Homo sapien
gctggatgtccctgaacaggaaaaagttgagtg

SEQ ID NO: 684486 - DNA, 33 bp, Homo sapien
gctggatgtccctgaagaggaaaaagttgagtg

SEQ ID NO: 684487 - DNA, 33 bp, Homo sapien
tgtaaagccttttgtacatactgtatgaacaac

SEQ ID NO: 684488 - DNA, 33 bp, Homo sapien
tgtaaagccttttgtatatactgtatgaacaac

SEQ ID NO: 684489 - DNA, 33 bp, Homo sapien
caaccttccagaagtacgccactgtataaaagc

SEQ ID NO: 684490 - DNA, 33 bp, Homo sapien
caaccttccagaagtatgccactgtataaaagc

SEQ ID NO: 684491 - DNA, 33 bp, Homo sapien
gaagggcttaaaaaacaacgcaccaggagatta

SEQ ID NO: 684492 - DNA, 33 bp, Homo sapien
gaagggcttaaaaaacgacgcaccaggagatta

SEQ ID NO: 684493 - DNA, 33 bp, Homo sapien
aacccaatcaatagaaatgagagagacggtgga

SEQ ID NO: 684494 - DNA, 33 bp, Homo sapien
aacccaatcaatagaagtgagagagacggtgga

SEQ ID NO: 684495 - DNA, 33 bp, Homo sapien
aaaacatctgaacaaccgccatgcaagtgctaa

SEQ ID NO: 684496 - DNA, 33 bp, Homo sapien
aaaacatctgaacaactgccatgcaagtgctaa

SEQ ID NO: 684497 - DNA, 33 bp, Homo sapien
tttcgtttttgtcttacgcactgattgaagaac

SEQ ID NO: 684498 - DNA, 33 bp, Homo sapien
tttcgtttttgtcttatgcactgattgaagaac

SEQ ID NO: 684499 - DNA, 33 bp, Homo sapien
gaagccctgtgacaaggctgccttactggagtg

SEQ ID NO: 684500 - DNA, 33 bp, Homo sapien
gaagccctgtgacaagtctgccttactggagtg

SEQ ID NO: 684501 - DNA, 33 bp, Homo sapien
ccttgaggtcatgttgaaacttggatcccagct

SEQ ID NO: 684502 - DNA, 33 bp, Homo sapien
ccttgaggtcatgttggaacttggatcccagct

SEQ ID NO: 684503 - DNA, 33 bp, Homo sapien
gtgtaatgagggtatacggggccaggtggagca

SEQ ID NO: 684504 - DNA, 33 bp, Homo sapien
gtgtaatgagggtatatggggccaggtggagca

SEQ ID NO: 684505 - DNA, 33 bp, Homo sapien
attacacccattttacagatgaaaacatgaaga

SEQ ID NO: 684506 - DNA, 33 bp, Homo sapien
attacacccattttacggatgaaaacatgaaga

SEQ ID NO: 684507 - DNA, 33 bp, Homo sapien
taatgataaagaaaataatgaaacccagcatgt

SEQ ID NO: 684508 - DNA, 33 bp, Homo sapien
taatgataaagaaaatcatgaaacccagcatgt

SEQ ID NO: 684509 - DNA, 33 bp, Homo sapien
caacaggttgatcctaaagagacctccttcagg

SEQ ID NO: 684510 - DNA, 33 bp, Homo sapien
caacaggttgatcctagagagacctccttcagg

SEQ ID NO: 684511 - DNA, 33 bp, Homo sapien
ctcatatccatgtctgcagaaaaagcactggct

SEQ ID NO: 684512 - DNA, 33 bp, Homo sapien
ctcatatccatgtctgtagaaaaagcactggct

SEQ ID NO: 684513 - DNA, 33 bp, Homo sapien
cactctgcatgtcccacacattccctgaatctg

SEQ ID NO: 684514 - DNA, 33 bp, Homo sapien
cactctgcatgtcccatacattccctgaatctg

SEQ ID NO: 684515 - DNA, 33 bp, Homo sapien
aaaaatcccactttaaccagaggcatagtaatt

SEQ ID NO: 684516 - DNA, 33 bp, Homo sapien
aaaaatcccactttaagcagaggcatagtaatt

SEQ ID NO: 684517 - DNA, 33 bp, Homo sapien
gggctcccatcaatcaacatgcatggatcccgc

SEQ ID NO: 684518 - DNA, 33 bp, Homo sapien
gggctcccatcaatcagcatgcatggatcccgc

SEQ ID NO: 684519 - DNA, 33 bp, Homo sapien
tcatagctctggtcaaaaaagcttgtagggcag

SEQ ID NO: 684520 - DNA, 33 bp, Homo sapien
tcatagctctggtcaagaaagcttgtagggcag

SEQ ID NO: 684521 - DNA, 33 bp, Homo sapien
tgaatgatattatgccagaaagtaactccacag

SEQ ID NO: 684522 - DNA, 33 bp, Homo sapien
tgaatgatattatgccggaaagtaactccacag

SEQ ID NO: 684523 - DNA, 33 bp, Homo sapien
tcacactcatcttataagtgacgaaactaaggc

SEQ ID NO: 684524 - DNA, 33 bp, Homo sapien
tcacactcatcttataggtgacgaaactaaggc

SEQ ID NO: 684525 - DNA, 33 bp, Homo sapien
caagctccactgtcacagccttgagtggtttca

SEQ ID NO: 684526 - DNA, 33 bp, Homo sapien
caagctccactgtcactgccttgagtggtttca

SEQ ID NO: 684527 - DNA, 33 bp, Homo sapien
aactaattcttggtggaataatacatccaaaat

SEQ ID NO: 684528 - DNA, 33 bp, Homo sapien
aactaattcttggtggtataatacatccaaaat

SEQ ID NO: 684529 - DNA, 33 bp, Homo sapien
acacatcagactgtacccttaaactgtgtgaat

SEQ ID NO: 684530 - DNA, 33 bp, Homo sapien
acacatcagactgtactcttaaactgtgtgaat

SEQ ID NO: 684531 - DNA, 33 bp, Homo sapien
attcactgtgaatccaccattcaatcagaacta

SEQ ID NO: 684532 - DNA, 33 bp, Homo sapien
attcactgtgaatccatcattcaatcagaacta

SEQ ID NO: 684533 - DNA, 33 bp, Homo sapien
tgtgccaggagacttaaggatgtcgctgacatc

SEQ ID NO: 684534 - DNA, 33 bp, Homo sapien
tgtgccaggagacttatggatgtcgctgacatc

SEQ ID NO: 684535 - DNA, 33 bp, Homo sapien
cgctagccttaccttacagtatggccgtaaagg

SEQ ID NO: 684536 - DNA, 33 bp, Homo sapien
cgctagccttaccttatagtatggccgtaaagg

SEQ ID NO: 684537 - DNA, 33 bp, Homo sapien
ggctagcgtgaatccacaggttcaagtggtgcc

SEQ ID NO: 684538 - DNA, 33 bp, Homo sapien
ggctagcgtgaatccataggttcaagtggtgcc

SEQ ID NO: 684539 - DNA, 33 bp, Homo sapien
caacatgatccctgcaatatatttcccatcaac

SEQ ID NO: 684540 - DNA, 33 bp, Homo sapien
caacatgatccctgcattatatttcccatcaac

SEQ ID NO: 684541 - DNA, 33 bp, Homo sapien
cagagaatggtttatgaaatgttcctgaggagc

SEQ ID NO: 684542 - DNA, 33 bp, Homo sapien
cagagaatggtttatggaatgttcctgaggagc

SEQ ID NO: 684543 - DNA, 33 bp, Homo sapien
acctcatcctggtaccagaaccagagctggcct

SEQ ID NO: 684544 - DNA, 33 bp, Homo sapien
acctcatcctggtaccggaaccagagctggcct

SEQ ID NO: 684545 - DNA, 33 bp, Homo sapien
ccagacttgctgagcaacatggagtgcccgtgt

SEQ ID NO: 684546 - DNA, 33 bp, Homo sapien
ccagacttgctgagcagcatggagtgcccgtgt

SEQ ID NO: 684547 - DNA, 33 bp, Homo sapien
tgtttttgatttggaaacttaacattcttgagt

SEQ ID NO: 684548 - DNA, 33 bp, Homo sapien
tgtttttgatttggaagcttaacattcttgagt

SEQ ID NO: 684549 - DNA, 33 bp, Homo sapien
tgcacaatggaaagcacattataccccaaactc

SEQ ID NO: 684550 - DNA, 33 bp, Homo sapien
tgcacaatggaaagcatattataccccaaactc

SEQ ID NO: 684551 - DNA, 33 bp, Homo sapien
gcaatgcccttgtggccaaaggaaagtaagatc

SEQ ID NO: 684552 - DNA, 33 bp, Homo sapien
gcaatgcccttgtggctaaaggaaagtaagatc

SEQ ID NO: 684553 - DNA, 33 bp, Homo sapien
gaaaagaatcatccacaattaccaccctttaat

SEQ ID NO: 684554 - DNA, 33 bp, Homo sapien
gaaaagaatcatccacgattaccaccctttaat

SEQ ID NO: 684555 - DNA, 33 bp, Homo sapien
ctcgcactgagcctgacgtacacttatagcacc

SEQ ID NO: 684556 - DNA, 33 bp, Homo sapien
ctcgcactgagcctgaggtacacttatagcacc

SEQ ID NO: 684557 - DNA, 33 bp, Homo sapien
atatgaaggtggtcccacaggattacaatgcag

SEQ ID NO: 684558 - DNA, 33 bp, Homo sapien
atatgaaggtggtcccgcaggattacaatgcag

SEQ ID NO: 684559 - DNA, 33 bp, Homo sapien
tcatccagggaaaccaatcagatagcctcaggg

SEQ ID NO: 684560 - DNA, 33 bp, Homo sapien
tcatccagggaaaccagtcagatagcctcaggg

SEQ ID NO: 684561 - DNA, 33 bp, Homo sapien
taggtccctggtttcacggagctgacattctag

SEQ ID NO: 684562 - DNA, 33 bp, Homo sapien
taggtccctggtttcatggagctgacattctag

SEQ ID NO: 684563 - DNA, 33 bp, Homo sapien
aattaagcaggtttaaaaccaattctgggattc

SEQ ID NO: 684564 - DNA, 33 bp, Homo sapien
aattaagcaggtttaagaccaattctgggattc

SEQ ID NO: 684565 - DNA, 33 bp, Homo sapien
tgcagaaacttcttgccaaaagcctggaatcct

SEQ ID NO: 684566 - DNA, 33 bp, Homo sapien
tgcagaaacttcttgctaaaagcctggaatcct

SEQ ID NO: 684567 - DNA, 33 bp, Homo sapien
actgataaattcccagaccctctgcgagaccgt

SEQ ID NO: 684568 - DNA, 33 bp, Homo sapien
actgataaattcccaggccctctgcgagaccgt

SEQ ID NO: 684569 - DNA, 33 bp, Homo sapien
tgaaatgcagtgaaataatccttgcagagaatc

SEQ ID NO: 684570 - DNA, 33 bp, Homo sapien
tgaaatgcagtgaaatcatccttgcagagaatc

SEQ ID NO: 684571 - DNA, 33 bp, Homo sapien
gtgacttaacgtagtacgagaactgttgagctt

SEQ ID NO: 684572 - DNA, 33 bp, Homo sapien
gtgacttaacgtagtatgagaactgttgagctt

SEQ ID NO: 684573 - DNA, 33 bp, Homo sapien
ccgttttatataatgcagaaagacagtaagaca

SEQ ID NO: 684574 - DNA, 33 bp, Homo sapien
ccgttttatataatgcggaaagacagtaagaca

SEQ ID NO: 684575 - DNA, 33 bp, Homo sapien
tctcattttcctggcaaagagatgatatcattc

SEQ ID NO: 684576 - DNA, 33 bp, Homo sapien
tctcattttcctggcagagagatgatatcattc

SEQ ID NO: 684577 - DNA, 33 bp, Homo sapien
cctcattggtgatgaaaatttgtctaaactgag

SEQ ID NO: 684578 - DNA, 33 bp, Homo sapien
cctcattggtgatgaagatttgtctaaactgag

SEQ ID NO: 684579 - DNA, 33 bp, Homo sapien
atgtgacaagaccacaagctaaatgccaagcat

SEQ ID NO: 684580 - DNA, 33 bp, Homo sapien
atgtgacaagaccacaggctaaatgccaagcat

SEQ ID NO: 684581 - DNA, 33 bp, Homo sapien
actgactgtcaaacaactccaacggtccagcaa

SEQ ID NO: 684582 - DNA, 33 bp, Homo sapien
actgactgtcaaacaattccaacggtccagcaa

SEQ ID NO: 684583 - DNA, 33 bp, Homo sapien
ttaaaggttaatttaacagtcaacaactttatg

SEQ ID NO: 684584 - DNA, 33 bp, Homo sapien
ttaaaggttaatttaatagtcaacaactttatg

SEQ ID NO: 684585 - DNA, 33 bp, Homo sapien
ggagacaggaggaaaagaatctcattagaaaga

SEQ ID NO: 684586 - DNA, 33 bp, Homo sapien
ggagacaggaggaaaataatctcattagaaaga

SEQ ID NO: 684587 - DNA, 33 bp, Homo sapien
tggttgctgttgagaaaactgattctattctga

SEQ ID NO: 684588 - DNA, 33 bp, Homo sapien
tggttgctgttgagaacactgattctattctga

SEQ ID NO: 684589 - DNA, 33 bp, Homo sapien
aaatgactttcaccaacaccatcgtggtgcaat

SEQ ID NO: 684590 - DNA, 33 bp, Homo sapien
aaatgactttcaccaagaccatcgtggtgcaat

SEQ ID NO: 684591 - DNA, 33 bp, Homo sapien
ttggagtctaatgcgcagaccccctcggaaact

SEQ ID NO: 684592 - DNA, 33 bp, Homo sapien
ttggagtctaatgcgccgaccccctcggaaact

SEQ ID NO: 684593 - DNA, 33 bp, Homo sapien
ttccccaaaggtccgaagtcagtagggctcagc

SEQ ID NO: 684594 - DNA, 33 bp, Homo sapien
ttccccaaaggtccgacgtcagtagggctcagc

SEQ ID NO: 684595 - DNA, 33 bp, Homo sapien
aacttgaggctcagacaggttatgcttcctgcc

SEQ ID NO: 684596 - DNA, 33 bp, Homo sapien
aacttgaggctcagacgggttatgcttcctgcc

SEQ ID NO: 684597 - DNA, 33 bp, Homo sapien
tttctgtgcactagagaacaagaaagttatagc

SEQ ID NO: 684598 - DNA, 33 bp, Homo sapien
tttctgtgcactagaggacaagaaagttatagc

SEQ ID NO: 684599 - DNA, 33 bp, Homo sapien
ctcagctggagcaatgaaattattcagaaaatt

SEQ ID NO: 684600 - DNA, 33 bp, Homo sapien
ctcagctggagcaatgcaattattcagaaaatt

SEQ ID NO: 684601 - DNA, 33 bp, Homo sapien
tccttggaagcttggggaggtagcgtacgttgg

SEQ ID NO: 684602 - DNA, 33 bp, Homo sapien
tccttggaagcttgggtaggtagcgtacgttgg

SEQ ID NO: 684603 - DNA, 33 bp, Homo sapien
aaccggatagtgaatgaagataagcagacaggc

SEQ ID NO: 684604 - DNA, 33 bp, Homo sapien
aaccggatagtgaatgtagataagcagacaggc

SEQ ID NO: 684605 - DNA, 33 bp, Homo sapien
aatatcacagcattcgccctgaaggccaaagtc

SEQ ID NO: 684606 - DNA, 33 bp, Homo sapien
aatatcacagcattcgtcctgaaggccaaagtc

SEQ ID NO: 684607 - DNA, 33 bp, Homo sapien
aactgttctcttatggccattagtgggtttcaa

SEQ ID NO: 684608 - DNA, 33 bp, Homo sapien
aactgttctcttatgggcattagtgggtttcaa

SEQ ID NO: 684609 - DNA, 33 bp, Homo sapien
cattggcacccgtttacgaggccagtcagtcct

SEQ ID NO: 684610 - DNA, 33 bp, Homo sapien
cattggcacccgtttatgaggccagtcagtcct

SEQ ID NO: 684611 - DNA, 33 bp, Homo sapien
gctacctctaccttcaacttcattagagtcctc

SEQ ID NO: 684612 - DNA, 33 bp, Homo sapien
gctacctctaccttcaccttcattagagtcctc

SEQ ID NO: 684613 - DNA, 33 bp, Homo sapien
gagccagaccgacaccacagttgaggctgacag

SEQ ID NO: 684614 - DNA, 33 bp, Homo sapien
gagccagaccgacaccgcagttgaggctgacag

SEQ ID NO: 684615 - DNA, 33 bp, Homo sapien
ggacccagtgaaagccaggatttggttcaggtc

SEQ ID NO: 684616 - DNA, 33 bp, Homo sapien
ggacccagtgaaagcccggatttggttcaggtc

SEQ ID NO: 684617 - DNA, 33 bp, Homo sapien
gacactaggaatcggaacaactttccctcatgg

SEQ ID NO: 684618 - DNA, 33 bp, Homo sapien
gacactaggaatcggagcaactttccctcatgg

SEQ ID NO: 684619 - DNA, 33 bp, Homo sapien
tctgcgtgctgtgaataaaatatcttccatacc

SEQ ID NO: 684620 - DNA, 33 bp, Homo sapien
tctgcgtgctgtgaattaaatatcttccatacc

SEQ ID NO: 684621 - DNA, 33 bp, Homo sapien
aacagctgccaagacacatgggactggctgtag

SEQ ID NO: 684622 - DNA, 33 bp, Homo sapien
aacagctgccaagacagatgggactggctgtag

SEQ ID NO: 684623 - DNA, 33 bp, Homo sapien
gtaagtcaaaatacgtcaagcattgagaacaac

SEQ ID NO: 684624 - DNA, 33 bp, Homo sapien
gtaagtcaaaatacgtgaagcattgagaacaac

SEQ ID NO: 684625 - DNA, 33 bp, Homo sapien
atccctcttctcacgcaactctctccacttcca

SEQ ID NO: 684626 - DNA, 33 bp, Homo sapien
atccctcttctcacgccactctctccacttcca

SEQ ID NO: 684627 - DNA, 33 bp, Homo sapien
gcctgactgctgaggacggccgagattttcagg

SEQ ID NO: 684628 - DNA, 33 bp, Homo sapien
gcctgactgctgaggatggccgagattttcagg

SEQ ID NO: 684629 - DNA, 33 bp, Homo sapien
gcaaaaagaaacacacaggaccatagctggggt

SEQ ID NO: 684630 - DNA, 33 bp, Homo sapien
gcaaaaagaaacacacgggaccatagctggggt

SEQ ID NO: 684631 - DNA, 33 bp, Homo sapien
gctgattgagtccccacgtcctgcagcaaagcc

SEQ ID NO: 684632 - DNA, 33 bp, Homo sapien
gctgattgagtccccatgtcctgcagcaaagcc

SEQ ID NO: 684633 - DNA, 33 bp, Homo sapien
cgccctgctggtgacacacctgggtttttctgt

SEQ ID NO: 684634 - DNA, 33 bp, Homo sapien
cgccctgctggtgacagacctgggtttttctgt

SEQ ID NO: 684635 - DNA, 33 bp, Homo sapien
caccagcttacagtccactaggaccctagggat

SEQ ID NO: 684636 - DNA, 33 bp, Homo sapien
caccagcttacagtcctctaggaccctagggat

SEQ ID NO: 684637 - DNA, 33 bp, Homo sapien
taaccagcctgcaagacggttacggacaagctg

SEQ ID NO: 684638 - DNA, 33 bp, Homo sapien
taaccagcctgcaagatggttacggacaagctg

SEQ ID NO: 684639 - DNA, 33 bp, Homo sapien
gcccagaaatatccaaataacgaggagctgaat

SEQ ID NO: 684640 - DNA, 33 bp, Homo sapien
gcccagaaatatccaagtaacgaggagctgaat

SEQ ID NO: 684641 - DNA, 33 bp, Homo sapien
tgtccttgatgtcacaaagcccagtgtgagtcc

SEQ ID NO: 684642 - DNA, 33 bp, Homo sapien
tgtccttgatgtcacagagcccagtgtgagtcc

SEQ ID NO: 684643 - DNA, 33 bp, Homo sapien
actgcttgaaagagccagactacagtgtaaatg

SEQ ID NO: 684644 - DNA, 33 bp, Homo sapien
actgcttgaaagagccggactacagtgtaaatg

SEQ ID NO: 684645 - DNA, 33 bp, Homo sapien
agtgatctaacctgtacctcaatttccttaatc

SEQ ID NO: 684646 - DNA, 33 bp, Homo sapien
agtgatctaacctgtatctcaatttccttaatc

SEQ ID NO: 684647 - DNA, 33 bp, Homo sapien
gcctcccatctattcaaagttatctctctgctc

SEQ ID NO: 684648 - DNA, 33 bp, Homo sapien
gcctcccatctattcacagttatctctctgctc

SEQ ID NO: 684649 - DNA, 33 bp, Homo sapien
tcctgtctcactcagaagtaaatgcaactatct

SEQ ID NO: 684650 - DNA, 33 bp, Homo sapien
tcctgtctcactcagatgtaaatgcaactatct

SEQ ID NO: 684651 - DNA, 33 bp, Homo sapien
gttaaggatcctgagacggaaagaagatcctgg

SEQ ID NO: 684652 - DNA, 33 bp, Homo sapien
gttaaggatcctgagatggaaagaagatcctgg

SEQ ID NO: 684653 - DNA, 33 bp, Homo sapien
tctacaatcaactcccaaggcaaacactggagt

SEQ ID NO: 684654 - DNA, 33 bp, Homo sapien
tctacaatcaactcccgaggcaaacactggagt

SEQ ID NO: 684655 - DNA, 33 bp, Homo sapien
tggtattggtgcggaaataaacacaccaataga

SEQ ID NO: 684656 - DNA, 33 bp, Homo sapien
tggtattggtgcggaagtaaacacaccaataga

SEQ ID NO: 684657 - DNA, 33 bp, Homo sapien
acacaggttttcaggcgagacaaattccccaat

SEQ ID NO: 684658 - DNA, 33 bp, Homo sapien
acacaggttttcaggctagacaaattccccaat

SEQ ID NO: 684659 - DNA, 33 bp, Homo sapien
caggagatgggtttagcacctgataaaatatgg

SEQ ID NO: 684660 - DNA, 33 bp, Homo sapien
caggagatgggtttagtacctgataaaatatgg

SEQ ID NO: 684661 - DNA, 33 bp, Homo sapien
tgagcttcctggtggtcaaagagacagacacct

SEQ ID NO: 684662 - DNA, 33 bp, Homo sapien
tgagcttcctggtggtgaaagagacagacacct

SEQ ID NO: 684663 - DNA, 33 bp, Homo sapien
tgtgcaccctacaagacgctgtcatccatccct

SEQ ID NO: 684664 - DNA, 33 bp, Homo sapien
tgtgcaccctacaagatgctgtcatccatccct

SEQ ID NO: 684665 - DNA, 33 bp, Homo sapien
gcgtgtggagtgctccaaggtgtgaaaatgcca

SEQ ID NO: 684666 - DNA, 33 bp, Homo sapien
gcgtgtggagtgctccgaggtgtgaaaatgcca

SEQ ID NO: 684667 - DNA, 33 bp, Homo sapien
ccatgtcaaagtaaaaattgttttgatcacctt

SEQ ID NO: 684668 - DNA, 33 bp, Homo sapien
ccatgtcaaagtaaaagttgttttgatcacctt

SEQ ID NO: 684669 - DNA, 33 bp, Homo sapien
gtctgcactaagagaaaaatagaaagttcaact

SEQ ID NO: 684670 - DNA, 33 bp, Homo sapien
gtctgcactaagagaagaatagaaagttcaact

SEQ ID NO: 684671 - DNA, 33 bp, Homo sapien
ccaatttcaacctatcaacattaagtaaatgag

SEQ ID NO: 684672 - DNA, 33 bp, Homo sapien
ccaatttcaacctatcgacattaagtaaatgag

SEQ ID NO: 684673 - DNA, 33 bp, Homo sapien
tctccatctcaattggccacttaggaagcatac

SEQ ID NO: 684674 - DNA, 33 bp, Homo sapien
tctccatctcaattggtcacttaggaagcatac

SEQ ID NO: 684675 - DNA, 33 bp, Homo sapien
aatcctgggaagtaacactgaggctgttggtgc

SEQ ID NO: 684676 - DNA, 33 bp, Homo sapien
aatcctgggaagtaacgctgaggctgttggtgc

SEQ ID NO: 684677 - DNA, 33 bp, Homo sapien
atgcccagttcccaagaataaacagttgggtca

SEQ ID NO: 684678 - DNA, 33 bp, Homo sapien
atgcccagttcccaaggataaacagttgggtca

SEQ ID NO: 684679 - DNA, 33 bp, Homo sapien
acaggaaacacttgtaacagctcacggccatgg

SEQ ID NO: 684680 - DNA, 33 bp, Homo sapien
acaggaaacacttgtagcagctcacggccatgg

SEQ ID NO: 684681 - DNA, 33 bp, Homo sapien
agcttcagggctcagcaagggaaagtattagat

SEQ ID NO: 684682 - DNA, 33 bp, Homo sapien
agcttcagggctcagcgagggaaagtattagat

SEQ ID NO: 684683 - DNA, 33 bp, Homo sapien
tccacaggaactaagacgtggttgagaaacaaa

SEQ ID NO: 684684 - DNA, 33 bp, Homo sapien
tccacaggaactaagatgtggttgagaaacaaa

SEQ ID NO: 684685 - DNA, 33 bp, Homo sapien
agggcgcaggagggaacgcataacttgagagat

SEQ ID NO: 684686 - DNA, 33 bp, Homo sapien
agggcgcaggagggaatgcataacttgagagat

SEQ ID NO: 684687 - DNA, 33 bp, Homo sapien
ccttgtcccagacgaccgtcatccgctcctcta

SEQ ID NO: 684688 - DNA, 33 bp, Homo sapien
ccttgtcccagacgacggtcatccgctcctcta

SEQ ID NO: 684689 - DNA, 33 bp, Homo sapien
ccactttgagtaaaacaagggagacagagagat

SEQ ID NO: 684690 - DNA, 33 bp, Homo sapien
ccactttgagtaaaacgagggagacagagagat

SEQ ID NO: 684691 - DNA, 33 bp, Homo sapien
accctgggcctcatcaaccatgaaaagaaatca

SEQ ID NO: 684692 - DNA, 33 bp, Homo sapien
accctgggcctcatcacccatgaaaagaaatca

SEQ ID NO: 684693 - DNA, 33 bp, Homo sapien
agtaagacatcgtgtacgtgaggttcagaatct

SEQ ID NO: 684694 - DNA, 33 bp, Homo sapien
agtaagacatcgtgtatgtgaggttcagaatct

SEQ ID NO: 684695 - DNA, 33 bp, Homo sapien
tcatgtggatggaatacgctgctacacaagtca

SEQ ID NO: 684696 - DNA, 33 bp, Homo sapien
tcatgtggatggaatatgctgctacacaagtca

SEQ ID NO: 684697 - DNA, 33 bp, Homo sapien
cagtcaacaaaagacactcaaagagctgaaaat

SEQ ID NO: 684698 - DNA, 33 bp, Homo sapien
cagtcaacaaaagacattcaaagagctgaaaat

SEQ ID NO: 684699 - DNA, 33 bp, Homo sapien
ttatgaaatcattcaactgcctctataaggtag

SEQ ID NO: 684700 - DNA, 33 bp, Homo sapien
ttatgaaatcattcaagtgcctctataaggtag

SEQ ID NO: 684701 - DNA, 33 bp, Homo sapien
gcaagggaaactgacaatgaaacaaaactagga

SEQ ID NO: 684702 - DNA, 33 bp, Homo sapien
gcaagggaaactgacagtgaaacaaaactagga

SEQ ID NO: 684703 - DNA, 33 bp, Homo sapien
aaaagctcccccaaatcagaatgtccaaaacct

SEQ ID NO: 684704 - DNA, 33 bp, Homo sapien
aaaagctcccccaaatgagaatgtccaaaacct

SEQ ID NO: 684705 - DNA, 33 bp, Homo sapien
aaagaacatttacaataaactgtggcctattta

SEQ ID NO: 684706 - DNA, 33 bp, Homo sapien
aaagaacatttacaatcaactgtggcctattta

SEQ ID NO: 684707 - DNA, 33 bp, Homo sapien
tcttctaagcgcatcacggcttctctcattgaa

SEQ ID NO: 684708 - DNA, 33 bp, Homo sapien
tcttctaagcgcatcatggcttctctcattgaa

SEQ ID NO: 684709 - DNA, 33 bp, Homo sapien
gcccggattccaccctaagacaactgaattcac

SEQ ID NO: 684710 - DNA, 33 bp, Homo sapien
gcccggattccaccctgagacaactgaattcac

SEQ ID NO: 684711 - DNA, 33 bp, Homo sapien
ttcttgtgtcagcaccacttaaaagcaaaacgt

SEQ ID NO: 684712 - DNA, 33 bp, Homo sapien
ttcttgtgtcagcaccgcttaaaagcaaaacgt

SEQ ID NO: 684713 - DNA, 33 bp, Homo sapien
ttcctgaccacctcatcatcagcttccacgggt

SEQ ID NO: 684714 - DNA, 33 bp, Homo sapien
ttcctgaccacctcattatcagcttccacgggt

SEQ ID NO: 684715 - DNA, 33 bp, Homo sapien
taaggtggtatagttacgtcactttcactttta

SEQ ID NO: 684716 - DNA, 33 bp, Homo sapien
taaggtggtatagttatgtcactttcactttta

SEQ ID NO: 684717 - DNA, 33 bp, Homo sapien
cggctactatattgtcgcagaaaaaggccaaga

SEQ ID NO: 684718 - DNA, 33 bp, Homo sapien
cggctactatattgtctcagaaaaaggccaaga

SEQ ID NO: 684719 - DNA, 33 bp, Homo sapien
cacaagtccacaccaggaataaaggaagtcaaa

SEQ ID NO: 684720 - DNA, 33 bp, Homo sapien
cacaagtccacaccagtaataaaggaagtcaaa

SEQ ID NO: 684721 - DNA, 33 bp, Homo sapien
tagttgtttcgatgtgaactctggcaccagact

SEQ ID NO: 684722 - DNA, 33 bp, Homo sapien
tagttgtttcgatgtggactctggcaccagact

SEQ ID NO: 684723 - DNA, 33 bp, Homo sapien
aaaaattctccagagacgagaagtttcctcctg

SEQ ID NO: 684724 - DNA, 33 bp, Homo sapien
aaaaattctccagagatgagaagtttcctcctg

SEQ ID NO: 684725 - DNA, 33 bp, Homo sapien
agttcacatgcatacaactttttgtgcaggttg

SEQ ID NO: 684726 - DNA, 33 bp, Homo sapien
agttcacatgcatacagctttttgtgcaggttg

SEQ ID NO: 684727 - DNA, 33 bp, Homo sapien
aaccgtcagtgaaatacctaagtcgaaggaact

SEQ ID NO: 684728 - DNA, 33 bp, Homo sapien
aaccgtcagtgaaatatctaagtcgaaggaact

SEQ ID NO: 684729 - DNA, 33 bp, Homo sapien
caaatgtaataggaaaaaattggaatgaggaaa

SEQ ID NO: 684730 - DNA, 33 bp, Homo sapien
caaatgtaataggaaagaattggaatgaggaaa

SEQ ID NO: 684731 - DNA, 33 bp, Homo sapien
aaacaactgcctgaaaagatgcaaaccttaagt

SEQ ID NO: 684732 - DNA, 33 bp, Homo sapien
aaacaactgcctgaaaggatgcaaaccttaagt

SEQ ID NO: 684733 - DNA, 33 bp, Homo sapien
gagagacctttgaaagacaggagcctagacctt

SEQ ID NO: 684734 - DNA, 33 bp, Homo sapien
gagagacctttgaaaggcaggagcctagacctt

SEQ ID NO: 684735 - DNA, 33 bp, Homo sapien
ggagttgttttgactacggtcgtgcctccctgc

SEQ ID NO: 684736 - DNA, 33 bp, Homo sapien
ggagttgttttgactatggtcgtgcctccctgc

SEQ ID NO: 684737 - DNA, 33 bp, Homo sapien
caatcttttctccacaaggatccaaaatggtct

SEQ ID NO: 684738 - DNA, 33 bp, Homo sapien
caatcttttctccacagggatccaaaatggtct

SEQ ID NO: 684739 - DNA, 33 bp, Homo sapien
ggatacttggagcagaaatgagcattctagctg

SEQ ID NO: 684740 - DNA, 33 bp, Homo sapien
ggatacttggagcagagatgagcattctagctg

SEQ ID NO: 684741 - DNA, 33 bp, Homo sapien
gccaggcatctaccagacactggagaaagggtt

SEQ ID NO: 684742 - DNA, 33 bp, Homo sapien
gccaggcatctaccaggcactggagaaagggtt

SEQ ID NO: 684743 - DNA, 33 bp, Homo sapien
aatggggtctcagcagaaaagaggtgactgagg

SEQ ID NO: 684744 - DNA, 33 bp, Homo sapien
aatggggtctcagcaggaaagaggtgactgagg

SEQ ID NO: 684745 - DNA, 33 bp, Homo sapien
aacttagtgtgaaatacctaaaccaagtgactt

SEQ ID NO: 684746 - DNA, 33 bp, Homo sapien
aacttagtgtgaaatagctaaaccaagtgactt

SEQ ID NO: 684747 - DNA, 33 bp, Homo sapien
aaaacaatttgtcacaaggactgtcagcaaaca

SEQ ID NO: 684748 - DNA, 33 bp, Homo sapien
aaaacaatttgtcacacggactgtcagcaaaca

SEQ ID NO: 684749 - DNA, 33 bp, Homo sapien
ctgtattttgggacaacgtcattagctttgagc

SEQ ID NO: 684750 - DNA, 33 bp, Homo sapien
ctgtattttgggacaatgtcattagctttgagc

SEQ ID NO: 684751 - DNA, 33 bp, Homo sapien
atttatagaggatatccactctacaggaacgcc

SEQ ID NO: 684752 - DNA, 33 bp, Homo sapien
atttatagaggatatctactctacaggaacgcc

SEQ ID NO: 684753 - DNA, 33 bp, Homo sapien
cactttctcttatcaccgggaaggagaaaattt

SEQ ID NO: 684754 - DNA, 33 bp, Homo sapien
cactttctcttatcactgggaaggagaaaattt

SEQ ID NO: 684755 - DNA, 33 bp, Homo sapien
tataaagtgggcctgaggatagcttgttgcagg

SEQ ID NO: 684756 - DNA, 33 bp, Homo sapien
tataaagtgggcctgatgatagcttgttgcagg

SEQ ID NO: 684757 - DNA, 33 bp, Homo sapien
attctaaatgccttcactaaatgtattagctct

SEQ ID NO: 684758 - DNA, 33 bp, Homo sapien
attctaaatgccttcattaaatgtattagctct

SEQ ID NO: 684759 - DNA, 33 bp, Homo sapien
tattgtacctgtgatcacttcacgaccaacatc

SEQ ID NO: 684760 - DNA, 33 bp, Homo sapien
tattgtacctgtgatcccttcacgaccaacatc

SEQ ID NO: 684761 - DNA, 33 bp, Homo sapien
gatgaggctaatgatacagagggcgaaacatct

SEQ ID NO: 684762 - DNA, 33 bp, Homo sapien
gatgaggctaatgatatagagggcgaaacatct

SEQ ID NO: 684763 - DNA, 33 bp, Homo sapien
tgtccagtcgtcatgaacatttgggaacagagc

SEQ ID NO: 684764 - DNA, 33 bp, Homo sapien
tgtccagtcgtcatgagcatttgggaacagagc

SEQ ID NO: 684765 - DNA, 33 bp, Homo sapien
cctctatttttgattccaggcactataataaat

SEQ ID NO: 684766 - DNA, 33 bp, Homo sapien
cctctatttttgattctaggcactataataaat

SEQ ID NO: 684767 - DNA, 33 bp, Homo sapien
ttgttgggacaattcaatgaaatcatgcatatg

SEQ ID NO: 684768 - DNA, 33 bp, Homo sapien
ttgttgggacaattcagtgaaatcatgcatatg

SEQ ID NO: 684769 - DNA, 33 bp, Homo sapien
tgggaccaaaactgaaaacagaagagaagccaa

SEQ ID NO: 684770 - DNA, 33 bp, Homo sapien
tgggaccaaaactgaatacagaagagaagccaa

SEQ ID NO: 684771 - DNA, 33 bp, Homo sapien
ctggtgacttttagtggatgctggacatcatgt

SEQ ID NO: 684772 - DNA, 33 bp, Homo sapien
ctggtgacttttagtgtatgctggacatcatgt

SEQ ID NO: 684773 - DNA, 33 bp, Homo sapien
cattaaaattagatcacagaaggagactgaggg

SEQ ID NO: 684774 - DNA, 33 bp, Homo sapien
cattaaaattagatcatagaaggagactgaggg

SEQ ID NO: 684775 - DNA, 33 bp, Homo sapien
aagaaatagaacacaaccgactcccgaacagcc

SEQ ID NO: 684776 - DNA, 33 bp, Homo sapien
aagaaatagaacacaatcgactcccgaacagcc

SEQ ID NO: 684777 - DNA, 33 bp, Homo sapien
tttctgggtgtatatcacttggataatttgcta

SEQ ID NO: 684778 - DNA, 33 bp, Homo sapien
tttctgggtgtatatcgcttggataatttgcta

SEQ ID NO: 684779 - DNA, 33 bp, Homo sapien
gggtccactccacagacggaaggtcccgtcaga

SEQ ID NO: 684780 - DNA, 33 bp, Homo sapien
gggtccactccacagatggaaggtcccgtcaga

SEQ ID NO: 684781 - DNA, 33 bp, Homo sapien
ggccattttttgactcaattcataggcagaact

SEQ ID NO: 684782 - DNA, 33 bp, Homo sapien
ggccattttttgactcgattcataggcagaact

SEQ ID NO: 684783 - DNA, 33 bp, Homo sapien
aatgaagcttgtatgacgctgaattacaatcac

SEQ ID NO: 684784 - DNA, 33 bp, Homo sapien
aatgaagcttgtatgatgctgaattacaatcac

SEQ ID NO: 684785 - DNA, 33 bp, Homo sapien
caatccttaccctttacggtgctcaggaaatgg

SEQ ID NO: 684786 - DNA, 33 bp, Homo sapien
caatccttaccctttatggtgctcaggaaatgg

SEQ ID NO: 684787 - DNA, 33 bp, Homo sapien
aggaggcaaacgtatacgcatcgtaggctctca

SEQ ID NO: 684788 - DNA, 33 bp, Homo sapien
aggaggcaaacgtatatgcatcgtaggctctca

SEQ ID NO: 684789 - DNA, 33 bp, Homo sapien
tattaacacatagaaactgacctcattctttta

SEQ ID NO: 684790 - DNA, 33 bp, Homo sapien
tattaacacatagaaagtgacctcattctttta

SEQ ID NO: 684791 - DNA, 33 bp, Homo sapien
taaggcaaattgcttgaaggataacctaaacat

SEQ ID NO: 684792 - DNA, 33 bp, Homo sapien
taaggcaaattgcttggaggataacctaaacat

SEQ ID NO: 684793 - DNA, 33 bp, Homo sapien
gacaaatgtataactgaaaaactccagagatgc

SEQ ID NO: 684794 - DNA, 33 bp, Homo sapien
gacaaatgtataactggaaaactccagagatgc

SEQ ID NO: 684795 - DNA, 33 bp, Homo sapien
tttaatttctaaatcaatacaacagggctagct

SEQ ID NO: 684796 - DNA, 33 bp, Homo sapien
tttaatttctaaatcagtacaacagggctagct

SEQ ID NO: 684797 - DNA, 33 bp, Homo sapien
gaactccctgcggtccaatgatgcacccagaca

SEQ ID NO: 684798 - DNA, 33 bp, Homo sapien
gaactccctgcggtccgatgatgcacccagaca

SEQ ID NO: 684799 - DNA, 33 bp, Homo sapien
tatctgtccacccaatcatgaaacatttattaa

SEQ ID NO: 684800 - DNA, 33 bp, Homo sapien
tatctgtccacccaatgatgaaacatttattaa

SEQ ID NO: 684801 - DNA, 33 bp, Homo sapien
gaatgaatgcactcgtaaatctaaaacatctac

SEQ ID NO: 684802 - DNA, 33 bp, Homo sapien
gaatgaatgcactcgtcaatctaaaacatctac

SEQ ID NO: 684803 - DNA, 33 bp, Homo sapien
cctggtttttcaagggacatggttttagactgc

SEQ ID NO: 684804 - DNA, 33 bp, Homo sapien
cctggtttttcaagggccatggttttagactgc

SEQ ID NO: 684805 - DNA, 33 bp, Homo sapien
agagaccgtgattgcaagaacccgctgaacaaa

SEQ ID NO: 684806 - DNA, 33 bp, Homo sapien
agagaccgtgattgcaggaacccgctgaacaaa

SEQ ID NO: 684807 - DNA, 33 bp, Homo sapien
ttatgtggcagatgacagcttatggtctcttct

SEQ ID NO: 684808 - DNA, 33 bp, Homo sapien
ttatgtggcagatgacggcttatggtctcttct

SEQ ID NO: 684809 - DNA, 33 bp, Homo sapien
caaccaaggagtgaggccccgatgtaattccca

SEQ ID NO: 684810 - DNA, 33 bp, Homo sapien
caaccaaggagtgaggtcccgatgtaattccca

SEQ ID NO: 684811 - DNA, 33 bp, Homo sapien
aagacaggcagggaaccccaaccaaaggagacc

SEQ ID NO: 684812 - DNA, 33 bp, Homo sapien
aagacaggcagggaactccaaccaaaggagacc

SEQ ID NO: 684813 - DNA, 33 bp, Homo sapien
ctcactgaacgttgtccataggcccttggaaac

SEQ ID NO: 684814 - DNA, 33 bp, Homo sapien
ctcactgaacgttgtctataggcccttggaaac

SEQ ID NO: 684815 - DNA, 33 bp, Homo sapien
aggcaaacagtgcccaaagcaggaagttctaca

SEQ ID NO: 684816 - DNA, 33 bp, Homo sapien
aggcaaacagtgcccacagcaggaagttctaca

SEQ ID NO: 684817 - DNA, 33 bp, Homo sapien
gttctacagagagaaacgaatgcggagaaccta

SEQ ID NO: 684818 - DNA, 33 bp, Homo sapien
gttctacagagagaaatgaatgcggagaaccta

SEQ ID NO: 684819 - DNA, 33 bp, Homo sapien
atgctgacttgtaaaaagagaggctttcattca

SEQ ID NO: 684820 - DNA, 33 bp, Homo sapien
atgctgacttgtaaaacgagaggctttcattca

SEQ ID NO: 684821 - DNA, 33 bp, Homo sapien
aaatgtgagaacataaccaaatatcaaactggc

SEQ ID NO: 684822 - DNA, 33 bp, Homo sapien
aaatgtgagaacataagcaaatatcaaactggc

SEQ ID NO: 684823 - DNA, 33 bp, Homo sapien
atttccatagtggtcccgagaccaggtcctgct

SEQ ID NO: 684824 - DNA, 33 bp, Homo sapien
atttccatagtggtcctgagaccaggtcctgct

SEQ ID NO: 684825 - DNA, 33 bp, Homo sapien
gccccttgcaaattacaatcaaggtgcaacgca

SEQ ID NO: 684826 - DNA, 33 bp, Homo sapien
gccccttgcaaattacgatcaaggtgcaacgca

SEQ ID NO: 684827 - DNA, 33 bp, Homo sapien
ctgctattgtctgaacggtaattgaactataag

SEQ ID NO: 684828 - DNA, 33 bp, Homo sapien
ctgctattgtctgaactgtaattgaactataag

SEQ ID NO: 684829 - DNA, 33 bp, Homo sapien
acaatagcagcatacaaataaatagaaggggca

SEQ ID NO: 684830 - DNA, 33 bp, Homo sapien
acaatagcagcatacacataaatagaaggggca

SEQ ID NO: 684831 - DNA, 33 bp, Homo sapien
caaggcttcgactcacagccaactattagaaag

SEQ ID NO: 684832 - DNA, 33 bp, Homo sapien
caaggcttcgactcacggccaactattagaaag

SEQ ID NO: 684833 - DNA, 33 bp, Homo sapien
cgtgccccacagagaaactgaaccatgagacat

SEQ ID NO: 684834 - DNA, 33 bp, Homo sapien
cgtgccccacagagaacctgaaccatgagacat

SEQ ID NO: 684835 - DNA, 33 bp, Homo sapien
gagggtatctggtgccacttttctggacactgt

SEQ ID NO: 684836 - DNA, 33 bp, Homo sapien
gagggtatctggtgccgcttttctggacactgt

SEQ ID NO: 684837 - DNA, 33 bp, Homo sapien
aagacgtagatagaaacttatgtgtaaaaaatg

SEQ ID NO: 684838 - DNA, 33 bp, Homo sapien
aagacgtagatagaaatttatgtgtaaaaaatg

SEQ ID NO: 684839 - DNA, 33 bp, Homo sapien
gtctgtatttactggacaaaagagtttgaacaa

SEQ ID NO: 684840 - DNA, 33 bp, Homo sapien
gtctgtatttactggataaaagagtttgaacaa

SEQ ID NO: 684841 - DNA, 33 bp, Homo sapien
ggatgcaggcggtgtcacttcccacactgatct

SEQ ID NO: 684842 - DNA, 33 bp, Homo sapien
ggatgcaggcggtgtcgcttcccacactgatct

SEQ ID NO: 684843 - DNA, 33 bp, Homo sapien
attgtgcttttgggaacgtgaacgaagtggaga

SEQ ID NO: 684844 - DNA, 33 bp, Homo sapien
attgtgcttttgggaatgtgaacgaagtggaga

SEQ ID NO: 684845 - DNA, 33 bp, Homo sapien
tttctgttaattagacagacagaatggagtcat

SEQ ID NO: 684846 - DNA, 33 bp, Homo sapien
tttctgttaattagacggacagaatggagtcat

SEQ ID NO: 684847 - DNA, 33 bp, Homo sapien
caagcacatggaatgcacagaagaggccctggt

SEQ ID NO: 684848 - DNA, 33 bp, Homo sapien
caagcacatggaatgcgcagaagaggccctggt

SEQ ID NO: 684849 - DNA, 33 bp, Homo sapien
gacacagcagtaaggaaccaatgcataaggaat

SEQ ID NO: 684850 - DNA, 33 bp, Homo sapien
gacacagcagtaaggacccaatgcataaggaat

SEQ ID NO: 684851 - DNA, 33 bp, Homo sapien
gcagaaatccaggtgccagatgataaggctttt

SEQ ID NO: 684852 - DNA, 33 bp, Homo sapien
gcagaaatccaggtgcgagatgataaggctttt

SEQ ID NO: 684853 - DNA, 33 bp, Homo sapien
aatggcttctctaaaccgtggtctgcatcctcc

SEQ ID NO: 684854 - DNA, 33 bp, Homo sapien
aatggcttctctaaactgtggtctgcatcctcc

SEQ ID NO: 684855 - DNA, 33 bp, Homo sapien
ggacatcctttctcacactgggagagacacacc

SEQ ID NO: 684856 - DNA, 33 bp, Homo sapien
ggacatcctttctcacgctgggagagacacacc

SEQ ID NO: 684857 - DNA, 33 bp, Homo sapien
gggtaagtcactgcccactaggattccacaatg

SEQ ID NO: 684858 - DNA, 33 bp, Homo sapien
gggtaagtcactgcccgctaggattccacaatg

SEQ ID NO: 684859 - DNA, 33 bp, Homo sapien
tctgctgcagagtcccaagaacaggagtgcgcc

SEQ ID NO: 684860 - DNA, 33 bp, Homo sapien
tctgctgcagagtcccgagaacaggagtgcgcc

SEQ ID NO: 684861 - DNA, 33 bp, Homo sapien
gcaaaactaatttttacgtaatggcagttgata

SEQ ID NO: 684862 - DNA, 33 bp, Homo sapien
gcaaaactaatttttatgtaatggcagttgata

SEQ ID NO: 684863 - DNA, 33 bp, Homo sapien
ctgtcattaagattgaagatggagaccctcttt

SEQ ID NO: 684864 - DNA, 33 bp, Homo sapien
ctgtcattaagattgatgatggagaccctcttt

SEQ ID NO: 684865 - DNA, 33 bp, Homo sapien
ctaagaaggctccacaaaacttcttcaaagtac

SEQ ID NO: 684866 - DNA, 33 bp, Homo sapien
ctaagaaggctccacacaacttcttcaaagtac

SEQ ID NO: 684867 - DNA, 33 bp, Homo sapien
ttgtccagccttcctacgggggagtgtcagaaa

SEQ ID NO: 684868 - DNA, 33 bp, Homo sapien
ttgtccagccttcctatgggggagtgtcagaaa

SEQ ID NO: 684869 - DNA, 33 bp, Homo sapien
agagggcccttcaccccaattctctgctgtggc

SEQ ID NO: 684870 - DNA, 33 bp, Homo sapien
agagggcccttcacccgaattctctgctgtggc

SEQ ID NO: 684871 - DNA, 33 bp, Homo sapien
gttctttcctgaactccatgtcaattaggatta

SEQ ID NO: 684872 - DNA, 33 bp, Homo sapien
gttctttcctgaactctatgtcaattaggatta

SEQ ID NO: 684873 - DNA, 33 bp, Homo sapien
ggcatctagaaacggacggagggccaatgcaga

SEQ ID NO: 684874 - DNA, 33 bp, Homo sapien
ggcatctagaaacggatggagggccaatgcaga

SEQ ID NO: 684875 - DNA, 33 bp, Homo sapien
taaactagagcatcgccgccccaggttgaccat

SEQ ID NO: 684876 - DNA, 33 bp, Homo sapien
taaactagagcatcgctgccccaggttgaccat

SEQ ID NO: 684877 - DNA, 33 bp, Homo sapien
gcctgaagcttgatgcaaaagggccactgagaa

SEQ ID NO: 684878 - DNA, 33 bp, Homo sapien
gcctgaagcttgatgcgaaagggccactgagaa

SEQ ID NO: 684879 - DNA, 33 bp, Homo sapien
caggggcatgatcgtaagtcacagtagcctcaa

SEQ ID NO: 684880 - DNA, 33 bp, Homo sapien
caggggcatgatcgtaggtcacagtagcctcaa

SEQ ID NO: 684881 - DNA, 33 bp, Homo sapien
gcaacagcaagggaaaaatataaattgcaaata

SEQ ID NO: 684882 - DNA, 33 bp, Homo sapien
gcaacagcaagggaaacatataaattgcaaata

SEQ ID NO: 684883 - DNA, 33 bp, Homo sapien
tgcatgagttcctatacgatgaactgcaaccta

SEQ ID NO: 684884 - DNA, 33 bp, Homo sapien
tgcatgagttcctatatgatgaactgcaaccta

SEQ ID NO: 684885 - DNA, 33 bp, Homo sapien
cagaaaaggtttgcccaaaagaggtgtggccca

SEQ ID NO: 684886 - DNA, 33 bp, Homo sapien
cagaaaaggtttgccccaaagaggtgtggccca

SEQ ID NO: 684887 - DNA, 33 bp, Homo sapien
tgtgtgaattagaatgaactgatatggttaggc

SEQ ID NO: 684888 - DNA, 33 bp, Homo sapien
tgtgtgaattagaatggactgatatggttaggc

SEQ ID NO: 684889 - DNA, 33 bp, Homo sapien
gatgcagataaaccacggtggatgcccagaggc

SEQ ID NO: 684890 - DNA, 33 bp, Homo sapien
gatgcagataaaccactgtggatgcccagaggc

SEQ ID NO: 684891 - DNA, 33 bp, Homo sapien
acggatgtcctaacaacacgaggaaaataggac

SEQ ID NO: 684892 - DNA, 33 bp, Homo sapien
acggatgtcctaacaatacgaggaaaataggac

SEQ ID NO: 684893 - DNA, 33 bp, Homo sapien
gcgcatgggattccacggaccatgccattgtac

SEQ ID NO: 684894 - DNA, 33 bp, Homo sapien
gcgcatgggattccactgaccatgccattgtac

SEQ ID NO: 684895 - DNA, 33 bp, Homo sapien
aaaccaaatattttgacgatgttaactacagac

SEQ ID NO: 684896 - DNA, 33 bp, Homo sapien
aaaccaaatattttgatgatgttaactacagac

SEQ ID NO: 684897 - DNA, 33 bp, Homo sapien
ttactgttgaggccaaagaattttaactcctaa

SEQ ID NO: 684898 - DNA, 33 bp, Homo sapien
ttactgttgaggccaaggaattttaactcctaa

SEQ ID NO: 684899 - DNA, 33 bp, Homo sapien
acgagagtccagttagaaggtatgtgttaccca

SEQ ID NO: 684900 - DNA, 33 bp, Homo sapien
acgagagtccagttagcaggtatgtgttaccca

SEQ ID NO: 684901 - DNA, 33 bp, Homo sapien
ctgggatttcgagtgcaagttggtttcaggtcc

SEQ ID NO: 684902 - DNA, 33 bp, Homo sapien
ctgggatttcgagtgcgagttggtttcaggtcc

SEQ ID NO: 684903 - DNA, 33 bp, Homo sapien
tgtccacggttcatccacctctacgtccccagg

SEQ ID NO: 684904 - DNA, 33 bp, Homo sapien
tgtccacggttcatccgcctctacgtccccagg

SEQ ID NO: 684905 - DNA, 33 bp, Homo sapien
tgtttacggagaggcagatctaacctgctcagt

SEQ ID NO: 684906 - DNA, 33 bp, Homo sapien
tgtttacggagaggcatatctaacctgctcagt

SEQ ID NO: 684907 - DNA, 33 bp, Homo sapien
gtagtatccgcagggcaaagttgggatgtatgg

SEQ ID NO: 684908 - DNA, 33 bp, Homo sapien
gtagtatccgcagggcgaagttgggatgtatgg

SEQ ID NO: 684909 - DNA, 33 bp, Homo sapien
ccaagagtgaatgagaatagcactttcccagaa

SEQ ID NO: 684910 - DNA, 33 bp, Homo sapien
ccaagagtgaatgagagtagcactttcccagaa

SEQ ID NO: 684911 - DNA, 33 bp, Homo sapien
catcagttacatctcaaacctgacattttgact

SEQ ID NO: 684912 - DNA, 33 bp, Homo sapien
catcagttacatctcatacctgacattttgact

SEQ ID NO: 684913 - DNA, 33 bp, Homo sapien
aaaactgaagtgcaagccagacgggatcaccct

SEQ ID NO: 684914 - DNA, 33 bp, Homo sapien
aaaactgaagtgcaaggcagacgggatcaccct

SEQ ID NO: 684915 - DNA, 33 bp, Homo sapien
agacttttattctgcaacttctccacatctctt

SEQ ID NO: 684916 - DNA, 33 bp, Homo sapien
agacttttattctgcagcttctccacatctctt

SEQ ID NO: 684917 - DNA, 33 bp, Homo sapien
atatcagaaaaccaccaacttcaattccccacc

SEQ ID NO: 684918 - DNA, 33 bp, Homo sapien
atatcagaaaaccacctacttcaattccccacc

SEQ ID NO: 684919 - DNA, 33 bp, Homo sapien
taagataaatgtgagaataaaccatcacttctc

SEQ ID NO: 684920 - DNA, 33 bp, Homo sapien
taagataaatgtgagactaaaccatcacttctc

SEQ ID NO: 684921 - DNA, 33 bp, Homo sapien
tctgaatctagccccaatgacttcattcactca

SEQ ID NO: 684922 - DNA, 33 bp, Homo sapien
tctgaatctagccccagtgacttcattcactca

SEQ ID NO: 684923 - DNA, 33 bp, Homo sapien
tgcccacagcagcttacgttctgggggagggga

SEQ ID NO: 684924 - DNA, 33 bp, Homo sapien
tgcccacagcagcttatgttctgggggagggga

SEQ ID NO: 684925 - DNA, 33 bp, Homo sapien
aagcggctgcccaccacagcttactttctagca

SEQ ID NO: 684926 - DNA, 33 bp, Homo sapien
aagcggctgcccaccagagcttactttctagca

SEQ ID NO: 684927 - DNA, 33 bp, Homo sapien
ttatcagattctcaaacatgtcccgttcacagc

SEQ ID NO: 684928 - DNA, 33 bp, Homo sapien
ttatcagattctcaaatatgtcccgttcacagc

SEQ ID NO: 684929 - DNA, 33 bp, Homo sapien
ggctttgaaggcttccgccccgaagggactctc

SEQ ID NO: 684930 - DNA, 33 bp, Homo sapien
ggctttgaaggcttcctccccgaagggactctc

SEQ ID NO: 684931 - DNA, 33 bp, Homo sapien
tgaaaggaggggagtaaatattgcgagctgggc

SEQ ID NO: 684932 - DNA, 33 bp, Homo sapien
tgaaaggaggggagtagatattgcgagctgggc

SEQ ID NO: 684933 - DNA, 33 bp, Homo sapien
aaggtgaactctatgacgacttggcactttgtc

SEQ ID NO: 684934 - DNA, 33 bp, Homo sapien
aaggtgaactctatgatgacttggcactttgtc

SEQ ID NO: 684935 - DNA, 33 bp, Homo sapien
aggagaatccagagaaatgcccaaagattatgc

SEQ ID NO: 684936 - DNA, 33 bp, Homo sapien
aggagaatccagagaactgcccaaagattatgc

SEQ ID NO: 684937 - DNA, 33 bp, Homo sapien
agagctcctttaccccaaagctgctaactggga

SEQ ID NO: 684938 - DNA, 33 bp, Homo sapien
agagctcctttacccccaagctgctaactggga

SEQ ID NO: 684939 - DNA, 33 bp, Homo sapien
tagagaataatcaagacgtgaccttaagaacct

SEQ ID NO: 684940 - DNA, 33 bp, Homo sapien
tagagaataatcaagatgtgaccttaagaacct

SEQ ID NO: 684941 - DNA, 33 bp, Homo sapien
gggagctcagtcaccactgatgaacccagatat

SEQ ID NO: 684942 - DNA, 33 bp, Homo sapien
gggagctcagtcaccattgatgaacccagatat

SEQ ID NO: 684943 - DNA, 33 bp, Homo sapien
aatgttgatattcatgaagttttgagagcagag

SEQ ID NO: 684944 - DNA, 33 bp, Homo sapien
aatgttgatattcatgcagttttgagagcagag

SEQ ID NO: 684945 - DNA, 33 bp, Homo sapien
tcactgaaacccacgagatagggactatgatcc

SEQ ID NO: 684946 - DNA, 33 bp, Homo sapien
tcactgaaacccacgatatagggactatgatcc

SEQ ID NO: 684947 - DNA, 33 bp, Homo sapien
aagggaaaggaatcacagtgacaggcctggcac

SEQ ID NO: 684948 - DNA, 33 bp, Homo sapien
aagggaaaggaatcacggtgacaggcctggcac

SEQ ID NO: 684949 - DNA, 33 bp, Homo sapien
acaccagacgtagcacaagtctcctggatattc

SEQ ID NO: 684950 - DNA, 33 bp, Homo sapien
acaccagacgtagcacgagtctcctggatattc

SEQ ID NO: 684951 - DNA, 33 bp, Homo sapien
agacattaccaagaacagttcatttcctttcaa

SEQ ID NO: 684952 - DNA, 33 bp, Homo sapien
agacattaccaagaactgttcatttcctttcaa

SEQ ID NO: 684953 - DNA, 33 bp, Homo sapien
tgttttttgcctaacacctttattgagatctag

SEQ ID NO: 684954 - DNA, 33 bp, Homo sapien
tgttttttgcctaacagctttattgagatctag

SEQ ID NO: 684955 - DNA, 33 bp, Homo sapien
taatacttccagtctcaatgtcagcagacacgc

SEQ ID NO: 684956 - DNA, 33 bp, Homo sapien
taatacttccagtctcgatgtcagcagacacgc

SEQ ID NO: 684957 - DNA, 33 bp, Homo sapien
tgagtcccacttctgcactatgggtttaaagaa

SEQ ID NO: 684958 - DNA, 33 bp, Homo sapien
tgagtcccacttctgcgctatgggtttaaagaa

SEQ ID NO: 684959 - DNA, 33 bp, Homo sapien
cacagttacttctcacaactttctcattttgtg

SEQ ID NO: 684960 - DNA, 33 bp, Homo sapien
cacagttacttctcacgactttctcattttgtg

SEQ ID NO: 684961 - DNA, 33 bp, Homo sapien
cgcatggctctgttacacttctcttcctatagg

SEQ ID NO: 684962 - DNA, 33 bp, Homo sapien
cgcatggctctgttacgcttctcttcctatagg

SEQ ID NO: 684963 - DNA, 33 bp, Homo sapien
catacaggatctcgctaacactcagtacagtcc

SEQ ID NO: 684964 - DNA, 33 bp, Homo sapien
catacaggatctcgctgacactcagtacagtcc

SEQ ID NO: 684965 - DNA, 33 bp, Homo sapien
aggaagccactgcaaacagggcctgcagctgcc

SEQ ID NO: 684966 - DNA, 33 bp, Homo sapien
aggaagccactgcaaatagggcctgcagctgcc

SEQ ID NO: 684967 - DNA, 33 bp, Homo sapien
cctgacctcacagccagattgtactttaaagtt

SEQ ID NO: 684968 - DNA, 33 bp, Homo sapien
cctgacctcacagccatattgtactttaaagtt

SEQ ID NO: 684969 - DNA, 33 bp, Homo sapien
acagtgtctaaaatgacaaggccaccagcaaaa

SEQ ID NO: 684970 - DNA, 33 bp, Homo sapien
acagtgtctaaaatgagaaggccaccagcaaaa

SEQ ID NO: 684971 - DNA, 33 bp, Homo sapien
tcgagcgagactcatacaaggtgtcaggacttg

SEQ ID NO: 684972 - DNA, 33 bp, Homo sapien
tcgagcgagactcatagaaggtgtcaggacttg

SEQ ID NO: 684973 - DNA, 33 bp, Homo sapien
ctcaagtgctcactcactgaataaaccagaggg

SEQ ID NO: 684974 - DNA, 33 bp, Homo sapien
ctcaagtgctcactcattgaataaaccagaggg

SEQ ID NO: 684975 - DNA, 33 bp, Homo sapien
aacgggagcatgttgacggcagactcggcgctg

SEQ ID NO: 684976 - DNA, 33 bp, Homo sapien
aacgggagcatgttgatggcagactcggcgctg

SEQ ID NO: 684977 - DNA, 33 bp, Homo sapien
ccacggtaatctcaaacttgtagcggtcgaact

SEQ ID NO: 684978 - DNA, 33 bp, Homo sapien
ccacggtaatctcaaatttgtagcggtcgaact

SEQ ID NO: 684979 - DNA, 33 bp, Homo sapien
ccagcagcgagttcaaaagcgtgctgctcagcc

SEQ ID NO: 684980 - DNA, 33 bp, Homo sapien
ccagcagcgagttcaagagcgtgctgctcagcc

SEQ ID NO: 684981 - DNA, 33 bp, Homo sapien
cctttgtcggggtccacgcaatctacacatggt

SEQ ID NO: 684982 - DNA, 33 bp, Homo sapien
cctttgtcggggtccatgcaatctacacatggt

SEQ ID NO: 684983 - DNA, 33 bp, Homo sapien
tggcacacccatgtcactcagaaaggtcaggct

SEQ ID NO: 684984 - DNA, 33 bp, Homo sapien
tggcacacccatgtcattcagaaaggtcaggct

SEQ ID NO: 684985 - DNA, 33 bp, Homo sapien
caacccgagggtgtcaacattactggctccagc

SEQ ID NO: 684986 - DNA, 33 bp, Homo sapien
caacccgagggtgtcaccattactggctccagc

SEQ ID NO: 684987 - DNA, 33 bp, Homo sapien
tgcagacagcctatcaggaaactttgctttgtg

SEQ ID NO: 684988 - DNA, 33 bp, Homo sapien
tgcagacagcctatcatgaaactttgctttgtg

SEQ ID NO: 684989 - DNA, 33 bp, Homo sapien
ctccggagtgacagaacttataggatctatgtg

SEQ ID NO: 684990 - DNA, 33 bp, Homo sapien
ctccggagtgacagaagttataggatctatgtg

SEQ ID NO: 684991 - DNA, 33 bp, Homo sapien
tccactgatacctcaaagcaaagggtggtgaac

SEQ ID NO: 684992 - DNA, 33 bp, Homo sapien
tccactgatacctcaaggcaaagggtggtgaac

SEQ ID NO: 684993 - DNA, 33 bp, Homo sapien
tgaccttcccttcgtaagtcgcattggagttgt

SEQ ID NO: 684994 - DNA, 33 bp, Homo sapien
tgaccttcccttcgtacgtcgcattggagttgt

SEQ ID NO: 684995 - DNA, 33 bp, Homo sapien
ggaagcgttcaccgccacaaatcataaaatgga

SEQ ID NO: 684996 - DNA, 33 bp, Homo sapien
ggaagcgttcaccgccgcaaatcataaaatgga

SEQ ID NO: 684997 - DNA, 33 bp, Homo sapien
gtcttcacctacataccgggcatatgaaagcca

SEQ ID NO: 684998 - DNA, 33 bp, Homo sapien
gtcttcacctacatactgggcatatgaaagcca

SEQ ID NO: 684999 - DNA, 33 bp, Homo sapien
tggtccctaaaggcaacggtttgctgcccacct

SEQ ID NO: 685000 - DNA, 33 bp, Homo sapien
tggtccctaaaggcaatggtttgctgcccacct

SEQ ID NO: 685001 - DNA, 33 bp, Homo sapien
ctgcggttattatttcacccaacaccgggccag

SEQ ID NO: 685002 - DNA, 33 bp, Homo sapien
ctgcggttattatttcgcccaacaccgggccag

SEQ ID NO: 685003 - DNA, 33 bp, Homo sapien
gaatccagccttaccaatcacacctgggccacc

SEQ ID NO: 685004 - DNA, 33 bp, Homo sapien
gaatccagccttaccactcacacctgggccacc

SEQ ID NO: 685005 - DNA, 33 bp, Homo sapien
tttgcgtcatcaggacactcattctcgttgtat

SEQ ID NO: 685006 - DNA, 33 bp, Homo sapien
tttgcgtcatcaggacgctcattctcgttgtat

SEQ ID NO: 685007 - DNA, 33 bp, Homo sapien
gttaagatgcaggaataagaatgtgaggacaca

SEQ ID NO: 685008 - DNA, 33 bp, Homo sapien
gttaagatgcaggaatgagaatgtgaggacaca

SEQ ID NO: 685009 - DNA, 33 bp, Homo sapien
agctccatgatcgatcaatggcctaagagagac

SEQ ID NO: 685010 - DNA, 33 bp, Homo sapien
agctccatgatcgatcgatggcctaagagagac

SEQ ID NO: 685011 - DNA, 33 bp, Homo sapien
tgggaggttgttttgcgatgagcatggctgtca

SEQ ID NO: 685012 - DNA, 33 bp, Homo sapien
tgggaggttgttttgctatgagcatggctgtca

SEQ ID NO: 685013 - DNA, 33 bp, Homo sapien
cggctgctatcagtccccatcgcagcacctgca

SEQ ID NO: 685014 - DNA, 33 bp, Homo sapien
cggctgctatcagtcctcatcgcagcacctgca

SEQ ID NO: 685015 - DNA, 33 bp, Homo sapien
ggccacaagacattcaaacaggttggctgtaaa

SEQ ID NO: 685016 - DNA, 33 bp, Homo sapien
ggccacaagacattcagacaggttggctgtaaa

SEQ ID NO: 685017 - DNA, 33 bp, Homo sapien
gaccctccactgaagccgaaaggacatcgggcc

SEQ ID NO: 685018 - DNA, 33 bp, Homo sapien
gaccctccactgaagctgaaaggacatcgggcc

SEQ ID NO: 685019 - DNA, 33 bp, Homo sapien
gcctatttcagaccacagaggatcaggatggac

SEQ ID NO: 685020 - DNA, 33 bp, Homo sapien
gcctatttcagaccacggaggatcaggatggac

SEQ ID NO: 685021 - DNA, 33 bp, Homo sapien
tacgaactttcatctcagacagttggtgcgagg

SEQ ID NO: 685022 - DNA, 33 bp, Homo sapien
tacgaactttcatctcggacagttggtgcgagg

SEQ ID NO: 685023 - DNA, 33 bp, Homo sapien
gatcagctacgggagcaaggcgtcacctcttgt

SEQ ID NO: 685024 - DNA, 33 bp, Homo sapien
gatcagctacgggagcgaggcgtcacctcttgt

SEQ ID NO: 685025 - DNA, 33 bp, Homo sapien
aggccttggactgagcactagagagatggagag

SEQ ID NO: 685026 - DNA, 33 bp, Homo sapien
aggccttggactgagcgctagagagatggagag

SEQ ID NO: 685027 - DNA, 33 bp, Homo sapien
aagcagccggatggaacagaagatccactttag

SEQ ID NO: 685028 - DNA, 33 bp, Homo sapien
aagcagccggatggaagagaagatccactttag

SEQ ID NO: 685029 - DNA, 33 bp, Homo sapien
gctccaccataagcacactacagataatgaaac

SEQ ID NO: 685030 - DNA, 33 bp, Homo sapien
gctccaccataagcaccctacagataatgaaac

SEQ ID NO: 685031 - DNA, 33 bp, Homo sapien
tccttgtctctaagtaaggaatgataattggtc

SEQ ID NO: 685032 - DNA, 33 bp, Homo sapien
tccttgtctctaagtagggaatgataattggtc

SEQ ID NO: 685033 - DNA, 33 bp, Homo sapien
ccaccataatccagtacgaccgcaccttaactt

SEQ ID NO: 685034 - DNA, 33 bp, Homo sapien
ccaccataatccagtatgaccgcaccttaactt

SEQ ID NO: 685035 - DNA, 33 bp, Homo sapien
actgtcctccagagaccgagacacggagcctct

SEQ ID NO: 685036 - DNA, 33 bp, Homo sapien
actgtcctccagagactgagacacggagcctct

SEQ ID NO: 685037 - DNA, 33 bp, Homo sapien
ctcacaaactcacaaaggtgcatacgtacgtgt

SEQ ID NO: 685038 - DNA, 33 bp, Homo sapien
ctcacaaactcacaaatgtgcatacgtacgtgt

SEQ ID NO: 685039 - DNA, 33 bp, Homo sapien
agtgtgggtattttgaacttccccctggttgct

SEQ ID NO: 685040 - DNA, 33 bp, Homo sapien
agtgtgggtattttgagcttccccctggttgct

SEQ ID NO: 685041 - DNA, 33 bp, Homo sapien
tcaatccacaagttcacccatccagatttgtcc

SEQ ID NO: 685042 - DNA, 33 bp, Homo sapien
tcaatccacaagttcatccatccagatttgtcc

SEQ ID NO: 685043 - DNA, 33 bp, Homo sapien
gtgggcagccgacagaaagtcaaatgcagaacg

SEQ ID NO: 685044 - DNA, 33 bp, Homo sapien
gtgggcagccgacagacagtcaaatgcagaacg

SEQ ID NO: 685045 - DNA, 33 bp, Homo sapien
aaagtcacaagtgacactggagaacagcgctat

SEQ ID NO: 685046 - DNA, 33 bp, Homo sapien
aaagtcacaagtgacattggagaacagcgctat

SEQ ID NO: 685047 - DNA, 33 bp, Homo sapien
caccatgcccattttgcaggtgagaacactgag

SEQ ID NO: 685048 - DNA, 33 bp, Homo sapien
caccatgcccattttgtaggtgagaacactgag

SEQ ID NO: 685049 - DNA, 33 bp, Homo sapien
cctcagtggaaattacggccctcctgccgcctg

SEQ ID NO: 685050 - DNA, 33 bp, Homo sapien
cctcagtggaaattactgccctcctgccgcctg

SEQ ID NO: 685051 - DNA, 33 bp, Homo sapien
tggagatgtaggcaaacagctagagtgaaagca

SEQ ID NO: 685052 - DNA, 33 bp, Homo sapien
tggagatgtaggcaaatagctagagtgaaagca

SEQ ID NO: 685053 - DNA, 33 bp, Homo sapien
agttgcttcacgtccaaccacaccccctcacac

SEQ ID NO: 685054 - DNA, 33 bp, Homo sapien
agttgcttcacgtccagccacaccccctcacac

SEQ ID NO: 685055 - DNA, 33 bp, Homo sapien
gagtacagacacaaatcagagaacttaagaggc

SEQ ID NO: 685056 - DNA, 33 bp, Homo sapien
gagtacagacacaaattagagaacttaagaggc

SEQ ID NO: 685057 - DNA, 33 bp, Homo sapien
catcacttatggagcacacttagtgagcccaac

SEQ ID NO: 685058 - DNA, 33 bp, Homo sapien
catcacttatggagcatacttagtgagcccaac

SEQ ID NO: 685059 - DNA, 33 bp, Homo sapien
ctcctaatgtatccacaaggccctgggctggat

SEQ ID NO: 685060 - DNA, 33 bp, Homo sapien
ctcctaatgtatccacgaggccctgggctggat

SEQ ID NO: 685061 - DNA, 33 bp, Homo sapien
tttgaaataagaggctaaatgtctgccaaatgc

SEQ ID NO: 685062 - DNA, 33 bp, Homo sapien
tttgaaataagaggctgaatgtctgccaaatgc

SEQ ID NO: 685063 - DNA, 33 bp, Homo sapien
cccagaaccaggcatgacacttagtacagggca

SEQ ID NO: 685064 - DNA, 33 bp, Homo sapien
cccagaaccaggcatggcacttagtacagggca

SEQ ID NO: 685065 - DNA, 33 bp, Homo sapien
gaaaagctgatgcccaataagaggactggttaa

SEQ ID NO: 685066 - DNA, 33 bp, Homo sapien
gaaaagctgatgcccagtaagaggactggttaa

SEQ ID NO: 685067 - DNA, 33 bp, Homo sapien
tggctccattgtctcaggtttaaccagtcctct

SEQ ID NO: 685068 - DNA, 33 bp, Homo sapien
tggctccattgtctcatgtttaaccagtcctct

SEQ ID NO: 685069 - DNA, 33 bp, Homo sapien
cctaagtgtttgataaatgtttgtggattaccc

SEQ ID NO: 685070 - DNA, 33 bp, Homo sapien
cctaagtgtttgataagtgtttgtggattaccc

SEQ ID NO: 685071 - DNA, 33 bp, Homo sapien
agcatccctaagagccgcatgtcacaatccata

SEQ ID NO: 685072 - DNA, 33 bp, Homo sapien
agcatccctaagagcctcatgtcacaatccata

SEQ ID NO: 685073 - DNA, 33 bp, Homo sapien
ccgttctttctggcaacgatgggcatttgtttc

SEQ ID NO: 685074 - DNA, 33 bp, Homo sapien
ccgttctttctggcaatgatgggcatttgtttc

SEQ ID NO: 685075 - DNA, 33 bp, Homo sapien
gttggtaaggactcctcagagtgtcatgtccag

SEQ ID NO: 685076 - DNA, 33 bp, Homo sapien
gttggtaaggactcctgagagtgtcatgtccag

SEQ ID NO: 685077 - DNA, 33 bp, Homo sapien
tcgtttccatgtgttcaccttcacatccatggc

SEQ ID NO: 685078 - DNA, 33 bp, Homo sapien
tcgtttccatgtgttcgccttcacatccatggc

SEQ ID NO: 685079 - DNA, 33 bp, Homo sapien
ggatcccttcagcctaagggttccagatcagtc

SEQ ID NO: 685080 - DNA, 33 bp, Homo sapien
ggatcccttcagcctaggggttccagatcagtc

SEQ ID NO: 685081 - DNA, 33 bp, Homo sapien
ggtgctaagatacaaaaccttttcatgccttcc

SEQ ID NO: 685082 - DNA, 33 bp, Homo sapien
ggtgctaagatacaaagccttttcatgccttcc

SEQ ID NO: 685083 - DNA, 33 bp, Homo sapien
tggaaacatctgaaccaggaaggggaacacgga

SEQ ID NO: 685084 - DNA, 33 bp, Homo sapien
tggaaacatctgaaccgggaaggggaacacgga

SEQ ID NO: 685085 - DNA, 33 bp, Homo sapien
atcccttttaatattacgtgtagtcatgagact

SEQ ID NO: 685086 - DNA, 33 bp, Homo sapien
atcccttttaatattaggtgtagtcatgagact

SEQ ID NO: 685087 - DNA, 33 bp, Homo sapien
gcttcaaggctatttcgcactcctgctgcgtgt

SEQ ID NO: 685088 - DNA, 33 bp, Homo sapien
gcttcaaggctatttctcactcctgctgcgtgt

SEQ ID NO: 685089 - DNA, 33 bp, Homo sapien
aggctcagtgacctaccatctccatttccaggt

SEQ ID NO: 685090 - DNA, 33 bp, Homo sapien
aggctcagtgacctactatctccatttccaggt

SEQ ID NO: 685091 - DNA, 33 bp, Homo sapien
acacagggagtgtgacaatgccatacgtatgga

SEQ ID NO: 685092 - DNA, 33 bp, Homo sapien
acacagggagtgtgacgatgccatacgtatgga

SEQ ID NO: 685093 - DNA, 33 bp, Homo sapien
ttgcaccaatatcacacggccttaagtattgtg

SEQ ID NO: 685094 - DNA, 33 bp, Homo sapien
ttgcaccaatatcacatggccttaagtattgtg

SEQ ID NO: 685095 - DNA, 33 bp, Homo sapien
acacattattttagaaggtcatgtgagtaggat

SEQ ID NO: 685096 - DNA, 33 bp, Homo sapien
acacattattttagaatgtcatgtgagtaggat

SEQ ID NO: 685097 - DNA, 33 bp, Homo sapien
agtggttgggcagactaactgggcttagctgag

SEQ ID NO: 685098 - DNA, 33 bp, Homo sapien
agtggttgggcagactgactgggcttagctgag

SEQ ID NO: 685099 - DNA, 33 bp, Homo sapien
atgaggaacaccaagaaggaacagctcagctaa

SEQ ID NO: 685100 - DNA, 33 bp, Homo sapien
atgaggaacaccaagagggaacagctcagctaa

SEQ ID NO: 685101 - DNA, 33 bp, Homo sapien
accattgatttgctcaagagtttgtgatctggg

SEQ ID NO: 685102 - DNA, 33 bp, Homo sapien
accattgatttgctcaggagtttgtgatctggg

SEQ ID NO: 685103 - DNA, 33 bp, Homo sapien
tctgaaaatccttagaagacaaatcaaatttag

SEQ ID NO: 685104 - DNA, 33 bp, Homo sapien
tctgaaaatccttagacgacaaatcaaatttag

SEQ ID NO: 685105 - DNA, 33 bp, Homo sapien
agcattcaacaagtaccggatggtgagcatttc

SEQ ID NO: 685106 - DNA, 33 bp, Homo sapien
agcattcaacaagtactggatggtgagcatttc

SEQ ID NO: 685107 - DNA, 33 bp, Homo sapien
tcatggtgataattaacaagaacaatggacaaa

SEQ ID NO: 685108 - DNA, 33 bp, Homo sapien
tcatggtgataattaataagaacaatggacaaa

SEQ ID NO: 685109 - DNA, 33 bp, Homo sapien
cacgggttggctctgacgtcctttcctctgtga

SEQ ID NO: 685110 - DNA, 33 bp, Homo sapien
cacgggttggctctgatgtcctttcctctgtga

SEQ ID NO: 685111 - DNA, 33 bp, Homo sapien
aatcctgcatttggaccgcaatgtcaactgcag

SEQ ID NO: 685112 - DNA, 33 bp, Homo sapien
aatcctgcatttggacggcaatgtcaactgcag

SEQ ID NO: 685113 - DNA, 33 bp, Homo sapien
cccaaagtggctacaccatttcacgttcccacc

SEQ ID NO: 685114 - DNA, 33 bp, Homo sapien
cccaaagtggctacactatttcacgttcccacc

SEQ ID NO: 685115 - DNA, 33 bp, Homo sapien
gccgagttgtagtccagtgacagctgtggctga

SEQ ID NO: 685116 - DNA, 33 bp, Homo sapien
gccgagttgtagtccattgacagctgtggctga

SEQ ID NO: 685117 - DNA, 33 bp, Homo sapien
gaagagcaacagctaacggcccccaagcacagg

SEQ ID NO: 685118 - DNA, 33 bp, Homo sapien
gaagagcaacagctaatggcccccaagcacagg

SEQ ID NO: 685119 - DNA, 33 bp, Homo sapien
ggctcaatctaataaaagctctgcggatttctg

SEQ ID NO: 685120 - DNA, 33 bp, Homo sapien
ggctcaatctaataaacgctctgcggatttctg

SEQ ID NO: 685121 - DNA, 33 bp, Homo sapien
gacctggggcgacataagtaacctcgctgagcc

SEQ ID NO: 685122 - DNA, 33 bp, Homo sapien
gacctggggcgacataggtaacctcgctgagcc

SEQ ID NO: 685123 - DNA, 33 bp, Homo sapien
atcccaaaggcactgcagaagggcacgtacctg

SEQ ID NO: 685124 - DNA, 33 bp, Homo sapien
atcccaaaggcactgcggaagggcacgtacctg

SEQ ID NO: 685125 - DNA, 33 bp, Homo sapien
tgatgtgaccttctaacggagaggggtacatgg

SEQ ID NO: 685126 - DNA, 33 bp, Homo sapien
tgatgtgaccttctaatggagaggggtacatgg

SEQ ID NO: 685127 - DNA, 33 bp, Homo sapien
tgtagatcagatcaacaaccatgtagttctgtg

SEQ ID NO: 685128 - DNA, 33 bp, Homo sapien
tgtagatcagatcaaccaccatgtagttctgtg

SEQ ID NO: 685129 - DNA, 33 bp, Homo sapien
atatcgaggaggttacagataggaaatggagct

SEQ ID NO: 685130 - DNA, 33 bp, Homo sapien
atatcgaggaggttacggataggaaatggagct

SEQ ID NO: 685131 - DNA, 33 bp, Homo sapien
cctcgcccacttcatacaggtggtagagccgca

SEQ ID NO: 685132 - DNA, 33 bp, Homo sapien
cctcgcccacttcatataggtggtagagccgca

SEQ ID NO: 685133 - DNA, 33 bp, Homo sapien
tcctgtctcagccagtaacagtgaatctggagg

SEQ ID NO: 685134 - DNA, 33 bp, Homo sapien
tcctgtctcagccagtgacagtgaatctggagg

SEQ ID NO: 685135 - DNA, 33 bp, Homo sapien
ccagttgtaatacctgacaaacccagaagacca

SEQ ID NO: 685136 - DNA, 33 bp, Homo sapien
ccagttgtaatacctggcaaacccagaagacca

SEQ ID NO: 685137 - DNA, 33 bp, Homo sapien
ggcgatggcgggaagacgacagtgatcgggccc

SEQ ID NO: 685138 - DNA, 33 bp, Homo sapien
ggcgatggcgggaagatgacagtgatcgggccc

SEQ ID NO: 685139 - DNA, 33 bp, Homo sapien
gccctcccaaatctaccacagtcggttaagaaa

SEQ ID NO: 685140 - DNA, 33 bp, Homo sapien
gccctcccaaatctactacagtcggttaagaaa

SEQ ID NO: 685141 - DNA, 33 bp, Homo sapien
agattatacagtgtgccaccattaatgtaaaaa

SEQ ID NO: 685142 - DNA, 33 bp, Homo sapien
agattatacagtgtgctaccattaatgtaaaaa

SEQ ID NO: 685143 - DNA, 33 bp, Homo sapien
ttttccctcagccagcaactgtgatcgcgacac

SEQ ID NO: 685144 - DNA, 33 bp, Homo sapien
ttttccctcagccagcgactgtgatcgcgacac

SEQ ID NO: 685145 - DNA, 33 bp, Homo sapien
cagtttcaacggattgaacgaggcctacccaca

SEQ ID NO: 685146 - DNA, 33 bp, Homo sapien
cagtttcaacggattggacgaggcctacccaca

SEQ ID NO: 685147 - DNA, 33 bp, Homo sapien
cctgtggaagtcctgtgaagtctgcagtcggca

SEQ ID NO: 685148 - DNA, 33 bp, Homo sapien
cctgtggaagtcctgttaagtctgcagtcggca

SEQ ID NO: 685149 - DNA, 33 bp, Homo sapien
aaggggcttgcttggacgaatggtcttcagagc

SEQ ID NO: 685150 - DNA, 33 bp, Homo sapien
aaggggcttgcttggatgaatggtcttcagagc

SEQ ID NO: 685151 - DNA, 33 bp, Homo sapien
ttgcagccacgaacacgatgaactcactgaagt

SEQ ID NO: 685152 - DNA, 33 bp, Homo sapien
ttgcagccacgaacactatgaactcactgaagt

SEQ ID NO: 685153 - DNA, 33 bp, Homo sapien
tgggtggctaagcctagcaacagacttcctcca

SEQ ID NO: 685154 - DNA, 33 bp, Homo sapien
tgggtggctaagcctatcaacagacttcctcca

SEQ ID NO: 685155 - DNA, 33 bp, Homo sapien
ctgattcctgcttgtacaagtttggggagaggg

SEQ ID NO: 685156 - DNA, 33 bp, Homo sapien
ctgattcctgcttgtagaagtttggggagaggg

SEQ ID NO: 685157 - DNA, 33 bp, Homo sapien
ctggccaggcaacatcaccattatttctgttat

SEQ ID NO: 685158 - DNA, 33 bp, Homo sapien
ctggccaggcaacatcgccattatttctgttat

SEQ ID NO: 685159 - DNA, 33 bp, Homo sapien
gagaatcgcttggacccaggagatggaagttgc

SEQ ID NO: 685160 - DNA, 33 bp, Homo sapien
gagaatcgcttggaccgaggagatggaagttgc

SEQ ID NO: 685161 - DNA, 33 bp, Homo sapien
tcctcaactgattccacacattagctgcgtacc

SEQ ID NO: 685162 - DNA, 33 bp, Homo sapien
tcctcaactgattccatacattagctgcgtacc

SEQ ID NO: 685163 - DNA, 33 bp, Homo sapien
ccccttcacctggaaccacgcagagtctaggtc

SEQ ID NO: 685164 - DNA, 33 bp, Homo sapien
ccccttcacctggaacgacgcagagtctaggtc

SEQ ID NO: 685165 - DNA, 33 bp, Homo sapien
cgttctgagctgtcaccggtagaggctgctggg

SEQ ID NO: 685166 - DNA, 33 bp, Homo sapien
cgttctgagctgtcactggtagaggctgctggg

SEQ ID NO: 685167 - DNA, 33 bp, Homo sapien
acaaggtaagcacacaataataactaccattag

SEQ ID NO: 685168 - DNA, 33 bp, Homo sapien
acaaggtaagcacacagtaataactaccattag

SEQ ID NO: 685169 - DNA, 33 bp, Homo sapien
gtacaaattacactcccaaattacagagactgg

SEQ ID NO: 685170 - DNA, 33 bp, Homo sapien
gtacaaattacactcctaaattacagagactgg

SEQ ID NO: 685171 - DNA, 33 bp, Homo sapien
ggtcccaggtgagagacggaagttagtacaagt

SEQ ID NO: 685172 - DNA, 33 bp, Homo sapien
ggtcccaggtgagagatggaagttagtacaagt

SEQ ID NO: 685173 - DNA, 33 bp, Homo sapien
catgtaaaatgattagcacggtgcaggaccggt

SEQ ID NO: 685174 - DNA, 33 bp, Homo sapien
catgtaaaatgattagtacggtgcaggaccggt

SEQ ID NO: 685175 - DNA, 33 bp, Homo sapien
cctagaagcctttggacgaggattcagtgcagt

SEQ ID NO: 685176 - DNA, 33 bp, Homo sapien
cctagaagcctttggatgaggattcagtgcagt

SEQ ID NO: 685177 - DNA, 33 bp, Homo sapien
tacagtgtttatagggaaaacggatataaatga

SEQ ID NO: 685178 - DNA, 33 bp, Homo sapien
tacagtgtttataggggaaacggatataaatga

SEQ ID NO: 685179 - DNA, 33 bp, Homo sapien
atgcctggcctagtggcatcttttcagtctcct

SEQ ID NO: 685180 - DNA, 33 bp, Homo sapien
atgcctggcctagtggtatcttttcagtctcct

SEQ ID NO: 685181 - DNA, 33 bp, Homo sapien
aaaatacagggcctgcaaggatgatcattttgt

SEQ ID NO: 685182 - DNA, 33 bp, Homo sapien
aaaatacagggcctgcgaggatgatcattttgt

SEQ ID NO: 685183 - DNA, 33 bp, Homo sapien
agcattctggtaaacacagacaaactatcaaag

SEQ ID NO: 685184 - DNA, 33 bp, Homo sapien
agcattctggtaaacatagacaaactatcaaag

SEQ ID NO: 685185 - DNA, 33 bp, Homo sapien
atgtgaaatttgtagacagaagtcacccagagc

SEQ ID NO: 685186 - DNA, 33 bp, Homo sapien
atgtgaaatttgtagatagaagtcacccagagc

SEQ ID NO: 685187 - DNA, 33 bp, Homo sapien
ttaactagaaaagccaataacgacacaaagaca

SEQ ID NO: 685188 - DNA, 33 bp, Homo sapien
ttaactagaaaagccagtaacgacacaaagaca

SEQ ID NO: 685189 - DNA, 33 bp, Homo sapien
acttgtgatactacaccgtgcctccactttatc

SEQ ID NO: 685190 - DNA, 33 bp, Homo sapien
acttgtgatactacactgtgcctccactttatc

SEQ ID NO: 685191 - DNA, 33 bp, Homo sapien
tgactcagcttttttgaaaacacagacttggca

SEQ ID NO: 685192 - DNA, 33 bp, Homo sapien
tgactcagcttttttggaaacacagacttggca

SEQ ID NO: 685193 - DNA, 33 bp, Homo sapien
cgagatgaacaactctcacctcttggcctaatg

SEQ ID NO: 685194 - DNA, 33 bp, Homo sapien
cgagatgaacaactctgacctcttggcctaatg

SEQ ID NO: 685195 - DNA, 33 bp, Homo sapien
tgtcaagcatataagccctcgataaatgtttct

SEQ ID NO: 685196 - DNA, 33 bp, Homo sapien
tgtcaagcatataagcgctcgataaatgtttct

SEQ ID NO: 685197 - DNA, 33 bp, Homo sapien
acttgagcatcatgaaaactatcagcagcagtt

SEQ ID NO: 685198 - DNA, 33 bp, Homo sapien
acttgagcatcatgaagactatcagcagcagtt

SEQ ID NO: 685199 - DNA, 33 bp, Homo sapien
ggctgacagcggggaacggtcaggactggcagg

SEQ ID NO: 685200 - DNA, 33 bp, Homo sapien
ggctgacagcggggaatggtcaggactggcagg

SEQ ID NO: 685201 - DNA, 33 bp, Homo sapien
gatataaccgcagtcgaaaggaaaattaactgc

SEQ ID NO: 685202 - DNA, 33 bp, Homo sapien
gatataaccgcagtcggaaggaaaattaactgc

SEQ ID NO: 685203 - DNA, 33 bp, Homo sapien
agaaagtaacaatctgcaactaaggtccttagc

SEQ ID NO: 685204 - DNA, 33 bp, Homo sapien
agaaagtaacaatctgtaactaaggtccttagc

SEQ ID NO: 685205 - DNA, 33 bp, Homo sapien
ttactgcctgcccaaacgagtggtgaagctgtc

SEQ ID NO: 685206 - DNA, 33 bp, Homo sapien
ttactgcctgcccaaatgagtggtgaagctgtc

SEQ ID NO: 685207 - DNA, 33 bp, Homo sapien
cagctgttgactatgactagcacagacaatagc

SEQ ID NO: 685208 - DNA, 33 bp, Homo sapien
cagctgttgactatgattagcacagacaatagc

SEQ ID NO: 685209 - DNA, 33 bp, Homo sapien
gcataacatgtggaaaagaatgactgaaaggaa

SEQ ID NO: 685210 - DNA, 33 bp, Homo sapien
gcataacatgtggaaatgaatgactgaaaggaa

SEQ ID NO: 685211 - DNA, 33 bp, Homo sapien
gtccctcattgctggacgtgtacattatgtcta

SEQ ID NO: 685212 - DNA, 33 bp, Homo sapien
gtccctcattgctggatgtgtacattatgtcta

SEQ ID NO: 685213 - DNA, 33 bp, Homo sapien
aagtgcctttgttaaccgtgagatgccagcggc

SEQ ID NO: 685214 - DNA, 33 bp, Homo sapien
aagtgcctttgttaactgtgagatgccagcggc

SEQ ID NO: 685215 - DNA, 33 bp, Homo sapien
aacatcatcaacactccagcagatcaaactagc

SEQ ID NO: 685216 - DNA, 33 bp, Homo sapien
aacatcatcaacactctagcagatcaaactagc

SEQ ID NO: 685217 - DNA, 33 bp, Homo sapien
ggctgggtgtagtatcccctttaccacggaaga

SEQ ID NO: 685218 - DNA, 33 bp, Homo sapien
ggctgggtgtagtatctcctttaccacggaaga

SEQ ID NO: 685219 - DNA, 33 bp, Homo sapien
aaggctttctcccttaagtgagatcagaccatt

SEQ ID NO: 685220 - DNA, 33 bp, Homo sapien
aaggctttctcccttacgtgagatcagaccatt

SEQ ID NO: 685221 - DNA, 33 bp, Homo sapien
agactctaggacaaaagaaccctagactctgcc

SEQ ID NO: 685222 - DNA, 33 bp, Homo sapien
agactctaggacaaaataaccctagactctgcc

SEQ ID NO: 685223 - DNA, 33 bp, Homo sapien
aggagaagtgtttgaactgcattgaaggatcag

SEQ ID NO: 685224 - DNA, 33 bp, Homo sapien
aggagaagtgtttgaattgcattgaaggatcag

SEQ ID NO: 685225 - DNA, 33 bp, Homo sapien
cacaggcagagaagaacattggtggttgagagc

SEQ ID NO: 685226 - DNA, 33 bp, Homo sapien
cacaggcagagaagaatattggtggttgagagc

SEQ ID NO: 685227 - DNA, 33 bp, Homo sapien
tccacccctcatcttcactccaacttggcaact

SEQ ID NO: 685228 - DNA, 33 bp, Homo sapien
tccacccctcatcttcgctccaacttggcaact

SEQ ID NO: 685229 - DNA, 33 bp, Homo sapien
agctcagagcctgacacaatgtagcccctgccc

SEQ ID NO: 685230 - DNA, 33 bp, Homo sapien
agctcagagcctgacataatgtagcccctgccc

SEQ ID NO: 685231 - DNA, 33 bp, Homo sapien
tgtgtctgccacctcaatcagtacagagactat

SEQ ID NO: 685232 - DNA, 33 bp, Homo sapien
tgtgtctgccacctcagtcagtacagagactat

SEQ ID NO: 685233 - DNA, 33 bp, Homo sapien
atggcgaaatcttagacgttaaacggattgaat

SEQ ID NO: 685234 - DNA, 33 bp, Homo sapien
atggcgaaatcttagatgttaaacggattgaat

SEQ ID NO: 685235 - DNA, 33 bp, Homo sapien
catttgctcagtagacactcttgaggctccact

SEQ ID NO: 685236 - DNA, 33 bp, Homo sapien
catttgctcagtagacgctcttgaggctccact

SEQ ID NO: 685237 - DNA, 33 bp, Homo sapien
acacagtgagtcgcccggcgttactagtcaagg

SEQ ID NO: 685238 - DNA, 33 bp, Homo sapien
acacagtgagtcgccctgcgttactagtcaagg

SEQ ID NO: 685239 - DNA, 33 bp, Homo sapien
aggccttcccctaacactgaaaacaagacaagg

SEQ ID NO: 685240 - DNA, 33 bp, Homo sapien
aggccttcccctaacattgaaaacaagacaagg

SEQ ID NO: 685241 - DNA, 33 bp, Homo sapien
taggtgtgtttattacggagtcatatttcgttg

SEQ ID NO: 685242 - DNA, 33 bp, Homo sapien
taggtgtgtttattactgagtcatatttcgttg

SEQ ID NO: 685243 - DNA, 33 bp, Homo sapien
tactccattcaagcccagatactgtaaagttac

SEQ ID NO: 685244 - DNA, 33 bp, Homo sapien
tactccattcaagccccgatactgtaaagttac

SEQ ID NO: 685245 - DNA, 33 bp, Homo sapien
ggcttgaatggagtaacaaatagcacagggaca

SEQ ID NO: 685246 - DNA, 33 bp, Homo sapien
ggcttgaatggagtaataaatagcacagggaca

SEQ ID NO: 685247 - DNA, 33 bp, Homo sapien
atttcaccagtaacacacctcttgacagctagt

SEQ ID NO: 685248 - DNA, 33 bp, Homo sapien
atttcaccagtaacacgcctcttgacagctagt

SEQ ID NO: 685249 - DNA, 33 bp, Homo sapien
tttcttgggcctaggacctgctggggagttgat

SEQ ID NO: 685250 - DNA, 33 bp, Homo sapien
tttcttgggcctaggatctgctggggagttgat

SEQ ID NO: 685251 - DNA, 33 bp, Homo sapien
gtgagaagatgaataacgtttaacttgtggaaa

SEQ ID NO: 685252 - DNA, 33 bp, Homo sapien
gtgagaagatgaataatgtttaacttgtggaaa

SEQ ID NO: 685253 - DNA, 33 bp, Homo sapien
aggacacaaacacctcgcaggaactgggatgtt

SEQ ID NO: 685254 - DNA, 33 bp, Homo sapien
aggacacaaacacctctcaggaactgggatgtt

SEQ ID NO: 685255 - DNA, 33 bp, Homo sapien
gcctctcatcaataacaatcagtggaaagcaag

SEQ ID NO: 685256 - DNA, 33 bp, Homo sapien
gcctctcatcaataaccatcagtggaaagcaag

SEQ ID NO: 685257 - DNA, 33 bp, Homo sapien
actcctctgctctcagaactgtgtgtagcagtc

SEQ ID NO: 685258 - DNA, 33 bp, Homo sapien
actcctctgctctcaggactgtgtgtagcagtc

SEQ ID NO: 685259 - DNA, 33 bp, Homo sapien
tttcagtttcaaattacgttcaaagagatttaa

SEQ ID NO: 685260 - DNA, 33 bp, Homo sapien
tttcagtttcaaattaggttcaaagagatttaa

SEQ ID NO: 685261 - DNA, 33 bp, Homo sapien
gtgagatggaaggatcaaaattacaacggtaga

SEQ ID NO: 685262 - DNA, 33 bp, Homo sapien
gtgagatggaaggatcgaaattacaacggtaga

SEQ ID NO: 685263 - DNA, 33 bp, Homo sapien
aagtgcaagaggcagcagaaacggaaacctccc

SEQ ID NO: 685264 - DNA, 33 bp, Homo sapien
aagtgcaagaggcagcggaaacggaaacctccc

SEQ ID NO: 685265 - DNA, 33 bp, Homo sapien
gctcatgggattggaaatggatttgtctcatgg

SEQ ID NO: 685266 - DNA, 33 bp, Homo sapien
gctcatgggattggaagtggatttgtctcatgg

SEQ ID NO: 685267 - DNA, 33 bp, Homo sapien
gcaccccccggccggaatccactgtgggcagaa

SEQ ID NO: 685268 - DNA, 33 bp, Homo sapien
gcaccccccggccggagtccactgtgggcagaa

SEQ ID NO: 685269 - DNA, 33 bp, Homo sapien
ttctgtggaatcgttacgggaaagtcagggtca

SEQ ID NO: 685270 - DNA, 33 bp, Homo sapien
ttctgtggaatcgttatgggaaagtcagggtca

SEQ ID NO: 685271 - DNA, 33 bp, Homo sapien
ggggccttcctgagtcacgccacttgccggcta

SEQ ID NO: 685272 - DNA, 33 bp, Homo sapien
ggggccttcctgagtcgcgccacttgccggcta

SEQ ID NO: 685273 - DNA, 33 bp, Homo sapien
tcagccccctgtaagtaaaagggtagagaaaga

SEQ ID NO: 685274 - DNA, 33 bp, Homo sapien
tcagccccctgtaagttaaagggtagagaaaga

SEQ ID NO: 685275 - DNA, 33 bp, Homo sapien
tctaagtagagatatacgctttcttcctttata

SEQ ID NO: 685276 - DNA, 33 bp, Homo sapien
tctaagtagagatatatgctttcttcctttata

SEQ ID NO: 685277 - DNA, 33 bp, Homo sapien
tgttactgggttcaaggctggtgagggagtgtt

SEQ ID NO: 685278 - DNA, 33 bp, Homo sapien
tgttactgggttcaagtctggtgagggagtgtt

SEQ ID NO: 685279 - DNA, 33 bp, Homo sapien
gggaataacgaacaagaaggctcccaaagtggt

SEQ ID NO: 685280 - DNA, 33 bp, Homo sapien
gggaataacgaacaaggaggctcccaaagtggt

SEQ ID NO: 685281 - DNA, 33 bp, Homo sapien
agcattaagtccactcacagtgttgtacagcca

SEQ ID NO: 685282 - DNA, 33 bp, Homo sapien
agcattaagtccactcccagtgttgtacagcca

SEQ ID NO: 685283 - DNA, 33 bp, Homo sapien
aacaccaagtcacaaccattgccggcagctact

SEQ ID NO: 685284 - DNA, 33 bp, Homo sapien
aacaccaagtcacaactattgccggcagctact

SEQ ID NO: 685285 - DNA, 33 bp, Homo sapien
gttctaccatgttgccacccgctggaaaagcaa

SEQ ID NO: 685286 - DNA, 33 bp, Homo sapien
gttctaccatgttgccgcccgctggaaaagcaa

SEQ ID NO: 685287 - DNA, 33 bp, Homo sapien
aacattctgggaggtaaacagtctcttggtacc

SEQ ID NO: 685288 - DNA, 33 bp, Homo sapien
aacattctgggaggtagacagtctcttggtacc

SEQ ID NO: 685289 - DNA, 33 bp, Homo sapien
gctgtcaaatgaaaaactttgtgctgaagcagg

SEQ ID NO: 685290 - DNA, 33 bp, Homo sapien
gctgtcaaatgaaaaagtttgtgctgaagcagg

SEQ ID NO: 685291 - DNA, 33 bp, Homo sapien
gctgatggccttcaccaaaataagtcttaacag

SEQ ID NO: 685292 - DNA, 33 bp, Homo sapien
gctgatggccttcaccgaaataagtcttaacag

SEQ ID NO: 685293 - DNA, 33 bp, Homo sapien
tgggcaaaaaagagccaggatctgatttattat

SEQ ID NO: 685294 - DNA, 33 bp, Homo sapien
tgggcaaaaaagagccgggatctgatttattat

SEQ ID NO: 685295 - DNA, 33 bp, Homo sapien
atgcaaaagccactggcaggttttgggcaaaaa

SEQ ID NO: 685296 - DNA, 33 bp, Homo sapien
atgcaaaagccactggtaggttttgggcaaaaa

SEQ ID NO: 685297 - DNA, 33 bp, Homo sapien
atggataatccgcggtaacagcttgcatccgaa

SEQ ID NO: 685298 - DNA, 33 bp, Homo sapien
atggataatccgcggtcacagcttgcatccgaa

SEQ ID NO: 685299 - DNA, 33 bp, Homo sapien
gtctagcgtgtcttcacgtgcttggaccatctg

SEQ ID NO: 685300 - DNA, 33 bp, Homo sapien
gtctagcgtgtcttcatgtgcttggaccatctg

SEQ ID NO: 685301 - DNA, 33 bp, Homo sapien
aagatgaagtattaggaacccaaacacatcact

SEQ ID NO: 685302 - DNA, 33 bp, Homo sapien
aagatgaagtattaggtacccaaacacatcact

SEQ ID NO: 685303 - DNA, 33 bp, Homo sapien
gctgttttctcgcctccctctccacctcctggg

SEQ ID NO: 685304 - DNA, 33 bp, Homo sapien
gctgttttctcgcctctctctccacctcctggg

SEQ ID NO: 685305 - DNA, 33 bp, Homo sapien
gccaccaacctgggtccgaaagagtgtctctta

SEQ ID NO: 685306 - DNA, 33 bp, Homo sapien
gccaccaacctgggtctgaaagagtgtctctta

SEQ ID NO: 685307 - DNA, 33 bp, Homo sapien
aggcctggggcttccaagtgtgacatatctgtg

SEQ ID NO: 685308 - DNA, 33 bp, Homo sapien
aggcctggggcttccacgtgtgacatatctgtg

SEQ ID NO: 685309 - DNA, 33 bp, Homo sapien
gaagccaaatgtaacaatgcaagtgtgtgtaag

SEQ ID NO: 685310 - DNA, 33 bp, Homo sapien
gaagccaaatgtaacagtgcaagtgtgtgtaag

SEQ ID NO: 685311 - DNA, 33 bp, Homo sapien
tggccaatggattactcaaggatgagatgtgag

SEQ ID NO: 685312 - DNA, 33 bp, Homo sapien
tggccaatggattactgaaggatgagatgtgag

SEQ ID NO: 685313 - DNA, 33 bp, Homo sapien
ccacagtctagtggagaagacggtacacacact

SEQ ID NO: 685314 - DNA, 33 bp, Homo sapien
ccacagtctagtggaggagacggtacacacact

SEQ ID NO: 685315 - DNA, 33 bp, Homo sapien
ttggctagctgaacagcagagatgggatttgaa

SEQ ID NO: 685316 - DNA, 33 bp, Homo sapien
ttggctagctgaacagtagagatgggatttgaa

SEQ ID NO: 685317 - DNA, 33 bp, Homo sapien
cctctgtagaaacccaatgacagagacagacag

SEQ ID NO: 685318 - DNA, 33 bp, Homo sapien
cctctgtagaaacccagtgacagagacagacag

SEQ ID NO: 685319 - DNA, 33 bp, Homo sapien
catcgtcatctggcaaaggctttatttaaatta

SEQ ID NO: 685320 - DNA, 33 bp, Homo sapien
catcgtcatctggcaagggctttatttaaatta

SEQ ID NO: 685321 - DNA, 33 bp, Homo sapien
attaacatagcaaagacgaatatcaattaacag

SEQ ID NO: 685322 - DNA, 33 bp, Homo sapien
attaacatagcaaagaggaatatcaattaacag

SEQ ID NO: 685323 - DNA, 33 bp, Homo sapien
tgggttttaagagttacagagacattttgctaa

SEQ ID NO: 685324 - DNA, 33 bp, Homo sapien
tgggttttaagagttatagagacattttgctaa

SEQ ID NO: 685325 - DNA, 33 bp, Homo sapien
cctattattattggaccacttggcaagtgcgag

SEQ ID NO: 685326 - DNA, 33 bp, Homo sapien
cctattattattggactacttggcaagtgcgag

SEQ ID NO: 685327 - DNA, 33 bp, Homo sapien
gggacggtctgattcacaactcttgccggcctt

SEQ ID NO: 685328 - DNA, 33 bp, Homo sapien
gggacggtctgattcataactcttgccggcctt

SEQ ID NO: 685329 - DNA, 33 bp, Homo sapien
ccgtgcctgagaactcaaactagggagaaactg

SEQ ID NO: 685330 - DNA, 33 bp, Homo sapien
ccgtgcctgagaactcgaactagggagaaactg

SEQ ID NO: 685331 - DNA, 33 bp, Homo sapien
acagtccgagtttccaaagaccgggacctgata

SEQ ID NO: 685332 - DNA, 33 bp, Homo sapien
acagtccgagtttccacagaccgggacctgata

SEQ ID NO: 685333 - DNA, 33 bp, Homo sapien
acaaactttcaaccaccgtagcaaaggaggcag

SEQ ID NO: 685334 - DNA, 33 bp, Homo sapien
acaaactttcaaccactgtagcaaaggaggcag

SEQ ID NO: 685335 - DNA, 33 bp, Homo sapien
ctgagcaaacagacccagattcaaacttcagat

SEQ ID NO: 685336 - DNA, 33 bp, Homo sapien
ctgagcaaacagaccccgattcaaacttcagat

SEQ ID NO: 685337 - DNA, 33 bp, Homo sapien
catcctcgacaccacgaagcgttactcttctca

SEQ ID NO: 685338 - DNA, 33 bp, Homo sapien
catcctcgacaccacggagcgttactcttctca

SEQ ID NO: 685339 - DNA, 33 bp, Homo sapien
gaattaatcaaagtcaaacaggtttttaagttg

SEQ ID NO: 685340 - DNA, 33 bp, Homo sapien
gaattaatcaaagtcatacaggtttttaagttg

SEQ ID NO: 685341 - DNA, 33 bp, Homo sapien
catgagtaacctagacagtcattggaagcttcc

SEQ ID NO: 685342 - DNA, 33 bp, Homo sapien
catgagtaacctagacggtcattggaagcttcc

SEQ ID NO: 685343 - DNA, 33 bp, Homo sapien
taatacctactttatagaggtgttgtgaagctc

SEQ ID NO: 685344 - DNA, 33 bp, Homo sapien
taatacctactttatataggtgttgtgaagctc

SEQ ID NO: 685345 - DNA, 33 bp, Homo sapien
aaatgtttggtctggacaggaattcaccccagc

SEQ ID NO: 685346 - DNA, 33 bp, Homo sapien
aaatgtttggtctggataggaattcaccccagc

SEQ ID NO: 685347 - DNA, 33 bp, Homo sapien
aacttggaaggcaaacagttacccttagcaagc

SEQ ID NO: 685348 - DNA, 33 bp, Homo sapien
aacttggaaggcaaacggttacccttagcaagc

SEQ ID NO: 685349 - DNA, 33 bp, Homo sapien
aaagatgaagtttcacaaggtccgcagcttgca

SEQ ID NO: 685350 - DNA, 33 bp, Homo sapien
aaagatgaagtttcacgaggtccgcagcttgca

SEQ ID NO: 685351 - DNA, 33 bp, Homo sapien
cttctctgatcatgccaaaaacccgaccccaca

SEQ ID NO: 685352 - DNA, 33 bp, Homo sapien
cttctctgatcatgccgaaaacccgaccccaca

SEQ ID NO: 685353 - DNA, 33 bp, Homo sapien
caggcatgactggctccaggcgttctaacatag

SEQ ID NO: 685354 - DNA, 33 bp, Homo sapien
caggcatgactggctctaggcgttctaacatag

SEQ ID NO: 685355 - DNA, 33 bp, Homo sapien
acccgtggccattggaaaatacccttcccacct

SEQ ID NO: 685356 - DNA, 33 bp, Homo sapien
acccgtggccattggacaatacccttcccacct

SEQ ID NO: 685357 - DNA, 33 bp, Homo sapien
aaataagtcaagaaccactgtgttaactcaggg

SEQ ID NO: 685358 - DNA, 33 bp, Homo sapien
aaataagtcaagaaccgctgtgttaactcaggg

SEQ ID NO: 685359 - DNA, 33 bp, Homo sapien
gatttctctaattgctcaatctgaccttctact

SEQ ID NO: 685360 - DNA, 33 bp, Homo sapien
gatttctctaattgcttaatctgaccttctact

SEQ ID NO: 685361 - DNA, 33 bp, Homo sapien
cagcacagcatttcccagacatgaactaaggtg

SEQ ID NO: 685362 - DNA, 33 bp, Homo sapien
cagcacagcatttcccggacatgaactaaggtg

SEQ ID NO: 685363 - DNA, 33 bp, Homo sapien
cttactgcactgcccgcaggcactctgccctga

SEQ ID NO: 685364 - DNA, 33 bp, Homo sapien
cttactgcactgcccgtaggcactctgccctga

SEQ ID NO: 685365 - DNA, 33 bp, Homo sapien
cgggtgagctcctgccactgagtgtgcaacatg

SEQ ID NO: 685366 - DNA, 33 bp, Homo sapien
cgggtgagctcctgccgctgagtgtgcaacatg

SEQ ID NO: 685367 - DNA, 33 bp, Homo sapien
cccacagcgtgcaaaacggggccggaaatggga

SEQ ID NO: 685368 - DNA, 33 bp, Homo sapien
cccacagcgtgcaaaatggggccggaaatggga

SEQ ID NO: 685369 - DNA, 33 bp, Homo sapien
gtgctggaaatttctcacaaactcatccccaag

SEQ ID NO: 685370 - DNA, 33 bp, Homo sapien
gtgctggaaatttctcgcaaactcatccccaag

SEQ ID NO: 685371 - DNA, 33 bp, Homo sapien
ccagcggaaccagagaccgccgtagtgaccttc

SEQ ID NO: 685372 - DNA, 33 bp, Homo sapien
ccagcggaaccagagagcgccgtagtgaccttc

SEQ ID NO: 685373 - DNA, 33 bp, Homo sapien
aacagccacttaacagcatggacttcagaatga

SEQ ID NO: 685374 - DNA, 33 bp, Homo sapien
aacagccacttaacaggatggacttcagaatga

SEQ ID NO: 685375 - DNA, 33 bp, Homo sapien
taaggcacccgttgcaccaagctcaatacctgg

SEQ ID NO: 685376 - DNA, 33 bp, Homo sapien
taaggcacccgttgcagcaagctcaatacctgg

SEQ ID NO: 685377 - DNA, 33 bp, Homo sapien
tgtaccatgatccatccgaaatgtgtgtgccgt

SEQ ID NO: 685378 - DNA, 33 bp, Homo sapien
tgtaccatgatccatctgaaatgtgtgtgccgt

SEQ ID NO: 685379 - DNA, 33 bp, Homo sapien
ttaaaaaaaatttaacaacagcctcagtctgga

SEQ ID NO: 685380 - DNA, 33 bp, Homo sapien
ttaaaaaaaatttaacgacagcctcagtctgga

SEQ ID NO: 685381 - DNA, 33 bp, Homo sapien
tttgaaatcttcaccacgaccttgcactgggag

SEQ ID NO: 685382 - DNA, 33 bp, Homo sapien
tttgaaatcttcaccatgaccttgcactgggag

SEQ ID NO: 685383 - DNA, 33 bp, Homo sapien
gcaagtgttgacaaaaagtttttcattatattt

SEQ ID NO: 685384 - DNA, 33 bp, Homo sapien
gcaagtgttgacaaaatgtttttcattatattt

SEQ ID NO: 685385 - DNA, 33 bp, Homo sapien
tggtcatcttgatccaatacttgcttgctatca

SEQ ID NO: 685386 - DNA, 33 bp, Homo sapien
tggtcatcttgatccagtacttgcttgctatca

SEQ ID NO: 685387 - DNA, 33 bp, Homo sapien
tgcagatctgactcagcaggtttgggccggctg

SEQ ID NO: 685388 - DNA, 33 bp, Homo sapien
tgcagatctgactcagtaggtttgggccggctg

SEQ ID NO: 685389 - DNA, 33 bp, Homo sapien
cgtgggccttgggagaatctaacaggtggctaa

SEQ ID NO: 685390 - DNA, 33 bp, Homo sapien
cgtgggccttgggagagtctaacaggtggctaa

SEQ ID NO: 685391 - DNA, 33 bp, Homo sapien
gcctcccacactccctaacaattcgctccaact

SEQ ID NO: 685392 - DNA, 33 bp, Homo sapien
gcctcccacactccctgacaattcgctccaact

SEQ ID NO: 685393 - DNA, 33 bp, Homo sapien
taaaaaataagtagtaaaatccacatcatattc

SEQ ID NO: 685394 - DNA, 33 bp, Homo sapien
taaaaaataagtagtacaatccacatcatattc

SEQ ID NO: 685395 - DNA, 33 bp, Homo sapien
cctatgtttggtggaaaccctggccttgaactg

SEQ ID NO: 685396 - DNA, 33 bp, Homo sapien
cctatgtttggtggaatccctggccttgaactg

SEQ ID NO: 685397 - DNA, 33 bp, Homo sapien
gcgtctgatctggggacacctggagtaaaccat

SEQ ID NO: 685398 - DNA, 33 bp, Homo sapien
gcgtctgatctggggagacctggagtaaaccat

SEQ ID NO: 685399 - DNA, 33 bp, Homo sapien
taaataaagaaccgtggaattcattctttaact

SEQ ID NO: 685400 - DNA, 33 bp, Homo sapien
taaataaagaaccgtgtaattcattctttaact

SEQ ID NO: 685401 - DNA, 33 bp, Homo sapien
tcagcctcaatttacacatggaaacccgatgtg

SEQ ID NO: 685402 - DNA, 33 bp, Homo sapien
tcagcctcaatttacagatggaaacccgatgtg

SEQ ID NO: 685403 - DNA, 33 bp, Homo sapien
atggaattcggtttgaggagtggttaccataca

SEQ ID NO: 685404 - DNA, 33 bp, Homo sapien
atggaattcggtttgatgagtggttaccataca

SEQ ID NO: 685405 - DNA, 33 bp, Homo sapien
ataaaagggaacgaacaattgattgactgatgt

SEQ ID NO: 685406 - DNA, 33 bp, Homo sapien
ataaaagggaacgaactattgattgactgatgt

SEQ ID NO: 685407 - DNA, 33 bp, Homo sapien
actcaagcaccgatcaaccctcagctggaccct

SEQ ID NO: 685408 - DNA, 33 bp, Homo sapien
actcaagcaccgatcagccctcagctggaccct

SEQ ID NO: 685409 - DNA, 33 bp, Homo sapien
gtccaggccagtttcacctatggcccttccaca

SEQ ID NO: 685410 - DNA, 33 bp, Homo sapien
gtccaggccagtttcatctatggcccttccaca

SEQ ID NO: 685411 - DNA, 33 bp, Homo sapien
gtcagagactgttgggacaccagaataaagctt

SEQ ID NO: 685412 - DNA, 33 bp, Homo sapien
gtcagagactgttggggcaccagaataaagctt

SEQ ID NO: 685413 - DNA, 33 bp, Homo sapien
cggtgactatagtgataatacagagtgctgggg

SEQ ID NO: 685414 - DNA, 33 bp, Homo sapien
cggtgactatagtgatcatacagagtgctgggg

SEQ ID NO: 685415 - DNA, 33 bp, Homo sapien
gagcctggaagtgatacgggtgaaattcacatg

SEQ ID NO: 685416 - DNA, 33 bp, Homo sapien
gagcctggaagtgatatgggtgaaattcacatg

SEQ ID NO: 685417 - DNA, 33 bp, Homo sapien
gcaaaatggccgccaaagtgtggcacatagtag

SEQ ID NO: 685418 - DNA, 33 bp, Homo sapien
gcaaaatggccgccaatgtgtggcacatagtag

SEQ ID NO: 685419 - DNA, 33 bp, Homo sapien
ccactccttgcaaggccaatgcaccatactgga

SEQ ID NO: 685420 - DNA, 33 bp, Homo sapien
ccactccttgcaaggcgaatgcaccatactgga

SEQ ID NO: 685421 - DNA, 33 bp, Homo sapien
tatgcctatgttgggacaaagattaaacgagct

SEQ ID NO: 685422 - DNA, 33 bp, Homo sapien
tatgcctatgttgggagaaagattaaacgagct

SEQ ID NO: 685423 - DNA, 33 bp, Homo sapien
gatgaaagaggaagccagcccatttccaggcat

SEQ ID NO: 685424 - DNA, 33 bp, Homo sapien
gatgaaagaggaagccggcccatttccaggcat

SEQ ID NO: 685425 - DNA, 33 bp, Homo sapien
tgccatgtaagtcagacgagacaagtcggaggg

SEQ ID NO: 685426 - DNA, 33 bp, Homo sapien
tgccatgtaagtcagatgagacaagtcggaggg

SEQ ID NO: 685427 - DNA, 33 bp, Homo sapien
gaaccaccagtgacagaaaaacttctatatttt

SEQ ID NO: 685428 - DNA, 33 bp, Homo sapien
gaaccaccagtgacagcaaaacttctatatttt

SEQ ID NO: 685429 - DNA, 33 bp, Homo sapien
cagggggctcaaccacaccatccaaaagcacat

SEQ ID NO: 685430 - DNA, 33 bp, Homo sapien
cagggggctcaaccacgccatccaaaagcacat

SEQ ID NO: 685431 - DNA, 33 bp, Homo sapien
gaaggaacacggtcaacacagccacccgggcta

SEQ ID NO: 685432 - DNA, 33 bp, Homo sapien
gaaggaacacggtcaatacagccacccgggcta

SEQ ID NO: 685433 - DNA, 33 bp, Homo sapien
gttgcggactctactaagacacgtctcaggaac

SEQ ID NO: 685434 - DNA, 33 bp, Homo sapien
gttgcggactctactatgacacgtctcaggaac

SEQ ID NO: 685435 - DNA, 33 bp, Homo sapien
ttggatttggaggctccagccctgcacagggtg

SEQ ID NO: 685436 - DNA, 33 bp, Homo sapien
ttggatttggaggctctagccctgcacagggtg

SEQ ID NO: 685437 - DNA, 33 bp, Homo sapien
gccacactttacagacgaggaccttgaggcgag

SEQ ID NO: 685438 - DNA, 33 bp, Homo sapien
gccacactttacagactaggaccttgaggcgag

SEQ ID NO: 685439 - DNA, 33 bp, Homo sapien
cagctggaacaaaccccgcctgcaggccacagc

SEQ ID NO: 685440 - DNA, 33 bp, Homo sapien
cagctggaacaaaccctgcctgcaggccacagc

SEQ ID NO: 685441 - DNA, 33 bp, Homo sapien
tgctccatttgcaggactaggaaggctttctgg

SEQ ID NO: 685442 - DNA, 33 bp, Homo sapien
tgctccatttgcaggagtaggaaggctttctgg

SEQ ID NO: 685443 - DNA, 33 bp, Homo sapien
ataacattcatcaaaccgtactataattgcttg

SEQ ID NO: 685444 - DNA, 33 bp, Homo sapien
ataacattcatcaaactgtactataattgcttg

SEQ ID NO: 685445 - DNA, 33 bp, Homo sapien
tggaaacacatttggaacatgatagcagcattc

SEQ ID NO: 685446 - DNA, 33 bp, Homo sapien
tggaaacacatttggagcatgatagcagcattc

SEQ ID NO: 685447 - DNA, 33 bp, Homo sapien
aggtggcctgactgaactgaactgtagccccac

SEQ ID NO: 685448 - DNA, 33 bp, Homo sapien
aggtggcctgactgaattgaactgtagccccac

SEQ ID NO: 685449 - DNA, 33 bp, Homo sapien
atgctgcagccagggccatgttttcaaaatacc

SEQ ID NO: 685450 - DNA, 33 bp, Homo sapien
atgctgcagccagggctatgttttcaaaatacc

SEQ ID NO: 685451 - DNA, 33 bp, Homo sapien
ccagagaatggtgacccggcaaattcacgtcaa

SEQ ID NO: 685452 - DNA, 33 bp, Homo sapien
ccagagaatggtgacctggcaaattcacgtcaa

SEQ ID NO: 685453 - DNA, 33 bp, Homo sapien
agcattaaacagatgaactcagtcaaggcggtt

SEQ ID NO: 685454 - DNA, 33 bp, Homo sapien
agcattaaacagatgacctcagtcaaggcggtt

SEQ ID NO: 685455 - DNA, 33 bp, Homo sapien
acagagacctgctcccaatgtggcactgaagag

SEQ ID NO: 685456 - DNA, 33 bp, Homo sapien
acagagacctgctcccgatgtggcactgaagag

SEQ ID NO: 685457 - DNA, 33 bp, Homo sapien
cttgtgtggacagggtcaacaagtgggtcttgg

SEQ ID NO: 685458 - DNA, 33 bp, Homo sapien
cttgtgtggacagggtgaacaagtgggtcttgg

SEQ ID NO: 685459 - DNA, 33 bp, Homo sapien
catatcagcaagggccacaatgaaaggaaccca

SEQ ID NO: 685460 - DNA, 33 bp, Homo sapien
catatcagcaagggccgcaatgaaaggaaccca

SEQ ID NO: 685461 - DNA, 33 bp, Homo sapien
tactgcattcaaccaccgacttacaaacaccca

SEQ ID NO: 685462 - DNA, 33 bp, Homo sapien
tactgcattcaaccactgacttacaaacaccca

SEQ ID NO: 685463 - DNA, 33 bp, Homo sapien
gtttgtgtcgagtgcaagtggcttcttcctgtg

SEQ ID NO: 685464 - DNA, 33 bp, Homo sapien
gtttgtgtcgagtgcacgtggcttcttcctgtg

SEQ ID NO: 685465 - DNA, 33 bp, Homo sapien
tgcttgtgatacaaacacataagctaggtgact

SEQ ID NO: 685466 - DNA, 33 bp, Homo sapien
tgcttgtgatacaaacccataagctaggtgact

SEQ ID NO: 685467 - DNA, 33 bp, Homo sapien
acctagatacagcttcaaatgttgacaagcaga

SEQ ID NO: 685468 - DNA, 33 bp, Homo sapien
acctagatacagcttcgaatgttgacaagcaga

SEQ ID NO: 685469 - DNA, 33 bp, Homo sapien
atgcatattacccgagaatgaaggtgcatctag

SEQ ID NO: 685470 - DNA, 33 bp, Homo sapien
atgcatattacccgaggatgaaggtgcatctag

SEQ ID NO: 685471 - DNA, 33 bp, Homo sapien
gcaacagaatctcacaataacccaggacatctg

SEQ ID NO: 685472 - DNA, 33 bp, Homo sapien
gcaacagaatctcacagtaacccaggacatctg

SEQ ID NO: 685473 - DNA, 33 bp, Homo sapien
accctgtggctttttaaattcgttctctaagca

SEQ ID NO: 685474 - DNA, 33 bp, Homo sapien
accctgtggctttttagattcgttctctaagca

SEQ ID NO: 685475 - DNA, 33 bp, Homo sapien
aagcaccaaatactaccactaaaagactgcaag

SEQ ID NO: 685476 - DNA, 33 bp, Homo sapien
aagcaccaaatactactactaaaagactgcaag

SEQ ID NO: 685477 - DNA, 33 bp, Homo sapien
ctgggagtttctaaaacaccattttcataaact

SEQ ID NO: 685478 - DNA, 33 bp, Homo sapien
ctgggagtttctaaaagaccattttcataaact

SEQ ID NO: 685479 - DNA, 33 bp, Homo sapien
acatattgattgcagggagacatacatatatac

SEQ ID NO: 685480 - DNA, 33 bp, Homo sapien
acatattgattgcaggtagacatacatatatac

SEQ ID NO: 685481 - DNA, 33 bp, Homo sapien
atctgagacgatcttacgggctaggaagctggc

SEQ ID NO: 685482 - DNA, 33 bp, Homo sapien
atctgagacgatcttatgggctaggaagctggc

SEQ ID NO: 685483 - DNA, 33 bp, Homo sapien
tgctgggtctgcaggaaagtgtagatggaagcc

SEQ ID NO: 685484 - DNA, 33 bp, Homo sapien
tgctgggtctgcaggacagtgtagatggaagcc

SEQ ID NO: 685485 - DNA, 33 bp, Homo sapien
tgaacacccagctggccccagtagaaaatggct

SEQ ID NO: 685486 - DNA, 33 bp, Homo sapien
tgaacacccagctggctccagtagaaaatggct

SEQ ID NO: 685487 - DNA, 33 bp, Homo sapien
gtggacttggttttccaaaatgcagggctcatg

SEQ ID NO: 685488 - DNA, 33 bp, Homo sapien
gtggacttggttttccgaaatgcagggctcatg

SEQ ID NO: 685489 - DNA, 33 bp, Homo sapien
cacgttaggtgggtgacgattaacccgtacaag

SEQ ID NO: 685490 - DNA, 33 bp, Homo sapien
cacgttaggtgggtgatgattaacccgtacaag

SEQ ID NO: 685491 - DNA, 33 bp, Homo sapien
ttgatgaggaacaagacagttacatattttcag

SEQ ID NO: 685492 - DNA, 33 bp, Homo sapien
ttgatgaggaacaagatagttacatattttcag

SEQ ID NO: 685493 - DNA, 33 bp, Homo sapien
caaaattaatctgtggaagaaaagtgtttgctc

SEQ ID NO: 685494 - DNA, 33 bp, Homo sapien
caaaattaatctgtgggagaaaagtgtttgctc

SEQ ID NO: 685495 - DNA, 33 bp, Homo sapien
ctgtggctctgatttcaccccttcagaaaatgc

SEQ ID NO: 685496 - DNA, 33 bp, Homo sapien
ctgtggctctgatttccccccttcagaaaatgc

SEQ ID NO: 685497 - DNA, 33 bp, Homo sapien
agacttgacattcacaatggcttagtggtttct

SEQ ID NO: 685498 - DNA, 33 bp, Homo sapien
agacttgacattcacagtggcttagtggtttct

SEQ ID NO: 685499 - DNA, 33 bp, Homo sapien
aaatccaaatagaaatcatggatctactatgat

SEQ ID NO: 685500 - DNA, 33 bp, Homo sapien
aaatccaaatagaaatgatggatctactatgat

SEQ ID NO: 685501 - DNA, 33 bp, Homo sapien
gagtgtgccctagtgaacattgcaagctgacag

SEQ ID NO: 685502 - DNA, 33 bp, Homo sapien
gagtgtgccctagtgagcattgcaagctgacag

SEQ ID NO: 685503 - DNA, 33 bp, Homo sapien
aaataaatgaaagcgaaatcatcccacatcaat

SEQ ID NO: 685504 - DNA, 33 bp, Homo sapien
aaataaatgaaagcgagatcatcccacatcaat

SEQ ID NO: 685505 - DNA, 33 bp, Homo sapien
tggagccctaaggaatcagcagaagttggcctt

SEQ ID NO: 685506 - DNA, 33 bp, Homo sapien
tggagccctaaggaatgagcagaagttggcctt

SEQ ID NO: 685507 - DNA, 33 bp, Homo sapien
aaggccacgtcctccccgatattgctcccctgg

SEQ ID NO: 685508 - DNA, 33 bp, Homo sapien
aaggccacgtcctccctgatattgctcccctgg

SEQ ID NO: 685509 - DNA, 33 bp, Homo sapien
ggggagagagctcctcactgggttttctctgtc

SEQ ID NO: 685510 - DNA, 33 bp, Homo sapien
ggggagagagctcctcgctgggttttctctgtc

SEQ ID NO: 685511 - DNA, 33 bp, Homo sapien
tctcttgacagttccaataattccttagaactt

SEQ ID NO: 685512 - DNA, 33 bp, Homo sapien
tctcttgacagttccattaattccttagaactt

SEQ ID NO: 685513 - DNA, 33 bp, Homo sapien
ccccctcttaatcccgcagtcattcattcagga

SEQ ID NO: 685514 - DNA, 33 bp, Homo sapien
ccccctcttaatcccgtagtcattcattcagga

SEQ ID NO: 685515 - DNA, 33 bp, Homo sapien
taggatttgctgcacagcccgttactcagaaaa

SEQ ID NO: 685516 - DNA, 33 bp, Homo sapien
taggatttgctgcacatcccgttactcagaaaa

SEQ ID NO: 685517 - DNA, 33 bp, Homo sapien
ctatggaggaaattcaaggtgagctttctgttt

SEQ ID NO: 685518 - DNA, 33 bp, Homo sapien
ctatggaggaaattcagggtgagctttctgttt

SEQ ID NO: 685519 - DNA, 33 bp, Homo sapien
taaaagaaaagtgcacacatatctccagcacaa

SEQ ID NO: 685520 - DNA, 33 bp, Homo sapien
taaaagaaaagtgcacgcatatctccagcacaa

SEQ ID NO: 685521 - DNA, 33 bp, Homo sapien
tcacctgtgtctctccaatcctcgcccagacca

SEQ ID NO: 685522 - DNA, 33 bp, Homo sapien
tcacctgtgtctctccgatcctcgcccagacca

SEQ ID NO: 685523 - DNA, 33 bp, Homo sapien
tccactgtttttcctccgagccctgtctctcca

SEQ ID NO: 685524 - DNA, 33 bp, Homo sapien
tccactgtttttcctctgagccctgtctctcca

SEQ ID NO: 685525 - DNA, 33 bp, Homo sapien
gcaattttaaatgatacagtgcaggctggacag

SEQ ID NO: 685526 - DNA, 33 bp, Homo sapien
gcaattttaaatgatatagtgcaggctggacag

SEQ ID NO: 685527 - DNA, 33 bp, Homo sapien
cgaggcatagaccccaactcagagaggtcaggg

SEQ ID NO: 685528 - DNA, 33 bp, Homo sapien
cgaggcatagaccccatctcagagaggtcaggg

SEQ ID NO: 685529 - DNA, 33 bp, Homo sapien
gcagtgccagggacacaagctaacagcacagag

SEQ ID NO: 685530 - DNA, 33 bp, Homo sapien
gcagtgccagggacacgagctaacagcacagag

SEQ ID NO: 685531 - DNA, 33 bp, Homo sapien
gtgatttcttcttcaccatctgagcgaaggcag

SEQ ID NO: 685532 - DNA, 33 bp, Homo sapien
gtgatttcttcttcacgatctgagcgaaggcag

SEQ ID NO: 685533 - DNA, 33 bp, Homo sapien
atgaaataagatgtagaattgacagtaacggtc

SEQ ID NO: 685534 - DNA, 33 bp, Homo sapien
atgaaataagatgtagtattgacagtaacggtc

SEQ ID NO: 685535 - DNA, 33 bp, Homo sapien
gctgatgtccgcagcacggtccctggctgcagg

SEQ ID NO: 685536 - DNA, 33 bp, Homo sapien
gctgatgtccgcagcatggtccctggctgcagg

SEQ ID NO: 685537 - DNA, 33 bp, Homo sapien
aggttcaaatctccaactcagtgctatgtggtc

SEQ ID NO: 685538 - DNA, 33 bp, Homo sapien
aggttcaaatctccaattcagtgctatgtggtc

SEQ ID NO: 685539 - DNA, 33 bp, Homo sapien
gggaaaggcccagacactgaggctcagctgagc

SEQ ID NO: 685540 - DNA, 33 bp, Homo sapien
gggaaaggcccagacattgaggctcagctgagc

SEQ ID NO: 685541 - DNA, 33 bp, Homo sapien
cacggccccccgatgcaaacattgccaggccct

SEQ ID NO: 685542 - DNA, 33 bp, Homo sapien
cacggccccccgatgcgaacattgccaggccct

SEQ ID NO: 685543 - DNA, 33 bp, Homo sapien
tctcactctctgactcaccattttaatgagcaa

SEQ ID NO: 685544 - DNA, 33 bp, Homo sapien
tctcactctctgactccccattttaatgagcaa

SEQ ID NO: 685545 - DNA, 33 bp, Homo sapien
tatttcattgacgaaacgagtgttcccttttct

SEQ ID NO: 685546 - DNA, 33 bp, Homo sapien
tatttcattgacgaaatgagtgttcccttttct

SEQ ID NO: 685547 - DNA, 33 bp, Homo sapien
aaacacttaaatgctcaaagaaagtaagtcaga

SEQ ID NO: 685548 - DNA, 33 bp, Homo sapien
aaacacttaaatgctcgaagaaagtaagtcaga

SEQ ID NO: 685549 - DNA, 33 bp, Homo sapien
aggacaggtgaccagactcctacatctcttgtt

SEQ ID NO: 685550 - DNA, 33 bp, Homo sapien
aggacaggtgaccagattcctacatctcttgtt

SEQ ID NO: 685551 - DNA, 33 bp, Homo sapien
ggtggctcctggataaggctgtgactccctgtt

SEQ ID NO: 685552 - DNA, 33 bp, Homo sapien
ggtggctcctggataatgctgtgactccctgtt

SEQ ID NO: 685553 - DNA, 33 bp, Homo sapien
caatgtaaattgtaagaaaaaatatgacatgga

SEQ ID NO: 685554 - DNA, 33 bp, Homo sapien
caatgtaaattgtaaggaaaaatatgacatgga

SEQ ID NO: 685555 - DNA, 33 bp, Homo sapien
gcgagcggctctgccccggattcctgcttcctt

SEQ ID NO: 685556 - DNA, 33 bp, Homo sapien
gcgagcggctctgccctggattcctgcttcctt

SEQ ID NO: 685557 - DNA, 33 bp, Homo sapien
gtgctaggagaggttcggaaattaaggcaatct

SEQ ID NO: 685558 - DNA, 33 bp, Homo sapien
gtgctaggagaggttctgaaattaaggcaatct

SEQ ID NO: 685559 - DNA, 33 bp, Homo sapien
aactgcaaaacaggacagcagaactgaaggact

SEQ ID NO: 685560 - DNA, 33 bp, Homo sapien
aactgcaaaacaggacggcagaactgaaggact

SEQ ID NO: 685561 - DNA, 33 bp, Homo sapien
tcaccaggacaggaacagccatctcattgacag

SEQ ID NO: 685562 - DNA, 33 bp, Homo sapien
tcaccaggacaggaacggccatctcattgacag

SEQ ID NO: 685563 - DNA, 33 bp, Homo sapien
gaggtggagggacccacgagtgtctcagccaag

SEQ ID NO: 685564 - DNA, 33 bp, Homo sapien
gaggtggagggacccatgagtgtctcagccaag

SEQ ID NO: 685565 - DNA, 33 bp, Homo sapien
ggagcaacaggaagcagtcaggatgtatttgac

SEQ ID NO: 685566 - DNA, 33 bp, Homo sapien
ggagcaacaggaagcattcaggatgtatttgac

SEQ ID NO: 685567 - DNA, 33 bp, Homo sapien
accagcttttggctccagcgttgcacggatttc

SEQ ID NO: 685568 - DNA, 33 bp, Homo sapien
accagcttttggctccggcgttgcacggatttc

SEQ ID NO: 685569 - DNA, 33 bp, Homo sapien
agccaaaagctggttccctggaccctctcattt

SEQ ID NO: 685570 - DNA, 33 bp, Homo sapien
agccaaaagctggttctctggaccctctcattt

SEQ ID NO: 685571 - DNA, 33 bp, Homo sapien
gttgctggtgtctaggaagcatttacaatttca

SEQ ID NO: 685572 - DNA, 33 bp, Homo sapien
gttgctggtgtctaggcagcatttacaatttca

SEQ ID NO: 685573 - DNA, 33 bp, Homo sapien
ggactaccctagatcacggagctcaaccataag

SEQ ID NO: 685574 - DNA, 33 bp, Homo sapien
ggactaccctagatcatggagctcaaccataag

SEQ ID NO: 685575 - DNA, 33 bp, Homo sapien
aacaggagatgatagcagacaaggcttgtggtt

SEQ ID NO: 685576 - DNA, 33 bp, Homo sapien
aacaggagatgatagcggacaaggcttgtggtt

SEQ ID NO: 685577 - DNA, 33 bp, Homo sapien
tgtattaagaagaaagcattttgacttccttat

SEQ ID NO: 685578 - DNA, 33 bp, Homo sapien
tgtattaagaagaaaggattttgacttccttat

SEQ ID NO: 685579 - DNA, 33 bp, Homo sapien
atgggttggcgaatcccatgtggtctcttgcca

SEQ ID NO: 685580 - DNA, 33 bp, Homo sapien
atgggttggcgaatcctatgtggtctcttgcca

SEQ ID NO: 685581 - DNA, 33 bp, Homo sapien
tgaaccacgaccaccaacagatccaacactgcg

SEQ ID NO: 685582 - DNA, 33 bp, Homo sapien
tgaaccacgaccaccagcagatccaacactgcg

SEQ ID NO: 685583 - DNA, 33 bp, Homo sapien
gataacctccgattaccggctggctaccctgct

SEQ ID NO: 685584 - DNA, 33 bp, Homo sapien
gataacctccgattactggctggctaccctgct

SEQ ID NO: 685585 - DNA, 33 bp, Homo sapien
cccctgctccttgctgcagaagtcaggagctgt

SEQ ID NO: 685586 - DNA, 33 bp, Homo sapien
cccctgctccttgctgtagaagtcaggagctgt

SEQ ID NO: 685587 - DNA, 33 bp, Homo sapien
cacacggtttctaagccgactgtagtaccagca

SEQ ID NO: 685588 - DNA, 33 bp, Homo sapien
cacacggtttctaagctgactgtagtaccagca

SEQ ID NO: 685589 - DNA, 33 bp, Homo sapien
ccaagacacacttcacaaggcatgagaagaacc

SEQ ID NO: 685590 - DNA, 33 bp, Homo sapien
ccaagacacacttcacgaggcatgagaagaacc

SEQ ID NO: 685591 - DNA, 33 bp, Homo sapien
cgggggacagtgagacaaagccggactctggag

SEQ ID NO: 685592 - DNA, 33 bp, Homo sapien
cgggggacagtgagacgaagccggactctggag

SEQ ID NO: 685593 - DNA, 33 bp, Homo sapien
gagcgaggaaggcagacgagaggatctttccag

SEQ ID NO: 685594 - DNA, 33 bp, Homo sapien
gagcgaggaaggcagatgagaggatctttccag

SEQ ID NO: 685595 - DNA, 33 bp, Homo sapien
taaaccaagtggcacgaaagtagacggtgaatc

SEQ ID NO: 685596 - DNA, 33 bp, Homo sapien
taaaccaagtggcacggaagtagacggtgaatc

SEQ ID NO: 685597 - DNA, 33 bp, Homo sapien
gggtaaagtggactcacgacgggtacaggtgca

SEQ ID NO: 685598 - DNA, 33 bp, Homo sapien
gggtaaagtggactcatgacgggtacaggtgca

SEQ ID NO: 685599 - DNA, 33 bp, Homo sapien
agttttcgaatctctaaaatgggaccgtatgta

SEQ ID NO: 685600 - DNA, 33 bp, Homo sapien
agttttcgaatctctagaatgggaccgtatgta

SEQ ID NO: 685601 - DNA, 33 bp, Homo sapien
aagccagagcccctaacaacaggccagatggga

SEQ ID NO: 685602 - DNA, 33 bp, Homo sapien
aagccagagcccctaataacaggccagatggga

SEQ ID NO: 685603 - DNA, 33 bp, Homo sapien
agaaaggatgaaacgaaactctatttgacttga

SEQ ID NO: 685604 - DNA, 33 bp, Homo sapien
agaaaggatgaaacgagactctatttgacttga

SEQ ID NO: 685605 - DNA, 33 bp, Homo sapien
gtcaggtccatttaaaacacagtccaggccagg

SEQ ID NO: 685606 - DNA, 33 bp, Homo sapien
gtcaggtccatttaaagcacagtccaggccagg

SEQ ID NO: 685607 - DNA, 33 bp, Homo sapien
tgccctgcctgcctccaagacagcagttcctgc

SEQ ID NO: 685608 - DNA, 33 bp, Homo sapien
tgccctgcctgcctccgagacagcagttcctgc

SEQ ID NO: 685609 - DNA, 33 bp, Homo sapien
gttgcagaccagaggcacagccaggctgagagg

SEQ ID NO: 685610 - DNA, 33 bp, Homo sapien
gttgcagaccagaggcgcagccaggctgagagg

SEQ ID NO: 685611 - DNA, 33 bp, Homo sapien
gtgatttataaagtaaaccttctgctgcctctg

SEQ ID NO: 685612 - DNA, 33 bp, Homo sapien
gtgatttataaagtaagccttctgctgcctctg

SEQ ID NO: 685613 - DNA, 33 bp, Homo sapien
catttatcacatgaacagtgccacatctacatg

SEQ ID NO: 685614 - DNA, 33 bp, Homo sapien
catttatcacatgaacggtgccacatctacatg

SEQ ID NO: 685615 - DNA, 33 bp, Homo sapien
gaagttctgcctagcccattgattgcttgccat

SEQ ID NO: 685616 - DNA, 33 bp, Homo sapien
gaagttctgcctagcctattgattgcttgccat

SEQ ID NO: 685617 - DNA, 33 bp, Homo sapien
tgtcacgggtagagtaagaaaccatcacagtga

SEQ ID NO: 685618 - DNA, 33 bp, Homo sapien
tgtcacgggtagagtaggaaaccatcacagtga

SEQ ID NO: 685619 - DNA, 33 bp, Homo sapien
cgctgccgattacgacacacaattacccatgta

SEQ ID NO: 685620 - DNA, 33 bp, Homo sapien
cgctgccgattacgacgcacaattacccatgta

SEQ ID NO: 685621 - DNA, 33 bp, Homo sapien
cgaggaagaacatcccaaagagaaatgctgtgt

SEQ ID NO: 685622 - DNA, 33 bp, Homo sapien
cgaggaagaacatcccgaagagaaatgctgtgt

SEQ ID NO: 685623 - DNA, 33 bp, Homo sapien
acactaaatagttgcacgcgtaaatgaagaaat

SEQ ID NO: 685624 - DNA, 33 bp, Homo sapien
acactaaatagttgcatgcgtaaatgaagaaat

SEQ ID NO: 685625 - DNA, 33 bp, Homo sapien
gagaggaggtgacatcaaaagacacagcatcag

SEQ ID NO: 685626 - DNA, 33 bp, Homo sapien
gagaggaggtgacatcgaaagacacagcatcag

SEQ ID NO: 685627 - DNA, 33 bp, Homo sapien
aattataatcaatcgagaagttcaattaactgg

SEQ ID NO: 685628 - DNA, 33 bp, Homo sapien
aattataatcaatcgataagttcaattaactgg

SEQ ID NO: 685629 - DNA, 33 bp, Homo sapien
accagtcaggttgttcacggtttccaccttaga

SEQ ID NO: 685630 - DNA, 33 bp, Homo sapien
accagtcaggttgttcgcggtttccaccttaga

SEQ ID NO: 685631 - DNA, 33 bp, Homo sapien
aactcagcaaacgtgccctaccagctgcctgtc

SEQ ID NO: 685632 - DNA, 33 bp, Homo sapien
aactcagcaaacgtgcgctaccagctgcctgtc

SEQ ID NO: 685633 - DNA, 33 bp, Homo sapien
taactcaaggatggaacaggctgtgagcattga

SEQ ID NO: 685634 - DNA, 33 bp, Homo sapien
taactcaaggatggaagaggctgtgagcattga

SEQ ID NO: 685635 - DNA, 33 bp, Homo sapien
ctgacgggccagtttacatatttaaagtgacgg

SEQ ID NO: 685636 - DNA, 33 bp, Homo sapien
ctgacgggccagtttatatatttaaagtgacgg

SEQ ID NO: 685637 - DNA, 33 bp, Homo sapien
tgttctggttaacaagccatttgcttattcaga

SEQ ID NO: 685638 - DNA, 33 bp, Homo sapien
tgttctggttaacaagtcatttgcttattcaga

SEQ ID NO: 685639 - DNA, 33 bp, Homo sapien
agaaaggatttgccgaacgcagaagatgttctg

SEQ ID NO: 685640 - DNA, 33 bp, Homo sapien
agaaaggatttgccgaccgcagaagatgttctg

SEQ ID NO: 685641 - DNA, 33 bp, Homo sapien
cactcagcacactcaaccctgggcaatctctct

SEQ ID NO: 685642 - DNA, 33 bp, Homo sapien
cactcagcacactcaatcctgggcaatctctct

SEQ ID NO: 685643 - DNA, 33 bp, Homo sapien
ggctcacgaggattaacgatgacgaggggggtg

SEQ ID NO: 685644 - DNA, 33 bp, Homo sapien
ggctcacgaggattaatgatgacgaggggggtg

SEQ ID NO: 685645 - DNA, 33 bp, Homo sapien
gggcagcaaatctgaaatgaacactgagtaagt

SEQ ID NO: 685646 - DNA, 33 bp, Homo sapien
gggcagcaaatctgaactgaacactgagtaagt

SEQ ID NO: 685647 - DNA, 33 bp, Homo sapien
cttgagttcctgagtgaagtcagcctgacccca

SEQ ID NO: 685648 - DNA, 33 bp, Homo sapien
cttgagttcctgagtggagtcagcctgacccca

SEQ ID NO: 685649 - DNA, 33 bp, Homo sapien
gcggcactacagttcaccctccgctcggcatca

SEQ ID NO: 685650 - DNA, 33 bp, Homo sapien
gcggcactacagttcagcctccgctcggcatca

SEQ ID NO: 685651 - DNA, 33 bp, Homo sapien
ctgtagctcaccttcaaagagttgtcaggtaag

SEQ ID NO: 685652 - DNA, 33 bp, Homo sapien
ctgtagctcaccttcagagagttgtcaggtaag

SEQ ID NO: 685653 - DNA, 33 bp, Homo sapien
atgttcttagcagcccaacatctgacagaggag

SEQ ID NO: 685654 - DNA, 33 bp, Homo sapien
atgttcttagcagcccgacatctgacagaggag

SEQ ID NO: 685655 - DNA, 33 bp, Homo sapien
ggccctttgaccacctgaagctaccttgctcat

SEQ ID NO: 685656 - DNA, 33 bp, Homo sapien
ggccctttgaccaccttaagctaccttgctcat

SEQ ID NO: 685657 - DNA, 33 bp, Homo sapien
agtgcagtcagcactacgattggtaaagtcccg

SEQ ID NO: 685658 - DNA, 33 bp, Homo sapien
agtgcagtcagcactatgattggtaaagtcccg

SEQ ID NO: 685659 - DNA, 33 bp, Homo sapien
aggctgtgaaaagcaaaagcccacatggagcca

SEQ ID NO: 685660 - DNA, 33 bp, Homo sapien
aggctgtgaaaagcaagagcccacatggagcca

SEQ ID NO: 685661 - DNA, 33 bp, Homo sapien
tttttaaatgcttgggaaaaaattcaatagttg

SEQ ID NO: 685662 - DNA, 33 bp, Homo sapien
tttttaaatgcttggggaaaaattcaatagttg

SEQ ID NO: 685663 - DNA, 33 bp, Homo sapien
cacctcagtgaatgggcacttattgcttctggg

SEQ ID NO: 685664 - DNA, 33 bp, Homo sapien
cacctcagtgaatggggacttattgcttctggg

SEQ ID NO: 685665 - DNA, 33 bp, Homo sapien
gggggagactgctggcacccataggtcctcgga

SEQ ID NO: 685666 - DNA, 33 bp, Homo sapien
gggggagactgctggcgcccataggtcctcgga

SEQ ID NO: 685667 - DNA, 33 bp, Homo sapien
gtaagaccatagagacagcgaggtgcccaggtg

SEQ ID NO: 685668 - DNA, 33 bp, Homo sapien
gtaagaccatagagacggcgaggtgcccaggtg

SEQ ID NO: 685669 - DNA, 33 bp, Homo sapien
tagcttccccacccaactctgaggagcttacat

SEQ ID NO: 685670 - DNA, 33 bp, Homo sapien
tagcttccccacccaattctgaggagcttacat

SEQ ID NO: 685671 - DNA, 33 bp, Homo sapien
tccatgaacaagataaaatcaggtaattcaatg

SEQ ID NO: 685672 - DNA, 33 bp, Homo sapien
tccatgaacaagataacatcaggtaattcaatg

SEQ ID NO: 685673 - DNA, 33 bp, Homo sapien
aaaatccatgtgtgatcaaatcaaaatagcttc

SEQ ID NO: 685674 - DNA, 33 bp, Homo sapien
aaaatccatgtgtgatgaaatcaaaatagcttc

SEQ ID NO: 685675 - DNA, 33 bp, Homo sapien
cattcattcacttaaacgcaggcactccttgca

SEQ ID NO: 685676 - DNA, 33 bp, Homo sapien
cattcattcacttaaaggcaggcactccttgca

SEQ ID NO: 685677 - DNA, 33 bp, Homo sapien
gggtgtctgtcattccaaatgtagagatgcgat

SEQ ID NO: 685678 - DNA, 33 bp, Homo sapien
gggtgtctgtcattccgaatgtagagatgcgat

SEQ ID NO: 685679 - DNA, 33 bp, Homo sapien
catttacacactaaaacacaccctcacactcaa

SEQ ID NO: 685680 - DNA, 33 bp, Homo sapien
catttacacactaaaatacaccctcacactcaa

SEQ ID NO: 685681 - DNA, 33 bp, Homo sapien
agcccaggcttcctggcattgctgttaagagat

SEQ ID NO: 685682 - DNA, 33 bp, Homo sapien
agcccaggcttcctggtattgctgttaagagat

SEQ ID NO: 685683 - DNA, 33 bp, Homo sapien
gacacgtagagctttaaggcagaaaaaagaaac

SEQ ID NO: 685684 - DNA, 33 bp, Homo sapien
gacacgtagagctttagggcagaaaaaagaaac

SEQ ID NO: 685685 - DNA, 33 bp, Homo sapien
agcactgagaggacgactactgcataaattcaa

SEQ ID NO: 685686 - DNA, 33 bp, Homo sapien
agcactgagaggacgagtactgcataaattcaa

SEQ ID NO: 685687 - DNA, 33 bp, Homo sapien
aactaacttctttccccatgctctctcagcacc

SEQ ID NO: 685688 - DNA, 33 bp, Homo sapien
aactaacttctttccctatgctctctcagcacc

SEQ ID NO: 685689 - DNA, 33 bp, Homo sapien
aggaaagtgcacagcccagaattaggcccatac

SEQ ID NO: 685690 - DNA, 33 bp, Homo sapien
aggaaagtgcacagccgagaattaggcccatac

SEQ ID NO: 685691 - DNA, 33 bp, Homo sapien
gcctgctgattttctaaattgtcccatatatac

SEQ ID NO: 685692 - DNA, 33 bp, Homo sapien
gcctgctgattttctacattgtcccatatatac

SEQ ID NO: 685693 - DNA, 33 bp, Homo sapien
ggacctgaccctcgggaagtcaggctccagagt

SEQ ID NO: 685694 - DNA, 33 bp, Homo sapien
ggacctgaccctcgggcagtcaggctccagagt

SEQ ID NO: 685695 - DNA, 33 bp, Homo sapien
gggagaacaacagcagccatgatgatgaaacca

SEQ ID NO: 685696 - DNA, 33 bp, Homo sapien
gggagaacaacagcagtcatgatgatgaaacca

SEQ ID NO: 685697 - DNA, 33 bp, Homo sapien
gtgagaagcctggtcaaattctcttggcccatt

SEQ ID NO: 685698 - DNA, 33 bp, Homo sapien
gtgagaagcctggtcagattctcttggcccatt

SEQ ID NO: 685699 - DNA, 33 bp, Homo sapien
ctgtttcccactgtcacccataagcccttctta

SEQ ID NO: 685700 - DNA, 33 bp, Homo sapien
ctgtttcccactgtcatccataagcccttctta

SEQ ID NO: 685701 - DNA, 33 bp, Homo sapien
atgcttggaagatacagaaaggtataaaaaggg

SEQ ID NO: 685702 - DNA, 33 bp, Homo sapien
atgcttggaagatacataaaggtataaaaaggg

SEQ ID NO: 685703 - DNA, 33 bp, Homo sapien
agtgtctagcaaatcaccaaagcctaccagatg

SEQ ID NO: 685704 - DNA, 33 bp, Homo sapien
agtgtctagcaaatcatcaaagcctaccagatg

SEQ ID NO: 685705 - DNA, 33 bp, Homo sapien
cccatttgcccagcagactcaatccaaacccca

SEQ ID NO: 685706 - DNA, 33 bp, Homo sapien
cccatttgcccagcaggctcaatccaaacccca

SEQ ID NO: 685707 - DNA, 33 bp, Homo sapien
tctcactgcatccctgacaacctgggcacgata

SEQ ID NO: 685708 - DNA, 33 bp, Homo sapien
tctcactgcatccctggcaacctgggcacgata

SEQ ID NO: 685709 - DNA, 33 bp, Homo sapien
tggatgactgaatggcagacagcaacttctacc

SEQ ID NO: 685710 - DNA, 33 bp, Homo sapien
tggatgactgaatggcggacagcaacttctacc

SEQ ID NO: 685711 - DNA, 33 bp, Homo sapien
cagtcatccagggtgcgctgagtccgcgtgggc

SEQ ID NO: 685712 - DNA, 33 bp, Homo sapien
cagtcatccagggtgctctgagtccgcgtgggc

SEQ ID NO: 685713 - DNA, 33 bp, Homo sapien
tatgacttgtcaattgcactgcgtgagtcgctc

SEQ ID NO: 685714 - DNA, 33 bp, Homo sapien
tatgacttgtcaattgtactgcgtgagtcgctc

SEQ ID NO: 685715 - DNA, 33 bp, Homo sapien
atggtacaggtaggaacagagtccagaggggac

SEQ ID NO: 685716 - DNA, 33 bp, Homo sapien
atggtacaggtaggaagagagtccagaggggac

SEQ ID NO: 685717 - DNA, 33 bp, Homo sapien
ccagttattgtcatcactcacctaattgtcctc

SEQ ID NO: 685718 - DNA, 33 bp, Homo sapien
ccagttattgtcatcattcacctaattgtcctc

SEQ ID NO: 685719 - DNA, 33 bp, Homo sapien
ctgttcccttgagagaactggattgggcgattc

SEQ ID NO: 685720 - DNA, 33 bp, Homo sapien
ctgttcccttgagagacctggattgggcgattc

SEQ ID NO: 685721 - DNA, 33 bp, Homo sapien
tctcgactcgggaagcagatttccagccccctg

SEQ ID NO: 685722 - DNA, 33 bp, Homo sapien
tctcgactcgggaagcggatttccagccccctg

SEQ ID NO: 685723 - DNA, 33 bp, Homo sapien
ctccgggtgcgacacgcatgcatcgaaccctct

SEQ ID NO: 685724 - DNA, 33 bp, Homo sapien
ctccgggtgcgacacggatgcatcgaaccctct

SEQ ID NO: 685725 - DNA, 33 bp, Homo sapien
gacaaatgacaggtaaacacacgaaaagatgac

SEQ ID NO: 685726 - DNA, 33 bp, Homo sapien
gacaaatgacaggtaagcacacgaaaagatgac

SEQ ID NO: 685727 - DNA, 33 bp, Homo sapien
ggcggtcatatcagagaaatgaagacttctgtt

SEQ ID NO: 685728 - DNA, 33 bp, Homo sapien
ggcggtcatatcagagtaatgaagacttctgtt

SEQ ID NO: 685729 - DNA, 33 bp, Homo sapien
ctccttgactcacaagaatgaacacaccctatg

SEQ ID NO: 685730 - DNA, 33 bp, Homo sapien
ctccttgactcacaagcatgaacacaccctatg

SEQ ID NO: 685731 - DNA, 33 bp, Homo sapien
accgtcagaaaggaccagaggcaatcaaacagc

SEQ ID NO: 685732 - DNA, 33 bp, Homo sapien
accgtcagaaaggaccggaggcaatcaaacagc

SEQ ID NO: 685733 - DNA, 33 bp, Homo sapien
gtggggcgaacctgccaagtttcaagggcacgg

SEQ ID NO: 685734 - DNA, 33 bp, Homo sapien
gtggggcgaacctgccgagtttcaagggcacgg

SEQ ID NO: 685735 - DNA, 33 bp, Homo sapien
ttacaaccagggacagacacgggcccacgcctg

SEQ ID NO: 685736 - DNA, 33 bp, Homo sapien
ttacaaccagggacagccacgggcccacgcctg

SEQ ID NO: 685737 - DNA, 33 bp, Homo sapien
catgcatttcaggaaaggaggaaagtatcttca

SEQ ID NO: 685738 - DNA, 33 bp, Homo sapien
catgcatttcaggaaatgaggaaagtatcttca

SEQ ID NO: 685739 - DNA, 33 bp, Homo sapien
aagtgagaatggaaaccgtcaaacagggtggct

SEQ ID NO: 685740 - DNA, 33 bp, Homo sapien
aagtgagaatggaaactgtcaaacagggtggct

SEQ ID NO: 685741 - DNA, 33 bp, Homo sapien
gtgattgactactggaacattccatcatcggcc

SEQ ID NO: 685742 - DNA, 33 bp, Homo sapien
gtgattgactactggagcattccatcatcggcc

SEQ ID NO: 685743 - DNA, 33 bp, Homo sapien
cctctcgtaaagtctacagacactgatcaggtc

SEQ ID NO: 685744 - DNA, 33 bp, Homo sapien
cctctcgtaaagtctagagacactgatcaggtc

SEQ ID NO: 685745 - DNA, 33 bp, Homo sapien
tagtcttgctgggaaaatctggttaaagctttt

SEQ ID NO: 685746 - DNA, 33 bp, Homo sapien
tagtcttgctgggaaagtctggttaaagctttt

SEQ ID NO: 685747 - DNA, 33 bp, Homo sapien
acccaaaaccgttcccagcagatggctttgcaa

SEQ ID NO: 685748 - DNA, 33 bp, Homo sapien
acccaaaaccgttcccggcagatggctttgcaa

SEQ ID NO: 685749 - DNA, 33 bp, Homo sapien
ataagtcacccctgaacgcctccgcaggcagat

SEQ ID NO: 685750 - DNA, 33 bp, Homo sapien
ataagtcacccctgaatgcctccgcaggcagat

SEQ ID NO: 685751 - DNA, 33 bp, Homo sapien
attgtatgcagcatgcagagacgtgcagtgtac

SEQ ID NO: 685752 - DNA, 33 bp, Homo sapien
attgtatgcagcatgcggagacgtgcagtgtac

SEQ ID NO: 685753 - DNA, 33 bp, Homo sapien
tcactcactactaccccaagctccctcccggca

SEQ ID NO: 685754 - DNA, 33 bp, Homo sapien
tcactcactactaccctaagctccctcccggca

SEQ ID NO: 685755 - DNA, 33 bp, Homo sapien
ctccacgcaggacaaaagacaagcagcgtgggg

SEQ ID NO: 685756 - DNA, 33 bp, Homo sapien
ctccacgcaggacaaaggacaagcagcgtgggg

SEQ ID NO: 685757 - DNA, 33 bp, Homo sapien
ccctggttcctcttcactcattcggctgagacc

SEQ ID NO: 685758 - DNA, 33 bp, Homo sapien
ccctggttcctcttcagtcattcggctgagacc

SEQ ID NO: 685759 - DNA, 33 bp, Homo sapien
ccactctggctgcaaactcagtttctgtgactt

SEQ ID NO: 685760 - DNA, 33 bp, Homo sapien
ccactctggctgcaaattcagtttctgtgactt

SEQ ID NO: 685761 - DNA, 33 bp, Homo sapien
atctactgcgtcctgcagatacaggggccatcc

SEQ ID NO: 685762 - DNA, 33 bp, Homo sapien
atctactgcgtcctgcggatacaggggccatcc

SEQ ID NO: 685763 - DNA, 33 bp, Homo sapien
tggagaaaagcctagagcagggatgtatacgct

SEQ ID NO: 685764 - DNA, 33 bp, Homo sapien
tggagaaaagcctagatcagggatgtatacgct

SEQ ID NO: 685765 - DNA, 33 bp, Homo sapien
atgttactgtttgccacagatacagggtgtgca

SEQ ID NO: 685766 - DNA, 33 bp, Homo sapien
atgttactgtttgccatagatacagggtgtgca

SEQ ID NO: 685767 - DNA, 33 bp, Homo sapien
ctcccaaaaactagataacgataataaggactt

SEQ ID NO: 685768 - DNA, 33 bp, Homo sapien
ctcccaaaaactagatgacgataataaggactt

SEQ ID NO: 685769 - DNA, 33 bp, Homo sapien
acttgtcatggagaaacaccaccgtactctgaa

SEQ ID NO: 685770 - DNA, 33 bp, Homo sapien
acttgtcatggagaaataccaccgtactctgaa

SEQ ID NO: 685771 - DNA, 33 bp, Homo sapien
tgctctgggtctacataaagacacacgaggtcc

SEQ ID NO: 685772 - DNA, 33 bp, Homo sapien
tgctctgggtctacatgaagacacacgaggtcc

SEQ ID NO: 685773 - DNA, 33 bp, Homo sapien
tcctcatagaaaattaaatgcttccaaatctaa

SEQ ID NO: 685774 - DNA, 33 bp, Homo sapien
tcctcatagaaaattagatgcttccaaatctaa

SEQ ID NO: 685775 - DNA, 33 bp, Homo sapien
catgcctctttcacaactgtgttacttccagaa

SEQ ID NO: 685776 - DNA, 33 bp, Homo sapien
catgcctctttcacaagtgtgttacttccagaa

SEQ ID NO: 685777 - DNA, 33 bp, Homo sapien
tggtttccctggcaaccagctctcatcctactc

SEQ ID NO: 685778 - DNA, 33 bp, Homo sapien
tggtttccctggcaactagctctcatcctactc

SEQ ID NO: 685779 - DNA, 33 bp, Homo sapien
catgttacatacacccagctaaggtcaatagcc

SEQ ID NO: 685780 - DNA, 33 bp, Homo sapien
catgttacatacacccggctaaggtcaatagcc

SEQ ID NO: 685781 - DNA, 33 bp, Homo sapien
atggaattcatgaccacctttgttttcattcac

SEQ ID NO: 685782 - DNA, 33 bp, Homo sapien
atggaattcatgaccagctttgttttcattcac

SEQ ID NO: 685783 - DNA, 33 bp, Homo sapien
tgggagttaaagacggcagataaagagctgtta

SEQ ID NO: 685784 - DNA, 33 bp, Homo sapien
tgggagttaaagacggtagataaagagctgtta

SEQ ID NO: 685785 - DNA, 33 bp, Homo sapien
gggaagcagagtagaacgaggtgagccagtcaa

SEQ ID NO: 685786 - DNA, 33 bp, Homo sapien
gggaagcagagtagaatgaggtgagccagtcaa

SEQ ID NO: 685787 - DNA, 33 bp, Homo sapien
ctggaattattgtcaccgtatgaattaagccgt

SEQ ID NO: 685788 - DNA, 33 bp, Homo sapien
ctggaattattgtcactgtatgaattaagccgt

SEQ ID NO: 685789 - DNA, 33 bp, Homo sapien
aagggcaaataagagacaaattttggtcagggg

SEQ ID NO: 685790 - DNA, 33 bp, Homo sapien
aagggcaaataagagataaattttggtcagggg

SEQ ID NO: 685791 - DNA, 33 bp, Homo sapien
tttcattaaaatggaaccatccttcagcaggag

SEQ ID NO: 685792 - DNA, 33 bp, Homo sapien
tttcattaaaatggaagcatccttcagcaggag

SEQ ID NO: 685793 - DNA, 33 bp, Homo sapien
taatacactatctctcaacacaatactggctcc

SEQ ID NO: 685794 - DNA, 33 bp, Homo sapien
taatacactatctctccacacaatactggctcc

SEQ ID NO: 685795 - DNA, 33 bp, Homo sapien
tattggcaaggctacaagaagaaaaggcactct

SEQ ID NO: 685796 - DNA, 33 bp, Homo sapien
tattggcaaggctacaggaagaaaaggcactct

SEQ ID NO: 685797 - DNA, 33 bp, Homo sapien
accatgtcttttgtgacagtctcagaacataca

SEQ ID NO: 685798 - DNA, 33 bp, Homo sapien
accatgtcttttgtgatagtctcagaacataca

SEQ ID NO: 685799 - DNA, 33 bp, Homo sapien
atgtgacacggtgtgaaacggtgtatctatggc

SEQ ID NO: 685800 - DNA, 33 bp, Homo sapien
atgtgacacggtgtgacacggtgtatctatggc

SEQ ID NO: 685801 - DNA, 33 bp, Homo sapien
ggaacttgctaggctccaggactaacccttatg

SEQ ID NO: 685802 - DNA, 33 bp, Homo sapien
ggaacttgctaggctctaggactaacccttatg

SEQ ID NO: 685803 - DNA, 33 bp, Homo sapien
tggctcccagctctgacagtcttgaaccctaca

SEQ ID NO: 685804 - DNA, 33 bp, Homo sapien
tggctcccagctctgatagtcttgaaccctaca

SEQ ID NO: 685805 - DNA, 33 bp, Homo sapien
accaaacacgctgcctcagaatcatggcccctg

SEQ ID NO: 685806 - DNA, 33 bp, Homo sapien
accaaacacgctgcctgagaatcatggcccctg

SEQ ID NO: 685807 - DNA, 33 bp, Homo sapien
gtcagtaacatttaccaaacagcctgcagtgtg

SEQ ID NO: 685808 - DNA, 33 bp, Homo sapien
gtcagtaacatttaccgaacagcctgcagtgtg

SEQ ID NO: 685809 - DNA, 33 bp, Homo sapien
gctcacaacagcgggaataacagaccaaaagaa

SEQ ID NO: 685810 - DNA, 33 bp, Homo sapien
gctcacaacagcgggagtaacagaccaaaagaa

SEQ ID NO: 685811 - DNA, 33 bp, Homo sapien
gatgcatgaagaaggccgaaacagaaggtaaaa

SEQ ID NO: 685812 - DNA, 33 bp, Homo sapien
gatgcatgaagaaggcggaaacagaaggtaaaa

SEQ ID NO: 685813 - DNA, 33 bp, Homo sapien
gttggactttgagggaagagttggatttccaca

SEQ ID NO: 685814 - DNA, 33 bp, Homo sapien
gttggactttgagggaggagttggatttccaca

SEQ ID NO: 685815 - DNA, 33 bp, Homo sapien
agcttcaggccacaacagtcaacttggtgtcag

SEQ ID NO: 685816 - DNA, 33 bp, Homo sapien
agcttcaggccacaacggtcaacttggtgtcag

SEQ ID NO: 685817 - DNA, 33 bp, Homo sapien
aggcatacagttctaaaagtcagaaattaacaa

SEQ ID NO: 685818 - DNA, 33 bp, Homo sapien
aggcatacagttctaagagtcagaaattaacaa

SEQ ID NO: 685819 - DNA, 33 bp, Homo sapien
tgtgtttatggggagacgatttatagctctcca

SEQ ID NO: 685820 - DNA, 33 bp, Homo sapien
tgtgtttatggggagatgatttatagctctcca

SEQ ID NO: 685821 - DNA, 33 bp, Homo sapien
tactgggtctacgtccagctctggaattttcct

SEQ ID NO: 685822 - DNA, 33 bp, Homo sapien
tactgggtctacgtccggctctggaattttcct

SEQ ID NO: 685823 - DNA, 33 bp, Homo sapien
gagatttcctgtagcaatgcccactgtgaatgg

SEQ ID NO: 685824 - DNA, 33 bp, Homo sapien
gagatttcctgtagcagtgcccactgtgaatgg

SEQ ID NO: 685825 - DNA, 33 bp, Homo sapien
tccacctagctgctcaagtgaaaatctcaaatc

SEQ ID NO: 685826 - DNA, 33 bp, Homo sapien
tccacctagctgctcaggtgaaaatctcaaatc

SEQ ID NO: 685827 - DNA, 33 bp, Homo sapien
agggatcaggagaacaaaacctcagggagtgaa

SEQ ID NO: 685828 - DNA, 33 bp, Homo sapien
agggatcaggagaacacaacctcagggagtgaa

SEQ ID NO: 685829 - DNA, 33 bp, Homo sapien
cattagtgtctggaacactttcccttctgtcca

SEQ ID NO: 685830 - DNA, 33 bp, Homo sapien
cattagtgtctggaacgctttcccttctgtcca

SEQ ID NO: 685831 - DNA, 33 bp, Homo sapien
tggtgaatattattaacgactttgctttgggat

SEQ ID NO: 685832 - DNA, 33 bp, Homo sapien
tggtgaatattattaatgactttgctttgggat

SEQ ID NO: 685833 - DNA, 33 bp, Homo sapien
gtctgcaggagaaacacattcacagaaagttta

SEQ ID NO: 685834 - DNA, 33 bp, Homo sapien
gtctgcaggagaaacatattcacagaaagttta

SEQ ID NO: 685835 - DNA, 33 bp, Homo sapien
atggtctccagaagccacactcttttgagaaca

SEQ ID NO: 685836 - DNA, 33 bp, Homo sapien
atggtctccagaagccgcactcttttgagaaca

SEQ ID NO: 685837 - DNA, 33 bp, Homo sapien
gcttccggccgctgtaaatcataggtgaaaacc

SEQ ID NO: 685838 - DNA, 33 bp, Homo sapien
gcttccggccgctgtagatcataggtgaaaacc

SEQ ID NO: 685839 - DNA, 33 bp, Homo sapien
gttagtgtattcggaacggaactgctcagtctt

SEQ ID NO: 685840 - DNA, 33 bp, Homo sapien
gttagtgtattcggaatggaactgctcagtctt

SEQ ID NO: 685841 - DNA, 33 bp, Homo sapien
gagctctaagagcacaaccattgtccaagccag

SEQ ID NO: 685842 - DNA, 33 bp, Homo sapien
gagctctaagagcacagccattgtccaagccag

SEQ ID NO: 685843 - DNA, 33 bp, Homo sapien
ccttcagctggagcgaagacttaattgtccatg

SEQ ID NO: 685844 - DNA, 33 bp, Homo sapien
ccttcagctggagcgacgacttaattgtccatg

SEQ ID NO: 685845 - DNA, 33 bp, Homo sapien
tcacccagaaatcccaggaggaaagagagggga

SEQ ID NO: 685846 - DNA, 33 bp, Homo sapien
tcacccagaaatcccatgaggaaagagagggga

SEQ ID NO: 685847 - DNA, 33 bp, Homo sapien
cctgcagtcctttctacggcatcagcctggctg

SEQ ID NO: 685848 - DNA, 33 bp, Homo sapien
cctgcagtcctttctatggcatcagcctggctg

SEQ ID NO: 685849 - DNA, 33 bp, Homo sapien
tgtttctcaaaattaaccagtgacatagagagc

SEQ ID NO: 685850 - DNA, 33 bp, Homo sapien
tgtttctcaaaattaatcagtgacatagagagc

SEQ ID NO: 685851 - DNA, 33 bp, Homo sapien
gttgttggaacctgcacggcacatagtaactgc

SEQ ID NO: 685852 - DNA, 33 bp, Homo sapien
gttgttggaacctgcatggcacatagtaactgc

SEQ ID NO: 685853 - DNA, 33 bp, Homo sapien
atatgattggacaaaaggtgtgtgatctgatgg

SEQ ID NO: 685854 - DNA, 33 bp, Homo sapien
atatgattggacaaaatgtgtgtgatctgatgg

SEQ ID NO: 685855 - DNA, 33 bp, Homo sapien
ccatttctgtgggtctgaacaaggcgcttgtac

SEQ ID NO: 685856 - DNA, 33 bp, Homo sapien
ccatttctgtgggtcttaacaaggcgcttgtac

SEQ ID NO: 685857 - DNA, 33 bp, Homo sapien
cttactgattcaggaaactggttattataaatt

SEQ ID NO: 685858 - DNA, 33 bp, Homo sapien
cttactgattcaggaagctggttattataaatt

SEQ ID NO: 685859 - DNA, 33 bp, Homo sapien
gtccagtttgtaaaaaggtaccaagatgcacag

SEQ ID NO: 685860 - DNA, 33 bp, Homo sapien
gtccagtttgtaaaaatgtaccaagatgcacag

SEQ ID NO: 685861 - DNA, 33 bp, Homo sapien
aagtaaaacctccaaaccaaggtgagcttgcac

SEQ ID NO: 685862 - DNA, 33 bp, Homo sapien
aagtaaaacctccaaagcaaggtgagcttgcac

SEQ ID NO: 685863 - DNA, 33 bp, Homo sapien
acacaggaaggagcgcagcagattgggtgatgt

SEQ ID NO: 685864 - DNA, 33 bp, Homo sapien
acacaggaaggagcgcggcagattgggtgatgt

SEQ ID NO: 685865 - DNA, 33 bp, Homo sapien
tagcatgagtggacctcaaaaacgcgaggctga

SEQ ID NO: 685866 - DNA, 33 bp, Homo sapien
tagcatgagtggacctgaaaaacgcgaggctga

SEQ ID NO: 685867 - DNA, 33 bp, Homo sapien
ctgtgttcatttacgacaaacaggcaggagagg

SEQ ID NO: 685868 - DNA, 33 bp, Homo sapien
ctgtgttcatttacgagaaacaggcaggagagg

SEQ ID NO: 685869 - DNA, 33 bp, Homo sapien
ctactgctggagtccacggtcactaatcatctt

SEQ ID NO: 685870 - DNA, 33 bp, Homo sapien
ctactgctggagtccatggtcactaatcatctt

SEQ ID NO: 685871 - DNA, 33 bp, Homo sapien
ctcgccagcgacaggcaatgggatgagacagtg

SEQ ID NO: 685872 - DNA, 33 bp, Homo sapien
ctcgccagcgacaggcgatgggatgagacagtg

SEQ ID NO: 685873 - DNA, 33 bp, Homo sapien
agcaattgggtaaatagatgtgagtgagtacgt

SEQ ID NO: 685874 - DNA, 33 bp, Homo sapien
agcaattgggtaaatatatgtgagtgagtacgt

SEQ ID NO: 685875 - DNA, 33 bp, Homo sapien
ttccgatctgtgcccacggatctatatttagtt

SEQ ID NO: 685876 - DNA, 33 bp, Homo sapien
ttccgatctgtgcccatggatctatatttagtt

SEQ ID NO: 685877 - DNA, 33 bp, Homo sapien
aatgttgaccgtctcacgtaagagtactgtacc

SEQ ID NO: 685878 - DNA, 33 bp, Homo sapien
aatgttgaccgtctcatgtaagagtactgtacc

SEQ ID NO: 685879 - DNA, 33 bp, Homo sapien
ccctggtcacttccccaagcctgttttccatct

SEQ ID NO: 685880 - DNA, 33 bp, Homo sapien
ccctggtcacttccccgagcctgttttccatct

SEQ ID NO: 685881 - DNA, 33 bp, Homo sapien
cgcattctgtctgtgacaccgttactcccatgg

SEQ ID NO: 685882 - DNA, 33 bp, Homo sapien
cgcattctgtctgtgataccgttactcccatgg

SEQ ID NO: 685883 - DNA, 33 bp, Homo sapien
gtagcactggttgcaaattctcctttacttaga

SEQ ID NO: 685884 - DNA, 33 bp, Homo sapien
gtagcactggttgcaacttctcctttacttaga

SEQ ID NO: 685885 - DNA, 33 bp, Homo sapien
agagagcgaatacatgcaccctggatctgagaa

SEQ ID NO: 685886 - DNA, 33 bp, Homo sapien
agagagcgaatacatgtaccctggatctgagaa

SEQ ID NO: 685887 - DNA, 33 bp, Homo sapien
tctctttgtgttggccaaaggcagatgtttggg

SEQ ID NO: 685888 - DNA, 33 bp, Homo sapien
tctctttgtgttggccgaaggcagatgtttggg

SEQ ID NO: 685889 - DNA, 33 bp, Homo sapien
ggagagtaggtcagataactcagcatcagcaag

SEQ ID NO: 685890 - DNA, 33 bp, Homo sapien
ggagagtaggtcagattactcagcatcagcaag

SEQ ID NO: 685891 - DNA, 33 bp, Homo sapien
tgcagtgtggtttatcggacacccaggttacct

SEQ ID NO: 685892 - DNA, 33 bp, Homo sapien
tgcagtgtggtttatctgacacccaggttacct

SEQ ID NO: 685893 - DNA, 33 bp, Homo sapien
cggatacacccgtcctcaaacttgggtgcgcag

SEQ ID NO: 685894 - DNA, 33 bp, Homo sapien
cggatacacccgtccttaaacttgggtgcgcag

SEQ ID NO: 685895 - DNA, 33 bp, Homo sapien
ggcttgaaacatggtacatcacgtcaggccccg

SEQ ID NO: 685896 - DNA, 33 bp, Homo sapien
ggcttgaaacatggtatatcacgtcaggccccg

SEQ ID NO: 685897 - DNA, 33 bp, Homo sapien
aatacttctagggccactgagacctcacctatg

SEQ ID NO: 685898 - DNA, 33 bp, Homo sapien
aatacttctagggccattgagacctcacctatg

SEQ ID NO: 685899 - DNA, 33 bp, Homo sapien
caatcccttgaacagtaacgaagcacctaccat

SEQ ID NO: 685900 - DNA, 33 bp, Homo sapien
caatcccttgaacagtgacgaagcacctaccat

SEQ ID NO: 685901 - DNA, 33 bp, Homo sapien
gtatatagtatggagacgcaattaaagatgtgt

SEQ ID NO: 685902 - DNA, 33 bp, Homo sapien
gtatatagtatggagatgcaattaaagatgtgt

SEQ ID NO: 685903 - DNA, 33 bp, Homo sapien
atcggccaacggagtcaagatctgagcaccaca

SEQ ID NO: 685904 - DNA, 33 bp, Homo sapien
atcggccaacggagtcgagatctgagcaccaca

SEQ ID NO: 685905 - DNA, 33 bp, Homo sapien
tttcttattcaaggtcagacctgtcagtggctc

SEQ ID NO: 685906 - DNA, 33 bp, Homo sapien
tttcttattcaaggtctgacctgtcagtggctc

SEQ ID NO: 685907 - DNA, 33 bp, Homo sapien
acattgaacaggaccactgaagacaagcatctc

SEQ ID NO: 685908 - DNA, 33 bp, Homo sapien
acattgaacaggaccattgaagacaagcatctc

SEQ ID NO: 685909 - DNA, 33 bp, Homo sapien
aagtccctggagcaaaagcgagtgactccagct

SEQ ID NO: 685910 - DNA, 33 bp, Homo sapien
aagtccctggagcaaatgcgagtgactccagct

SEQ ID NO: 685911 - DNA, 33 bp, Homo sapien
atgctgtcaggtgggcaacaaaggaggacagga

SEQ ID NO: 685912 - DNA, 33 bp, Homo sapien
atgctgtcaggtgggcgacaaaggaggacagga

SEQ ID NO: 685913 - DNA, 33 bp, Homo sapien
cacggcaaggaaaagacgaaggacatccttctg

SEQ ID NO: 685914 - DNA, 33 bp, Homo sapien
cacggcaaggaaaagatgaaggacatccttctg

SEQ ID NO: 685915 - DNA, 33 bp, Homo sapien
gcaacaagaaggcacaactgaagatctacacgc

SEQ ID NO: 685916 - DNA, 33 bp, Homo sapien
gcaacaagaaggcacagctgaagatctacacgc

SEQ ID NO: 685917 - DNA, 33 bp, Homo sapien
agacctgccaagacgcccacatactggtaagag

SEQ ID NO: 685918 - DNA, 33 bp, Homo sapien
agacctgccaagacgctcacatactggtaagag

SEQ ID NO: 685919 - DNA, 33 bp, Homo sapien
ctgtttctagtaaaaccccacagcattccactg

SEQ ID NO: 685920 - DNA, 33 bp, Homo sapien
ctgtttctagtaaaactccacagcattccactg

SEQ ID NO: 685921 - DNA, 33 bp, Homo sapien
atagcagcagtgtccaactccgctccacagtat

SEQ ID NO: 685922 - DNA, 33 bp, Homo sapien
atagcagcagtgtccacctccgctccacagtat

SEQ ID NO: 685923 - DNA, 33 bp, Homo sapien
caagcataagatgagacgttgcttatcctcagt

SEQ ID NO: 685924 - DNA, 33 bp, Homo sapien
caagcataagatgagatgttgcttatcctcagt

SEQ ID NO: 685925 - DNA, 33 bp, Homo sapien
tccaggttcacagataaccaagttaagaatggg

SEQ ID NO: 685926 - DNA, 33 bp, Homo sapien
tccaggttcacagatacccaagttaagaatggg

SEQ ID NO: 685927 - DNA, 33 bp, Homo sapien
acagccggtggaggaacaagaggattctggggg

SEQ ID NO: 685928 - DNA, 33 bp, Homo sapien
acagccggtggaggaagaagaggattctggggg

SEQ ID NO: 685929 - DNA, 33 bp, Homo sapien
cagcatttgtgatgaaatcttttgcaagggggt

SEQ ID NO: 685930 - DNA, 33 bp, Homo sapien
cagcatttgtgatgaagtcttttgcaagggggt

SEQ ID NO: 685931 - DNA, 33 bp, Homo sapien
tcgcgaccgtgaaaaggctgaaaagcagggaag

SEQ ID NO: 685932 - DNA, 33 bp, Homo sapien
tcgcgaccgtgaaaagtctgaaaagcagggaag

SEQ ID NO: 685933 - DNA, 33 bp, Homo sapien
gtactgctccagagagaacatctaaattaccaa

SEQ ID NO: 685934 - DNA, 33 bp, Homo sapien
gtactgctccagagaggacatctaaattaccaa

SEQ ID NO: 685935 - DNA, 33 bp, Homo sapien
tgggcaagactcaaacaggtactgctccagaga

SEQ ID NO: 685936 - DNA, 33 bp, Homo sapien
tgggcaagactcaaaccggtactgctccagaga

SEQ ID NO: 685937 - DNA, 33 bp, Homo sapien
acattctcagaaatacaacttacctaaacagac

SEQ ID NO: 685938 - DNA, 33 bp, Homo sapien
acattctcagaaatacgacttacctaaacagac

SEQ ID NO: 685939 - DNA, 33 bp, Homo sapien
catctaaaatgtcaaacgtaggctggatgcgat

SEQ ID NO: 685940 - DNA, 33 bp, Homo sapien
catctaaaatgtcaaatgtaggctggatgcgat

SEQ ID NO: 685941 - DNA, 33 bp, Homo sapien
caaagcctctgccagaagtccatgtcatccaca

SEQ ID NO: 685942 - DNA, 33 bp, Homo sapien
caaagcctctgccagaggtccatgtcatccaca

SEQ ID NO: 685943 - DNA, 33 bp, Homo sapien
taccacccactgctccacaaccttccaaaaccc

SEQ ID NO: 685944 - DNA, 33 bp, Homo sapien
taccacccactgctccgcaaccttccaaaaccc

SEQ ID NO: 685945 - DNA, 33 bp, Homo sapien
ggtgtaaatgctctcactacagccaatttcaag

SEQ ID NO: 685946 - DNA, 33 bp, Homo sapien
ggtgtaaatgctctcagtacagccaatttcaag

SEQ ID NO: 685947 - DNA, 33 bp, Homo sapien
gggtggcagaactgaacgtaagactgggcttat

SEQ ID NO: 685948 - DNA, 33 bp, Homo sapien
gggtggcagaactgaatgtaagactgggcttat

SEQ ID NO: 685949 - DNA, 33 bp, Homo sapien
gaacttaagcctgtccaaaaggctagttgcagc

SEQ ID NO: 685950 - DNA, 33 bp, Homo sapien
gaacttaagcctgtcccaaaggctagttgcagc

SEQ ID NO: 685951 - DNA, 33 bp, Homo sapien
ccaggactgggttagacctggcatgaacactcc

SEQ ID NO: 685952 - DNA, 33 bp, Homo sapien
ccaggactgggttagagctggcatgaacactcc

SEQ ID NO: 685953 - DNA, 33 bp, Homo sapien
tagttgttgatcccagaaagccttggtaggggt

SEQ ID NO: 685954 - DNA, 33 bp, Homo sapien
tagttgttgatcccaggaagccttggtaggggt

SEQ ID NO: 685955 - DNA, 33 bp, Homo sapien
tcagcttttggggaagccaaactatgcttatta

SEQ ID NO: 685956 - DNA, 33 bp, Homo sapien
tcagcttttggggaagtcaaactatgcttatta

SEQ ID NO: 685957 - DNA, 33 bp, Homo sapien
ggattttctgcaatcaatatgtgttacttttaa

SEQ ID NO: 685958 - DNA, 33 bp, Homo sapien
ggattttctgcaatcagtatgtgttacttttaa

SEQ ID NO: 685959 - DNA, 33 bp, Homo sapien
gccctgggagtcttccaaagcagccttcttggt

SEQ ID NO: 685960 - DNA, 33 bp, Homo sapien
gccctgggagtcttccgaagcagccttcttggt

SEQ ID NO: 685961 - DNA, 33 bp, Homo sapien
tttgttttaatggaggaagacgtccactgaagc

SEQ ID NO: 685962 - DNA, 33 bp, Homo sapien
tttgttttaatggagggagacgtccactgaagc

SEQ ID NO: 685963 - DNA, 33 bp, Homo sapien
aaccacgaaactccaaactcagaatctctccct

SEQ ID NO: 685964 - DNA, 33 bp, Homo sapien
aaccacgaaactccaacctcagaatctctccct

SEQ ID NO: 685965 - DNA, 33 bp, Homo sapien
ggccctctgacgtcaaaaagccactcatggggc

SEQ ID NO: 685966 - DNA, 33 bp, Homo sapien
ggccctctgacgtcaagaagccactcatggggc

SEQ ID NO: 685967 - DNA, 33 bp, Homo sapien
ttgcagatggaaggcacggtaacaaacttttct

SEQ ID NO: 685968 - DNA, 33 bp, Homo sapien
ttgcagatggaaggcatggtaacaaacttttct

SEQ ID NO: 685969 - DNA, 33 bp, Homo sapien
ttggggccgggtttcaagtgcttacattgtttc

SEQ ID NO: 685970 - DNA, 33 bp, Homo sapien
ttggggccgggtttcaggtgcttacattgtttc

SEQ ID NO: 685971 - DNA, 33 bp, Homo sapien
acccaggacctagcacacagtgtctgtagagtc

SEQ ID NO: 685972 - DNA, 33 bp, Homo sapien
acccaggacctagcacgcagtgtctgtagagtc

SEQ ID NO: 685973 - DNA, 33 bp, Homo sapien
ctgcagccttgatcgacagttcggctgggtata

SEQ ID NO: 685974 - DNA, 33 bp, Homo sapien
ctgcagccttgatcgatagttcggctgggtata

SEQ ID NO: 685975 - DNA, 33 bp, Homo sapien
tagactccaataaaggcaagggtccttctgtct

SEQ ID NO: 685976 - DNA, 33 bp, Homo sapien
tagactccaataaaggtaagggtccttctgtct

SEQ ID NO: 685977 - DNA, 33 bp, Homo sapien
ctcttgcaaagcaaacagttcagcacaatgtgg

SEQ ID NO: 685978 - DNA, 33 bp, Homo sapien
ctcttgcaaagcaaacggttcagcacaatgtgg

SEQ ID NO: 685979 - DNA, 33 bp, Homo sapien
atccaaaccaagtttccaagaggctgctccatg

SEQ ID NO: 685980 - DNA, 33 bp, Homo sapien
atccaaaccaagtttctaagaggctgctccatg

SEQ ID NO: 685981 - DNA, 33 bp, Homo sapien
cttagcagtgacagccacaaagacctcaacccc

SEQ ID NO: 685982 - DNA, 33 bp, Homo sapien
cttagcagtgacagccgcaaagacctcaacccc

SEQ ID NO: 685983 - DNA, 33 bp, Homo sapien
tcccggcaggtgagagaaagaaagtgtgcagaa

SEQ ID NO: 685984 - DNA, 33 bp, Homo sapien
tcccggcaggtgagaggaagaaagtgtgcagaa

SEQ ID NO: 685985 - DNA, 33 bp, Homo sapien
tgcaccactggttggccgactttgaataagtgg

SEQ ID NO: 685986 - DNA, 33 bp, Homo sapien
tgcaccactggttggctgactttgaataagtgg

SEQ ID NO: 685987 - DNA, 33 bp, Homo sapien
cgtctcaaaaaaatgaaagccacaactgatttc

SEQ ID NO: 685988 - DNA, 33 bp, Homo sapien
cgtctcaaaaaaatgacagccacaactgatttc

SEQ ID NO: 685989 - DNA, 33 bp, Homo sapien
atcctcagcagactaacgcagcaacagaaaatc

SEQ ID NO: 685990 - DNA, 33 bp, Homo sapien
atcctcagcagactaatgcagcaacagaaaatc

SEQ ID NO: 685991 - DNA, 33 bp, Homo sapien
tctgcattgcaaaagacgctctaaacaaaatcg

SEQ ID NO: 685992 - DNA, 33 bp, Homo sapien
tctgcattgcaaaagatgctctaaacaaaatcg

SEQ ID NO: 685993 - DNA, 33 bp, Homo sapien
tactttttcacttccaaattaactctgaaaatg

SEQ ID NO: 685994 - DNA, 33 bp, Homo sapien
tactttttcacttccacattaactctgaaaatg

SEQ ID NO: 685995 - DNA, 33 bp, Homo sapien
ggccccacatcacttaaacagcttttaccaaag

SEQ ID NO: 685996 - DNA, 33 bp, Homo sapien
ggccccacatcacttacacagcttttaccaaag

SEQ ID NO: 685997 - DNA, 33 bp, Homo sapien
ctggtgggaatgacagaaaatcaggaggccagg

SEQ ID NO: 685998 - DNA, 33 bp, Homo sapien
ctggtgggaatgacaggaaatcaggaggccagg

SEQ ID NO: 685999 - DNA, 33 bp, Homo sapien
acctcaaacttctggtcaaggatgccgggatag

SEQ ID NO: 686000 - DNA, 33 bp, Homo sapien
acctcaaacttctggttaaggatgccgggatag

SEQ ID NO: 686001 - DNA, 33 bp, Homo sapien
tgtccagaggacccgaaggccacagacccacag

SEQ ID NO: 686002 - DNA, 33 bp, Homo sapien
tgtccagaggacccgacggccacagacccacag

SEQ ID NO: 686003 - DNA, 33 bp, Homo sapien
aaaattcttcttttaccctgaatcagtctctta

SEQ ID NO: 686004 - DNA, 33 bp, Homo sapien
aaaattcttcttttactctgaatcagtctctta

SEQ ID NO: 686005 - DNA, 33 bp, Homo sapien
gggtctcctggcgaaccgtccacaaagggggac

SEQ ID NO: 686006 - DNA, 33 bp, Homo sapien
gggtctcctggcgaactgtccacaaagggggac

SEQ ID NO: 686007 - DNA, 33 bp, Homo sapien
aaggcattgcaagtgaacttaggaatcagacaa

SEQ ID NO: 686008 - DNA, 33 bp, Homo sapien
aaggcattgcaagtgatcttaggaatcagacaa

SEQ ID NO: 686009 - DNA, 33 bp, Homo sapien
tctcccaactctggaggccggggtctgaaattg

SEQ ID NO: 686010 - DNA, 33 bp, Homo sapien
tctcccaactctggagtccggggtctgaaattg

SEQ ID NO: 686011 - DNA, 33 bp, Homo sapien
ggtccctgagtttggaacatatgagacgtcatg

SEQ ID NO: 686012 - DNA, 33 bp, Homo sapien
ggtccctgagtttggagcatatgagacgtcatg

SEQ ID NO: 686013 - DNA, 33 bp, Homo sapien
caggtgtctatatgtcaaggagaagccagtgca

SEQ ID NO: 686014 - DNA, 33 bp, Homo sapien
caggtgtctatatgtcgaggagaagccagtgca

SEQ ID NO: 686015 - DNA, 33 bp, Homo sapien
tgtccaggaccagagactaagactgagaaggcc

SEQ ID NO: 686016 - DNA, 33 bp, Homo sapien
tgtccaggaccagagattaagactgagaaggcc

SEQ ID NO: 686017 - DNA, 33 bp, Homo sapien; identical to SEQ ID NO: 686015

SEQ ID NO: 686018 - DNA, 33 bp, Homo sapien; identical to SEQ ID NO: 686016

SEQ ID NO: 686019 - DNA, 33 bp, Homo sapien
tatgtgaaaagttaaaatacaaaagagcagttc

SEQ ID NO: 686020 - DNA, 33 bp, Homo sapien
tatgtgaaaagttaaagtacaaaagagcagttc

SEQ ID NO: 686021 - DNA, 33 bp, Homo sapien
gaaaccgaacaatttacgtttgctcttgaaact

SEQ ID NO: 686022 - DNA, 33 bp, Homo sapien
gaaaccgaacaatttatgtttgctcttgaaact

SEQ ID NO: 686023 - DNA, 33 bp, Homo sapien
agaagagaaaaagagacatgaaactagacttca

SEQ ID NO: 686024 - DNA, 33 bp, Homo sapien
agaagagaaaaagagagatgaaactagacttca

SEQ ID NO: 686025 - DNA, 33 bp, Homo sapien
ttaggtgctgacgattcaacagtgacaagagcc

SEQ ID NO: 686026 - DNA, 33 bp, Homo sapien
ttaggtgctgacgatttaacagtgacaagagcc

SEQ ID NO: 686027 - DNA, 33 bp, Homo sapien
tggcagaagtagccaacgagctggacacggaga

SEQ ID NO: 686028 - DNA, 33 bp, Homo sapien
tggcagaagtagccaatgagctggacacggaga

SEQ ID NO: 686029 - DNA, 33 bp, Homo sapien
tccagggtcagggatacaaccggaacacagcct

SEQ ID NO: 686030 - DNA, 33 bp, Homo sapien
tccagggtcagggatagaaccggaacacagcct

SEQ ID NO: 686031 - DNA, 33 bp, Homo sapien
tcttttgagtcctcgaacagtctttcactgaat

SEQ ID NO: 686032 - DNA, 33 bp, Homo sapien
tcttttgagtcctcgatcagtctttcactgaat

SEQ ID NO: 686033 - DNA, 33 bp, Homo sapien
aacagctttagcgggcacttggccactgtgaga

SEQ ID NO: 686034 - DNA, 33 bp, Homo sapien
aacagctttagcgggcgcttggccactgtgaga

SEQ ID NO: 686035 - DNA, 33 bp, Homo sapien
tcaaatagcaaaggaacgtcccgtctgccggag

SEQ ID NO: 686036 - DNA, 33 bp, Homo sapien
tcaaatagcaaaggaatgtcccgtctgccggag

SEQ ID NO: 686037 - DNA, 33 bp, Homo sapien
tccatgcaggacctgacggtacaaatagaggtg

SEQ ID NO: 686038 - DNA, 33 bp, Homo sapien
tccatgcaggacctgatggtacaaatagaggtg

SEQ ID NO: 686039 - DNA, 33 bp, Homo sapien
gggacttgccggccgacgacaggctcaagtgtg

SEQ ID NO: 686040 - DNA, 33 bp, Homo sapien
gggacttgccggccgatgacaggctcaagtgtg

SEQ ID NO: 686041 - DNA, 33 bp, Homo sapien
gacgggaagtgggagaatcagtcgatgagctgg

SEQ ID NO: 686042 - DNA, 33 bp, Homo sapien
gacgggaagtgggagagtcagtcgatgagctgg

SEQ ID NO: 686043 - DNA, 33 bp, Homo sapien
gtgaggacgcagaaccgcttagtcgccccagag

SEQ ID NO: 686044 - DNA, 33 bp, Homo sapien
gtgaggacgcagaacctcttagtcgccccagag

SEQ ID NO: 686045 - DNA, 33 bp, Homo sapien
aggtcacactggatgacgtaaactaaaaattaa

SEQ ID NO: 686046 - DNA, 33 bp, Homo sapien
aggtcacactggatgatgtaaactaaaaattaa

SEQ ID NO: 686047 - DNA, 33 bp, Homo sapien
gggccatttcaacataggtacattctgggggta

SEQ ID NO: 686048 - DNA, 33 bp, Homo sapien
gggccatttcaacatatgtacattctgggggta

SEQ ID NO: 686049 - DNA, 33 bp, Homo sapien
acagacacatccctggaagaagcagccgagcca

SEQ ID NO: 686050 - DNA, 33 bp, Homo sapien
acagacacatccctgggagaagcagccgagcca

SEQ ID NO: 686051 - DNA, 33 bp, Homo sapien
agccccccaagtcctccagttgcctgtgaagga

SEQ ID NO: 686052 - DNA, 33 bp, Homo sapien
agccccccaagtcctctagttgcctgtgaagga

SEQ ID NO: 686053 - DNA, 33 bp, Homo sapien
tcggctaaaccaacctaagcaagcgtgggaagg

SEQ ID NO: 686054 - DNA, 33 bp, Homo sapien
tcggctaaaccaacctgagcaagcgtgggaagg

SEQ ID NO: 686055 - DNA, 33 bp, Homo sapien
atgtgcaaagacctgaagttaagaggaagaaat

SEQ ID NO: 686056 - DNA, 33 bp, Homo sapien
atgtgcaaagacctgaggttaagaggaagaaat

SEQ ID NO: 686057 - DNA, 33 bp, Homo sapien
agcagagcccgtgctgaaagagaattatggagg

SEQ ID NO: 686058 - DNA, 33 bp, Homo sapien
agcagagcccgtgctggaagagaattatggagg

SEQ ID NO: 686059 - DNA, 33 bp, Homo sapien
ggatgtcattaggaagcaaggcattagggatat

SEQ ID NO: 686060 - DNA, 33 bp, Homo sapien
ggatgtcattaggaagtaaggcattagggatat

SEQ ID NO: 686061 - DNA, 33 bp, Homo sapien
ccagtcacacaagaagaactctccgggtttgtt

SEQ ID NO: 686062 - DNA, 33 bp, Homo sapien
ccagtcacacaagaagtactctccgggtttgtt

SEQ ID NO: 686063 - DNA, 33 bp, Homo sapien
ttgggtgtgaaagaaccagcttttctgctctgt

SEQ ID NO: 686064 - DNA, 33 bp, Homo sapien
ttgggtgtgaaagaactagcttttctgctctgt

SEQ ID NO: 686065 - DNA, 33 bp, Homo sapien
ctcaaagctatccacaaaaggaaaaattaagcc

SEQ ID NO: 686066 - DNA, 33 bp, Homo sapien
ctcaaagctatccacagaaggaaaaattaagcc

SEQ ID NO: 686067 - DNA, 33 bp, Homo sapien
ataattaaaacctggaatataatgactgcatga

SEQ ID NO: 686068 - DNA, 33 bp, Homo sapien
ataattaaaacctggagtataatgactgcatga

SEQ ID NO: 686069 - DNA, 33 bp, Homo sapien
ccgtggtgagtagatacggctcacgggaactgg

SEQ ID NO: 686070 - DNA, 33 bp, Homo sapien
ccgtggtgagtagatatggctcacgggaactgg

SEQ ID NO: 686071 - DNA, 33 bp, Homo sapien
ctcctgacacctccaccactccccagagctgca

SEQ ID NO: 686072 - DNA, 33 bp, Homo sapien
ctcctgacacctccactactccccagagctgca

SEQ ID NO: 686073 - DNA, 33 bp, Homo sapien
agcgtgtacaagagaacgtgctggatacagcag

SEQ ID NO: 686074 - DNA, 33 bp, Homo sapien
agcgtgtacaagagaatgtgctggatacagcag

SEQ ID NO: 686075 - DNA, 33 bp, Homo sapien
gctcaacaaagtgaagaaatcaagccttgtgtg

SEQ ID NO: 686076 - DNA, 33 bp, Homo sapien
gctcaacaaagtgaaggaatcaagccttgtgtg

SEQ ID NO: 686077 - DNA, 33 bp, Homo sapien
gatgaaaaggaaagtacagagagggcattcagg

SEQ ID NO: 686078 - DNA, 33 bp, Homo sapien
gatgaaaaggaaagtatagagagggcattcagg

SEQ ID NO: 686079 - DNA, 33 bp, Homo sapien
tgcccattcttgctgacatacgcattgcaatga

SEQ ID NO: 686080 - DNA, 33 bp, Homo sapien
tgcccattcttgctgagatacgcattgcaatga

SEQ ID NO: 686081 - DNA, 33 bp, Homo sapien
agagagaaagcctctgcatttgatggatggcaa

SEQ ID NO: 686082 - DNA, 33 bp, Homo sapien
agagagaaagcctctgtatttgatggatggcaa

SEQ ID NO: 686083 - DNA, 33 bp, Homo sapien
acattgtggaaacaacactgcaaaggcaggctt

SEQ ID NO: 686084 - DNA, 33 bp, Homo sapien
acattgtggaaacaacgctgcaaaggcaggctt

SEQ ID NO: 686085 - DNA, 33 bp, Homo sapien
gttcatgcggataaagcaggtaaaggagatggg

SEQ ID NO: 686086 - DNA, 33 bp, Homo sapien
gttcatgcggataaagtaggtaaaggagatggg

SEQ ID NO: 686087 - DNA, 33 bp, Homo sapien
gacacctgttactccaacctggttatgagcatt

SEQ ID NO: 686088 - DNA, 33 bp, Homo sapien
gacacctgttactccagcctggttatgagcatt

SEQ ID NO: 686089 - DNA, 33 bp, Homo sapien
cagtcctccccctcctaaactgaccagtggctg

SEQ ID NO: 686090 - DNA, 33 bp, Homo sapien
cagtcctccccctcctcaactgaccagtggctg

SEQ ID NO: 686091 - DNA, 33 bp, Homo sapien
agaccctccagaaccacagtgcttacccctggt

SEQ ID NO: 686092 - DNA, 33 bp, Homo sapien
agaccctccagaaccatagtgcttacccctggt

SEQ ID NO: 686093 - DNA, 33 bp, Homo sapien
tctggcacctctttgcacacctcagagacaagt

SEQ ID NO: 686094 - DNA, 33 bp, Homo sapien
tctggcacctctttgcgcacctcagagacaagt

SEQ ID NO: 686095 - DNA, 33 bp, Homo sapien
ctgggcatgtgcaaccactatatgtataaagaa

SEQ ID NO: 686096 - DNA, 33 bp, Homo sapien
ctgggcatgtgcaaccgctatatgtataaagaa

SEQ ID NO: 686097 - DNA, 33 bp, Homo sapien
ctgcttctaaaataaccgattctgtttgagtgg

SEQ ID NO: 686098 - DNA, 33 bp, Homo sapien
ctgcttctaaaataactgattctgtttgagtgg

SEQ ID NO: 686099 - DNA, 33 bp, Homo sapien
ttttccaggggagcaaatgcgaggcttagagag

SEQ ID NO: 686100 - DNA, 33 bp, Homo sapien
ttttccaggggagcaagtgcgaggcttagagag

SEQ ID NO: 686101 - DNA, 33 bp, Homo sapien
tttggggcctcagagtcaagggtataggcagga

SEQ ID NO: 686102 - DNA, 33 bp, Homo sapien
tttggggcctcagagtgaagggtataggcagga

SEQ ID NO: 686103 - DNA, 33 bp, Homo sapien
caagtaagaatcgagccaactccctggggcagc

SEQ ID NO: 686104 - DNA, 33 bp, Homo sapien
caagtaagaatcgagcgaactccctggggcagc

SEQ ID NO: 686105 - DNA, 33 bp, Homo sapien
tgtctgatgaacatgacgttgaaggagcctcgg

SEQ ID NO: 686106 - DNA, 33 bp, Homo sapien
tgtctgatgaacatgaggttgaaggagcctcgg

SEQ ID NO: 686107 - DNA, 33 bp, Homo sapien
tcaccgtagcagcccggaaggatggtcgtatca

SEQ ID NO: 686108 - DNA, 33 bp, Homo sapien
tcaccgtagcagcccgtaaggatggtcgtatca

SEQ ID NO: 686109 - DNA, 33 bp, Homo sapien
atttctctttcactagcaggaacataatagctt

SEQ ID NO: 686110 - DNA, 33 bp, Homo sapien
atttctctttcactagtaggaacataatagctt

SEQ ID NO: 686111 - DNA, 33 bp, Homo sapien
tttgttttctatcctccgaaagtttaagtgagg

SEQ ID NO: 686112 - DNA, 33 bp, Homo sapien
tttgttttctatcctctgaaagtttaagtgagg

SEQ ID NO: 686113 - DNA, 33 bp, Homo sapien
taaaaaccctggggaccatcgcagtagaagagg

SEQ ID NO: 686114 - DNA, 33 bp, Homo sapien
taaaaaccctggggactatcgcagtagaagagg

SEQ ID NO: 686115 - DNA, 33 bp, Homo sapien
agacagggatcagcagaccatattcaaacacag

SEQ ID NO: 686116 - DNA, 33 bp, Homo sapien
agacagggatcagcaggccatattcaaacacag

SEQ ID NO: 686117 - DNA, 33 bp, Homo sapien
ctagagggaatctaacactgagaatgagaaaag

SEQ ID NO: 686118 - DNA, 33 bp, Homo sapien
ctagagggaatctaacgctgagaatgagaaaag

SEQ ID NO: 686119 - DNA, 33 bp, Homo sapien
ctgaggcatcatcataactgggccaaagtcttt

SEQ ID NO: 686120 - DNA, 33 bp, Homo sapien
ctgaggcatcatcatatctgggccaaagtcttt

SEQ ID NO: 686121 - DNA, 33 bp, Homo sapien
tttgtggagccgagacaggtgacatttttcatg

SEQ ID NO: 686122 - DNA, 33 bp, Homo sapien
tttgtggagccgagacgggtgacatttttcatg

SEQ ID NO: 686123 - DNA, 33 bp, Homo sapien
atgaactaagtatagaggcttgttgatagatgg

SEQ ID NO: 686124 - DNA, 33 bp, Homo sapien
atgaactaagtatagatgcttgttgatagatgg

SEQ ID NO: 686125 - DNA, 33 bp, Homo sapien
cccctcctgatacacaagtcagcgccgcaccct

SEQ ID NO: 686126 - DNA, 33 bp, Homo sapien
cccctcctgatacacatgtcagcgccgcaccct

SEQ ID NO: 686127 - DNA, 33 bp, Homo sapien
atttttgatctgcaaacgtctttcttgaggata

SEQ ID NO: 686128 - DNA, 33 bp, Homo sapien
atttttgatctgcaaatgtctttcttgaggata

SEQ ID NO: 686129 - DNA, 33 bp, Homo sapien
actgagttgctgataaacttaagaatcttttgg

SEQ ID NO: 686130 - DNA, 33 bp, Homo sapien
actgagttgctgataagcttaagaatcttttgg

SEQ ID NO: 686131 - DNA, 33 bp, Homo sapien
gaggccaagacagcgaccagccttacagcaatt

SEQ ID NO: 686132 - DNA, 33 bp, Homo sapien
gaggccaagacagcgatcagccttacagcaatt

SEQ ID NO: 686133 - DNA, 33 bp, Homo sapien
cctccactcctcaccccatgtgaagtttttact

SEQ ID NO: 686134 - DNA, 33 bp, Homo sapien
cctccactcctcaccctatgtgaagtttttact

SEQ ID NO: 686135 - DNA, 33 bp, Homo sapien
agacatgtctctgatccccaccagcccatcagt

SEQ ID NO: 686136 - DNA, 33 bp, Homo sapien
agacatgtctctgatctccaccagcccatcagt

SEQ ID NO: 686137 - DNA, 33 bp, Homo sapien
gaaacctgatttagaaatatcccttcatcttag

SEQ ID NO: 686138 - DNA, 33 bp, Homo sapien
gaaacctgatttagaactatcccttcatcttag

SEQ ID NO: 686139 - DNA, 33 bp, Homo sapien; identical to SEQ ID NO: 686137

SEQ ID NO: 686140 - DNA, 33 bp, Homo sapien; identical to SEQ ID NO: 686138

SEQ ID NO: 686141 - DNA, 33 bp, Homo sapien
ttccataagtgaataacaggcataaatatttgg

SEQ ID NO: 686142 - DNA, 33 bp, Homo sapien
ttccataagtgaataataggcataaatatttgg

SEQ ID NO: 686143 - DNA, 33 bp, Homo sapien; identical to SEQ ID NO: 686141

SEQ ID NO: 686144 - DNA, 33 bp, Homo sapien; identical to SEQ ID NO: 686142

SEQ ID NO: 686145 - DNA, 33 bp, Homo sapien
ccaatcttctgcaggacgttctatgtcagccag

SEQ ID NO: 686146 - DNA, 33 bp, Homo sapien
ccaatcttctgcaggatgttctatgtcagccag

SEQ ID NO: 686147 - DNA, 33 bp, Homo sapien
actatttcaagatgtacagattcaatatatttt

SEQ ID NO: 686148 - DNA, 33 bp, Homo sapien
actatttcaagatgtagagattcaatatatttt

SEQ ID NO: 686149 - DNA, 33 bp, Homo sapien; identical to SEQ ID NO: 686147

SEQ ID NO: 686150 - DNA, 33 bp, Homo sapien; identical to SEQ ID NO: 686148

SEQ ID NO: 686151 - DNA, 33 bp, Homo sapien
tgaaggccaccttctaacaatgagaggataata

SEQ ID NO: 686152 - DNA, 33 bp, Homo sapien
tgaaggccaccttctagcaatgagaggataata

SEQ ID NO: 686153 - DNA, 33 bp, Homo sapien
gtcttaacatatggtccagcctggagaatgttc

SEQ ID NO: 686154 - DNA, 33 bp, Homo sapien
gtcttaacatatggtctagcctggagaatgttc

SEQ ID NO: 686155 - DNA, 33 bp, Homo sapien
gagatgctgaataaagacaagcgatgatttctt

SEQ ID NO: 686156 - DNA, 33 bp, Homo sapien
gagatgctgaataaaggcaagcgatgatttctt

SEQ ID NO: 686157 - DNA, 33 bp, Homo sapien
cacctagcggagcaacgcgcagcctatgtctct

SEQ ID NO: 686158 - DNA, 33 bp, Homo sapien
cacctagcggagcaactcgcagcctatgtctct

SEQ ID NO: 686159 - DNA, 33 bp, Homo sapien; identical to SEQ ID NO: 686157

SEQ ID NO: 686160 - DNA, 33 bp, Homo sapien; identical to SEQ ID NO: 686158

SEQ ID NO: 686161 - DNA, 33 bp, Homo sapien
gcatattggtctcctcacatctgcccagcgcat

SEQ ID NO: 686162 - DNA, 33 bp, Homo sapien
gcatattggtctcctcgcatctgcccagcgcat

SEQ ID NO: 686163 - DNA, 33 bp, Homo sapien
tcagaggaagccaagaagaagagaaagtttttg

SEQ ID NO: 686164 - DNA, 33 bp, Homo sapien
tcagaggaagccaagatgaagagaaagtttttg

SEQ ID NO: 686165 - DNA, 33 bp, Homo sapien; identical to SEQ ID NO: 686163

SEQ ID NO: 686166 - DNA, 33 bp, Homo sapien; identical to SEQ ID NO: 686164

SEQ ID NO: 686167 - DNA, 33 bp, Homo sapien
tacagggaactctaatcagcaagaaaaaaataa

SEQ ID NO: 686168 - DNA, 33 bp, Homo sapien
tacagggaactctaatgagcaagaaaaaaataa

SEQ ID NO: 686169 - DNA, 33 bp, Homo sapien
ttagaatgttggctgacgttattatgaagggaa

SEQ ID NO: 686170 - DNA, 33 bp, Homo sapien
ttagaatgttggctgatgttattatgaagggaa

SEQ ID NO: 686171 - DNA, 33 bp, Homo sapien
agcattatacataacaatgccaaagtgagaaca

SEQ ID NO: 686172 - DNA, 33 bp, Homo sapien
agcattatacataacagtgccaaagtgagaaca

SEQ ID NO: 686173 - DNA, 33 bp, Homo sapien
atggttcattggaaaaaacggatcacagagtca

SEQ ID NO: 686174 - DNA, 33 bp, Homo sapien
atggttcattggaaaacacggatcacagagtca

SEQ ID NO: 686175 - DNA, 33 bp, Homo sapien
actatcgaaactggccaatctgatcttcaagct

SEQ ID NO: 686176 - DNA, 33 bp, Homo sapien
actatcgaaactggccgatctgatcttcaagct

SEQ ID NO: 686177 - DNA, 33 bp, Homo sapien
gaagatgatgttgccggaaatatccttaaacgg

SEQ ID NO: 686178 - DNA, 33 bp, Homo sapien
gaagatgatgttgccgtaaatatccttaaacgg

SEQ ID NO: 686179 - DNA, 33 bp, Homo sapien; identical to SEQ ID NO: 686177

SEQ ID NO: 686180 - DNA, 33 bp, Homo sapien; identical to SEQ ID NO: 686178

SEQ ID NO: 686181 - DNA, 33 bp, Homo sapien
agtggcatgaccattgcataagagttttttgtt

SEQ ID NO: 686182 - DNA, 33 bp, Homo sapien
agtggcatgaccattggataagagttttttgtt

SEQ ID NO: 686183 - DNA, 33 bp, Homo sapien
catgcctgtagtcacacatacttggggggctga

SEQ ID NO: 686184 - DNA, 33 bp, Homo sapien
catgcctgtagtcacagatacttggggggctga

SEQ ID NO: 686185 - DNA, 33 bp, Homo sapien
ctgaatgtctcgctgtaaagcccgattgtacat

SEQ ID NO: 686186 - DNA, 33 bp, Homo sapien
ctgaatgtctcgctgtgaagcccgattgtacat

SEQ ID NO: 686187 - DNA, 33 bp, Homo sapien
gtgccttttgggaacaaatctgcattgccaggc

SEQ ID NO: 686188 - DNA, 33 bp, Homo sapien
gtgccttttgggaacacatctgcattgccaggc

SEQ ID NO: 686189 - DNA, 33 bp, Homo sapien
cagattacacccaacaagaaaaggtccattgcc

SEQ ID NO: 686190 - DNA, 33 bp, Homo sapien
cagattacacccaacaggaaaaggtccattgcc

SEQ ID NO: 686191 - DNA, 33 bp, Homo sapien
gctatgattgtactacagcaccactatatatac

SEQ ID NO: 686192 - DNA, 33 bp, Homo sapien
gctatgattgtactactgcaccactatatatac

SEQ ID NO: 686193 - DNA, 33 bp, Homo sapien; identical to SEQ ID NO: 686191

SEQ ID NO: 686194 - DNA, 33 bp, Homo sapien; identical to SEQ ID NO: 686192

SEQ ID NO: 686195 - DNA, 33 bp, Homo sapien
aaagcccggcgagaaactgagcaaagcagctgc

SEQ ID NO: 686196 - DNA, 33 bp, Homo sapien
aaagcccggcgagaaattgagcaaagcagctgc

SEQ ID NO: 686197 - DNA, 33 bp, Homo sapien
aatccatatgctagaaactggggccccagagaa

SEQ ID NO: 686198 - DNA, 33 bp, Homo sapien
aatccatatgctagaagctggggccccagagaa

SEQ ID NO: 686199 - DNA, 33 bp, Homo sapien
tcactcaaagccggaacatgcagctctagagac

SEQ ID NO: 686200 - DNA, 33 bp, Homo sapien
tcactcaaagccggaagatgcagctctagagac

SEQ ID NO: 686201 - DNA, 33 bp, Homo sapien
gtgggcacagacacaaatggctggacatccaga

SEQ ID NO: 686202 - DNA, 33 bp, Homo sapien
gtgggcacagacacaagtggctggacatccaga

SEQ ID NO: 686203 - DNA, 33 bp, Homo sapien
tgttctgtcttaagataagcagagagggtcatg

SEQ ID NO: 686204 - DNA, 33 bp, Homo sapien
tgttctgtcttaagatgagcagagagggtcatg

SEQ ID NO: 686205 - DNA, 33 bp, Homo sapien
cctgggctgccttccgacccctgtcagatagta

SEQ ID NO: 686206 - DNA, 33 bp, Homo sapien
cctgggctgccttccgtcccctgtcagatagta

SEQ ID NO: 686207 - DNA, 33 bp, Homo sapien
ctgacaaagccttttccattttatgtgtcagag

SEQ ID NO: 686208 - DNA, 33 bp, Homo sapien
ctgacaaagccttttctattttatgtgtcagag

SEQ ID NO: 686209 - DNA, 33 bp, Homo sapien
ttacattgcgtatccaaacagataacccatgat

SEQ ID NO: 686210 - DNA, 33 bp, Homo sapien
ttacattgcgtatccatacagataacccatgat

SEQ ID NO: 686211 - DNA, 33 bp, Homo sapien
aaaattgaagtgttgccagggcccttggtagaa

SEQ ID NO: 686212 - DNA, 33 bp, Homo sapien
aaaattgaagtgttgctagggcccttggtagaa

SEQ ID NO: 686213 - DNA, 33 bp, Homo sapien
cggcagcatcaagacaacctttgcagcccggct

SEQ ID NO: 686214 - DNA, 33 bp, Homo sapien
cggcagcatcaagacagcctttgcagcccggct

SEQ ID NO: 686215 - DNA, 33 bp, Homo sapien; identical to SEQ ID NO: 686213

SEQ ID NO: 686216 - DNA, 33 bp, Homo sapien; identical to SEQ ID NO: 686214

SEQ ID NO: 686217 - DNA, 33 bp, Homo sapien
aaggtaagtcagcaccaagcgaacagatcattc

SEQ ID NO: 686218 - DNA, 33 bp, Homo sapien
aaggtaagtcagcaccgagcgaacagatcattc

SEQ ID NO: 686219 - DNA, 33 bp, Homo sapien
tgatatatctacataaataggcatagaaataga

SEQ ID NO: 686220 - DNA, 33 bp, Homo sapien
tgatatatctacataagtaggcatagaaataga

SEQ ID NO: 686221 - DNA, 33 bp, Homo sapien
tggtactctcagttcactaagagttttcaggac

SEQ ID NO: 686222 - DNA, 33 bp, Homo sapien
tggtactctcagttcagtaagagttttcaggac

SEQ ID NO: 686223 - DNA, 33 bp, Homo sapien
ggaaaggagggaaaacagatgtttgctgaataa

SEQ ID NO: 686224 - DNA, 33 bp, Homo sapien
ggaaaggagggaaaacggatgtttgctgaataa

SEQ ID NO: 686225 - DNA, 33 bp, Homo sapien
acacatagcatttacaacgcatcaggtattata

SEQ ID NO: 686226 - DNA, 33 bp, Homo sapien
acacatagcatttacatcgcatcaggtattata

SEQ ID NO: 686227 - DNA, 33 bp, Homo sapien
ctgccttatccaggaacatttcccaattgtact

SEQ ID NO: 686228 - DNA, 33 bp, Homo sapien
ctgccttatccaggaatatttcccaattgtact

SEQ ID NO: 686229 - DNA, 33 bp, Homo sapien
taaaagtaatcccagacatagtggccatccagc

SEQ ID NO: 686230 - DNA, 33 bp, Homo sapien
taaaagtaatcccagatatagtggccatccagc

SEQ ID NO: 686231 - DNA, 33 bp, Homo sapien
acatatggtggtaaagaagacagaaaatgccca

SEQ ID NO: 686232 - DNA, 33 bp, Homo sapien
acatatggtggtaaagtagacagaaaatgccca

SEQ ID NO: 686233 - DNA, 33 bp, Homo sapien
ggggactgcagtttgtctcagccaagaactaga

SEQ ID NO: 686234 - DNA, 33 bp, Homo sapien
ggggactgcagtttgtttcagccaagaactaga

SEQ ID NO: 686235 - DNA, 33 bp, Homo sapien
gccctgtgcttgtgaccgtcaaaacttctgtct

SEQ ID NO: 686236 - DNA, 33 bp, Homo sapien
gccctgtgcttgtgactgtcaaaacttctgtct

SEQ ID NO: 686237 - DNA, 33 bp, Homo sapien
aataaattatatcaggcaaattgaagagagaaa

SEQ ID NO: 686238 - DNA, 33 bp, Homo sapien
aataaattatatcaggtaaattgaagagagaaa

SEQ ID NO: 686239 - DNA, 33 bp, Homo sapien
accaaattcaaacacactggtgctaattcaagt

SEQ ID NO: 686240 - DNA, 33 bp, Homo sapien
accaaattcaaacacattggtgctaattcaagt

SEQ ID NO: 686241 - DNA, 33 bp, Homo sapien
tgcttctaaaatgaaaaaacgtgtcctaaagta

SEQ ID NO: 686242 - DNA, 33 bp, Homo sapien
tgcttctaaaatgaaacaacgtgtcctaaagta

SEQ ID NO: 686243 - DNA, 33 bp, Homo sapien
ttctcaaaagaagacactcatatggccaaaaaa

SEQ ID NO: 686244 - DNA, 33 bp, Homo sapien
ttctcaaaagaagacattcatatggccaaaaaa

SEQ ID NO: 686245 - DNA, 33 bp, Homo sapien
ctcagcctacccttgaccaaagcacaaccatgt

SEQ ID NO: 686246 - DNA, 33 bp, Homo sapien
ctcagcctacccttgagcaaagcacaaccatgt

SEQ ID NO: 686247 - DNA, 33 bp, Homo sapien
tggcggcccgaggcccaagtagatgaacacagt

SEQ ID NO: 686248 - DNA, 33 bp, Homo sapien
tggcggcccgaggcccgagtagatgaacacagt

SEQ ID NO: 686249 - DNA, 33 bp, Homo sapien
ggttttgcccaaagcacagtttcttccttcctt

SEQ ID NO: 686250 - DNA, 33 bp, Homo sapien
ggttttgcccaaagcatagtttcttccttcctt

SEQ ID NO: 686251 - DNA, 33 bp, Homo sapien
acaaaaatacactcaagatggattaaatactta

SEQ ID NO: 686252 - DNA, 33 bp, Homo sapien
acaaaaatacactcaatatggattaaatactta

SEQ ID NO: 686253 - DNA, 33 bp, Homo sapien
gttttccacagtttcccgagggtcccagttgga

SEQ ID NO: 686254 - DNA, 33 bp, Homo sapien
gttttccacagtttcctgagggtcccagttgga

SEQ ID NO: 686255 - DNA, 33 bp, Homo sapien
tggcaggccaaaagcactgctcaaagtataaca

SEQ ID NO: 686256 - DNA, 33 bp, Homo sapien
tggcaggccaaaagcattgctcaaagtataaca

SEQ ID NO: 686257 - DNA, 33 bp, Homo sapien
tagccaggctagtagcgaagaccattggcacta

SEQ ID NO: 686258 - DNA, 33 bp, Homo sapien
tagccaggctagtagctaagaccattggcacta

SEQ ID NO: 686259 - DNA, 33 bp, Homo sapien
ttgcttgccccatagcaaatcatgtctgtctct

SEQ ID NO: 686260 - DNA, 33 bp, Homo sapien
ttgcttgccccatagccaatcatgtctgtctct

SEQ ID NO: 686261 - DNA, 33 bp, Homo sapien
tttagtgtctcagaaccatttacaactcagtat

SEQ ID NO: 686262 - DNA, 33 bp, Homo sapien
tttagtgtctcagaactatttacaactcagtat

SEQ ID NO: 686263 - DNA, 33 bp, Homo sapien
ttaacaaagagaaccccagacagtcacaaagac

SEQ ID NO: 686264 - DNA, 33 bp, Homo sapien
ttaacaaagagaaccctagacagtcacaaagac

SEQ ID NO: 686265 - DNA, 33 bp, Homo sapien
tcaggagattctaggcaccaaaagtggatgtgt

SEQ ID NO: 686266 - DNA, 33 bp, Homo sapien
tcaggagattctaggctccaaaagtggatgtgt

SEQ ID NO: 686267 - DNA, 33 bp, Homo sapien
actcaaatggcaaacacatgattaggttaagga

SEQ ID NO: 686268 - DNA, 33 bp, Homo sapien
actcaaatggcaaacatatgattaggttaagga

SEQ ID NO: 686269 - DNA, 33 bp, Homo sapien
tgctgacagaaaccacaagaaagacctatgagc

SEQ ID NO: 686270 - DNA, 33 bp, Homo sapien
tgctgacagaaaccacgagaaagacctatgagc

SEQ ID NO: 686271 - DNA, 33 bp, Homo sapien
cgaatttattcattcaagcgtttggaaaacagg

SEQ ID NO: 686272 - DNA, 33 bp, Homo sapien
cgaatttattcattcatgcgtttggaaaacagg

SEQ ID NO: 686273 - DNA, 33 bp, Homo sapien
ctaaaatgaattcgtacagaaggtgagaattaa

SEQ ID NO: 686274 - DNA, 33 bp, Homo sapien
ctaaaatgaattcgtagagaaggtgagaattaa

SEQ ID NO: 686275 - DNA, 33 bp, Homo sapien
gtcctgtttgtgtctacgtggaaagaaatactt

SEQ ID NO: 686276 - DNA, 33 bp, Homo sapien
gtcctgtttgtgtctatgtggaaagaaatactt

SEQ ID NO: 686277 - DNA, 33 bp, Homo sapien
tattcagaatgatccaataatttttcccaaatc

SEQ ID NO: 686278 - DNA, 33 bp, Homo sapien
tattcagaatgatccagtaatttttcccaaatc

SEQ ID NO: 686279 - DNA, 33 bp, Homo sapien
aggagagcaggggtaggcaggaggaagataaaa

SEQ ID NO: 686280 - DNA, 33 bp, Homo sapien
aggagagcaggggtagtcaggaggaagataaaa

SEQ ID NO: 686281 - DNA, 33 bp, Homo sapien
gcttgagaaattgataagaatggaattcaacct

SEQ ID NO: 686282 - DNA, 33 bp, Homo sapien
gcttgagaaattgatatgaatggaattcaacct

SEQ ID NO: 686283 - DNA, 33 bp, Homo sapien
gaccccttttcctgcaatatccctgagctccag

SEQ ID NO: 686284 - DNA, 33 bp, Homo sapien
gaccccttttcctgcagtatccctgagctccag

SEQ ID NO: 686285 - DNA, 33 bp, Homo sapien
atctttcaccatagaccgtaactgcttaggcac

SEQ ID NO: 686286 - DNA, 33 bp, Homo sapien
atctttcaccatagacggtaactgcttaggcac

SEQ ID NO: 686287 - DNA, 33 bp, Homo sapien
cctgaagcccacaaaccccatctaagcctcatt

SEQ ID NO: 686288 - DNA, 33 bp, Homo sapien
cctgaagcccacaaacgccatctaagcctcatt

SEQ ID NO: 686289 - DNA, 33 bp, Homo sapien
atacctcacataatccaagtacctaacctgtgt

SEQ ID NO: 686290 - DNA, 33 bp, Homo sapien
atacctcacataatccgagtacctaacctgtgt

SEQ ID NO: 686291 - DNA, 33 bp, Homo sapien
aatatctagatggtaaatatgtagaaattaaca

SEQ ID NO: 686292 - DNA, 33 bp, Homo sapien
aatatctagatggtaactatgtagaaattaaca

SEQ ID NO: 686293 - DNA, 33 bp, Homo sapien
gttagccacaagaaaagctgtgacatctttaga

SEQ ID NO: 686294 - DNA, 33 bp, Homo sapien
gttagccacaagaaaatctgtgacatctttaga

SEQ ID NO: 686295 - DNA, 33 bp, Homo sapien
tcagcatcatggtgtaagataatggttctcaac

SEQ ID NO: 686296 - DNA, 33 bp, Homo sapien
tcagcatcatggtgtaggataatggttctcaac

SEQ ID NO: 686297 - DNA, 33 bp, Homo sapien
cccaccctttccaaagcatttgaacgtcagcat

SEQ ID NO: 686298 - DNA, 33 bp, Homo sapien
cccaccctttccaaagtatttgaacgtcagcat

SEQ ID NO: 686299 - DNA, 33 bp, Homo sapien
ttttcattcagtctaaggtacccatttgaattg

SEQ ID NO: 686300 - DNA, 33 bp, Homo sapien
ttttcattcagtctaatgtacccatttgaattg

SEQ ID NO: 686301 - DNA, 33 bp, Homo sapien
ttcaatcatttagcagacaacattacaagccct

SEQ ID NO: 686302 - DNA, 33 bp, Homo sapien
ttcaatcatttagcaggcaacattacaagccct

SEQ ID NO: 686303 - DNA, 33 bp, Homo sapien
actgctgtagacaaaacagataatggcagaggg

SEQ ID NO: 686304 - DNA, 33 bp, Homo sapien
actgctgtagacaaaatagataatggcagaggg

SEQ ID NO: 686305 - DNA, 33 bp, Homo sapien
aagaccccctgtaaaaccctgctctccacaagg

SEQ ID NO: 686306 - DNA, 33 bp, Homo sapien
aagaccccctgtaaaatcctgctctccacaagg

SEQ ID NO: 686307 - DNA, 33 bp, Homo sapien
aaaggttcaggctaacaatggagtctaacgttc

SEQ ID NO: 686308 - DNA, 33 bp, Homo sapien
aaaggttcaggctaacgatggagtctaacgttc

SEQ ID NO: 686309 - DNA, 33 bp, Homo sapien
tgaatttggctgatgactaagaaaggctgttac

SEQ ID NO: 686310 - DNA, 33 bp, Homo sapien
tgaatttggctgatgattaagaaaggctgttac

SEQ ID NO: 686311 - DNA, 33 bp, Homo sapien
gcttcaagcccagctaacccttcaaggccagtg

SEQ ID NO: 686312 - DNA, 33 bp, Homo sapien
gcttcaagcccagctagcccttcaaggccagtg

SEQ ID NO: 686313 - DNA, 33 bp, Homo sapien
ccccgtataacttcataaattcctctatggtgt

SEQ ID NO: 686314 - DNA, 33 bp, Homo sapien
ccccgtataacttcattaattcctctatggtgt

SEQ ID NO: 686315 - DNA, 33 bp, Homo sapien
cacctgggtaagcacaaaaatgatgccaagtag

SEQ ID NO: 686316 - DNA, 33 bp, Homo sapien
cacctgggtaagcacagaaatgatgccaagtag

SEQ ID NO: 686317 - DNA, 33 bp, Homo sapien
tctcataccactgtctcaccctgtcacctggca

SEQ ID NO: 686318 - DNA, 33 bp, Homo sapien
tctcataccactgtcttaccctgtcacctggca

SEQ ID NO: 686319 - DNA, 33 bp, Homo sapien
tactacgaaccttatacgcaccatctaattcag

SEQ ID NO: 686320 - DNA, 33 bp, Homo sapien
tactacgaaccttatatgcaccatctaattcag

SEQ ID NO: 686321 - DNA, 33 bp, Homo sapien
tgtgtcatagtttgatcaaaaagaaagaccagg

SEQ ID NO: 686322 - DNA, 33 bp, Homo sapien
tgtgtcatagtttgattaaaaagaaagaccagg

SEQ ID NO: 686323 - DNA, 33 bp, Homo sapien
aacaacaactgtagtgcaaacagaaggtcaggg

SEQ ID NO: 686324 - DNA, 33 bp, Homo sapien
aacaacaactgtagtggaaacagaaggtcaggg

SEQ ID NO: 686325 - DNA, 33 bp, Homo sapien
gaggtttaaagaatccaccttttctccagaggt

SEQ ID NO: 686326 - DNA, 33 bp, Homo sapien
gaggtttaaagaatccgccttttctccagaggt

SEQ ID NO: 686327 - DNA, 33 bp, Homo sapien
gtgattatctccactacacagaaatattaactg

SEQ ID NO: 686328 - DNA, 33 bp, Homo sapien
gtgattatctccactatacagaaatattaactg

SEQ ID NO: 686329 - DNA, 33 bp, Homo sapien
acactccagaaccctcagaaagtgctcatgagg

SEQ ID NO: 686330 - DNA, 33 bp, Homo sapien
acactccagaaccctcggaaagtgctcatgagg

SEQ ID NO: 686331 - DNA, 33 bp, Homo sapien
tcttcatgtccatccacacatctgacaaaaatt

SEQ ID NO: 686332 - DNA, 33 bp, Homo sapien
tcttcatgtccatccatacatctgacaaaaatt

SEQ ID NO: 686333 - DNA, 33 bp, Homo sapien
ggagggaatgctataaggtaaaggatgagtaga

SEQ ID NO: 686334 - DNA, 33 bp, Homo sapien
ggagggaatgctataatgtaaaggatgagtaga

SEQ ID NO: 686335 - DNA, 33 bp, Homo sapien
taatttctagtccatagaagagaaaatgtagac

SEQ ID NO: 686336 - DNA, 33 bp, Homo sapien
taatttctagtccatataagagaaaatgtagac

SEQ ID NO: 686337 - DNA, 33 bp, Homo sapien
gtgtggtgattgagtcagaatatttaaggtatc

SEQ ID NO: 686338 - DNA, 33 bp, Homo sapien
gtgtggtgattgagtcggaatatttaaggtatc

SEQ ID NO: 686339 - DNA, 33 bp, Homo sapien
ttggctttttgagaaccgtcctttctgtctaaa

SEQ ID NO: 686340 - DNA, 33 bp, Homo sapien
ttggctttttgagaactgtcctttctgtctaaa

SEQ ID NO: 686341 - DNA, 33 bp, Homo sapien
tttggccattcttgcacggctgtaaacacctga

SEQ ID NO: 686342 - DNA, 33 bp, Homo sapien
tttggccattcttgcatggctgtaaacacctga

SEQ ID NO: 686343 - DNA, 33 bp, Homo sapien
tttgcaaagcatcttacaatgcaagaattacag

SEQ ID NO: 686344 - DNA, 33 bp, Homo sapien
tttgcaaagcatcttagaatgcaagaattacag

SEQ ID NO: 686345 - DNA, 33 bp, Homo sapien
tttctctgattcacaaattctgtgactttaatt

SEQ ID NO: 686346 - DNA, 33 bp, Homo sapien
tttctctgattcacaagttctgtgactttaatt

SEQ ID NO: 686347 - DNA, 33 bp, Homo sapien
tctcgtcactgcccaacgatgttacctcaggag

SEQ ID NO: 686348 - DNA, 33 bp, Homo sapien
tctcgtcactgcccaatgatgttacctcaggag

SEQ ID NO: 686349 - DNA, 33 bp, Homo sapien
tgtgctggggattcaacagattacatgcaaagt

SEQ ID NO: 686350 - DNA, 33 bp, Homo sapien
tgtgctggggattcaatagattacatgcaaagt

SEQ ID NO: 686351 - DNA, 33 bp, Homo sapien
ctggaagacttgtctgaaactatatttgtttgg

SEQ ID NO: 686352 - DNA, 33 bp, Homo sapien
ctggaagacttgtctgcaactatatttgtttgg

SEQ ID NO: 686353 - DNA, 33 bp, Homo sapien
tcgtgaagttagggcaaagcaggaggtcagtag

SEQ ID NO: 686354 - DNA, 33 bp, Homo sapien
tcgtgaagttagggcagagcaggaggtcagtag

SEQ ID NO: 686355 - DNA, 33 bp, Homo sapien
gccaaatgaagggaagaaaaacaccattccagg

SEQ ID NO: 686356 - DNA, 33 bp, Homo sapien
gccaaatgaagggaaggaaaacaccattccagg

SEQ ID NO: 686357 - DNA, 33 bp, Homo sapien
aacctgtgagggactccgaagtggcaggaagaa

SEQ ID NO: 686358 - DNA, 33 bp, Homo sapien
aacctgtgagggactctgaagtggcaggaagaa

SEQ ID NO: 686359 - DNA, 33 bp, Homo sapien
agggtctggatgagaaaaatatgaggctgcaaa

SEQ ID NO: 686360 - DNA, 33 bp, Homo sapien
agggtctggatgagaagaatatgaggctgcaaa

SEQ ID NO: 686361 - DNA, 33 bp, Homo sapien
tgctcaaattcctataccagactctaacctttg

SEQ ID NO: 686362 - DNA, 33 bp, Homo sapien
tgctcaaattcctatatcagactctaacctttg

SEQ ID NO: 686363 - DNA, 33 bp, Homo sapien
aggaaagagttctaaaattcccacaagagaata

SEQ ID NO: 686364 - DNA, 33 bp, Homo sapien
aggaaagagttctaaagttcccacaagagaata

SEQ ID NO: 686365 - DNA, 33 bp, Homo sapien
tgtaaaatgaacatgaaaaaacagtctttcatt

SEQ ID NO: 686366 - DNA, 33 bp, Homo sapien
tgtaaaatgaacatgagaaaacagtctttcatt

SEQ ID NO: 686367 - DNA, 33 bp, Homo sapien
ttatggataaactctcaatagccatcaatagaa

SEQ ID NO: 686368 - DNA, 33 bp, Homo sapien
ttatggataaactctccatagccatcaatagaa

SEQ ID NO: 686369 - DNA, 33 bp, Homo sapien
atattgtcagacaaacactgctctctttctaaa

SEQ ID NO: 686370 - DNA, 33 bp, Homo sapien
atattgtcagacaaacgctgctctctttctaaa

SEQ ID NO: 686371 - DNA, 33 bp, Homo sapien
tggcgagtaaatgaaacaacgaatgagtcagag

SEQ ID NO: 686372 - DNA, 33 bp, Homo sapien
tggcgagtaaatgaaataacgaatgagtcagag

SEQ ID NO: 686373 - DNA, 33 bp, Homo sapien
tgatgaagcgtcccacaatgagcatttcaaagg

SEQ ID NO: 686374 - DNA, 33 bp, Homo sapien
tgatgaagcgtcccacgatgagcatttcaaagg

SEQ ID NO: 686375 - DNA, 33 bp, Homo sapien
tgcaaagctgactcaccgggcttcagagcagga

SEQ ID NO: 686376 - DNA, 33 bp, Homo sapien
tgcaaagctgactcactgggcttcagagcagga

SEQ ID NO: 686377 - DNA, 33 bp, Homo sapien
catggggaagattctacactattggagaagcta

SEQ ID NO: 686378 - DNA, 33 bp, Homo sapien
catggggaagattctagactattggagaagcta

SEQ ID NO: 686379 - DNA, 33 bp, Homo sapien
tggaaattctccttccaatagttgtgattaaag

SEQ ID NO: 686380 - DNA, 33 bp, Homo sapien
tggaaattctccttccgatagttgtgattaaag

SEQ ID NO: 686381 - DNA, 33 bp, Homo sapien
acctgcacttttcaaaagatgagtccaagaccc

SEQ ID NO: 686382 - DNA, 33 bp, Homo sapien
acctgcacttttcaaatgatgagtccaagaccc

SEQ ID NO: 686383 - DNA, 33 bp, Homo sapien
accttgaaggacctcagacaatggcatctctca

SEQ ID NO: 686384 - DNA, 33 bp, Homo sapien
accttgaaggacctcatacaatggcatctctca

SEQ ID NO: 686385 - DNA, 33 bp, Homo sapien
aattcagggcctggaaatacaactactgcatga

SEQ ID NO: 686386 - DNA, 33 bp, Homo sapien
aattcagggcctggaagtacaactactgcatga

SEQ ID NO: 686387 - DNA, 33 bp, Homo sapien
gaaaactagagttgacaatgtttcaaagcaaga

SEQ ID NO: 686388 - DNA, 33 bp, Homo sapien
gaaaactagagttgacgatgtttcaaagcaaga

SEQ ID NO: 686389 - DNA, 33 bp, Homo sapien
acaatctgaaatgaccgaatcctttacattctt

SEQ ID NO: 686390 - DNA, 33 bp, Homo sapien
acaatctgaaatgacctaatcctttacattctt

SEQ ID NO: 686391 - DNA, 33 bp, Homo sapien
ctccttattgcattgacgtgagttgaagaggag

SEQ ID NO: 686392 - DNA, 33 bp, Homo sapien
ctccttattgcattgatgtgagttgaagaggag

SEQ ID NO: 686393 - DNA, 33 bp, Homo sapien
aaataatgtggtcaataacaagaatttttattt

SEQ ID NO: 686394 - DNA, 33 bp, Homo sapien
aaataatgtggtcaatgacaagaatttttattt

SEQ ID NO: 686395 - DNA, 33 bp, Homo sapien
aggccctctccaatcagctcacttgaccttgtg

SEQ ID NO: 686396 - DNA, 33 bp, Homo sapien
aggccctctccaatcatctcacttgaccttgtg

SEQ ID NO: 686397 - DNA, 33 bp, Homo sapien
ttatttgtaatgtaaacgatctgaaatgaccta

SEQ ID NO: 686398 - DNA, 33 bp, Homo sapien
ttatttgtaatgtaaatgatctgaaatgaccta

SEQ ID NO: 686399 - DNA, 33 bp, Homo sapien
gatgatgaagtttccagacctcagtgcacaaga

SEQ ID NO: 686400 - DNA, 33 bp, Homo sapien
gatgatgaagtttccatacctcagtgcacaaga

SEQ ID NO: 686401 - DNA, 33 bp, Homo sapien
attgcttgaattactacaagagtgccataggga

SEQ ID NO: 686402 - DNA, 33 bp, Homo sapien
attgcttgaattactataagagtgccataggga

SEQ ID NO: 686403 - DNA, 33 bp, Homo sapien
tttctgctgtgtggcaataaccatataataata

SEQ ID NO: 686404 - DNA, 33 bp, Homo sapien
tttctgctgtgtggcagtaaccatataataata

SEQ ID NO: 686405 - DNA, 33 bp, Homo sapien
ttggagggttttagcacggaattgatagctcta

SEQ ID NO: 686406 - DNA, 33 bp, Homo sapien
ttggagggttttagcatggaattgatagctcta

SEQ ID NO: 686407 - DNA, 33 bp, Homo sapien
aaaaagccaattccaactacctttaacattgac

SEQ ID NO: 686408 - DNA, 33 bp, Homo sapien
aaaaagccaattccaagtacctttaacattgac

SEQ ID NO: 686409 - DNA, 33 bp, Homo sapien
ggacaacacccatgagcaagaggagctttgact

SEQ ID NO: 686410 - DNA, 33 bp, Homo sapien
ggacaacacccatgagtaagaggagctttgact

SEQ ID NO: 686411 - DNA, 33 bp, Homo sapien
tcactcatcttaagaaaggtaaaggccaccctg

SEQ ID NO: 686412 - DNA, 33 bp, Homo sapien
tcactcatcttaagaacggtaaaggccaccctg

SEQ ID NO: 686413 - DNA, 33 bp, Homo sapien
aaaccttgcatctctacgtctgcaggtccttgt

SEQ ID NO: 686414 - DNA, 33 bp, Homo sapien
aaaccttgcatctctatgtctgcaggtccttgt

SEQ ID NO: 686415 - DNA, 33 bp, Homo sapien
agctggtcagggaatacaggccaagtggacagg

SEQ ID NO: 686416 - DNA, 33 bp, Homo sapien
agctggtcagggaatataggccaagtggacagg

SEQ ID NO: 686417 - DNA, 33 bp, Homo sapien
gtccacaaaagagagaccgaaaagttagcaaag

SEQ ID NO: 686418 - DNA, 33 bp, Homo sapien
gtccacaaaagagagatcgaaaagttagcaaag

SEQ ID NO: 686419 - DNA, 33 bp, Homo sapien
aatttgagctttagcaaaatctggtgaggtccc

SEQ ID NO: 686420 - DNA, 33 bp, Homo sapien
aatttgagctttagcataatctggtgaggtccc

SEQ ID NO: 686421 - DNA, 33 bp, Homo sapien
ccttttgagttttcaaacccaacagaggactac

SEQ ID NO: 686422 - DNA, 33 bp, Homo sapien
ccttttgagttttcaatcccaacagaggactac

SEQ ID NO: 686423 - DNA, 33 bp, Homo sapien
gggttcctggtagccacagcacttgcctcacct

SEQ ID NO: 686424 - DNA, 33 bp, Homo sapien
gggttcctggtagccagagcacttgcctcacct

SEQ ID NO: 686425 - DNA, 33 bp, Homo sapien
atgacttcatctgtgacaggagtcgcttcctta

SEQ ID NO: 686426 - DNA, 33 bp, Homo sapien
atgacttcatctgtgataggagtcgcttcctta

SEQ ID NO: 686427 - DNA, 33 bp, Homo sapien
gccttgacctttgtaacatgagcggctcctgaa

SEQ ID NO: 686428 - DNA, 33 bp, Homo sapien
gccttgacctttgtaagatgagcggctcctgaa

SEQ ID NO: 686429 - DNA, 33 bp, Homo sapien
gatagatgagcctccaatggagacaggaaggtg

SEQ ID NO: 686430 - DNA, 33 bp, Homo sapien
gatagatgagcctccagtggagacaggaaggtg

SEQ ID NO: 686431 - DNA, 33 bp, Homo sapien
tgtcaaattcaaggcaaaagaactaaatgcaat

SEQ ID NO: 686432 - DNA, 33 bp, Homo sapien
tgtcaaattcaaggcacaagaactaaatgcaat

SEQ ID NO: 686433 - DNA, 33 bp, Homo sapien
gaagatagagaatagcagaggacgaggaggtgg

SEQ ID NO: 686434 - DNA, 33 bp, Homo sapien
gaagatagagaatagcggaggacgaggaggtgg

SEQ ID NO: 686435 - DNA, 33 bp, Homo sapien
tgcttatgctaggtgacgcctaaataacttgcc

SEQ ID NO: 686436 - DNA, 33 bp, Homo sapien
tgcttatgctaggtgatgcctaaataacttgcc

SEQ ID NO: 686437 - DNA, 33 bp, Homo sapien
aaggtgtgtgggcaaaatggagctctctatgct

SEQ ID NO: 686438 - DNA, 33 bp, Homo sapien
aaggtgtgtgggcaaagtggagctctctatgct

SEQ ID NO: 686439 - DNA, 33 bp, Homo sapien
acatcagtcaaaacacagcatgtgccattatta

SEQ ID NO: 686440 - DNA, 33 bp, Homo sapien
acatcagtcaaaacacggcatgtgccattatta

SEQ ID NO: 686441 - DNA, 33 bp, Homo sapien
catgttcagctgcctgaaagctcgccaaaccct

SEQ ID NO: 686442 - DNA, 33 bp, Homo sapien
catgttcagctgcctgcaagctcgccaaaccct

SEQ ID NO: 686443 - DNA, 33 bp, Homo sapien
aggacagataaagagacggagatatcagctaac

SEQ ID NO: 686444 - DNA, 33 bp, Homo sapien
aggacagataaagagagggagatatcagctaac

SEQ ID NO: 686445 - DNA, 33 bp, Homo sapien
ctcaactggaaattcacgtgcccctggagccac

SEQ ID NO: 686446 - DNA, 33 bp, Homo sapien
ctcaactggaaattcatgtgcccctggagccac

SEQ ID NO: 686447 - DNA, 33 bp, Homo sapien
tgcagctctacttttcaatttttctttgttttt

SEQ ID NO: 686448 - DNA, 33 bp, Homo sapien
tgcagctctacttttccatttttctttgttttt

SEQ ID NO: 686449 - DNA, 33 bp, Homo sapien
ctgtactgggctcctccagaaagtttatcagat

SEQ ID NO: 686450 - DNA, 33 bp, Homo sapien
ctgtactgggctcctctagaaagtttatcagat

SEQ ID NO: 686451 - DNA, 33 bp, Homo sapien
attcctcccatgtagacgtaatttagtaacaat

SEQ ID NO: 686452 - DNA, 33 bp, Homo sapien
attcctcccatgtagatgtaatttagtaacaat

SEQ ID NO: 686453 - DNA, 33 bp, Homo sapien
gccaaattaaatggccacaaacaaaccacagtc

SEQ ID NO: 686454 - DNA, 33 bp, Homo sapien
gccaaattaaatggccgcaaacaaaccacagtc

SEQ ID NO: 686455 - DNA, 33 bp, Homo sapien
tcgcaaaatgctgcaacagaatctaagtgaaaa

SEQ ID NO: 686456 - DNA, 33 bp, Homo sapien
tcgcaaaatgctgcaagagaatctaagtgaaaa

SEQ ID NO: 686457 - DNA, 33 bp, Homo sapien
tctgcctcttctcaaaccaaaatgtagatgcaa

SEQ ID NO: 686458 - DNA, 33 bp, Homo sapien
tctgcctcttctcaaatcaaaatgtagatgcaa

SEQ ID NO: 686459 - DNA, 33 bp, Homo sapien
tcagaggtccagatacaacacatgaggttctaa

SEQ ID NO: 686460 - DNA, 33 bp, Homo sapien
tcagaggtccagatacgacacatgaggttctaa

SEQ ID NO: 686461 - DNA, 33 bp, Homo sapien
tagttgagcttcttctaaccaaaaggtcggtgt

SEQ ID NO: 686462 - DNA, 33 bp, Homo sapien
tagttgagcttcttcttaccaaaaggtcggtgt

SEQ ID NO: 686463 - DNA, 33 bp, Homo sapien
tttaattgggattgcacatttagacaactttac

SEQ ID NO: 686464 - DNA, 33 bp, Homo sapien
tttaattgggattgcatatttagacaactttac

SEQ ID NO: 686465 - DNA, 33 bp, Homo sapien
aatccactgtccctaaagcaattaagttcacaa

SEQ ID NO: 686466 - DNA, 33 bp, Homo sapien
aatccactgtccctaacgcaattaagttcacaa

SEQ ID NO: 686467 - DNA, 33 bp, Homo sapien
tgggcgggtaagctgaggacacactgccctgcc

SEQ ID NO: 686468 - DNA, 33 bp, Homo sapien
tgggcgggtaagctgatgacacactgccctgcc

SEQ ID NO: 686469 - DNA, 33 bp, Homo sapien
gaaaagctttaaggtcacaataaggtgatggga

SEQ ID NO: 686470 - DNA, 33 bp, Homo sapien
gaaaagctttaaggtcgcaataaggtgatggga

SEQ ID NO: 686471 - DNA, 33 bp, Homo sapien
tcacagggcagttcccaagagagctgcaggaag

SEQ ID NO: 686472 - DNA, 33 bp, Homo sapien
tcacagggcagttcccgagagagctgcaggaag

SEQ ID NO: 686473 - DNA, 33 bp, Homo sapien
cacagctcgaatcctacacctctgaccagcaca

SEQ ID NO: 686474 - DNA, 33 bp, Homo sapien
cacagctcgaatcctagacctctgaccagcaca

SEQ ID NO: 686475 - DNA, 33 bp, Homo sapien
aggaaaatttgagctcaaaacaggcaaggtttc

SEQ ID NO: 686476 - DNA, 33 bp, Homo sapien
aggaaaatttgagctctaaacaggcaaggtttc

SEQ ID NO: 686477 - DNA, 33 bp, Homo sapien
agaactgtaaggagaacggtgaagctgtaaaga

SEQ ID NO: 686478 - DNA, 33 bp, Homo sapien
agaactgtaaggagaatggtgaagctgtaaaga

SEQ ID NO: 686479 - DNA, 33 bp, Homo sapien
tcaccttcctgggcccaaattttctcttccaaa

SEQ ID NO: 686480 - DNA, 33 bp, Homo sapien
tcaccttcctgggcccgaattttctcttccaaa

SEQ ID NO: 686481 - DNA, 33 bp, Homo sapien
tatttacttagttcttcgacgcagagcttttcc

SEQ ID NO: 686482 - DNA, 33 bp, Homo sapien
tatttacttagttctttgacgcagagcttttcc

SEQ ID NO: 686483 - DNA, 33 bp, Homo sapien
tcacgttttatttgtacactgggcctttgctct

SEQ ID NO: 686484 - DNA, 33 bp, Homo sapien
tcacgttttatttgtagactgggcctttgctct

SEQ ID NO: 686485 - DNA, 33 bp, Homo sapien
tgaaattagaatgtatcaaggtgtctatccaaa

SEQ ID NO: 686486 - DNA, 33 bp, Homo sapien
tgaaattagaatgtatgaaggtgtctatccaaa

SEQ ID NO: 686487 - DNA, 33 bp, Homo sapien
aggcaaaggcaataaccagcaggtaccaagaca

SEQ ID NO: 686488 - DNA, 33 bp, Homo sapien
aggcaaaggcaataactagcaggtaccaagaca

SEQ ID NO: 686489 - DNA, 33 bp, Homo sapien
gactcaacatacataccccaagccaaatttgtg

SEQ ID NO: 686490 - DNA, 33 bp, Homo sapien
gactcaacatacatactccaagccaaatttgtg

SEQ ID NO: 686491 - DNA, 33 bp, Homo sapien
gtgacactcatcaactaacatttgagcaattaa

SEQ ID NO: 686492 - DNA, 33 bp, Homo sapien
gtgacactcatcaactgacatttgagcaattaa

SEQ ID NO: 686493 - DNA, 33 bp, Homo sapien
ctttgataacttagaaatcatcaaatcaccttg

SEQ ID NO: 686494 - DNA, 33 bp, Homo sapien
ctttgataacttagaactcatcaaatcaccttg

SEQ ID NO: 686495 - DNA, 33 bp, Homo sapien
actcaagtgactacgaacaaacagctcccccac

SEQ ID NO: 686496 - DNA, 33 bp, Homo sapien
actcaagtgactacgagcaaacagctcccccac

SEQ ID NO: 686497 - DNA, 33 bp, Homo sapien
gttacataaagcgttcagaacccactccaaact

SEQ ID NO: 686498 - DNA, 33 bp, Homo sapien
gttacataaagcgttcggaacccactccaaact

SEQ ID NO: 686499 - DNA, 33 bp, Homo sapien
ttgggtgagagcatgcgaagattctaccttcac

SEQ ID NO: 686500 - DNA, 33 bp, Homo sapien
ttgggtgagagcatgctaagattctaccttcac

SEQ ID NO: 686501 - DNA, 33 bp, Homo sapien
cagaccagacccccacagcaccacaggatgccc

SEQ ID NO: 686502 - DNA, 33 bp, Homo sapien
cagaccagacccccacggcaccacaggatgccc

SEQ ID NO: 686503 - DNA, 33 bp, Homo sapien
taccttcaatatagatcaaactcagcccctaca

SEQ ID NO: 686504 - DNA, 33 bp, Homo sapien
taccttcaatatagatgaaactcagcccctaca

SEQ ID NO: 686505 - DNA, 33 bp, Homo sapien
ggggaaactggacttaaggcacaacctggatca

SEQ ID NO: 686506 - DNA, 33 bp, Homo sapien
ggggaaactggacttagggcacaacctggatca

SEQ ID NO: 686507 - DNA, 33 bp, Homo sapien
actatatctgcctggcaaaggaatcactgagga

SEQ ID NO: 686508 - DNA, 33 bp, Homo sapien
actatatctgcctggcgaaggaatcactgagga

SEQ ID NO: 686509 - DNA, 33 bp, Homo sapien
tgtgagtggtggcctacggaggattggagggta

SEQ ID NO: 686510 - DNA, 33 bp, Homo sapien
tgtgagtggtggcctatggaggattggagggta

SEQ ID NO: 686511 - DNA, 33 bp, Homo sapien
ctccaaaggacagaatgacaaggccaagtctac

SEQ ID NO: 686512 - DNA, 33 bp, Homo sapien
ctccaaaggacagaattacaaggccaagtctac

SEQ ID NO: 686513 - DNA, 33 bp, Homo sapien
tttggcaacatcccggaacaaccttcaaaataa

SEQ ID NO: 686514 - DNA, 33 bp, Homo sapien
tttggcaacatcccgggacaaccttcaaaataa

SEQ ID NO: 686515 - DNA, 33 bp, Homo sapien
cccgagaataatggaaggggtcaagagcatgca

SEQ ID NO: 686516 - DNA, 33 bp, Homo sapien
cccgagaataatggaatgggtcaagagcatgca

SEQ ID NO: 686517 - DNA, 33 bp, Homo sapien
ttggaactattatgccgacctgtctccagaagg

SEQ ID NO: 686518 - DNA, 33 bp, Homo sapien
ttggaactattatgcctacctgtctccagaagg

SEQ ID NO: 686519 - DNA, 33 bp, Homo sapien
tcctcctggtatctgaacacttcttgcctctgg

SEQ ID NO: 686520 - DNA, 33 bp, Homo sapien
tcctcctggtatctgagcacttcttgcctctgg

SEQ ID NO: 686521 - DNA, 33 bp, Homo sapien
catgggctgctgtatacccttcgaggccacaca

SEQ ID NO: 686522 - DNA, 33 bp, Homo sapien
catgggctgctgtatatccttcgaggccacaca

SEQ ID NO: 686523 - DNA, 33 bp, Homo sapien
gaggggtacatgcccaagagcgttaagggcacc

SEQ ID NO: 686524 - DNA, 33 bp, Homo sapien
gaggggtacatgcccaggagcgttaagggcacc

SEQ ID NO: 686525 - DNA, 33 bp, Homo sapien
tgaagacttgcagagcacttctgaattggaata

SEQ ID NO: 686526 - DNA, 33 bp, Homo sapien
tgaagacttgcagagcgcttctgaattggaata

SEQ ID NO: 686527 - DNA, 33 bp, Homo sapien
tgcaagttcagaaaagcaggcctgatgtatcag

SEQ ID NO: 686528 - DNA, 33 bp, Homo sapien
tgcaagttcagaaaagtaggcctgatgtatcag

SEQ ID NO: 686529 - DNA, 33 bp, Homo sapien
atgaattgtgactgaaaaaaacctgtgaagcat

SEQ ID NO: 686530 - DNA, 33 bp, Homo sapien
atgaattgtgactgaagaaaacctgtgaagcat

SEQ ID NO: 686531 - DNA, 33 bp, Homo sapien
aaacttgagtcggcaacgtgatatgtagaccaa

SEQ ID NO: 686532 - DNA, 33 bp, Homo sapien
aaacttgagtcggcaatgtgatatgtagaccaa

SEQ ID NO: 686533 - DNA, 33 bp, Homo sapien
tggcttgagactccagaaagacccagtagcagg

SEQ ID NO: 686534 - DNA, 33 bp, Homo sapien
tggcttgagactccaggaagacccagtagcagg

SEQ ID NO: 686535 - DNA, 33 bp, Homo sapien
acctccaagtacaatcagactgctgagctattt

SEQ ID NO: 686536 - DNA, 33 bp, Homo sapien
acctccaagtacaatcggactgctgagctattt

SEQ ID NO: 686537 - DNA, 33 bp, Homo sapien
gtggacagtcagtcgaagtcgagattttgtgat

SEQ ID NO: 686538 - DNA, 33 bp, Homo sapien
gtggacagtcagtcgatgtcgagattttgtgat

SEQ ID NO: 686539 - DNA, 33 bp, Homo sapien
agtttattaacttacacaaccataagatcccca

SEQ ID NO: 686540 - DNA, 33 bp, Homo sapien
agtttattaacttacagaaccataagatcccca

SEQ ID NO: 686541 - DNA, 33 bp, Homo sapien
gattgatcttcctcaccgactcatttcacacag

SEQ ID NO: 686542 - DNA, 33 bp, Homo sapien
gattgatcttcctcactgactcatttcacacag

SEQ ID NO: 686543 - DNA, 33 bp, Homo sapien
tctcgccaagagccaaagttcttccaggttggt

SEQ ID NO: 686544 - DNA, 33 bp, Homo sapien
tctcgccaagagccaaggttcttccaggttggt

SEQ ID NO: 686545 - DNA, 33 bp, Homo sapien
ctacgatttaagaaaaaggaagctgtcccatca

SEQ ID NO: 686546 - DNA, 33 bp, Homo sapien
ctacgatttaagaaaagggaagctgtcccatca

SEQ ID NO: 686547 - DNA, 33 bp, Homo sapien
agcagggagctttggaacaagataatcctcaat

SEQ ID NO: 686548 - DNA, 33 bp, Homo sapien
agcagggagctttggagcaagataatcctcaat

SEQ ID NO: 686549 - DNA, 33 bp, Homo sapien
tacctactaagggctccagctgttagctcatgt

SEQ ID NO: 686550 - DNA, 33 bp, Homo sapien
tacctactaagggctctagctgttagctcatgt

SEQ ID NO: 686551 - DNA, 33 bp, Homo sapien
tttgctaacaagaaacccagtctggaactagca

SEQ ID NO: 686552 - DNA, 33 bp, Homo sapien
tttgctaacaagaaactcagtctggaactagca

SEQ ID NO: 686553 - DNA, 33 bp, Homo sapien
atcagacattagaaagcccgttcacatttttag

SEQ ID NO: 686554 - DNA, 33 bp, Homo sapien
atcagacattagaaaggccgttcacatttttag

SEQ ID NO: 686555 - DNA, 33 bp, Homo sapien
aaccattgcccaggcagggaagatcccagcagc

SEQ ID NO: 686556 - DNA, 33 bp, Homo sapien
aaccattgcccaggcatggaagatcccagcagc

SEQ ID NO: 686557 - DNA, 33 bp, Homo sapien
ctgggagtgaaaaggccgcaggcagaggttcag

SEQ ID NO: 686558 - DNA, 33 bp, Homo sapien
ctgggagtgaaaaggctgcaggcagaggttcag

SEQ ID NO: 686559 - DNA, 33 bp, Homo sapien
tacacgttcatcatccactgaggaattagtctc

SEQ ID NO: 686560 - DNA, 33 bp, Homo sapien
tacacgttcatcatccgctgaggaattagtctc

SEQ ID NO: 686561 - DNA, 33 bp, Homo sapien
aatctttgttccctcaagagtatgagttagcct

SEQ ID NO: 686562 - DNA, 33 bp, Homo sapien
aatctttgttccctcacgagtatgagttagcct

SEQ ID NO: 686563 - DNA, 33 bp, Homo sapien
agatggttaatttgcaaccccagcaacagttct

SEQ ID NO: 686564 - DNA, 33 bp, Homo sapien
agatggttaatttgcacccccagcaacagttct

SEQ ID NO: 686565 - DNA, 33 bp, Homo sapien
tgcagagtaacttcagaaaagccctacatcctg

SEQ ID NO: 686566 - DNA, 33 bp, Homo sapien
tgcagagtaacttcaggaaagccctacatcctg

SEQ ID NO: 686567 - DNA, 33 bp, Homo sapien
gtcatatttcttgaagccaaagtagtctcctct

SEQ ID NO: 686568 - DNA, 33 bp, Homo sapien
gtcatatttcttgaaggcaaagtagtctcctct

SEQ ID NO: 686569 - DNA, 33 bp, Homo sapien
gagaatctttgtccagaaagaaattcacatggt

SEQ ID NO: 686570 - DNA, 33 bp, Homo sapien
gagaatctttgtccaggaagaaattcacatggt

SEQ ID NO: 686571 - DNA, 33 bp, Homo sapien
tggtaccctaagtcaaacattcagaagtgagct

SEQ ID NO: 686572 - DNA, 33 bp, Homo sapien
tggtaccctaagtcaagcattcagaagtgagct

SEQ ID NO: 686573 - DNA, 33 bp, Homo sapien
aaaccaccaagtatggaagagatcagttatgac

SEQ ID NO: 686574 - DNA, 33 bp, Homo sapien
aaaccaccaagtatgggagagatcagttatgac

SEQ ID NO: 686575 - DNA, 33 bp, Homo sapien
cccaggccataataggaaaaggatgtcccaaat

SEQ ID NO: 686576 - DNA, 33 bp, Homo sapien
cccaggccataataggtaaaggatgtcccaaat

SEQ ID NO: 686577 - DNA, 33 bp, Homo sapien
aatagtgccacagaaactaaccatacgttggaa

SEQ ID NO: 686578 - DNA, 33 bp, Homo sapien
aatagtgccacagaaagtaaccatacgttggaa

SEQ ID NO: 686579 - DNA, 33 bp, Homo sapien
ataaagatgagaacccaatttcgggaagtgcca

SEQ ID NO: 686580 - DNA, 33 bp, Homo sapien
ataaagatgagaacccgatttcgggaagtgcca

SEQ ID NO: 686581 - DNA, 33 bp, Homo sapien
gttctcatctttatcaaacttagtgacgctgat

SEQ ID NO: 686582 - DNA, 33 bp, Homo sapien
gttctcatctttatcagacttagtgacgctgat

SEQ ID NO: 686583 - DNA, 33 bp, Homo sapien
aaataaagaactggtaccataacctctccacac

SEQ ID NO: 686584 - DNA, 33 bp, Homo sapien
aaataaagaactggtatcataacctctccacac

SEQ ID NO: 686585 - DNA, 33 bp, Homo sapien
agacacagtggtatacagaaacgtgtgtttcag

SEQ ID NO: 686586 - DNA, 33 bp, Homo sapien
agacacagtggtatacggaaacgtgtgtttcag

SEQ ID NO: 686587 - DNA, 33 bp, Homo sapien
gttttctgctgggatacgcactgaactgacagc

SEQ ID NO: 686588 - DNA, 33 bp, Homo sapien
gttttctgctgggatatgcactgaactgacagc

SEQ ID NO: 686589 - DNA, 33 bp, Homo sapien
ctggcccttttgctacgcatttaccttagtgtc

SEQ ID NO: 686590 - DNA, 33 bp, Homo sapien
ctggcccttttgctactcatttaccttagtgtc

SEQ ID NO: 686591 - DNA, 33 bp, Homo sapien
aggttgtgagggaaataaacatagaactacatt

SEQ ID NO: 686592 - DNA, 33 bp, Homo sapien
aggttgtgagggaaatgaacatagaactacatt

SEQ ID NO: 686593 - DNA, 33 bp, Homo sapien
tgggcaatggttaaggacaagctagtggtcact

SEQ ID NO: 686594 - DNA, 33 bp, Homo sapien
tgggcaatggttaagggcaagctagtggtcact

SEQ ID NO: 686595 - DNA, 33 bp, Homo sapien
aatgtacaaggttaagccagtgagggaggggga

SEQ ID NO: 686596 - DNA, 33 bp, Homo sapien
aatgtacaaggttaagtcagtgagggaggggga

SEQ ID NO: 686597 - DNA, 33 bp, Homo sapien
tctcagcaatagatgaggacattttggactcag

SEQ ID NO: 686598 - DNA, 33 bp, Homo sapien
tctcagcaatagatgatgacattttggactcag

SEQ ID NO: 686599 - DNA, 33 bp, Homo sapien
tgaggaatgtttcccacatctaagggcagtcca

SEQ ID NO: 686600 - DNA, 33 bp, Homo sapien
tgaggaatgtttcccatatctaagggcagtcca

SEQ ID NO: 686601 - DNA, 33 bp, Homo sapien
ttgtgctttaggaccaaactaggatcattctga

SEQ ID NO: 686602 - DNA, 33 bp, Homo sapien
ttgtgctttaggaccatactaggatcattctga

SEQ ID NO: 686603 - DNA, 33 bp, Homo sapien
gtggcatgttcatgcgacaacaagtccagtggg

SEQ ID NO: 686604 - DNA, 33 bp, Homo sapien
gtggcatgttcatgcggcaacaagtccagtggg

SEQ ID NO: 686605 - DNA, 33 bp, Homo sapien
gtatgcatgttctctacagctacaatgacttac

SEQ ID NO: 686606 - DNA, 33 bp, Homo sapien
gtatgcatgttctctatagctacaatgacttac

SEQ ID NO: 686607 - DNA, 33 bp, Homo sapien
ccctcggagaagttccagaaagcattccattgc

SEQ ID NO: 686608 - DNA, 33 bp, Homo sapien
ccctcggagaagttccggaaagcattccattgc

SEQ ID NO: 686609 - DNA, 33 bp, Homo sapien
tcaagcaacattgataccatccacatttccaca

SEQ ID NO: 686610 - DNA, 33 bp, Homo sapien
tcaagcaacattgatagcatccacatttccaca

SEQ ID NO: 686611 - DNA, 33 bp, Homo sapien
aacagtcatctagaggccccacaagaacaggaa

SEQ ID NO: 686612 - DNA, 33 bp, Homo sapien
aacagtcatctagaggtcccacaagaacaggaa

SEQ ID NO: 686613 - DNA, 33 bp, Homo sapien
catattgtcaagcctagatcatacatacttttg

SEQ ID NO: 686614 - DNA, 33 bp, Homo sapien
catattgtcaagcctatatcatacatacttttg

SEQ ID NO: 686615 - DNA, 33 bp, Homo sapien
gaagctagtggtactgaaggtgaggaatgtgtt

SEQ ID NO: 686616 - DNA, 33 bp, Homo sapien
gaagctagtggtactgtaggtgaggaatgtgtt

SEQ ID NO: 686617 - DNA, 33 bp, Homo sapien
ctgacgatacaaaggacgaaagcattaagttct

SEQ ID NO: 686618 - DNA, 33 bp, Homo sapien
ctgacgatacaaaggatgaaagcattaagttct

SEQ ID NO: 686619 - DNA, 33 bp, Homo sapien
cagaagctcccatatcacacttctactcagtga

SEQ ID NO: 686620 - DNA, 33 bp, Homo sapien
cagaagctcccatatcgcacttctactcagtga

SEQ ID NO: 686621 - DNA, 33 bp, Homo sapien
ccttgaccgtgaaggaagtaaatgtcacaaaat

SEQ ID NO: 686622 - DNA, 33 bp, Homo sapien
ccttgaccgtgaaggaggtaaatgtcacaaaat

SEQ ID NO: 686623 - DNA, 33 bp, Homo sapien
ttgtgcagaatccagacgtttttcttacggcat

SEQ ID NO: 686624 - DNA, 33 bp, Homo sapien
ttgtgcagaatccagatgtttttcttacggcat

SEQ ID NO: 686625 - DNA, 33 bp, Homo sapien
tgaggaggactccaagaaaatgagggctccaca

SEQ ID NO: 686626 - DNA, 33 bp, Homo sapien
tgaggaggactccaagcaaatgagggctccaca

SEQ ID NO: 686627 - DNA, 33 bp, Homo sapien
attctcccataatttcaaagttggaagtaacgt

SEQ ID NO: 686628 - DNA, 33 bp, Homo sapien
attctcccataatttcgaagttggaagtaacgt

SEQ ID NO: 686629 - DNA, 33 bp, Homo sapien
ttggtgaataactaccccttctggcatttagtg

SEQ ID NO: 686630 - DNA, 33 bp, Homo sapien
ttggtgaataactacctcttctggcatttagtg

SEQ ID NO: 686631 - DNA, 33 bp, Homo sapien
aggcagcatgttcttaacaacagtccttgccct

SEQ ID NO: 686632 - DNA, 33 bp, Homo sapien
aggcagcatgttcttagcaacagtccttgccct

SEQ ID NO: 686633 - DNA, 33 bp, Homo sapien
gaaaccagtggtaacacacgtcagcatctcatt

SEQ ID NO: 686634 - DNA, 33 bp, Homo sapien
gaaaccagtggtaacatacgtcagcatctcatt

SEQ ID NO: 686635 - DNA, 33 bp, Homo sapien
atacgtagcaatgaaacacaggaggacacactt

SEQ ID NO: 686636 - DNA, 33 bp, Homo sapien
atacgtagcaatgaaagacaggaggacacactt

SEQ ID NO: 686637 - DNA, 33 bp, Homo sapien
tggcatgaaaatgaacacaatagggacacaaac

SEQ ID NO: 686638 - DNA, 33 bp, Homo sapien
tggcatgaaaatgaactcaatagggacacaaac

SEQ ID NO: 686639 - DNA, 33 bp, Homo sapien
gtttatatagcaatgacgaaatgtaactgggta

SEQ ID NO: 686640 - DNA, 33 bp, Homo sapien
gtttatatagcaatgaggaaatgtaactgggta

SEQ ID NO: 686641 - DNA, 33 bp, Homo sapien
tgcatgactgtagccaagtgaaagagcacacag

SEQ ID NO: 686642 - DNA, 33 bp, Homo sapien
tgcatgactgtagccaggtgaaagagcacacag

SEQ ID NO: 686643 - DNA, 33 bp, Homo sapien
tccatagatgagacatgagggggcatctgatct

SEQ ID NO: 686644 - DNA, 33 bp, Homo sapien
tccatagatgagacattagggggcatctgatct

SEQ ID NO: 686645 - DNA, 33 bp, Homo sapien
gaattggtttctgatacacaatggaggagttca

SEQ ID NO: 686646 - DNA, 33 bp, Homo sapien
gaattggtttctgatagacaatggaggagttca

SEQ ID NO: 686647 - DNA, 33 bp, Homo sapien
agtactcatggactaacggataagcacagactg

SEQ ID NO: 686648 - DNA, 33 bp, Homo sapien
agtactcatggactaatggataagcacagactg

SEQ ID NO: 686649 - DNA, 33 bp, Homo sapien
tttgctgtgtggaagccctttagtttagatccc

SEQ ID NO: 686650 - DNA, 33 bp, Homo sapien
tttgctgtgtggaagctctttagtttagatccc

SEQ ID NO: 686651 - DNA, 33 bp, Homo sapien
ctatgacaggcaatgggatcatcatcctgcaca

SEQ ID NO: 686652 - DNA, 33 bp, Homo sapien
ctatgacaggcaatggtatcatcatcctgcaca

SEQ ID NO: 686653 - DNA, 33 bp, Homo sapien
ccttgggccattcagaccgtcgagtctcctaaa

SEQ ID NO: 686654 - DNA, 33 bp, Homo sapien
ccttgggccattcagagcgtcgagtctcctaaa

SEQ ID NO: 686655 - DNA, 33 bp, Homo sapien
attcaccctgaggaagaaaatgatagtatgaat

SEQ ID NO: 686656 - DNA, 33 bp, Homo sapien
attcaccctgaggaaggaaatgatagtatgaat

SEQ ID NO: 686657 - DNA, 33 bp, Homo sapien
gctggtcttgggcttcaaggtttagttcctttc

SEQ ID NO: 686658 - DNA, 33 bp, Homo sapien
gctggtcttgggcttcgaggtttagttcctttc

SEQ ID NO: 686659 - DNA, 33 bp, Homo sapien
tacacaagaactgcccaaaagcaatgaagaggc

SEQ ID NO: 686660 - DNA, 33 bp, Homo sapien
tacacaagaactgcccgaaagcaatgaagaggc

SEQ ID NO: 686661 - DNA, 33 bp, Homo sapien
ctgtcctctgggcttgaaaccaaatctaactgc

SEQ ID NO: 686662 - DNA, 33 bp, Homo sapien
ctgtcctctgggcttggaaccaaatctaactgc

SEQ ID NO: 686663 - DNA, 33 bp, Homo sapien
aggcataaaaatgtgaacttccccactttcacc

SEQ ID NO: 686664 - DNA, 33 bp, Homo sapien
aggcataaaaatgtgaccttccccactttcacc

SEQ ID NO: 686665 - DNA, 33 bp, Homo sapien
cgaagcacttcagtaacagcaagtggtggaaaa

SEQ ID NO: 686666 - DNA, 33 bp, Homo sapien
cgaagcacttcagtaagagcaagtggtggaaaa

SEQ ID NO: 686667 - DNA, 33 bp, Homo sapien
cttcatgattcaacctaaaagctgattgccttg

SEQ ID NO: 686668 - DNA, 33 bp, Homo sapien
cttcatgattcaacctgaaagctgattgccttg

SEQ ID NO: 686669 - DNA, 33 bp, Homo sapien
cttatgagaatcccccactaactatgacatgga

SEQ ID NO: 686670 - DNA, 33 bp, Homo sapien
cttatgagaatccccccctaactatgacatgga

SEQ ID NO: 686671 - DNA, 33 bp, Homo sapien
actcacaagcaacaaacacactgggcaagcaag

SEQ ID NO: 686672 - DNA, 33 bp, Homo sapien
actcacaagcaacaaatacactgggcaagcaag

SEQ ID NO: 686673 - DNA, 33 bp, Homo sapien
tgggaaggaatctcccaatatgttcaaatggga

SEQ ID NO: 686674 - DNA, 33 bp, Homo sapien
tgggaaggaatctcccgatatgttcaaatggga

SEQ ID NO: 686675 - DNA, 33 bp, Homo sapien
ctgaacgctccccgcagtatggcattgggactg

SEQ ID NO: 686676 - DNA, 33 bp, Homo sapien
ctgaacgctccccgcattatggcattgggactg

SEQ ID NO: 686677 - DNA, 33 bp, Homo sapien
tctcaggggttacttacgagtactgtggttaat

SEQ ID NO: 686678 - DNA, 33 bp, Homo sapien
tctcaggggttacttatgagtactgtggttaat

SEQ ID NO: 686679 - DNA, 33 bp, Homo sapien
acagtcaagtttctaacagtgtgaggtgcagag

SEQ ID NO: 686680 - DNA, 33 bp, Homo sapien
acagtcaagtttctaagagtgtgaggtgcagag

SEQ ID NO: 686681 - DNA, 33 bp, Homo sapien
ttctagagctcttcctcacagacagcttatgat

SEQ ID NO: 686682 - DNA, 33 bp, Homo sapien
ttctagagctcttccttacagacagcttatgat

SEQ ID NO: 686683 - DNA, 33 bp, Homo sapien
aataaagaattgatacccatcatcaggcacctg

SEQ ID NO: 686684 - DNA, 33 bp, Homo sapien
aataaagaattgatactcatcatcaggcacctg

SEQ ID NO: 686685 - DNA, 33 bp, Homo sapien
actagaaagcatttgagatcatccgtcttccac

SEQ ID NO: 686686 - DNA, 33 bp, Homo sapien
actagaaagcatttgatatcatccgtcttccac

SEQ ID NO: 686687 - DNA, 33 bp, Homo sapien
ttcacaggtgagtagacgcacacaactaaatcg

SEQ ID NO: 686688 - DNA, 33 bp, Homo sapien
ttcacaggtgagtagatgcacacaactaaatcg

SEQ ID NO: 686689 - DNA, 33 bp, Homo sapien
atatcacatttgtggaaaagtttccatagcaaa

SEQ ID NO: 686690 - DNA, 33 bp, Homo sapien
atatcacatttgtggataagtttccatagcaaa

SEQ ID NO: 686691 - DNA, 33 bp, Homo sapien
aatgtcttcacgtttggacttgatggttctgtg

SEQ ID NO: 686692 - DNA, 33 bp, Homo sapien
aatgtcttcacgtttgtacttgatggttctgtg

SEQ ID NO: 686693 - DNA, 33 bp, Homo sapien
ttcacgtatttagtcacaacatcattgctttga

SEQ ID NO: 686694 - DNA, 33 bp, Homo sapien
ttcacgtatttagtcagaacatcattgctttga

SEQ ID NO: 686695 - DNA, 33 bp, Homo sapien
atagacagtccagatcaccctaatcggtggggt

SEQ ID NO: 686696 - DNA, 33 bp, Homo sapien
atagacagtccagatcgccctaatcggtggggt

SEQ ID NO: 686697 - DNA, 33 bp, Homo sapien
cttctgtagtttgctcacaggtaacatcttgag

SEQ ID NO: 686698 - DNA, 33 bp, Homo sapien
cttctgtagtttgctcgcaggtaacatcttgag

SEQ ID NO: 686699 - DNA, 33 bp, Homo sapien
ggcccattgttggaaaacttgcaactataccca

SEQ ID NO: 686700 - DNA, 33 bp, Homo sapien
ggcccattgttggaaagcttgcaactataccca

SEQ ID NO: 686701 - DNA, 33 bp, Homo sapien
aagcagggacaggagtaaagttcagcatctact

SEQ ID NO: 686702 - DNA, 33 bp, Homo sapien
aagcagggacaggagtcaagttcagcatctact

SEQ ID NO: 686703 - DNA, 33 bp, Homo sapien
tgagtgatgacctcaacagtgacttcagtcagc

SEQ ID NO: 686704 - DNA, 33 bp, Homo sapien
tgagtgatgacctcaatagtgacttcagtcagc

SEQ ID NO: 686705 - DNA, 33 bp, Homo sapien
gagatctgttccctctcacacaatcctttactg

SEQ ID NO: 686706 - DNA, 33 bp, Homo sapien
gagatctgttccctctgacacaatcctttactg

SEQ ID NO: 686707 - DNA, 33 bp, Homo sapien
catcacaccctgatgacgctctatgctggatca

SEQ ID NO: 686708 - DNA, 33 bp, Homo sapien
catcacaccctgatgatgctctatgctggatca

SEQ ID NO: 686709 - DNA, 33 bp, Homo sapien
cgcattcactgacattaaaataaccacatgaac

SEQ ID NO: 686710 - DNA, 33 bp, Homo sapien
cgcattcactgacatttaaataaccacatgaac

SEQ ID NO: 686711 - DNA, 33 bp, Homo sapien
ttatgaccatgaaggcactaaattcactactaa

SEQ ID NO: 686712 - DNA, 33 bp, Homo sapien
ttatgaccatgaaggcgctaaattcactactaa

SEQ ID NO: 686713 - DNA, 33 bp, Homo sapien
acaagaaaagcaatgcaagggaccctgaaaggt

SEQ ID NO: 686714 - DNA, 33 bp, Homo sapien
acaagaaaagcaatgccagggaccctgaaaggt

SEQ ID NO: 686715 - DNA, 33 bp, Homo sapien
cattattccctatgcccccaacaggcactgagc

SEQ ID NO: 686716 - DNA, 33 bp, Homo sapien
cattattccctatgccgccaacaggcactgagc

SEQ ID NO: 686717 - DNA, 33 bp, Homo sapien
gacccaggcccagtcaatcaatattacctatgt

SEQ ID NO: 686718 - DNA, 33 bp, Homo sapien
gacccaggcccagtcagtcaatattacctatgt

SEQ ID NO: 686719 - DNA, 33 bp, Homo sapien
gagaactctttggaagcctagaaccgaaaataa

SEQ ID NO: 686720 - DNA, 33 bp, Homo sapien
gagaactctttggaagtctagaaccgaaaataa

SEQ ID NO: 686721 - DNA, 33 bp, Homo sapien
atcaacataaggaataacgtctcatgatgcaaa

SEQ ID NO: 686722 - DNA, 33 bp, Homo sapien
atcaacataaggaatagcgtctcatgatgcaaa

SEQ ID NO: 686723 - DNA, 33 bp, Homo sapien
ctatacctctgacagacgaaccatcccaaaaga

SEQ ID NO: 686724 - DNA, 33 bp, Homo sapien
ctatacctctgacagatgaaccatcccaaaaga

SEQ ID NO: 686725 - DNA, 33 bp, Homo sapien
gtaattatcaggacacacagatagagacgtttt

SEQ ID NO: 686726 - DNA, 33 bp, Homo sapien
gtaattatcaggacacccagatagagacgtttt

SEQ ID NO: 686727 - DNA, 33 bp, Homo sapien
atcctgatttgtctccaccatatcaccatctcc

SEQ ID NO: 686728 - DNA, 33 bp, Homo sapien
atcctgatttgtctccgccatatcaccatctcc

SEQ ID NO: 686729 - DNA, 33 bp, Homo sapien
aacctcaaatactatacggagatggtgatatgg

SEQ ID NO: 686730 - DNA, 33 bp, Homo sapien
aacctcaaatactatatggagatggtgatatgg

SEQ ID NO: 686731 - DNA, 33 bp, Homo sapien
ttctacgaaaggcggcaaaatttggaaagtaca

SEQ ID NO: 686732 - DNA, 33 bp, Homo sapien
ttctacgaaaggcggccaaatttggaaagtaca

SEQ ID NO: 686733 - DNA, 33 bp, Homo sapien
ttcaaggagtttggtcacttttcacaaatgcct

SEQ ID NO: 686734 - DNA, 33 bp, Homo sapien
ttcaaggagtttggtcgcttttcacaaatgcct

SEQ ID NO: 686735 - DNA, 33 bp, Homo sapien
ctctctgacagattaaaagtaaaagcgctattt

SEQ ID NO: 686736 - DNA, 33 bp, Homo sapien
ctctctgacagattaatagtaaaagcgctattt

SEQ ID NO: 686737 - DNA, 33 bp, Homo sapien
ctcagtgctcagactaaggcttcttaaatgaac

SEQ ID NO: 686738 - DNA, 33 bp, Homo sapien
ctcagtgctcagactagggcttcttaaatgaac

SEQ ID NO: 686739 - DNA, 33 bp, Homo sapien
tagatacttcacaaaaaaattgattttaactgt

SEQ ID NO: 686740 - DNA, 33 bp, Homo sapien
tagatacttcacaaaagaattgattttaactgt

SEQ ID NO: 686741 - DNA, 33 bp, Homo sapien
agatgtcaatttcaagaagactgttcaaccagc

SEQ ID NO: 686742 - DNA, 33 bp, Homo sapien
agatgtcaatttcaaggagactgttcaaccagc

SEQ ID NO: 686743 - DNA, 33 bp, Homo sapien
tctggaatgtttgtgaaggtgagttagaccccc

SEQ ID NO: 686744 - DNA, 33 bp, Homo sapien
tctggaatgtttgtgacggtgagttagaccccc

SEQ ID NO: 686745 - DNA, 33 bp, Homo sapien
acagtgtggcagaaacaaacctgttatcccaca

SEQ ID NO: 686746 - DNA, 33 bp, Homo sapien
acagtgtggcagaaacgaacctgttatcccaca

SEQ ID NO: 686747 - DNA, 33 bp, Homo sapien
ttcctccagttccatgaattgtaactaccaaga

SEQ ID NO: 686748 - DNA, 33 bp, Homo sapien
ttcctccagttccatggattgtaactaccaaga

SEQ ID NO: 686749 - DNA, 33 bp, Homo sapien
catctgcagactacacaaagacgacatagatta

SEQ ID NO: 686750 - DNA, 33 bp, Homo sapien
catctgcagactacactaagacgacatagatta

SEQ ID NO: 686751 - DNA, 33 bp, Homo sapien
ttctgatgccctggaacaaactttatcagttta

SEQ ID NO: 686752 - DNA, 33 bp, Homo sapien
ttctgatgccctggaagaaactttatcagttta

SEQ ID NO: 686753 - DNA, 33 bp, Homo sapien
gttctttgtgggggggaaaaagctctagaatta

SEQ ID NO: 686754 - DNA, 33 bp, Homo sapien
gttctttgtggggggggaaaagctctagaatta

SEQ ID NO: 686755 - DNA, 33 bp, Homo sapien
aaatacgttgtgactacggcatttgagaaatgt

SEQ ID NO: 686756 - DNA, 33 bp, Homo sapien
aaatacgttgtgactatggcatttgagaaatgt

SEQ ID NO: 686757 - DNA, 33 bp, Homo sapien
cacctacctttgtgtaaggagaagatagtcctg

SEQ ID NO: 686758 - DNA, 33 bp, Homo sapien
cacctacctttgtgtagggagaagatagtcctg

SEQ ID NO: 686759 - DNA, 33 bp, Homo sapien
catactgggcacgtgacaattggtgctctagag

SEQ ID NO: 686760 - DNA, 33 bp, Homo sapien
catactgggcacgtgagaattggtgctctagag

SEQ ID NO: 686761 - DNA, 33 bp, Homo sapien
gactgtaatggagatccaaagaaaggaaggaag

SEQ ID NO: 686762 - DNA, 33 bp, Homo sapien
gactgtaatggagatctaaagaaaggaaggaag

SEQ ID NO: 686763 - DNA, 33 bp, Homo sapien
taagccctagacaatacaatctgaacacactag

SEQ ID NO: 686764 - DNA, 33 bp, Homo sapien
taagccctagacaatagaatctgaacacactag

SEQ ID NO: 686765 - DNA, 33 bp, Homo sapien
tgcttcccgacgacaacttcgtaacattcttgg

SEQ ID NO: 686766 - DNA, 33 bp, Homo sapien
tgcttcccgacgacaatttcgtaacattcttgg

SEQ ID NO: 686767 - DNA, 33 bp, Homo sapien
ttgagtcaggtgttgaccactttaaatctcagg

SEQ ID NO: 686768 - DNA, 33 bp, Homo sapien
ttgagtcaggtgttgatcactttaaatctcagg

SEQ ID NO: 686769 - DNA, 33 bp, Homo sapien
ccagtggtgtggaaaagtggtcaatgttagcct

SEQ ID NO: 686770 - DNA, 33 bp, Homo sapien
ccagtggtgtggaaaattggtcaatgttagcct

SEQ ID NO: 686771 - DNA, 33 bp, Homo sapien
attccccaagatagtcccaatgcctccttttaa

SEQ ID NO: 686772 - DNA, 33 bp, Homo sapien
attccccaagatagtctcaatgcctccttttaa

SEQ ID NO: 686773 - DNA, 33 bp, Homo sapien
atagtgaatttttgtcccagaatatcattttag

SEQ ID NO: 686774 - DNA, 33 bp, Homo sapien
atagtgaatttttgtctcagaatatcattttag

SEQ ID NO: 686775 - DNA, 33 bp, Homo sapien
cacatgaggagtgttacaaaagttatagctctt

SEQ ID NO: 686776 - DNA, 33 bp, Homo sapien
cacatgaggagtgttataaaagttatagctctt

SEQ ID NO: 686777 - DNA, 33 bp, Homo sapien
tgttcagatggcttgacgaaaatttcaggagca

SEQ ID NO: 686778 - DNA, 33 bp, Homo sapien
tgttcagatggcttgatgaaaatttcaggagca

SEQ ID NO: 686779 - DNA, 33 bp, Homo sapien
tctgggcacccaggacgactctggtggaaaggc

SEQ ID NO: 686780 - DNA, 33 bp, Homo sapien
tctgggcacccaggactactctggtggaaaggc

SEQ ID NO: 686781 - DNA, 33 bp, Homo sapien
caccacagcagtgcaagcatgtgggactgtaaa

SEQ ID NO: 686782 - DNA, 33 bp, Homo sapien
caccacagcagtgcaatcatgtgggactgtaaa

SEQ ID NO: 686783 - DNA, 33 bp, Homo sapien
ttccacatgtatcttacggtgatctttaccttc

SEQ ID NO: 686784 - DNA, 33 bp, Homo sapien
ttccacatgtatcttatggtgatctttaccttc

SEQ ID NO: 686785 - DNA, 33 bp, Homo sapien
taagctgcagaagtgaagaggtaaaccaaaggg

SEQ ID NO: 686786 - DNA, 33 bp, Homo sapien
taagctgcagaagtgaggaggtaaaccaaaggg

SEQ ID NO: 686787 - DNA, 33 bp, Homo sapien
acgggtcctgatagaactgccaggcatccaatg

SEQ ID NO: 686788 - DNA, 33 bp, Homo sapien
acgggtcctgatagaattgccaggcatccaatg

SEQ ID NO: 686789 - DNA, 33 bp, Homo sapien
gtttaatacccaagaccgaggtctcaagatgca

SEQ ID NO: 686790 - DNA, 33 bp, Homo sapien
gtttaatacccaagactgaggtctcaagatgca

SEQ ID NO: 686791 - DNA, 33 bp, Homo sapien
atagaaatatacaggcaaaagatagtacttgat

SEQ ID NO: 686792 - DNA, 33 bp, Homo sapien
atagaaatatacaggcgaaagatagtacttgat

SEQ ID NO: 686793 - DNA, 33 bp, Homo sapien
actcaggcagttcacaacttgaattctcactag

SEQ ID NO: 686794 - DNA, 33 bp, Homo sapien
actcaggcagttcacaccttgaattctcactag

SEQ ID NO: 686795 - DNA, 33 bp, Homo sapien
caccctattttctctacgaaatcattcagtaca

SEQ ID NO: 686796 - DNA, 33 bp, Homo sapien
caccctattttctctatgaaatcattcagtaca

SEQ ID NO: 686797 - DNA, 33 bp, Homo sapien
acaagcagactactaacctggaaattaaagcag

SEQ ID NO: 686798 - DNA, 33 bp, Homo sapien
acaagcagactactaagctggaaattaaagcag

SEQ ID NO: 686799 - DNA, 33 bp, Homo sapien
ccagataagtctgtacacaccccattccttcat

SEQ ID NO: 686800 - DNA, 33 bp, Homo sapien
ccagataagtctgtacgcaccccattccttcat

SEQ ID NO: 686801 - DNA, 33 bp, Homo sapien
ccagtaacaccgggtaaccataagcagagagct

SEQ ID NO: 686802 - DNA, 33 bp, Homo sapien
ccagtaacaccgggtagccataagcagagagct

SEQ ID NO: 686803 - DNA, 33 bp, Homo sapien
gtctctcaccatttcacgctctgggtttctggg

SEQ ID NO: 686804 - DNA, 33 bp, Homo sapien
gtctctcaccatttcatgctctgggtttctggg

SEQ ID NO: 686805 - DNA, 33 bp, Homo sapien
ccctgggtatctgacacggtccaagtgaggttc

SEQ ID NO: 686806 - DNA, 33 bp, Homo sapien
ccctgggtatctgacatggtccaagtgaggttc

SEQ ID NO: 686807 - DNA, 33 bp, Homo sapien
gtgcatcaaacacgcgccctcattctcaaacaa

SEQ ID NO: 686808 - DNA, 33 bp, Homo sapien
gtgcatcaaacacgcgtcctcattctcaaacaa

SEQ ID NO: 686809 - DNA, 33 bp, Homo sapien
attagacactacaggaaagcaattgcctggttg

SEQ ID NO: 686810 - DNA, 33 bp, Homo sapien
attagacactacaggacagcaattgcctggttg

SEQ ID NO: 686811 - DNA, 33 bp, Homo sapien
ccttgcaccagttgtgaaattaacctgcttgga

SEQ ID NO: 686812 - DNA, 33 bp, Homo sapien
ccttgcaccagttgtggaattaacctgcttgga

SEQ ID NO: 686813 - DNA, 33 bp, Homo sapien
tactgggatgctaggaaaatgacactaatttta

SEQ ID NO: 686814 - DNA, 33 bp, Homo sapien
tactgggatgctaggagaatgacactaatttta

SEQ ID NO: 686815 - DNA, 33 bp, Homo sapien
aaggccagataagatccaactatgactacacct

SEQ ID NO: 686816 - DNA, 33 bp, Homo sapien
aaggccagataagatctaactatgactacacct

SEQ ID NO: 686817 - DNA, 33 bp, Homo sapien
aagaatatgaaatcaaaacaggtaaatattctg

SEQ ID NO: 686818 - DNA, 33 bp, Homo sapien
aagaatatgaaatcaagacaggtaaatattctg

SEQ ID NO: 686819 - DNA, 33 bp, Homo sapien
ttgtctttgtggaatcacactgattttcattgt

SEQ ID NO: 686820 - DNA, 33 bp, Homo sapien
ttgtctttgtggaatcgcactgattttcattgt

SEQ ID NO: 686821 - DNA, 33 bp, Homo sapien
tctagggatggagaaacgtaaggccattgaaat

SEQ ID NO: 686822 - DNA, 33 bp, Homo sapien
tctagggatggagaaatgtaaggccattgaaat

SEQ ID NO: 686823 - DNA, 33 bp, Homo sapien
atgcaaacattctgtcccttttacttgatcttt

SEQ ID NO: 686824 - DNA, 33 bp, Homo sapien
atgcaaacattctgtctcttttacttgatcttt

SEQ ID NO: 686825 - DNA, 33 bp, Homo sapien
tattagtccccaactacatacatctcttaagtt

SEQ ID NO: 686826 - DNA, 33 bp, Homo sapien
tattagtccccaactagatacatctcttaagtt

SEQ ID NO: 686827 - DNA, 33 bp, Homo sapien
aggaccatgtcaaacacatttctcttccatttc

SEQ ID NO: 686828 - DNA, 33 bp, Homo sapien
aggaccatgtcaaacatatttctcttccatttc

SEQ ID NO: 686829 - DNA, 33 bp, Homo sapien
aaatcttccaagcacaagtctcagattatgagt

SEQ ID NO: 686830 - DNA, 33 bp, Homo sapien
aaatcttccaagcacaggtctcagattatgagt

SEQ ID NO: 686831 - DNA, 33 bp, Homo sapien
tagccttcctgcagtacgtccaatttgtttctt

SEQ ID NO: 686832 - DNA, 33 bp, Homo sapien
tagccttcctgcagtatgtccaatttgtttctt

SEQ ID NO: 686833 - DNA, 33 bp, Homo sapien
ttgggttttctacgaacgaaactgataaaaatc

SEQ ID NO: 686834 - DNA, 33 bp, Homo sapien
ttgggttttctacgaatgaaactgataaaaatc

SEQ ID NO: 686835 - DNA, 33 bp, Homo sapien
ccaaactgataagcaacgtaggattgaaaaatt

SEQ ID NO: 686836 - DNA, 33 bp, Homo sapien
ccaaactgataagcaatgtaggattgaaaaatt

SEQ ID NO: 686837 - DNA, 33 bp, Homo sapien
ggagctattccagaagaaaacattgttacagga

SEQ ID NO: 686838 - DNA, 33 bp, Homo sapien
ggagctattccagaaggaaacattgttacagga

SEQ ID NO: 686839 - DNA, 33 bp, Homo sapien
ggtatacagcttaacaagcaaagaactgtaata

SEQ ID NO: 686840 - DNA, 33 bp, Homo sapien
ggtatacagcttaacatgcaaagaactgtaata

SEQ ID NO: 686841 - DNA, 33 bp, Homo sapien
cagttttgaggcaacactgaagcaaacaaataa

SEQ ID NO: 686842 - DNA, 33 bp, Homo sapien
cagttttgaggcaacattgaagcaaacaaataa

SEQ ID NO: 686843 - DNA, 33 bp, Homo sapien
tgaagtgctcaaagaacgacagggatatatcaa

SEQ ID NO: 686844 - DNA, 33 bp, Homo sapien
tgaagtgctcaaagaatgacagggatatatcaa

SEQ ID NO: 686845 - DNA, 33 bp, Homo sapien
cctctactcctcaccacgtccaggaggaggaga

SEQ ID NO: 686846 - DNA, 33 bp, Homo sapien
cctctactcctcaccatgtccaggaggaggaga

SEQ ID NO: 686847 - DNA, 33 bp, Homo sapien
ctccaatgtcatcttccaggatttgggccctta

SEQ ID NO: 686848 - DNA, 33 bp, Homo sapien
ctccaatgtcatcttcgaggatttgggccctta

SEQ ID NO: 686849 - DNA, 33 bp, Homo sapien
taaaagagaacttgaggattttcaagtgtggtc

SEQ ID NO: 686850 - DNA, 33 bp, Homo sapien
taaaagagaacttgagtattttcaagtgtggtc

SEQ ID NO: 686851 - DNA, 33 bp, Homo sapien
gctatcttggaagaaccatagaatttctggccc

SEQ ID NO: 686852 - DNA, 33 bp, Homo sapien
gctatcttggaagaactatagaatttctggccc

SEQ ID NO: 686853 - DNA, 33 bp, Homo sapien
ccaagattcagtagaaaaaatacagactgtaga

SEQ ID NO: 686854 - DNA, 33 bp, Homo sapien
ccaagattcagtagaagaaatacagactgtaga

SEQ ID NO: 686855 - DNA, 33 bp, Homo sapien
tgagttcattagtcggaaggaagtgagggtctt

SEQ ID NO: 686856 - DNA, 33 bp, Homo sapien
tgagttcattagtcggcaggaagtgagggtctt

SEQ ID NO: 686857 - DNA, 33 bp, Homo sapien
tggctttccaataagaagacttaactgaagaca

SEQ ID NO: 686858 - DNA, 33 bp, Homo sapien
tggctttccaataagacgacttaactgaagaca

SEQ ID NO: 686859 - DNA, 33 bp, Homo sapien
ggaatgtcttaacttacgcactcctgtaagtta

SEQ ID NO: 686860 - DNA, 33 bp, Homo sapien
ggaatgtcttaacttatgcactcctgtaagtta

SEQ ID NO: 686861 - DNA, 33 bp, Homo sapien
ctttggagataaagacaaaaaagacacaatccc

SEQ ID NO: 686862 - DNA, 33 bp, Homo sapien
ctttggagataaagacgaaaaagacacaatccc

SEQ ID NO: 686863 - DNA, 33 bp, Homo sapien
aggtgctaacacaatacatgactaatgatgagg

SEQ ID NO: 686864 - DNA, 33 bp, Homo sapien
aggtgctaacacaatatatgactaatgatgagg

SEQ ID NO: 686865 - DNA, 33 bp, Homo sapien
ccatctgagtccttagcatagaaaggttgtgat

SEQ ID NO: 686866 - DNA, 33 bp, Homo sapien
ccatctgagtccttaggatagaaaggttgtgat

SEQ ID NO: 686867 - DNA, 33 bp, Homo sapien
ggaacttatccaaactaacctgatcagaattac

SEQ ID NO: 686868 - DNA, 33 bp, Homo sapien
ggaacttatccaaactcacctgatcagaattac

SEQ ID NO: 686869 - DNA, 33 bp, Homo sapien
cagaggttggctatgaagattcaatagatcaaa

SEQ ID NO: 686870 - DNA, 33 bp, Homo sapien
cagaggttggctatgaggattcaatagatcaaa

SEQ ID NO: 686871 - DNA, 33 bp, Homo sapien
tttcactgactatgtacatgccaggcctagtct

SEQ ID NO: 686872 - DNA, 33 bp, Homo sapien
tttcactgactatgtatatgccaggcctagtct

SEQ ID NO: 686873 - DNA, 33 bp, Homo sapien
gcgttgcctgttaaagaaaactcattctacaag

SEQ ID NO: 686874 - DNA, 33 bp, Homo sapien
gcgttgcctgttaaaggaaactcattctacaag

SEQ ID NO: 686875 - DNA, 33 bp, Homo sapien
catcttttcagacacgccagcattctgcccttg

SEQ ID NO: 686876 - DNA, 33 bp, Homo sapien
catcttttcagacacgtcagcattctgcccttg

SEQ ID NO: 686877 - DNA, 33 bp, Homo sapien
agttgaacagtccagcaaccattagttgagcag

SEQ ID NO: 686878 - DNA, 33 bp, Homo sapien
agttgaacagtccagcgaccattagttgagcag

SEQ ID NO: 686879 - DNA, 33 bp, Homo sapien
aatattttgatacaaacaagccctcacaacaaa

SEQ ID NO: 686880 - DNA, 33 bp, Homo sapien
aatattttgatacaaataagccctcacaacaaa

SEQ ID NO: 686881 - DNA, 33 bp, Homo sapien
tacctggactattgcactagccttctaataata

SEQ ID NO: 686882 - DNA, 33 bp, Homo sapien
tacctggactattgcattagccttctaataata

SEQ ID NO: 686883 - DNA, 33 bp, Homo sapien
aatacaagcgccatgacgagctgtgcaccccaa

SEQ ID NO: 686884 - DNA, 33 bp, Homo sapien
aatacaagcgccatgatgagctgtgcaccccaa

SEQ ID NO: 686885 - DNA, 33 bp, Homo sapien
gatagcattagacacaggaaaggtgaatttgat

SEQ ID NO: 686886 - DNA, 33 bp, Homo sapien
gatagcattagacacatgaaaggtgaatttgat

SEQ ID NO: 686887 - DNA, 33 bp, Homo sapien
atgaagaaattgattgcaaaaattcgtattctt

SEQ ID NO: 686888 - DNA, 33 bp, Homo sapien
atgaagaaattgattgtaaaaattcgtattctt

SEQ ID NO: 686889 - DNA, 33 bp, Homo sapien
attctatgaaacaacccgaaagaatctggaagc

SEQ ID NO: 686890 - DNA, 33 bp, Homo sapien
attctatgaaacaacctgaaagaatctggaagc

SEQ ID NO: 686891 - DNA, 33 bp, Homo sapien
ctcctgaatagactataagtattttgaggacag

SEQ ID NO: 686892 - DNA, 33 bp, Homo sapien
ctcctgaatagactatgagtattttgaggacag

SEQ ID NO: 686893 - DNA, 33 bp, Homo sapien
aattttaaacatagaacactgagtgggctcaat

SEQ ID NO: 686894 - DNA, 33 bp, Homo sapien
aattttaaacatagaatactgagtgggctcaat

SEQ ID NO: 686895 - DNA, 33 bp, Homo sapien
tttcttggcagccaaaagaagaagggaaatatc

SEQ ID NO: 686896 - DNA, 33 bp, Homo sapien
tttcttggcagccaaaggaagaagggaaatatc

SEQ ID NO: 686897 - DNA, 33 bp, Homo sapien
tcagggaggactaccacctataatgaataaact

SEQ ID NO: 686898 - DNA, 33 bp, Homo sapien
tcagggaggactaccatctataatgaataaact

SEQ ID NO: 686899 - DNA, 33 bp, Homo sapien
tgcagatttggagccaaccctgatctttgccac

SEQ ID NO: 686900 - DNA, 33 bp, Homo sapien
tgcagatttggagccagccctgatctttgccac

SEQ ID NO: 686901 - DNA, 33 bp, Homo sapien
gcgtaacaacttcaggaagtatcctggaaattc

SEQ ID NO: 686902 - DNA, 33 bp, Homo sapien
gcgtaacaacttcagggagtatcctggaaattc

SEQ ID NO: 686903 - DNA, 33 bp, Homo sapien
cttaacagggggttgaagaacaggcataatgtt

SEQ ID NO: 686904 - DNA, 33 bp, Homo sapien
cttaacagggggttgaggaacaggcataatgtt

SEQ ID NO: 686905 - DNA, 33 bp, Homo sapien
atagcttatatagacacgttttctgccctcaaa

SEQ ID NO: 686906 - DNA, 33 bp, Homo sapien
atagcttatatagacatgttttctgccctcaaa

SEQ ID NO: 686907 - DNA, 33 bp, Homo sapien
ctttcattatagacatcaggaaacagtacaaaa

SEQ ID NO: 686908 - DNA, 33 bp, Homo sapien
ctttcattatagacatgaggaaacagtacaaaa

SEQ ID NO: 686909 - DNA, 33 bp, Homo sapien
acatcctactaaatccccaatacccacttttat

SEQ ID NO: 686910 - DNA, 33 bp, Homo sapien
acatcctactaaatccgcaatacccacttttat

SEQ ID NO: 686911 - DNA, 33 bp, Homo sapien
acatccatattcattaaccatgacctgtctgca

SEQ ID NO: 686912 - DNA, 33 bp, Homo sapien
acatccatattcattatccatgacctgtctgca

SEQ ID NO: 686913 - DNA, 33 bp, Homo sapien
atagcagggggtatatcaccttcctcatacatt

SEQ ID NO: 686914 - DNA, 33 bp, Homo sapien
atagcagggggtatattaccttcctcatacatt

SEQ ID NO: 686915 - DNA, 33 bp, Homo sapien
agaattgggccctagaaaataaatataatcacg

SEQ ID NO: 686916 - DNA, 33 bp, Homo sapien
agaattgggccctagagaataaatataatcacg

SEQ ID NO: 686917 - DNA, 33 bp, Homo sapien
gtcatgcaccatataacatttaggtgaatgatg

SEQ ID NO: 686918 - DNA, 33 bp, Homo sapien
gtcatgcaccatataatatttaggtgaatgatg

SEQ ID NO: 686919 - DNA, 33 bp, Homo sapien
ggattacaatctctgaatagggtttgcaatcat

SEQ ID NO: 686920 - DNA, 33 bp, Homo sapien
ggattacaatctctgagtagggtttgcaatcat

SEQ ID NO: 686921 - DNA, 33 bp, Homo sapien
tgcaggggtccgggagaaagatcaagaggcttt

SEQ ID NO: 686922 - DNA, 33 bp, Homo sapien
tgcaggggtccgggaggaagatcaagaggcttt

SEQ ID NO: 686923 - DNA, 33 bp, Homo sapien
aacaaaataaagaagacggctaattcctatgga

SEQ ID NO: 686924 - DNA, 33 bp, Homo sapien
aacaaaataaagaagatggctaattcctatgga

SEQ ID NO: 686925 - DNA, 33 bp, Homo sapien
acagagaaggacaacaataacagtaaacagaat

SEQ ID NO: 686926 - DNA, 33 bp, Homo sapien
acagagaaggacaacagtaacagtaaacagaat

SEQ ID NO: 686927 - DNA, 33 bp, Homo sapien
agctgtgggataactgaaggaaaagttcaaagg

SEQ ID NO: 686928 - DNA, 33 bp, Homo sapien
agctgtgggataactgcaggaaaagttcaaagg

SEQ ID NO: 686929 - DNA, 33 bp, Homo sapien
cattccagttcagccacgtggacctcattacct

SEQ ID NO: 686930 - DNA, 33 bp, Homo sapien
cattccagttcagccatgtggacctcattacct

SEQ ID NO: 686931 - DNA, 33 bp, Homo sapien
atggtttccaaaagagcagacattcaggagaga

SEQ ID NO: 686932 - DNA, 33 bp, Homo sapien
atggtttccaaaagaggagacattcaggagaga

SEQ ID NO: 686933 - DNA, 33 bp, Homo sapien
ggagagtgggtactcacaggaaacaatcacaac

SEQ ID NO: 686934 - DNA, 33 bp, Homo sapien
ggagagtgggtactcataggaaacaatcacaac

SEQ ID NO: 686935 - DNA, 33 bp, Homo sapien
gtcaactagtcaatggaagtgttctggtaaagc

SEQ ID NO: 686936 - DNA, 33 bp, Homo sapien
gtcaactagtcaatggtagtgttctggtaaagc

SEQ ID NO: 686937 - DNA, 33 bp, Homo sapien
aagaccataggtaatcacgaaatgtagtaaaat

SEQ ID NO: 686938 - DNA, 33 bp, Homo sapien
aagaccataggtaatcgcgaaatgtagtaaaat

SEQ ID NO: 686939 - DNA, 33 bp, Homo sapien
tccacaaagcaataaactaaaccccgatttgta

SEQ ID NO: 686940 - DNA, 33 bp, Homo sapien
tccacaaagcaataaagtaaaccccgatttgta

SEQ ID NO: 686941 - DNA, 33 bp, Homo sapien
atatctataacattgcaaatagcacaaaatagg

SEQ ID NO: 686942 - DNA, 33 bp, Homo sapien
atatctataacattgcgaatagcacaaaatagg

SEQ ID NO: 686943 - DNA, 33 bp, Homo sapien
cgtgaggactctggcccctggatccaatcacgt

SEQ ID NO: 686944 - DNA, 33 bp, Homo sapien
cgtgaggactctggccgctggatccaatcacgt

SEQ ID NO: 686945 - DNA, 33 bp, Homo sapien
tgcaccattttactagcaggctgttgcttcatt

SEQ ID NO: 686946 - DNA, 33 bp, Homo sapien
tgcaccattttactaggaggctgttgcttcatt

SEQ ID NO: 686947 - DNA, 33 bp, Homo sapien
ggtcaaggacgatgccgggacactcgtactgta

SEQ ID NO: 686948 - DNA, 33 bp, Homo sapien
ggtcaaggacgatgcctggacactcgtactgta

SEQ ID NO: 686949 - DNA, 33 bp, Homo sapien
ttcctgtactaagttgaaatgccacaagggcag

SEQ ID NO: 686950 - DNA, 33 bp, Homo sapien
ttcctgtactaagttgcaatgccacaagggcag

SEQ ID NO: 686951 - DNA, 33 bp, Homo sapien
taatacatgacgaatgcaaaagtagtgagagca

SEQ ID NO: 686952 - DNA, 33 bp, Homo sapien
taatacatgacgaatggaaaagtagtgagagca

SEQ ID NO: 686953 - DNA, 33 bp, Homo sapien
ctgctaagaaggacacaagaagagcaaataaac

SEQ ID NO: 686954 - DNA, 33 bp, Homo sapien
ctgctaagaaggacacgagaagagcaaataaac

SEQ ID NO: 686955 - DNA, 33 bp, Homo sapien
tcatgattctggaggcgagaaatctgggatcaa

SEQ ID NO: 686956 - DNA, 33 bp, Homo sapien
tcatgattctggaggctagaaatctgggatcaa

SEQ ID NO: 686957 - DNA, 33 bp, Homo sapien
acgtgaaacctacttacaggcagatgaaaagca

SEQ ID NO: 686958 - DNA, 33 bp, Homo sapien
acgtgaaacctacttataggcagatgaaaagca

SEQ ID NO: 686959 - DNA, 33 bp, Homo sapien
gaaatcatgctagaaactttaaacatgactccc

SEQ ID NO: 686960 - DNA, 33 bp, Homo sapien
gaaatcatgctagaaagtttaaacatgactccc

SEQ ID NO: 686961 - DNA, 33 bp, Homo sapien
atggctatgcaagaccaataaacatagatatat

SEQ ID NO: 686962 - DNA, 33 bp, Homo sapien
atggctatgcaagaccgataaacatagatatat

SEQ ID NO: 686963 - DNA, 33 bp, Homo sapien
tctagcagaagagtgacggaaaggagtctaata

SEQ ID NO: 686964 - DNA, 33 bp, Homo sapien
tctagcagaagagtgatggaaaggagtctaata

SEQ ID NO: 686965 - DNA, 33 bp, Homo sapien
aaatatgaccaaagacaaagagtatgctaacta

SEQ ID NO: 686966 - DNA, 33 bp, Homo sapien
aaatatgaccaaagactaagagtatgctaacta

SEQ ID NO: 686967 - DNA, 33 bp, Homo sapien
ttagttcaccaggaggaaataatagtttgaaaa

SEQ ID NO: 686968 - DNA, 33 bp, Homo sapien
ttagttcaccaggagggaataatagtttgaaaa

SEQ ID NO: 686969 - DNA, 33 bp, Homo sapien
tcgtgaactagagaacccaacgtcataaagatg

SEQ ID NO: 686970 - DNA, 33 bp, Homo sapien
tcgtgaactagagaactcaacgtcataaagatg

SEQ ID NO: 686971 - DNA, 33 bp, Homo sapien
ttgagatagttactataacgatttcatttaata

SEQ ID NO: 686972 - DNA, 33 bp, Homo sapien
ttgagatagttactattacgatttcatttaata

SEQ ID NO: 686973 - DNA, 33 bp, Homo sapien
agatgagacataagaaaggagaaaacttgactt

SEQ ID NO: 686974 - DNA, 33 bp, Homo sapien
agatgagacataagaagggagaaaacttgactt

SEQ ID NO: 686975 - DNA, 33 bp, Homo sapien
tgttgggccaatgcaaattatagacatgcaaat

SEQ ID NO: 686976 - DNA, 33 bp, Homo sapien
tgttgggccaatgcaagttatagacatgcaaat

SEQ ID NO: 686977 - DNA, 33 bp, Homo sapien
ttacaattttataacccggaatcctaagcagac

SEQ ID NO: 686978 - DNA, 33 bp, Homo sapien
ttacaattttataacctggaatcctaagcagac

SEQ ID NO: 686979 - DNA, 33 bp, Homo sapien
cttggcgactgctgtgcataagttctcaagtgt

SEQ ID NO: 686980 - DNA, 33 bp, Homo sapien
cttggcgactgctgtggataagttctcaagtgt

SEQ ID NO: 686981 - DNA, 33 bp, Homo sapien
gttggtctctgttgaacatggcttctcaccaag

SEQ ID NO: 686982 - DNA, 33 bp, Homo sapien
gttggtctctgttgaagatggcttctcaccaag

SEQ ID NO: 686983 - DNA, 33 bp, Homo sapien
caaaacattttaataacaggagggatgtcacgg

SEQ ID NO: 686984 - DNA, 33 bp, Homo sapien
caaaacattttaataagaggagggatgtcacgg

SEQ ID NO: 686985 - DNA, 33 bp, Homo sapien
gtccaggctcttgcaactgtacagggtagagtt

SEQ ID NO: 686986 - DNA, 33 bp, Homo sapien
gtccaggctcttgcaattgtacagggtagagtt

SEQ ID NO: 686987 - DNA, 33 bp, Homo sapien
ataataataatgctaacaatgatgataatagcc

SEQ ID NO: 686988 - DNA, 33 bp, Homo sapien
ataataataatgctaagaatgatgataatagcc

SEQ ID NO: 686989 - DNA, 33 bp, Homo sapien
taaacagaggttctgacgagttaaataacttgt

SEQ ID NO: 686990 - DNA, 33 bp, Homo sapien
taaacagaggttctgaggagttaaataacttgt

SEQ ID NO: 686991 - DNA, 33 bp, Homo sapien
gattatcacactcatgaatctgtttgttggcaa

SEQ ID NO: 686992 - DNA, 33 bp, Homo sapien
gattatcacactcatgcatctgtttgttggcaa

SEQ ID NO: 686993 - DNA, 33 bp, Homo sapien
aagctccatcaaaggagtaggtatatctcttat

SEQ ID NO: 686994 - DNA, 33 bp, Homo sapien
aagctccatcaaaggattaggtatatctcttat

SEQ ID NO: 686995 - DNA, 33 bp, Homo sapien
caacaaaagaggctcaatctcaggccagctgca

SEQ ID NO: 686996 - DNA, 33 bp, Homo sapien
caacaaaagaggctcagtctcaggccagctgca

SEQ ID NO: 686997 - DNA, 33 bp, Homo sapien
tgcctctgccggatgaactcttatactgagccc

SEQ ID NO: 686998 - DNA, 33 bp, Homo sapien
tgcctctgccggatgagctcttatactgagccc

SEQ ID NO: 686999 - DNA, 33 bp, Homo sapien
taaatagagtaactgacgctttttccaacattt

SEQ ID NO: 687000 - DNA, 33 bp, Homo sapien
taaatagagtaactgatgctttttccaacattt

SEQ ID NO: 687001 - DNA, 33 bp, Homo sapien
tacaaactcctcagcacaatgttttgagacaca

SEQ ID NO: 687002 - DNA, 33 bp, Homo sapien
tacaaactcctcagcataatgttttgagacaca

SEQ ID NO: 687003 - DNA, 33 bp, Homo sapien
agaacccaacttgtgacgtaggtgacatttata

SEQ ID NO: 687004 - DNA, 33 bp, Homo sapien
agaacccaacttgtgatgtaggtgacatttata

SEQ ID NO: 687005 - DNA, 33 bp, Homo sapien
taaacaaaaagtagccaattcctggcatctgaa

SEQ ID NO: 687006 - DNA, 33 bp, Homo sapien
taaacaaaaagtagccgattcctggcatctgaa

SEQ ID NO: 687007 - DNA, 33 bp, Homo sapien
ctggtactatctcaaaatttcccccaataaatc

SEQ ID NO: 687008 - DNA, 33 bp, Homo sapien
ctggtactatctcaaagtttcccccaataaatc

SEQ ID NO: 687009 - DNA, 33 bp, Homo sapien
atagtggggttccagaaaatggaatagagacaa

SEQ ID NO: 687010 - DNA, 33 bp, Homo sapien
atagtggggttccagacaatggaatagagacaa

SEQ ID NO: 687011 - DNA, 33 bp, Homo sapien
accaccagagtggttaccttaaaatgaaaatct

SEQ ID NO: 687012 - DNA, 33 bp, Homo sapien
accaccagagtggttatcttaaaatgaaaatct

SEQ ID NO: 687013 - DNA, 33 bp, Homo sapien
gaagtataaatagcacacatcttattctcaggg

SEQ ID NO: 687014 - DNA, 33 bp, Homo sapien
gaagtataaatagcacgcatcttattctcaggg

SEQ ID NO: 687015 - DNA, 33 bp, Homo sapien
ccaagaatagctgccaaataattttgaaatata

SEQ ID NO: 687016 - DNA, 33 bp, Homo sapien
ccaagaatagctgccagataattttgaaatata

SEQ ID NO: 687017 - DNA, 33 bp, Homo sapien
gttcaaagtaggtgatcaaaagtgagttagatg

SEQ ID NO: 687018 - DNA, 33 bp, Homo sapien
gttcaaagtaggtgattaaaagtgagttagatg

SEQ ID NO: 687019 - DNA, 33 bp, Homo sapien
tttggcctatttgcagaaatgagccagggtggt

SEQ ID NO: 687020 - DNA, 33 bp, Homo sapien
tttggcctatttgcaggaatgagccagggtggt

SEQ ID NO: 687021 - DNA, 33 bp, Homo sapien
aaagcaagctaagaaacagtggctggttgccat

SEQ ID NO: 687022 - DNA, 33 bp, Homo sapien
aaagcaagctaagaaagagtggctggttgccat

SEQ ID NO: 687023 - DNA, 33 bp, Homo sapien
ttacattcttgtggaccaactgatgcccaccag

SEQ ID NO: 687024 - DNA, 33 bp, Homo sapien
ttacattcttgtggactaactgatgcccaccag

SEQ ID NO: 687025 - DNA, 33 bp, Homo sapien
tctgtgacttggtacacccttcttcaccaaatt

SEQ ID NO: 687026 - DNA, 33 bp, Homo sapien
tctgtgacttggtacatccttcttcaccaaatt

SEQ ID NO: 687027 - DNA, 33 bp, Homo sapien
ccaggacctaggagtgcaaccttacctggaaac

SEQ ID NO: 687028 - DNA, 33 bp, Homo sapien
ccaggacctaggagtgtaaccttacctggaaac

SEQ ID NO: 687029 - DNA, 33 bp, Homo sapien
tgaacctcacattgtaaagaatttccttccatg

SEQ ID NO: 687030 - DNA, 33 bp, Homo sapien
tgaacctcacattgtacagaatttccttccatg

SEQ ID NO: 687031 - DNA, 33 bp, Homo sapien
cctgtggttgcattgccagagactgtctcagaa

SEQ ID NO: 687032 - DNA, 33 bp, Homo sapien
cctgtggttgcattgcgagagactgtctcagaa

SEQ ID NO: 687033 - DNA, 33 bp, Homo sapien
ttgaggttatagaaaaagcctgagaattgtgat

SEQ ID NO: 687034 - DNA, 33 bp, Homo sapien
ttgaggttatagaaaaggcctgagaattgtgat

SEQ ID NO: 687035 - DNA, 33 bp, Homo sapien
cacatttgccgtcttcactctaggaacattcgg

SEQ ID NO: 687036 - DNA, 33 bp, Homo sapien
cacatttgccgtcttcgctctaggaacattcgg

SEQ ID NO: 687037 - DNA, 33 bp, Homo sapien
attcaaactcatgtagacacaaagggcctggtg

SEQ ID NO: 687038 - DNA, 33 bp, Homo sapien
attcaaactcatgtaggcacaaagggcctggtg

SEQ ID NO: 687039 - DNA, 33 bp, Homo sapien
tacagcttaagcttcaccatgtgtgggactgtg

SEQ ID NO: 687040 - DNA, 33 bp, Homo sapien
tacagcttaagcttcatcatgtgtgggactgtg

SEQ ID NO: 687041 - DNA, 33 bp, Homo sapien
ctgtcagtgatccttaacaggtaagacaaattc

SEQ ID NO: 687042 - DNA, 33 bp, Homo sapien
ctgtcagtgatccttagcaggtaagacaaattc

SEQ ID NO: 687043 - DNA, 33 bp, Homo sapien
tcactgcatctctagaacatggagcacaatggc

SEQ ID NO: 687044 - DNA, 33 bp, Homo sapien
tcactgcatctctagagcatggagcacaatggc

SEQ ID NO: 687045 - DNA, 33 bp, Homo sapien
gatttcatctgtaaaacaaggcaattataacca

SEQ ID NO: 687046 - DNA, 33 bp, Homo sapien
gatttcatctgtaaaagaaggcaattataacca

SEQ ID NO: 687047 - DNA, 33 bp, Homo sapien
aacaccccaggaaatgaatgagcttgggtaatg

SEQ ID NO: 687048 - DNA, 33 bp, Homo sapien
aacaccccaggaaatgcatgagcttgggtaatg

SEQ ID NO: 687049 - DNA, 33 bp, Homo sapien
gatctgttgagcttatcacataacaggtactaa

SEQ ID NO: 687050 - DNA, 33 bp, Homo sapien
gatctgttgagcttattacataacaggtactaa

SEQ ID NO: 687051 - DNA, 33 bp, Homo sapien
ccttgtaagttctagactatcagagaaaatttt

SEQ ID NO: 687052 - DNA, 33 bp, Homo sapien
ccttgtaagttctagattatcagagaaaatttt

SEQ ID NO: 687053 - DNA, 33 bp, Homo sapien
acaaaggccatgtacgcagaaaggcaaaataat

SEQ ID NO: 687054 - DNA, 33 bp, Homo sapien
acaaaggccatgtacgtagaaaggcaaaataat

SEQ ID NO: 687055 - DNA, 33 bp, Homo sapien
tgataaagagataaacaaaatgtaacatatata

SEQ ID NO: 687056 - DNA, 33 bp, Homo sapien
tgataaagagataaacgaaatgtaacatatata

SEQ ID NO: 687057 - DNA, 33 bp, Homo sapien
ctttttgtttctatcacattatgctgtagattt

SEQ ID NO: 687058 - DNA, 33 bp, Homo sapien
ctttttgtttctatcatattatgctgtagattt

SEQ ID NO: 687059 - DNA, 33 bp, Homo sapien
cacttccttagtacagcacagcagttttgtgta

SEQ ID NO: 687060 - DNA, 33 bp, Homo sapien
cacttccttagtacaggacagcagttttgtgta

SEQ ID NO: 687061 - DNA, 33 bp, Homo sapien
ctcacaatatcactccaaggtaggtcttactat

SEQ ID NO: 687062 - DNA, 33 bp, Homo sapien
ctcacaatatcactccgaggtaggtcttactat

SEQ ID NO: 687063 - DNA, 33 bp, Homo sapien
cacatgtcctctggaccggcactgaactgtctt

SEQ ID NO: 687064 - DNA, 33 bp, Homo sapien
cacatgtcctctggactggcactgaactgtctt

SEQ ID NO: 687065 - DNA, 33 bp, Homo sapien
atgattttggatcacaacttttggacagcaatg

SEQ ID NO: 687066 - DNA, 33 bp, Homo sapien
atgattttggatcacaccttttggacagcaatg

SEQ ID NO: 687067 - DNA, 33 bp, Homo sapien
aggcttagacttgcaccaaggctccatcaggcc

SEQ ID NO: 687068 - DNA, 33 bp, Homo sapien
aggcttagacttgcactaaggctccatcaggcc

SEQ ID NO: 687069 - DNA, 33 bp, Homo sapien
aggattttgaggtgaacgactcaaaggatgcta

SEQ ID NO: 687070 - DNA, 33 bp, Homo sapien
aggattttgaggtgaaggactcaaaggatgcta

SEQ ID NO: 687071 - DNA, 33 bp, Homo sapien
gcagaaatcctgcaagacatctcctatctttta

SEQ ID NO: 687072 - DNA, 33 bp, Homo sapien
gcagaaatcctgcaaggcatctcctatctttta

SEQ ID NO: 687073 - DNA, 33 bp, Homo sapien
cccaggttactcgtacgatattcaagacaagga

SEQ ID NO: 687074 - DNA, 33 bp, Homo sapien
cccaggttactcgtactatattcaagacaagga

SEQ ID NO: 687075 - DNA, 33 bp, Homo sapien
taccttcacatttatcgaatatttgagttggta

SEQ ID NO: 687076 - DNA, 33 bp, Homo sapien
taccttcacatttatctaatatttgagttggta

SEQ ID NO: 687077 - DNA, 33 bp, Homo sapien
tgtgattgcttctcacagtccctgcttctgtct

SEQ ID NO: 687078 - DNA, 33 bp, Homo sapien
tgtgattgcttctcacggtccctgcttctgtct

SEQ ID NO: 687079 - DNA, 33 bp, Homo sapien
atgcttgattgactaaagcagcaaatcctggag

SEQ ID NO: 687080 - DNA, 33 bp, Homo sapien
atgcttgattgactaaggcagcaaatcctggag

SEQ ID NO: 687081 - DNA, 33 bp, Homo sapien
tttcctccctcttagcactttaaagttgccatt

SEQ ID NO: 687082 - DNA, 33 bp, Homo sapien
tttcctccctcttagccctttaaagttgccatt

SEQ ID NO: 687083 - DNA, 33 bp, Homo sapien
gaattttgtaagtgcaaaatcagatcatctaaa

SEQ ID NO: 687084 - DNA, 33 bp, Homo sapien
gaattttgtaagtgcacaatcagatcatctaaa

SEQ ID NO: 687085 - DNA, 33 bp, Homo sapien
ataagtaaaccagataaaggctttagatatata

SEQ ID NO: 687086 - DNA, 33 bp, Homo sapien
ataagtaaaccagatacaggctttagatatata

SEQ ID NO: 687087 - DNA, 33 bp, Homo sapien
tcatatcaacacctcaatgaaagaccacttgaa

SEQ ID NO: 687088 - DNA, 33 bp, Homo sapien
tcatatcaacacctcagtgaaagaccacttgaa

SEQ ID NO: 687089 - DNA, 33 bp, Homo sapien
acttatacaggcctatgaactaaataagacatt

SEQ ID NO: 687090 - DNA, 33 bp, Homo sapien
acttatacaggcctattaactaaataagacatt

SEQ ID NO: 687091 - DNA, 33 bp, Homo sapien
ccaggtgtattcgtcaacttttgtgttactata

SEQ ID NO: 687092 - DNA, 33 bp, Homo sapien
ccaggtgtattcgtcagcttttgtgttactata

SEQ ID NO: 687093 - DNA, 33 bp, Homo sapien
atgtattactaaaaaggcatggcagtagtgatg

SEQ ID NO: 687094 - DNA, 33 bp, Homo sapien
atgtattactaaaaagtcatggcagtagtgatg

SEQ ID NO: 687095 - DNA, 33 bp, Homo sapien
agataaagtatcaatgcacaaaaatctactacc

SEQ ID NO: 687096 - DNA, 33 bp, Homo sapien
agataaagtatcaatggacaaaaatctactacc

SEQ ID NO: 687097 - DNA, 33 bp, Homo sapien
attaaggccaggcataaccctagatatttgata

SEQ ID NO: 687098 - DNA, 33 bp, Homo sapien
attaaggccaggcatagccctagatatttgata

SEQ ID NO: 687099 - DNA, 33 bp, Homo sapien
ttaactgaaatgaaacagactctattaaagtag

SEQ ID NO: 687100 - DNA, 33 bp, Homo sapien
ttaactgaaatgaaactgactctattaaagtag

SEQ ID NO: 687101 - DNA, 33 bp, Homo sapien
ggtcatgtgtgactcaatcccattatgcacaag

SEQ ID NO: 687102 - DNA, 33 bp, Homo sapien
ggtcatgtgtgactcagtcccattatgcacaag

SEQ ID NO: 687103 - DNA, 33 bp, Homo sapien
tggttccactaaagtcgctttcacttggattga

SEQ ID NO: 687104 - DNA, 33 bp, Homo sapien
tggttccactaaagtctctttcacttggattga

SEQ ID NO: 687105 - DNA, 33 bp, Homo sapien
atgcccttttaactcaaaccatttattcatttg

SEQ ID NO: 687106 - DNA, 33 bp, Homo sapien
atgcccttttaactcagaccatttattcatttg

SEQ ID NO: 687107 - DNA, 33 bp, Homo sapien
catgtgagccagagaactcctataatgtcccaa

SEQ ID NO: 687108 - DNA, 33 bp, Homo sapien
catgtgagccagagaattcctataatgtcccaa

SEQ ID NO: 687109 - DNA, 33 bp, Homo sapien
caaggcatacatcaaggcatttccatacatcct

SEQ ID NO: 687110 - DNA, 33 bp, Homo sapien
caaggcatacatcaagtcatttccatacatcct

SEQ ID NO: 687111 - DNA, 33 bp, Homo sapien
gaggttatgtgactacaagtgtgatacatgagt

SEQ ID NO: 687112 - DNA, 33 bp, Homo sapien
gaggttatgtgactacgagtgtgatacatgagt

SEQ ID NO: 687113 - DNA, 33 bp, Homo sapien
cattccaccatcttaacaacaacagagtttttc

SEQ ID NO: 687114 - DNA, 33 bp, Homo sapien
cattccaccatcttaataacaacagagtttttc

SEQ ID NO: 687115 - DNA, 33 bp, Homo sapien
acaagtgaaggtggaagagttacaactgacaac

SEQ ID NO: 687116 - DNA, 33 bp, Homo sapien
acaagtgaaggtggaatagttacaactgacaac

SEQ ID NO: 687117 - DNA, 33 bp, Homo sapien
taatgtgctcagttgacgacgagaagcagccct

SEQ ID NO: 687118 - DNA, 33 bp, Homo sapien
taatgtgctcagttgatgacgagaagcagccct

SEQ ID NO: 687119 - DNA, 33 bp, Homo sapien
taaaatgttacatgacactccagctcaccctgc

SEQ ID NO: 687120 - DNA, 33 bp, Homo sapien
taaaatgttacatgacgctccagctcaccctgc

SEQ ID NO: 687121 - DNA, 33 bp, Homo sapien
gttgcaatgtcccttaaagaagtcctgtgttgg

SEQ ID NO: 687122 - DNA, 33 bp, Homo sapien
gttgcaatgtcccttagagaagtcctgtgttgg

SEQ ID NO: 687123 - DNA, 33 bp, Homo sapien
ttcccttactcttccaacaaggttctaagctct

SEQ ID NO: 687124 - DNA, 33 bp, Homo sapien
ttcccttactcttccaccaaggttctaagctct

SEQ ID NO: 687125 - DNA, 33 bp, Homo sapien
ggaaaagtgcatcctgcatatttcggatatttt

SEQ ID NO: 687126 - DNA, 33 bp, Homo sapien
ggaaaagtgcatcctgtatatttcggatatttt

SEQ ID NO: 687127 - DNA, 33 bp, Homo sapien
cacaggatccgctaaccgacccctaagccacat

SEQ ID NO: 687128 - DNA, 33 bp, Homo sapien
cacaggatccgctaactgacccctaagccacat

SEQ ID NO: 687129 - DNA, 33 bp, Homo sapien
ttgctgtggttggccacagtagacacacgcttt

SEQ ID NO: 687130 - DNA, 33 bp, Homo sapien
ttgctgtggttggccatagtagacacacgcttt

SEQ ID NO: 687131 - DNA, 33 bp, Homo sapien
tataatttaaggcatccgagaacttccagaagc

SEQ ID NO: 687132 - DNA, 33 bp, Homo sapien
tataatttaaggcatctgagaacttccagaagc

SEQ ID NO: 687133 - DNA, 33 bp, Homo sapien
acagactctgtgtaccaacccacatggcctcct

SEQ ID NO: 687134 - DNA, 33 bp, Homo sapien
acagactctgtgtaccgacccacatggcctcct

SEQ ID NO: 687135 - DNA, 33 bp, Homo sapien
aaatgtgcagtggcagaaatttgcctatgaaag

SEQ ID NO: 687136 - DNA, 33 bp, Homo sapien
aaatgtgcagtggcaggaatttgcctatgaaag

SEQ ID NO: 687137 - DNA, 33 bp, Homo sapien
agatactgaaattacaacctcaggcaattcctt

SEQ ID NO: 687138 - DNA, 33 bp, Homo sapien
agatactgaaattacaccctcaggcaattcctt

SEQ ID NO: 687139 - DNA, 33 bp, Homo sapien
ggtcggataatatcaacaagactcagttcctct

SEQ ID NO: 687140 - DNA, 33 bp, Homo sapien
ggtcggataatatcaagaagactcagttcctct

SEQ ID NO: 687141 - DNA, 33 bp, Homo sapien
tcctattgtttttgccacagtggttggttcaca

SEQ ID NO: 687142 - DNA, 33 bp, Homo sapien
tcctattgtttttgccgcagtggttggttcaca

SEQ ID NO: 687143 - DNA, 33 bp, Homo sapien
ttaaatgaagatggctaaagttcaacagactcc

SEQ ID NO: 687144 - DNA, 33 bp, Homo sapien
ttaaatgaagatggctcaagttcaacagactcc

SEQ ID NO: 687145 - DNA, 33 bp, Homo sapien
atcttttgcttttgtaaatccatctgtgagccc

SEQ ID NO: 687146 - DNA, 33 bp, Homo sapien
atcttttgcttttgtacatccatctgtgagccc

SEQ ID NO: 687147 - DNA, 33 bp, Homo sapien
acagcagtggctattagagagctagactttctc

SEQ ID NO: 687148 - DNA, 33 bp, Homo sapien
acagcagtggctattatagagctagactttctc

SEQ ID NO: 687149 - DNA, 33 bp, Homo sapien
ggacgcaaccagaccaagtcaagttcttagggt

SEQ ID NO: 687150 - DNA, 33 bp, Homo sapien
ggacgcaaccagaccatgtcaagttcttagggt

SEQ ID NO: 687151 - DNA, 33 bp, Homo sapien
gaaattaggaactaaaagcctcagctcctggag

SEQ ID NO: 687152 - DNA, 33 bp, Homo sapien
gaaattaggaactaaatgcctcagctcctggag

SEQ ID NO: 687153 - DNA, 33 bp, Homo sapien
tagacttagaattggacggaatcaggtgttagc

SEQ ID NO: 687154 - DNA, 33 bp, Homo sapien
tagacttagaattggatggaatcaggtgttagc

SEQ ID NO: 687155 - DNA, 33 bp, Homo sapien
aagggtgacaggacaagggtttgataagaaata

SEQ ID NO: 687156 - DNA, 33 bp, Homo sapien
aagggtgacaggacaatggtttgataagaaata

SEQ ID NO: 687157 - DNA, 33 bp, Homo sapien
aataaaatgagagtccaacagggagaaaagaca

SEQ ID NO: 687158 - DNA, 33 bp, Homo sapien
aataaaatgagagtccgacagggagaaaagaca

SEQ ID NO: 687159 - DNA, 33 bp, Homo sapien
ttaccctgagcttcaaccacaatggaaacttcc

SEQ ID NO: 687160 - DNA, 33 bp, Homo sapien
ttaccctgagcttcaatcacaatggaaacttcc

SEQ ID NO: 687161 - DNA, 33 bp, Homo sapien
ggacattgaagtagtaagagacttgagtgttat

SEQ ID NO: 687162 - DNA, 33 bp, Homo sapien
ggacattgaagtagtaggagacttgagtgttat

SEQ ID NO: 687163 - DNA, 33 bp, Homo sapien
catacaaaggcattcaaaacattttatgtagta

SEQ ID NO: 687164 - DNA, 33 bp, Homo sapien
catacaaaggcattcagaacattttatgtagta

SEQ ID NO: 687165 - DNA, 33 bp, Homo sapien
gggaaaacaataaaaagaaaggctccaagcatg

SEQ ID NO: 687166 - DNA, 33 bp, Homo sapien
gggaaaacaataaaaataaaggctccaagcatg

SEQ ID NO: 687167 - DNA, 33 bp, Homo sapien
aagtgacaaaaacagagattgtaaccatgatca

SEQ ID NO: 687168 - DNA, 33 bp, Homo sapien
aagtgacaaaaacagatattgtaaccatgatca

SEQ ID NO: 687169 - DNA, 33 bp, Homo sapien
tgcatttgcaaaagggaatactaatgatgcata

SEQ ID NO: 687170 - DNA, 33 bp, Homo sapien
tgcatttgcaaaaggggatactaatgatgcata

SEQ ID NO: 687171 - DNA, 33 bp, Homo sapien
aggtcaccagtatttgcaaggaagaaggacaga

SEQ ID NO: 687172 - DNA, 33 bp, Homo sapien
aggtcaccagtatttgtaaggaagaaggacaga

SEQ ID NO: 687173 - DNA, 33 bp, Homo sapien
agtgcttaccactctcaaaagttacttgtttgt

SEQ ID NO: 687174 - DNA, 33 bp, Homo sapien
agtgcttaccactctctaaagttacttgtttgt

SEQ ID NO: 687175 - DNA, 33 bp, Homo sapien
ttaggacacttactacaaatgaagcttgcagga

SEQ ID NO: 687176 - DNA, 33 bp, Homo sapien
ttaggacacttactacgaatgaagcttgcagga

SEQ ID NO: 687177 - DNA, 33 bp, Homo sapien
ttacaaaatatagtaacgtactgcacaaggtta

SEQ ID NO: 687178 - DNA, 33 bp, Homo sapien
ttacaaaatatagtaatgtactgcacaaggtta

SEQ ID NO: 687179 - DNA, 33 bp, Homo sapien
agccaatcctctcaaaagctgtattttcagcca

SEQ ID NO: 687180 - DNA, 33 bp, Homo sapien
agccaatcctctcaaaggctgtattttcagcca

SEQ ID NO: 687181 - DNA, 33 bp, Homo sapien
cctttcttactggtcacgttactggcacttttt

SEQ ID NO: 687182 - DNA, 33 bp, Homo sapien
cctttcttactggtcatgttactggcacttttt

SEQ ID NO: 687183 - DNA, 33 bp, Homo sapien
ttaatacaaattgcacacctctaagcgcaatgt

SEQ ID NO: 687184 - DNA, 33 bp, Homo sapien
ttaatacaaattgcacgcctctaagcgcaatgt

SEQ ID NO: 687185 - DNA, 33 bp, Homo sapien
ggctgagtgtgttaaccggggactgcttactct

SEQ ID NO: 687186 - DNA, 33 bp, Homo sapien
ggctgagtgtgttaactggggactgcttactct

SEQ ID NO: 687187 - DNA, 33 bp, Homo sapien
cttcctgttagacagcactttcttttctctggg

SEQ ID NO: 687188 - DNA, 33 bp, Homo sapien
cttcctgttagacagccctttcttttctctggg

SEQ ID NO: 687189 - DNA, 33 bp, Homo sapien
tgacacctccttgcaaagactatgaattataca

SEQ ID NO: 687190 - DNA, 33 bp, Homo sapien
tgacacctccttgcaatgactatgaattataca

SEQ ID NO: 687191 - DNA, 33 bp, Homo sapien
agaaagtaatgttacgcattccttcaatgaatg

SEQ ID NO: 687192 - DNA, 33 bp, Homo sapien
agaaagtaatgttacgtattccttcaatgaatg

SEQ ID NO: 687193 - DNA, 33 bp, Homo sapien
ttcctctgaaagatgacaaaagtatcgctttaa

SEQ ID NO: 687194 - DNA, 33 bp, Homo sapien
ttcctctgaaagatgagaaaagtatcgctttaa

SEQ ID NO: 687195 - DNA, 33 bp, Homo sapien
ttgtgaataaatgataccgaaggagaaaaatta

SEQ ID NO: 687196 - DNA, 33 bp, Homo sapien
ttgtgaataaatgatatcgaaggagaaaaatta

SEQ ID NO: 687197 - DNA, 33 bp, Homo sapien
tagattctacctaaagccttgatgagtaggatt

SEQ ID NO: 687198 - DNA, 33 bp, Homo sapien
tagattctacctaaaggcttgatgagtaggatt

SEQ ID NO: 687199 - DNA, 33 bp, Homo sapien
gaaatgaaaagttttgcatctgctgtagaaaaa

SEQ ID NO: 687200 - DNA, 33 bp, Homo sapien
gaaatgaaaagttttggatctgctgtagaaaaa

SEQ ID NO: 687201 - DNA, 33 bp, Homo sapien
cctatctcacttaaagcccactaaacaagttta

SEQ ID NO: 687202 - DNA, 33 bp, Homo sapien
cctatctcacttaaagtccactaaacaagttta

SEQ ID NO: 687203 - DNA, 33 bp, Homo sapien
taactccatctaaaaacagaggataatgccatg

SEQ ID NO: 687204 - DNA, 33 bp, Homo sapien
taactccatctaaaaatagaggataatgccatg

SEQ ID NO: 687205 - DNA, 33 bp, Homo sapien
tcacaataccttattgccaactcaaggcactag

SEQ ID NO: 687206 - DNA, 33 bp, Homo sapien
tcacaataccttattgtcaactcaaggcactag

SEQ ID NO: 687207 - DNA, 33 bp, Homo sapien
ttccagctgttccaaaatccccatccaagtctg

SEQ ID NO: 687208 - DNA, 33 bp, Homo sapien
ttccagctgttccaaactccccatccaagtctg

SEQ ID NO: 687209 - DNA, 33 bp, Homo sapien
tttcctttgatccaaactgactcctattcatca

SEQ ID NO: 687210 - DNA, 33 bp, Homo sapien
tttcctttgatccaaattgactcctattcatca

SEQ ID NO: 687211 - DNA, 33 bp, Homo sapien
aagggtatctaagaaacaacattgccttcaaaa

SEQ ID NO: 687212 - DNA, 33 bp, Homo sapien
aagggtatctaagaaagaacattgccttcaaaa

SEQ ID NO: 687213 - DNA, 33 bp, Homo sapien
acaattcttctcttccaaaacctaagtgattta

SEQ ID NO: 687214 - DNA, 33 bp, Homo sapien
acaattcttctcttccgaaacctaagtgattta

SEQ ID NO: 687215 - DNA, 33 bp, Homo sapien
aaagggacccacttgacgaaacatataagtcct

SEQ ID NO: 687216 - DNA, 33 bp, Homo sapien
aaagggacccacttgatgaaacatataagtcct

SEQ ID NO: 687217 - DNA, 33 bp, Homo sapien
cagtgtttgcaccgaagaacttccctagcactt

SEQ ID NO: 687218 - DNA, 33 bp, Homo sapien
cagtgtttgcaccgaataacttccctagcactt

SEQ ID NO: 687219 - DNA, 33 bp, Homo sapien
gatgaccttcattgcaaaggtgaagactgattc

SEQ ID NO: 687220 - DNA, 33 bp, Homo sapien
gatgaccttcattgcataggtgaagactgattc

SEQ ID NO: 687221 - DNA, 33 bp, Homo sapien
atcacatccaaaataacgattacagtaaggatg

SEQ ID NO: 687222 - DNA, 33 bp, Homo sapien
atcacatccaaaataatgattacagtaaggatg

SEQ ID NO: 687223 - DNA, 33 bp, Homo sapien
agtgtgatctgtattgcaatggatcttcaggct

SEQ ID NO: 687224 - DNA, 33 bp, Homo sapien
agtgtgatctgtattgtaatggatcttcaggct

SEQ ID NO: 687225 - DNA, 33 bp, Homo sapien
gctcagcagtttatcaaacaaaagctgacattt

SEQ ID NO: 687226 - DNA, 33 bp, Homo sapien
gctcagcagtttatcagacaaaagctgacattt

SEQ ID NO: 687227 - DNA, 33 bp, Homo sapien
caagagtattagaaaaacgctaacatttactgt

SEQ ID NO: 687228 - DNA, 33 bp, Homo sapien
caagagtattagaaaagcgctaacatttactgt

SEQ ID NO: 687229 - DNA, 33 bp, Homo sapien
acccaatataaagcacacaagttgagaacaatt

SEQ ID NO: 687230 - DNA, 33 bp, Homo sapien
acccaatataaagcacgcaagttgagaacaatt

SEQ ID NO: 687231 - DNA, 33 bp, Homo sapien
gacttcattctgatgaatacaggagccgcaaga

SEQ ID NO: 687232 - DNA, 33 bp, Homo sapien
gacttcattctgatgattacaggagccgcaaga

SEQ ID NO: 687233 - DNA, 33 bp, Homo sapien
agtctgaagagtctcacctggagaacaaaatcc

SEQ ID NO: 687234 - DNA, 33 bp, Homo sapien
agtctgaagagtctcatctggagaacaaaatcc

SEQ ID NO: 687235 - DNA, 33 bp, Homo sapien
aaaggcaattgatctccagtgggcaacagtgat

SEQ ID NO: 687236 - DNA, 33 bp, Homo sapien
aaaggcaattgatctctagtgggcaacagtgat

SEQ ID NO: 687237 - DNA, 33 bp, Homo sapien
gatataggaaatgtcaagttgtaaggatcctgg

SEQ ID NO: 687238 - DNA, 33 bp, Homo sapien
gatataggaaatgtcatgttgtaaggatcctgg

SEQ ID NO: 687239 - DNA, 33 bp, Homo sapien
cagcacatggtaccaacttggcacttgatcaat

SEQ ID NO: 687240 - DNA, 33 bp, Homo sapien
cagcacatggtaccaatttggcacttgatcaat

SEQ ID NO: 687241 - DNA, 33 bp, Homo sapien
aaacaattaagttgacaagacagaaaaatggag

SEQ ID NO: 687242 - DNA, 33 bp, Homo sapien
aaacaattaagttgacgagacagaaaaatggag

SEQ ID NO: 687243 - DNA, 33 bp, Homo sapien
tactgctctattccccaataacacataataaaa

SEQ ID NO: 687244 - DNA, 33 bp, Homo sapien
tactgctctattccccgataacacataataaaa

SEQ ID NO: 687245 - DNA, 33 bp, Homo sapien
attgaccaagaattaacacagatgttagaatta

SEQ ID NO: 687246 - DNA, 33 bp, Homo sapien
attgaccaagaattaatacagatgttagaatta

SEQ ID NO: 687247 - DNA, 33 bp, Homo sapien
acttttagtgaatacccataagatctgttgacg

SEQ ID NO: 687248 - DNA, 33 bp, Homo sapien
acttttagtgaatacctataagatctgttgacg

SEQ ID NO: 687249 - DNA, 33 bp, Homo sapien
agttttactgataaggaatatgatgatcatgga

SEQ ID NO: 687250 - DNA, 33 bp, Homo sapien
agttttactgataaggtatatgatgatcatgga

SEQ ID NO: 687251 - DNA, 33 bp, Homo sapien
aatgggcttttgctaaatagtggtggcatgatg

SEQ ID NO: 687252 - DNA, 33 bp, Homo sapien
aatgggcttttgctaagtagtggtggcatgatg

SEQ ID NO: 687253 - DNA, 33 bp, Homo sapien
agtcctagaaattggagtcactggatggagtta

SEQ ID NO: 687254 - DNA, 33 bp, Homo sapien
agtcctagaaattggattcactggatggagtta

SEQ ID NO: 687255 - DNA, 33 bp, Homo sapien
gagttacacctgagatcagcacaacccagtgct

SEQ ID NO: 687256 - DNA, 33 bp, Homo sapien
gagttacacctgagattagcacaacccagtgct

SEQ ID NO: 687257 - DNA, 33 bp, Homo sapien
tgcatgaataatcatgcaggttttgaaggttga

SEQ ID NO: 687258 - DNA, 33 bp, Homo sapien
tgcatgaataatcatggaggttttgaaggttga

SEQ ID NO: 687259 - DNA, 33 bp, Homo sapien
cacttctcttcataatcacatttccctagatga

SEQ ID NO: 687260 - DNA, 33 bp, Homo sapien
cacttctcttcataattacatttccctagatga

SEQ ID NO: 687261 - DNA, 33 bp, Homo sapien
acttagtgactgattccatcaaataatgccaat

SEQ ID NO: 687262 - DNA, 33 bp, Homo sapien
acttagtgactgattcgatcaaataatgccaat

SEQ ID NO: 687263 - DNA, 33 bp, Homo sapien
aatgtaacctattgacccccctaagttgtcaga

SEQ ID NO: 687264 - DNA, 33 bp, Homo sapien
aatgtaacctattgactcccctaagttgtcaga

SEQ ID NO: 687265 - DNA, 33 bp, Homo sapien
catggttgcccattcacataaaccattgtgagc

SEQ ID NO: 687266 - DNA, 33 bp, Homo sapien
catggttgcccattcatataaaccattgtgagc

SEQ ID NO: 687267 - DNA, 33 bp, Homo sapien
tttgcggctttcaaagaataggcttatttccct

SEQ ID NO: 687268 - DNA, 33 bp, Homo sapien
tttgcggctttcaaaggataggcttatttccct

SEQ ID NO: 687269 - DNA, 33 bp, Homo sapien
tgatacaccatatcaaacatttaatctccaaat

SEQ ID NO: 687270 - DNA, 33 bp, Homo sapien
tgatacaccatatcaagcatttaatctccaaat

SEQ ID NO: 687271 - DNA, 33 bp, Homo sapien
ctctctatactaattacgagcaaccctggtttg

SEQ ID NO: 687272 - DNA, 33 bp, Homo sapien
ctctctatactaattatgagcaaccctggtttg

SEQ ID NO: 687273 - DNA, 33 bp, Homo sapien
agtggtgaacatttaaactctctgggaacgcct

SEQ ID NO: 687274 - DNA, 33 bp, Homo sapien
agtggtgaacatttaagctctctgggaacgcct

SEQ ID NO: 687275 - DNA, 33 bp, Homo sapien
ttaaatatctctcaaaactttcatctcttattt

SEQ ID NO: 687276 - DNA, 33 bp, Homo sapien
ttaaatatctctcaaacctttcatctcttattt

SEQ ID NO: 687277 - DNA, 33 bp, Homo sapien
tgatgtagaaggttccaatgcacatggagctgc

SEQ ID NO: 687278 - DNA, 33 bp, Homo sapien
tgatgtagaaggttccgatgcacatggagctgc

SEQ ID NO: 687279 - DNA, 33 bp, Homo sapien
cacagtcatttgaaataaagtatacacagatcc

SEQ ID NO: 687280 - DNA, 33 bp, Homo sapien
cacagtcatttgaaatgaagtatacacagatcc

SEQ ID NO: 687281 - DNA, 33 bp, Homo sapien
ctcattccttgacttcaccatagcaggcagtgc

SEQ ID NO: 687282 - DNA, 33 bp, Homo sapien
ctcattccttgacttctccatagcaggcagtgc

SEQ ID NO: 687283 - DNA, 33 bp, Homo sapien
tgagatatctctttaaatgtgggaacaatgtcc

SEQ ID NO: 687284 - DNA, 33 bp, Homo sapien
tgagatatctctttaattgtgggaacaatgtcc

SEQ ID NO: 687285 - DNA, 33 bp, Homo sapien
atgagcaccactgtcaataatattctaccctaa

SEQ ID NO: 687286 - DNA, 33 bp, Homo sapien
atgagcaccactgtcagtaatattctaccctaa

SEQ ID NO: 687287 - DNA, 33 bp, Homo sapien
cctccaaagcagcactcaaaattcagtcatatc

SEQ ID NO: 687288 - DNA, 33 bp, Homo sapien
cctccaaagcagcactgaaaattcagtcatatc

SEQ ID NO: 687289 - DNA, 33 bp, Homo sapien
aaaaggtgttttgacactgattagttgagacta

SEQ ID NO: 687290 - DNA, 33 bp, Homo sapien
aaaaggtgttttgacattgattagttgagacta

SEQ ID NO: 687291 - DNA, 33 bp, Homo sapien
aattcatcttttgacaaacacttaatagccatc

SEQ ID NO: 687292 - DNA, 33 bp, Homo sapien
aattcatcttttgacagacacttaatagccatc

SEQ ID NO: 687293 - DNA, 33 bp, Homo sapien
tccttcaggttcaaacaaggacaatagctataa

SEQ ID NO: 687294 - DNA, 33 bp, Homo sapien
tccttcaggttcaaacgaggacaatagctataa

SEQ ID NO: 687295 - DNA, 33 bp, Homo sapien
gtgctacaaggccagaaagaaataatatgaaat

SEQ ID NO: 687296 - DNA, 33 bp, Homo sapien
gtgctacaaggccagacagaaataatatgaaat

SEQ ID NO: 687297 - DNA, 33 bp, Homo sapien
gaatgcgatggaattacatttattgcacttaca

SEQ ID NO: 687298 - DNA, 33 bp, Homo sapien
gaatgcgatggaattagatttattgcacttaca

SEQ ID NO: 687299 - DNA, 33 bp, Homo sapien
tgctaacacaactgaccgggtgagagataatga

SEQ ID NO: 687300 - DNA, 33 bp, Homo sapien
tgctaacacaactgactgggtgagagataatga

SEQ ID NO: 687301 - DNA, 33 bp, Homo sapien
tcagcacacagtgggaacttgatagatactcac

SEQ ID NO: 687302 - DNA, 33 bp, Homo sapien
tcagcacacagtgggagcttgatagatactcac

SEQ ID NO: 687303 - DNA, 33 bp, Homo sapien
cgtaggataccactgagagaaccacttctagaa

SEQ ID NO: 687304 - DNA, 33 bp, Homo sapien
cgtaggataccactgatagaaccacttctagaa

SEQ ID NO: 687305 - DNA, 33 bp, Homo sapien
aaggaggcatgggtatgaggcaactctacagca

SEQ ID NO: 687306 - DNA, 33 bp, Homo sapien
aaggaggcatgggtattaggcaactctacagca

SEQ ID NO: 687307 - DNA, 33 bp, Homo sapien
agaatcacaggagtccacatagggcactcttcc

SEQ ID NO: 687308 - DNA, 33 bp, Homo sapien
agaatcacaggagtccgcatagggcactcttcc

SEQ ID NO: 687309 - DNA, 33 bp, Homo sapien
tggaaggctgctaaaaacttgaaatgagtgtat

SEQ ID NO: 687310 - DNA, 33 bp, Homo sapien
tggaaggctgctaaaaccttgaaatgagtgtat

SEQ ID NO: 687311 - DNA, 33 bp, Homo sapien
tgcaagctgaagagcaagaaaaccagtccaagt

SEQ ID NO: 687312 - DNA, 33 bp, Homo sapien
tgcaagctgaagagcatgaaaaccagtccaagt

SEQ ID NO: 687313 - DNA, 33 bp, Homo sapien
ggaggctttaaaatgtgacactttgcagactca

SEQ ID NO: 687314 - DNA, 33 bp, Homo sapien
ggaggctttaaaatgttacactttgcagactca

SEQ ID NO: 687315 - DNA, 33 bp, Homo sapien
tccctttcccaggccactaatgaagagatgagt

SEQ ID NO: 687316 - DNA, 33 bp, Homo sapien
tccctttcccaggccattaatgaagagatgagt

SEQ ID NO: 687317 - DNA, 33 bp, Homo sapien
gctctgctcatgatgacgtttcttgggtagcat

SEQ ID NO: 687318 - DNA, 33 bp, Homo sapien
gctctgctcatgatgatgtttcttgggtagcat

SEQ ID NO: 687319 - DNA, 33 bp, Homo sapien
tttctatcctggaagacgaaagtaagagatgaa

SEQ ID NO: 687320 - DNA, 33 bp, Homo sapien
tttctatcctggaagaggaaagtaagagatgaa

SEQ ID NO: 687321 - DNA, 33 bp, Homo sapien
tatgttgcagaatactcagcattcactgaaaaa

SEQ ID NO: 687322 - DNA, 33 bp, Homo sapien
tatgttgcagaatacttagcattcactgaaaaa

SEQ ID NO: 687323 - DNA, 33 bp, Homo sapien
taaacgaagtagcctacgataaacccaaattaa

SEQ ID NO: 687324 - DNA, 33 bp, Homo sapien
taaacgaagtagcctatgataaacccaaattaa

SEQ ID NO: 687325 - DNA, 33 bp, Homo sapien
ctaggtttgaatcccaactctaatacttgaaca

SEQ ID NO: 687326 - DNA, 33 bp, Homo sapien
ctaggtttgaatcccagctctaatacttgaaca

SEQ ID NO: 687327 - DNA, 33 bp, Homo sapien
agcgttaaatactctgccaatcaaagcacaata

SEQ ID NO: 687328 - DNA, 33 bp, Homo sapien
agcgttaaatactctgtcaatcaaagcacaata

SEQ ID NO: 687329 - DNA, 33 bp, Homo sapien
ataaaaatacagcacaatgataaaatggacagt

SEQ ID NO: 687330 - DNA, 33 bp, Homo sapien
ataaaaatacagcacagtgataaaatggacagt

SEQ ID NO: 687331 - DNA, 33 bp, Homo sapien
gcttttacgcatctcacatccgttcccttgttt

SEQ ID NO: 687332 - DNA, 33 bp, Homo sapien
gcttttacgcatctcatatccgttcccttgttt

SEQ ID NO: 687333 - DNA, 33 bp, Homo sapien
caatggtcagaccacagcaatggtcacatattt

SEQ ID NO: 687334 - DNA, 33 bp, Homo sapien
caatggtcagaccacatcaatggtcacatattt

SEQ ID NO: 687335 - DNA, 33 bp, Homo sapien
ttgcatcagctggactcactttctcagacccct

SEQ ID NO: 687336 - DNA, 33 bp, Homo sapien
ttgcatcagctggactgactttctcagacccct

SEQ ID NO: 687337 - DNA, 33 bp, Homo sapien
gacgtgctcagtctgacatgggaggagagagag

SEQ ID NO: 687338 - DNA, 33 bp, Homo sapien
gacgtgctcagtctgatatgggaggagagagag

SEQ ID NO: 687339 - DNA, 33 bp, Homo sapien
gtgaaagtgtaggttgaacacagaacagacagg

SEQ ID NO: 687340 - DNA, 33 bp, Homo sapien
gtgaaagtgtaggttgcacacagaacagacagg

SEQ ID NO: 687341 - DNA, 33 bp, Homo sapien
ggcgttgggtcttttcacaggattttctagtcc

SEQ ID NO: 687342 - DNA, 33 bp, Homo sapien
ggcgttgggtcttttctcaggattttctagtcc

SEQ ID NO: 687343 - DNA, 33 bp, Homo sapien
gtggggaatctgcacaagctcaagtgacaggaa

SEQ ID NO: 687344 - DNA, 33 bp, Homo sapien
gtggggaatctgcacaggctcaagtgacaggaa

SEQ ID NO: 687345 - DNA, 33 bp, Homo sapien
gaaatacaaacattgccgaaagagaacactaat

SEQ ID NO: 687346 - DNA, 33 bp, Homo sapien
gaaatacaaacattgctgaaagagaacactaat

SEQ ID NO: 687347 - DNA, 33 bp, Homo sapien
gttgactggaacactgaagccaattaatcaggc

SEQ ID NO: 687348 - DNA, 33 bp, Homo sapien
gttgactggaacactgcagccaattaatcaggc

SEQ ID NO: 687349 - DNA, 33 bp, Homo sapien
gtggcagaacattagacgattgttgcttgaaga

SEQ ID NO: 687350 - DNA, 33 bp, Homo sapien
gtggcagaacattagaggattgttgcttgaaga

SEQ ID NO: 687351 - DNA, 33 bp, Homo sapien
atatactaatatccaccgctctcaaacattgaa

SEQ ID NO: 687352 - DNA, 33 bp, Homo sapien
atatactaatatccactgctctcaaacattgaa

SEQ ID NO: 687353 - DNA, 33 bp, Homo sapien
tacagtatatgtagaaagaaacagaggaaagaa

SEQ ID NO: 687354 - DNA, 33 bp, Homo sapien
tacagtatatgtagaaggaaacagaggaaagaa

SEQ ID NO: 687355 - DNA, 33 bp, Homo sapien
atttaaattctgcataagtgaccatgttttaaa

SEQ ID NO: 687356 - DNA, 33 bp, Homo sapien
atttaaattctgcatacgtgaccatgttttaaa

SEQ ID NO: 687357 - DNA, 33 bp, Homo sapien
ttccatatgggataaactgtgtgcatcagattc

SEQ ID NO: 687358 - DNA, 33 bp, Homo sapien
ttccatatgggataaagtgtgtgcatcagattc

SEQ ID NO: 687359 - DNA, 33 bp, Homo sapien
atggacttgaggacctcagattaacagtttgcg

SEQ ID NO: 687360 - DNA, 33 bp, Homo sapien
atggacttgaggaccttagattaacagtttgcg

SEQ ID NO: 687361 - DNA, 33 bp, Homo sapien
tcaaacgctacctggcacaaaatacaacagaaa

SEQ ID NO: 687362 - DNA, 33 bp, Homo sapien
tcaaacgctacctggcgcaaaatacaacagaaa

SEQ ID NO: 687363 - DNA, 33 bp, Homo sapien
gccaggtgccatgtataaaaactagataactcg

SEQ ID NO: 687364 - DNA, 33 bp, Homo sapien
gccaggtgccatgtatgaaaactagataactcg

SEQ ID NO: 687365 - DNA, 33 bp, Homo sapien
agaatattaatgattaagtttcattgcatttcc

SEQ ID NO: 687366 - DNA, 33 bp, Homo sapien
agaatattaatgattacgtttcattgcatttcc

SEQ ID NO: 687367 - DNA, 33 bp, Homo sapien
tattttgaattgttagaataccacagactgggt

SEQ ID NO: 687368 - DNA, 33 bp, Homo sapien
tattttgaattgttagtataccacagactgggt

SEQ ID NO: 687369 - DNA, 33 bp, Homo sapien
tgttaatgcagacactaaactacctttccccag

SEQ ID NO: 687370 - DNA, 33 bp, Homo sapien
tgttaatgcagacactgaactacctttccccag

SEQ ID NO: 687371 - DNA, 33 bp, Homo sapien
ggaatactcagcctacactattttatcatggat

SEQ ID NO: 687372 - DNA, 33 bp, Homo sapien
ggaatactcagcctacgctattttatcatggat

SEQ ID NO: 687373 - DNA, 33 bp, Homo sapien
actgagagggaatggccagaaagtcgggagaag

SEQ ID NO: 687374 - DNA, 33 bp, Homo sapien
actgagagggaatggctagaaagtcgggagaag

SEQ ID NO: 687375 - DNA, 33 bp, Homo sapien
ataaaaagctagcagaaaggagagaaggattta

SEQ ID NO: 687376 - DNA, 33 bp, Homo sapien
ataaaaagctagcagagaggagagaaggattta

SEQ ID NO: 687377 - DNA, 33 bp, Homo sapien
agcactcacatcatcaaaagctaaaaataaaga

SEQ ID NO: 687378 - DNA, 33 bp, Homo sapien
agcactcacatcatcacaagctaaaaataaaga

SEQ ID NO: 687379 - DNA, 33 bp, Homo sapien
gtgcaaaacatatttacatagccccaactctct

SEQ ID NO: 687380 - DNA, 33 bp, Homo sapien
gtgcaaaacatatttatatagccccaactctct

SEQ ID NO: 687381 - DNA, 33 bp, Homo sapien
tcctttgatcctcaaaattgacatcaccacctc

SEQ ID NO: 687382 - DNA, 33 bp, Homo sapien
tcctttgatcctcaaagttgacatcaccacctc

SEQ ID NO: 687383 - DNA, 33 bp, Homo sapien
atattccattaaccacaaccaaaagaaggaaat

SEQ ID NO: 687384 - DNA, 33 bp, Homo sapien
atattccattaaccacgaccaaaagaaggaaat

SEQ ID NO: 687385 - DNA, 33 bp, Homo sapien
agtataaatatcagaaatatgctccctaaatat

SEQ ID NO: 687386 - DNA, 33 bp, Homo sapien
agtataaatatcagaattatgctccctaaatat

SEQ ID NO: 687387 - DNA, 33 bp, Homo sapien
ggaaggcattctggaaatcatctaattgaacta

SEQ ID NO: 687388 - DNA, 33 bp, Homo sapien
ggaaggcattctggaagtcatctaattgaacta

SEQ ID NO: 687389 - DNA, 33 bp, Homo sapien
ggttaaggttgctacaatgagagatggtgacat

SEQ ID NO: 687390 - DNA, 33 bp, Homo sapien
ggttaaggttgctacagtgagagatggtgacat

SEQ ID NO: 687391 - DNA, 33 bp, Homo sapien
atgatcacatcttcccactacaggttttattat

SEQ ID NO: 687392 - DNA, 33 bp, Homo sapien
atgatcacatcttcccgctacaggttttattat

SEQ ID NO: 687393 - DNA, 33 bp, Homo sapien
tctagggtcaataggcaactagacaacatatct

SEQ ID NO: 687394 - DNA, 33 bp, Homo sapien
tctagggtcaataggctactagacaacatatct

SEQ ID NO: 687395 - DNA, 33 bp, Homo sapien
cttgcttccaagtgcccattgcctcactgagga

SEQ ID NO: 687396 - DNA, 33 bp, Homo sapien
cttgcttccaagtgcctattgcctcactgagga

SEQ ID NO: 687397 - DNA, 33 bp, Homo sapien
aagactcaggcaaggacgtagcatagccgtgag

SEQ ID NO: 687398 - DNA, 33 bp, Homo sapien
aagactcaggcaaggaggtagcatagccgtgag

SEQ ID NO: 687399 - DNA, 33 bp, Homo sapien
atcctagtgtgataaaaccatgttcatattagt

SEQ ID NO: 687400 - DNA, 33 bp, Homo sapien
atcctagtgtgataaagccatgttcatattagt

SEQ ID NO: 687401 - DNA, 33 bp, Homo sapien
cagccataactgataaatgttagctgaacttta

SEQ ID NO: 687402 - DNA, 33 bp, Homo sapien
cagccataactgataagtgttagctgaacttta

SEQ ID NO: 687403 - DNA, 33 bp, Homo sapien
cctaaatgaacaaagacaacttctctgtgcctc

SEQ ID NO: 687404 - DNA, 33 bp, Homo sapien
cctaaatgaacaaagagaacttctctgtgcctc

SEQ ID NO: 687405 - DNA, 33 bp, Homo sapien
gcttaacttgcctaggaacacttttttttggaa

SEQ ID NO: 687406 - DNA, 33 bp, Homo sapien
gcttaacttgcctagggacacttttttttggaa

SEQ ID NO: 687407 - DNA, 33 bp, Homo sapien
gttggtgaatttaggcaaacacctaggacttct

SEQ ID NO: 687408 - DNA, 33 bp, Homo sapien
gttggtgaatttaggcgaacacctaggacttct

SEQ ID NO: 687409 - DNA, 33 bp, Homo sapien
gacacttgtctccaaagttacacgtaatttcta

SEQ ID NO: 687410 - DNA, 33 bp, Homo sapien
gacacttgtctccaaatttacacgtaatttcta

SEQ ID NO: 687411 - DNA, 33 bp, Homo sapien
atttacgccaaagagcagcctcctccaagagcc

SEQ ID NO: 687412 - DNA, 33 bp, Homo sapien
atttacgccaaagagcggcctcctccaagagcc

SEQ ID NO: 687413 - DNA, 33 bp, Homo sapien
tattttcaacttatcaagatatttcaataaatc

SEQ ID NO: 687414 - DNA, 33 bp, Homo sapien
tattttcaacttatcaggatatttcaataaatc

SEQ ID NO: 687415 - DNA, 33 bp, Homo sapien
tagatggactgaaaaggagcagagacatcggag

SEQ ID NO: 687416 - DNA, 33 bp, Homo sapien
tagatggactgaaaagtagcagagacatcggag

SEQ ID NO: 687417 - DNA, 33 bp, Homo sapien
tgtggcgcagcgggaaaaagcgcagccagttct

SEQ ID NO: 687418 - DNA, 33 bp, Homo sapien
tgtggcgcagcgggaagaagcgcagccagttct

SEQ ID NO: 687419 - DNA, 33 bp, Homo sapien
ctcatggcaaagccaagagtgaaagagggtgag

SEQ ID NO: 687420 - DNA, 33 bp, Homo sapien
ctcatggcaaagccaatagtgaaagagggtgag

SEQ ID NO: 687421 - DNA, 33 bp, Homo sapien
tagtgacaatagctgaatatagtatgagaccac

SEQ ID NO: 687422 - DNA, 33 bp, Homo sapien
tagtgacaatagctgagtatagtatgagaccac

SEQ ID NO: 687423 - DNA, 33 bp, Homo sapien
caatcattgcttttgccaaggatgtggcctcag

SEQ ID NO: 687424 - DNA, 33 bp, Homo sapien
caatcattgcttttgctaaggatgtggcctcag

SEQ ID NO: 687425 - DNA, 33 bp, Homo sapien
ctcttaaagaatgatacagtctgaacctgataa

SEQ ID NO: 687426 - DNA, 33 bp, Homo sapien
ctcttaaagaatgatatagtctgaacctgataa

SEQ ID NO: 687427 - DNA, 33 bp, Homo sapien
tttatctgggaacaaacggtggtcctgaggtca

SEQ ID NO: 687428 - DNA, 33 bp, Homo sapien
tttatctgggaacaaagggtggtcctgaggtca

SEQ ID NO: 687429 - DNA, 33 bp, Homo sapien
tgcctggctgctgaagacattagagtttgcgac

SEQ ID NO: 687430 - DNA, 33 bp, Homo sapien
tgcctggctgctgaaggcattagagtttgcgac

SEQ ID NO: 687431 - DNA, 33 bp, Homo sapien
gctctcctatgacaacacaatcacattattgaa

SEQ ID NO: 687432 - DNA, 33 bp, Homo sapien
gctctcctatgacaacgcaatcacattattgaa

SEQ ID NO: 687433 - DNA, 33 bp, Homo sapien
taactattttgtgcaaactcagaaaaatctact

SEQ ID NO: 687434 - DNA, 33 bp, Homo sapien
taactattttgtgcaatctcagaaaaatctact

SEQ ID NO: 687435 - DNA, 33 bp, Homo sapien
gaataagggtactgtccctagcttgcttttgca

SEQ ID NO: 687436 - DNA, 33 bp, Homo sapien
gaataagggtactgtctctagcttgcttttgca

SEQ ID NO: 687437 - DNA, 33 bp, Homo sapien
agaatggtaagtgtaacgggcttgaatcatccc

SEQ ID NO: 687438 - DNA, 33 bp, Homo sapien
agaatggtaagtgtaatgggcttgaatcatccc

SEQ ID NO: 687439 - DNA, 33 bp, Homo sapien
aatgaagatctccaataagaagcatctattatc

SEQ ID NO: 687440 - DNA, 33 bp, Homo sapien
aatgaagatctccaatgagaagcatctattatc

SEQ ID NO: 687441 - DNA, 33 bp, Homo sapien
tattctgcaaagataaaatcctaagatgaatag

SEQ ID NO: 687442 - DNA, 33 bp, Homo sapien
tattctgcaaagataacatcctaagatgaatag

SEQ ID NO: 687443 - DNA, 33 bp, Homo sapien
ctccctctgtctagacaaattatactgagtcta

SEQ ID NO: 687444 - DNA, 33 bp, Homo sapien
ctccctctgtctagaccaattatactgagtcta

SEQ ID NO: 687445 - DNA, 33 bp, Homo sapien
tgaaatgaggggagtaagcaaacagggaaaagt

SEQ ID NO: 687446 - DNA, 33 bp, Homo sapien
tgaaatgaggggagtaggcaaacagggaaaagt

SEQ ID NO: 687447 - DNA, 33 bp, Homo sapien
ccataccaggattaacaagacacagttgtttct

SEQ ID NO: 687448 - DNA, 33 bp, Homo sapien
ccataccaggattaacgagacacagttgtttct

SEQ ID NO: 687449 - DNA, 33 bp, Homo sapien
tttgcttggtttctcaaggggaatagaagagta

SEQ ID NO: 687450 - DNA, 33 bp, Homo sapien
tttgcttggtttctcagggggaatagaagagta

SEQ ID NO: 687451 - DNA, 33 bp, Homo sapien
agatcacagcctagaaccttgctcctcacagcc

SEQ ID NO: 687452 - DNA, 33 bp, Homo sapien
agatcacagcctagaagcttgctcctcacagcc

SEQ ID NO: 687453 - DNA, 33 bp, Homo sapien
tggcctataccatgagaatgtgaaaaggccact

SEQ ID NO: 687454 - DNA, 33 bp, Homo sapien
tggcctataccatgaggatgtgaaaaggccact

SEQ ID NO: 687455 - DNA, 33 bp, Homo sapien
aaccatagtacttacaacttccttttcatacat

SEQ ID NO: 687456 - DNA, 33 bp, Homo sapien
aaccatagtacttacatcttccttttcatacat

SEQ ID NO: 687457 - DNA, 33 bp, Homo sapien
gaatttaggtatgtgaaccctcttagacttgag

SEQ ID NO: 687458 - DNA, 33 bp, Homo sapien
gaatttaggtatgtgagccctcttagacttgag

SEQ ID NO: 687459 - DNA, 33 bp, Homo sapien
ttaaatgaaatagcctaaacctaaaagctcaag

SEQ ID NO: 687460 - DNA, 33 bp, Homo sapien
ttaaatgaaatagcctgaacctaaaagctcaag

SEQ ID NO: 687461 - DNA, 33 bp, Homo sapien
aaacagtcctataaaaacaaaacatctaagagg

SEQ ID NO: 687462 - DNA, 33 bp, Homo sapien
aaacagtcctataaaatcaaaacatctaagagg

SEQ ID NO: 687463 - DNA, 33 bp, Homo sapien
gaggagaggattgttacagagtaaaaatgatgc

SEQ ID NO: 687464 - DNA, 33 bp, Homo sapien
gaggagaggattgttatagagtaaaaatgatgc

SEQ ID NO: 687465 - DNA, 33 bp, Homo sapien
tcaagtaaaagctacagagtcagaatcataata

SEQ ID NO: 687466 - DNA, 33 bp, Homo sapien
tcaagtaaaagctacatagtcagaatcataata

SEQ ID NO: 687467 - DNA, 33 bp, Homo sapien
gagccactgcgctcaaactgatgttttatcaag

SEQ ID NO: 687468 - DNA, 33 bp, Homo sapien
gagccactgcgctcaatctgatgttttatcaag

SEQ ID NO: 687469 - DNA, 33 bp, Homo sapien
cataagtactgggggacagaaagacagaaataa

SEQ ID NO: 687470 - DNA, 33 bp, Homo sapien
cataagtactgggggagagaaagacagaaataa

SEQ ID NO: 687471 - DNA, 33 bp, Homo sapien
actacagaagatattcaaaagataatgattact

SEQ ID NO: 687472 - DNA, 33 bp, Homo sapien
actacagaagatattcgaaagataatgattact

SEQ ID NO: 687473 - DNA, 33 bp, Homo sapien
gcccagttgaaacggaggagggcagccacacca

SEQ ID NO: 687474 - DNA, 33 bp, Homo sapien
gcccagttgaaacggatgagggcagccacacca

SEQ ID NO: 687475 - DNA, 33 bp, Homo sapien
gattgaattcccattaggtactaggcactgaag

SEQ ID NO: 687476 - DNA, 33 bp, Homo sapien
gattgaattcccattatgtactaggcactgaag

SEQ ID NO: 687477 - DNA, 33 bp, Homo sapien
caatatttgccacccgcactacaaagctcatca

SEQ ID NO: 687478 - DNA, 33 bp, Homo sapien
caatatttgccacccgtactacaaagctcatca

SEQ ID NO: 687479 - DNA, 33 bp, Homo sapien
aaatgataaagcctggccatgtgcaagttgctc

SEQ ID NO: 687480 - DNA, 33 bp, Homo sapien
aaatgataaagcctggtcatgtgcaagttgctc

SEQ ID NO: 687481 - DNA, 33 bp, Homo sapien
gtcataggttttctaccgtaagaaggaactatc

SEQ ID NO: 687482 - DNA, 33 bp, Homo sapien
gtcataggttttctactgtaagaaggaactatc

SEQ ID NO: 687483 - DNA, 33 bp, Homo sapien
attttatatggataaactataaaggcttacaaa

SEQ ID NO: 687484 - DNA, 33 bp, Homo sapien
attttatatggataaattataaaggcttacaaa

SEQ ID NO: 687485 - DNA, 33 bp, Homo sapien
taaatgtttatgcttacagtttatatcatatcc

SEQ ID NO: 687486 - DNA, 33 bp, Homo sapien
taaatgtttatgcttagagtttatatcatatcc

SEQ ID NO: 687487 - DNA, 33 bp, Homo sapien
gcagtgtcaagaagtacaggttcttgcttgaca

SEQ ID NO: 687488 - DNA, 33 bp, Homo sapien
gcagtgtcaagaagtataggttcttgcttgaca

SEQ ID NO: 687489 - DNA, 33 bp, Homo sapien
aggcagaaccacactacatacagaaatttggaa

SEQ ID NO: 687490 - DNA, 33 bp, Homo sapien
aggcagaaccacactagatacagaaatttggaa

SEQ ID NO: 687491 - DNA, 33 bp, Homo sapien
ttgttcaagattcttcactttcctcctgctttt

SEQ ID NO: 687492 - DNA, 33 bp, Homo sapien
ttgttcaagattcttcgctttcctcctgctttt

SEQ ID NO: 687493 - DNA, 33 bp, Homo sapien
gagtgaatggtaagaaatgctaatgttgggcat

SEQ ID NO: 687494 - DNA, 33 bp, Homo sapien
gagtgaatggtaagaagtgctaatgttgggcat

SEQ ID NO: 687495 - DNA, 33 bp, Homo sapien
agtttataatctagtacagagctacacataaat

SEQ ID NO: 687496 - DNA, 33 bp, Homo sapien
agtttataatctagtagagagctacacataaat

SEQ ID NO: 687497 - DNA, 33 bp, Homo sapien
tagtagtaatttcataggtgtgtttgcaaatat

SEQ ID NO: 687498 - DNA, 33 bp, Homo sapien
tagtagtaatttcatatgtgtgtttgcaaatat

SEQ ID NO: 687499 - DNA, 33 bp, Homo sapien
acagcctcttatagcaacctgcactgtaaattc

SEQ ID NO: 687500 - DNA, 33 bp, Homo sapien
acagcctcttatagcagcctgcactgtaaattc

SEQ ID NO: 687501 - DNA, 33 bp, Homo sapien
catttgtgtttacaaacgcctctgcctctctac

SEQ ID NO: 687502 - DNA, 33 bp, Homo sapien
catttgtgtttacaaatgcctctgcctctctac

SEQ ID NO: 687503 - DNA, 33 bp, Homo sapien
cctaaaatacccagcaaaatacctggcatacag

SEQ ID NO: 687504 - DNA, 33 bp, Homo sapien
cctaaaatacccagcacaatacctggcatacag

SEQ ID NO: 687505 - DNA, 33 bp, Homo sapien
tgttgtaagagttaagcagcttattgcacctaa

SEQ ID NO: 687506 - DNA, 33 bp, Homo sapien
tgttgtaagagttaagtagcttattgcacctaa

SEQ ID NO: 687507 - DNA, 33 bp, Homo sapien
ataaaacctgccaaaggatgacttaatgccaat

SEQ ID NO: 687508 - DNA, 33 bp, Homo sapien
ataaaacctgccaaagtatgacttaatgccaat

SEQ ID NO: 687509 - DNA, 33 bp, Homo sapien
agacagcatgaatataaaccttgtgccaaaagt

SEQ ID NO: 687510 - DNA, 33 bp, Homo sapien
agacagcatgaatatacaccttgtgccaaaagt

SEQ ID NO: 687511 - DNA, 33 bp, Homo sapien
caagcaaacctgggcacatggccaacctaagta

SEQ ID NO: 687512 - DNA, 33 bp, Homo sapien
caagcaaacctgggcagatggccaacctaagta

SEQ ID NO: 687513 - DNA, 33 bp, Homo sapien
ttggtagtcaggaagacctgagttcaagttcag

SEQ ID NO: 687514 - DNA, 33 bp, Homo sapien
ttggtagtcaggaagatctgagttcaagttcag

SEQ ID NO: 687515 - DNA, 33 bp, Homo sapien
tatggcatttgtccaccgtcacaagtccaagga

SEQ ID NO: 687516 - DNA, 33 bp, Homo sapien
tatggcatttgtccactgtcacaagtccaagga

SEQ ID NO: 687517 - DNA, 33 bp, Homo sapien
gagccttataatcagacggtgtaagcttccctg

SEQ ID NO: 687518 - DNA, 33 bp, Homo sapien
gagccttataatcagatggtgtaagcttccctg

SEQ ID NO: 687519 - DNA, 33 bp, Homo sapien
tatttgctcaaaggacgcacagaaacattatct

SEQ ID NO: 687520 - DNA, 33 bp, Homo sapien
tatttgctcaaaggactcacagaaacattatct

SEQ ID NO: 687521 - DNA, 33 bp, Homo sapien
ttagcctcagttgaaaacacagcatctcaggaa

SEQ ID NO: 687522 - DNA, 33 bp, Homo sapien
ttagcctcagttgaaagcacagcatctcaggaa

SEQ ID NO: 687523 - DNA, 33 bp, Homo sapien
tgatctgggaattagacaagctgaaggagtgat

SEQ ID NO: 687524 - DNA, 33 bp, Homo sapien
tgatctgggaattagataagctgaaggagtgat

SEQ ID NO: 687525 - DNA, 33 bp, Homo sapien
attaagtttgtttctcactctaaacatctgaga

SEQ ID NO: 687526 - DNA, 33 bp, Homo sapien
attaagtttgtttctcgctctaaacatctgaga

SEQ ID NO: 687527 - DNA, 33 bp, Homo sapien
cagtagctgcataaataacaagttcactttaga

SEQ ID NO: 687528 - DNA, 33 bp, Homo sapien
cagtagctgcataaatgacaagttcactttaga

SEQ ID NO: 687529 - DNA, 33 bp, Homo sapien
tcaaacaatgacaatagatcttgggcacattgc

SEQ ID NO: 687530 - DNA, 33 bp, Homo sapien
tcaaacaatgacaatatatcttgggcacattgc

SEQ ID NO: 687531 - DNA, 33 bp, Homo sapien
tgttactaggcctcacagtacccagttcctaag

SEQ ID NO: 687532 - DNA, 33 bp, Homo sapien
tgttactaggcctcacggtacccagttcctaag

SEQ ID NO: 687533 - DNA, 33 bp, Homo sapien
aaatatgtgactcacccaaattgctattactgg

SEQ ID NO: 687534 - DNA, 33 bp, Homo sapien
aaatatgtgactcaccgaaattgctattactgg

SEQ ID NO: 687535 - DNA, 33 bp, Homo sapien
aactttcctggacctcaactatttaatgaaagt

SEQ ID NO: 687536 - DNA, 33 bp, Homo sapien
aactttcctggacctcgactatttaatgaaagt

SEQ ID NO: 687537 - DNA, 33 bp, Homo sapien
ggtcacatacgtgtataacattctgccaatggg

SEQ ID NO: 687538 - DNA, 33 bp, Homo sapien
ggtcacatacgtgtatgacattctgccaatggg

SEQ ID NO: 687539 - DNA, 33 bp, Homo sapien
gtggtcatgggaacaacgcctaacctctattct

SEQ ID NO: 687540 - DNA, 33 bp, Homo sapien
gtggtcatgggaacaatgcctaacctctattct

SEQ ID NO: 687541 - DNA, 33 bp, Homo sapien
tgcctactctgtaggaatcatataaatggagtt

SEQ ID NO: 687542 - DNA, 33 bp, Homo sapien
tgcctactctgtaggattcatataaatggagtt

SEQ ID NO: 687543 - DNA, 33 bp, Homo sapien
cacagttagcagatgaacaaagagactaattca

SEQ ID NO: 687544 - DNA, 33 bp, Homo sapien
cacagttagcagatgaccaaagagactaattca

SEQ ID NO: 687545 - DNA, 33 bp, Homo sapien
gcacgggcaaagtagaaactcgtaccttgtgat

SEQ ID NO: 687546 - DNA, 33 bp, Homo sapien
gcacgggcaaagtagagactcgtaccttgtgat

SEQ ID NO: 687547 - DNA, 33 bp, Homo sapien
acatcttaagatcaaaattctcaggacaagata

SEQ ID NO: 687548 - DNA, 33 bp, Homo sapien
acatcttaagatcaaatttctcaggacaagata

SEQ ID NO: 687549 - DNA, 33 bp, Homo sapien
ttgagcacttcattgcaagtcctggaaattcag

SEQ ID NO: 687550 - DNA, 33 bp, Homo sapien
ttgagcacttcattgcgagtcctggaaattcag

SEQ ID NO: 687551 - DNA, 33 bp, Homo sapien
tttcaaggtatcctaaggtgattttaagagcta

SEQ ID NO: 687552 - DNA, 33 bp, Homo sapien
tttcaaggtatcctaatgtgattttaagagcta

SEQ ID NO: 687553 - DNA, 33 bp, Homo sapien
ctaatcatgtccttaaacacaagcaaaatagtc

SEQ ID NO: 687554 - DNA, 33 bp, Homo sapien
ctaatcatgtccttaagcacaagcaaaatagtc

SEQ ID NO: 687555 - DNA, 33 bp, Homo sapien
agccaggtgagaatgggatttcaaggaagaaga

SEQ ID NO: 687556 - DNA, 33 bp, Homo sapien
agccaggtgagaatggtatttcaaggaagaaga

SEQ ID NO: 687557 - DNA, 33 bp, Homo sapien
tcagtggatgtgtgccaatctcctgaaactcca

SEQ ID NO: 687558 - DNA, 33 bp, Homo sapien
tcagtggatgtgtgccgatctcctgaaactcca

SEQ ID NO: 687559 - DNA, 33 bp, Homo sapien
aggatcttgtctgaataactgtttgaagaatct

SEQ ID NO: 687560 - DNA, 33 bp, Homo sapien
aggatcttgtctgaatgactgtttgaagaatct

SEQ ID NO: 687561 - DNA, 33 bp, Homo sapien
gtgatactctgtcacaaaattaacaacagattg

SEQ ID NO: 687562 - DNA, 33 bp, Homo sapien
gtgatactctgtcacagaattaacaacagattg

SEQ ID NO: 687563 - DNA, 33 bp, Homo sapien
tgaggaaggtggtctgcaagacttaggattgca

SEQ ID NO: 687564 - DNA, 33 bp, Homo sapien
tgaggaaggtggtctggaagacttaggattgca

SEQ ID NO: 687565 - DNA, 33 bp, Homo sapien
tttgctaatcggttcaatacagcctgagtaaaa

SEQ ID NO: 687566 - DNA, 33 bp, Homo sapien
tttgctaatcggttcagtacagcctgagtaaaa

SEQ ID NO: 687567 - DNA, 33 bp, Homo sapien
tttgtctatttattaacgctttgtaccaaccat

SEQ ID NO: 687568 - DNA, 33 bp, Homo sapien
tttgtctatttattaatgctttgtaccaaccat

SEQ ID NO: 687569 - DNA, 33 bp, Homo sapien
ctgtgagtataatgaacgctcagttatggatat

SEQ ID NO: 687570 - DNA, 33 bp, Homo sapien
ctgtgagtataatgaatgctcagttatggatat

SEQ ID NO: 687571 - DNA, 33 bp, Homo sapien
gtagattctatagttgaacaaagtgtcatgagt

SEQ ID NO: 687572 - DNA, 33 bp, Homo sapien
gtagattctatagttgcacaaagtgtcatgagt

SEQ ID NO: 687573 - DNA, 33 bp, Homo sapien
ttcagcattccttctccagtctaatagaactct

SEQ ID NO: 687574 - DNA, 33 bp, Homo sapien
ttcagcattccttctctagtctaatagaactct

SEQ ID NO: 687575 - DNA, 33 bp, Homo sapien
ggagaggaactgggagaaacaaatggagagctt

SEQ ID NO: 687576 - DNA, 33 bp, Homo sapien
ggagaggaactgggaggaacaaatggagagctt

SEQ ID NO: 687577 - DNA, 33 bp, Homo sapien
caagagcctcctgaaacataacaggtcaaatgg

SEQ ID NO: 687578 - DNA, 33 bp, Homo sapien
caagagcctcctgaaatataacaggtcaaatgg

SEQ ID NO: 687579 - DNA, 33 bp, Homo sapien
ctacacgtttcactcaacttctgcatttgtgaa

SEQ ID NO: 687580 - DNA, 33 bp, Homo sapien
ctacacgtttcactcagcttctgcatttgtgaa

SEQ ID NO: 687581 - DNA, 33 bp, Homo sapien
tgaatgaatgaatgcacaaatccccatcatttc

SEQ ID NO: 687582 - DNA, 33 bp, Homo sapien
tgaatgaatgaatgcagaaatccccatcatttc

SEQ ID NO: 687583 - DNA, 33 bp, Homo sapien
atacagacttgaaaaacctgatcaagctgtatc

SEQ ID NO: 687584 - DNA, 33 bp, Homo sapien
atacagacttgaaaaatctgatcaagctgtatc

SEQ ID NO: 687585 - DNA, 33 bp, Homo sapien
aggaggctagtgtcaaatagcgctgccaagtgt

SEQ ID NO: 687586 - DNA, 33 bp, Homo sapien
aggaggctagtgtcaagtagcgctgccaagtgt

SEQ ID NO: 687587 - DNA, 33 bp, Homo sapien
tttcctgcaatgaagacagattgattcagaaat

SEQ ID NO: 687588 - DNA, 33 bp, Homo sapien
tttcctgcaatgaagagagattgattcagaaat

SEQ ID NO: 687589 - DNA, 33 bp, Homo sapien
tatcaagggttagagcactatagaatgcctttt

SEQ ID NO: 687590 - DNA, 33 bp, Homo sapien
tatcaagggttagagcgctatagaatgcctttt

SEQ ID NO: 687591 - DNA, 33 bp, Homo sapien
ttaagtgaagttataaaacaaggtgcataattt

SEQ ID NO: 687592 - DNA, 33 bp, Homo sapien
ttaagtgaagttataagacaaggtgcataattt

SEQ ID NO: 687593 - DNA, 33 bp, Homo sapien
tatcttaagaacataaacatggctgaataatat

SEQ ID NO: 687594 - DNA, 33 bp, Homo sapien
tatcttaagaacataatcatggctgaataatat

SEQ ID NO: 687595 - DNA, 33 bp, Homo sapien
agagtctcacggtaaacataaaagtcaactgcc

SEQ ID NO: 687596 - DNA, 33 bp, Homo sapien
agagtctcacggtaaatataaaagtcaactgcc

SEQ ID NO: 687597 - DNA, 33 bp, Homo sapien
aacatggagcactactaaaaggtcagagtccta

SEQ ID NO: 687598 - DNA, 33 bp, Homo sapien
aacatggagcactactgaaaggtcagagtccta

SEQ ID NO: 687599 - DNA, 33 bp, Homo sapien
aatctgtaagtatgagaatgctgtcttgggggc

SEQ ID NO: 687600 - DNA, 33 bp, Homo sapien
aatctgtaagtatgaggatgctgtcttgggggc

SEQ ID NO: 687601 - DNA, 33 bp, Homo sapien
acaggcattgtgctaaataagagctttaaccag

SEQ ID NO: 687602 - DNA, 33 bp, Homo sapien
acaggcattgtgctaagtaagagctttaaccag

SEQ ID NO: 687603 - DNA, 33 bp, Homo sapien
acaatatttttggaaacagggtacgcctgcccc

SEQ ID NO: 687604 - DNA, 33 bp, Homo sapien
acaatatttttggaaatagggtacgcctgcccc

SEQ ID NO: 687605 - DNA, 33 bp, Homo sapien
ctggcaaagtcacctcaagagaacaggaacatg

SEQ ID NO: 687606 - DNA, 33 bp, Homo sapien
ctggcaaagtcacctcgagagaacaggaacatg

SEQ ID NO: 687607 - DNA, 33 bp, Homo sapien
gctctatcactgaatacatgcaagccttgaaaa

SEQ ID NO: 687608 - DNA, 33 bp, Homo sapien
gctctatcactgaatagatgcaagccttgaaaa

SEQ ID NO: 687609 - DNA, 33 bp, Homo sapien
gcaggtgaaatacaagacattcggttaaatttg

SEQ ID NO: 687610 - DNA, 33 bp, Homo sapien
gcaggtgaaatacaaggcattcggttaaatttg

SEQ ID NO: 687611 - DNA, 33 bp, Homo sapien
gaaatttgaacagggcaaactcattaccaaaac

SEQ ID NO: 687612 - DNA, 33 bp, Homo sapien
gaaatttgaacagggcgaactcattaccaaaac

SEQ ID NO: 687613 - DNA, 33 bp, Homo sapien
agcatataaagtgctaatagatcaagccagatg

SEQ ID NO: 687614 - DNA, 33 bp, Homo sapien
agcatataaagtgctagtagatcaagccagatg

SEQ ID NO: 687615 - DNA, 33 bp, Homo sapien
ccaggtctcttaggccaaaactagtcccatgag

SEQ ID NO: 687616 - DNA, 33 bp, Homo sapien
ccaggtctcttaggccgaaactagtcccatgag

SEQ ID NO: 687617 - DNA, 33 bp, Homo sapien
agctatcataatggagaaaccttgtgattttgc

SEQ ID NO: 687618 - DNA, 33 bp, Homo sapien
agctatcataatggaggaaccttgtgattttgc

SEQ ID NO: 687619 - DNA, 33 bp, Homo sapien
caaccaggtttctgaacggatcaaaggtattat

SEQ ID NO: 687620 - DNA, 33 bp, Homo sapien
caaccaggtttctgaatggatcaaaggtattat

SEQ ID NO: 687621 - DNA, 33 bp, Homo sapien
agtgagtgaagggcaacgtgctacccactttca

SEQ ID NO: 687622 - DNA, 33 bp, Homo sapien
agtgagtgaagggcaaggtgctacccactttca

SEQ ID NO: 687623 - DNA, 33 bp, Homo sapien
caggctttggaactgacctacactggaattcca

SEQ ID NO: 687624 - DNA, 33 bp, Homo sapien
caggctttggaactgagctacactggaattcca

SEQ ID NO: 687625 - DNA, 33 bp, Homo sapien
ttataagattgcttggaacattacacataatct

SEQ ID NO: 687626 - DNA, 33 bp, Homo sapien
ttataagattgcttgggacattacacataatct

SEQ ID NO: 687627 - DNA, 33 bp, Homo sapien
aagagaggatgagttacggaggtaaaggtaatg

SEQ ID NO: 687628 - DNA, 33 bp, Homo sapien
aagagaggatgagttagggaggtaaaggtaatg

SEQ ID NO: 687629 - DNA, 33 bp, Homo sapien
gctacagatgaaataaacaagtcaaagtctatt

SEQ ID NO: 687630 - DNA, 33 bp, Homo sapien
gctacagatgaaataagcaagtcaaagtctatt

SEQ ID NO: 687631 - DNA, 33 bp, Homo sapien
gttttagctgatttataagaccccattccctca

SEQ ID NO: 687632 - DNA, 33 bp, Homo sapien
gttttagctgatttatgagaccccattccctca

SEQ ID NO: 687633 - DNA, 33 bp, Homo sapien
aaaatgcctctgcatcacctaatcttgcatacg

SEQ ID NO: 687634 - DNA, 33 bp, Homo sapien
aaaatgcctctgcatcgcctaatcttgcatacg

SEQ ID NO: 687635 - DNA, 33 bp, Homo sapien
catttgcagtagataaactggaatactgagaac

SEQ ID NO: 687636 - DNA, 33 bp, Homo sapien
catttgcagtagataacctggaatactgagaac

SEQ ID NO: 687637 - DNA, 33 bp, Homo sapien
tggcttcttgtactggccatccactatttagta

SEQ ID NO: 687638 - DNA, 33 bp, Homo sapien
tggcttcttgtactggtcatccactatttagta

SEQ ID NO: 687639 - DNA, 33 bp, Homo sapien
taatgatgtgtttctccgaaaatattaatatac

SEQ ID NO: 687640 - DNA, 33 bp, Homo sapien
taatgatgtgtttctctgaaaatattaatatac

SEQ ID NO: 687641 - DNA, 33 bp, Homo sapien
gcatatttgaatatttaaaagtggtgccctgaa

SEQ ID NO: 687642 - DNA, 33 bp, Homo sapien
gcatatttgaatatttgaaagtggtgccctgaa

SEQ ID NO: 687643 - DNA, 33 bp, Homo sapien
tagaccagcagaaacaagtatgagagatgttta

SEQ ID NO: 687644 - DNA, 33 bp, Homo sapien
tagaccagcagaaacaggtatgagagatgttta

SEQ ID NO: 687645 - DNA, 33 bp, Homo sapien
aaatggtagaattatcaaaatgtggtgcctact

SEQ ID NO: 687646 - DNA, 33 bp, Homo sapien
aaatggtagaattatcgaaatgtggtgcctact

SEQ ID NO: 687647 - DNA, 33 bp, Homo sapien
aggaaatctttatgaacgacaatgtcataaaca

SEQ ID NO: 687648 - DNA, 33 bp, Homo sapien
aggaaatctttatgaaggacaatgtcataaaca

SEQ ID NO: 687649 - DNA, 33 bp, Homo sapien
tgtttgtttttgagacaagatgactctctgtca

SEQ ID NO: 687650 - DNA, 33 bp, Homo sapien
tgtttgtttttgagacgagatgactctctgtca

SEQ ID NO: 687651 - DNA, 33 bp, Homo sapien
aactctttcttcttgcacaaatcttttcttttt

SEQ ID NO: 687652 - DNA, 33 bp, Homo sapien
aactctttcttcttgcgcaaatcttttcttttt

SEQ ID NO: 687653 - DNA, 33 bp, Homo sapien
ttgagtaaaaatccaaagtgttctcttatatac

SEQ ID NO: 687654 - DNA, 33 bp, Homo sapien
ttgagtaaaaatccaaggtgttctcttatatac

SEQ ID NO: 687655 - DNA, 33 bp, Homo sapien
cacccagatacaaggaacattatgttgggtgaa

SEQ ID NO: 687656 - DNA, 33 bp, Homo sapien
cacccagatacaaggaccattatgttgggtgaa

SEQ ID NO: 687657 - DNA, 33 bp, Homo sapien
cctaggttccaatagccactatcccaagagcag

SEQ ID NO: 687658 - DNA, 33 bp, Homo sapien
cctaggttccaatagctactatcccaagagcag

SEQ ID NO: 687659 - DNA, 33 bp, Homo sapien
gtttctcaatgctacagtaggaaatggatgaga

SEQ ID NO: 687660 - DNA, 33 bp, Homo sapien
gtttctcaatgctacattaggaaatggatgaga

SEQ ID NO: 687661 - DNA, 33 bp, Homo sapien
tgaaaaggagtaaccacgatttcccatttcaca

SEQ ID NO: 687662 - DNA, 33 bp, Homo sapien
tgaaaaggagtaaccatgatttcccatttcaca

SEQ ID NO: 687663 - DNA, 33 bp, Homo sapien
ttcagcaccagtaatacgttggcacaaaagcct

SEQ ID NO: 687664 - DNA, 33 bp, Homo sapien
ttcagcaccagtaataggttggcacaaaagcct

SEQ ID NO: 687665 - DNA, 33 bp, Homo sapien
agtcttagcttggtccaaagaagctcagttcag

SEQ ID NO: 687666 - DNA, 33 bp, Homo sapien
agtcttagcttggtccgaagaagctcagttcag

SEQ ID NO: 687667 - DNA, 33 bp, Homo sapien
ttatgagtaatgatgacgccagagtagcaagtt

SEQ ID NO: 687668 - DNA, 33 bp, Homo sapien
ttatgagtaatgatgatgccagagtagcaagtt

SEQ ID NO: 687669 - DNA, 33 bp, Homo sapien
tatgatggggttgtacgggagtagagcaggcct

SEQ ID NO: 687670 - DNA, 33 bp, Homo sapien
tatgatggggttgtactggagtagagcaggcct

SEQ ID NO: 687671 - DNA, 33 bp, Homo sapien
gttgaagtcttaccaccaaataccgcagaatag

SEQ ID NO: 687672 - DNA, 33 bp, Homo sapien
gttgaagtcttaccactaaataccgcagaatag

SEQ ID NO: 687673 - DNA, 33 bp, Homo sapien
cttctttccttatgccaaaaaaaatatatttgc

SEQ ID NO: 687674 - DNA, 33 bp, Homo sapien
cttctttccttatgccgaaaaaaatatatttgc

SEQ ID NO: 687675 - DNA, 33 bp, Homo sapien
atcattttgtgggtcacgaatccgggagtggct

SEQ ID NO: 687676 - DNA, 33 bp, Homo sapien
atcattttgtgggtcatgaatccgggagtggct

SEQ ID NO: 687677 - DNA, 33 bp, Homo sapien
atggatgtttatgacagtatttcaaattaattg

SEQ ID NO: 687678 - DNA, 33 bp, Homo sapien
atggatgtttatgacattatttcaaattaattg

SEQ ID NO: 687679 - DNA, 33 bp, Homo sapien
aaagcaaatagaaacaatggaatgttcacagtg

SEQ ID NO: 687680 - DNA, 33 bp, Homo sapien
aaagcaaatagaaacagtggaatgttcacagtg

SEQ ID NO: 687681 - DNA, 33 bp, Homo sapien
agggtctcccctgctccctgtgttagcctttat

SEQ ID NO: 687682 - DNA, 33 bp, Homo sapien
agggtctcccctgctcgctgtgttagcctttat

SEQ ID NO: 687683 - DNA, 33 bp, Homo sapien
atgcaaaaattgttgacaaccacttgaatacta

SEQ ID NO: 687684 - DNA, 33 bp, Homo sapien
atgcaaaaattgttgataaccacttgaatacta

SEQ ID NO: 687685 - DNA, 33 bp, Homo sapien
ttttaccccatgagatcatccagtcaaaaggcg

SEQ ID NO: 687686 - DNA, 33 bp, Homo sapien
ttttaccccatgagattatccagtcaaaaggcg

SEQ ID NO: 687687 - DNA, 33 bp, Homo sapien
ggttgagctttgaagacgacctgagcaccattt

SEQ ID NO: 687688 - DNA, 33 bp, Homo sapien
ggttgagctttgaagatgacctgagcaccattt

SEQ ID NO: 687689 - DNA, 33 bp, Homo sapien
cctgtggtgagcatcactcttgctgggcagagg

SEQ ID NO: 687690 - DNA, 33 bp, Homo sapien
cctgtggtgagcatcagtcttgctgggcagagg

SEQ ID NO: 687691 - DNA, 33 bp, Homo sapien
cagcatagcccacctgcaaaactgagctggtgg

SEQ ID NO: 687692 - DNA, 33 bp, Homo sapien
cagcatagcccacctggaaaactgagctggtgg

SEQ ID NO: 687693 - DNA, 33 bp, Homo sapien
ccactggcaggtacacagggccaccacaaagat

SEQ ID NO: 687694 - DNA, 33 bp, Homo sapien
ccactggcaggtacactgggccaccacaaagat

SEQ ID NO: 687695 - DNA, 33 bp, Homo sapien
tttctgagaagtgtctcaaaacatgagaaagac

SEQ ID NO: 687696 - DNA, 33 bp, Homo sapien
tttctgagaagtgtcttaaaacatgagaaagac

SEQ ID NO: 687697 - DNA, 33 bp, Homo sapien
ccgtcagtttctaagaaagagcgatccaaagat

SEQ ID NO: 687698 - DNA, 33 bp, Homo sapien
ccgtcagtttctaagagagagcgatccaaagat

SEQ ID NO: 687699 - DNA, 33 bp, Homo sapien
ttggaaagagctcttcaataatctagttggtgg

SEQ ID NO: 687700 - DNA, 33 bp, Homo sapien
ttggaaagagctcttcgataatctagttggtgg

SEQ ID NO: 687701 - DNA, 33 bp, Homo sapien
gattactgagatttagcattttaagtggtgatg

SEQ ID NO: 687702 - DNA, 33 bp, Homo sapien
gattactgagatttaggattttaagtggtgatg

SEQ ID NO: 687703 - DNA, 33 bp, Homo sapien
aatctatctataccaacggcacaagaaggacta

SEQ ID NO: 687704 - DNA, 33 bp, Homo sapien
aatctatctataccaatggcacaagaaggacta

SEQ ID NO: 687705 - DNA, 33 bp, Homo sapien
tttaaaaaatgagttcaagcaaatttaaagcac

SEQ ID NO: 687706 - DNA, 33 bp, Homo sapien
tttaaaaaatgagttccagcaaatttaaagcac

SEQ ID NO: 687707 - DNA, 33 bp, Homo sapien
ctgatttgaaagcaagactccttttgtatataa

SEQ ID NO: 687708 - DNA, 33 bp, Homo sapien
ctgatttgaaagcaagtctccttttgtatataa

SEQ ID NO: 687709 - DNA, 33 bp, Homo sapien
gttgtcaaggctgtaagctcattccccaaaatg

SEQ ID NO: 687710 - DNA, 33 bp, Homo sapien
gttgtcaaggctgtaatctcattccccaaaatg

SEQ ID NO: 687711 - DNA, 33 bp, Homo sapien
caaattgatcaaaatacggtatttcagaaggat

SEQ ID NO: 687712 - DNA, 33 bp, Homo sapien
caaattgatcaaaatatggtatttcagaaggat

SEQ ID NO: 687713 - DNA, 33 bp, Homo sapien
tcaacgttttgtagagaaaatctggagttgtgg

SEQ ID NO: 687714 - DNA, 33 bp, Homo sapien
tcaacgttttgtagagtaaatctggagttgtgg

SEQ ID NO: 687715 - DNA, 33 bp, Homo sapien
ctctctggtagttatgaaagtactgggatcctt

SEQ ID NO: 687716 - DNA, 33 bp, Homo sapien
ctctctggtagttatggaagtactgggatcctt

SEQ ID NO: 687717 - DNA, 33 bp, Homo sapien
agggcaagtgactcaaaggatggcagtcttcat

SEQ ID NO: 687718 - DNA, 33 bp, Homo sapien
agggcaagtgactcaagggatggcagtcttcat

SEQ ID NO: 687719 - DNA, 33 bp, Homo sapien
acctgcagtaacctgccatggtcaaaatagtcc

SEQ ID NO: 687720 - DNA, 33 bp, Homo sapien
acctgcagtaacctgcgatggtcaaaatagtcc

SEQ ID NO: 687721 - DNA, 33 bp, Homo sapien
ttaacatagtgtgccacgtattcctagaatctc

SEQ ID NO: 687722 - DNA, 33 bp, Homo sapien
ttaacatagtgtgccatgtattcctagaatctc

SEQ ID NO: 687723 - DNA, 33 bp, Homo sapien
cgattatgtgttcagacgtcacctactgtaggc

SEQ ID NO: 687724 - DNA, 33 bp, Homo sapien
cgattatgtgttcagatgtcacctactgtaggc

SEQ ID NO: 687725 - DNA, 33 bp, Homo sapien
attagataagccttaaaaagcgtcattcttcac

SEQ ID NO: 687726 - DNA, 33 bp, Homo sapien
attagataagccttaagaagcgtcattcttcac

SEQ ID NO: 687727 - DNA, 33 bp, Homo sapien
ctcatcaaaacttccaagctgtcttctgaaagt

SEQ ID NO: 687728 - DNA, 33 bp, Homo sapien
ctcatcaaaacttccaggctgtcttctgaaagt

SEQ ID NO: 687729 - DNA, 33 bp, Homo sapien
ttaacctcacaaagaactagcttcctaaaataa

SEQ ID NO: 687730 - DNA, 33 bp, Homo sapien
ttaacctcacaaagaattagcttcctaaaataa

SEQ ID NO: 687731 - DNA, 33 bp, Homo sapien
gacttctgagtaatcaatctatgaaatgaacaa

SEQ ID NO: 687732 - DNA, 33 bp, Homo sapien
gacttctgagtaatcagtctatgaaatgaacaa

SEQ ID NO: 687733 - DNA, 33 bp, Homo sapien
attagcaaaattgatcacttaatggtagttcgt

SEQ ID NO: 687734 - DNA, 33 bp, Homo sapien
attagcaaaattgatcgcttaatggtagttcgt

SEQ ID NO: 687735 - DNA, 33 bp, Homo sapien
aacaagatagaccaaaagacactcgtagctcca

SEQ ID NO: 687736 - DNA, 33 bp, Homo sapien
aacaagatagaccaaaggacactcgtagctcca

SEQ ID NO: 687737 - DNA, 33 bp, Homo sapien
ggggcttctcaacagaaaagactgtctttatga

SEQ ID NO: 687738 - DNA, 33 bp, Homo sapien
ggggcttctcaacagacaagactgtctttatga

SEQ ID NO: 687739 - DNA, 33 bp, Homo sapien
catactgttccctctcaaccagatcttagtaaa

SEQ ID NO: 687740 - DNA, 33 bp, Homo sapien
catactgttccctctcgaccagatcttagtaaa

SEQ ID NO: 687741 - DNA, 33 bp, Homo sapien
ttccaattttctgactcaaattaatcacacata

SEQ ID NO: 687742 - DNA, 33 bp, Homo sapien
ttccaattttctgactgaaattaatcacacata

SEQ ID NO: 687743 - DNA, 33 bp, Homo sapien
gcaaaactcagctcaaataacatctattatgag

SEQ ID NO: 687744 - DNA, 33 bp, Homo sapien
gcaaaactcagctcaagtaacatctattatgag

SEQ ID NO: 687745 - DNA, 33 bp, Homo sapien
caagacttgatagtggaaacattcagattattg

SEQ ID NO: 687746 - DNA, 33 bp, Homo sapien
caagacttgatagtggcaacattcagattattg

SEQ ID NO: 687747 - DNA, 33 bp, Homo sapien
aggaagagctaagtataacagggctttttatct

SEQ ID NO: 687748 - DNA, 33 bp, Homo sapien
aggaagagctaagtattacagggctttttatct

SEQ ID NO: 687749 - DNA, 33 bp, Homo sapien
tgtcacactgtgcagaaaacggtctatgacatt

SEQ ID NO: 687750 - DNA, 33 bp, Homo sapien
tgtcacactgtgcagacaacggtctatgacatt

SEQ ID NO: 687751 - DNA, 33 bp, Homo sapien
acagcctaatttagaaacacttgccctcatggt

SEQ ID NO: 687752 - DNA, 33 bp, Homo sapien
acagcctaatttagaaccacttgccctcatggt

SEQ ID NO: 687753 - DNA, 33 bp, Homo sapien
atttcacttatgaaaacgaaccaactctagaaa

SEQ ID NO: 687754 - DNA, 33 bp, Homo sapien
atttcacttatgaaaatgaaccaactctagaaa

SEQ ID NO: 687755 - DNA, 33 bp, Homo sapien
gtcctggtgaagattaagttataggaagaggaa

SEQ ID NO: 687756 - DNA, 33 bp, Homo sapien
gtcctggtgaagattacgttataggaagaggaa

SEQ ID NO: 687757 - DNA, 33 bp, Homo sapien
acatacctgaaagtgcaaccaaatggaaattcc

SEQ ID NO: 687758 - DNA, 33 bp, Homo sapien
acatacctgaaagtgctaccaaatggaaattcc

SEQ ID NO: 687759 - DNA, 33 bp, Homo sapien
atgcatcacatttttcaattttcacaacccttt

SEQ ID NO: 687760 - DNA, 33 bp, Homo sapien
atgcatcacatttttcgattttcacaacccttt

SEQ ID NO: 687761 - DNA, 33 bp, Homo sapien
gtatttcaaaaaaacaaatgatcctggtattct

SEQ ID NO: 687762 - DNA, 33 bp, Homo sapien
gtatttcaaaaaaacacatgatcctggtattct

SEQ ID NO: 687763 - DNA, 33 bp, Homo sapien
aatttctattttactgcaagagtcagatcatag

SEQ ID NO: 687764 - DNA, 33 bp, Homo sapien
aatttctattttactgtaagagtcagatcatag

SEQ ID NO: 687765 - DNA, 33 bp, Homo sapien
caaccactaaggagacaggatattgagttccca

SEQ ID NO: 687766 - DNA, 33 bp, Homo sapien
caaccactaaggagacgggatattgagttccca

SEQ ID NO: 687767 - DNA, 33 bp, Homo sapien
agccaaggtatcatagaaaatgctcaataagga

SEQ ID NO: 687768 - DNA, 33 bp, Homo sapien
agccaaggtatcatagcaaatgctcaataagga

SEQ ID NO: 687769 - DNA, 33 bp, Homo sapien
gtgacttccttcagagaatccttattgagcatt

SEQ ID NO: 687770 - DNA, 33 bp, Homo sapien
gtgacttccttcagaggatccttattgagcatt

SEQ ID NO: 687771 - DNA, 33 bp, Homo sapien
taactaaagtgagactaaaccaatacatgtgca

SEQ ID NO: 687772 - DNA, 33 bp, Homo sapien
taactaaagtgagactgaaccaatacatgtgca

SEQ ID NO: 687773 - DNA, 33 bp, Homo sapien
aaataaattttgttcccagtgagcaaccaaagt

SEQ ID NO: 687774 - DNA, 33 bp, Homo sapien
aaataaattttgttcctagtgagcaaccaaagt

SEQ ID NO: 687775 - DNA, 33 bp, Homo sapien
tggtgccacgaactcaaaatgtcttgcagaatt

SEQ ID NO: 687776 - DNA, 33 bp, Homo sapien
tggtgccacgaactcagaatgtcttgcagaatt

SEQ ID NO: 687777 - DNA, 33 bp, Homo sapien
aacagagtggaggagaagatgttaatcaattaa

SEQ ID NO: 687778 - DNA, 33 bp, Homo sapien
aacagagtggaggagacgatgttaatcaattaa

SEQ ID NO: 687779 - DNA, 33 bp, Homo sapien
ggaaacagagatcatcacagagcagtggtggaa

SEQ ID NO: 687780 - DNA, 33 bp, Homo sapien
ggaaacagagatcatcgcagagcagtggtggaa

SEQ ID NO: 687781 - DNA, 33 bp, Homo sapien
atataataccatctcaatacattttaacaacat

SEQ ID NO: 687782 - DNA, 33 bp, Homo sapien
atataataccatctcagtacattttaacaacat

SEQ ID NO: 687783 - DNA, 33 bp, Homo sapien
aagcagaacaagataaaatctctgtgtgagtgt

SEQ ID NO: 687784 - DNA, 33 bp, Homo sapien
aagcagaacaagataagatctctgtgtgagtgt

SEQ ID NO: 687785 - DNA, 33 bp, Homo sapien
gctttactaggaatgcaatgaaattcaaccagg

SEQ ID NO: 687786 - DNA, 33 bp, Homo sapien
gctttactaggaatgcgatgaaattcaaccagg

SEQ ID NO: 687787 - DNA, 33 bp, Homo sapien
tgagtttatgtgggtgaaccctaatacaagatg

SEQ ID NO: 687788 - DNA, 33 bp, Homo sapien
tgagtttatgtgggtggaccctaatacaagatg

SEQ ID NO: 687789 - DNA, 33 bp, Homo sapien
agcttgccggggcaggcacactctaacatacta

SEQ ID NO: 687790 - DNA, 33 bp, Homo sapien
agcttgccggggcagggacactctaacatacta

SEQ ID NO: 687791 - DNA, 33 bp, Homo sapien
ttaggctgtacatatcaagcaacttctatgtgc

SEQ ID NO: 687792 - DNA, 33 bp, Homo sapien
ttaggctgtacatatcgagcaacttctatgtgc

SEQ ID NO: 687793 - DNA, 33 bp, Homo sapien
tatacatgatttatataacaccatccaagcttg

SEQ ID NO: 687794 - DNA, 33 bp, Homo sapien
tatacatgatttatattacaccatccaagcttg

SEQ ID NO: 687795 - DNA, 33 bp, Homo sapien
cccaggatattttccaactaaatttagacttcc

SEQ ID NO: 687796 - DNA, 33 bp, Homo sapien
cccaggatattttccacctaaatttagacttcc

SEQ ID NO: 687797 - DNA, 33 bp, Homo sapien
agtcatgtagtttaaacacttcggctattattt

SEQ ID NO: 687798 - DNA, 33 bp, Homo sapien
agtcatgtagtttaaatacttcggctattattt

SEQ ID NO: 687799 - DNA, 33 bp, Homo sapien
agacttgctacttttgaaaagagagaaaggtat

SEQ ID NO: 687800 - DNA, 33 bp, Homo sapien
agacttgctacttttggaaagagagaaaggtat

SEQ ID NO: 687801 - DNA, 33 bp, Homo sapien
tttcagccactactaacagatttttattttttt

SEQ ID NO: 687802 - DNA, 33 bp, Homo sapien
tttcagccactactaagagatttttattttttt

SEQ ID NO: 687803 - DNA, 33 bp, Homo sapien
tcaaaccacatcagtgacaaacttggatattta

SEQ ID NO: 687804 - DNA, 33 bp, Homo sapien
tcaaaccacatcagtggcaaacttggatattta

SEQ ID NO: 687805 - DNA, 33 bp, Homo sapien
tattaatctttaacccaagtgctttcctaagga

SEQ ID NO: 687806 - DNA, 33 bp, Homo sapien
tattaatctttaacccgagtgctttcctaagga

SEQ ID NO: 687807 - DNA, 33 bp, Homo sapien
ccactacaagtatttacgcagaaggctttgttt

SEQ ID NO: 687808 - DNA, 33 bp, Homo sapien
ccactacaagtatttatgcagaaggctttgttt

SEQ ID NO: 687809 - DNA, 33 bp, Homo sapien
agattgctgagtattaacttcgtgaatataaat

SEQ ID NO: 687810 - DNA, 33 bp, Homo sapien
agattgctgagtattatcttcgtgaatataaat

SEQ ID NO: 687811 - DNA, 33 bp, Homo sapien
cctctaccacattatgaaaagtacccgcagaac

SEQ ID NO: 687812 - DNA, 33 bp, Homo sapien
cctctaccacattatggaaagtacccgcagaac

SEQ ID NO: 687813 - DNA, 33 bp, Homo sapien
agaccaaattctacaaccacagccaggccctcg

SEQ ID NO: 687814 - DNA, 33 bp, Homo sapien
agaccaaattctacaatcacagccaggccctcg

SEQ ID NO: 687815 - DNA, 33 bp, Homo sapien
gacacttcttgaggcccggaacacccaaaaagg

SEQ ID NO: 687816 - DNA, 33 bp, Homo sapien
gacacttcttgaggcctggaacacccaaaaagg

SEQ ID NO: 687817 - DNA, 33 bp, Homo sapien
gctgtgttaaggtcagaaagaaattcagagaca

SEQ ID NO: 687818 - DNA, 33 bp, Homo sapien
gctgtgttaaggtcaggaagaaattcagagaca

SEQ ID NO: 687819 - DNA, 33 bp, Homo sapien
actattctaagaatacacactatgagaaagagg

SEQ ID NO: 687820 - DNA, 33 bp, Homo sapien
actattctaagaatacgcactatgagaaagagg

SEQ ID NO: 687821 - DNA, 33 bp, Homo sapien
ccatgcacatggtaacaagtttgttttctatct

SEQ ID NO: 687822 - DNA, 33 bp, Homo sapien
ccatgcacatggtaactagtttgttttctatct

SEQ ID NO: 687823 - DNA, 33 bp, Homo sapien
gggatttcattacttcactttcaacaataaata

SEQ ID NO: 687824 - DNA, 33 bp, Homo sapien
gggatttcattacttcgctttcaacaataaata

SEQ ID NO: 687825 - DNA, 33 bp, Homo sapien
gtgcagggaagagaaacgtcagaggcttataaa

SEQ ID NO: 687826 - DNA, 33 bp, Homo sapien
gtgcagggaagagaaatgtcagaggcttataaa

SEQ ID NO: 687827 - DNA, 33 bp, Homo sapien
gatatcaaagccactaaaagaacagaaaattac

SEQ ID NO: 687828 - DNA, 33 bp, Homo sapien
gatatcaaagccactagaagaacagaaaattac

SEQ ID NO: 687829 - DNA, 33 bp, Homo sapien
gaatacaatgccaacacataaaactcagtagca

SEQ ID NO: 687830 - DNA, 33 bp, Homo sapien
gaatacaatgccaacagataaaactcagtagca

SEQ ID NO: 687831 - DNA, 33 bp, Homo sapien
tccacaggaaaagagccgaaagagatagcctct

SEQ ID NO: 687832 - DNA, 33 bp, Homo sapien
tccacaggaaaagagctgaaagagatagcctct

SEQ ID NO: 687833 - DNA, 33 bp, Homo sapien
accacctggcccccccaatttagtcatgcaaat

SEQ ID NO: 687834 - DNA, 33 bp, Homo sapien
accacctggccccccctatttagtcatgcaaat

SEQ ID NO: 687835 - DNA, 33 bp, Homo sapien
tctcaccagggttcaaatagcttgtaatttttt

SEQ ID NO: 687836 - DNA, 33 bp, Homo sapien
tctcaccagggttcaagtagcttgtaatttttt

SEQ ID NO: 687837 - DNA, 33 bp, Homo sapien
tatatcagttggattgaacttgcattcagtgat

SEQ ID NO: 687838 - DNA, 33 bp, Homo sapien
tatatcagttggattggacttgcattcagtgat

SEQ ID NO: 687839 - DNA, 33 bp, Homo sapien
aagaccatctctttgcaactaaaccactaatct

SEQ ID NO: 687840 - DNA, 33 bp, Homo sapien
aagaccatctctttgccactaaaccactaatct

SEQ ID NO: 687841 - DNA, 33 bp, Homo sapien
taattaccaaaaaaaaatcattatcagaagtaa

SEQ ID NO: 687842 - DNA, 33 bp, Homo sapien
taattaccaaaaaaaattcattatcagaagtaa

SEQ ID NO: 687843 - DNA, 33 bp, Homo sapien
gttgatagttctttgcccctagattttctgaga

SEQ ID NO: 687844 - DNA, 33 bp, Homo sapien
gttgatagttctttgctcctagattttctgaga

SEQ ID NO: 687845 - DNA, 33 bp, Homo sapien
attagaacaacgtctgaaatagtagcagctact

SEQ ID NO: 687846 - DNA, 33 bp, Homo sapien
attagaacaacgtctggaatagtagcagctact

SEQ ID NO: 687847 - DNA, 33 bp, Homo sapien
tctttcttttaatggaagttctgcctttctcat

SEQ ID NO: 687848 - DNA, 33 bp, Homo sapien
tctttcttttaatggaggttctgcctttctcat

SEQ ID NO: 687849 - DNA, 33 bp, Homo sapien
gtgataggcgtgggtacgcactgaatttcatta

SEQ ID NO: 687850 - DNA, 33 bp, Homo sapien
gtgataggcgtgggtatgcactgaatttcatta

SEQ ID NO: 687851 - DNA, 33 bp, Homo sapien
atattagtgatggtaacaacatataagcaataa

SEQ ID NO: 687852 - DNA, 33 bp, Homo sapien
atattagtgatggtaataacatataagcaataa

SEQ ID NO: 687853 - DNA, 33 bp, Homo sapien
atcagcaaattaaaaaaggagaatgcagggtta

SEQ ID NO: 687854 - DNA, 33 bp, Homo sapien
atcagcaaattaaaaatggagaatgcagggtta

SEQ ID NO: 687855 - DNA, 33 bp, Homo sapien
agagcttaatccaccccctgaaaccctaagagt

SEQ ID NO: 687856 - DNA, 33 bp, Homo sapien
agagcttaatccaccctctgaaaccctaagagt

SEQ ID NO: 687857 - DNA, 33 bp, Homo sapien
gattgcagagctgagacgatctctttgttccca

SEQ ID NO: 687858 - DNA, 33 bp, Homo sapien
gattgcagagctgagatgatctctttgttccca

SEQ ID NO: 687859 - DNA, 33 bp, Homo sapien
caaatgtcaaacagccaggaagtgatagaatga

SEQ ID NO: 687860 - DNA, 33 bp, Homo sapien
caaatgtcaaacagcccggaagtgatagaatga

SEQ ID NO: 687861 - DNA, 33 bp, Homo sapien
atttacttaatctcgccgagctttatctcctag

SEQ ID NO: 687862 - DNA, 33 bp, Homo sapien
atttacttaatctcgctgagctttatctcctag

SEQ ID NO: 687863 - DNA, 33 bp, Homo sapien
ggcttctaaagtccaaacttagccattaaggat

SEQ ID NO: 687864 - DNA, 33 bp, Homo sapien
ggcttctaaagtccaagcttagccattaaggat

SEQ ID NO: 687865 - DNA, 33 bp, Homo sapien
catcatcactgctaaacggagatcggtatgtag

SEQ ID NO: 687866 - DNA, 33 bp, Homo sapien
catcatcactgctaaatggagatcggtatgtag

SEQ ID NO: 687867 - DNA, 33 bp, Homo sapien
tttgagatagtcattgaatctttatcttgcaaa

SEQ ID NO: 687868 - DNA, 33 bp, Homo sapien
tttgagatagtcattgcatctttatcttgcaaa

SEQ ID NO: 687869 - DNA, 33 bp, Homo sapien
tgacacttattatatgacacattactgttcacg

SEQ ID NO: 687870 - DNA, 33 bp, Homo sapien
tgacacttattatatggcacattactgttcacg

SEQ ID NO: 687871 - DNA, 33 bp, Homo sapien
gtagactcagcctctgcaatcgaggaagaaaga

SEQ ID NO: 687872 - DNA, 33 bp, Homo sapien
gtagactcagcctctggaatcgaggaagaaaga

SEQ ID NO: 687873 - DNA, 33 bp, Homo sapien
gcctttgtataagggcactgggttttaatattt

SEQ ID NO: 687874 - DNA, 33 bp, Homo sapien
gcctttgtataagggcgctgggttttaatattt

SEQ ID NO: 687875 - DNA, 33 bp, Homo sapien
gaggcactaaagaataagaactcaattatgact

SEQ ID NO: 687876 - DNA, 33 bp, Homo sapien
gaggcactaaagaataggaactcaattatgact

SEQ ID NO: 687877 - DNA, 33 bp, Homo sapien
ttccacagctattctgaagaaccatgggtaagg

SEQ ID NO: 687878 - DNA, 33 bp, Homo sapien
ttccacagctattctggagaaccatgggtaagg

SEQ ID NO: 687879 - DNA, 33 bp, Homo sapien
gggcatttatatgataacaactgaaagccaaaa

SEQ ID NO: 687880 - DNA, 33 bp, Homo sapien
gggcatttatatgatagcaactgaaagccaaaa

SEQ ID NO: 687881 - DNA, 33 bp, Homo sapien
gatacacagagcaaagaattgtacatcaacatc

SEQ ID NO: 687882 - DNA, 33 bp, Homo sapien
gatacacagagcaaaggattgtacatcaacatc

SEQ ID NO: 687883 - DNA, 33 bp, Homo sapien
caaagttgttaatttccagaaggggctcatatc

SEQ ID NO: 687884 - DNA, 33 bp, Homo sapien
caaagttgttaatttctagaaggggctcatatc

SEQ ID NO: 687885 - DNA, 33 bp, Homo sapien
tattcaatagatcaccagaatttatttctccca

SEQ ID NO: 687886 - DNA, 33 bp, Homo sapien
tattcaatagatcacctgaatttatttctccca

SEQ ID NO: 687887 - DNA, 33 bp, Homo sapien
atgtctgtaataccaacgctttagaaggccagg

SEQ ID NO: 687888 - DNA, 33 bp, Homo sapien
atgtctgtaataccaatgctttagaaggccagg

SEQ ID NO: 687889 - DNA, 33 bp, Homo sapien
agcaatctgtattcatcaagttacttcacatcc

SEQ ID NO: 687890 - DNA, 33 bp, Homo sapien
agcaatctgtattcattaagttacttcacatcc

SEQ ID NO: 687891 - DNA, 33 bp, Homo sapien
aatgatactcataaaaccaggtattatattaat

SEQ ID NO: 687892 - DNA, 33 bp, Homo sapien
aatgatactcataaaagcaggtattatattaat

SEQ ID NO: 687893 - DNA, 33 bp, Homo sapien
tgaccttgggaaaagacagcaagtccttgaccc

SEQ ID NO: 687894 - DNA, 33 bp, Homo sapien
tgaccttgggaaaagagagcaagtccttgaccc

SEQ ID NO: 687895 - DNA, 33 bp, Homo sapien
aaatttgtttacttgcacgtccatcctaactat

SEQ ID NO: 687896 - DNA, 33 bp, Homo sapien
aaatttgtttacttgcgcgtccatcctaactat

SEQ ID NO: 687897 - DNA, 33 bp, Homo sapien
catgttcagtccgttccaggtttggaaacaatc

SEQ ID NO: 687898 - DNA, 33 bp, Homo sapien
catgttcagtccgttctaggtttggaaacaatc

SEQ ID NO: 687899 - DNA, 33 bp, Homo sapien
cagaatgcttatttggaagcagattgttgcctc

SEQ ID NO: 687900 - DNA, 33 bp, Homo sapien
cagaatgcttatttggtagcagattgttgcctc

SEQ ID NO: 687901 - DNA, 33 bp, Homo sapien
ttatttcctgaccgacactaagaacctgccctg

SEQ ID NO: 687902 - DNA, 33 bp, Homo sapien
ttatttcctgaccgacgctaagaacctgccctg

SEQ ID NO: 687903 - DNA, 33 bp, Homo sapien
cctttgacattatacgacacattctgggcatac

SEQ ID NO: 687904 - DNA, 33 bp, Homo sapien
cctttgacattatacgccacattctgggcatac

SEQ ID NO: 687905 - DNA, 33 bp, Homo sapien
tattctttgatcttcacgtttgatctttcttca

SEQ ID NO: 687906 - DNA, 33 bp, Homo sapien
tattctttgatcttcatgtttgatctttcttca

SEQ ID NO: 687907 - DNA, 33 bp, Homo sapien
gttttctgttaaggaacaaagtatgcccagtgc

SEQ ID NO: 687908 - DNA, 33 bp, Homo sapien
gttttctgttaaggaagaaagtatgcccagtgc

SEQ ID NO: 687909 - DNA, 33 bp, Homo sapien
attagaggtttggacaacaagtggaagtgtttc

SEQ ID NO: 687910 - DNA, 33 bp, Homo sapien
attagaggtttggacagcaagtggaagtgtttc

SEQ ID NO: 687911 - DNA, 33 bp, Homo sapien
tggtcagatggaacacagtccagagagttgtgt

SEQ ID NO: 687912 - DNA, 33 bp, Homo sapien
tggtcagatggaacacggtccagagagttgtgt

SEQ ID NO: 687913 - DNA, 33 bp, Homo sapien
aaagttcattatgttcacaacttgctgttgcca

SEQ ID NO: 687914 - DNA, 33 bp, Homo sapien
aaagttcattatgttctcaacttgctgttgcca

SEQ ID NO: 687915 - DNA, 33 bp, Homo sapien
cactgaggttgtaatgaattcctctggtagatg

SEQ ID NO: 687916 - DNA, 33 bp, Homo sapien
cactgaggttgtaatgcattcctctggtagatg

SEQ ID NO: 687917 - DNA, 33 bp, Homo sapien
acttgaaaagggattgcaagcatggaaaagatg

SEQ ID NO: 687918 - DNA, 33 bp, Homo sapien
acttgaaaagggattgtaagcatggaaaagatg

SEQ ID NO: 687919 - DNA, 33 bp, Homo sapien
gccaacagcaaattcaatgaaggaaatccaaaa

SEQ ID NO: 687920 - DNA, 33 bp, Homo sapien
gccaacagcaaattcattgaaggaaatccaaaa

SEQ ID NO: 687921 - DNA, 33 bp, Homo sapien
tctttcctcattttgaagggagaagttgcaaat

SEQ ID NO: 687922 - DNA, 33 bp, Homo sapien
tctttcctcattttgaggggagaagttgcaaat

SEQ ID NO: 687923 - DNA, 33 bp, Homo sapien
atactgagcaggctacaaaagctttccaggcat

SEQ ID NO: 687924 - DNA, 33 bp, Homo sapien
atactgagcaggctacgaaagctttccaggcat

SEQ ID NO: 687925 - DNA, 33 bp, Homo sapien
tataaattgggagaaagtaagagtgacatctat

SEQ ID NO: 687926 - DNA, 33 bp, Homo sapien
tataaattgggagaaattaagagtgacatctat

SEQ ID NO: 687927 - DNA, 33 bp, Homo sapien
gaacaagatatctgcaagttttctgttcctgag

SEQ ID NO: 687928 - DNA, 33 bp, Homo sapien
gaacaagatatctgcaggttttctgttcctgag

SEQ ID NO: 687929 - DNA, 33 bp, Homo sapien
tttactttattacaaaattcactgtttctattt

SEQ ID NO: 687930 - DNA, 33 bp, Homo sapien
tttactttattacaaagttcactgtttctattt

SEQ ID NO: 687931 - DNA, 33 bp, Homo sapien
aatgttatctttgtgactaataaagctgaaggg

SEQ ID NO: 687932 - DNA, 33 bp, Homo sapien
aatgttatctttgtgattaataaagctgaaggg

SEQ ID NO: 687933 - DNA, 33 bp, Homo sapien
cagtttgggccaaaaaaatgtatgcaaatatag

SEQ ID NO: 687934 - DNA, 33 bp, Homo sapien
cagtttgggccaaaaagatgtatgcaaatatag

SEQ ID NO: 687935 - DNA, 33 bp, Homo sapien
tctgtggaatggaagacaggagccctggaagtg

SEQ ID NO: 687936 - DNA, 33 bp, Homo sapien
tctgtggaatggaagataggagccctggaagtg

SEQ ID NO: 687937 - DNA, 33 bp, Homo sapien
ctagcagcagcataaccgggattttaaacaacg

SEQ ID NO: 687938 - DNA, 33 bp, Homo sapien
ctagcagcagcataactgggattttaaacaacg

SEQ ID NO: 687939 - DNA, 33 bp, Homo sapien
ttgctgatattgggccaaatgtgtttttagcta

SEQ ID NO: 687940 - DNA, 33 bp, Homo sapien
ttgctgatattgggccgaatgtgtttttagcta

SEQ ID NO: 687941 - DNA, 33 bp, Homo sapien
aaatgttaacagataactgcccatgtaattact

SEQ ID NO: 687942 - DNA, 33 bp, Homo sapien
aaatgttaacagataattgcccatgtaattact

SEQ ID NO: 687943 - DNA, 33 bp, Homo sapien
attattacatttcccaaatctgaattggaccat

SEQ ID NO: 687944 - DNA, 33 bp, Homo sapien
attattacatttcccagatctgaattggaccat

SEQ ID NO: 687945 - DNA, 33 bp, Homo sapien
cacctaagtgttcttcaccaagaaaggtcttat

SEQ ID NO: 687946 - DNA, 33 bp, Homo sapien
cacctaagtgttcttcgccaagaaaggtcttat

SEQ ID NO: 687947 - DNA, 33 bp, Homo sapien
taacattaaatgcttgcataattccaaaaaaaa

SEQ ID NO: 687948 - DNA, 33 bp, Homo sapien
taacattaaatgcttgtataattccaaaaaaaa

SEQ ID NO: 687949 - DNA, 33 bp, Homo sapien
accctattgaagatgacaaattaagcatactca

SEQ ID NO: 687950 - DNA, 33 bp, Homo sapien
accctattgaagatgataaattaagcatactca

SEQ ID NO: 687951 - DNA, 33 bp, Homo sapien
acaaatagttctccacagtgacagaaatatcag

SEQ ID NO: 687952 - DNA, 33 bp, Homo sapien
acaaatagttctccacggtgacagaaatatcag

SEQ ID NO: 687953 - DNA, 33 bp, Homo sapien
attatgtagggggaagcattctgaaagagatag

SEQ ID NO: 687954 - DNA, 33 bp, Homo sapien
attatgtagggggaaggattctgaaagagatag

SEQ ID NO: 687955 - DNA, 33 bp, Homo sapien
ggcaggaataaagctacgtgacctggaggattt

SEQ ID NO: 687956 - DNA, 33 bp, Homo sapien
ggcaggaataaagctatgtgacctggaggattt

SEQ ID NO: 687957 - DNA, 33 bp, Homo sapien
ctggacacatgatacaagttaagtttattggat

SEQ ID NO: 687958 - DNA, 33 bp, Homo sapien
ctggacacatgatacaggttaagtttattggat

SEQ ID NO: 687959 - DNA, 33 bp, Homo sapien
taaatggataactgcacggttcccaatctgaaa

SEQ ID NO: 687960 - DNA, 33 bp, Homo sapien
taaatggataactgcatggttcccaatctgaaa

SEQ ID NO: 687961 - DNA, 33 bp, Homo sapien
cttagagatcttcaagcaacatttagagggaaa

SEQ ID NO: 687962 - DNA, 33 bp, Homo sapien
cttagagatcttcaaggaacatttagagggaaa

SEQ ID NO: 687963 - DNA, 33 bp, Homo sapien
ctggtggctctactctaacccaggatatgtacc

SEQ ID NO: 687964 - DNA, 33 bp, Homo sapien
ctggtggctctactctgacccaggatatgtacc

SEQ ID NO: 687965 - DNA, 33 bp, Homo sapien
tccctcattgggctcacctttgatttccaagcc

SEQ ID NO: 687966 - DNA, 33 bp, Homo sapien
tccctcattgggctcatctttgatttccaagcc

SEQ ID NO: 687967 - DNA, 33 bp, Homo sapien
tgtgatatgtcttttagcaccctgagaacagat

SEQ ID NO: 687968 - DNA, 33 bp, Homo sapien
tgtgatatgtcttttatcaccctgagaacagat

SEQ ID NO: 687969 - DNA, 33 bp, Homo sapien
ttgggctggtttaataataaatgcagacttgaa

SEQ ID NO: 687970 - DNA, 33 bp, Homo sapien
ttgggctggtttaatagtaaatgcagacttgaa

SEQ ID NO: 687971 - DNA, 33 bp, Homo sapien
tggatgtgaacagtctcaagtcagttagggccg

SEQ ID NO: 687972 - DNA, 33 bp, Homo sapien
tggatgtgaacagtctgaagtcagttagggccg

SEQ ID NO: 687973 - DNA, 33 bp, Homo sapien
ccctggcaaggactgtcaactactggttgggtg

SEQ ID NO: 687974 - DNA, 33 bp, Homo sapien
ccctggcaaggactgttaactactggttgggtg

SEQ ID NO: 687975 - DNA, 33 bp, Homo sapien
tttgtaagccaaaaaaagctcaattagcaaact

SEQ ID NO: 687976 - DNA, 33 bp, Homo sapien
tttgtaagccaaaaaaggctcaattagcaaact

SEQ ID NO: 687977 - DNA, 33 bp, Homo sapien
aaaagcagccaggagactagttcactaagatca

SEQ ID NO: 687978 - DNA, 33 bp, Homo sapien
aaaagcagccaggagattagttcactaagatca

SEQ ID NO: 687979 - DNA, 33 bp, Homo sapien
tttctgagaagatggaaaaggaaattcacatgg

SEQ ID NO: 687980 - DNA, 33 bp, Homo sapien
tttctgagaagatggagaaggaaattcacatgg

SEQ ID NO: 687981 - DNA, 33 bp, Homo sapien
gctaaattagggctaaactgagatatagagggg

SEQ ID NO: 687982 - DNA, 33 bp, Homo sapien
gctaaattagggctaagctgagatatagagggg

SEQ ID NO: 687983 - DNA, 33 bp, Homo sapien
tgtacttgagaaacagaaaacatgcgctatctc

SEQ ID NO: 687984 - DNA, 33 bp, Homo sapien
tgtacttgagaaacaggaaacatgcgctatctc

SEQ ID NO: 687985 - DNA, 33 bp, Homo sapien
tgtttttcagaagttcacaaggaaagcttctag

SEQ ID NO: 687986 - DNA, 33 bp, Homo sapien
tgtttttcagaagttctcaaggaaagcttctag

SEQ ID NO: 687987 - DNA, 33 bp, Homo sapien
ttagggacagatctccaaagaagggtccgtcgt

SEQ ID NO: 687988 - DNA, 33 bp, Homo sapien
ttagggacagatctccgaagaagggtccgtcgt

SEQ ID NO: 687989 - DNA, 33 bp, Homo sapien
ttgttttagatccatgaaaaatgtcttatttct

SEQ ID NO: 687990 - DNA, 33 bp, Homo sapien
ttgttttagatccatggaaaatgtcttatttct

SEQ ID NO: 687991 - DNA, 33 bp, Homo sapien
ctgattccaacgtctaaccttttcctgagtcct

SEQ ID NO: 687992 - DNA, 33 bp, Homo sapien
ctgattccaacgtctatccttttcctgagtcct

SEQ ID NO: 687993 - DNA, 33 bp, Homo sapien
caggttgaggcaaagtaactcagttgaggtcag

SEQ ID NO: 687994 - DNA, 33 bp, Homo sapien
caggttgaggcaaagtcactcagttgaggtcag

SEQ ID NO: 687995 - DNA, 33 bp, Homo sapien
gtaggaatctaggtctcaagcggccttgtgtgt

SEQ ID NO: 687996 - DNA, 33 bp, Homo sapien
gtaggaatctaggtcttaagcggccttgtgtgt

SEQ ID NO: 687997 - DNA, 33 bp, Homo sapien
ttttataaaatggtcaaatagcatcatactata

SEQ ID NO: 687998 - DNA, 33 bp, Homo sapien
ttttataaaatggtcacatagcatcatactata

SEQ ID NO: 687999 - DNA, 33 bp, Homo sapien
atttcttacaaaaagaacctgtctaacatctaa

SEQ ID NO: 688000 - DNA, 33 bp, Homo sapien
atttcttacaaaaagaccctgtctaacatctaa

SEQ ID NO: 688001 - DNA, 33 bp, Homo sapien
atgaaatgggagactgaaaaattgttgccagca

SEQ ID NO: 688002 - DNA, 33 bp, Homo sapien
atgaaatgggagactggaaaattgttgccagca

SEQ ID NO: 688003 - DNA, 33 bp, Homo sapien
ttatgggcaaatcatgaacctccagcttgaaca

SEQ ID NO: 688004 - DNA, 33 bp, Homo sapien
ttatgggcaaatcatggacctccagcttgaaca

SEQ ID NO: 688005 - DNA, 33 bp, Homo sapien
tatcctgtgaagcataaaattgtccctggttga

SEQ ID NO: 688006 - DNA, 33 bp, Homo sapien
tatcctgtgaagcatacaattgtccctggttga

SEQ ID NO: 688007 - DNA, 33 bp, Homo sapien
cattcatccataaaaaactcatacacaaatatt

SEQ ID NO: 688008 - DNA, 33 bp, Homo sapien
cattcatccataaaaatctcatacacaaatatt

SEQ ID NO: 688009 - DNA, 33 bp, Homo sapien
agctttgggctttcaacagactttcatgaaggt

SEQ ID NO: 688010 - DNA, 33 bp, Homo sapien
agctttgggctttcaatagactttcatgaaggt

SEQ ID NO: 688011 - DNA, 33 bp, Homo sapien
tattgtgttccatgaacctggatgaccatcaca

SEQ ID NO: 688012 - DNA, 33 bp, Homo sapien
tattgtgttccatgaatctggatgaccatcaca

SEQ ID NO: 688013 - DNA, 33 bp, Homo sapien
acaagtctgcctttggaaagttcttagatggaa

SEQ ID NO: 688014 - DNA, 33 bp, Homo sapien
acaagtctgcctttggcaagttcttagatggaa

SEQ ID NO: 688015 - DNA, 33 bp, Homo sapien
aggtaaggagaaacaacgaaaggcaggaagaca

SEQ ID NO: 688016 - DNA, 33 bp, Homo sapien
aggtaaggagaaacaatgaaaggcaggaagaca

SEQ ID NO: 688017 - DNA, 33 bp, Homo sapien
aaacgattttttgtcccctctgtgttctctcca

SEQ ID NO: 688018 - DNA, 33 bp, Homo sapien
aaacgattttttgtcctctctgtgttctctcca

SEQ ID NO: 688019 - DNA, 33 bp, Homo sapien
tggagatactcaaactaaatcactttatgtgta

SEQ ID NO: 688020 - DNA, 33 bp, Homo sapien
tggagatactcaaactgaatcactttatgtgta

SEQ ID NO: 688021 - DNA, 33 bp, Homo sapien
agcaatttactctccacattgtagccaaatgac

SEQ ID NO: 688022 - DNA, 33 bp, Homo sapien
agcaatttactctccagattgtagccaaatgac

SEQ ID NO: 688023 - DNA, 33 bp, Homo sapien
tagcgtctatgcttagaaggcacatttatacgt

SEQ ID NO: 688024 - DNA, 33 bp, Homo sapien
tagcgtctatgcttagcaggcacatttatacgt

SEQ ID NO: 688025 - DNA, 33 bp, Homo sapien
cattttgtgagcagaacttaatgcttgtgggaa

SEQ ID NO: 688026 - DNA, 33 bp, Homo sapien
cattttgtgagcagaatttaatgcttgtgggaa

SEQ ID NO: 688027 - DNA, 33 bp, Homo sapien
agggaaggcatcattaaaccttttccttttgta

SEQ ID NO: 688028 - DNA, 33 bp, Homo sapien
agggaaggcatcattagaccttttccttttgta

SEQ ID NO: 688029 - DNA, 33 bp, Homo sapien
aatcatgtaattgaatcatgggtgtgggccttt

SEQ ID NO: 688030 - DNA, 33 bp, Homo sapien
aatcatgtaattgaatgatgggtgtgggccttt

SEQ ID NO: 688031 - DNA, 33 bp, Homo sapien
ggtacctcctttgacaatctcttcatagtccag

SEQ ID NO: 688032 - DNA, 33 bp, Homo sapien
ggtacctcctttgacagtctcttcatagtccag

SEQ ID NO: 688033 - DNA, 33 bp, Homo sapien
tgtcagccactatcacaggaacttgaagcataa

SEQ ID NO: 688034 - DNA, 33 bp, Homo sapien
tgtcagccactatcacgggaacttgaagcataa

SEQ ID NO: 688035 - DNA, 33 bp, Homo sapien
taatactttgacattaaccctttctgaacttct

SEQ ID NO: 688036 - DNA, 33 bp, Homo sapien
taatactttgacattatccctttctgaacttct

SEQ ID NO: 688037 - DNA, 33 bp, Homo sapien
tgcaggataaaaataaaatattaacagagctgt

SEQ ID NO: 688038 - DNA, 33 bp, Homo sapien
tgcaggataaaaataagatattaacagagctgt

SEQ ID NO: 688039 - DNA, 33 bp, Homo sapien
tgtcactgcagcaataaggaagtaatacagtgc

SEQ ID NO: 688040 - DNA, 33 bp, Homo sapien
tgtcactgcagcaatagggaagtaatacagtgc

SEQ ID NO: 688041 - DNA, 33 bp, Homo sapien
tgtgtgtggctcgagactattatcacagttcag

SEQ ID NO: 688042 - DNA, 33 bp, Homo sapien
tgtgtgtggctcgagagtattatcacagttcag

SEQ ID NO: 688043 - DNA, 33 bp, Homo sapien
ccaaacactaagagaacaattggctactctggt

SEQ ID NO: 688044 - DNA, 33 bp, Homo sapien
ccaaacactaagagaataattggctactctggt

SEQ ID NO: 688045 - DNA, 33 bp, Homo sapien
atctccttggaacttacaggaaacaaaattctc

SEQ ID NO: 688046 - DNA, 33 bp, Homo sapien
atctccttggaacttagaggaaacaaaattctc

SEQ ID NO: 688047 - DNA, 33 bp, Homo sapien
gttcactagagtgtagaccattgttacttaagg

SEQ ID NO: 688048 - DNA, 33 bp, Homo sapien
gttcactagagtgtagtccattgttacttaagg

SEQ ID NO: 688049 - DNA, 33 bp, Homo sapien
tgaacaagaagtcactaaagagtagtcaggaaa

SEQ ID NO: 688050 - DNA, 33 bp, Homo sapien
tgaacaagaagtcactgaagagtagtcaggaaa

SEQ ID NO: 688051 - DNA, 33 bp, Homo sapien
ttccttaacaatcatcactttaccaaaggctat

SEQ ID NO: 688052 - DNA, 33 bp, Homo sapien
ttccttaacaatcatctctttaccaaaggctat

SEQ ID NO: 688053 - DNA, 33 bp, Homo sapien
tttaaagcacacaactcaggagcagatggggca

SEQ ID NO: 688054 - DNA, 33 bp, Homo sapien
tttaaagcacacaacttaggagcagatggggca

SEQ ID NO: 688055 - DNA, 33 bp, Homo sapien
tttgaatataacttaccctaaagcgttcatctc

SEQ ID NO: 688056 - DNA, 33 bp, Homo sapien
tttgaatataacttactctaaagcgttcatctc

SEQ ID NO: 688057 - DNA, 33 bp, Homo sapien
acagttatattccaaagcatgaacaagatgaat

SEQ ID NO: 688058 - DNA, 33 bp, Homo sapien
acagttatattccaaatcatgaacaagatgaat

SEQ ID NO: 688059 - DNA, 33 bp, Homo sapien
cactcttctcaattaccctttgaacagcctttc

SEQ ID NO: 688060 - DNA, 33 bp, Homo sapien
cactcttctcaattactctttgaacagcctttc

SEQ ID NO: 688061 - DNA, 33 bp, Homo sapien
atgtgcatgaacagaactaattgctccttccac

SEQ ID NO: 688062 - DNA, 33 bp, Homo sapien
atgtgcatgaacagaattaattgctccttccac

SEQ ID NO: 688063 - DNA, 33 bp, Homo sapien
agcatcaagaagaaaacagccaacacttccata

SEQ ID NO: 688064 - DNA, 33 bp, Homo sapien
agcatcaagaagaaaatagccaacacttccata

SEQ ID NO: 688065 - DNA, 33 bp, Homo sapien
aaagatttagagataacattagccaaacacaag

SEQ ID NO: 688066 - DNA, 33 bp, Homo sapien
aaagatttagagataagattagccaaacacaag

SEQ ID NO: 688067 - DNA, 33 bp, Homo sapien
cattgaagctggaggtaaaaatagctttttgtt

SEQ ID NO: 688068 - DNA, 33 bp, Homo sapien
cattgaagctggaggtgaaaatagctttttgtt

SEQ ID NO: 688069 - DNA, 33 bp, Homo sapien
catattgacacctgtgacaaatgaccattcaaa

SEQ ID NO: 688070 - DNA, 33 bp, Homo sapien
catattgacacctgtggcaaatgaccattcaaa

SEQ ID NO: 688071 - DNA, 33 bp, Homo sapien
cacgtctatgtcaccaataatataaatgccctc

SEQ ID NO: 688072 - DNA, 33 bp, Homo sapien
cacgtctatgtcaccagtaatataaatgccctc

SEQ ID NO: 688073 - DNA, 33 bp, Homo sapien
ttgaatatcttgagagacatttaagacccatgc

SEQ ID NO: 688074 - DNA, 33 bp, Homo sapien
ttgaatatcttgagagtcatttaagacccatgc

SEQ ID NO: 688075 - DNA, 33 bp, Homo sapien
aaggctgctactgacaagacaattataaagcta

SEQ ID NO: 688076 - DNA, 33 bp, Homo sapien
aaggctgctactgacacgacaattataaagcta

SEQ ID NO: 688077 - DNA, 33 bp, Homo sapien
ggttgaaagtcattttcttcctgctgtttttct

SEQ ID NO: 688078 - DNA, 33 bp, Homo sapien
ggttgaaagtcattttgttcctgctgtttttct

SEQ ID NO: 688079 - DNA, 33 bp, Homo sapien
tgaattttagggtagagagtttctgagggacaa

SEQ ID NO: 688080 - DNA, 33 bp, Homo sapien
tgaattttagggtagatagtttctgagggacaa

SEQ ID NO: 688081 - DNA, 33 bp, Homo sapien
tggaaggaaggacggccaggctttgagagctgt

SEQ ID NO: 688082 - DNA, 33 bp, Homo sapien
tggaaggaaggacggctaggctttgagagctgt

SEQ ID NO: 688083 - DNA, 33 bp, Homo sapien
aagtcgtgagggtcaccggtgttctgaagttat

SEQ ID NO: 688084 - DNA, 33 bp, Homo sapien
aagtcgtgagggtcactggtgttctgaagttat

SEQ ID NO: 688085 - DNA, 33 bp, Homo sapien
cagatacagattgagagagtgttgcaggttaga

SEQ ID NO: 688086 - DNA, 33 bp, Homo sapien
cagatacagattgagatagtgttgcaggttaga

SEQ ID NO: 688087 - DNA, 33 bp, Homo sapien
catgtttccctcaagcacatttaaacaaattag

SEQ ID NO: 688088 - DNA, 33 bp, Homo sapien
catgtttccctcaagcgcatttaaacaaattag

SEQ ID NO: 688089 - DNA, 33 bp, Homo sapien
tgatatttaaagagaaacgtgaacaaaatgata

SEQ ID NO: 688090 - DNA, 33 bp, Homo sapien
tgatatttaaagagaatcgtgaacaaaatgata

SEQ ID NO: 688091 - DNA, 33 bp, Homo sapien
tgagtcttccttaacccacctctttcttcacat

SEQ ID NO: 688092 - DNA, 33 bp, Homo sapien
tgagtcttccttaacctacctctttcttcacat

SEQ ID NO: 688093 - DNA, 33 bp, Homo sapien
aattctgggaagttaactacaggtgagagagat

SEQ ID NO: 688094 - DNA, 33 bp, Homo sapien
aattctgggaagttaattacaggtgagagagat

SEQ ID NO: 688095 - DNA, 33 bp, Homo sapien
tctttccagaacagcagtcggaactctacgtcc

SEQ ID NO: 688096 - DNA, 33 bp, Homo sapien
tctttccagaacagcattcggaactctacgtcc

SEQ ID NO: 688097 - DNA, 33 bp, Homo sapien
agactttggaataagacagataaggagagatta

SEQ ID NO: 688098 - DNA, 33 bp, Homo sapien
agactttggaataagatagataaggagagatta

SEQ ID NO: 688099 - DNA, 33 bp, Homo sapien
gaacgtaccatgaagcaaattttcaccgagtgc

SEQ ID NO: 688100 - DNA, 33 bp, Homo sapien
gaacgtaccatgaagccaattttcaccgagtgc

SEQ ID NO: 688101 - DNA, 33 bp, Homo sapien
tcttgggatgttagagaataaccagcctttact

SEQ ID NO: 688102 - DNA, 33 bp, Homo sapien
tcttgggatgttagaggataaccagcctttact

SEQ ID NO: 688103 - DNA, 33 bp, Homo sapien
gtcatcccatgaatccacatttagccctaattc

SEQ ID NO: 688104 - DNA, 33 bp, Homo sapien
gtcatcccatgaatccgcatttagccctaattc

SEQ ID NO: 688105 - DNA, 33 bp, Homo sapien
accagccatcctgtaccatctaatcccagttga

SEQ ID NO: 688106 - DNA, 33 bp, Homo sapien
accagccatcctgtactatctaatcccagttga

SEQ ID NO: 688107 - DNA, 33 bp, Homo sapien
taagtgagaagcaagacgtagtgtaatatgtgt

SEQ ID NO: 688108 - DNA, 33 bp, Homo sapien
taagtgagaagcaagatgtagtgtaatatgtgt

SEQ ID NO: 688109 - DNA, 33 bp, Homo sapien
gaaaaaaaagaatagacgaagatggaattgttt

SEQ ID NO: 688110 - DNA, 33 bp, Homo sapien
gaaaaaaaagaatagatgaagatggaattgttt

SEQ ID NO: 688111 - DNA, 33 bp, Homo sapien
agatgtttaggaaaaacgaattcaaccgaagtc

SEQ ID NO: 688112 - DNA, 33 bp, Homo sapien
agatgtttaggaaaaatgaattcaaccgaagtc

SEQ ID NO: 688113 - DNA, 33 bp, Homo sapien
acaacaaattattcagaagagagacctcaaaac

SEQ ID NO: 688114 - DNA, 33 bp, Homo sapien
acaacaaattattcaggagagagacctcaaaac

SEQ ID NO: 688115 - DNA, 33 bp, Homo sapien
ctgataaaatttatgcacttcagggataaagat

SEQ ID NO: 688116 - DNA, 33 bp, Homo sapien
ctgataaaatttatgcgcttcagggataaagat

SEQ ID NO: 688117 - DNA, 33 bp, Homo sapien
acacatgacatgaggaaatttttcttttgagtt

SEQ ID NO: 688118 - DNA, 33 bp, Homo sapien
acacatgacatgaggacatttttcttttgagtt

SEQ ID NO: 688119 - DNA, 33 bp, Homo sapien
gtgcagggcaagagaaagagcctcccaacaggt

SEQ ID NO: 688120 - DNA, 33 bp, Homo sapien
gtgcagggcaagagaaggagcctcccaacaggt

SEQ ID NO: 688121 - DNA, 33 bp, Homo sapien
cctgcacccaccttgaagtttgtctcaacagga

SEQ ID NO: 688122 - DNA, 33 bp, Homo sapien
cctgcacccaccttgatgtttgtctcaacagga

SEQ ID NO: 688123 - DNA, 33 bp, Homo sapien
gctgcatggtttagccaactaggcttccataac

SEQ ID NO: 688124 - DNA, 33 bp, Homo sapien
gctgcatggtttagccgactaggcttccataac

SEQ ID NO: 688125 - DNA, 33 bp, Homo sapien
agaaatgtctgctgtgcaagtcacccagtctat

SEQ ID NO: 688126 - DNA, 33 bp, Homo sapien
agaaatgtctgctgtgtaagtcacccagtctat

SEQ ID NO: 688127 - DNA, 33 bp, Homo sapien
tcatagaatttcagtccaggagaataagcagac

SEQ ID NO: 688128 - DNA, 33 bp, Homo sapien
tcatagaatttcagtctaggagaataagcagac

SEQ ID NO: 688129 - DNA, 33 bp, Homo sapien
aagtgattggatgataataagctaacactgaaa

SEQ ID NO: 688130 - DNA, 33 bp, Homo sapien
aagtgattggatgatattaagctaacactgaaa

SEQ ID NO: 688131 - DNA, 33 bp, Homo sapien
aagttcactccagtagcatcaggaaaagtggac

SEQ ID NO: 688132 - DNA, 33 bp, Homo sapien
aagttcactccagtagtatcaggaaaagtggac

SEQ ID NO: 688133 - DNA, 33 bp, Homo sapien
tacagtgaggacaatgaaaacactagatctctc

SEQ ID NO: 688134 - DNA, 33 bp, Homo sapien
tacagtgaggacaatggaaacactagatctctc

SEQ ID NO: 688135 - DNA, 33 bp, Homo sapien
gatctctcttaccaacgaggcttagaactagcc

SEQ ID NO: 688136 - DNA, 33 bp, Homo sapien
gatctctcttaccaactaggcttagaactagcc

SEQ ID NO: 688137 - DNA, 33 bp, Homo sapien
tcggaaagccatttggaactcaatacgtgtctt

SEQ ID NO: 688138 - DNA, 33 bp, Homo sapien
tcggaaagccatttgggactcaatacgtgtctt

SEQ ID NO: 688139 - DNA, 33 bp, Homo sapien
gagcagaacttgaaaaaacggtgttgctgaact

SEQ ID NO: 688140 - DNA, 33 bp, Homo sapien
gagcagaacttgaaaagacggtgttgctgaact

SEQ ID NO: 688141 - DNA, 33 bp, Homo sapien
atttgtagcaggaatgcatgaaaagactggtag

SEQ ID NO: 688142 - DNA, 33 bp, Homo sapien
atttgtagcaggaatgtatgaaaagactggtag

SEQ ID NO: 688143 - DNA, 33 bp, Homo sapien
gccagactcatgcatgcatctgaaagttagatt

SEQ ID NO: 688144 - DNA, 33 bp, Homo sapien
gccagactcatgcatgtatctgaaagttagatt

SEQ ID NO: 688145 - DNA, 33 bp, Homo sapien
taacccaagatggatcagacttaaatgtaagac

SEQ ID NO: 688146 - DNA, 33 bp, Homo sapien
taacccaagatggatctgacttaaatgtaagac

SEQ ID NO: 688147 - DNA, 33 bp, Homo sapien
aatccaagtgagagctaactcataattcccagt

SEQ ID NO: 688148 - DNA, 33 bp, Homo sapien
aatccaagtgagagctgactcataattcccagt

SEQ ID NO: 688149 - DNA, 33 bp, Homo sapien
gatcaaggataatcaaacctcttatgatctaaa

SEQ ID NO: 688150 - DNA, 33 bp, Homo sapien
gatcaaggataatcaagcctcttatgatctaaa

SEQ ID NO: 688151 - DNA, 33 bp, Homo sapien
actaataggatatataatacactatcacaaggt

SEQ ID NO: 688152 - DNA, 33 bp, Homo sapien
actaataggatatatattacactatcacaaggt

SEQ ID NO: 688153 - DNA, 33 bp, Homo sapien
aagtttagcccattgacaagtgtaggacacagg

SEQ ID NO: 688154 - DNA, 33 bp, Homo sapien
aagtttagcccattgataagtgtaggacacagg

SEQ ID NO: 688155 - DNA, 33 bp, Homo sapien
aaaaaaagaggaggacactaatacagtaagatt

SEQ ID NO: 688156 - DNA, 33 bp, Homo sapien
aaaaaaagaggaggaccctaatacagtaagatt

SEQ ID NO: 688157 - DNA, 33 bp, Homo sapien
ttttacgtgaagcacactgaagaaagatcttac

SEQ ID NO: 688158 - DNA, 33 bp, Homo sapien
ttttacgtgaagcacattgaagaaagatcttac

SEQ ID NO: 688159 - DNA, 33 bp, Homo sapien
aagtcgagagatacaacgtgcaacatgaagaat

SEQ ID NO: 688160 - DNA, 33 bp, Homo sapien
aagtcgagagatacaatgtgcaacatgaagaat

SEQ ID NO: 688161 - DNA, 33 bp, Homo sapien
aaatctatggataaaaagagacttaaaagaaat

SEQ ID NO: 688162 - DNA, 33 bp, Homo sapien
aaatctatggataaaaggagacttaaaagaaat

SEQ ID NO: 688163 - DNA, 33 bp, Homo sapien
gcatgttcctctgtccactgggtttcctgccaa

SEQ ID NO: 688164 - DNA, 33 bp, Homo sapien
gcatgttcctctgtcctctgggtttcctgccaa

SEQ ID NO: 688165 - DNA, 33 bp, Homo sapien
atcagaagttgtttaaccacatctccagaatgt

SEQ ID NO: 688166 - DNA, 33 bp, Homo sapien
atcagaagttgtttaatcacatctccagaatgt

SEQ ID NO: 688167 - DNA, 33 bp, Homo sapien
aagatttatgttaggacgtatgaatgatgcctc

SEQ ID NO: 688168 - DNA, 33 bp, Homo sapien
aagatttatgttaggatgtatgaatgatgcctc

SEQ ID NO: 688169 - DNA, 33 bp, Homo sapien
aatcaaagtacattgccaactgttttagttgat

SEQ ID NO: 688170 - DNA, 33 bp, Homo sapien
aatcaaagtacattgcgaactgttttagttgat

SEQ ID NO: 688171 - DNA, 33 bp, Homo sapien
gctcagtgtgggttaccggctgcaattttagct

SEQ ID NO: 688172 - DNA, 33 bp, Homo sapien
gctcagtgtgggttacgggctgcaattttagct

SEQ ID NO: 688173 - DNA, 33 bp, Homo sapien
ttttaaaaataagttacccagcctcagaaatgc

SEQ ID NO: 688174 - DNA, 33 bp, Homo sapien
ttttaaaaataagttatccagcctcagaaatgc

SEQ ID NO: 688175 - DNA, 33 bp, Homo sapien
aacataatttgctcaactacttgtgatttggct

SEQ ID NO: 688176 - DNA, 33 bp, Homo sapien
aacataatttgctcaattacttgtgatttggct

SEQ ID NO: 688177 - DNA, 33 bp, Homo sapien
taaaattcaggcatcaaaaaggttcccccaatc

SEQ ID NO: 688178 - DNA, 33 bp, Homo sapien
taaaattcaggcatcagaaaggttcccccaatc

SEQ ID NO: 688179 - DNA, 33 bp, Homo sapien
ccatggctcccttaagaagccgagtaggatctt

SEQ ID NO: 688180 - DNA, 33 bp, Homo sapien
ccatggctcccttaagtagccgagtaggatctt

SEQ ID NO: 688181 - DNA, 33 bp, Homo sapien
atccactggtcccttacgagtctacaccttact

SEQ ID NO: 688182 - DNA, 33 bp, Homo sapien
atccactggtcccttatgagtctacaccttact

SEQ ID NO: 688183 - DNA, 33 bp, Homo sapien
agactggatttctgaaaatatgatacaactggt

SEQ ID NO: 688184 - DNA, 33 bp, Homo sapien
agactggatttctgaatatatgatacaactggt

SEQ ID NO: 688185 - DNA, 33 bp, Homo sapien
ggtgaaatgattcataaatgtggccttatttta

SEQ ID NO: 688186 - DNA, 33 bp, Homo sapien
ggtgaaatgattcatagatgtggccttatttta

SEQ ID NO: 688187 - DNA, 33 bp, Homo sapien
taaatgatatttatgaaaaaagccagagctctc

SEQ ID NO: 688188 - DNA, 33 bp, Homo sapien
taaatgatatttatgataaaagccagagctctc

SEQ ID NO: 688189 - DNA, 33 bp, Homo sapien
ctctctgcaggacagactcattcagtagttgaa

SEQ ID NO: 688190 - DNA, 33 bp, Homo sapien
ctctctgcaggacagattcattcagtagttgaa

SEQ ID NO: 688191 - DNA, 33 bp, Homo sapien
gcctcatgaatttccaaaattacttcctcctga

SEQ ID NO: 688192 - DNA, 33 bp, Homo sapien
gcctcatgaatttccagaattacttcctcctga

SEQ ID NO: 688193 - DNA, 33 bp, Homo sapien
catcacagtggtgaacacagaggctggccaaga

SEQ ID NO: 688194 - DNA, 33 bp, Homo sapien
catcacagtggtgaacgcagaggctggccaaga

SEQ ID NO: 688195 - DNA, 33 bp, Homo sapien
tcatttattcttgacactacatcatgaaaaatc

SEQ ID NO: 688196 - DNA, 33 bp, Homo sapien
tcatttattcttgacagtacatcatgaaaaatc

SEQ ID NO: 688197 - DNA, 33 bp, Homo sapien
gttagaactttttcacaatctggctcctttata

SEQ ID NO: 688198 - DNA, 33 bp, Homo sapien
gttagaactttttcacgatctggctcctttata

SEQ ID NO: 688199 - DNA, 33 bp, Homo sapien
cttccaatcacctccacaagcaatggccatgtc

SEQ ID NO: 688200 - DNA, 33 bp, Homo sapien
cttccaatcacctccataagcaatggccatgtc

SEQ ID NO: 688201 - DNA, 33 bp, Homo sapien
tctaccttttacttcaagtctttgtgatgtgtt

SEQ ID NO: 688202 - DNA, 33 bp, Homo sapien
tctaccttttacttcatgtctttgtgatgtgtt

SEQ ID NO: 688203 - DNA, 33 bp, Homo sapien
cacatgagatgtgagacaaaagatggttcactt

SEQ ID NO: 688204 - DNA, 33 bp, Homo sapien
cacatgagatgtgagataaaagatggttcactt

SEQ ID NO: 688205 - DNA, 33 bp, Homo sapien
acctgttgacagaccacgttctagttgctaggg

SEQ ID NO: 688206 - DNA, 33 bp, Homo sapien
acctgttgacagaccatgttctagttgctaggg

SEQ ID NO: 688207 - DNA, 33 bp, Homo sapien
tttataaaaagctcaaaaataagtgacattaga

SEQ ID NO: 688208 - DNA, 33 bp, Homo sapien
tttataaaaagctcaataataagtgacattaga

SEQ ID NO: 688209 - DNA, 33 bp, Homo sapien
acattttcggtttggcatagcacattgtgccaa

SEQ ID NO: 688210 - DNA, 33 bp, Homo sapien
acattttcggtttggcgtagcacattgtgccaa

SEQ ID NO: 688211 - DNA, 33 bp, Homo sapien
ctgttgtgtctggtccgctacagtgagaataag

SEQ ID NO: 688212 - DNA, 33 bp, Homo sapien
ctgttgtgtctggtcctctacagtgagaataag

SEQ ID NO: 688213 - DNA, 33 bp, Homo sapien
acatcagctggacccacagggatctttttctac

SEQ ID NO: 688214 - DNA, 33 bp, Homo sapien
acatcagctggacccagagggatctttttctac

SEQ ID NO: 688215 - DNA, 33 bp, Homo sapien
gcgattttagtagaagaattagacctgagtgat

SEQ ID NO: 688216 - DNA, 33 bp, Homo sapien
gcgattttagtagaaggattagacctgagtgat

SEQ ID NO: 688217 - DNA, 33 bp, Homo sapien
gtctcagattttccataaataagaggatagcga

SEQ ID NO: 688218 - DNA, 33 bp, Homo sapien
gtctcagattttccatgaataagaggatagcga

SEQ ID NO: 688219 - DNA, 33 bp, Homo sapien
ccattggtatcagttacctgtttcaatgcaaca

SEQ ID NO: 688220 - DNA, 33 bp, Homo sapien
ccattggtatcagttatctgtttcaatgcaaca

SEQ ID NO: 688221 - DNA, 33 bp, Homo sapien
ttctgtttatttcttacctacaatggtgtgtca

SEQ ID NO: 688222 - DNA, 33 bp, Homo sapien
ttctgtttatttcttatctacaatggtgtgtca

SEQ ID NO: 688223 - DNA, 33 bp, Homo sapien
gaatcagccatcaagcacggtatacctatcttc

SEQ ID NO: 688224 - DNA, 33 bp, Homo sapien
gaatcagccatcaagcgcggtatacctatcttc

SEQ ID NO: 688225 - DNA, 33 bp, Homo sapien
aagcagtcattttcagacctttcgcaacctcgg

SEQ ID NO: 688226 - DNA, 33 bp, Homo sapien
aagcagtcattttcagccctttcgcaacctcgg

SEQ ID NO: 688227 - DNA, 33 bp, Homo sapien
gacaatgagttctagtcaatgaaatgtaaccgg

SEQ ID NO: 688228 - DNA, 33 bp, Homo sapien
gacaatgagttctagtgaatgaaatgtaaccgg

SEQ ID NO: 688229 - DNA, 33 bp, Homo sapien
ttgtatattaagcatcacaggaataaatcttgg

SEQ ID NO: 688230 - DNA, 33 bp, Homo sapien
ttgtatattaagcatcgcaggaataaatcttgg

SEQ ID NO: 688231 - DNA, 33 bp, Homo sapien
tctgtttccagaacaacgtcgggtggttgtaaa

SEQ ID NO: 688232 - DNA, 33 bp, Homo sapien
tctgtttccagaacaatgtcgggtggttgtaaa

SEQ ID NO: 688233 - DNA, 33 bp, Homo sapien
ataaaaagagatctccggaggcaaacatatggg

SEQ ID NO: 688234 - DNA, 33 bp, Homo sapien
ataaaaagagatctcctgaggcaaacatatggg

SEQ ID NO: 688235 - DNA, 33 bp, Homo sapien
gatgaagaaacaggctcagcaaggtcatgcaac

SEQ ID NO: 688236 - DNA, 33 bp, Homo sapien
gatgaagaaacaggctgagcaaggtcatgcaac

SEQ ID NO: 688237 - DNA, 33 bp, Homo sapien
acaaagtacagattcaactagaacccgggcagg

SEQ ID NO: 688238 - DNA, 33 bp, Homo sapien
acaaagtacagattcagctagaacccgggcagg

SEQ ID NO: 688239 - DNA, 33 bp, Homo sapien
gtggatccaggatctacgttgaaggttatcttt

SEQ ID NO: 688240 - DNA, 33 bp, Homo sapien
gtggatccaggatctatgttgaaggttatcttt

SEQ ID NO: 688241 - DNA, 33 bp, Homo sapien
acaaatgattttttacaaagtcccttctataac

SEQ ID NO: 688242 - DNA, 33 bp, Homo sapien
acaaatgattttttacgaagtcccttctataac

SEQ ID NO: 688243 - DNA, 33 bp, Homo sapien
agtgaaaggaaaacaaatgtgtattgaatgtct

SEQ ID NO: 688244 - DNA, 33 bp, Homo sapien
agtgaaaggaaaacaagtgtgtattgaatgtct

SEQ ID NO: 688245 - DNA, 33 bp, Homo sapien
tggagaggggagctagcagagagaactttcaga

SEQ ID NO: 688246 - DNA, 33 bp, Homo sapien
tggagaggggagctaggagagagaactttcaga

SEQ ID NO: 688247 - DNA, 33 bp, Homo sapien
aacttccaagggcacaagtaacttttttctgtc

SEQ ID NO: 688248 - DNA, 33 bp, Homo sapien
aacttccaagggcacaggtaacttttttctgtc

SEQ ID NO: 688249 - DNA, 33 bp, Homo sapien
ggccctggggcgattaagctggtggatagtgtt

SEQ ID NO: 688250 - DNA, 33 bp, Homo sapien
ggccctggggcgattaggctggtggatagtgtt

SEQ ID NO: 688251 - DNA, 33 bp, Homo sapien
gggaccaagcatgaacagagatcacatggtgag

SEQ ID NO: 688252 - DNA, 33 bp, Homo sapien
gggaccaagcatgaacggagatcacatggtgag

SEQ ID NO: 688253 - DNA, 33 bp, Homo sapien
ataaaggcagaggctaaataaaagtaaacaatt

SEQ ID NO: 688254 - DNA, 33 bp, Homo sapien
ataaaggcagaggctacataaaagtaaacaatt

SEQ ID NO: 688255 - DNA, 33 bp, Homo sapien
acactataaagttacacggcataggtctgggag

SEQ ID NO: 688256 - DNA, 33 bp, Homo sapien
acactataaagttacatggcataggtctgggag

SEQ ID NO: 688257 - DNA, 33 bp, Homo sapien
ctaggaagaaccataacatgttggggtaggcag

SEQ ID NO: 688258 - DNA, 33 bp, Homo sapien
ctaggaagaaccataatatgttggggtaggcag

SEQ ID NO: 688259 - DNA, 33 bp, Homo sapien
tgagtaacatacaccaatcaaataaaacatggg

SEQ ID NO: 688260 - DNA, 33 bp, Homo sapien
tgagtaacatacaccagtcaaataaaacatggg

SEQ ID NO: 688261 - DNA, 33 bp, Homo sapien
catattgtcactttaaatccctctcataactca

SEQ ID NO: 688262 - DNA, 33 bp, Homo sapien
catattgtcactttaactccctctcataactca

SEQ ID NO: 688263 - DNA, 33 bp, Homo sapien
gtttattatacaaggccctggatatgagctgtg

SEQ ID NO: 688264 - DNA, 33 bp, Homo sapien
gtttattatacaaggctctggatatgagctgtg

SEQ ID NO: 688265 - DNA, 33 bp, Homo sapien
ggctgcctcttgaataaattgtagaagaacaac

SEQ ID NO: 688266 - DNA, 33 bp, Homo sapien
ggctgcctcttgaatagattgtagaagaacaac

SEQ ID NO: 688267 - DNA, 33 bp, Homo sapien
tcaacaaacttttgtacatccttggcactttga

SEQ ID NO: 688268 - DNA, 33 bp, Homo sapien
tcaacaaacttttgtagatccttggcactttga

SEQ ID NO: 688269 - DNA, 33 bp, Homo sapien
ggacctattatgtacaaggttgcatgataagta

SEQ ID NO: 688270 - DNA, 33 bp, Homo sapien
ggacctattatgtacagggttgcatgataagta

SEQ ID NO: 688271 - DNA, 33 bp, Homo sapien
atttcctaattacaaaagttccagctatactct

SEQ ID NO: 688272 - DNA, 33 bp, Homo sapien
atttcctaattacaaatgttccagctatactct

SEQ ID NO: 688273 - DNA, 33 bp, Homo sapien
aacactaagatttttaccctgaagcacaatggt

SEQ ID NO: 688274 - DNA, 33 bp, Homo sapien
aacactaagatttttagcctgaagcacaatggt

SEQ ID NO: 688275 - DNA, 33 bp, Homo sapien
gggacatagaaattaacgaggactgacttcatc

SEQ ID NO: 688276 - DNA, 33 bp, Homo sapien
gggacatagaaattaatgaggactgacttcatc

SEQ ID NO: 688277 - DNA, 33 bp, Homo sapien
cactgggttgagttccaaattttggcttgtcat

SEQ ID NO: 688278 - DNA, 33 bp, Homo sapien
cactgggttgagttccgaattttggcttgtcat

SEQ ID NO: 688279 - DNA, 33 bp, Homo sapien
atcttaaaattgggagcaagattattgtcttat

SEQ ID NO: 688280 - DNA, 33 bp, Homo sapien
atcttaaaattgggaggaagattattgtcttat

SEQ ID NO: 688281 - DNA, 33 bp, Homo sapien
gatcacaacttaccacaactcattggcaaaatt

SEQ ID NO: 688282 - DNA, 33 bp, Homo sapien
gatcacaacttaccacgactcattggcaaaatt

SEQ ID NO: 688283 - DNA, 33 bp, Homo sapien
ggaagcagtgattgggaaacagcaatttttatg

SEQ ID NO: 688284 - DNA, 33 bp, Homo sapien
ggaagcagtgattggggaacagcaatttttatg

SEQ ID NO: 688285 - DNA, 33 bp, Homo sapien
tggccacacttgctccaacattatgacaaggtg

SEQ ID NO: 688286 - DNA, 33 bp, Homo sapien
tggccacacttgctccgacattatgacaaggtg

SEQ ID NO: 688287 - DNA, 33 bp, Homo sapien
tttccatgatgatgtgcaaatttgtgacgtgtt

SEQ ID NO: 688288 - DNA, 33 bp, Homo sapien
tttccatgatgatgtgtaaatttgtgacgtgtt

SEQ ID NO: 688289 - DNA, 33 bp, Homo sapien
ccagaccctgtaataaacacttcatgagcttcc

SEQ ID NO: 688290 - DNA, 33 bp, Homo sapien
ccagaccctgtaataatcacttcatgagcttcc

SEQ ID NO: 688291 - DNA, 33 bp, Homo sapien
ctgagtttcacaaaaaattattacactctgttc

SEQ ID NO: 688292 - DNA, 33 bp, Homo sapien
ctgagtttcacaaaaagttattacactctgttc

SEQ ID NO: 688293 - DNA, 33 bp, Homo sapien
ctggggcttgagggtcgcagccaggtgtccaga

SEQ ID NO: 688294 - DNA, 33 bp, Homo sapien
ctggggcttgagggtctcagccaggtgtccaga

SEQ ID NO: 688295 - DNA, 33 bp, Homo sapien
gtaaactataagaagaaaacttagaggaaatgt

SEQ ID NO: 688296 - DNA, 33 bp, Homo sapien
gtaaactataagaagagaacttagaggaaatgt

SEQ ID NO: 688297 - DNA, 33 bp, Homo sapien
ttgttgcattattttgcagtggtatgctttgat

SEQ ID NO: 688298 - DNA, 33 bp, Homo sapien
ttgttgcattattttgtagtggtatgctttgat

SEQ ID NO: 688299 - DNA, 33 bp, Homo sapien
tctaaagatggtatgtaaatcattcttaagtca

SEQ ID NO: 688300 - DNA, 33 bp, Homo sapien
tctaaagatggtatgttaatcattcttaagtca

SEQ ID NO: 688301 - DNA, 33 bp, Homo sapien
ggagtttataattaaaactcagaacctcatgtg

SEQ ID NO: 688302 - DNA, 33 bp, Homo sapien
ggagtttataattaaatctcagaacctcatgtg

SEQ ID NO: 688303 - DNA, 33 bp, Homo sapien
tttcttttactgtgaaatatatgtaacacattt

SEQ ID NO: 688304 - DNA, 33 bp, Homo sapien
tttcttttactgtgaagtatatgtaacacattt

SEQ ID NO: 688305 - DNA, 33 bp, Homo sapien
acaagaagtatgtttacaggtttctcccatatc

SEQ ID NO: 688306 - DNA, 33 bp, Homo sapien
acaagaagtatgtttataggtttctcccatatc

SEQ ID NO: 688307 - DNA, 33 bp, Homo sapien
agcttccttatcactcgaatgaggggaatatac

SEQ ID NO: 688308 - DNA, 33 bp, Homo sapien
agcttccttatcactctaatgaggggaatatac

SEQ ID NO: 688309 - DNA, 33 bp, Homo sapien
aatataaaaaacagccaaaatgtttcttcaata

SEQ ID NO: 688310 - DNA, 33 bp, Homo sapien
aatataaaaaacagccgaaatgtttcttcaata

SEQ ID NO: 688311 - DNA, 33 bp, Homo sapien
gggtgaatggtttgccaaagttcctgcagccac

SEQ ID NO: 688312 - DNA, 33 bp, Homo sapien
gggtgaatggtttgcccaagttcctgcagccac

SEQ ID NO: 688313 - DNA, 33 bp, Homo sapien
aatgacaagatggggaaagtagctttgagaaga

SEQ ID NO: 688314 - DNA, 33 bp, Homo sapien
aatgacaagatggggagagtagctttgagaaga

SEQ ID NO: 688315 - DNA, 33 bp, Homo sapien
aagagtctgtgtagataaatttggtggcctttg

SEQ ID NO: 688316 - DNA, 33 bp, Homo sapien
aagagtctgtgtagatgaatttggtggcctttg

SEQ ID NO: 688317 - DNA, 33 bp, Homo sapien
taatttctaacatataagcaagtgatgccaatt

SEQ ID NO: 688318 - DNA, 33 bp, Homo sapien
taatttctaacatatacgcaagtgatgccaatt

SEQ ID NO: 688319 - DNA, 33 bp, Homo sapien
agacaatcatcacatacgcaaacttggactttt

SEQ ID NO: 688320 - DNA, 33 bp, Homo sapien
agacaatcatcacataggcaaacttggactttt

SEQ ID NO: 688321 - DNA, 33 bp, Homo sapien
tggaaggaatctccaacttcggaggtgaccctg

SEQ ID NO: 688322 - DNA, 33 bp, Homo sapien
tggaaggaatctccaagttcggaggtgaccctg

SEQ ID NO: 688323 - DNA, 33 bp, Homo sapien
caattttcctcaaagacggtgggtgacatggaa

SEQ ID NO: 688324 - DNA, 33 bp, Homo sapien
caattttcctcaaagatggtgggtgacatggaa

SEQ ID NO: 688325 - DNA, 33 bp, Homo sapien
ttgacacttttgtagacgcaataaaatagaagg

SEQ ID NO: 688326 - DNA, 33 bp, Homo sapien
ttgacacttttgtagatgcaataaaatagaagg

SEQ ID NO: 688327 - DNA, 33 bp, Homo sapien
ggatattgtgagaaaaagaaatagcctaacaaa

SEQ ID NO: 688328 - DNA, 33 bp, Homo sapien
ggatattgtgagaaaatgaaatagcctaacaaa

SEQ ID NO: 688329 - DNA, 33 bp, Homo sapien
tttgctctcagttacccgatatggctcagtctt

SEQ ID NO: 688330 - DNA, 33 bp, Homo sapien
tttgctctcagttacctgatatggctcagtctt

SEQ ID NO: 688331 - DNA, 33 bp, Homo sapien
ccgcagcccatttgtaacatacacactcctata

SEQ ID NO: 688332 - DNA, 33 bp, Homo sapien
ccgcagcccatttgtagcatacacactcctata

SEQ ID NO: 688333 - DNA, 33 bp, Homo sapien
agggtggatggggttacattatgttaaagatta

SEQ ID NO: 688334 - DNA, 33 bp, Homo sapien
agggtggatggggttatattatgttaaagatta

SEQ ID NO: 688335 - DNA, 33 bp, Homo sapien
gttcgaatgtcaggaaaagcatctggggcttgg

SEQ ID NO: 688336 - DNA, 33 bp, Homo sapien
gttcgaatgtcaggaagagcatctggggcttgg

SEQ ID NO: 688337 - DNA, 33 bp, Homo sapien
ctccctgccttgaatacctcatatcaccaaaaa

SEQ ID NO: 688338 - DNA, 33 bp, Homo sapien
ctccctgccttgaatatctcatatcaccaaaaa

SEQ ID NO: 688339 - DNA, 33 bp, Homo sapien
ataaaagttctgattacattgtagagttttatt

SEQ ID NO: 688340 - DNA, 33 bp, Homo sapien
ataaaagttctgattatattgtagagttttatt

SEQ ID NO: 688341 - DNA, 33 bp, Homo sapien
taatgcctgaaactgacaagtccagaaacagca

SEQ ID NO: 688342 - DNA, 33 bp, Homo sapien
taatgcctgaaactgagaagtccagaaacagca

SEQ ID NO: 688343 - DNA, 33 bp, Homo sapien
aggcaagctgcagaagcctaaagaatgcatggg

SEQ ID NO: 688344 - DNA, 33 bp, Homo sapien
aggcaagctgcagaaggctaaagaatgcatggg

SEQ ID NO: 688345 - DNA, 33 bp, Homo sapien
ttttgcacacttgaaaaaaaagctattctaatc

SEQ ID NO: 688346 - DNA, 33 bp, Homo sapien
ttttgcacacttgaaagaaaagctattctaatc

SEQ ID NO: 688347 - DNA, 33 bp, Homo sapien
gcgctgttctgcacaacggacaagcaacatagg

SEQ ID NO: 688348 - DNA, 33 bp, Homo sapien
gcgctgttctgcacaatggacaagcaacatagg

SEQ ID NO: 688349 - DNA, 33 bp, Homo sapien
tggggacatctgagtacaggtttagaagcttga

SEQ ID NO: 688350 - DNA, 33 bp, Homo sapien
tggggacatctgagtagaggtttagaagcttga

SEQ ID NO: 688351 - DNA, 33 bp, Homo sapien
aaaggtcaatgataccacaaagaaactgcatca

SEQ ID NO: 688352 - DNA, 33 bp, Homo sapien
aaaggtcaatgataccgcaaagaaactgcatca

SEQ ID NO: 688353 - DNA, 33 bp, Homo sapien; identical to SEQ ID NO: 688351

SEQ ID NO: 688354 - DNA, 33 bp, Homo sapien; identical to SEQ ID NO: 688352

SEQ ID NO: 688355 - DNA, 33 bp, Homo sapien
gtatttcaacacctaaacctgataattcttatc

SEQ ID NO: 688356 - DNA, 33 bp, Homo sapien
gtatttcaacacctaagcctgataattcttatc

SEQ ID NO: 688357 - DNA, 33 bp, Homo sapien
accatacaacttagaactcaactacacttgaac

SEQ ID NO: 688358 - DNA, 33 bp, Homo sapien
accatacaacttagaattcaactacacttgaac

SEQ ID NO: 688359 - DNA, 33 bp, Homo sapien
gtttataaggggccaaaattttgttgagtaaat

SEQ ID NO: 688360 - DNA, 33 bp, Homo sapien
gtttataaggggccaacattttgttgagtaaat

SEQ ID NO: 688361 - DNA, 33 bp, Homo sapien
aaagttgggagtaagcaaggaaaggagttggaa

SEQ ID NO: 688362 - DNA, 33 bp, Homo sapien
aaagttgggagtaagcgaggaaaggagttggaa

SEQ ID NO: 688363 - DNA, 33 bp, Homo sapien
gtgattccaaggatgacagatttgaccctgaat

SEQ ID NO: 688364 - DNA, 33 bp, Homo sapien
gtgattccaaggatgatagatttgaccctgaat

SEQ ID NO: 688365 - DNA, 33 bp, Homo sapien
catgagccagcttacacaggcctccaagtcgga

SEQ ID NO: 688366 - DNA, 33 bp, Homo sapien
catgagccagcttacataggcctccaagtcgga

SEQ ID NO: 688367 - DNA, 33 bp, Homo sapien
acaagaatccacttcactacacaaaaggatggc

SEQ ID NO: 688368 - DNA, 33 bp, Homo sapien
acaagaatccacttcattacacaaaaggatggc

SEQ ID NO: 688369 - DNA, 33 bp, Homo sapien
tggctgtgagttcagccgatgtgcctggtcttc

SEQ ID NO: 688370 - DNA, 33 bp, Homo sapien
tggctgtgagttcagctgatgtgcctggtcttc

SEQ ID NO: 688371 - DNA, 33 bp, Homo sapien
cctgaggaattcaacacgggaggtgtcagggat

SEQ ID NO: 688372 - DNA, 33 bp, Homo sapien
cctgaggaattcaacatgggaggtgtcagggat

SEQ ID NO: 688373 - DNA, 33 bp, Homo sapien
gcactaaagtttctacacaatttgattctaatc

SEQ ID NO: 688374 - DNA, 33 bp, Homo sapien
gcactaaagtttctacgcaatttgattctaatc

SEQ ID NO: 688375 - DNA, 33 bp, Homo sapien
aaaagttaagcatcaaaagaatggaataagaat

SEQ ID NO: 688376 - DNA, 33 bp, Homo sapien
aaaagttaagcatcaagagaatggaataagaat

SEQ ID NO: 688377 - DNA, 33 bp, Homo sapien
atatgacattccttacaaaaccaattagtaaaa

SEQ ID NO: 688378 - DNA, 33 bp, Homo sapien
atatgacattccttacgaaaccaattagtaaaa

SEQ ID NO: 688379 - DNA, 33 bp, Homo sapien
tgtaccagctacattacgtacttgtcaaaaata

SEQ ID NO: 688380 - DNA, 33 bp, Homo sapien
tgtaccagctacattatgtacttgtcaaaaata

SEQ ID NO: 688381 - DNA, 33 bp, Homo sapien
ctgtgagggatggagaaaagaaggcgcataaaa

SEQ ID NO: 688382 - DNA, 33 bp, Homo sapien
ctgtgagggatggagagaagaaggcgcataaaa

SEQ ID NO: 688383 - DNA, 33 bp, Homo sapien
aatgcttttcagaggaaaatgaaaattacaatg

SEQ ID NO: 688384 - DNA, 33 bp, Homo sapien
aatgcttttcagaggagaatgaaaattacaatg

SEQ ID NO: 688385 - DNA, 33 bp, Homo sapien
ttccccacagacttccccttgtcatagctctgt

SEQ ID NO: 688386 - DNA, 33 bp, Homo sapien
ttccccacagacttccgcttgtcatagctctgt

SEQ ID NO: 688387 - DNA, 33 bp, Homo sapien
gtactggaaccaggaagaatttactcaggacca

SEQ ID NO: 688388 - DNA, 33 bp, Homo sapien
gtactggaaccaggaataatttactcaggacca

SEQ ID NO: 688389 - DNA, 33 bp, Homo sapien
acacatctgccttctccagagcccaggaaccaa

SEQ ID NO: 688390 - DNA, 33 bp, Homo sapien
acacatctgccttctctagagcccaggaaccaa

SEQ ID NO: 688391 - DNA, 33 bp, Homo sapien
ttgaccataaaatgagaaccccaagacttgtcc

SEQ ID NO: 688392 - DNA, 33 bp, Homo sapien
ttgaccataaaatgaggaccccaagacttgtcc

SEQ ID NO: 688393 - DNA, 33 bp, Homo sapien
aacttaaagcctttgaacaagtagcttggcctc

SEQ ID NO: 688394 - DNA, 33 bp, Homo sapien
aacttaaagcctttgagcaagtagcttggcctc

SEQ ID NO: 688395 - DNA, 33 bp, Homo sapien
aatgataaaactcaggaacaccctccatcctcc

SEQ ID NO: 688396 - DNA, 33 bp, Homo sapien
aatgataaaactcagggacaccctccatcctcc

SEQ ID NO: 688397 - DNA, 33 bp, Homo sapien
aggtttcacaaagcaaaccctaccttgctatgt

SEQ ID NO: 688398 - DNA, 33 bp, Homo sapien
aggtttcacaaagcaatccctaccttgctatgt

SEQ ID NO: 688399 - DNA, 33 bp, Homo sapien
tacttgccaatcaagaggagagtgaagtaatat

SEQ ID NO: 688400 - DNA, 33 bp, Homo sapien
tacttgccaatcaagatgagagtgaagtaatat

SEQ ID NO: 688401 - DNA, 33 bp, Homo sapien
ataacaaacccatagacgtacgccctgagtcta

SEQ ID NO: 688402 - DNA, 33 bp, Homo sapien
ataacaaacccatagaggtacgccctgagtcta

SEQ ID NO: 688403 - DNA, 33 bp, Homo sapien
cagtctgtggcatccccgacttctcacttaggc

SEQ ID NO: 688404 - DNA, 33 bp, Homo sapien
cagtctgtggcatccctgacttctcacttaggc

SEQ ID NO: 688405 - DNA, 33 bp, Homo sapien
tagagggaacagcacaagtaaagagcctggggc

SEQ ID NO: 688406 - DNA, 33 bp, Homo sapien
tagagggaacagcacacgtaaagagcctggggc

SEQ ID NO: 688407 - DNA, 33 bp, Homo sapien
ttgttgcatttggtaaatatcgagccatccaat

SEQ ID NO: 688408 - DNA, 33 bp, Homo sapien
ttgttgcatttggtaagtatcgagccatccaat

SEQ ID NO: 688409 - DNA, 33 bp, Homo sapien
ctctgatggttacgcaaggtttgctggtgaaga

SEQ ID NO: 688410 - DNA, 33 bp, Homo sapien
ctctgatggttacgcagggtttgctggtgaaga

SEQ ID NO: 688411 - DNA, 33 bp, Homo sapien
cctgggaaagaggtaaattaagtaggcatggag

SEQ ID NO: 688412 - DNA, 33 bp, Homo sapien
cctgggaaagaggtaagttaagtaggcatggag

SEQ ID NO: 688413 - DNA, 33 bp, Homo sapien
gagctgataatctgaacgaggtggagctggatg

SEQ ID NO: 688414 - DNA, 33 bp, Homo sapien
gagctgataatctgaatgaggtggagctggatg

SEQ ID NO: 688415 - DNA, 33 bp, Homo sapien
tggtgacgtctccttccctgaggctttggacag

SEQ ID NO: 688416 - DNA, 33 bp, Homo sapien
tggtgacgtctccttctctgaggctttggacag

SEQ ID NO: 688417 - DNA, 33 bp, Homo sapien
aagagcattaggaagcaaatttttataaagact

SEQ ID NO: 688418 - DNA, 33 bp, Homo sapien
aagagcattaggaagccaatttttataaagact

SEQ ID NO: 688419 - DNA, 33 bp, Homo sapien
tttttgtaacatatgcgccagtcttagaaaagc

SEQ ID NO: 688420 - DNA, 33 bp, Homo sapien
tttttgtaacatatgctccagtcttagaaaagc

SEQ ID NO: 688421 - DNA, 33 bp, Homo sapien
cctagttcaaaaacaacgagcttgggtcaggca

SEQ ID NO: 688422 - DNA, 33 bp, Homo sapien
cctagttcaaaaacaaggagcttgggtcaggca

SEQ ID NO: 688423 - DNA, 33 bp, Homo sapien
ttctgttataagtccacattagacttgcatcat

SEQ ID NO: 688424 - DNA, 33 bp, Homo sapien
ttctgttataagtccatattagacttgcatcat

SEQ ID NO: 688425 - DNA, 33 bp, Homo sapien
catggcccagtaaaaactttctgaatcatctct

SEQ ID NO: 688426 - DNA, 33 bp, Homo sapien
catggcccagtaaaaattttctgaatcatctct

SEQ ID NO: 688427 - DNA, 33 bp, Homo sapien
ttttagtaactttcaagtgtagaatacattatt

SEQ ID NO: 688428 - DNA, 33 bp, Homo sapien
ttttagtaactttcaattgtagaatacattatt

SEQ ID NO: 688429 - DNA, 33 bp, Homo sapien
aagcattatcataacacacacaaaaaatggtga

SEQ ID NO: 688430 - DNA, 33 bp, Homo sapien
aagcattatcataacatacacaaaaaatggtga

SEQ ID NO: 688431 - DNA, 33 bp, Homo sapien
aaccatcagatttcacgggacttattcactacc

SEQ ID NO: 688432 - DNA, 33 bp, Homo sapien
aaccatcagatttcactggacttattcactacc

SEQ ID NO: 688433 - DNA, 33 bp, Homo sapien
ggacagtagtctaggcaacatctggcttgagac

SEQ ID NO: 688434 - DNA, 33 bp, Homo sapien
ggacagtagtctaggcgacatctggcttgagac

SEQ ID NO: 688435 - DNA, 33 bp, Homo sapien
caggtatttcacataaaaagggagatagatgct

SEQ ID NO: 688436 - DNA, 33 bp, Homo sapien
caggtatttcacataacaagggagatagatgct

SEQ ID NO: 688437 - DNA, 33 bp, Homo sapien
cttccctattatcacaactcagggtaagcccaa

SEQ ID NO: 688438 - DNA, 33 bp, Homo sapien
cttccctattatcacagctcagggtaagcccaa

SEQ ID NO: 688439 - DNA, 33 bp, Homo sapien
tcaatggcatggtggacactgtcaacactccta

SEQ ID NO: 688440 - DNA, 33 bp, Homo sapien
tcaatggcatggtggatactgtcaacactccta

SEQ ID NO: 688441 - DNA, 33 bp, Homo sapien
taatgttcagtgcacaaactcacaaactaagga

SEQ ID NO: 688442 - DNA, 33 bp, Homo sapien
taatgttcagtgcacatactcacaaactaagga

SEQ ID NO: 688443 - DNA, 33 bp, Homo sapien
tggagggcctgggagacgaagcaaattgttcat

SEQ ID NO: 688444 - DNA, 33 bp, Homo sapien
tggagggcctgggagatgaagcaaattgttcat

SEQ ID NO: 688445 - DNA, 33 bp, Homo sapien
taaaaaatctgaacaacctgggaaactagaaca

SEQ ID NO: 688446 - DNA, 33 bp, Homo sapien
taaaaaatctgaacaatctgggaaactagaaca

SEQ ID NO: 688447 - DNA, 33 bp, Homo sapien
tggttataaaagaagacgagcaaagagatgaag

SEQ ID NO: 688448 - DNA, 33 bp, Homo sapien
tggttataaaagaagatgagcaaagagatgaag

SEQ ID NO: 688449 - DNA, 33 bp, Homo sapien
gttcaatttgccttcaaataatctgagagtggt

SEQ ID NO: 688450 - DNA, 33 bp, Homo sapien
gttcaatttgccttcagataatctgagagtggt

SEQ ID NO: 688451 - DNA, 33 bp, Homo sapien
actacagttctgcacactaatcaacctaaagtt

SEQ ID NO: 688452 - DNA, 33 bp, Homo sapien
actacagttctgcacattaatcaacctaaagtt

SEQ ID NO: 688453 - DNA, 33 bp, Homo sapien
tcactccaaacattcaccttaggttggcattct

SEQ ID NO: 688454 - DNA, 33 bp, Homo sapien
tcactccaaacattcatcttaggttggcattct

SEQ ID NO: 688455 - DNA, 33 bp, Homo sapien
ttaaggtggaaacttacatcactgattttgaaa

SEQ ID NO: 688456 - DNA, 33 bp, Homo sapien
ttaaggtggaaacttagatcactgattttgaaa

SEQ ID NO: 688457 - DNA, 33 bp, Homo sapien
attaagaatttgaacaactcctaaacagcctgt

SEQ ID NO: 688458 - DNA, 33 bp, Homo sapien
attaagaatttgaacacctcctaaacagcctgt

SEQ ID NO: 688459 - DNA, 33 bp, Homo sapien
acctaatagacatttacagaacgttccatctga

SEQ ID NO: 688460 - DNA, 33 bp, Homo sapien
acctaatagacatttatagaacgttccatctga

SEQ ID NO: 688461 - DNA, 33 bp, Homo sapien
aggttaaatagacaaacctaccattgaatctga

SEQ ID NO: 688462 - DNA, 33 bp, Homo sapien
aggttaaatagacaaatctaccattgaatctga

SEQ ID NO: 688463 - DNA, 33 bp, Homo sapien
atattggatagaaaagcaagacccgactactat

SEQ ID NO: 688464 - DNA, 33 bp, Homo sapien
atattggatagaaaaggaagacccgactactat

SEQ ID NO: 688465 - DNA, 33 bp, Homo sapien
aaaccctctttttgtacactggatcctaccttc

SEQ ID NO: 688466 - DNA, 33 bp, Homo sapien
aaaccctctttttgtagactggatcctaccttc

SEQ ID NO: 688467 - DNA, 33 bp, Homo sapien
agaatggataaatcggaaacaaaaagtaatatt

SEQ ID NO: 688468 - DNA, 33 bp, Homo sapien
agaatggataaatcgggaacaaaaagtaatatt

SEQ ID NO: 688469 - DNA, 33 bp, Homo sapien
tgttatctgtgttctcaaggttgtttacatctg

SEQ ID NO: 688470 - DNA, 33 bp, Homo sapien
tgttatctgtgttctcgaggttgtttacatctg

SEQ ID NO: 688471 - DNA, 33 bp, Homo sapien
ttaaaagtgaggtaacaaatgttgcccaagatc

SEQ ID NO: 688472 - DNA, 33 bp, Homo sapien
ttaaaagtgaggtaacgaatgttgcccaagatc

SEQ ID NO: 688473 - DNA, 33 bp, Homo sapien
gagtagcagccactagaaacagtaatgataatt

SEQ ID NO: 688474 - DNA, 33 bp, Homo sapien
gagtagcagccactagtaacagtaatgataatt

SEQ ID NO: 688475 - DNA, 33 bp, Homo sapien
catcaagacagtttcagattctggtacattaaa

SEQ ID NO: 688476 - DNA, 33 bp, Homo sapien
catcaagacagtttcatattctggtacattaaa

SEQ ID NO: 688477 - DNA, 33 bp, Homo sapien
aaggaactaatttcagaaactaccagtctctga

SEQ ID NO: 688478 - DNA, 33 bp, Homo sapien
aaggaactaatttcagtaactaccagtctctga

SEQ ID NO: 688479 - DNA, 33 bp, Homo sapien
taccgctcttccaaagaaaatctctgtccacaa

SEQ ID NO: 688480 - DNA, 33 bp, Homo sapien
taccgctcttccaaaggaaatctctgtccacaa

SEQ ID NO: 688481 - DNA, 33 bp, Homo sapien
actggattaagtagtacatttgaaacagctcag

SEQ ID NO: 688482 - DNA, 33 bp, Homo sapien
actggattaagtagtagatttgaaacagctcag

SEQ ID NO: 688483 - DNA, 33 bp, Homo sapien
aagctgtcgaaggctccaggggaaagcacccct

SEQ ID NO: 688484 - DNA, 33 bp, Homo sapien
aagctgtcgaaggctctaggggaaagcacccct

SEQ ID NO: 688485 - DNA, 33 bp, Homo sapien
aacagccacagtgaaactcagactcagaaatgg

SEQ ID NO: 688486 - DNA, 33 bp, Homo sapien
aacagccacagtgaaattcagactcagaaatgg

SEQ ID NO: 688487 - DNA, 33 bp, Homo sapien
aggtatggtatgattccatttatctgtaaagta

SEQ ID NO: 688488 - DNA, 33 bp, Homo sapien
aggtatggtatgattcgatttatctgtaaagta

SEQ ID NO: 688489 - DNA, 33 bp, Homo sapien
agtttcacactaaccaaaaatatagggaatgaa

SEQ ID NO: 688490 - DNA, 33 bp, Homo sapien
agtttcacactaaccagaaatatagggaatgaa

SEQ ID NO: 688491 - DNA, 33 bp, Homo sapien
agctgattgcactcgacacccggctcctcgacg

SEQ ID NO: 688492 - DNA, 33 bp, Homo sapien
agctgattgcactcgagacccggctcctcgacg

SEQ ID NO: 688493 - DNA, 33 bp, Homo sapien
ggtctcgtccattctacgggggtcataatatta

SEQ ID NO: 688494 - DNA, 33 bp, Homo sapien
ggtctcgtccattctatgggggtcataatatta

SEQ ID NO: 688495 - DNA, 33 bp, Homo sapien
actggagctccaggaaaggaaagaaggttgaac

SEQ ID NO: 688496 - DNA, 33 bp, Homo sapien
actggagctccaggaatggaaagaaggttgaac

SEQ ID NO: 688497 - DNA, 33 bp, Homo sapien
gctgatgactcgtccaagagcaatcatttggaa

SEQ ID NO: 688498 - DNA, 33 bp, Homo sapien
gctgatgactcgtccaggagcaatcatttggaa

SEQ ID NO: 688499 - DNA, 33 bp, Homo sapien
caggtccaagctagccaacttattgccaggccc

SEQ ID NO: 688500 - DNA, 33 bp, Homo sapien
caggtccaagctagccgacttattgccaggccc

SEQ ID NO: 688501 - DNA, 33 bp, Homo sapien
gaagctagggaattaaaatatctttacacctgc

SEQ ID NO: 688502 - DNA, 33 bp, Homo sapien
gaagctagggaattaatatatctttacacctgc

SEQ ID NO: 688503 - DNA, 33 bp, Homo sapien
gctaagaagagaaaaaaccagtaacatttatac

SEQ ID NO: 688504 - DNA, 33 bp, Homo sapien
gctaagaagagaaaaacccagtaacatttatac

SEQ ID NO: 688505 - DNA, 33 bp, Homo sapien
tcatatcaataaagtcacatttctctgtggggg

SEQ ID NO: 688506 - DNA, 33 bp, Homo sapien
tcatatcaataaagtcgcatttctctgtggggg

SEQ ID NO: 688507 - DNA, 33 bp, Homo sapien
taagttctaaactccacgactctctctcttgga

SEQ ID NO: 688508 - DNA, 33 bp, Homo sapien
taagttctaaactccatgactctctctcttgga

SEQ ID NO: 688509 - DNA, 33 bp, Homo sapien
ggctaacaaacagtcaccaaacaataccaaata

SEQ ID NO: 688510 - DNA, 33 bp, Homo sapien
ggctaacaaacagtcagcaaacaataccaaata

SEQ ID NO: 688511 - DNA, 33 bp, Homo sapien
caatttactccaggctaaattcaacagaaactt

SEQ ID NO: 688512 - DNA, 33 bp, Homo sapien
caatttactccaggctgaattcaacagaaactt

SEQ ID NO: 688513 - DNA, 33 bp, Homo sapien
ttagcttcaaagtttacactccagtgagaaatt

SEQ ID NO: 688514 - DNA, 33 bp, Homo sapien
ttagcttcaaagtttatactccagtgagaaatt

SEQ ID NO: 688515 - DNA, 33 bp, Homo sapien
cgtagggttcgcattacaaatgtctatggatct

SEQ ID NO: 688516 - DNA, 33 bp, Homo sapien
cgtagggttcgcattataaatgtctatggatct

SEQ ID NO: 688517 - DNA, 33 bp, Homo sapien
ccttcttttcctactaataagatatattcagcc

SEQ ID NO: 688518 - DNA, 33 bp, Homo sapien
ccttcttttcctactagtaagatatattcagcc

SEQ ID NO: 688519 - DNA, 33 bp, Homo sapien
gcatcagacattaccaaaaaggcctttatgaaa

SEQ ID NO: 688520 - DNA, 33 bp, Homo sapien
gcatcagacattaccagaaaggcctttatgaaa

SEQ ID NO: 688521 - DNA, 33 bp, Homo sapien
attccaagtgaagtgcagatagccgctctctgc

SEQ ID NO: 688522 - DNA, 33 bp, Homo sapien
attccaagtgaagtgcggatagccgctctctgc

SEQ ID NO: 688523 - DNA, 33 bp, Homo sapien
gctgtaccaatcaacccatcatttacattaggt

SEQ ID NO: 688524 - DNA, 33 bp, Homo sapien
gctgtaccaatcaacctatcatttacattaggt

SEQ ID NO: 688525 - DNA, 33 bp, Homo sapien
gacatttgctttttacagggaatgcttcacaag

SEQ ID NO: 688526 - DNA, 33 bp, Homo sapien
gacatttgctttttaccgggaatgcttcacaag

SEQ ID NO: 688527 - DNA, 33 bp, Homo sapien
cagcagagaataagacaacctgagtctctgacc

SEQ ID NO: 688528 - DNA, 33 bp, Homo sapien
cagcagagaataagacgacctgagtctctgacc

SEQ ID NO: 688529 - DNA, 33 bp, Homo sapien
aatactacactcaaagccctcatgaaatacaca

SEQ ID NO: 688530 - DNA, 33 bp, Homo sapien
aatactacactcaaaggcctcatgaaatacaca

SEQ ID NO: 688531 - DNA, 33 bp, Homo sapien
tatttttgtggtaggaagtatcagttttttgtt

SEQ ID NO: 688532 - DNA, 33 bp, Homo sapien
tatttttgtggtaggacgtatcagttttttgtt

SEQ ID NO: 688533 - DNA, 33 bp, Homo sapien
tcaacttattgtatgacgcctttggaaaagaaa

SEQ ID NO: 688534 - DNA, 33 bp, Homo sapien
tcaacttattgtatgatgcctttggaaaagaaa

SEQ ID NO: 688535 - DNA, 33 bp, Homo sapien
ttccacttgtgtttatcaggagctccctggtca

SEQ ID NO: 688536 - DNA, 33 bp, Homo sapien
ttccacttgtgtttattaggagctccctggtca

SEQ ID NO: 688537 - DNA, 33 bp, Homo sapien
acctttttgtagtctcaaatgtgtattatttca

SEQ ID NO: 688538 - DNA, 33 bp, Homo sapien
acctttttgtagtctccaatgtgtattatttca

SEQ ID NO: 688539 - DNA, 33 bp, Homo sapien
cctgttggtgaagataccactggttggcttctc

SEQ ID NO: 688540 - DNA, 33 bp, Homo sapien
cctgttggtgaagatatcactggttggcttctc

SEQ ID NO: 688541 - DNA, 33 bp, Homo sapien
ggaaagagtaaaagtacacatcaaatttgggct

SEQ ID NO: 688542 - DNA, 33 bp, Homo sapien
ggaaagagtaaaagtagacatcaaatttgggct

SEQ ID NO: 688543 - DNA, 33 bp, Homo sapien
atggaataggagctcaagataactaagtggaag

SEQ ID NO: 688544 - DNA, 33 bp, Homo sapien
atggaataggagctcaggataactaagtggaag

SEQ ID NO: 688545 - DNA, 33 bp, Homo sapien
cttcatgggtgacttacgtgttatttgagcatg

SEQ ID NO: 688546 - DNA, 33 bp, Homo sapien
cttcatgggtgacttatgtgttatttgagcatg

SEQ ID NO: 688547 - DNA, 33 bp, Homo sapien
tatgtcttgtaaggaaggtagagcatactgtaa

SEQ ID NO: 688548 - DNA, 33 bp, Homo sapien
tatgtcttgtaaggaatgtagagcatactgtaa

SEQ ID NO: 688549 - DNA, 33 bp, Homo sapien
tcacttggccatcagaagtttcaaaagagaaag

SEQ ID NO: 688550 - DNA, 33 bp, Homo sapien
tcacttggccatcagaggtttcaaaagagaaag

SEQ ID NO: 688551 - DNA, 33 bp, Homo sapien
aaaaatttagtcaggcagattgattcattaggg

SEQ ID NO: 688552 - DNA, 33 bp, Homo sapien
aaaaatttagtcaggctgattgattcattaggg

SEQ ID NO: 688553 - DNA, 33 bp, Homo sapien
tctggaaataaactgaaaatatgcaacgctaaa

SEQ ID NO: 688554 - DNA, 33 bp, Homo sapien
tctggaaataaactgagaatatgcaacgctaaa

SEQ ID NO: 688555 - DNA, 33 bp, Homo sapien
ttttacagaaatggaggaatcaccaacacctat

SEQ ID NO: 688556 - DNA, 33 bp, Homo sapien
ttttacagaaatggagtaatcaccaacacctat

SEQ ID NO: 688557 - DNA, 33 bp, Homo sapien
cttaatgactggaagcaaatggtgaataccaag

SEQ ID NO: 688558 - DNA, 33 bp, Homo sapien
cttaatgactggaagcgaatggtgaataccaag

SEQ ID NO: 688559 - DNA, 33 bp, Homo sapien
ctagcttgcaccataacggaagttcttatccta

SEQ ID NO: 688560 - DNA, 33 bp, Homo sapien
ctagcttgcaccataatggaagttcttatccta

SEQ ID NO: 688561 - DNA, 33 bp, Homo sapien
agaagtccaaattcaagatgtcagcaggtccaa

SEQ ID NO: 688562 - DNA, 33 bp, Homo sapien
agaagtccaaattcaatatgtcagcaggtccaa

SEQ ID NO: 688563 - DNA, 33 bp, Homo sapien
ggatccagggagacatcaaggtcttggcaaagg

SEQ ID NO: 688564 - DNA, 33 bp, Homo sapien
ggatccagggagacatgaaggtcttggcaaagg

SEQ ID NO: 688565 - DNA, 33 bp, Homo sapien
tcagccatattcccagactcttcatccggaccc

SEQ ID NO: 688566 - DNA, 33 bp, Homo sapien
tcagccatattcccagtctcttcatccggaccc

SEQ ID NO: 688567 - DNA, 33 bp, Homo sapien
gtgtactgctgggaaacgctaaaagcctgaagt

SEQ ID NO: 688568 - DNA, 33 bp, Homo sapien
gtgtactgctgggaaatgctaaaagcctgaagt

SEQ ID NO: 688569 - DNA, 33 bp, Homo sapien
gaaagccttgtctagaaaaaggtaaagttttca

SEQ ID NO: 688570 - DNA, 33 bp, Homo sapien
gaaagccttgtctagataaaggtaaagttttca

SEQ ID NO: 688571 - DNA, 33 bp, Homo sapien
agcaacatggaagagaacatccaacaagataat

SEQ ID NO: 688572 - DNA, 33 bp, Homo sapien
agcaacatggaagagaccatccaacaagataat

SEQ ID NO: 688573 - DNA, 33 bp, Homo sapien
tatgtgaggaagataaacagacacagaaaatct

SEQ ID NO: 688574 - DNA, 33 bp, Homo sapien
tatgtgaggaagataagcagacacagaaaatct

SEQ ID NO: 688575 - DNA, 33 bp, Homo sapien
taccctcaggaagcacaaaagtatcatatcaag

SEQ ID NO: 688576 - DNA, 33 bp, Homo sapien
taccctcaggaagcacgaaagtatcatatcaag

SEQ ID NO: 688577 - DNA, 33 bp, Homo sapien
tgtgacaagaaataaacaggatagtgacaagct

SEQ ID NO: 688578 - DNA, 33 bp, Homo sapien
tgtgacaagaaataaagaggatagtgacaagct

SEQ ID NO: 688579 - DNA, 33 bp, Homo sapien
attcctttggatggccacatagtattccatggt

SEQ ID NO: 688580 - DNA, 33 bp, Homo sapien
attcctttggatggccgcatagtattccatggt

SEQ ID NO: 688581 - DNA, 33 bp, Homo sapien
agtaactaaccatgatcacacagtcaataaggg

SEQ ID NO: 688582 - DNA, 33 bp, Homo sapien
agtaactaaccatgattacacagtcaataaggg

SEQ ID NO: 688583 - DNA, 33 bp, Homo sapien
gagggacaagaaaacactgtggtctgggatggc

SEQ ID NO: 688584 - DNA, 33 bp, Homo sapien
gagggacaagaaaacattgtggtctgggatggc

SEQ ID NO: 688585 - DNA, 33 bp, Homo sapien
acattaaggtaacacaaggatattaactgggaa

SEQ ID NO: 688586 - DNA, 33 bp, Homo sapien
acattaaggtaacacagggatattaactgggaa

SEQ ID NO: 688587 - DNA, 33 bp, Homo sapien
tacctgctggttgtaaatagaaaagaggacaaa

SEQ ID NO: 688588 - DNA, 33 bp, Homo sapien
tacctgctggttgtaactagaaaagaggacaaa

SEQ ID NO: 688589 - DNA, 33 bp, Homo sapien
tatgacacttggggaacaacagttgcttttcca

SEQ ID NO: 688590 - DNA, 33 bp, Homo sapien
tatgacacttggggaataacagttgcttttcca

SEQ ID NO: 688591 - DNA, 33 bp, Homo sapien
cttcccaattatcatggagcctttacttacata

SEQ ID NO: 688592 - DNA, 33 bp, Homo sapien
cttcccaattatcatgtagcctttacttacata

SEQ ID NO: 688593 - DNA, 33 bp, Homo sapien
tccccatcttccaaataagatcaagaaagaagt

SEQ ID NO: 688594 - DNA, 33 bp, Homo sapien
tccccatcttccaaatgagatcaagaaagaagt

SEQ ID NO: 688595 - DNA, 33 bp, Homo sapien
agtatacattgcactgaagttagtgttatttat

SEQ ID NO: 688596 - DNA, 33 bp, Homo sapien
agtatacattgcactgcagttagtgttatttat

SEQ ID NO: 688597 - DNA, 33 bp, Homo sapien
acttatgtaacattctgaaaggcgttttccatg

SEQ ID NO: 688598 - DNA, 33 bp, Homo sapien
acttatgtaacattcttaaaggcgttttccatg

SEQ ID NO: 688599 - DNA, 33 bp, Homo sapien
ccattcttctcaactgaagggaatgaaagtgtg

SEQ ID NO: 688600 - DNA, 33 bp, Homo sapien
ccattcttctcaactggagggaatgaaagtgtg

SEQ ID NO: 688601 - DNA, 33 bp, Homo sapien
ttttgctaattacagagggtggttaataacaac

SEQ ID NO: 688602 - DNA, 33 bp, Homo sapien
ttttgctaattacagatggtggttaataacaac

SEQ ID NO: 688603 - DNA, 33 bp, Homo sapien
aaggaaggaagaaactaacatatttgagcattt

SEQ ID NO: 688604 - DNA, 33 bp, Homo sapien
aaggaaggaagaaacttacatatttgagcattt

SEQ ID NO: 688605 - DNA, 33 bp, Homo sapien
tttgatggatgcaacaaaagaatatatgcagaa

SEQ ID NO: 688606 - DNA, 33 bp, Homo sapien
tttgatggatgcaacagaagaatatatgcagaa

SEQ ID NO: 688607 - DNA, 33 bp, Homo sapien
atttattgtttttataagcagacatatggtcta

SEQ ID NO: 688608 - DNA, 33 bp, Homo sapien
atttattgtttttataggcagacatatggtcta

SEQ ID NO: 688609 - DNA, 33 bp, Homo sapien
taagtgttatgatccacgtgctggtaatttgat

SEQ ID NO: 688610 - DNA, 33 bp, Homo sapien
taagtgttatgatccatgtgctggtaatttgat

SEQ ID NO: 688611 - DNA, 33 bp, Homo sapien
gatatttgttgctggaaagatgaccatttggta

SEQ ID NO: 688612 - DNA, 33 bp, Homo sapien
gatatttgttgctggagagatgaccatttggta

SEQ ID NO: 688613 - DNA, 33 bp, Homo sapien
tttcctcatctataaaggccgtagagttgttgt

SEQ ID NO: 688614 - DNA, 33 bp, Homo sapien
tttcctcatctataaatgccgtagagttgttgt

SEQ ID NO: 688615 - DNA, 33 bp, Homo sapien
ctcctgggcatccccaatatcagagcagaggcc

SEQ ID NO: 688616 - DNA, 33 bp, Homo sapien
ctcctgggcatccccagtatcagagcagaggcc

SEQ ID NO: 688617 - DNA, 33 bp, Homo sapien
gatggagtgtttgccacaagcttctctttattc

SEQ ID NO: 688618 - DNA, 33 bp, Homo sapien
gatggagtgtttgccataagcttctctttattc

SEQ ID NO: 688619 - DNA, 33 bp, Homo sapien
acatgacatatctttcccctctctccagttggt

SEQ ID NO: 688620 - DNA, 33 bp, Homo sapien
acatgacatatctttctcctctctccagttggt

SEQ ID NO: 688621 - DNA, 33 bp, Homo sapien
atgcatttgagtggaccacaagtgaggctagag

SEQ ID NO: 688622 - DNA, 33 bp, Homo sapien
atgcatttgagtggactacaagtgaggctagag

SEQ ID NO: 688623 - DNA, 33 bp, Homo sapien
agtaaaggcagctgcaagagaatgagtaagggg

SEQ ID NO: 688624 - DNA, 33 bp, Homo sapien
agtaaaggcagctgcaggagaatgagtaagggg

SEQ ID NO: 688625 - DNA, 33 bp, Homo sapien
aaacctgatcagcatacatatggttcttcttcc

SEQ ID NO: 688626 - DNA, 33 bp, Homo sapien
aaacctgatcagcatatatatggttcttcttcc

SEQ ID NO: 688627 - DNA, 33 bp, Homo sapien
gtggtacaagcaggcactagtttcatgggggtc

SEQ ID NO: 688628 - DNA, 33 bp, Homo sapien
gtggtacaagcaggcattagtttcatgggggtc

SEQ ID NO: 688629 - DNA, 33 bp, Homo sapien
ggtttctatagggaacaatacatcccatgactc

SEQ ID NO: 688630 - DNA, 33 bp, Homo sapien
ggtttctatagggaaccatacatcccatgactc

SEQ ID NO: 688631 - DNA, 33 bp, Homo sapien
tctgttcacagcaatgcaggctttgtttcacat

SEQ ID NO: 688632 - DNA, 33 bp, Homo sapien
tctgttcacagcaatgtaggctttgtttcacat

SEQ ID NO: 688633 - DNA, 33 bp, Homo sapien
ttcagatgctctggacaatgactgtttgtttgt

SEQ ID NO: 688634 - DNA, 33 bp, Homo sapien
ttcagatgctctggacgatgactgtttgtttgt

SEQ ID NO: 688635 - DNA, 33 bp, Homo sapien
atataactgccagaagaaaagtaaatgctcctt

SEQ ID NO: 688636 - DNA, 33 bp, Homo sapien
atataactgccagaaggaaagtaaatgctcctt

SEQ ID NO: 688637 - DNA, 33 bp, Homo sapien
acatcttggttaaataacagctgattttgcaat

SEQ ID NO: 688638 - DNA, 33 bp, Homo sapien
acatcttggttaaatagcagctgattttgcaat

SEQ ID NO: 688639 - DNA, 33 bp, Homo sapien
tcaatagggaaattgaaaaacaggagtattttg

SEQ ID NO: 688640 - DNA, 33 bp, Homo sapien
tcaatagggaaattgataaacaggagtattttg

SEQ ID NO: 688641 - DNA, 33 bp, Homo sapien
tgatagcaacagggcccgcaaagtcataaaaac

SEQ ID NO: 688642 - DNA, 33 bp, Homo sapien
tgatagcaacagggcctgcaaagtcataaaaac

SEQ ID NO: 688643 - DNA, 33 bp, Homo sapien
taggtagttgtttggaagtaataatctgttttt

SEQ ID NO: 688644 - DNA, 33 bp, Homo sapien
taggtagttgtttggatgtaataatctgttttt

SEQ ID NO: 688645 - DNA, 33 bp, Homo sapien
tcacatctttcaactgcaaaattctagagtatt

SEQ ID NO: 688646 - DNA, 33 bp, Homo sapien
tcacatctttcaactgtaaaattctagagtatt

SEQ ID NO: 688647 - DNA, 33 bp, Homo sapien
gtgaactcccataacacatctgcccaataccat

SEQ ID NO: 688648 - DNA, 33 bp, Homo sapien
gtgaactcccataacatatctgcccaataccat

SEQ ID NO: 688649 - DNA, 33 bp, Homo sapien
cattgcactttcttcacactctctctgccagtc

SEQ ID NO: 688650 - DNA, 33 bp, Homo sapien
cattgcactttcttcatactctctctgccagtc

SEQ ID NO: 688651 - DNA, 33 bp, Homo sapien
ttctgggcattttataagaaatacaaacgaatt

SEQ ID NO: 688652 - DNA, 33 bp, Homo sapien
ttctgggcattttataggaaatacaaacgaatt

SEQ ID NO: 688653 - DNA, 33 bp, Homo sapien
atcatgagagtgagtactaatcaggtggtggtt

SEQ ID NO: 688654 - DNA, 33 bp, Homo sapien
atcatgagagtgagtattaatcaggtggtggtt

SEQ ID NO: 688655 - DNA, 33 bp, Homo sapien
agcaggtaccagaacacggttgaggaagaagga

SEQ ID NO: 688656 - DNA, 33 bp, Homo sapien
agcaggtaccagaacatggttgaggaagaagga

SEQ ID NO: 688657 - DNA, 33 bp, Homo sapien
ttccttaactcggagacgtaacaaagctcctga

SEQ ID NO: 688658 - DNA, 33 bp, Homo sapien
ttccttaactcggagatgtaacaaagctcctga

SEQ ID NO: 688659 - DNA, 33 bp, Homo sapien
tgttcaaataaggcaaatggtgagctgcaacca

SEQ ID NO: 688660 - DNA, 33 bp, Homo sapien
tgttcaaataaggcaagtggtgagctgcaacca

SEQ ID NO: 688661 - DNA, 33 bp, Homo sapien
tatctctaaagcaaacgggaatgaggttccagt

SEQ ID NO: 688662 - DNA, 33 bp, Homo sapien
tatctctaaagcaaactggaatgaggttccagt

SEQ ID NO: 688663 - DNA, 33 bp, Homo sapien
actcttctcttacacagtctgagcatcaattat

SEQ ID NO: 688664 - DNA, 33 bp, Homo sapien
actcttctcttacacattctgagcatcaattat

SEQ ID NO: 688665 - DNA, 33 bp, Homo sapien
tacctgtgaaggtactcagagaaaattagtatc

SEQ ID NO: 688666 - DNA, 33 bp, Homo sapien
tacctgtgaaggtacttagagaaaattagtatc

SEQ ID NO: 688667 - DNA, 33 bp, Homo sapien
agaggctattagaaaaatgtacacgagatataa

SEQ ID NO: 688668 - DNA, 33 bp, Homo sapien
agaggctattagaaaagtgtacacgagatataa

SEQ ID NO: 688669 - DNA, 33 bp, Homo sapien
tggcctgggtcatgtggagcatacagctgcaac

SEQ ID NO: 688670 - DNA, 33 bp, Homo sapien
tggcctgggtcatgtgtagcatacagctgcaac

SEQ ID NO: 688671 - DNA, 33 bp, Homo sapien
tcctcccttcagtgaaattaaagaatttaaact

SEQ ID NO: 688672 - DNA, 33 bp, Homo sapien
tcctcccttcagtgaagttaaagaatttaaact

SEQ ID NO: 688673 - DNA, 33 bp, Homo sapien
ttgaaagtcttcccaacctttatgaattattat

SEQ ID NO: 688674 - DNA, 33 bp, Homo sapien
ttgaaagtcttcccaatctttatgaattattat

SEQ ID NO: 688675 - DNA, 33 bp, Homo sapien
tcctgccatctgtgacaacaggtatggaactgt

SEQ ID NO: 688676 - DNA, 33 bp, Homo sapien
tcctgccatctgtgactacaggtatggaactgt

SEQ ID NO: 688677 - DNA, 33 bp, Homo sapien
gcatatgtatccaaagaaatcgaaaaagtatct

SEQ ID NO: 688678 - DNA, 33 bp, Homo sapien
gcatatgtatccaaagcaatcgaaaaagtatct

SEQ ID NO: 688679 - DNA, 33 bp, Homo sapien
ccatagaagagcaccaaatttcccacagattgt

SEQ ID NO: 688680 - DNA, 33 bp, Homo sapien
ccatagaagagcaccacatttcccacagattgt

SEQ ID NO: 688681 - DNA, 33 bp, Homo sapien
gtgattcactctgcaaataccttgattcaccca

SEQ ID NO: 688682 - DNA, 33 bp, Homo sapien
gtgattcactctgcaagtaccttgattcaccca

SEQ ID NO: 688683 - DNA, 33 bp, Homo sapien
gagtgaggctgattggcagcaattgtcctggaa

SEQ ID NO: 688684 - DNA, 33 bp, Homo sapien
gagtgaggctgattggtagcaattgtcctggaa

SEQ ID NO: 688685 - DNA, 33 bp, Homo sapien
agcaattgtcctggaactaggcaggtttgaaaa

SEQ ID NO: 688686 - DNA, 33 bp, Homo sapien
agcaattgtcctggaagtaggcaggtttgaaaa

SEQ ID NO: 688687 - DNA, 33 bp, Homo sapien
gaatctctaaaatcaactgcttcctcatgggat

SEQ ID NO: 688688 - DNA, 33 bp, Homo sapien
gaatctctaaaatcaagtgcttcctcatgggat

SEQ ID NO: 688689 - DNA, 33 bp, Homo sapien
ctggtgataggaagaccgcactttgcaatcaca

SEQ ID NO: 688690 - DNA, 33 bp, Homo sapien
ctggtgataggaagactgcactttgcaatcaca

SEQ ID NO: 688691 - DNA, 33 bp, Homo sapien
ccgtgtgctggaatacactataactgtggcccc

SEQ ID NO: 688692 - DNA, 33 bp, Homo sapien
ccgtgtgctggaatactctataactgtggcccc

SEQ ID NO: 688693 - DNA, 33 bp, Homo sapien
aaattaggaaaccaaccctttggctgaatggcc

SEQ ID NO: 688694 - DNA, 33 bp, Homo sapien
aaattaggaaaccaactctttggctgaatggcc

SEQ ID NO: 688695 - DNA, 33 bp, Homo sapien
gcagtagctaggaaaacatctatgagacaaaga

SEQ ID NO: 688696 - DNA, 33 bp, Homo sapien
gcagtagctaggaaaatatctatgagacaaaga

SEQ ID NO: 688697 - DNA, 33 bp, Homo sapien
atgcatcacacagggaacgttgtttatggatgc

SEQ ID NO: 688698 - DNA, 33 bp, Homo sapien
atgcatcacacagggaccgttgtttatggatgc

SEQ ID NO: 688699 - DNA, 33 bp, Homo sapien
aaatttggtgattagaccttgaacttaaagctt

SEQ ID NO: 688700 - DNA, 33 bp, Homo sapien
aaatttggtgattagatcttgaacttaaagctt

SEQ ID NO: 688701 - DNA, 33 bp, Homo sapien
ttggtgaaaaattaagcaatctaggcatgattt

SEQ ID NO: 688702 - DNA, 33 bp, Homo sapien
ttggtgaaaaattaagtaatctaggcatgattt

SEQ ID NO: 688703 - DNA, 33 bp, Homo sapien
caccctgagtgagaaccacatagctgagcccag

SEQ ID NO: 688704 - DNA, 33 bp, Homo sapien
caccctgagtgagaactacatagctgagcccag

SEQ ID NO: 688705 - DNA, 33 bp, Homo sapien
tatcaaatccttggagaagtgtacacagatttt

SEQ ID NO: 688706 - DNA, 33 bp, Homo sapien
tatcaaatccttggagcagtgtacacagatttt

SEQ ID NO: 688707 - DNA, 33 bp, Homo sapien
cattcctggagttcagaaaattaaagaaagatt

SEQ ID NO: 688708 - DNA, 33 bp, Homo sapien
cattcctggagttcagcaaattaaagaaagatt

SEQ ID NO: 688709 - DNA, 33 bp, Homo sapien
aatgtaccatcttgacccttttttagtgtacag

SEQ ID NO: 688710 - DNA, 33 bp, Homo sapien
aatgtaccatcttgacgcttttttagtgtacag

SEQ ID NO: 688711 - DNA, 33 bp, Homo sapien
tacagttgactaggataaagtatatttccgttg

SEQ ID NO: 688712 - DNA, 33 bp, Homo sapien
tacagttgactaggattaagtatatttccgttg

SEQ ID NO: 688713 - DNA, 33 bp, Homo sapien
caaactgcagtaaagaactggtcccagaacagt

SEQ ID NO: 688714 - DNA, 33 bp, Homo sapien
caaactgcagtaaagagctggtcccagaacagt

SEQ ID NO: 688715 - DNA, 33 bp, Homo sapien
ctcagttgctagcagacagttccagaaacagac

SEQ ID NO: 688716 - DNA, 33 bp, Homo sapien
ctcagttgctagcagagagttccagaaacagac

SEQ ID NO: 688717 - DNA, 33 bp, Homo sapien
acatatcaaatgcgaacctcgttgtgttacttc

SEQ ID NO: 688718 - DNA, 33 bp, Homo sapien
acatatcaaatgcgaagctcgttgtgttacttc

SEQ ID NO: 688719 - DNA, 33 bp, Homo sapien
cctatgcctgaaatgcagaaacattcttctctt

SEQ ID NO: 688720 - DNA, 33 bp, Homo sapien
cctatgcctgaaatgcggaaacattcttctctt

SEQ ID NO: 688721 - DNA, 33 bp, Homo sapien
ttggctcttggttcgcgctacctctcagctgaa

SEQ ID NO: 688722 - DNA, 33 bp, Homo sapien
ttggctcttggttcgctctacctctcagctgaa

SEQ ID NO: 688723 - DNA, 33 bp, Homo sapien
catttaatttcaaaacaggtgattcattaagat

SEQ ID NO: 688724 - DNA, 33 bp, Homo sapien
catttaatttcaaaactggtgattcattaagat

SEQ ID NO: 688725 - DNA, 33 bp, Homo sapien
gctctgttgaggaaaacgaattagttctcctct

SEQ ID NO: 688726 - DNA, 33 bp, Homo sapien
gctctgttgaggaaaatgaattagttctcctct

SEQ ID NO: 688727 - DNA, 33 bp, Homo sapien
aatatcacctaaagtaagactggggaactcata

SEQ ID NO: 688728 - DNA, 33 bp, Homo sapien
aatatcacctaaagtacgactggggaactcata

SEQ ID NO: 688729 - DNA, 33 bp, Homo sapien
ggttcattcttgttgagactcactataaggaaa

SEQ ID NO: 688730 - DNA, 33 bp, Homo sapien
ggttcattcttgttgatactcactataaggaaa

SEQ ID NO: 688731 - DNA, 33 bp, Homo sapien
tgaactagaaagacggacaccaacaaaaggata

SEQ ID NO: 688732 - DNA, 33 bp, Homo sapien
tgaactagaaagacgggcaccaacaaaaggata

SEQ ID NO: 688733 - DNA, 33 bp, Homo sapien
gtctggagaaaagataagtgtagtttgtacatc

SEQ ID NO: 688734 - DNA, 33 bp, Homo sapien
gtctggagaaaagataggtgtagtttgtacatc

SEQ ID NO: 688735 - DNA, 33 bp, Homo sapien
ctcaagttgctcaagaccacttcaaagcacagt

SEQ ID NO: 688736 - DNA, 33 bp, Homo sapien
ctcaagttgctcaagatcacttcaaagcacagt

SEQ ID NO: 688737 - DNA, 33 bp, Homo sapien
atatcaagatgaaagaacaacagttgctaagat

SEQ ID NO: 688738 - DNA, 33 bp, Homo sapien
atatcaagatgaaagagcaacagttgctaagat

SEQ ID NO: 688739 - DNA, 33 bp, Homo sapien
gaaggtcattctaattaaaaaaagtgaagaaat

SEQ ID NO: 688740 - DNA, 33 bp, Homo sapien
gaaggtcattctaatttaaaaaagtgaagaaat

SEQ ID NO: 688741 - DNA, 33 bp, Homo sapien
ggggaagtgttcagagaaaacaaaaacagtgct

SEQ ID NO: 688742 - DNA, 33 bp, Homo sapien
ggggaagtgttcagaggaaacaaaaacagtgct

SEQ ID NO: 688743 - DNA, 33 bp, Homo sapien
gggaatagtgcctggccgcatagtagaaattta

SEQ ID NO: 688744 - DNA, 33 bp, Homo sapien
gggaatagtgcctggctgcatagtagaaattta

SEQ ID NO: 688745 - DNA, 33 bp, Homo sapien
tcagcaataagtagaacgaaggaagtaggaatg

SEQ ID NO: 688746 - DNA, 33 bp, Homo sapien
tcagcaataagtagaatgaaggaagtaggaatg

SEQ ID NO: 688747 - DNA, 33 bp, Homo sapien
ccctgctgcatgaaagaacatcagagatggctc

SEQ ID NO: 688748 - DNA, 33 bp, Homo sapien
ccctgctgcatgaaaggacatcagagatggctc

SEQ ID NO: 688749 - DNA, 33 bp, Homo sapien
ttttagctgcataccacgtagatagaaggctgg

SEQ ID NO: 688750 - DNA, 33 bp, Homo sapien
ttttagctgcataccatgtagatagaaggctgg

SEQ ID NO: 688751 - DNA, 33 bp, Homo sapien
aactgctgtaagaataaactaaaatactgtata

SEQ ID NO: 688752 - DNA, 33 bp, Homo sapien
aactgctgtaagaatagactaaaatactgtata

SEQ ID NO: 688753 - DNA, 33 bp, Homo sapien
atttattattactagaaactcgatacatgacac

SEQ ID NO: 688754 - DNA, 33 bp, Homo sapien
atttattattactagatactcgatacatgacac

SEQ ID NO: 688755 - DNA, 33 bp, Homo sapien
ggacagggaagacaaacgtagctaaagccagac

SEQ ID NO: 688756 - DNA, 33 bp, Homo sapien
ggacagggaagacaaatgtagctaaagccagac

SEQ ID NO: 688757 - DNA, 33 bp, Homo sapien
ttttttaataactagcactacttaatgcaggcc

SEQ ID NO: 688758 - DNA, 33 bp, Homo sapien
ttttttaataactagcgctacttaatgcaggcc

SEQ ID NO: 688759 - DNA, 33 bp, Homo sapien
tatctctatccttctcaagaacaacctgctagg

SEQ ID NO: 688760 - DNA, 33 bp, Homo sapien
tatctctatccttctccagaacaacctgctagg

SEQ ID NO: 688761 - DNA, 33 bp, Homo sapien
cttggccatcaaaaagcccccttctggtactgg

SEQ ID NO: 688762 - DNA, 33 bp, Homo sapien
cttggccatcaaaaagtccccttctggtactgg

SEQ ID NO: 688763 - DNA, 33 bp, Homo sapien
aatggcaaggctactgaagcaaggaaaaggagc

SEQ ID NO: 688764 - DNA, 33 bp, Homo sapien
aatggcaaggctactgcagcaaggaaaaggagc

SEQ ID NO: 688765 - DNA, 33 bp, Homo sapien
cttttattttgacaatcatgagtcaaaaaacaa

SEQ ID NO: 688766 - DNA, 33 bp, Homo sapien
cttttattttgacaatgatgagtcaaaaaacaa

SEQ ID NO: 688767 - DNA, 33 bp, Homo sapien
gatctaaataaaaagcaatgtttcacactttct

SEQ ID NO: 688768 - DNA, 33 bp, Homo sapien
gatctaaataaaaagccatgtttcacactttct

SEQ ID NO: 688769 - DNA, 33 bp, Homo sapien
tttgagcacatgagaaatcaccctgtgaggaaa

SEQ ID NO: 688770 - DNA, 33 bp, Homo sapien
tttgagcacatgagaagtcaccctgtgaggaaa

SEQ ID NO: 688771 - DNA, 33 bp, Homo sapien
gcatgatattatgttacctttcccattgagctg

SEQ ID NO: 688772 - DNA, 33 bp, Homo sapien
gcatgatattatgttatctttcccattgagctg

SEQ ID NO: 688773 - DNA, 33 bp, Homo sapien
tttgagccaaggtctcacttagcttttcctaga

SEQ ID NO: 688774 - DNA, 33 bp, Homo sapien
tttgagccaaggtctcgcttagcttttcctaga

SEQ ID NO: 688775 - DNA, 33 bp, Homo sapien
ctgtcttaactttttaaaacaatgtgctgatgg

SEQ ID NO: 688776 - DNA, 33 bp, Homo sapien
ctgtcttaactttttacaacaatgtgctgatgg

SEQ ID NO: 688777 - DNA, 33 bp, Homo sapien
aggctagtccttaccaataacctgacccacaaa

SEQ ID NO: 688778 - DNA, 33 bp, Homo sapien
aggctagtccttaccagtaacctgacccacaaa

SEQ ID NO: 688779 - DNA, 33 bp, Homo sapien
aatcttcaggtagtcaataccaaaacaaatgaa

SEQ ID NO: 688780 - DNA, 33 bp, Homo sapien
aatcttcaggtagtcagtaccaaaacaaatgaa

SEQ ID NO: 688781 - DNA, 33 bp, Homo sapien
agcccaagcagcattgaaagaggatcaagagtc

SEQ ID NO: 688782 - DNA, 33 bp, Homo sapien
agcccaagcagcattgcaagaggatcaagagtc

SEQ ID NO: 688783 - DNA, 33 bp, Homo sapien
tttcatgatttaagaacgtttttggctatgcct

SEQ ID NO: 688784 - DNA, 33 bp, Homo sapien
tttcatgatttaagaatgtttttggctatgcct

SEQ ID NO: 688785 - DNA, 33 bp, Homo sapien
gggtatccagactcataaacctttgtcccaact

SEQ ID NO: 688786 - DNA, 33 bp, Homo sapien
gggtatccagactcatgaacctttgtcccaact

SEQ ID NO: 688787 - DNA, 33 bp, Homo sapien
atgagtctggatacccacagtgtcctcacagcc

SEQ ID NO: 688788 - DNA, 33 bp, Homo sapien
atgagtctggatacccgcagtgtcctcacagcc

SEQ ID NO: 688789 - DNA, 33 bp, Homo sapien
tacagatcaagatgtcaacaaggttggttttct

SEQ ID NO: 688790 - DNA, 33 bp, Homo sapien
tacagatcaagatgtcgacaaggttggttttct

SEQ ID NO: 688791 - DNA, 33 bp, Homo sapien
caagagtacaggattagaaagcaacatctcttt

SEQ ID NO: 688792 - DNA, 33 bp, Homo sapien
caagagtacaggattataaagcaacatctcttt

SEQ ID NO: 688793 - DNA, 33 bp, Homo sapien
ctgggatccattggtgaaagcagaaattaagta

SEQ ID NO: 688794 - DNA, 33 bp, Homo sapien
ctgggatccattggtggaagcagaaattaagta

SEQ ID NO: 688795 - DNA, 33 bp, Homo sapien
tgtgctggacagaaggaacatagagacagtggg

SEQ ID NO: 688796 - DNA, 33 bp, Homo sapien
tgtgctggacagaagggacatagagacagtggg

SEQ ID NO: 688797 - DNA, 33 bp, Homo sapien
aatgggaactcattaacaccaatactctccagg

SEQ ID NO: 688798 - DNA, 33 bp, Homo sapien
aatgggaactcattaataccaatactctccagg

SEQ ID NO: 688799 - DNA, 33 bp, Homo sapien
ctacttattagaaagaatacagacaaggcagta

SEQ ID NO: 688800 - DNA, 33 bp, Homo sapien
ctacttattagaaagattacagacaaggcagta

SEQ ID NO: 688801 - DNA, 33 bp, Homo sapien
gcttctagagagcagtaaattcttcgaaaagct

SEQ ID NO: 688802 - DNA, 33 bp, Homo sapien
gcttctagagagcagtgaattcttcgaaaagct

SEQ ID NO: 688803 - DNA, 33 bp, Homo sapien
cttaaagatgtttcacagacatttccaccaact

SEQ ID NO: 688804 - DNA, 33 bp, Homo sapien
cttaaagatgtttcaccgacatttccaccaact

SEQ ID NO: 688805 - DNA, 33 bp, Homo sapien
atacacactgatctctcaaagttactgcaaaag

SEQ ID NO: 688806 - DNA, 33 bp, Homo sapien
atacacactgatctcttaaagttactgcaaaag

SEQ ID NO: 688807 - DNA, 33 bp, Homo sapien
cttttcagaaacgtcaacaatacctgggctgta

SEQ ID NO: 688808 - DNA, 33 bp, Homo sapien
cttttcagaaacgtcatcaatacctgggctgta

SEQ ID NO: 688809 - DNA, 33 bp, Homo sapien
acatcacatcaaaatacggcctttaaaaccagt

SEQ ID NO: 688810 - DNA, 33 bp, Homo sapien
acatcacatcaaaatatggcctttaaaaccagt

SEQ ID NO: 688811 - DNA, 33 bp, Homo sapien
gcaaaacgtagcaccacgcacatttcatgttag

SEQ ID NO: 688812 - DNA, 33 bp, Homo sapien
gcaaaacgtagcaccaggcacatttcatgttag

SEQ ID NO: 688813 - DNA, 33 bp, Homo sapien
ccaagtcatgggaaaacttaaggataatccaaa

SEQ ID NO: 688814 - DNA, 33 bp, Homo sapien
ccaagtcatgggaaaatttaaggataatccaaa

SEQ ID NO: 688815 - DNA, 33 bp, Homo sapien
agctcattaaaacaaacgcttgctagattctgt

SEQ ID NO: 688816 - DNA, 33 bp, Homo sapien
agctcattaaaacaaatgcttgctagattctgt

SEQ ID NO: 688817 - DNA, 33 bp, Homo sapien
tacaggctgatagctagaactggaaataacagt

SEQ ID NO: 688818 - DNA, 33 bp, Homo sapien
tacaggctgatagctataactggaaataacagt

SEQ ID NO: 688819 - DNA, 33 bp, Homo sapien
gagtagacacccaataactgtttcatcaatgca

SEQ ID NO: 688820 - DNA, 33 bp, Homo sapien
gagtagacacccaatacctgtttcatcaatgca

SEQ ID NO: 688821 - DNA, 33 bp, Homo sapien
actgatagcaatgaaagactgcttttgataatt

SEQ ID NO: 688822 - DNA, 33 bp, Homo sapien
actgatagcaatgaaatactgcttttgataatt

SEQ ID NO: 688823 - DNA, 33 bp, Homo sapien
ggaatacttatgataacaacataccacattctg

SEQ ID NO: 688824 - DNA, 33 bp, Homo sapien
ggaatacttatgataataacataccacattctg

SEQ ID NO: 688825 - DNA, 33 bp, Homo sapien
tttgtagaagagaaaaagcttataaggcatctg

SEQ ID NO: 688826 - DNA, 33 bp, Homo sapien
tttgtagaagagaaaacgcttataaggcatctg

SEQ ID NO: 688827 - DNA, 33 bp, Homo sapien
gtagggatccactgggcatttcatgtcagattc

SEQ ID NO: 688828 - DNA, 33 bp, Homo sapien
gtagggatccactggggatttcatgtcagattc

SEQ ID NO: 688829 - DNA, 33 bp, Homo sapien
tttgtagcagagatgtaaagatttagagatatt

SEQ ID NO: 688830 - DNA, 33 bp, Homo sapien
tttgtagcagagatgtgaagatttagagatatt

SEQ ID NO: 688831 - DNA, 33 bp, Homo sapien
tgccaacacatgggtacggaatccaaatgaaca

SEQ ID NO: 688832 - DNA, 33 bp, Homo sapien
tgccaacacatgggtatggaatccaaatgaaca

SEQ ID NO: 688833 - DNA, 33 bp, Homo sapien
ggactcaaggggaagagtctaacctgctgctct

SEQ ID NO: 688834 - DNA, 33 bp, Homo sapien
ggactcaaggggaagattctaacctgctgctct

SEQ ID NO: 688835 - DNA, 33 bp, Homo sapien
atgacttaggtacttacggatgaggacttgaag

SEQ ID NO: 688836 - DNA, 33 bp, Homo sapien
atgacttaggtacttatggatgaggacttgaag

SEQ ID NO: 688837 - DNA, 33 bp, Homo sapien
ttctcaacctcagcacactggtattttatgcca

SEQ ID NO: 688838 - DNA, 33 bp, Homo sapien
ttctcaacctcagcaccctggtattttatgcca

SEQ ID NO: 688839 - DNA, 33 bp, Homo sapien
tttcttctgctttacccatcaggccctaacttt

SEQ ID NO: 688840 - DNA, 33 bp, Homo sapien
tttcttctgctttacctatcaggccctaacttt

SEQ ID NO: 688841 - DNA, 33 bp, Homo sapien
ggggacgtgagaatcacaggatttgagtgtttt

SEQ ID NO: 688842 - DNA, 33 bp, Homo sapien
ggggacgtgagaatcataggatttgagtgtttt

SEQ ID NO: 688843 - DNA, 33 bp, Homo sapien
accaactcaactagcaaaagagacccggcaagg

SEQ ID NO: 688844 - DNA, 33 bp, Homo sapien
accaactcaactagcagaagagacccggcaagg

SEQ ID NO: 688845 - DNA, 33 bp, Homo sapien
tgaagatttaacgtgcagattaatgcaaagtac

SEQ ID NO: 688846 - DNA, 33 bp, Homo sapien
tgaagatttaacgtgcggattaatgcaaagtac

SEQ ID NO: 688847 - DNA, 33 bp, Homo sapien
tgtcttccccacctaaagagccaagatgttaga

SEQ ID NO: 688848 - DNA, 33 bp, Homo sapien
tgtcttccccacctaatgagccaagatgttaga

SEQ ID NO: 688849 - DNA, 33 bp, Homo sapien
agtctcttcaccaatgcagttgtgatgcaaaat

SEQ ID NO: 688850 - DNA, 33 bp, Homo sapien
agtctcttcaccaatgtagttgtgatgcaaaat

SEQ ID NO: 688851 - DNA, 33 bp, Homo sapien
gctttagaaaaccacaagcaagggaatgtttga

SEQ ID NO: 688852 - DNA, 33 bp, Homo sapien
gctttagaaaaccacaggcaagggaatgtttga

SEQ ID NO: 688853 - DNA, 33 bp, Homo sapien
tgtggttttctaaagccattactgttagatact

SEQ ID NO: 688854 - DNA, 33 bp, Homo sapien
tgtggttttctaaagctattactgttagatact

SEQ ID NO: 688855 - DNA, 33 bp, Homo sapien
cagtcagaatatcaggacatagaatctcatgaa

SEQ ID NO: 688856 - DNA, 33 bp, Homo sapien
cagtcagaatatcagggcatagaatctcatgaa

SEQ ID NO: 688857 - DNA, 33 bp, Homo sapien
cattcactttttgatacgtgtgaaaatagacta

SEQ ID NO: 688858 - DNA, 33 bp, Homo sapien
cattcactttttgatatgtgtgaaaatagacta

SEQ ID NO: 688859 - DNA, 33 bp, Homo sapien
ttcaaaaatttcaagcacaacttaagtcaaaaa

SEQ ID NO: 688860 - DNA, 33 bp, Homo sapien
ttcaaaaatttcaagctcaacttaagtcaaaaa

SEQ ID NO: 688861 - DNA, 33 bp, Homo sapien
atagtaatagtaatagaccagtaagcttccatg

SEQ ID NO: 688862 - DNA, 33 bp, Homo sapien
atagtaatagtaataggccagtaagcttccatg

SEQ ID NO: 688863 - DNA, 33 bp, Homo sapien
ctaaaatcatacaaccccatgatggcactgtac

SEQ ID NO: 688864 - DNA, 33 bp, Homo sapien
ctaaaatcatacaacctcatgatggcactgtac

SEQ ID NO: 688865 - DNA, 33 bp, Homo sapien
ctctaaaatatgaataacccccagcactgtttt

SEQ ID NO: 688866 - DNA, 33 bp, Homo sapien
ctctaaaatatgaatatcccccagcactgtttt

SEQ ID NO: 688867 - DNA, 33 bp, Homo sapien
acagatcactaacagaatccccctggagaccgt

SEQ ID NO: 688868 - DNA, 33 bp, Homo sapien
acagatcactaacagagtccccctggagaccgt

SEQ ID NO: 688869 - DNA, 33 bp, Homo sapien
caactcagcatggaaagcagaatccaccagatg

SEQ ID NO: 688870 - DNA, 33 bp, Homo sapien
caactcagcatggaaatcagaatccaccagatg

SEQ ID NO: 688871 - DNA, 33 bp, Homo sapien
tatggaattaggtcaagggctctcaatcgtggg

SEQ ID NO: 688872 - DNA, 33 bp, Homo sapien
tatggaattaggtcaatggctctcaatcgtggg

SEQ ID NO: 688873 - DNA, 33 bp, Homo sapien
caagaagagagctgcaaaacatggcaacactga

SEQ ID NO: 688874 - DNA, 33 bp, Homo sapien
caagaagagagctgcagaacatggcaacactga

SEQ ID NO: 688875 - DNA, 33 bp, Homo sapien
gaatgagagcaagaaacatggaagaaagggagg

SEQ ID NO: 688876 - DNA, 33 bp, Homo sapien
gaatgagagcaagaaagatggaagaaagggagg

SEQ ID NO: 688877 - DNA, 33 bp, Homo sapien
ttgcttaactgaagcaactgcacatagttatgc

SEQ ID NO: 688878 - DNA, 33 bp, Homo sapien
ttgcttaactgaagcatctgcacatagttatgc

SEQ ID NO: 688879 - DNA, 33 bp, Homo sapien
tatcttctattttccacctgaaactccgactat

SEQ ID NO: 688880 - DNA, 33 bp, Homo sapien
tatcttctattttccagctgaaactccgactat

SEQ ID NO: 688881 - DNA, 33 bp, Homo sapien
accttagtttatgcatcaaggcagtttccagca

SEQ ID NO: 688882 - DNA, 33 bp, Homo sapien
accttagtttatgcatgaaggcagtttccagca

SEQ ID NO: 688883 - DNA, 33 bp, Homo sapien
gttacaaggtagtttcaaggtagcttggtaatt

SEQ ID NO: 688884 - DNA, 33 bp, Homo sapien
gttacaaggtagtttcgaggtagcttggtaatt

SEQ ID NO: 688885 - DNA, 33 bp, Homo sapien
ctttctttgaccaacacaagaaggaaaggactt

SEQ ID NO: 688886 - DNA, 33 bp, Homo sapien
ctttctttgaccaacataagaaggaaaggactt

SEQ ID NO: 688887 - DNA, 33 bp, Homo sapien
aaccatggtcagcatactacaaatgaagaaaag

SEQ ID NO: 688888 - DNA, 33 bp, Homo sapien
aaccatggtcagcatattacaaatgaagaaaag

SEQ ID NO: 688889 - DNA, 33 bp, Homo sapien
tttttttgcttgctaacgacttattacttgctg

SEQ ID NO: 688890 - DNA, 33 bp, Homo sapien
tttttttgcttgctaatgacttattacttgctg

SEQ ID NO: 688891 - DNA, 33 bp, Homo sapien
cgaaactccattaaaaaaaaataggatgcatta

SEQ ID NO: 688892 - DNA, 33 bp, Homo sapien
cgaaactccattaaaagaaaataggatgcatta

SEQ ID NO: 688893 - DNA, 33 bp, Homo sapien
aatgtatgttaattccaactccctgacagctgc

SEQ ID NO: 688894 - DNA, 33 bp, Homo sapien
aatgtatgttaattccgactccctgacagctgc

SEQ ID NO: 688895 - DNA, 33 bp, Homo sapien
tctctattctcaatcaatcaccactttacaatt

SEQ ID NO: 688896 - DNA, 33 bp, Homo sapien
tctctattctcaatcattcaccactttacaatt

SEQ ID NO: 688897 - DNA, 33 bp, Homo sapien
atttctcataaatatcaaaactgcaaccttgac

SEQ ID NO: 688898 - DNA, 33 bp, Homo sapien
atttctcataaatatccaaactgcaaccttgac

SEQ ID NO: 688899 - DNA, 33 bp, Homo sapien
ctattttgcatgaaatgagttatttagtaaatc

SEQ ID NO: 688900 - DNA, 33 bp, Homo sapien
ctattttgcatgaaattagttatttagtaaatc

SEQ ID NO: 688901 - DNA, 33 bp, Homo sapien
tttctgatgacaatgacaatgatgaggaactcc

SEQ ID NO: 688902 - DNA, 33 bp, Homo sapien
tttctgatgacaatgataatgatgaggaactcc

SEQ ID NO: 688903 - DNA, 33 bp, Homo sapien
ttatctaagttctttcgcaggcatcaactcatt

SEQ ID NO: 688904 - DNA, 33 bp, Homo sapien
ttatctaagttctttctcaggcatcaactcatt

SEQ ID NO: 688905 - DNA, 33 bp, Homo sapien
aacaagaaagcgaaccacacatctcatggagaa

SEQ ID NO: 688906 - DNA, 33 bp, Homo sapien
aacaagaaagcgaaccgcacatctcatggagaa

SEQ ID NO: 688907 - DNA, 33 bp, Homo sapien
accactaaacatgacactgcttctgactgtaga

SEQ ID NO: 688908 - DNA, 33 bp, Homo sapien
accactaaacatgacagtgcttctgactgtaga

SEQ ID NO: 688909 - DNA, 33 bp, Homo sapien
tgcagcacaaatatcaacaaatattacacacca

SEQ ID NO: 688910 - DNA, 33 bp, Homo sapien
tgcagcacaaatatcagcaaatattacacacca

SEQ ID NO: 688911 - DNA, 33 bp, Homo sapien
aatgtgttggagaactctttggccttggtcagt

SEQ ID NO: 688912 - DNA, 33 bp, Homo sapien
aatgtgttggagaactgtttggccttggtcagt

SEQ ID NO: 688913 - DNA, 33 bp, Homo sapien
tattacttaagtttgaactcagatatcaacccc

SEQ ID NO: 688914 - DNA, 33 bp, Homo sapien
tattacttaagtttgagctcagatatcaacccc

SEQ ID NO: 688915 - DNA, 33 bp, Homo sapien
actgtaaaactgattccctgttgaagtccaaga

SEQ ID NO: 688916 - DNA, 33 bp, Homo sapien
actgtaaaactgattctctgttgaagtccaaga

SEQ ID NO: 688917 - DNA, 33 bp, Homo sapien
ttgatgacaactactacatttttgcaaagccaa

SEQ ID NO: 688918 - DNA, 33 bp, Homo sapien
ttgatgacaactactatatttttgcaaagccaa

SEQ ID NO: 688919 - DNA, 33 bp, Homo sapien
taggcatggtgcagtacacatttttaatatact

SEQ ID NO: 688920 - DNA, 33 bp, Homo sapien
taggcatggtgcagtatacatttttaatatact

SEQ ID NO: 688921 - DNA, 33 bp, Homo sapien
tctgtcccagttttgcagagtacaaatgggatg

SEQ ID NO: 688922 - DNA, 33 bp, Homo sapien
tctgtcccagttttgccgagtacaaatgggatg

SEQ ID NO: 688923 - DNA, 33 bp, Homo sapien
atacggtttgcaaatacgttctgccattctgtt

SEQ ID NO: 688924 - DNA, 33 bp, Homo sapien
atacggtttgcaaatatgttctgccattctgtt

SEQ ID NO: 688925 - DNA, 33 bp, Homo sapien
gtaatggatataggaacacgaatacttctttga

SEQ ID NO: 688926 - DNA, 33 bp, Homo sapien
gtaatggatataggaatacgaatacttctttga

SEQ ID NO: 688927 - DNA, 33 bp, Homo sapien
ttaagtttcatcatagaaggagatttgcaactt

SEQ ID NO: 688928 - DNA, 33 bp, Homo sapien
ttaagtttcatcataggaggagatttgcaactt

SEQ ID NO: 688929 - DNA, 33 bp, Homo sapien
tggttgctacctccaacgcttgagtccttcaag

SEQ ID NO: 688930 - DNA, 33 bp, Homo sapien
tggttgctacctccaatgcttgagtccttcaag

SEQ ID NO: 688931 - DNA, 33 bp, Homo sapien
gctcattttattcctgcattgctactaaatcaa

SEQ ID NO: 688932 - DNA, 33 bp, Homo sapien
gctcattttattcctgtattgctactaaatcaa

SEQ ID NO: 688933 - DNA, 33 bp, Homo sapien
ccttagtctttgagtcacaggctgatgctgaaa

SEQ ID NO: 688934 - DNA, 33 bp, Homo sapien
ccttagtctttgagtcgcaggctgatgctgaaa

SEQ ID NO: 688935 - DNA, 33 bp, Homo sapien
ctggcacctatgctgaacttggaggcttaccta

SEQ ID NO: 688936 - DNA, 33 bp, Homo sapien
ctggcacctatgctgatcttggaggcttaccta

SEQ ID NO: 688937 - DNA, 33 bp, Homo sapien
aggttcctgagaggtaaattaaaagagtaatgt

SEQ ID NO: 688938 - DNA, 33 bp, Homo sapien
aggttcctgagaggtatattaaaagagtaatgt

SEQ ID NO: 688939 - DNA, 33 bp, Homo sapien
actgtattctacccaacggacagtaacatttga

SEQ ID NO: 688940 - DNA, 33 bp, Homo sapien
actgtattctacccaatggacagtaacatttga

SEQ ID NO: 688941 - DNA, 33 bp, Homo sapien
ttatgatcccataatacgatgtttgctgtctta

SEQ ID NO: 688942 - DNA, 33 bp, Homo sapien
ttatgatcccataatatgatgtttgctgtctta

SEQ ID NO: 688943 - DNA, 33 bp, Homo sapien
gtctctctcagcagaaagttctagaacataatt

SEQ ID NO: 688944 - DNA, 33 bp, Homo sapien
gtctctctcagcagaaggttctagaacataatt

SEQ ID NO: 688945 - DNA, 33 bp, Homo sapien
ttgtagttttatggtgaactaatcataatgtat

SEQ ID NO: 688946 - DNA, 33 bp, Homo sapien
ttgtagttttatggtggactaatcataatgtat

SEQ ID NO: 688947 - DNA, 33 bp, Homo sapien
ctttgatggtccaagaacaagtgatctgtcaag

SEQ ID NO: 688948 - DNA, 33 bp, Homo sapien
ctttgatggtccaagagcaagtgatctgtcaag

SEQ ID NO: 688949 - DNA, 33 bp, Homo sapien
gttttgaatgaaccaaattggaatagttatagt

SEQ ID NO: 688950 - DNA, 33 bp, Homo sapien
gttttgaatgaaccaagttggaatagttatagt

SEQ ID NO: 688951 - DNA, 33 bp, Homo sapien
attaatctctcctaaactgtgccttaggtctca

SEQ ID NO: 688952 - DNA, 33 bp, Homo sapien
attaatctctcctaaattgtgccttaggtctca

SEQ ID NO: 688953 - DNA, 33 bp, Homo sapien
agcttgggttaaatgaacaaaacattgtattat

SEQ ID NO: 688954 - DNA, 33 bp, Homo sapien
agcttgggttaaatgagcaaaacattgtattat

SEQ ID NO: 688955 - DNA, 33 bp, Homo sapien
catatttataagaaaacttccattaaaaataca

SEQ ID NO: 688956 - DNA, 33 bp, Homo sapien
catatttataagaaaagttccattaaaaataca

SEQ ID NO: 688957 - DNA, 33 bp, Homo sapien
ttttcctttcctagaactgatgcacaagagagt

SEQ ID NO: 688958 - DNA, 33 bp, Homo sapien
ttttcctttcctagaattgatgcacaagagagt

SEQ ID NO: 688959 - DNA, 33 bp, Homo sapien
aatctcaaagtctgtacggttaattggatctgt

SEQ ID NO: 688960 - DNA, 33 bp, Homo sapien
aatctcaaagtctgtatggttaattggatctgt

SEQ ID NO: 688961 - DNA, 33 bp, Homo sapien
tcttgagatttttatacgcacaggatgagcatg

SEQ ID NO: 688962 - DNA, 33 bp, Homo sapien
tcttgagatttttatatgcacaggatgagcatg

SEQ ID NO: 688963 - DNA, 33 bp, Homo sapien
ccgaagtgttcacctaaaatagtacagtgcacc

SEQ ID NO: 688964 - DNA, 33 bp, Homo sapien
ccgaagtgttcacctagaatagtacagtgcacc

SEQ ID NO: 688965 - DNA, 33 bp, Homo sapien
tcatatgcctagaaagaaagataagactagaca

SEQ ID NO: 688966 - DNA, 33 bp, Homo sapien
tcatatgcctagaaaggaagataagactagaca

SEQ ID NO: 688967 - DNA, 33 bp, Homo sapien
ggaaacacccatgtagcattcttcaatgtctct

SEQ ID NO: 688968 - DNA, 33 bp, Homo sapien
ggaaacacccatgtaggattcttcaatgtctct

SEQ ID NO: 688969 - DNA, 33 bp, Homo sapien
ctaattccttaaaaacagtatttatcgcatata

SEQ ID NO: 688970 - DNA, 33 bp, Homo sapien
ctaattccttaaaaactgtatttatcgcatata

SEQ ID NO: 688971 - DNA, 33 bp, Homo sapien
aacagtggataaagaagggctgctgtattccta

SEQ ID NO: 688972 - DNA, 33 bp, Homo sapien
aacagtggataaagaatggctgctgtattccta

SEQ ID NO: 688973 - DNA, 33 bp, Homo sapien
cttatctgtggggttacgtccaaagatctccag

SEQ ID NO: 688974 - DNA, 33 bp, Homo sapien
cttatctgtggggttaggtccaaagatctccag

SEQ ID NO: 688975 - DNA, 33 bp, Homo sapien
aaaactacatttctaactccttcacagcttgat

SEQ ID NO: 688976 - DNA, 33 bp, Homo sapien
aaaactacatttctaattccttcacagcttgat

SEQ ID NO: 688977 - DNA, 33 bp, Homo sapien
catgtaattggcaaaactctaatttgcatttaa

SEQ ID NO: 688978 - DNA, 33 bp, Homo sapien
catgtaattggcaaaagtctaatttgcatttaa

SEQ ID NO: 688979 - DNA, 33 bp, Homo sapien
tggtgagtctcagacacggaagcagggtcaagt

SEQ ID NO: 688980 - DNA, 33 bp, Homo sapien
tggtgagtctcagacatggaagcagggtcaagt

SEQ ID NO: 688981 - DNA, 33 bp, Homo sapien
agctttaggaccagaacgctagagatctccttc

SEQ ID NO: 688982 - DNA, 33 bp, Homo sapien
agctttaggaccagaatgctagagatctccttc

SEQ ID NO: 688983 - DNA, 33 bp, Homo sapien
tatgtgtgtgacttgacggaagagaaggagacc

SEQ ID NO: 688984 - DNA, 33 bp, Homo sapien
tatgtgtgtgacttgagggaagagaaggagacc

SEQ ID NO: 688985 - DNA, 33 bp, Homo sapien
gtagctgaattacacaatccagaagctaatggg

SEQ ID NO: 688986 - DNA, 33 bp, Homo sapien
gtagctgaattacacattccagaagctaatggg

SEQ ID NO: 688987 - DNA, 33 bp, Homo sapien
taaggagctagagccaatacaaaaaatgagtct

SEQ ID NO: 688988 - DNA, 33 bp, Homo sapien
taaggagctagagccattacaaaaaatgagtct

SEQ ID NO: 688989 - DNA, 33 bp, Homo sapien
aatagtctaagatcaacggtttgagccagactg

SEQ ID NO: 688990 - DNA, 33 bp, Homo sapien
aatagtctaagatcaatggtttgagccagactg

SEQ ID NO: 688991 - DNA, 33 bp, Homo sapien
tctaccattgaagtggccacaattctacttcac

SEQ ID NO: 688992 - DNA, 33 bp, Homo sapien
tctaccattgaagtggtcacaattctacttcac

SEQ ID NO: 688993 - DNA, 33 bp, Homo sapien
ctgcagaaaacttggacgcacaagactgcatta

SEQ ID NO: 688994 - DNA, 33 bp, Homo sapien
ctgcagaaaacttggatgcacaagactgcatta

SEQ ID NO: 688995 - DNA, 33 bp, Homo sapien
aattcaaatgtggatacacctaaacctaaacct

SEQ ID NO: 688996 - DNA, 33 bp, Homo sapien
aattcaaatgtggatatacctaaacctaaacct

SEQ ID NO: 688997 - DNA, 33 bp, Homo sapien
ctagtacgtgttgaaactggaattcaaatgtgg

SEQ ID NO: 688998 - DNA, 33 bp, Homo sapien
ctagtacgtgttgaaattggaattcaaatgtgg

SEQ ID NO: 688999 - DNA, 33 bp, Homo sapien
taagggctcaaacatcccaaacataagtattag

SEQ ID NO: 689000 - DNA, 33 bp, Homo sapien
taagggctcaaacatctcaaacataagtattag

SEQ ID NO: 689001 - DNA, 33 bp, Homo sapien
gaattaacagagacaacgggtgactaacatgtc

SEQ ID NO: 689002 - DNA, 33 bp, Homo sapien
gaattaacagagacaatgggtgactaacatgtc

SEQ ID NO: 689003 - DNA, 33 bp, Homo sapien
aggatgcgaaggcaaacacccaggaagatgaag

SEQ ID NO: 689004 - DNA, 33 bp, Homo sapien
aggatgcgaaggcaaagacccaggaagatgaag

SEQ ID NO: 689005 - DNA, 33 bp, Homo sapien
agagatttaaggaaaaagaaactgacagtgcaa

SEQ ID NO: 689006 - DNA, 33 bp, Homo sapien
agagatttaaggaaaacgaaactgacagtgcaa

SEQ ID NO: 689007 - DNA, 33 bp, Homo sapien
ctctcctcgtcagaaacattttatcaggaagtg

SEQ ID NO: 689008 - DNA, 33 bp, Homo sapien
ctctcctcgtcagaaatattttatcaggaagtg

SEQ ID NO: 689009 - DNA, 33 bp, Homo sapien
gaactcttcagagccacaggatcagtctcatgg

SEQ ID NO: 689010 - DNA, 33 bp, Homo sapien
gaactcttcagagccagaggatcagtctcatgg

SEQ ID NO: 689011 - DNA, 33 bp, Homo sapien
caatatctctttcctgcagacacacctgtatca

SEQ ID NO: 689012 - DNA, 33 bp, Homo sapien
caatatctctttcctgtagacacacctgtatca

SEQ ID NO: 689013 - DNA, 33 bp, Homo sapien
gtctgacacacattccagcaatttagggatgag

SEQ ID NO: 689014 - DNA, 33 bp, Homo sapien
gtctgacacacattcccgcaatttagggatgag

SEQ ID NO: 689015 - DNA, 33 bp, Homo sapien
gagatgagcagggcatcatgaactgatcaaggt

SEQ ID NO: 689016 - DNA, 33 bp, Homo sapien
gagatgagcagggcatgatgaactgatcaaggt

SEQ ID NO: 689017 - DNA, 33 bp, Homo sapien
ctaccagacttccatcaaaacaccttagaattt

SEQ ID NO: 689018 - DNA, 33 bp, Homo sapien
ctaccagacttccatcgaaacaccttagaattt

SEQ ID NO: 689019 - DNA, 33 bp, Homo sapien
ttatttggaaagtagaatcattaatacttggca

SEQ ID NO: 689020 - DNA, 33 bp, Homo sapien
ttatttggaaagtagagtcattaatacttggca

SEQ ID NO: 689021 - DNA, 33 bp, Homo sapien
catcaagggagctctaaggtgaggaagacaatc

SEQ ID NO: 689022 - DNA, 33 bp, Homo sapien
catcaagggagctctagggtgaggaagacaatc

SEQ ID NO: 689023 - DNA, 33 bp, Homo sapien
tgctttgtcaatctgccaagggaatctaagtgc

SEQ ID NO: 689024 - DNA, 33 bp, Homo sapien
tgctttgtcaatctgcgaagggaatctaagtgc

SEQ ID NO: 689025 - DNA, 33 bp, Homo sapien
taattcagcaacaccaagggcaggtttgagcag

SEQ ID NO: 689026 - DNA, 33 bp, Homo sapien
taattcagcaacaccaggggcaggtttgagcag

SEQ ID NO: 689027 - DNA, 33 bp, Homo sapien
caggatctggagtcaaatgataaaattaaaatg

SEQ ID NO: 689028 - DNA, 33 bp, Homo sapien
caggatctggagtcaagtgataaaattaaaatg

SEQ ID NO: 689029 - DNA, 33 bp, Homo sapien
gccaatgattcataacggtattcaagggttcac

SEQ ID NO: 689030 - DNA, 33 bp, Homo sapien
gccaatgattcataactgtattcaagggttcac

SEQ ID NO: 689031 - DNA, 33 bp, Homo sapien
agacaaattggtaaccaacagggcattgaagat

SEQ ID NO: 689032 - DNA, 33 bp, Homo sapien
agacaaattggtaaccgacagggcattgaagat

SEQ ID NO: 689033 - DNA, 33 bp, Homo sapien
cctctctagccaggacccttcaaggttgattgg

SEQ ID NO: 689034 - DNA, 33 bp, Homo sapien
cctctctagccaggactcttcaaggttgattgg

SEQ ID NO: 689035 - DNA, 33 bp, Homo sapien
acctcacatcctcatgacaacaatctctttaga

SEQ ID NO: 689036 - DNA, 33 bp, Homo sapien
acctcacatcctcatggcaacaatctctttaga

SEQ ID NO: 689037 - DNA, 33 bp, Homo sapien
gacacaaaaatgatgacggcaagatgatgtcct

SEQ ID NO: 689038 - DNA, 33 bp, Homo sapien
gacacaaaaatgatgatggcaagatgatgtcct

SEQ ID NO: 689039 - DNA, 33 bp, Homo sapien
tgaaaataattgcacccgagtatgttgaagctt

SEQ ID NO: 689040 - DNA, 33 bp, Homo sapien
tgaaaataattgcacctgagtatgttgaagctt

SEQ ID NO: 689041 - DNA, 33 bp, Homo sapien
aagataatcctcttgactagttgagaccaaaag

SEQ ID NO: 689042 - DNA, 33 bp, Homo sapien
aagataatcctcttgattagttgagaccaaaag

SEQ ID NO: 689043 - DNA, 33 bp, Homo sapien
tgtccaagagagctttcaaaaaggaagcaggca

SEQ ID NO: 689044 - DNA, 33 bp, Homo sapien
tgtccaagagagctttgaaaaaggaagcaggca

SEQ ID NO: 689045 - DNA, 33 bp, Homo sapien
ttacattacataaaaccgtctgctagcagaccc

SEQ ID NO: 689046 - DNA, 33 bp, Homo sapien
ttacattacataaaactgtctgctagcagaccc

SEQ ID NO: 689047 - DNA, 33 bp, Homo sapien
tgagtttgaacttgaaatcccaagagatgacac

SEQ ID NO: 689048 - DNA, 33 bp, Homo sapien
tgagtttgaacttgaagtcccaagagatgacac

SEQ ID NO: 689049 - DNA, 33 bp, Homo sapien
ttttcaaagagtaaggaaacatggttaggccta

SEQ ID NO: 689050 - DNA, 33 bp, Homo sapien
ttttcaaagagtaaggcaacatggttaggccta

SEQ ID NO: 689051 - DNA, 33 bp, Homo sapien
atgaaacagccctaaaaagagcagagaatctgt

SEQ ID NO: 689052 - DNA, 33 bp, Homo sapien
atgaaacagccctaaacagagcagagaatctgt

SEQ ID NO: 689053 - DNA, 33 bp, Homo sapien
ttaagttcttgagttgaagaatgccatttataa

SEQ ID NO: 689054 - DNA, 33 bp, Homo sapien
ttaagttcttgagttggagaatgccatttataa

SEQ ID NO: 689055 - DNA, 33 bp, Homo sapien
gaccaaaaccccagagaatttcccactactcct

SEQ ID NO: 689056 - DNA, 33 bp, Homo sapien
gaccaaaaccccagaggatttcccactactcct

SEQ ID NO: 689057 - DNA, 33 bp, Homo sapien
ttagaagcatggctaaagtttccataaacacct

SEQ ID NO: 689058 - DNA, 33 bp, Homo sapien
ttagaagcatggctaaggtttccataaacacct

SEQ ID NO: 689059 - DNA, 33 bp, Homo sapien
ctatccagaaccaagccgagtatgcctaagaga

SEQ ID NO: 689060 - DNA, 33 bp, Homo sapien
ctatccagaaccaagctgagtatgcctaagaga

SEQ ID NO: 689061 - DNA, 33 bp, Homo sapien
tcaggatcatgatccaaacgtaatctcccacat

SEQ ID NO: 689062 - DNA, 33 bp, Homo sapien
tcaggatcatgatccagacgtaatctcccacat

SEQ ID NO: 689063 - DNA, 33 bp, Homo sapien
tagcaaattcctctccaaggagccctcctctac

SEQ ID NO: 689064 - DNA, 33 bp, Homo sapien
tagcaaattcctctcccaggagccctcctctac

SEQ ID NO: 689065 - DNA, 33 bp, Homo sapien
tactcttgttaagtccacagaatgcaaaatcaa

SEQ ID NO: 689066 - DNA, 33 bp, Homo sapien
tactcttgttaagtccgcagaatgcaaaatcaa

SEQ ID NO: 689067 - DNA, 33 bp, Homo sapien
caaggaatgacaaagacaatatgaccgccagag

SEQ ID NO: 689068 - DNA, 33 bp, Homo sapien
caaggaatgacaaagataatatgaccgccagag

SEQ ID NO: 689069 - DNA, 33 bp, Homo sapien
atcacaagttctatgaaaaaatgcaggagacag

SEQ ID NO: 689070 - DNA, 33 bp, Homo sapien
atcacaagttctatgagaaaatgcaggagacag

SEQ ID NO: 689071 - DNA, 33 bp, Homo sapien
agagagattttcctaacgtgttaagcctcattt

SEQ ID NO: 689072 - DNA, 33 bp, Homo sapien
agagagattttcctaatgtgttaagcctcattt

SEQ ID NO: 689073 - DNA, 33 bp, Homo sapien
taaccaaatgactctacgttggttgggaagagc

SEQ ID NO: 689074 - DNA, 33 bp, Homo sapien
taaccaaatgactctaggttggttgggaagagc

SEQ ID NO: 689075 - DNA, 33 bp, Homo sapien
agacaatgtgctcgtgcatttttttagtcctct

SEQ ID NO: 689076 - DNA, 33 bp, Homo sapien
agacaatgtgctcgtgtatttttttagtcctct

SEQ ID NO: 689077 - DNA, 33 bp, Homo sapien
catttatgtgaatccactgcatgcttataatag

SEQ ID NO: 689078 - DNA, 33 bp, Homo sapien
catttatgtgaatccattgcatgcttataatag

SEQ ID NO: 689079 - DNA, 33 bp, Homo sapien
cctaggtaagtgaacacggcctcaggtgactgc

SEQ ID NO: 689080 - DNA, 33 bp, Homo sapien
cctaggtaagtgaacatggcctcaggtgactgc

SEQ ID NO: 689081 - DNA, 33 bp, Homo sapien
aagcctggtcataggacgctataattaactcta

SEQ ID NO: 689082 - DNA, 33 bp, Homo sapien
aagcctggtcataggatgctataattaactcta

SEQ ID NO: 689083 - DNA, 33 bp, Homo sapien
ctgaacaaagccagaaacatggcaagcctaagt

SEQ ID NO: 689084 - DNA, 33 bp, Homo sapien
ctgaacaaagccagaagcatggcaagcctaagt

SEQ ID NO: 689085 - DNA, 33 bp, Homo sapien
aactgtagaaactgagaagtcatcagacaagta

SEQ ID NO: 689086 - DNA, 33 bp, Homo sapien
aactgtagaaactgaggagtcatcagacaagta

SEQ ID NO: 689087 - DNA, 33 bp, Homo sapien
gttatcagactttttgcagtattggaaagacct

SEQ ID NO: 689088 - DNA, 33 bp, Homo sapien
gttatcagactttttggagtattggaaagacct

SEQ ID NO: 689089 - DNA, 33 bp, Homo sapien
ccttttcttcctatcccaccacaatgcagccac

SEQ ID NO: 689090 - DNA, 33 bp, Homo sapien
ccttttcttcctatcctaccacaatgcagccac

SEQ ID NO: 689091 - DNA, 33 bp, Homo sapien
tgctgaataattagctcagcgatattgaggact

SEQ ID NO: 689092 - DNA, 33 bp, Homo sapien
tgctgaataattagcttagcgatattgaggact

SEQ ID NO: 689093 - DNA, 33 bp, Homo sapien
ctcagtaagtaacacaatagtacttgcctggct

SEQ ID NO: 689094 - DNA, 33 bp, Homo sapien
ctcagtaagtaacacactagtacttgcctggct

SEQ ID NO: 689095 - DNA, 33 bp, Homo sapien
ttaatgattaaaagcaacatgaagccaggcaag

SEQ ID NO: 689096 - DNA, 33 bp, Homo sapien
ttaatgattaaaagcaccatgaagccaggcaag

SEQ ID NO: 689097 - DNA, 33 bp, Homo sapien
tggcctccaggaaaaaataactgaaaattagct

SEQ ID NO: 689098 - DNA, 33 bp, Homo sapien
tggcctccaggaaaaattaactgaaaattagct

SEQ ID NO: 689099 - DNA, 33 bp, Homo sapien
ttgtaaagaaaaagaaattcagtggactcacag

SEQ ID NO: 689100 - DNA, 33 bp, Homo sapien
ttgtaaagaaaaagaagttcagtggactcacag

SEQ ID NO: 689101 - DNA, 33 bp, Homo sapien
ggcattgacatcagacagaaataaaacaagagc

SEQ ID NO: 689102 - DNA, 33 bp, Homo sapien
ggcattgacatcagacggaaataaaacaagagc

SEQ ID NO: 689103 - DNA, 33 bp, Homo sapien
agatatatgttcagaccaccattacttgtgtag

SEQ ID NO: 689104 - DNA, 33 bp, Homo sapien
agatatatgttcagactaccattacttgtgtag

SEQ ID NO: 689105 - DNA, 33 bp, Homo sapien
taacggaagaagcatcagataattttgaggaca

SEQ ID NO: 689106 - DNA, 33 bp, Homo sapien
taacggaagaagcatccgataattttgaggaca

SEQ ID NO: 689107 - DNA, 33 bp, Homo sapien
cacttctctgtaagtacgtgactgtgaacaagt

SEQ ID NO: 689108 - DNA, 33 bp, Homo sapien
cacttctctgtaagtaggtgactgtgaacaagt

SEQ ID NO: 689109 - DNA, 33 bp, Homo sapien
acgttatgtctgggtacgtctgtgagagtgttt

SEQ ID NO: 689110 - DNA, 33 bp, Homo sapien
acgttatgtctgggtatgtctgtgagagtgttt

SEQ ID NO: 689111 - DNA, 33 bp, Homo sapien
gagacacaaatgtaaacggtaatatgagaaaaa

SEQ ID NO: 689112 - DNA, 33 bp, Homo sapien
gagacacaaatgtaaatggtaatatgagaaaaa

SEQ ID NO: 689113 - DNA, 33 bp, Homo sapien
tctaatttgtctccaaactttctggcagccaga

SEQ ID NO: 689114 - DNA, 33 bp, Homo sapien
tctaatttgtctccaacctttctggcagccaga

SEQ ID NO: 689115 - DNA, 33 bp, Homo sapien
aaacacaaaggtgctacgcctagaaacagtggc

SEQ ID NO: 689116 - DNA, 33 bp, Homo sapien
aaacacaaaggtgctatgcctagaaacagtggc

SEQ ID NO: 689117 - DNA, 33 bp, Homo sapien
atctgagtgctattaactgaaacaggatgggga

SEQ ID NO: 689118 - DNA, 33 bp, Homo sapien
atctgagtgctattaattgaaacaggatgggga

SEQ ID NO: 689119 - DNA, 33 bp, Homo sapien
agtaatggaagatgaaactaaaattacaagagc

SEQ ID NO: 689120 - DNA, 33 bp, Homo sapien
agtaatggaagatgaagctaaaattacaagagc

SEQ ID NO: 689121 - DNA, 33 bp, Homo sapien
ttcttgtggaatgttcaagtgtagtagtatttt

SEQ ID NO: 689122 - DNA, 33 bp, Homo sapien
ttcttgtggaatgttcgagtgtagtagtatttt

SEQ ID NO: 689123 - DNA, 33 bp, Homo sapien
gagctgccatcttgtagagtgtgatgagccact

SEQ ID NO: 689124 - DNA, 33 bp, Homo sapien
gagctgccatcttgtatagtgtgatgagccact

SEQ ID NO: 689125 - DNA, 33 bp, Homo sapien
tgggcacaacactttggaaaacgctatttattt

SEQ ID NO: 689126 - DNA, 33 bp, Homo sapien
tgggcacaacactttgtaaaacgctatttattt

SEQ ID NO: 689127 - DNA, 33 bp, Homo sapien
cctggcactgccacaaattagatgtgtggttct

SEQ ID NO: 689128 - DNA, 33 bp, Homo sapien
cctggcactgccacaagttagatgtgtggttct

SEQ ID NO: 689129 - DNA, 33 bp, Homo sapien
aaaatcataatgttggaaaagtttaaaggcaaa

SEQ ID NO: 689130 - DNA, 33 bp, Homo sapien
aaaatcataatgttgggaaagtttaaaggcaaa

SEQ ID NO: 689131 - DNA, 33 bp, Homo sapien
ttcttttattgacctgaacttattatacacctt

SEQ ID NO: 689132 - DNA, 33 bp, Homo sapien
ttcttttattgacctgtacttattatacacctt

SEQ ID NO: 689133 - DNA, 33 bp, Homo sapien
cttataatttcctacacggtctggcctctcatt

SEQ ID NO: 689134 - DNA, 33 bp, Homo sapien
cttataatttcctacatggtctggcctctcatt

SEQ ID NO: 689135 - DNA, 33 bp, Homo sapien
gaggaaattagcaaaaatctcacgttttgttct

SEQ ID NO: 689136 - DNA, 33 bp, Homo sapien
gaggaaattagcaaaagtctcacgttttgttct

SEQ ID NO: 689137 - DNA, 33 bp, Homo sapien
gcatttcacattatggcccactatacgcatgca

SEQ ID NO: 689138 - DNA, 33 bp, Homo sapien
gcatttcacattatggtccactatacgcatgca

SEQ ID NO: 689139 - DNA, 33 bp, Homo sapien
gcaccatctcaaagagcagccaaatgaaatagg

SEQ ID NO: 689140 - DNA, 33 bp, Homo sapien
gcaccatctcaaagagtagccaaatgaaatagg

SEQ ID NO: 689141 - DNA, 33 bp, Homo sapien
tcaagaagtgtttacccatccatgttagtctgt

SEQ ID NO: 689142 - DNA, 33 bp, Homo sapien
tcaagaagtgtttacctatccatgttagtctgt

SEQ ID NO: 689143 - DNA, 33 bp, Homo sapien
gtgctcacactcagaagaattcctataactcca

SEQ ID NO: 689144 - DNA, 33 bp, Homo sapien
gtgctcacactcagaataattcctataactcca

SEQ ID NO: 689145 - DNA, 33 bp, Homo sapien
tttgatggattagatacacagtgagggaaagtg

SEQ ID NO: 689146 - DNA, 33 bp, Homo sapien
tttgatggattagatatacagtgagggaaagtg

SEQ ID NO: 689147 - DNA, 33 bp, Homo sapien
taagactaaacaaatgaatcactaattgccatt

SEQ ID NO: 689148 - DNA, 33 bp, Homo sapien
taagactaaacaaatgcatcactaattgccatt

SEQ ID NO: 689149 - DNA, 33 bp, Homo sapien
ttagttgttacactagaaggaaaatcctattgg

SEQ ID NO: 689150 - DNA, 33 bp, Homo sapien
ttagttgttacactagcaggaaaatcctattgg

SEQ ID NO: 689151 - DNA, 33 bp, Homo sapien
ttaatttttttgaaacaggatcttggtctttca

SEQ ID NO: 689152 - DNA, 33 bp, Homo sapien
ttaatttttttgaaactggatcttggtctttca

SEQ ID NO: 689153 - DNA, 33 bp, Homo sapien
gacagagactgaccaaacaaaagggaagaaaac

SEQ ID NO: 689154 - DNA, 33 bp, Homo sapien
gacagagactgaccaaccaaaagggaagaaaac

SEQ ID NO: 689155 - DNA, 33 bp, Homo sapien
tgatcttctccggcaaaagagtctggcaaggag

SEQ ID NO: 689156 - DNA, 33 bp, Homo sapien
tgatcttctccggcaatagagtctggcaaggag

SEQ ID NO: 689157 - DNA, 33 bp, Homo sapien
gacaaatagatctcaccatatagttatggaacc

SEQ ID NO: 689158 - DNA, 33 bp, Homo sapien
gacaaatagatctcactatatagttatggaacc

SEQ ID NO: 689159 - DNA, 33 bp, Homo sapien
aaacaaccagatcccacgtgactaactgagcaa

SEQ ID NO: 689160 - DNA, 33 bp, Homo sapien
aaacaaccagatcccatgtgactaactgagcaa

SEQ ID NO: 689161 - DNA, 33 bp, Homo sapien
ggagaggtatggaggaagggaataatctaagac

SEQ ID NO: 689162 - DNA, 33 bp, Homo sapien
ggagaggtatggaggaggggaataatctaagac

SEQ ID NO: 689163 - DNA, 33 bp, Homo sapien
atgggtgaccttctgaactctgttttggtcaag

SEQ ID NO: 689164 - DNA, 33 bp, Homo sapien
atgggtgaccttctgagctctgttttggtcaag

SEQ ID NO: 689165 - DNA, 33 bp, Homo sapien
aggaactcattgttccagccagatgtgtcctcc

SEQ ID NO: 689166 - DNA, 33 bp, Homo sapien
aggaactcattgttccggccagatgtgtcctcc

SEQ ID NO: 689167 - DNA, 33 bp, Homo sapien
atgggttcctgggtaactggtttaatcagctat

SEQ ID NO: 689168 - DNA, 33 bp, Homo sapien
atgggttcctgggtaagtggtttaatcagctat

SEQ ID NO: 689169 - DNA, 33 bp, Homo sapien
ggagtcctgtcatccaagtaacactcaagttga

SEQ ID NO: 689170 - DNA, 33 bp, Homo sapien
ggagtcctgtcatccaggtaacactcaagttga

SEQ ID NO: 689171 - DNA, 33 bp, Homo sapien
tgccaagttgtgtttaacgtttctgaagtgcta

SEQ ID NO: 689172 - DNA, 33 bp, Homo sapien
tgccaagttgtgtttagcgtttctgaagtgcta

SEQ ID NO: 689173 - DNA, 33 bp, Homo sapien
gagctataacatgttcgcatgacctttattcgt

SEQ ID NO: 689174 - DNA, 33 bp, Homo sapien
gagctataacatgttctcatgacctttattcgt

SEQ ID NO: 689175 - DNA, 33 bp, Homo sapien
ttactctatcagtaaacggaaataatagtcata

SEQ ID NO: 689176 - DNA, 33 bp, Homo sapien
ttactctatcagtaaatggaaataatagtcata

SEQ ID NO: 689177 - DNA, 33 bp, Homo sapien
ataacgggcatagatacaaacaggtttgagaag

SEQ ID NO: 689178 - DNA, 33 bp, Homo sapien
ataacgggcatagatataaacaggtttgagaag

SEQ ID NO: 689179 - DNA, 33 bp, Homo sapien
tttaagcttcttggcaatagaaactatgctccc

SEQ ID NO: 689180 - DNA, 33 bp, Homo sapien
tttaagcttcttggcagtagaaactatgctccc

SEQ ID NO: 689181 - DNA, 33 bp, Homo sapien
ttggagaaggtaactgccaagaagctgtgaagt

SEQ ID NO: 689182 - DNA, 33 bp, Homo sapien
ttggagaaggtaactggcaagaagctgtgaagt

SEQ ID NO: 689183 - DNA, 33 bp, Homo sapien
gctttattcatgataactaaaaactggacacaa

SEQ ID NO: 689184 - DNA, 33 bp, Homo sapien
gctttattcatgataattaaaaactggacacaa

SEQ ID NO: 689185 - DNA, 33 bp, Homo sapien
acaaggtgacagacgaaaaagcaggtcatgaat

SEQ ID NO: 689186 - DNA, 33 bp, Homo sapien
acaaggtgacagacgacaaagcaggtcatgaat

SEQ ID NO: 689187 - DNA, 33 bp, Homo sapien
atcttcaacttgccaactctagtgaccaatttt

SEQ ID NO: 689188 - DNA, 33 bp, Homo sapien
atcttcaacttgccaattctagtgaccaatttt

SEQ ID NO: 689189 - DNA, 33 bp, Homo sapien
aaggaaactggataaaatgggattactgtatat

SEQ ID NO: 689190 - DNA, 33 bp, Homo sapien
aaggaaactggataaagtgggattactgtatat

SEQ ID NO: 689191 - DNA, 33 bp, Homo sapien
caacccataagagggacgagaattgcagaatgg

SEQ ID NO: 689192 - DNA, 33 bp, Homo sapien
caacccataagagggatgagaattgcagaatgg

SEQ ID NO: 689193 - DNA, 33 bp, Homo sapien
acatggaaatggcaacaaccccatgtggaacag

SEQ ID NO: 689194 - DNA, 33 bp, Homo sapien
acatggaaatggcaaccaccccatgtggaacag

SEQ ID NO: 689195 - DNA, 33 bp, Homo sapien
taaaatgaggtcataccggagtaaggtgagttt

SEQ ID NO: 689196 - DNA, 33 bp, Homo sapien
taaaatgaggtcatacgggagtaaggtgagttt

SEQ ID NO: 689197 - DNA, 33 bp, Homo sapien
aacccagcatgcataaatctcttcccaagtcta

SEQ ID NO: 689198 - DNA, 33 bp, Homo sapien
aacccagcatgcataagtctcttcccaagtcta

SEQ ID NO: 689199 - DNA, 33 bp, Homo sapien
tgagaagagtccttcaagggcgctgactctgcc

SEQ ID NO: 689200 - DNA, 33 bp, Homo sapien
tgagaagagtccttcacgggcgctgactctgcc

SEQ ID NO: 689201 - DNA, 33 bp, Homo sapien
tggaatgaggatatgacggatttagccaaagca

SEQ ID NO: 689202 - DNA, 33 bp, Homo sapien
tggaatgaggatatgatggatttagccaaagca

SEQ ID NO: 689203 - DNA, 33 bp, Homo sapien
ctcctctcaaggcaaagctggatctgacacaaa

SEQ ID NO: 689204 - DNA, 33 bp, Homo sapien
ctcctctcaaggcaaatctggatctgacacaaa

SEQ ID NO: 689205 - DNA, 33 bp, Homo sapien
tcatccttgtaaacagcagaacataagcattta

SEQ ID NO: 689206 - DNA, 33 bp, Homo sapien
tcatccttgtaaacaggagaacataagcattta

SEQ ID NO: 689207 - DNA, 33 bp, Homo sapien
tgcctaatgttaccagaccttgcagaaaccact

SEQ ID NO: 689208 - DNA, 33 bp, Homo sapien
tgcctaatgttaccaggccttgcagaaaccact

SEQ ID NO: 689209 - DNA, 33 bp, Homo sapien
ttccctatctcccacaatgaatcccctatctga

SEQ ID NO: 689210 - DNA, 33 bp, Homo sapien
ttccctatctcccacactgaatcccctatctga

SEQ ID NO: 689211 - DNA, 33 bp, Homo sapien
gttgtgattgttttccccagttcagacaatccc

SEQ ID NO: 689212 - DNA, 33 bp, Homo sapien
gttgtgattgttttcctcagttcagacaatccc

SEQ ID NO: 689213 - DNA, 33 bp, Homo sapien
tgtatacaatttgggacaacctcttcaagaaat

SEQ ID NO: 689214 - DNA, 33 bp, Homo sapien
tgtatacaatttgggagaacctcttcaagaaat

SEQ ID NO: 689215 - DNA, 33 bp, Homo sapien
acgtgagtcccattcactattttcttatatggt

SEQ ID NO: 689216 - DNA, 33 bp, Homo sapien
acgtgagtcccattcagtattttcttatatggt

SEQ ID NO: 689217 - DNA, 33 bp, Homo sapien
agtgaaacagctgaaaggcttaagttgcatagt

SEQ ID NO: 689218 - DNA, 33 bp, Homo sapien
agtgaaacagctgaaatgcttaagttgcatagt

SEQ ID NO: 689219 - DNA, 33 bp, Homo sapien
tttaagccatcaaatacatggtaatgtggcctc

SEQ ID NO: 689220 - DNA, 33 bp, Homo sapien
tttaagccatcaaatatatggtaatgtggcctc

SEQ ID NO: 689221 - DNA, 33 bp, Homo sapien
catgtgcagcccctgaaaaatgcttgcagagat

SEQ ID NO: 689222 - DNA, 33 bp, Homo sapien
catgtgcagcccctgagaaatgcttgcagagat

SEQ ID NO: 689223 - DNA, 33 bp, Homo sapien
atatcaccatcagggaataaaggagcagcacct

SEQ ID NO: 689224 - DNA, 33 bp, Homo sapien
atatcaccatcagggagtaaaggagcagcacct

SEQ ID NO: 689225 - DNA, 33 bp, Homo sapien
atttttctctgtaatacgttttccaggtcattt

SEQ ID NO: 689226 - DNA, 33 bp, Homo sapien
atttttctctgtaatatgttttccaggtcattt

SEQ ID NO: 689227 - DNA, 33 bp, Homo sapien
gacaaacaatatggcaagatttctccgactcaa

SEQ ID NO: 689228 - DNA, 33 bp, Homo sapien
gacaaacaatatggcaggatttctccgactcaa

SEQ ID NO: 689229 - DNA, 33 bp, Homo sapien
catgaaggtctccccactggactctgactctcc

SEQ ID NO: 689230 - DNA, 33 bp, Homo sapien
catgaaggtctccccattggactctgactctcc

SEQ ID NO: 689231 - DNA, 33 bp, Homo sapien
caggaatttctgggaaagagaaccaagtttgtc

SEQ ID NO: 689232 - DNA, 33 bp, Homo sapien
caggaatttctgggaaggagaaccaagtttgtc

SEQ ID NO: 689233 - DNA, 33 bp, Homo sapien
agagaagaaattcccaatctctggaactgcaag

SEQ ID NO: 689234 - DNA, 33 bp, Homo sapien
agagaagaaattcccagtctctggaactgcaag

SEQ ID NO: 689235 - DNA, 33 bp, Homo sapien
catcaacttgtccgtacaccctgcttgccttgc

SEQ ID NO: 689236 - DNA, 33 bp, Homo sapien
catcaacttgtccgtagaccctgcttgccttgc

SEQ ID NO: 689237 - DNA, 33 bp, Homo sapien
ttaggtagaaggatgaacagatgagtgtggtgg

SEQ ID NO: 689238 - DNA, 33 bp, Homo sapien
ttaggtagaaggatgagcagatgagtgtggtgg

SEQ ID NO: 689239 - DNA, 33 bp, Homo sapien
cttggtttatgacaccaggaagtctccctgaga

SEQ ID NO: 689240 - DNA, 33 bp, Homo sapien
cttggtttatgacaccgggaagtctccctgaga

SEQ ID NO: 689241 - DNA, 33 bp, Homo sapien
gcaagtcaaatatgaacgtgggcctacagcata

SEQ ID NO: 689242 - DNA, 33 bp, Homo sapien
gcaagtcaaatatgaatgtgggcctacagcata

SEQ ID NO: 689243 - DNA, 33 bp, Homo sapien
aagccaaacaataaccactgtcacagtaaatcc

SEQ ID NO: 689244 - DNA, 33 bp, Homo sapien
aagccaaacaataacccctgtcacagtaaatcc

SEQ ID NO: 689245 - DNA, 33 bp, Homo sapien
attaataaaatcttggacatcatggatttactg

SEQ ID NO: 689246 - DNA, 33 bp, Homo sapien
attaataaaatcttggccatcatggatttactg

SEQ ID NO: 689247 - DNA, 33 bp, Homo sapien
ggaaaagagccttcaccaaacctgagtctgttg

SEQ ID NO: 689248 - DNA, 33 bp, Homo sapien
ggaaaagagccttcactaaacctgagtctgttg

SEQ ID NO: 689249 - DNA, 33 bp, Homo sapien
aaggcgagatggaccaaactcactctttttatc

SEQ ID NO: 689250 - DNA, 33 bp, Homo sapien
aaggcgagatggaccagactcactctttttatc

SEQ ID NO: 689251 - DNA, 33 bp, Homo sapien
tgttccctaaaattcacgcccttcctctcacat

SEQ ID NO: 689252 - DNA, 33 bp, Homo sapien
tgttccctaaaattcatgcccttcctctcacat

SEQ ID NO: 689253 - DNA, 33 bp, Homo sapien
gtgaacatttgctaaacagatttctgtcgttgg

SEQ ID NO: 689254 - DNA, 33 bp, Homo sapien
gtgaacatttgctaaagagatttctgtcgttgg

SEQ ID NO: 689255 - DNA, 33 bp, Homo sapien
gttattaagaatttcaagacggcctttctgagc

SEQ ID NO: 689256 - DNA, 33 bp, Homo sapien
gttattaagaatttcaggacggcctttctgagc

SEQ ID NO: 689257 - DNA, 33 bp, Homo sapien
cacagctagtaagtagaacaagaaggaaatttc

SEQ ID NO: 689258 - DNA, 33 bp, Homo sapien
cacagctagtaagtagcacaagaaggaaatttc

SEQ ID NO: 689259 - DNA, 33 bp, Homo sapien
gacatctagcagttgacggaccttgagctgata

SEQ ID NO: 689260 - DNA, 33 bp, Homo sapien
gacatctagcagttgatggaccttgagctgata

SEQ ID NO: 689261 - DNA, 33 bp, Homo sapien
tgttgtgggattagaaatgagttggggagaggc

SEQ ID NO: 689262 - DNA, 33 bp, Homo sapien
tgttgtgggattagaactgagttggggagaggc

SEQ ID NO: 689263 - DNA, 33 bp, Homo sapien
aggcccgtaatagtgacgtcttccagtgtcttc

SEQ ID NO: 689264 - DNA, 33 bp, Homo sapien
aggcccgtaatagtgatgtcttccagtgtcttc

SEQ ID NO: 689265 - DNA, 33 bp, Homo sapien
aataggggttgggaatcataatactattgggaa

SEQ ID NO: 689266 - DNA, 33 bp, Homo sapien
aataggggttgggaattataatactattgggaa

SEQ ID NO: 689267 - DNA, 33 bp, Homo sapien
ggagtcttgtttgagccactaatgtgatagccc

SEQ ID NO: 689268 - DNA, 33 bp, Homo sapien
ggagtcttgtttgagctactaatgtgatagccc

SEQ ID NO: 689269 - DNA, 33 bp, Homo sapien
acaacagcactagcaaaccaatacacctgggta

SEQ ID NO: 689270 - DNA, 33 bp, Homo sapien
acaacagcactagcaagccaatacacctgggta

SEQ ID NO: 689271 - DNA, 33 bp, Homo sapien
gttttccatcactacccggactataggaagtac

SEQ ID NO: 689272 - DNA, 33 bp, Homo sapien
gttttccatcactacctggactataggaagtac

SEQ ID NO: 689273 - DNA, 33 bp, Homo sapien
caaaggactggtcccacaggcatttaaaaccac

SEQ ID NO: 689274 - DNA, 33 bp, Homo sapien
caaaggactggtcccataggcatttaaaaccac

SEQ ID NO: 689275 - DNA, 33 bp, Homo sapien
cttttgcaagagttctaacatgagaaaaaagtg

SEQ ID NO: 689276 - DNA, 33 bp, Homo sapien
cttttgcaagagttctgacatgagaaaaaagtg

SEQ ID NO: 689277 - DNA, 33 bp, Homo sapien
ttaagcaagaaaatcacgtcttcctcagtgaaa

SEQ ID NO: 689278 - DNA, 33 bp, Homo sapien
ttaagcaagaaaatcatgtcttcctcagtgaaa

SEQ ID NO: 689279 - DNA, 33 bp, Homo sapien
ccttttgtcatcttgacctggcttagctctcca

SEQ ID NO: 689280 - DNA, 33 bp, Homo sapien
ccttttgtcatcttgatctggcttagctctcca

SEQ ID NO: 689281 - DNA, 33 bp, Homo sapien
ggaggcctcaatgaaaaccactgccctatggga

SEQ ID NO: 689282 - DNA, 33 bp, Homo sapien
ggaggcctcaatgaaatccactgccctatggga

SEQ ID NO: 689283 - DNA, 33 bp, Homo sapien
gaactcctgacttttcaaagacttcctcaattg

SEQ ID NO: 689284 - DNA, 33 bp, Homo sapien
gaactcctgacttttcgaagacttcctcaattg

SEQ ID NO: 689285 - DNA, 33 bp, Homo sapien
caggtaaaatgtgaacggagaaatagccattat

SEQ ID NO: 689286 - DNA, 33 bp, Homo sapien
caggtaaaatgtgaactgagaaatagccattat

SEQ ID NO: 689287 - DNA, 33 bp, Homo sapien
ttttattctttagtccaaagtacttagcattat

SEQ ID NO: 689288 - DNA, 33 bp, Homo sapien
ttttattctttagtcccaagtacttagcattat

SEQ ID NO: 689289 - DNA, 33 bp, Homo sapien
tgaaaatgaagttgcacgaggctggagttcaca

SEQ ID NO: 689290 - DNA, 33 bp, Homo sapien
tgaaaatgaagttgcatgaggctggagttcaca

SEQ ID NO: 689291 - DNA, 33 bp, Homo sapien
gcttacgcagttggcaatgagagactgggggcc

SEQ ID NO: 689292 - DNA, 33 bp, Homo sapien
gcttacgcagttggcagtgagagactgggggcc

SEQ ID NO: 689293 - DNA, 33 bp, Homo sapien
gacagtgtgctccaaaaacccgtatttgaatcc

SEQ ID NO: 689294 - DNA, 33 bp, Homo sapien
gacagtgtgctccaaagacccgtatttgaatcc

SEQ ID NO: 689295 - DNA, 33 bp, Homo sapien
acctgaatacacagcaacaaatttttggcagca

SEQ ID NO: 689296 - DNA, 33 bp, Homo sapien
acctgaatacacagcagcaaatttttggcagca

SEQ ID NO: 689297 - DNA, 33 bp, Homo sapien
tttttgtcaactttctaaagctcttctataaaa

SEQ ID NO: 689298 - DNA, 33 bp, Homo sapien
tttttgtcaactttctgaagctcttctataaaa

SEQ ID NO: 689299 - DNA, 33 bp, Homo sapien
tagatatttggtgtaacaacaaacttgaattta

SEQ ID NO: 689300 - DNA, 33 bp, Homo sapien
tagatatttggtgtaataacaaacttgaattta

SEQ ID NO: 689301 - DNA, 33 bp, Homo sapien
gtcactaccagacctacgacagtgcagagttta

SEQ ID NO: 689302 - DNA, 33 bp, Homo sapien
gtcactaccagacctatgacagtgcagagttta

SEQ ID NO: 689303 - DNA, 33 bp, Homo sapien
ctatgtaggttctgaaagtatagagtaggtgcc

SEQ ID NO: 689304 - DNA, 33 bp, Homo sapien
ctatgtaggttctgaaggtatagagtaggtgcc

SEQ ID NO: 689305 - DNA, 33 bp, Homo sapien
attccttacctgttgaatagctagtggagcaac

SEQ ID NO: 689306 - DNA, 33 bp, Homo sapien
attccttacctgttgagtagctagtggagcaac

SEQ ID NO: 689307 - DNA, 33 bp, Homo sapien
attcaaagaccaagtacatgagagaactgtaag

SEQ ID NO: 689308 - DNA, 33 bp, Homo sapien
attcaaagaccaagtagatgagagaactgtaag

SEQ ID NO: 689309 - DNA, 33 bp, Homo sapien
aatgataattcacttactaaatcagcttctaat

SEQ ID NO: 689310 - DNA, 33 bp, Homo sapien
aatgataattcacttattaaatcagcttctaat

SEQ ID NO: 689311 - DNA, 33 bp, Homo sapien
agagcaaaagagaaaaagtggaaatgtaaactt

SEQ ID NO: 689312 - DNA, 33 bp, Homo sapien
agagcaaaagagaaaaggtggaaatgtaaactt

SEQ ID NO: 689313 - DNA, 33 bp, Homo sapien
ttgatgtctctggtgaccagaaatagcagcatt

SEQ ID NO: 689314 - DNA, 33 bp, Homo sapien
ttgatgtctctggtgatcagaaatagcagcatt

SEQ ID NO: 689315 - DNA, 33 bp, Homo sapien
gtgtggaagtggagaacaaagatgccaatagcc

SEQ ID NO: 689316 - DNA, 33 bp, Homo sapien
gtgtggaagtggagaataaagatgccaatagcc

SEQ ID NO: 689317 - DNA, 33 bp, Homo sapien
atttctctttatctgccatttctttcagggcaa

SEQ ID NO: 689318 - DNA, 33 bp, Homo sapien
atttctctttatctgcgatttctttcagggcaa

SEQ ID NO: 689319 - DNA, 33 bp, Homo sapien
taattggatatttttaagccgattgtccatact

SEQ ID NO: 689320 - DNA, 33 bp, Homo sapien
taattggatatttttaggccgattgtccatact

SEQ ID NO: 689321 - DNA, 33 bp, Homo sapien
atcttccagttcagcacgttttcttgtgatttg

SEQ ID NO: 689322 - DNA, 33 bp, Homo sapien
atcttccagttcagcatgttttcttgtgatttg

SEQ ID NO: 689323 - DNA, 33 bp, Homo sapien
gtctatgcagcaaaccactatggtacacattta

SEQ ID NO: 689324 - DNA, 33 bp, Homo sapien
gtctatgcagcaaaccgctatggtacacattta

SEQ ID NO: 689325 - DNA, 33 bp, Homo sapien
atcacttcctagtagaacctctgctacaagact

SEQ ID NO: 689326 - DNA, 33 bp, Homo sapien
atcacttcctagtagagcctctgctacaagact

SEQ ID NO: 689327 - DNA, 33 bp, Homo sapien
tcacttctctgagaaaacaatgtcaagttaagg

SEQ ID NO: 689328 - DNA, 33 bp, Homo sapien
tcacttctctgagaaagcaatgtcaagttaagg

SEQ ID NO: 689329 - DNA, 33 bp, Homo sapien
tgagatgtggtcaaaaacctggactcagtttgt

SEQ ID NO: 689330 - DNA, 33 bp, Homo sapien
tgagatgtggtcaaaagcctggactcagtttgt

SEQ ID NO: 689331 - DNA, 33 bp, Homo sapien
accaatttcttaaaatcatccttctatctcttt

SEQ ID NO: 689332 - DNA, 33 bp, Homo sapien
accaatttcttaaaatgatccttctatctcttt

SEQ ID NO: 689333 - DNA, 33 bp, Homo sapien
agactgcattatttctcacctgatcttcagcct

SEQ ID NO: 689334 - DNA, 33 bp, Homo sapien
agactgcattatttcttacctgatcttcagcct

SEQ ID NO: 689335 - DNA, 33 bp, Homo sapien
gactgtaaagacatgaagcagctgctcctctgc

SEQ ID NO: 689336 - DNA, 33 bp, Homo sapien
gactgtaaagacatgaggcagctgctcctctgc

SEQ ID NO: 689337 - DNA, 33 bp, Homo sapien
atcaacatcaaagatccacaagcaaatccacca

SEQ ID NO: 689338 - DNA, 33 bp, Homo sapien
atcaacatcaaagatctacaagcaaatccacca

SEQ ID NO: 689339 - DNA, 33 bp, Homo sapien
ctagaccagagcctgcaaactttttctgtactt

SEQ ID NO: 689340 - DNA, 33 bp, Homo sapien
ctagaccagagcctgccaactttttctgtactt

SEQ ID NO: 689341 - DNA, 33 bp, Homo sapien
aggaaacaagagagtaaaaaagcaacatccaca

SEQ ID NO: 689342 - DNA, 33 bp, Homo sapien
aggaaacaagagagtagaaaagcaacatccaca

SEQ ID NO: 689343 - DNA, 33 bp, Homo sapien
ttgacgcttcgaccaacaacttaaccatgaata

SEQ ID NO: 689344 - DNA, 33 bp, Homo sapien
ttgacgcttcgaccaagaacttaaccatgaata

SEQ ID NO: 689345 - DNA, 33 bp, Homo sapien
tctctgcttagttgacacttcgaccaagaactt

SEQ ID NO: 689346 - DNA, 33 bp, Homo sapien
tctctgcttagttgacgcttcgaccaagaactt

SEQ ID NO: 689347 - DNA, 33 bp, Homo sapien
ttcctaattaaacttacgaggctaattgtattt

SEQ ID NO: 689348 - DNA, 33 bp, Homo sapien
ttcctaattaaacttatgaggctaattgtattt

SEQ ID NO: 689349 - DNA, 33 bp, Homo sapien
agagtgacaaggaaaagaaagagaagatgcgat

SEQ ID NO: 689350 - DNA, 33 bp, Homo sapien
agagtgacaaggaaaataaagagaagatgcgat

SEQ ID NO: 689351 - DNA, 33 bp, Homo sapien
aagtagaagctgtaaagaaactcagattttaga

SEQ ID NO: 689352 - DNA, 33 bp, Homo sapien
aagtagaagctgtaaataaactcagattttaga

SEQ ID NO: 689353 - DNA, 33 bp, Homo sapien
tgttaaaagttactcacgtatttgaaagcttat

SEQ ID NO: 689354 - DNA, 33 bp, Homo sapien
tgttaaaagttactcatgtatttgaaagcttat

SEQ ID NO: 689355 - DNA, 33 bp, Homo sapien
tttgggcaagttactcaactactgtttccttat

SEQ ID NO: 689356 - DNA, 33 bp, Homo sapien
tttgggcaagttactcgactactgtttccttat

SEQ ID NO: 689357 - DNA, 33 bp, Homo sapien
aagtgaggataagagcagaaaggagcctcagac

SEQ ID NO: 689358 - DNA, 33 bp, Homo sapien
aagtgaggataagagcggaaaggagcctcagac

SEQ ID NO: 689359 - DNA, 33 bp, Homo sapien
gtactgattctgaacccctagctttaaaaaggc

SEQ ID NO: 689360 - DNA, 33 bp, Homo sapien
gtactgattctgaacctctagctttaaaaaggc

SEQ ID NO: 689361 - DNA, 33 bp, Homo sapien
atctatcatgatgtcaaacaaataggaggagcc

SEQ ID NO: 689362 - DNA, 33 bp, Homo sapien
atctatcatgatgtcagacaaataggaggagcc

SEQ ID NO: 689363 - DNA, 33 bp, Homo sapien
atacccaacataaaacagtccggtccgtggcct

SEQ ID NO: 689364 - DNA, 33 bp, Homo sapien
atacccaacataaaacggtccggtccgtggcct

SEQ ID NO: 689365 - DNA, 33 bp, Homo sapien
aagctacagtaggaaggctggaatgaaacatgt

SEQ ID NO: 689366 - DNA, 33 bp, Homo sapien
aagctacagtaggaagtctggaatgaaacatgt

SEQ ID NO: 689367 - DNA, 33 bp, Homo sapien
gggtacttatctatcaatattagtgcagtagct

SEQ ID NO: 689368 - DNA, 33 bp, Homo sapien
gggtacttatctatcagtattagtgcagtagct

SEQ ID NO: 689369 - DNA, 33 bp, Homo sapien
cactaacaatatctaaatcaactgatggcattc

SEQ ID NO: 689370 - DNA, 33 bp, Homo sapien
cactaacaatatctaactcaactgatggcattc

SEQ ID NO: 689371 - DNA, 33 bp, Homo sapien; identical to SEQ ID NO: 689369

SEQ ID NO: 689372 - DNA, 33 bp, Homo sapien; identical to SEQ ID NO: 689370

SEQ ID NO: 689373 - DNA, 33 bp, Homo sapien
tgagaattattattgccatcagaagagtcaggt

SEQ ID NO: 689374 - DNA, 33 bp, Homo sapien
tgagaattattattgctatcagaagagtcaggt

SEQ ID NO: 689375 - DNA, 33 bp, Homo sapien
agattataggctttcaccactaggaattgtcgg

SEQ ID NO: 689376 - DNA, 33 bp, Homo sapien
agattataggctttcatcactaggaattgtcgg

SEQ ID NO: 689377 - DNA, 33 bp, Homo sapien
cccagaccatgagaagacactccactgaacttt

SEQ ID NO: 689378 - DNA, 33 bp, Homo sapien
cccagaccatgagaagccactccactgaacttt

SEQ ID NO: 689379 - DNA, 33 bp, Homo sapien
ttgcgagccaccaaaagtttagtttctcaggca

SEQ ID NO: 689380 - DNA, 33 bp, Homo sapien
ttgcgagccaccaaaattttagtttctcaggca

SEQ ID NO: 689381 - DNA, 33 bp, Homo sapien
gacttattttgcattacgtaatctgctattgat

SEQ ID NO: 689382 - DNA, 33 bp, Homo sapien
gacttattttgcattatgtaatctgctattgat

SEQ ID NO: 689383 - DNA, 33 bp, Homo sapien
gtggggtatgtggcataaggggtttggacagaa

SEQ ID NO: 689384 - DNA, 33 bp, Homo sapien
gtggggtatgtggcatgaggggtttggacagaa

SEQ ID NO: 689385 - DNA, 33 bp, Homo sapien
tttattttttcagagacgcaatttttttcttta

SEQ ID NO: 689386 - DNA, 33 bp, Homo sapien
tttattttttcagagatgcaatttttttcttta

SEQ ID NO: 689387 - DNA, 33 bp, Homo sapien
tggttggctcagatcccaggttcatgggccacc

SEQ ID NO: 689388 - DNA, 33 bp, Homo sapien
tggttggctcagatccgaggttcatgggccacc

SEQ ID NO: 689389 - DNA, 33 bp, Homo sapien
tggcactctgctcagcactcattcattagtaac

SEQ ID NO: 689390 - DNA, 33 bp, Homo sapien
tggcactctgctcagcgctcattcattagtaac

SEQ ID NO: 689391 - DNA, 33 bp, Homo sapien
ttactgacatataaagactgctataaggaagtg

SEQ ID NO: 689392 - DNA, 33 bp, Homo sapien
ttactgacatataaagtctgctataaggaagtg

SEQ ID NO: 689393 - DNA, 33 bp, Homo sapien
acctctattcctctaccactgcatggtggggct

SEQ ID NO: 689394 - DNA, 33 bp, Homo sapien
acctctattcctctactactgcatggtggggct

SEQ ID NO: 689395 - DNA, 33 bp, Homo sapien
caacccgccctttgacacaaatacctgcagctc

SEQ ID NO: 689396 - DNA, 33 bp, Homo sapien
caacccgccctttgacgcaaatacctgcagctc

SEQ ID NO: 689397 - DNA, 33 bp, Homo sapien
tagcctaaatcatgagcaaggatttataccctc

SEQ ID NO: 689398 - DNA, 33 bp, Homo sapien
tagcctaaatcatgaggaaggatttataccctc

SEQ ID NO: 689399 - DNA, 33 bp, Homo sapien
gaaataaagtgtgtgaaatatgttgtagccctt

SEQ ID NO: 689400 - DNA, 33 bp, Homo sapien
gaaataaagtgtgtgacatatgttgtagccctt

SEQ ID NO: 689401 - DNA, 33 bp, Homo sapien
tgtcaaattaaattcactagcccggaagccaat

SEQ ID NO: 689402 - DNA, 33 bp, Homo sapien
tgtcaaattaaattcattagcccggaagccaat

SEQ ID NO: 689403 - DNA, 33 bp, Homo sapien
atccacatctttattcactgagtacccacttaa

SEQ ID NO: 689404 - DNA, 33 bp, Homo sapien
atccacatctttattcgctgagtacccacttaa

SEQ ID NO: 689405 - DNA, 33 bp, Homo sapien
gcagcttaaaacaatacctacttataagctcac

SEQ ID NO: 689406 - DNA, 33 bp, Homo sapien
gcagcttaaaacaatagctacttataagctcac

SEQ ID NO: 689407 - DNA, 33 bp, Homo sapien
gatcttgggtactctaaaatccttctctgtaca

SEQ ID NO: 689408 - DNA, 33 bp, Homo sapien
gatcttgggtactctacaatccttctctgtaca

SEQ ID NO: 689409 - DNA, 33 bp, Homo sapien
gatgagaagtgtccaaatcaatctggtggtggt

SEQ ID NO: 689410 - DNA, 33 bp, Homo sapien
gatgagaagtgtccaagtcaatctggtggtggt

SEQ ID NO: 689411 - DNA, 33 bp, Homo sapien
aataaaactagtcatcactaagcatctcgaagt

SEQ ID NO: 689412 - DNA, 33 bp, Homo sapien
aataaaactagtcatccctaagcatctcgaagt

SEQ ID NO: 689413 - DNA, 33 bp, Homo sapien
tttggcttaggtcctccgacaatgcagtgcttt

SEQ ID NO: 689414 - DNA, 33 bp, Homo sapien
tttggcttaggtcctctgacaatgcagtgcttt

SEQ ID NO: 689415 - DNA, 33 bp, Homo sapien
tttatttgctataaaaatgacaagaattatgat

SEQ ID NO: 689416 - DNA, 33 bp, Homo sapien
tttatttgctataaaattgacaagaattatgat

SEQ ID NO: 689417 - DNA, 33 bp, Homo sapien
tcacatattgccttcacccttatctcttctttc

SEQ ID NO: 689418 - DNA, 33 bp, Homo sapien
tcacatattgccttcatccttatctcttctttc

SEQ ID NO: 689419 - DNA, 33 bp, Homo sapien
tctgtttcagtcagcaaatccaaagggtattgt

SEQ ID NO: 689420 - DNA, 33 bp, Homo sapien
tctgtttcagtcagcagatccaaagggtattgt

SEQ ID NO: 689421 - DNA, 33 bp, Homo sapien
aataccagtgatgagacacagtgcttgccttct

SEQ ID NO: 689422 - DNA, 33 bp, Homo sapien
aataccagtgatgagatacagtgcttgccttct

SEQ ID NO: 689423 - DNA, 33 bp, Homo sapien
aggtagagattacaccaagtgtagaagccccgg

SEQ ID NO: 689424 - DNA, 33 bp, Homo sapien
aggtagagattacaccgagtgtagaagccccgg

SEQ ID NO: 689425 - DNA, 33 bp, Homo sapien
aaatcattcttgactacgtagagcaaagaggtg

SEQ ID NO: 689426 - DNA, 33 bp, Homo sapien
aaatcattcttgactatgtagagcaaagaggtg

SEQ ID NO: 689427 - DNA, 33 bp, Homo sapien
atttatgacaccgataatagtgacaataattat

SEQ ID NO: 689428 - DNA, 33 bp, Homo sapien
atttatgacaccgatattagtgacaataattat

SEQ ID NO: 689429 - DNA, 33 bp, Homo sapien
agggcaaattttgtcacgatacttagcctcact

SEQ ID NO: 689430 - DNA, 33 bp, Homo sapien
agggcaaattttgtcatgatacttagcctcact

SEQ ID NO: 689431 - DNA, 33 bp, Homo sapien
acccaaaaagagcccacatttattgaccaatga

SEQ ID NO: 689432 - DNA, 33 bp, Homo sapien
acccaaaaagagcccatatttattgaccaatga

SEQ ID NO: 689433 - DNA, 33 bp, Homo sapien
aatcttctaaggaaataaagttcacagctacca

SEQ ID NO: 689434 - DNA, 33 bp, Homo sapien
aatcttctaaggaaattaagttcacagctacca

SEQ ID NO: 689435 - DNA, 33 bp, Homo sapien
tgaaggtcttcaaaataatcctgtaaagtcagc

SEQ ID NO: 689436 - DNA, 33 bp, Homo sapien
tgaaggtcttcaaaatgatcctgtaaagtcagc

SEQ ID NO: 689437 - DNA, 33 bp, Homo sapien
ccttccaagtggaatgaattatccttcttagat

SEQ ID NO: 689438 - DNA, 33 bp, Homo sapien
ccttccaagtggaatggattatccttcttagat

SEQ ID NO: 689439 - DNA, 33 bp, Homo sapien
aaagctgcttttcaagactcggcttgctttctt

SEQ ID NO: 689440 - DNA, 33 bp, Homo sapien
aaagctgcttttcaaggctcggcttgctttctt

SEQ ID NO: 689441 - DNA, 33 bp, Homo sapien
actctcctatgagaaagcaatgaagatggtgct

SEQ ID NO: 689442 - DNA, 33 bp, Homo sapien
actctcctatgagaaatcaatgaagatggtgct

SEQ ID NO: 689443 - DNA, 33 bp, Homo sapien
accaaatgaaaagtaaaagagtcagtaggcagg

SEQ ID NO: 689444 - DNA, 33 bp, Homo sapien
accaaatgaaaagtaagagagtcagtaggcagg

SEQ ID NO: 689445 - DNA, 33 bp, Homo sapien
agtgtccttataagaaaagacatcagagtctgc

SEQ ID NO: 689446 - DNA, 33 bp, Homo sapien
agtgtccttataagaagagacatcagagtctgc

SEQ ID NO: 689447 - DNA, 33 bp, Homo sapien
ggttattttttatttaccacattgcttcatatt

SEQ ID NO: 689448 - DNA, 33 bp, Homo sapien
ggttattttttatttatcacattgcttcatatt

SEQ ID NO: 689449 - DNA, 33 bp, Homo sapien
tacaaaaccagtatgactaaattaaattgtaaa

SEQ ID NO: 689450 - DNA, 33 bp, Homo sapien
tacaaaaccagtatgagtaaattaaattgtaaa

SEQ ID NO: 689451 - DNA, 33 bp, Homo sapien
cccaagtcacaccatacccagttcacatcatgg

SEQ ID NO: 689452 - DNA, 33 bp, Homo sapien
cccaagtcacaccatatccagttcacatcatgg

SEQ ID NO: 689453 - DNA, 33 bp, Homo sapien
gacacattgactgaaaggtggcaaggacccaat

SEQ ID NO: 689454 - DNA, 33 bp, Homo sapien
gacacattgactgaaatgtggcaaggacccaat

SEQ ID NO: 689455 - DNA, 33 bp, Homo sapien
gaacccagttacagctcagatgagtaatttggc

SEQ ID NO: 689456 - DNA, 33 bp, Homo sapien
gaacccagttacagcttagatgagtaatttggc

SEQ ID NO: 689457 - DNA, 33 bp, Homo sapien
ctgactgttgttggaacccgggaaatatgccta

SEQ ID NO: 689458 - DNA, 33 bp, Homo sapien
ctgactgttgttggaatccgggaaatatgccta

SEQ ID NO: 689459 - DNA, 33 bp, Homo sapien
aacaaagccaaccaaaaaagcaataaggaaagg

SEQ ID NO: 689460 - DNA, 33 bp, Homo sapien
aacaaagccaaccaaagaagcaataaggaaagg

SEQ ID NO: 689461 - DNA, 33 bp, Homo sapien
ttctccattagtgattcaaaagcatcttacaat

SEQ ID NO: 689462 - DNA, 33 bp, Homo sapien
ttctccattagtgattgaaaagcatcttacaat

SEQ ID NO: 689463 - DNA, 33 bp, Homo sapien
ttaatttagtagtttacacacaatcagtggcct

SEQ ID NO: 689464 - DNA, 33 bp, Homo sapien
ttaatttagtagtttagacacaatcagtggcct

SEQ ID NO: 689465 - DNA, 33 bp, Homo sapien
gggtagggccagataggagtttcagaggctcaa

SEQ ID NO: 689466 - DNA, 33 bp, Homo sapien
gggtagggccagatagtagtttcagaggctcaa

SEQ ID NO: 689467 - DNA, 33 bp, Homo sapien
atggagccaagtaaagcaagtggagctcgggga

SEQ ID NO: 689468 - DNA, 33 bp, Homo sapien
atggagccaagtaaagtaagtggagctcgggga

SEQ ID NO: 689469 - DNA, 33 bp, Homo sapien
catcagagactgaattgaagtcttcacagttga

SEQ ID NO: 689470 - DNA, 33 bp, Homo sapien
catcagagactgaatttaagtcttcacagttga

SEQ ID NO: 689471 - DNA, 33 bp, Homo sapien
ctcctcttcaccatacaaccatgtaggaattca

SEQ ID NO: 689472 - DNA, 33 bp, Homo sapien
ctcctcttcaccatacgaccatgtaggaattca

SEQ ID NO: 689473 - DNA, 33 bp, Homo sapien
cgaaggagaggttaacagagacaaatatcgcta

SEQ ID NO: 689474 - DNA, 33 bp, Homo sapien
cgaaggagaggttaacggagacaaatatcgcta

SEQ ID NO: 689475 - DNA, 33 bp, Homo sapien
gatgcaatatagcagcacctgtctcctgggcag

SEQ ID NO: 689476 - DNA, 33 bp, Homo sapien
gatgcaatatagcagctcctgtctcctgggcag

SEQ ID NO: 689477 - DNA, 33 bp, Homo sapien
aattctatattcctaaacagattatggaccata

SEQ ID NO: 689478 - DNA, 33 bp, Homo sapien
aattctatattcctaagcagattatggaccata

SEQ ID NO: 689479 - DNA, 33 bp, Homo sapien
atatctggggcatctcgcaaaaaggaagcagtt

SEQ ID NO: 689480 - DNA, 33 bp, Homo sapien
atatctggggcatctctcaaaaaggaagcagtt

SEQ ID NO: 689481 - DNA, 33 bp, Homo sapien
atcatctactgggtgaaaagcaagttgaaagaa

SEQ ID NO: 689482 - DNA, 33 bp, Homo sapien
atcatctactgggtgacaagcaagttgaaagaa

SEQ ID NO: 689483 - DNA, 33 bp, Homo sapien
cactgcctgggagagacgtgctgaagcctgaga

SEQ ID NO: 689484 - DNA, 33 bp, Homo sapien
cactgcctgggagagaggtgctgaagcctgaga

SEQ ID NO: 689485 - DNA, 33 bp, Homo sapien
accaaataaggggcatcaaatacaggaatccac

SEQ ID NO: 689486 - DNA, 33 bp, Homo sapien
accaaataaggggcatgaaatacaggaatccac

SEQ ID NO: 689487 - DNA, 33 bp, Homo sapien
tacacttaccccaatacatatgctggtgttagt

SEQ ID NO: 689488 - DNA, 33 bp, Homo sapien
tacacttaccccaatagatatgctggtgttagt

SEQ ID NO: 689489 - DNA, 33 bp, Homo sapien
tgtgtagataaacacaagatattatgtgaagca

SEQ ID NO: 689490 - DNA, 33 bp, Homo sapien
tgtgtagataaacacaggatattatgtgaagca

SEQ ID NO: 689491 - DNA, 33 bp, Homo sapien
tgaagagtatgacatgaagcagaaagtggtaag

SEQ ID NO: 689492 - DNA, 33 bp, Homo sapien
tgaagagtatgacatggagcagaaagtggtaag

SEQ ID NO: 689493 - DNA, 33 bp, Homo sapien
ctttcttcaagttcaacgattttaagtgttctt

SEQ ID NO: 689494 - DNA, 33 bp, Homo sapien
ctttcttcaagttcaatgattttaagtgttctt

SEQ ID NO: 689495 - DNA, 33 bp, Homo sapien
ggggttttcaagcaaggctcatttttccttgac

SEQ ID NO: 689496 - DNA, 33 bp, Homo sapien
ggggttttcaagcaagtctcatttttccttgac

SEQ ID NO: 689497 - DNA, 33 bp, Homo sapien
aagcaaaggagtataaataaagttaacatacaa

SEQ ID NO: 689498 - DNA, 33 bp, Homo sapien
aagcaaaggagtataagtaaagttaacatacaa

SEQ ID NO: 689499 - DNA, 33 bp, Homo sapien
tgtttgctgcctctagcagtttagaacatcttt

SEQ ID NO: 689500 - DNA, 33 bp, Homo sapien
tgtttgctgcctctagtagtttagaacatcttt

SEQ ID NO: 689501 - DNA, 33 bp, Homo sapien
caaacaacatcctaaacaaggtttgactgagat

SEQ ID NO: 689502 - DNA, 33 bp, Homo sapien
caaacaacatcctaaagaaggtttgactgagat

SEQ ID NO: 689503 - DNA, 33 bp, Homo sapien
aagaagcatttggcaagtaggagaaacagagca

SEQ ID NO: 689504 - DNA, 33 bp, Homo sapien
aagaagcatttggcaattaggagaaacagagca

SEQ ID NO: 689505 - DNA, 33 bp, Homo sapien
aaactttcaagttacactagatgcacttttggt

SEQ ID NO: 689506 - DNA, 33 bp, Homo sapien
aaactttcaagttacagtagatgcacttttggt

SEQ ID NO: 689507 - DNA, 33 bp, Homo sapien
cactgttctatccacagaaaaggccttcaaagg

SEQ ID NO: 689508 - DNA, 33 bp, Homo sapien
cactgttctatccacataaaaggccttcaaagg

SEQ ID NO: 689509 - DNA, 33 bp, Homo sapien
gcagatttttaggaatgaattgtgaggcttcac

SEQ ID NO: 689510 - DNA, 33 bp, Homo sapien
gcagatttttaggaattaattgtgaggcttcac

SEQ ID NO: 689511 - DNA, 33 bp, Homo sapien
tggtgcaagttctctgaatggtgatcttcattt

SEQ ID NO: 689512 - DNA, 33 bp, Homo sapien
tggtgcaagttctctgcatggtgatcttcattt

SEQ ID NO: 689513 - DNA, 33 bp, Homo sapien
tgtgatgaagccccaaatgaaagaatcttggca

SEQ ID NO: 689514 - DNA, 33 bp, Homo sapien
tgtgatgaagccccaagtgaaagaatcttggca

SEQ ID NO: 689515 - DNA, 33 bp, Homo sapien
ggcactttgaaacatacgatgcagcttggaaaa

SEQ ID NO: 689516 - DNA, 33 bp, Homo sapien
ggcactttgaaacatatgatgcagcttggaaaa

SEQ ID NO: 689517 - DNA, 33 bp, Homo sapien
cctctcccaggatagagctcaaagtgttttcaa

SEQ ID NO: 689518 - DNA, 33 bp, Homo sapien
cctctcccaggatagatctcaaagtgttttcaa

SEQ ID NO: 689519 - DNA, 33 bp, Homo sapien
aatgattgaaacagtcgctatctggttttcctg

SEQ ID NO: 689520 - DNA, 33 bp, Homo sapien
aatgattgaaacagtctctatctggttttcctg

SEQ ID NO: 689521 - DNA, 33 bp, Homo sapien
gctcttttcactaaacaatatgtggtgaatacc

SEQ ID NO: 689522 - DNA, 33 bp, Homo sapien
gctcttttcactaaacgatatgtggtgaatacc

SEQ ID NO: 689523 - DNA, 33 bp, Homo sapien
gattccatttcaaaaacaaattcatcctcatat

SEQ ID NO: 689524 - DNA, 33 bp, Homo sapien
gattccatttcaaaaataaattcatcctcatat

SEQ ID NO: 689525 - DNA, 33 bp, Homo sapien
cactgatgttagccgcaagcctaatcaagtgga

SEQ ID NO: 689526 - DNA, 33 bp, Homo sapien
cactgatgttagccgcgagcctaatcaagtgga

SEQ ID NO: 689527 - DNA, 33 bp, Homo sapien
tcaagaaattgcttagaagttcagtccctaagg

SEQ ID NO: 689528 - DNA, 33 bp, Homo sapien
tcaagaaattgcttaggagttcagtccctaagg

SEQ ID NO: 689529 - DNA, 33 bp, Homo sapien
ggtgcaaacaagaggaccatagagaacccagga

SEQ ID NO: 689530 - DNA, 33 bp, Homo sapien
ggtgcaaacaagaggagcatagagaacccagga

SEQ ID NO: 689531 - DNA, 33 bp, Homo sapien
agaagtgatattttggacaaggtaaagtattat

SEQ ID NO: 689532 - DNA, 33 bp, Homo sapien
agaagtgatattttgggcaaggtaaagtattat

SEQ ID NO: 689533 - DNA, 33 bp, Homo sapien
aattgacacacctaaccacttaccatatttcct

SEQ ID NO: 689534 - DNA, 33 bp, Homo sapien
aattgacacacctaactacttaccatatttcct

SEQ ID NO: 689535 - DNA, 33 bp, Homo sapien
aagccagctctgctcaccactacacacatacat

SEQ ID NO: 689536 - DNA, 33 bp, Homo sapien
aagccagctctgctcatcactacacacatacat

SEQ ID NO: 689537 - DNA, 33 bp, Homo sapien
cacctaacagtttgccactaacctagctctcaa

SEQ ID NO: 689538 - DNA, 33 bp, Homo sapien
cacctaacagtttgccgctaacctagctctcaa

SEQ ID NO: 689539 - DNA, 33 bp, Homo sapien
tttgcagtgtttgagaaatacaaatacaaaact

SEQ ID NO: 689540 - DNA, 33 bp, Homo sapien
tttgcagtgtttgagagatacaaatacaaaact

SEQ ID NO: 689541 - DNA, 33 bp, Homo sapien
tgcatgctagtggcacaatggtgactggtcagt

SEQ ID NO: 689542 - DNA, 33 bp, Homo sapien
tgcatgctagtggcacgatggtgactggtcagt

SEQ ID NO: 689543 - DNA, 33 bp, Homo sapien
aagaaatctaggtagaaccatttcatggagaac

SEQ ID NO: 689544 - DNA, 33 bp, Homo sapien
aagaaatctaggtagacccatttcatggagaac

SEQ ID NO: 689545 - DNA, 33 bp, Homo sapien
aggtaatgatggggacaaagtgagaacagagac

SEQ ID NO: 689546 - DNA, 33 bp, Homo sapien
aggtaatgatggggacgaagtgagaacagagac

SEQ ID NO: 689547 - DNA, 33 bp, Homo sapien
acaaaccacattagggaacacacaaggcctgtg

SEQ ID NO: 689548 - DNA, 33 bp, Homo sapien
acaaaccacattaggggacacacaaggcctgtg

SEQ ID NO: 689549 - DNA, 33 bp, Homo sapien
tggcagacattggtaacagatagaagcatttct

SEQ ID NO: 689550 - DNA, 33 bp, Homo sapien
tggcagacattggtaatagatagaagcatttct

SEQ ID NO: 689551 - DNA, 33 bp, Homo sapien
attcaataggcaaggccatacctagttttgcac

SEQ ID NO: 689552 - DNA, 33 bp, Homo sapien
attcaataggcaaggctatacctagttttgcac

SEQ ID NO: 689553 - DNA, 33 bp, Homo sapien
caagttttgcttttaactgggagtgcaaaacta

SEQ ID NO: 689554 - DNA, 33 bp, Homo sapien
caagttttgcttttaattgggagtgcaaaacta

SEQ ID NO: 689555 - DNA, 33 bp, Homo sapien
gatctcatgtttggcaagcccctgtttatcaaa

SEQ ID NO: 689556 - DNA, 33 bp, Homo sapien
gatctcatgtttggcaggcccctgtttatcaaa

SEQ ID NO: 689557 - DNA, 33 bp, Homo sapien
tgaactgaacatcgcaatgcctacctgatgaca

SEQ ID NO: 689558 - DNA, 33 bp, Homo sapien
tgaactgaacatcgcagtgcctacctgatgaca

SEQ ID NO: 689559 - DNA, 33 bp, Homo sapien
tgggaagtttgtttcaacctcatatccaagttg

SEQ ID NO: 689560 - DNA, 33 bp, Homo sapien
tgggaagtttgtttcatcctcatatccaagttg

SEQ ID NO: 689561 - DNA, 33 bp, Homo sapien
ttagcatcccacaacaaaaacttttccattcag

SEQ ID NO: 689562 - DNA, 33 bp, Homo sapien
ttagcatcccacaacagaaacttttccattcag

SEQ ID NO: 689563 - DNA, 33 bp, Homo sapien
cacaacctactttcgaatcagctgtgtggattc

SEQ ID NO: 689564 - DNA, 33 bp, Homo sapien
cacaacctactttcgagtcagctgtgtggattc

SEQ ID NO: 689565 - DNA, 33 bp, Homo sapien
caagttggacactgaaaaatgacttttgaatca

SEQ ID NO: 689566 - DNA, 33 bp, Homo sapien
caagttggacactgaagaatgacttttgaatca

SEQ ID NO: 689567 - DNA, 33 bp, Homo sapien
tgcctcaggacctttgcagctgcggttcctgct

SEQ ID NO: 689568 - DNA, 33 bp, Homo sapien
tgcctcaggacctttgtagctgcggttcctgct

SEQ ID NO: 689569 - DNA, 33 bp, Homo sapien
tctacctgaatgctccaaagctgttttgtcacg

SEQ ID NO: 689570 - DNA, 33 bp, Homo sapien
tctacctgaatgctccgaagctgttttgtcacg

SEQ ID NO: 689571 - DNA, 33 bp, Homo sapien
ctctcctgtgagtgaacagagcaagaactcact

SEQ ID NO: 689572 - DNA, 33 bp, Homo sapien
ctctcctgtgagtgaatagagcaagaactcact

SEQ ID NO: 689573 - DNA, 33 bp, Homo sapien
tattttcagacaactcaaattttacttaactga

SEQ ID NO: 689574 - DNA, 33 bp, Homo sapien
tattttcagacaactcgaattttacttaactga

SEQ ID NO: 689575 - DNA, 33 bp, Homo sapien
gtgtctttgcatcagacagtaccctacctgtac

SEQ ID NO: 689576 - DNA, 33 bp, Homo sapien
gtgtctttgcatcagatagtaccctacctgtac

SEQ ID NO: 689577 - DNA, 33 bp, Homo sapien
acccagggcaagaaaacggcccaaaagcttatt

SEQ ID NO: 689578 - DNA, 33 bp, Homo sapien
acccagggcaagaaaatggcccaaaagcttatt

SEQ ID NO: 689579 - DNA, 33 bp, Homo sapien
tgggtacataggacacaatcttattgtcaggca

SEQ ID NO: 689580 - DNA, 33 bp, Homo sapien
tgggtacataggacacgatcttattgtcaggca

SEQ ID NO: 689581 - DNA, 33 bp, Homo sapien
gcttctttcttgtgcaatctaagacattcttca

SEQ ID NO: 689582 - DNA, 33 bp, Homo sapien
gcttctttcttgtgcagtctaagacattcttca

SEQ ID NO: 689583 - DNA, 33 bp, Homo sapien
taattggaaggttacaataattacatttttaaa

SEQ ID NO: 689584 - DNA, 33 bp, Homo sapien
taattggaaggttacagtaattacatttttaaa

SEQ ID NO: 689585 - DNA, 33 bp, Homo sapien
acttgtttcaaaatacagtagctatcaaattga

SEQ ID NO: 689586 - DNA, 33 bp, Homo sapien
acttgtttcaaaatacggtagctatcaaattga

SEQ ID NO: 689587 - DNA, 33 bp, Homo sapien
gttagaggcaacatgacatcaaacaggaatttt

SEQ ID NO: 689588 - DNA, 33 bp, Homo sapien
gttagaggcaacatgatatcaaacaggaatttt

SEQ ID NO: 689589 - DNA, 33 bp, Homo sapien
gagtggatgctccgaccgtaaatgaggctgaca

SEQ ID NO: 689590 - DNA, 33 bp, Homo sapien
gagtggatgctccgactgtaaatgaggctgaca

SEQ ID NO: 689591 - DNA, 33 bp, Homo sapien
acatgtatttttatcaaatctggagggtgtgct

SEQ ID NO: 689592 - DNA, 33 bp, Homo sapien
acatgtatttttatcatatctggagggtgtgct

SEQ ID NO: 689593 - DNA, 33 bp, Homo sapien
ttaaaatcatctcaaacctgtaatgaacaaaaa

SEQ ID NO: 689594 - DNA, 33 bp, Homo sapien
ttaaaatcatctcaaagctgtaatgaacaaaaa

SEQ ID NO: 689595 - DNA, 33 bp, Homo sapien
gtttaaagcatggcaaataagatgtatgtgaaa

SEQ ID NO: 689596 - DNA, 33 bp, Homo sapien
gtttaaagcatggcaagtaagatgtatgtgaaa

SEQ ID NO: 689597 - DNA, 33 bp, Homo sapien
tctgaatacaacctgaacctggaaaaggaggag

SEQ ID NO: 689598 - DNA, 33 bp, Homo sapien
tctgaatacaacctgagcctggaaaaggaggag

SEQ ID NO: 689599 - DNA, 33 bp, Homo sapien
gtagggaggctaatcaaagtagcaggcgaggat

SEQ ID NO: 689600 - DNA, 33 bp, Homo sapien
gtagggaggctaatcagagtagcaggcgaggat

SEQ ID NO: 689601 - DNA, 33 bp, Homo sapien
gagttgtgttactatacggtttccatggagatg

SEQ ID NO: 689602 - DNA, 33 bp, Homo sapien
gagttgtgttactatatggtttccatggagatg

SEQ ID NO: 689603 - DNA, 33 bp, Homo sapien
ccagagaagagaaataaccaataaaaacagcag

SEQ ID NO: 689604 - DNA, 33 bp, Homo sapien
ccagagaagagaaatagccaataaaaacagcag

SEQ ID NO: 689605 - DNA, 33 bp, Homo sapien
tcatagcaagagaccaatcaagaaggcaatccc

SEQ ID NO: 689606 - DNA, 33 bp, Homo sapien
tcatagcaagagaccagtcaagaaggcaatccc

SEQ ID NO: 689607 - DNA, 33 bp, Homo sapien
gaattggtctttgatacagtaaccaggattctg

SEQ ID NO: 689608 - DNA, 33 bp, Homo sapien
gaattggtctttgatagagtaaccaggattctg

SEQ ID NO: 689609 - DNA, 33 bp, Homo sapien
cccattaaaaggtaaccgctgataataaaccag

SEQ ID NO: 689610 - DNA, 33 bp, Homo sapien
cccattaaaaggtaactgctgataataaaccag

SEQ ID NO: 689611 - DNA, 33 bp, Homo sapien
cccttatgcactagaaaactaaaaattaaagct

SEQ ID NO: 689612 - DNA, 33 bp, Homo sapien
cccttatgcactagaagactaaaaattaaagct

SEQ ID NO: 689613 - DNA, 33 bp, Homo sapien
ataggagaaacgttcagggaccaaataaattct

SEQ ID NO: 689614 - DNA, 33 bp, Homo sapien
ataggagaaacgttcatggaccaaataaattct

SEQ ID NO: 689615 - DNA, 33 bp, Homo sapien
agtgagtatgctgtaaaggagcgattgacttgg

SEQ ID NO: 689616 - DNA, 33 bp, Homo sapien
agtgagtatgctgtaagggagcgattgacttgg

SEQ ID NO: 689617 - DNA, 33 bp, Homo sapien
tcggagaaatgtgttacgactactagaattcac

SEQ ID NO: 689618 - DNA, 33 bp, Homo sapien
tcggagaaatgtgttatgactactagaattcac

SEQ ID NO: 689619 - DNA, 33 bp, Homo sapien
ctctgttctcaagataccgggatatcaggacac

SEQ ID NO: 689620 - DNA, 33 bp, Homo sapien
ctctgttctcaagatatcgggatatcaggacac

SEQ ID NO: 689621 - DNA, 33 bp, Homo sapien
aatgttctcaatgtgaagaaaatgaaatatcac

SEQ ID NO: 689622 - DNA, 33 bp, Homo sapien
aatgttctcaatgtgaggaaaatgaaatatcac

SEQ ID NO: 689623 - DNA, 33 bp, Homo sapien
ttcaaatgaacgccaacaaacatgtttacacac

SEQ ID NO: 689624 - DNA, 33 bp, Homo sapien
ttcaaatgaacgccaataaacatgtttacacac

SEQ ID NO: 689625 - DNA, 33 bp, Homo sapien
acctataatcttgccccaaattttgatactatg

SEQ ID NO: 689626 - DNA, 33 bp, Homo sapien
acctataatcttgcccgaaattttgatactatg

SEQ ID NO: 689627 - DNA, 33 bp, Homo sapien
ctctatagccaaattgcagttcttaaagatctt

SEQ ID NO: 689628 - DNA, 33 bp, Homo sapien
ctctatagccaaattgtagttcttaaagatctt

SEQ ID NO: 689629 - DNA, 33 bp, Homo sapien
gaaaaattatgtaacacgatggaatattttaca

SEQ ID NO: 689630 - DNA, 33 bp, Homo sapien
gaaaaattatgtaacatgatggaatattttaca

SEQ ID NO: 689631 - DNA, 33 bp, Homo sapien
tagtttttacatgatacagaaagtacagtgaaa

SEQ ID NO: 689632 - DNA, 33 bp, Homo sapien
tagtttttacatgatagagaaagtacagtgaaa

SEQ ID NO: 689633 - DNA, 33 bp, Homo sapien
aaatctgaaagtaagacagtctgggaattagaa

SEQ ID NO: 689634 - DNA, 33 bp, Homo sapien
aaatctgaaagtaagatagtctgggaattagaa

SEQ ID NO: 689635 - DNA, 33 bp, Homo sapien
cagtcaaccagttacaataagtacaacttgtgt

SEQ ID NO: 689636 - DNA, 33 bp, Homo sapien
cagtcaaccagttacagtaagtacaacttgtgt

SEQ ID NO: 689637 - DNA, 33 bp, Homo sapien
ctctttggtattcaaacaaaacgttacaattct

SEQ ID NO: 689638 - DNA, 33 bp, Homo sapien
ctctttggtattcaaataaaacgttacaattct

SEQ ID NO: 689639 - DNA, 33 bp, Homo sapien
ttccagggacagcctacgttttccaaaaccctc

SEQ ID NO: 689640 - DNA, 33 bp, Homo sapien
ttccagggacagcctatgttttccaaaaccctc

SEQ ID NO: 689641 - DNA, 33 bp, Homo sapien
aaaaagacaaggcagccaaaccgaaaaaagcac

SEQ ID NO: 689642 - DNA, 33 bp, Homo sapien
aaaaagacaaggcagctaaaccgaaaaaagcac

SEQ ID NO: 689643 - DNA, 33 bp, Homo sapien
gaggtagtgctgcaggaaattaagtcttcaaga

SEQ ID NO: 689644 - DNA, 33 bp, Homo sapien
gaggtagtgctgcagggaattaagtcttcaaga

SEQ ID NO: 689645 - DNA, 33 bp, Homo sapien
tatgttgtcttgtccaatcaactgtttgtgtct

SEQ ID NO: 689646 - DNA, 33 bp, Homo sapien
tatgttgtcttgtccagtcaactgtttgtgtct

SEQ ID NO: 689647 - DNA, 33 bp, Homo sapien
atttttccatcactcaatatcttaataagacac

SEQ ID NO: 689648 - DNA, 33 bp, Homo sapien
atttttccatcactcagtatcttaataagacac

SEQ ID NO: 689649 - DNA, 33 bp, Homo sapien
gcataagtttaagcaccctagtgtgtaatggga

SEQ ID NO: 689650 - DNA, 33 bp, Homo sapien
gcataagtttaagcacgctagtgtgtaatggga

SEQ ID NO: 689651 - DNA, 33 bp, Homo sapien
tctaatttagatatgacatttgggactttttag

SEQ ID NO: 689652 - DNA, 33 bp, Homo sapien
tctaatttagatatgagatttgggactttttag

SEQ ID NO: 689653 - DNA, 33 bp, Homo sapien
atgggactttgaaaggaattggctggtgtcttc

SEQ ID NO: 689654 - DNA, 33 bp, Homo sapien
atgggactttgaaagggattggctggtgtcttc

SEQ ID NO: 689655 - DNA, 33 bp, Homo sapien
aacaaatgcctcaccaaagaagatattccattc

SEQ ID NO: 689656 - DNA, 33 bp, Homo sapien
aacaaatgcctcaccagagaagatattccattc

SEQ ID NO: 689657 - DNA, 33 bp, Homo sapien
tggatataaaaagctccaggaataaatgctcgg

SEQ ID NO: 689658 - DNA, 33 bp, Homo sapien
tggatataaaaagctcgaggaataaatgctcgg

SEQ ID NO: 689659 - DNA, 33 bp, Homo sapien
cgtataggtggctggaatcactccctagcaaag

SEQ ID NO: 689660 - DNA, 33 bp, Homo sapien
cgtataggtggctggattcactccctagcaaag

SEQ ID NO: 689661 - DNA, 33 bp, Homo sapien
gtgcacctactatgtgaaactgtaatgaaaaat

SEQ ID NO: 689662 - DNA, 33 bp, Homo sapien
gtgcacctactatgtgcaactgtaatgaaaaat

SEQ ID NO: 689663 - DNA, 33 bp, Homo sapien
aggcatttgctgtgtgaactacataaaatagta

SEQ ID NO: 689664 - DNA, 33 bp, Homo sapien
aggcatttgctgtgtgcactacataaaatagta

SEQ ID NO: 689665 - DNA, 33 bp, Homo sapien
ttaacttagctggaaggctctatcctaaatgcc

SEQ ID NO: 689666 - DNA, 33 bp, Homo sapien
ttaacttagctggaagtctctatcctaaatgcc

SEQ ID NO: 689667 - DNA, 33 bp, Homo sapien
ttaagctacaaagtgacaaaccaatgcacagaa

SEQ ID NO: 689668 - DNA, 33 bp, Homo sapien
ttaagctacaaagtgagaaaccaatgcacagaa

SEQ ID NO: 689669 - DNA, 33 bp, Homo sapien
ctaggcaaaggaatagaaactggaaaaagatga

SEQ ID NO: 689670 - DNA, 33 bp, Homo sapien
ctaggcaaaggaataggaactggaaaaagatga

SEQ ID NO: 689671 - DNA, 33 bp, Homo sapien
agtgaatcgagtctggaacattaactgcatcac

SEQ ID NO: 689672 - DNA, 33 bp, Homo sapien
agtgaatcgagtctgggacattaactgcatcac

SEQ ID NO: 689673 - DNA, 33 bp, Homo sapien
ctttttgctcaggaaacaatgtcttgagatggt

SEQ ID NO: 689674 - DNA, 33 bp, Homo sapien
ctttttgctcaggaaagaatgtcttgagatggt

SEQ ID NO: 689675 - DNA, 33 bp, Homo sapien
tcagcactctgtgtccagctaaaggatagtaaa

SEQ ID NO: 689676 - DNA, 33 bp, Homo sapien
tcagcactctgtgtccggctaaaggatagtaaa

SEQ ID NO: 689677 - DNA, 33 bp, Homo sapien
tctgctactctgcgtgaagtatgacagatgaga

SEQ ID NO: 689678 - DNA, 33 bp, Homo sapien
tctgctactctgcgtgcagtatgacagatgaga

SEQ ID NO: 689679 - DNA, 33 bp, Homo sapien
cagagcaatgtcctacactagggtcctgagtgc

SEQ ID NO: 689680 - DNA, 33 bp, Homo sapien
cagagcaatgtcctacgctagggtcctgagtgc

SEQ ID NO: 689681 - DNA, 33 bp, Homo sapien
agacttggtaacaagggactttctgaacctgaa

SEQ ID NO: 689682 - DNA, 33 bp, Homo sapien
agacttggtaacaaggtactttctgaacctgaa

SEQ ID NO: 689683 - DNA, 33 bp, Homo sapien
tttgaagttcagcttcaacacgattgttacaga

SEQ ID NO: 689684 - DNA, 33 bp, Homo sapien
tttgaagttcagcttccacacgattgttacaga

SEQ ID NO: 689685 - DNA, 33 bp, Homo sapien
aacttcagaaagactgaaatggaaatgagcatt

SEQ ID NO: 689686 - DNA, 33 bp, Homo sapien
aacttcagaaagactggaatggaaatgagcatt

SEQ ID NO: 689687 - DNA, 33 bp, Homo sapien
aactctgcaatagctcagaagcggaatagataa

SEQ ID NO: 689688 - DNA, 33 bp, Homo sapien
aactctgcaatagctcggaagcggaatagataa

SEQ ID NO: 689689 - DNA, 33 bp, Homo sapien
tatggttggtgcataacgccccggtctctgttg

SEQ ID NO: 689690 - DNA, 33 bp, Homo sapien
tatggttggtgcataatgccccggtctctgttg

SEQ ID NO: 689691 - DNA, 33 bp, Homo sapien
ttatagtaggaaagataaagtaaacacccctga

SEQ ID NO: 689692 - DNA, 33 bp, Homo sapien
ttatagtaggaaagatgaagtaaacacccctga

SEQ ID NO: 689693 - DNA, 33 bp, Homo sapien
caatcaaaagtgatcaagagcaagagagccaaa

SEQ ID NO: 689694 - DNA, 33 bp, Homo sapien
caatcaaaagtgatcaggagcaagagagccaaa

SEQ ID NO: 689695 - DNA, 33 bp, Homo sapien
aaggacaaaggacacccactggcgcgatcgtga

SEQ ID NO: 689696 - DNA, 33 bp, Homo sapien
aaggacaaaggacacctactggcgcgatcgtga

SEQ ID NO: 689697 - DNA, 33 bp, Homo sapien
tgataagcatgcctgaaaagatggaaaaaacgg

SEQ ID NO: 689698 - DNA, 33 bp, Homo sapien
tgataagcatgcctgataagatggaaaaaacgg

SEQ ID NO: 689699 - DNA, 33 bp, Homo sapien
aattacaaaaatggaccgctgggaaagagcccg

SEQ ID NO: 689700 - DNA, 33 bp, Homo sapien
aattacaaaaatggactgctgggaaagagcccg

SEQ ID NO: 689701 - DNA, 33 bp, Homo sapien
gtaaaaaataaagtgaaggatctctgtatgtat

SEQ ID NO: 689702 - DNA, 33 bp, Homo sapien
gtaaaaaataaagtgagggatctctgtatgtat

SEQ ID NO: 689703 - DNA, 33 bp, Homo sapien
gtaaactgatagatgacgttaaggttctcaagg

SEQ ID NO: 689704 - DNA, 33 bp, Homo sapien
gtaaactgatagatgatgttaaggttctcaagg

SEQ ID NO: 689705 - DNA, 33 bp, Homo sapien
accgaatttgtttaacagctataaacccagtac

SEQ ID NO: 689706 - DNA, 33 bp, Homo sapien
accgaatttgtttaactgctataaacccagtac

SEQ ID NO: 689707 - DNA, 33 bp, Homo sapien
agaaggatgccaaacaatctttgtctcaggtac

SEQ ID NO: 689708 - DNA, 33 bp, Homo sapien
agaaggatgccaaacagtctttgtctcaggtac

SEQ ID NO: 689709 - DNA, 33 bp, Homo sapien
cctgaaggttaaggaaaaacaactggatgaggg

SEQ ID NO: 689710 - DNA, 33 bp, Homo sapien
cctgaaggttaaggaacaacaactggatgaggg

SEQ ID NO: 689711 - DNA, 33 bp, Homo sapien
agttcatcaaaagtcaacttctcagccacatcc

SEQ ID NO: 689712 - DNA, 33 bp, Homo sapien
agttcatcaaaagtcagcttctcagccacatcc

SEQ ID NO: 689713 - DNA, 33 bp, Homo sapien
gttggcactcaagcaacgcctgcagaataagca

SEQ ID NO: 689714 - DNA, 33 bp, Homo sapien
gttggcactcaagcaatgcctgcagaataagca

SEQ ID NO: 689715 - DNA, 33 bp, Homo sapien
cttctcatttcactgaaaagcagcagaaaagta

SEQ ID NO: 689716 - DNA, 33 bp, Homo sapien
cttctcatttcactgagaagcagcagaaaagta

SEQ ID NO: 689717 - DNA, 33 bp, Homo sapien
ctgtcacacattcctactactaatgctacagta

SEQ ID NO: 689718 - DNA, 33 bp, Homo sapien
ctgtcacacattcctagtactaatgctacagta

SEQ ID NO: 689719 - DNA, 33 bp, Homo sapien
ccaagaacaagcttcaatactcacctacccaca

SEQ ID NO: 689720 - DNA, 33 bp, Homo sapien
ccaagaacaagcttcagtactcacctacccaca

SEQ ID NO: 689721 - DNA, 33 bp, Homo sapien
tcagtacctgcaatcaccatcatccatggagag

SEQ ID NO: 689722 - DNA, 33 bp, Homo sapien
tcagtacctgcaatcagcatcatccatggagag

SEQ ID NO: 689723 - DNA, 33 bp, Homo sapien
gaaaaagaagaaacaacaatgcttccaagattt

SEQ ID NO: 689724 - DNA, 33 bp, Homo sapien
gaaaaagaagaaacaataatgcttccaagattt

SEQ ID NO: 689725 - DNA, 33 bp, Homo sapien
catccagggcagaagaaagcaggacatcatgag

SEQ ID NO: 689726 - DNA, 33 bp, Homo sapien
catccagggcagaagacagcaggacatcatgag

SEQ ID NO: 689727 - DNA, 33 bp, Homo sapien
actgccaacttagacaacgttagagataattta

SEQ ID NO: 689728 - DNA, 33 bp, Homo sapien
actgccaacttagacaccgttagagataattta

SEQ ID NO: 689729 - DNA, 33 bp, Homo sapien
atttggccatatgcaacgtggcagacgccgttg

SEQ ID NO: 689730 - DNA, 33 bp, Homo sapien
atttggccatatgcaatgtggcagacgccgttg

SEQ ID NO: 689731 - DNA, 33 bp, Homo sapien
ccctcatgagtctctacgctgagtgtcctccct

SEQ ID NO: 689732 - DNA, 33 bp, Homo sapien
ccctcatgagtctctatgctgagtgtcctccct

SEQ ID NO: 689733 - DNA, 33 bp, Homo sapien
ttgactttgtgcctgtaaaataacttgacatac

SEQ ID NO: 689734 - DNA, 33 bp, Homo sapien
ttgactttgtgcctgttaaataacttgacatac

SEQ ID NO: 689735 - DNA, 33 bp, Homo sapien
aaggaaactgttagaacgagtaaacatggtcag

SEQ ID NO: 689736 - DNA, 33 bp, Homo sapien
aaggaaactgttagaatgagtaaacatggtcag

SEQ ID NO: 689737 - DNA, 33 bp, Homo sapien
tcagacatctttggaccgtacttgattttaagg

SEQ ID NO: 689738 - DNA, 33 bp, Homo sapien
tcagacatctttggactgtacttgattttaagg

SEQ ID NO: 689739 - DNA, 33 bp, Homo sapien
aaaaaaacactgagcaaattagaaataaaattt

SEQ ID NO: 689740 - DNA, 33 bp, Homo sapien
aaaaaaacactgagcagattagaaataaaattt

SEQ ID NO: 689741 - DNA, 33 bp, Homo sapien
catcaaggcagtcttaaccctgagtgaagtaca

SEQ ID NO: 689742 - DNA, 33 bp, Homo sapien
catcaaggcagtcttagccctgagtgaagtaca

SEQ ID NO: 689743 - DNA, 33 bp, Homo sapien
accaagcactgactgaataacgtcttaagttct

SEQ ID NO: 689744 - DNA, 33 bp, Homo sapien
accaagcactgactgagtaacgtcttaagttct

SEQ ID NO: 689745 - DNA, 33 bp, Homo sapien
gagaaaaaggttcagacgcacatgccagaaaat

SEQ ID NO: 689746 - DNA, 33 bp, Homo sapien
gagaaaaaggttcagatgcacatgccagaaaat

SEQ ID NO: 689747 - DNA, 33 bp, Homo sapien
aatcttagatacctggaacagtcgtaacaatct

SEQ ID NO: 689748 - DNA, 33 bp, Homo sapien
aatcttagatacctgggacagtcgtaacaatct

SEQ ID NO: 689749 - DNA, 33 bp, Homo sapien
cttgcagatatctgaccagtctaagctgttcaa

SEQ ID NO: 689750 - DNA, 33 bp, Homo sapien
cttgcagatatctgacgagtctaagctgttcaa

SEQ ID NO: 689751 - DNA, 33 bp, Homo sapien; identical to SEQ ID NO: 689749

SEQ ID NO: 689752 - DNA, 33 bp, Homo sapien; identical to SEQ ID NO: 689750

SEQ ID NO: 689753 - DNA, 33 bp, Homo sapien
atggagtaggcagacagggagtagtagatttac

SEQ ID NO: 689754 - DNA, 33 bp, Homo sapien
atggagtaggcagacatggagtagtagatttac

SEQ ID NO: 689755 - DNA, 33 bp, Homo sapien
cttgatagtttttagaaaattcactttcagcct

SEQ ID NO: 689756 - DNA, 33 bp, Homo sapien
cttgatagtttttagagaattcactttcagcct

SEQ ID NO: 689757 - DNA, 33 bp, Homo sapien
gtggagagtagaatgagaccaaaggctaagggt

SEQ ID NO: 689758 - DNA, 33 bp, Homo sapien
gtggagagtagaatgataccaaaggctaagggt

SEQ ID NO: 689759 - DNA, 33 bp, Homo sapien
aagcatgacaaagaaccgaagagtaactaactt

SEQ ID NO: 689760 - DNA, 33 bp, Homo sapien
aagcatgacaaagaactgaagagtaactaactt

SEQ ID NO: 689761 - DNA, 33 bp, Homo sapien
atgcgtccttgagttaacaaatatctgaggggt

SEQ ID NO: 689762 - DNA, 33 bp, Homo sapien
atgcgtccttgagttagcaaatatctgaggggt

SEQ ID NO: 689763 - DNA, 33 bp, Homo sapien
aagaggtcagcataaagccatcaactgtttgct

SEQ ID NO: 689764 - DNA, 33 bp, Homo sapien
aagaggtcagcataaatccatcaactgtttgct

SEQ ID NO: 689765 - DNA, 33 bp, Homo sapien
acattcttttaaacaccgccttagaggttgccc

SEQ ID NO: 689766 - DNA, 33 bp, Homo sapien
acattcttttaaacactgccttagaggttgccc

SEQ ID NO: 689767 - DNA, 33 bp, Homo sapien
ggttacctactcaataccaatttctcctttttt

SEQ ID NO: 689768 - DNA, 33 bp, Homo sapien
ggttacctactcaatatcaatttctcctttttt

SEQ ID NO: 689769 - DNA, 33 bp, Homo sapien
gtagttgctaccaacaaaaatttccacagtgat

SEQ ID NO: 689770 - DNA, 33 bp, Homo sapien
gtagttgctaccaacagaaatttccacagtgat

SEQ ID NO: 689771 - DNA, 33 bp, Homo sapien
tgtctattgtccttaaacaaggctacatcaagg

SEQ ID NO: 689772 - DNA, 33 bp, Homo sapien
tgtctattgtccttaagcaaggctacatcaagg

SEQ ID NO: 689773 - DNA, 33 bp, Homo sapien
gtaaaagcatcttcaccgaggaccagagctcct

SEQ ID NO: 689774 - DNA, 33 bp, Homo sapien
gtaaaagcatcttcactgaggaccagagctcct

SEQ ID NO: 689775 - DNA, 33 bp, Homo sapien
ttttgaagcgagacagaccttagttcacattcc

SEQ ID NO: 689776 - DNA, 33 bp, Homo sapien
ttttgaagcgagacaggccttagttcacattcc

SEQ ID NO: 689777 - DNA, 33 bp, Homo sapien
tggaaaaagtgttcacaggcttaggatactgac

SEQ ID NO: 689778 - DNA, 33 bp, Homo sapien
tggaaaaagtgttcacgggcttaggatactgac

SEQ ID NO: 689779 - DNA, 33 bp, Homo sapien
tcaccacaaaaccacaacacatgggaaacctgt

SEQ ID NO: 689780 - DNA, 33 bp, Homo sapien
tcaccacaaaaccacagcacatgggaaacctgt

SEQ ID NO: 689781 - DNA, 33 bp, Homo sapien
atccaggtacaacctcaacttaggatgctagtg

SEQ ID NO: 689782 - DNA, 33 bp, Homo sapien
atccaggtacaacctcgacttaggatgctagtg

SEQ ID NO: 689783 - DNA, 33 bp, Homo sapien
catccctcctatctggcaacaggaatatttggg

SEQ ID NO: 689784 - DNA, 33 bp, Homo sapien
catccctcctatctggtaacaggaatatttggg

SEQ ID NO: 689785 - DNA, 33 bp, Homo sapien
atagcaaccttttaagacaaattaaatgagcta

SEQ ID NO: 689786 - DNA, 33 bp, Homo sapien
atagcaaccttttaagtcaaattaaatgagcta

SEQ ID NO: 689787 - DNA, 33 bp, Homo sapien
ttcatgtttaaatcaactgggcacttgaacagg

SEQ ID NO: 689788 - DNA, 33 bp, Homo sapien
ttcatgtttaaatcaattgggcacttgaacagg

SEQ ID NO: 689789 - DNA, 33 bp, Homo sapien
gtttggcagtccatacaaaaagttttaaacatg

SEQ ID NO: 689790 - DNA, 33 bp, Homo sapien
gtttggcagtccataccaaaagttttaaacatg

SEQ ID NO: 689791 - DNA, 33 bp, Homo sapien
ggtgtccagtgcgatcactcggagtgctttaaa

SEQ ID NO: 689792 - DNA, 33 bp, Homo sapien
ggtgtccagtgcgatcgctcggagtgctttaaa

SEQ ID NO: 689793 - DNA, 33 bp, Homo sapien
tcctactctattcttaccacccacgcagtgcat

SEQ ID NO: 689794 - DNA, 33 bp, Homo sapien
tcctactctattcttagcacccacgcagtgcat

SEQ ID NO: 689795 - DNA, 33 bp, Homo sapien
gcacatcttacctaccaaaaaatttccatcttt

SEQ ID NO: 689796 - DNA, 33 bp, Homo sapien
gcacatcttacctaccgaaaaatttccatcttt

SEQ ID NO: 689797 - DNA, 33 bp, Homo sapien
gccacccacatctttaagaatgtccacggggag

SEQ ID NO: 689798 - DNA, 33 bp, Homo sapien
gccacccacatctttatgaatgtccacggggag

SEQ ID NO: 689799 - DNA, 33 bp, Homo sapien
gtggtagtagaaatgaagtcgcattagggtcca

SEQ ID NO: 689800 - DNA, 33 bp, Homo sapien
gtggtagtagaaatgaggtcgcattagggtcca

SEQ ID NO: 689801 - DNA, 33 bp, Homo sapien
ttgaacagtccatcacaggttgacattgactgt

SEQ ID NO: 689802 - DNA, 33 bp, Homo sapien
ttgaacagtccatcacgggttgacattgactgt

SEQ ID NO: 689803 - DNA, 33 bp, Homo sapien
taaaatcccacaggtacgttttgggacagttga

SEQ ID NO: 689804 - DNA, 33 bp, Homo sapien
taaaatcccacaggtatgttttgggacagttga

SEQ ID NO: 689805 - DNA, 33 bp, Homo sapien
aggttggtcttgagtcacattcctgccattgga

SEQ ID NO: 689806 - DNA, 33 bp, Homo sapien
aggttggtcttgagtcgcattcctgccattgga

SEQ ID NO: 689807 - DNA, 33 bp, Homo sapien
tcaaacatggcggagaaaaaccctacagaagga

SEQ ID NO: 689808 - DNA, 33 bp, Homo sapien
tcaaacatggcggagacaaaccctacagaagga

SEQ ID NO: 689809 - DNA, 33 bp, Homo sapien
atcactgctaaatatgaaaatttgtcacaacat

SEQ ID NO: 689810 - DNA, 33 bp, Homo sapien
atcactgctaaatatggaaatttgtcacaacat

SEQ ID NO: 689811 - DNA, 33 bp, Homo sapien
acatgagcctaaatcaacctgatcactgcaaaa

SEQ ID NO: 689812 - DNA, 33 bp, Homo sapien
acatgagcctaaatcagcctgatcactgcaaaa

SEQ ID NO: 689813 - DNA, 33 bp, Homo sapien
tgtggatgccatggaaaggatgcatatgaggtg

SEQ ID NO: 689814 - DNA, 33 bp, Homo sapien
tgtggatgccatggaagggatgcatatgaggtg

SEQ ID NO: 689815 - DNA, 33 bp, Homo sapien
tactggtacgcagtggcaattgacaactgtcat

SEQ ID NO: 689816 - DNA, 33 bp, Homo sapien
tactggtacgcagtggtaattgacaactgtcat

SEQ ID NO: 689817 - DNA, 33 bp, Homo sapien
atgaaaactgtaagagcatctcatcagtgggga

SEQ ID NO: 689818 - DNA, 33 bp, Homo sapien
atgaaaactgtaagaggatctcatcagtgggga

SEQ ID NO: 689819 - DNA, 33 bp, Homo sapien
ctggagctctatgtgacgagagaaccaaaggga

SEQ ID NO: 689820 - DNA, 33 bp, Homo sapien
ctggagctctatgtgatgagagaaccaaaggga

SEQ ID NO: 689821 - DNA, 33 bp, Homo sapien
taacgttgatgtaatgaaattccagatgtaggc

SEQ ID NO: 689822 - DNA, 33 bp, Homo sapien
taacgttgatgtaatggaattccagatgtaggc

SEQ ID NO: 689823 - DNA, 33 bp, Homo sapien; identical to SEQ ID NO: 689821

SEQ ID NO: 689824 - DNA, 33 bp, Homo sapien; identical to SEQ ID NO: 689822

SEQ ID NO: 689825 - DNA, 33 bp, Homo sapien; identical to SEQ ID NO: 689821

SEQ ID NO: 689826 - DNA, 33 bp, Homo sapien; identical to SEQ ID NO: 689822

SEQ ID NO: 689827 - DNA, 33 bp, Homo sapien
gttttctgttgcattacgataaacattaattgg

SEQ ID NO: 689828 - DNA, 33 bp, Homo sapien
gttttctgttgcattaggataaacattaattgg

SEQ ID NO: 689829 - DNA, 33 bp, Homo sapien
taagagaagaatcccaaagactgagtgacacct

SEQ ID NO: 689830 - DNA, 33 bp, Homo sapien
taagagaagaatcccagagactgagtgacacct

SEQ ID NO: 689831 - DNA, 33 bp, Homo sapien
aatatccctgccttagaataatgctgtcagtaa

SEQ ID NO: 689832 - DNA, 33 bp, Homo sapien
aatatccctgccttaggataatgctgtcagtaa

SEQ ID NO: 689833 - DNA, 33 bp, Homo sapien
caaccttgtcttgagaagctttataactttata

SEQ ID NO: 689834 - DNA, 33 bp, Homo sapien
caaccttgtcttgagaggctttataactttata

SEQ ID NO: 689835 - DNA, 33 bp, Homo sapien
tatcgtattgactaaacggatgcccagagctct

SEQ ID NO: 689836 - DNA, 33 bp, Homo sapien
tatcgtattgactaaatggatgcccagagctct

SEQ ID NO: 689837 - DNA, 33 bp, Homo sapien
gacagacagggcaatagggatgaactgtgccag

SEQ ID NO: 689838 - DNA, 33 bp, Homo sapien
gacagacagggcaatatggatgaactgtgccag

SEQ ID NO: 689839 - DNA, 33 bp, Homo sapien
ggagaacatcaactctaaatgaaaattccactt

SEQ ID NO: 689840 - DNA, 33 bp, Homo sapien
ggagaacatcaactctgaatgaaaattccactt

SEQ ID NO: 689841 - DNA, 33 bp, Homo sapien
aatagtctgtacatgacaggttttgggtatcag

SEQ ID NO: 689842 - DNA, 33 bp, Homo sapien
aatagtctgtacatgagaggttttgggtatcag

SEQ ID NO: 689843 - DNA, 33 bp, Homo sapien
tttaacccacactcaacgaatgtttaatttatt

SEQ ID NO: 689844 - DNA, 33 bp, Homo sapien
tttaacccacactcaatgaatgtttaatttatt

SEQ ID NO: 689845 - DNA, 33 bp, Homo sapien
ccatcctggcaacattcaaggctcagaggggtt

SEQ ID NO: 689846 - DNA, 33 bp, Homo sapien
ccatcctggcaacatttaaggctcagaggggtt

SEQ ID NO: 689847 - DNA, 33 bp, Homo sapien
tggctgtggacggaaacgtaatgacacacacaa

SEQ ID NO: 689848 - DNA, 33 bp, Homo sapien
tggctgtggacggaaatgtaatgacacacacaa

SEQ ID NO: 689849 - DNA, 33 bp, Homo sapien
acagtatttaaccggacgatttgaactcaccaa

SEQ ID NO: 689850 - DNA, 33 bp, Homo sapien
acagtatttaaccggatgatttgaactcaccaa

SEQ ID NO: 689851 - DNA, 33 bp, Homo sapien
attttaaagtgagcaaatcggtggcattgagta

SEQ ID NO: 689852 - DNA, 33 bp, Homo sapien
attttaaagtgagcaattcggtggcattgagta

SEQ ID NO: 689853 - DNA, 33 bp, Homo sapien
atatacagctttcaaacacagcttttcacattt

SEQ ID NO: 689854 - DNA, 33 bp, Homo sapien
atatacagctttcaaatacagcttttcacattt

SEQ ID NO: 689855 - DNA, 33 bp, Homo sapien
aagacaaagcctacgaataacatttataagttc

SEQ ID NO: 689856 - DNA, 33 bp, Homo sapien
aagacaaagcctacgagtaacatttataagttc

SEQ ID NO: 689857 - DNA, 33 bp, Homo sapien
taagaatggtggttcacgtgtagggcatggaag

SEQ ID NO: 689858 - DNA, 33 bp, Homo sapien
taagaatggtggttcatgtgtagggcatggaag

SEQ ID NO: 689859 - DNA, 33 bp, Homo sapien
agtagaggaaaatggacgtatcagagtgaaaag

SEQ ID NO: 689860 - DNA, 33 bp, Homo sapien
agtagaggaaaatggatgtatcagagtgaaaag

SEQ ID NO: 689861 - DNA, 33 bp, Homo sapien
tgccctgacactatgaacttatcttaaaaagaa

SEQ ID NO: 689862 - DNA, 33 bp, Homo sapien
tgccctgacactatgagcttatcttaaaaagaa

SEQ ID NO: 689863 - DNA, 33 bp, Homo sapien
gctcaagaaatttagacgatcatgtattaggta

SEQ ID NO: 689864 - DNA, 33 bp, Homo sapien
gctcaagaaatttagaggatcatgtattaggta

SEQ ID NO: 689865 - DNA, 33 bp, Homo sapien
tgagacaacctaaacacgagagcaaaggacatg

SEQ ID NO: 689866 - DNA, 33 bp, Homo sapien
tgagacaacctaaacatgagagcaaaggacatg

SEQ ID NO: 689867 - DNA, 33 bp, Homo sapien
aaacttgcaagatgaacgcatggatccctgttc

SEQ ID NO: 689868 - DNA, 33 bp, Homo sapien
aaacttgcaagatgaatgcatggatccctgttc

SEQ ID NO: 689869 - DNA, 33 bp, Homo sapien
gctgtgtttccatagcaatcaaggagaccaaag

SEQ ID NO: 689870 - DNA, 33 bp, Homo sapien
gctgtgtttccatagcgatcaaggagaccaaag

SEQ ID NO: 689871 - DNA, 33 bp, Homo sapien
agaggggaatacaggaacatcgctaggctgctc

SEQ ID NO: 689872 - DNA, 33 bp, Homo sapien
agaggggaatacaggagcatcgctaggctgctc

SEQ ID NO: 689873 - DNA, 33 bp, Homo sapien
cttagaagaagagcaaagccctctaatttaaat

SEQ ID NO: 689874 - DNA, 33 bp, Homo sapien
cttagaagaagagcaatgccctctaatttaaat

SEQ ID NO: 689875 - DNA, 33 bp, Homo sapien
ttggctagactcaacacggaaacatttttaaaa

SEQ ID NO: 689876 - DNA, 33 bp, Homo sapien
ttggctagactcaacatggaaacatttttaaaa

SEQ ID NO: 689877 - DNA, 33 bp, Homo sapien
ccagttctgcttctaccctgctacagcacatct

SEQ ID NO: 689878 - DNA, 33 bp, Homo sapien
ccagttctgcttctacgctgctacagcacatct

SEQ ID NO: 689879 - DNA, 33 bp, Homo sapien
acccagggtgctcttcaatagtcctaaatatta

SEQ ID NO: 689880 - DNA, 33 bp, Homo sapien
acccagggtgctcttcgatagtcctaaatatta

SEQ ID NO: 689881 - DNA, 33 bp, Homo sapien
atgttatgtatctgaaataagtggaaaagatat

SEQ ID NO: 689882 - DNA, 33 bp, Homo sapien
atgttatgtatctgaagtaagtggaaaagatat

SEQ ID NO: 689883 - DNA, 33 bp, Homo sapien
caagaaaagagtgagcaagcctgccaagcccag

SEQ ID NO: 689884 - DNA, 33 bp, Homo sapien
caagaaaagagtgagcgagcctgccaagcccag

SEQ ID NO: 689885 - DNA, 33 bp, Homo sapien
tggccatgtatttaataactcaattctctgctt

SEQ ID NO: 689886 - DNA, 33 bp, Homo sapien
tggccatgtatttaattactcaattctctgctt

SEQ ID NO: 689887 - DNA, 33 bp, Homo sapien
cgctttgcacactgcaaaaatagaagttaaaga

SEQ ID NO: 689888 - DNA, 33 bp, Homo sapien
cgctttgcacactgcacaaatagaagttaaaga

SEQ ID NO: 689889 - DNA, 33 bp, Homo sapien
tgaaaattagagataacgcatgattagaaataa

SEQ ID NO: 689890 - DNA, 33 bp, Homo sapien
tgaaaattagagataatgcatgattagaaataa

SEQ ID NO: 689891 - DNA, 33 bp, Homo sapien
tatcaggaacaagatacggcatttcaagagttc

SEQ ID NO: 689892 - DNA, 33 bp, Homo sapien
tatcaggaacaagatagggcatttcaagagttc

SEQ ID NO: 689893 - DNA, 33 bp, Homo sapien
taggtctaaaggtaaaatccttgtctgctattt

SEQ ID NO: 689894 - DNA, 33 bp, Homo sapien
taggtctaaaggtaaagtccttgtctgctattt

SEQ ID NO: 689895 - DNA, 33 bp, Homo sapien
aaaggtagatcctcacaggtctgaaccagcggg

SEQ ID NO: 689896 - DNA, 33 bp, Homo sapien
aaaggtagatcctcacgggtctgaaccagcggg

SEQ ID NO: 689897 - DNA, 33 bp, Homo sapien
gtgagcatttctcccccgaaaaagccaaggctt

SEQ ID NO: 689898 - DNA, 33 bp, Homo sapien
gtgagcatttctccccggaaaaagccaaggctt

SEQ ID NO: 689899 - DNA, 33 bp, Homo sapien
gaagtgtagtgagaaactgcaagagaatcccac

SEQ ID NO: 689900 - DNA, 33 bp, Homo sapien
gaagtgtagtgagaaagtgcaagagaatcccac

SEQ ID NO: 689901 - DNA, 33 bp, Homo sapien
aatttagagacttgcaaaaactaggtttgtaca

SEQ ID NO: 689902 - DNA, 33 bp, Homo sapien
aatttagagacttgcagaaactaggtttgtaca

SEQ ID NO: 689903 - DNA, 33 bp, Homo sapien
gggcaagatgcctctcaatcttccatagcctgt

SEQ ID NO: 689904 - DNA, 33 bp, Homo sapien
gggcaagatgcctctcgatcttccatagcctgt

SEQ ID NO: 689905 - DNA, 33 bp, Homo sapien
agtgattcatctgagcaatgctccactgtattt

SEQ ID NO: 689906 - DNA, 33 bp, Homo sapien
agtgattcatctgagctatgctccactgtattt

SEQ ID NO: 689907 - DNA, 33 bp, Homo sapien
aacttcctagaatccaatacaaacatgacatct

SEQ ID NO: 689908 - DNA, 33 bp, Homo sapien
aacttcctagaatccagtacaaacatgacatct

SEQ ID NO: 689909 - DNA, 33 bp, Homo sapien
cctacacccaagcggccgactgctcctagaaac

SEQ ID NO: 689910 - DNA, 33 bp, Homo sapien
cctacacccaagcggctgactgctcctagaaac

SEQ ID NO: 689911 - DNA, 33 bp, Homo sapien
atgagagggctctctaggtgctaatataaaata

SEQ ID NO: 689912 - DNA, 33 bp, Homo sapien
atgagagggctctctatgtgctaatataaaata

SEQ ID NO: 689913 - DNA, 33 bp, Homo sapien
tttttgagagcaagggaacccagtcaacaccat

SEQ ID NO: 689914 - DNA, 33 bp, Homo sapien
tttttgagagcaaggggacccagtcaacaccat

SEQ ID NO: 689915 - DNA, 33 bp, Homo sapien
gtccactagctctgcactgcacaagttacttaa

SEQ ID NO: 689916 - DNA, 33 bp, Homo sapien
gtccactagctctgcattgcacaagttacttaa

SEQ ID NO: 689917 - DNA, 33 bp, Homo sapien
tcttcactttcataggacagtcttctgtaacca

SEQ ID NO: 689918 - DNA, 33 bp, Homo sapien
tcttcactttcatagggcagtcttctgtaacca

SEQ ID NO: 689919 - DNA, 33 bp, Homo sapien
gggagtttctcatcaggactccgggttctctca

SEQ ID NO: 689920 - DNA, 33 bp, Homo sapien
gggagtttctcatcagtactccgggttctctca

SEQ ID NO: 689921 - DNA, 33 bp, Homo sapien
aagagcctgtcagatggagatatttttgcagag

SEQ ID NO: 689922 - DNA, 33 bp, Homo sapien
aagagcctgtcagatgtagatatttttgcagag

SEQ ID NO: 689923 - DNA, 33 bp, Homo sapien
tccattcagtttcttgaaataataccatagact

SEQ ID NO: 689924 - DNA, 33 bp, Homo sapien
tccattcagtttcttggaataataccatagact

SEQ ID NO: 689925 - DNA, 33 bp, Homo sapien
taaacaatatataggaatcaatcatgcacatgc

SEQ ID NO: 689926 - DNA, 33 bp, Homo sapien
taaacaatatataggactcaatcatgcacatgc

SEQ ID NO: 689927 - DNA, 33 bp, Homo sapien
taagagaaattcttcaccttgagatgctgttaa

SEQ ID NO: 689928 - DNA, 33 bp, Homo sapien
taagagaaattcttcagcttgagatgctgttaa

SEQ ID NO: 689929 - DNA, 33 bp, Homo sapien
gacatactttgcaagaagccagaggacccacta

SEQ ID NO: 689930 - DNA, 33 bp, Homo sapien
gacatactttgcaagaggccagaggacccacta

SEQ ID NO: 689931 - DNA, 33 bp, Homo sapien
atgcagtgatgaagagacactaacagcactacc

SEQ ID NO: 689932 - DNA, 33 bp, Homo sapien
atgcagtgatgaagagccactaacagcactacc

SEQ ID NO: 689933 - DNA, 33 bp, Homo sapien
cagtgacaagacctaaggatttgttccattcaa

SEQ ID NO: 689934 - DNA, 33 bp, Homo sapien
cagtgacaagacctaatgatttgttccattcaa

SEQ ID NO: 689935 - DNA, 33 bp, Homo sapien
cgggcatatccatagacgttatgaaactatata

SEQ ID NO: 689936 - DNA, 33 bp, Homo sapien
cgggcatatccatagatgttatgaaactatata

SEQ ID NO: 689937 - DNA, 33 bp, Homo sapien
gacctggctgcttacaaactgtaggtactcaat

SEQ ID NO: 689938 - DNA, 33 bp, Homo sapien
gacctggctgcttacacactgtaggtactcaat

SEQ ID NO: 689939 - DNA, 33 bp, Homo sapien
tttctttataaatcgcacagtcttaggtatttc

SEQ ID NO: 689940 - DNA, 33 bp, Homo sapien
tttctttataaatcgcgcagtcttaggtatttc

SEQ ID NO: 689941 - DNA, 33 bp, Homo sapien
gtctgacataggaaaacgaggaatacctcaaag

SEQ ID NO: 689942 - DNA, 33 bp, Homo sapien
gtctgacataggaaaatgaggaatacctcaaag

SEQ ID NO: 689943 - DNA, 33 bp, Homo sapien
tattggctgtgatttacggtctatgtccccttg

SEQ ID NO: 689944 - DNA, 33 bp, Homo sapien
tattggctgtgatttatggtctatgtccccttg

SEQ ID NO: 689945 - DNA, 33 bp, Homo sapien
gaaacagaaggttgaagatggttaaggtgacca

SEQ ID NO: 689946 - DNA, 33 bp, Homo sapien
gaaacagaaggttgaatatggttaaggtgacca

SEQ ID NO: 689947 - DNA, 33 bp, Homo sapien
gggctaggaaatgagaccaaagagatatggaag

SEQ ID NO: 689948 - DNA, 33 bp, Homo sapien
gggctaggaaatgagatcaaagagatatggaag

SEQ ID NO: 689949 - DNA, 33 bp, Homo sapien
gattatgtgaagacaccgtaaaaagactcctat

SEQ ID NO: 689950 - DNA, 33 bp, Homo sapien
gattatgtgaagacactgtaaaaagactcctat

SEQ ID NO: 689951 - DNA, 33 bp, Homo sapien
tgcagatgttctctcaatacttcacagcagaag

SEQ ID NO: 689952 - DNA, 33 bp, Homo sapien
tgcagatgttctctcactacttcacagcagaag

SEQ ID NO: 689953 - DNA, 33 bp, Homo sapien
tagtgtttgcttagagacaagaaagctaattat

SEQ ID NO: 689954 - DNA, 33 bp, Homo sapien
tagtgtttgcttagaggcaagaaagctaattat

SEQ ID NO: 689955 - DNA, 33 bp, Homo sapien
cctttccagtgactccaattcctcctgggcagc

SEQ ID NO: 689956 - DNA, 33 bp, Homo sapien
cctttccagtgactccgattcctcctgggcagc

SEQ ID NO: 689957 - DNA, 33 bp, Homo sapien
atctgcaggaacactacggagaccaagaaggtt

SEQ ID NO: 689958 - DNA, 33 bp, Homo sapien
atctgcaggaacactatggagaccaagaaggtt

SEQ ID NO: 689959 - DNA, 33 bp, Homo sapien
gtccccagaagtgaagacaatgggttctcacac

SEQ ID NO: 689960 - DNA, 33 bp, Homo sapien
gtccccagaagtgaagtcaatgggttctcacac

SEQ ID NO: 689961 - DNA, 33 bp, Homo sapien
gaaaagatgtgaaggaagcttaaatgcgtattt

SEQ ID NO: 689962 - DNA, 33 bp, Homo sapien
gaaaagatgtgaaggaggcttaaatgcgtattt

SEQ ID NO: 689963 - DNA, 33 bp, Homo sapien
ggacaacttgaagcaaaagcgggacaactcaaa

SEQ ID NO: 689964 - DNA, 33 bp, Homo sapien
ggacaacttgaagcaagagcgggacaactcaaa

SEQ ID NO: 689965 - DNA, 33 bp, Homo sapien
cagctgattccacacaaggaccaaagggtacag

SEQ ID NO: 689966 - DNA, 33 bp, Homo sapien
cagctgattccacacagggaccaaagggtacag

SEQ ID NO: 689967 - DNA, 33 bp, Homo sapien
tttcctaatgtactaacgtgggctaaacttcat

SEQ ID NO: 689968 - DNA, 33 bp, Homo sapien
tttcctaatgtactaatgtgggctaaacttcat

SEQ ID NO: 689969 - DNA, 33 bp, Homo sapien
gcagagttgctggtcaacttggaaaattccgct

SEQ ID NO: 689970 - DNA, 33 bp, Homo sapien
gcagagttgctggtcagcttggaaaattccgct

SEQ ID NO: 689971 - DNA, 33 bp, Homo sapien
acatggaataaaatgaatattgcagaaaactcc

SEQ ID NO: 689972 - DNA, 33 bp, Homo sapien
acatggaataaaatgagtattgcagaaaactcc

SEQ ID NO: 689973 - DNA, 33 bp, Homo sapien
catatggcagctgcaaatatagagaaaatctgc

SEQ ID NO: 689974 - DNA, 33 bp, Homo sapien
catatggcagctgcaagtatagagaaaatctgc

SEQ ID NO: 689975 - DNA, 33 bp, Homo sapien
agctcatgttacaatgcaaggtggtccgcattg

SEQ ID NO: 689976 - DNA, 33 bp, Homo sapien
agctcatgttacaatgtaaggtggtccgcattg

SEQ ID NO: 689977 - DNA, 33 bp, Homo sapien
cacattcctgctcttaagttccatgtgaagtca

SEQ ID NO: 689978 - DNA, 33 bp, Homo sapien
cacattcctgctcttaggttccatgtgaagtca

SEQ ID NO: 689979 - DNA, 33 bp, Homo sapien
cacaaaacgaagtcacaaatttcaggagaatag

SEQ ID NO: 689980 - DNA, 33 bp, Homo sapien
cacaaaacgaagtcacgaatttcaggagaatag

SEQ ID NO: 689981 - DNA, 33 bp, Homo sapien
cttattctttgtgtaactgaaaatttgtcagtt

SEQ ID NO: 689982 - DNA, 33 bp, Homo sapien
cttattctttgtgtaattgaaaatttgtcagtt

SEQ ID NO: 689983 - DNA, 33 bp, Homo sapien
tagtagtggcattatgaaacagaaccaaactga

SEQ ID NO: 689984 - DNA, 33 bp, Homo sapien
tagtagtggcattatggaacagaaccaaactga

SEQ ID NO: 689985 - DNA, 33 bp, Homo sapien
catggtaaaaatagtacagctaaaacgacattt

SEQ ID NO: 689986 - DNA, 33 bp, Homo sapien
catggtaaaaatagtagagctaaaacgacattt

SEQ ID NO: 689987 - DNA, 33 bp, Homo sapien
cctctagatggcctgccgaggatgagtgtaaaa

SEQ ID NO: 689988 - DNA, 33 bp, Homo sapien
cctctagatggcctgctgaggatgagtgtaaaa

SEQ ID NO: 689989 - DNA, 33 bp, Homo sapien
cctttcctaattcagacgtatcaacggaaggaa

SEQ ID NO: 689990 - DNA, 33 bp, Homo sapien
cctttcctaattcagatgtatcaacggaaggaa

SEQ ID NO: 689991 - DNA, 33 bp, Homo sapien
tggttgagctcctcaaattatctgatcctgatg

SEQ ID NO: 689992 - DNA, 33 bp, Homo sapien
tggttgagctcctcaagttatctgatcctgatg

SEQ ID NO: 689993 - DNA, 33 bp, Homo sapien
ctagacctgaaaaatccctcagcagacaaagtg

SEQ ID NO: 689994 - DNA, 33 bp, Homo sapien
ctagacctgaaaaatctctcagcagacaaagtg

SEQ ID NO: 689995 - DNA, 33 bp, Homo sapien
cctctcaggcacagatcagacattctgcactca

SEQ ID NO: 689996 - DNA, 33 bp, Homo sapien
cctctcaggcacagatgagacattctgcactca

SEQ ID NO: 689997 - DNA, 33 bp, Homo sapien
ttatcaccttcccttaaactcaaacatcacccg

SEQ ID NO: 689998 - DNA, 33 bp, Homo sapien
ttatcaccttcccttagactcaaacatcacccg

SEQ ID NO: 689999 - DNA, 33 bp, Homo sapien
tgggttacaaatatgaataaggccttacaaaaa

SEQ ID NO: 690000 - DNA, 33 bp, Homo sapien
tgggttacaaatatgagtaaggccttacaaaaa

SEQ ID NO: 690001 - DNA, 33 bp, Homo sapien
attataaatagtgacactggacacatttttagg

SEQ ID NO: 690002 - DNA, 33 bp, Homo sapien
attataaatagtgacattggacacatttttagg

SEQ ID NO: 690003 - DNA, 33 bp, Homo sapien
ttttcagatgagaaaacggaggagtgaggtcgt

SEQ ID NO: 690004 - DNA, 33 bp, Homo sapien
ttttcagatgagaaaatggaggagtgaggtcgt

SEQ ID NO: 690005 - DNA, 33 bp, Homo sapien
atataggagaatttcaaatgacatatgtagtgg

SEQ ID NO: 690006 - DNA, 33 bp, Homo sapien
atataggagaatttcagatgacatatgtagtgg

SEQ ID NO: 690007 - DNA, 33 bp, Homo sapien
aacagtagaaagtctgaaatatttaatgtgaaa

SEQ ID NO: 690008 - DNA, 33 bp, Homo sapien
aacagtagaaagtctgcaatatttaatgtgaaa

SEQ ID NO: 690009 - DNA, 33 bp, Homo sapien
tttccaaccgccctcactatttctgatgtaaac

SEQ ID NO: 690010 - DNA, 33 bp, Homo sapien
tttccaaccgccctcattatttctgatgtaaac

SEQ ID NO: 690011 - DNA, 33 bp, Homo sapien
aaacatggaaccaggaactttgtgaacccccct

SEQ ID NO: 690012 - DNA, 33 bp, Homo sapien
aaacatggaaccaggagctttgtgaacccccct

SEQ ID NO: 690013 - DNA, 33 bp, Homo sapien
tcatcctccttaggcacagttggcctgtcattc

SEQ ID NO: 690014 - DNA, 33 bp, Homo sapien
tcatcctccttaggcatagttggcctgtcattc

SEQ ID NO: 690015 - DNA, 33 bp, Homo sapien
aatattcttattggcccacagtgccatcttgtg

SEQ ID NO: 690016 - DNA, 33 bp, Homo sapien
aatattcttattggccgacagtgccatcttgtg

SEQ ID NO: 690017 - DNA, 33 bp, Homo sapien
caagcaagatgatgaacgtataaaagctctttg

SEQ ID NO: 690018 - DNA, 33 bp, Homo sapien
caagcaagatgatgaatgtataaaagctctttg

SEQ ID NO: 690019 - DNA, 33 bp, Homo sapien
atctttgactaatggaaggaaagaagccgatgg

SEQ ID NO: 690020 - DNA, 33 bp, Homo sapien
atctttgactaatggagggaaagaagccgatgg

SEQ ID NO: 690021 - DNA, 33 bp, Homo sapien
gtttcagagtcacggcaatcacaaaatacaaca

SEQ ID NO: 690022 - DNA, 33 bp, Homo sapien
gtttcagagtcacggcgatcacaaaatacaaca

SEQ ID NO: 690023 - DNA, 33 bp, Homo sapien
agatgagcttaggaaacgttcttttccagtgcc

SEQ ID NO: 690024 - DNA, 33 bp, Homo sapien
agatgagcttaggaaatgttcttttccagtgcc

SEQ ID NO: 690025 - DNA, 33 bp, Homo sapien
atcggtgggtctcctacaaaatgtgaaattcta

SEQ ID NO: 690026 - DNA, 33 bp, Homo sapien
atcggtgggtctcctataaaatgtgaaattcta

SEQ ID NO: 690027 - DNA, 33 bp, Homo sapien
gaagacccagatccaacagttattctccacaga

SEQ ID NO: 690028 - DNA, 33 bp, Homo sapien
gaagacccagatccaagagttattctccacaga

SEQ ID NO: 690029 - DNA, 33 bp, Homo sapien
caatcaagacagaaaacatcactaccacagagc

SEQ ID NO: 690030 - DNA, 33 bp, Homo sapien
caatcaagacagaaaagatcactaccacagagc

SEQ ID NO: 690031 - DNA, 33 bp, Homo sapien
aggactttctggatatcaagtagaggagcgagc

SEQ ID NO: 690032 - DNA, 33 bp, Homo sapien
aggactttctggatatgaagtagaggagcgagc

SEQ ID NO: 690033 - DNA, 33 bp, Homo sapien
gttgttattggctgaacaagcaaagatgacctc

SEQ ID NO: 690034 - DNA, 33 bp, Homo sapien
gttgttattggctgaagaagcaaagatgacctc

SEQ ID NO: 690035 - DNA, 33 bp, Homo sapien
taagaggctttgcagaacaatcatggaagggca

SEQ ID NO: 690036 - DNA, 33 bp, Homo sapien
taagaggctttgcagagcaatcatggaagggca

SEQ ID NO: 690037 - DNA, 33 bp, Homo sapien
tttttgtttttaacacagagccaaaattactta

SEQ ID NO: 690038 - DNA, 33 bp, Homo sapien
tttttgtttttaacacggagccaaaattactta

SEQ ID NO: 690039 - DNA, 33 bp, Homo sapien
aggttggcttcatatcaagggagtgccaatttc

SEQ ID NO: 690040 - DNA, 33 bp, Homo sapien
aggttggcttcatatcgagggagtgccaatttc

SEQ ID NO: 690041 - DNA, 33 bp, Homo sapien
ctatgacatgactttaacaaggaagtagaaaac

SEQ ID NO: 690042 - DNA, 33 bp, Homo sapien
ctatgacatgactttagcaaggaagtagaaaac

SEQ ID NO: 690043 - DNA, 33 bp, Homo sapien
tatattcccctacaagacaaatgttaaacttcc

SEQ ID NO: 690044 - DNA, 33 bp, Homo sapien
tatattcccctacaagtcaaatgttaaacttcc

SEQ ID NO: 690045 - DNA, 33 bp, Homo sapien
gttgaggtctcaaatacagcaaaaaggcaaatg

SEQ ID NO: 690046 - DNA, 33 bp, Homo sapien
gttgaggtctcaaatagagcaaaaaggcaaatg

SEQ ID NO: 690047 - DNA, 33 bp, Homo sapien
ttctcagaatcaagtccagtttccttagtgtga

SEQ ID NO: 690048 - DNA, 33 bp, Homo sapien
ttctcagaatcaagtctagtttccttagtgtga

SEQ ID NO: 690049 - DNA, 33 bp, Homo sapien
tccatagaaaagaaaacggagctacagcaaggt

SEQ ID NO: 690050 - DNA, 33 bp, Homo sapien
tccatagaaaagaaaatggagctacagcaaggt

SEQ ID NO: 690051 - DNA, 33 bp, Homo sapien
caaaaggggcagaaagacactgaaactatgcat

SEQ ID NO: 690052 - DNA, 33 bp, Homo sapien
caaaaggggcagaaagtcactgaaactatgcat

SEQ ID NO: 690053 - DNA, 33 bp, Homo sapien
tgtgcccaacagccgaagtggaaaaccttgtaa

SEQ ID NO: 690054 - DNA, 33 bp, Homo sapien
tgtgcccaacagccgaggtggaaaaccttgtaa

SEQ ID NO: 690055 - DNA, 33 bp, Homo sapien
gtgagttaattaagaaatcacctggcattgatg

SEQ ID NO: 690056 - DNA, 33 bp, Homo sapien
gtgagttaattaagaagtcacctggcattgatg

SEQ ID NO: 690057 - DNA, 33 bp, Homo sapien
catttctaccttcaacgccagttacagctattt

SEQ ID NO: 690058 - DNA, 33 bp, Homo sapien
catttctaccttcaactccagttacagctattt

SEQ ID NO: 690059 - DNA, 33 bp, Homo sapien
caagatggataagttaaggagaagaaagtaaag

SEQ ID NO: 690060 - DNA, 33 bp, Homo sapien
caagatggataagttacggagaagaaagtaaag

SEQ ID NO: 690061 - DNA, 33 bp, Homo sapien
cagatctctttgatgacacttaaatgtagatac

SEQ ID NO: 690062 - DNA, 33 bp, Homo sapien
cagatctctttgatgatacttaaatgtagatac

SEQ ID NO: 690063 - DNA, 33 bp, Homo sapien
ggaagaagccgagttacaaattagtgcaattca

SEQ ID NO: 690064 - DNA, 33 bp, Homo sapien
ggaagaagccgagttagaaattagtgcaattca

SEQ ID NO: 690065 - DNA, 33 bp, Homo sapien
tcaaaggatttgcggacgttaaaaggagacaaa

SEQ ID NO: 690066 - DNA, 33 bp, Homo sapien
tcaaaggatttgcggatgttaaaaggagacaaa

SEQ ID NO: 690067 - DNA, 33 bp, Homo sapien
tgtggttatgggtcagaatttgtgtgctttata

SEQ ID NO: 690068 - DNA, 33 bp, Homo sapien
tgtggttatgggtcaggatttgtgtgctttata

SEQ ID NO: 690069 - DNA, 33 bp, Homo sapien
actaaataatgagcaacagatgaataagaaagt

SEQ ID NO: 690070 - DNA, 33 bp, Homo sapien
actaaataatgagcaatagatgaataagaaagt

SEQ ID NO: 690071 - DNA, 33 bp, Homo sapien
gattccttgatggggaaaaataagaaaaaggat

SEQ ID NO: 690072 - DNA, 33 bp, Homo sapien
gattccttgatggggagaaataagaaaaaggat

SEQ ID NO: 690073 - DNA, 33 bp, Homo sapien
tcctttggatgttaaaaaaaccagttgataagt

SEQ ID NO: 690074 - DNA, 33 bp, Homo sapien
tcctttggatgttaaagaaaccagttgataagt

SEQ ID NO: 690075 - DNA, 33 bp, Homo sapien
gaaggcacctattggaactcagggtggaatagg

SEQ ID NO: 690076 - DNA, 33 bp, Homo sapien
gaaggcacctattggatctcagggtggaatagg

SEQ ID NO: 690077 - DNA, 33 bp, Homo sapien
tgaaggtgatctttcagaatatcttgatagttc

SEQ ID NO: 690078 - DNA, 33 bp, Homo sapien
tgaaggtgatctttcataatatcttgatagttc

SEQ ID NO: 690079 - DNA, 33 bp, Homo sapien
aataaaagtatggatacggatcccgaaacgata

SEQ ID NO: 690080 - DNA, 33 bp, Homo sapien
aataaaagtatggatatggatcccgaaacgata

SEQ ID NO: 690081 - DNA, 33 bp, Homo sapien
ctgcgagtacgagccgaagtgtgagaagcgctt

SEQ ID NO: 690082 - DNA, 33 bp, Homo sapien
ctgcgagtacgagccggagtgtgagaagcgctt

SEQ ID NO: 690083 - DNA, 33 bp, Homo sapien
cccagtattcaccgtgcagtttaacaaatagaa

SEQ ID NO: 690084 - DNA, 33 bp, Homo sapien
cccagtattcaccgtgtagtttaacaaatagaa

SEQ ID NO: 690085 - DNA, 33 bp, Homo sapien
gttccactcttaggggccaacaaggatgcttat

SEQ ID NO: 690086 - DNA, 33 bp, Homo sapien
gttccactcttaggggtcaacaaggatgcttat

SEQ ID NO: 690087 - DNA, 33 bp, Homo sapien
ccttcttcctgattaagaatgtcataaatccca

SEQ ID NO: 690088 - DNA, 33 bp, Homo sapien
ccttcttcctgattaataatgtcataaatccca

SEQ ID NO: 690089 - DNA, 33 bp, Homo sapien
tggcctattcatctgaacactcataaattttgc

SEQ ID NO: 690090 - DNA, 33 bp, Homo sapien
tggcctattcatctgaccactcataaattttgc

SEQ ID NO: 690091 - DNA, 33 bp, Homo sapien
tctactctcttaaatccatcatgattcaggcca

SEQ ID NO: 690092 - DNA, 33 bp, Homo sapien
tctactctcttaaatctatcatgattcaggcca

SEQ ID NO: 690093 - DNA, 33 bp, Homo sapien
cacgcttcttttggtgaaacactctttccgggt

SEQ ID NO: 690094 - DNA, 33 bp, Homo sapien
cacgcttcttttggtggaacactctttccgggt

SEQ ID NO: 690095 - DNA, 33 bp, Homo sapien
gtgcatcttatccctgcatctgtttcaacatca

SEQ ID NO: 690096 - DNA, 33 bp, Homo sapien
gtgcatcttatccctggatctgtttcaacatca

SEQ ID NO: 690097 - DNA, 33 bp, Homo sapien
aggtcctgtggtcctgcagtgatgtctgagagt

SEQ ID NO: 690098 - DNA, 33 bp, Homo sapien
aggtcctgtggtcctggagtgatgtctgagagt

SEQ ID NO: 690099 - DNA, 33 bp, Homo sapien
gccagccagggtagacacctcacttgacaggaa

SEQ ID NO: 690100 - DNA, 33 bp, Homo sapien
gccagccagggtagacccctcacttgacaggaa

SEQ ID NO: 690101 - DNA, 33 bp, Homo sapien
caagtacatgaggatcagacacttgattgaata

SEQ ID NO: 690102 - DNA, 33 bp, Homo sapien
caagtacatgaggatcggacacttgattgaata

SEQ ID NO: 690103 - DNA, 33 bp, Homo sapien
cgttgcaatccacctaaatccctggatcccaag

SEQ ID NO: 690104 - DNA, 33 bp, Homo sapien
cgttgcaatccacctacatccctggatcccaag

SEQ ID NO: 690105 - DNA, 33 bp, Homo sapien
gacaagtcctgatgagaataaaaggctaaatta

SEQ ID NO: 690106 - DNA, 33 bp, Homo sapien
gacaagtcctgatgaggataaaaggctaaatta

SEQ ID NO: 690107 - DNA, 33 bp, Homo sapien
tcacaaaagattgaaagaaattttgtgaatgtc

SEQ ID NO: 690108 - DNA, 33 bp, Homo sapien
tcacaaaagattgaaataaattttgtgaatgtc

SEQ ID NO: 690109 - DNA, 33 bp, Homo sapien
gtgcacagccaggagcaagaaacttgaggaaag

SEQ ID NO: 690110 - DNA, 33 bp, Homo sapien
gtgcacagccaggagcgagaaacttgaggaaag

SEQ ID NO: 690111 - DNA, 33 bp, Homo sapien
tggtctctttgtcttaacatcctgactgattga

SEQ ID NO: 690112 - DNA, 33 bp, Homo sapien
tggtctctttgtcttaccatcctgactgattga

SEQ ID NO: 690113 - DNA, 33 bp, Homo sapien
aaaagcacattcactccatcttctccaaagttg

SEQ ID NO: 690114 - DNA, 33 bp, Homo sapien
aaaagcacattcactctatcttctccaaagttg

SEQ ID NO: 690115 - DNA, 33 bp, Homo sapien
gacatggaataatctaagtgctagtaagtggca

SEQ ID NO: 690116 - DNA, 33 bp, Homo sapien
gacatggaataatctaggtgctagtaagtggca

SEQ ID NO: 690117 - DNA, 33 bp, Homo sapien
ccttatgagaagtccacgtagagatacagagat

SEQ ID NO: 690118 - DNA, 33 bp, Homo sapien
ccttatgagaagtccatgtagagatacagagat

SEQ ID NO: 690119 - DNA, 33 bp, Homo sapien
tccagacacatttgcaagctctgacctcacagg

SEQ ID NO: 690120 - DNA, 33 bp, Homo sapien
tccagacacatttgcaggctctgacctcacagg

SEQ ID NO: 690121 - DNA, 33 bp, Homo sapien
agaggctttcctgtgaatatctttgtcaaggtg

SEQ ID NO: 690122 - DNA, 33 bp, Homo sapien
agaggctttcctgtgagtatctttgtcaaggtg

SEQ ID NO: 690123 - DNA, 33 bp, Homo sapien
actgaggaaaacagcacagtgaaatagatgaaa

SEQ ID NO: 690124 - DNA, 33 bp, Homo sapien
actgaggaaaacagcatagtgaaatagatgaaa

SEQ ID NO: 690125 - DNA, 33 bp, Homo sapien
acagtgggcatacaaacctgttggtctggtaac

SEQ ID NO: 690126 - DNA, 33 bp, Homo sapien
acagtgggcatacaaatctgttggtctggtaac

SEQ ID NO: 690127 - DNA, 33 bp, Homo sapien
gattcactttgatcacagagacaacagttcata

SEQ ID NO: 690128 - DNA, 33 bp, Homo sapien
gattcactttgatcacggagacaacagttcata

SEQ ID NO: 690129 - DNA, 33 bp, Homo sapien
aagcccttctgtgcctaaagtcttttatctgta

SEQ ID NO: 690130 - DNA, 33 bp, Homo sapien
aagcccttctgtgcctgaagtcttttatctgta

SEQ ID NO: 690131 - DNA, 33 bp, Homo sapien
ttcatccagacactgaaaaaatctgaaaccaaa

SEQ ID NO: 690132 - DNA, 33 bp, Homo sapien
ttcatccagacactgacaaaatctgaaaccaaa

SEQ ID NO: 690133 - DNA, 33 bp, Homo sapien
ttttgctctaagggacaagataaaccacaaact

SEQ ID NO: 690134 - DNA, 33 bp, Homo sapien
ttttgctctaagggacgagataaaccacaaact

SEQ ID NO: 690135 - DNA, 33 bp, Homo sapien
gttgcaagaattcaaactgtggctaaaacaatc

SEQ ID NO: 690136 - DNA, 33 bp, Homo sapien
gttgcaagaattcaaattgtggctaaaacaatc

SEQ ID NO: 690137 - DNA, 33 bp, Homo sapien
cctgtagccaaaaatacagcttgtgatccagat

SEQ ID NO: 690138 - DNA, 33 bp, Homo sapien
cctgtagccaaaaatatagcttgtgatccagat

SEQ ID NO: 690139 - DNA, 33 bp, Homo sapien
agcattaatgccgtaaaagagatcttcaaaaat

SEQ ID NO: 690140 - DNA, 33 bp, Homo sapien
agcattaatgccgtaagagagatcttcaaaaat

SEQ ID NO: 690141 - DNA, 33 bp, Homo sapien
aggccatcaagatcaacttccctaaagcaggat

SEQ ID NO: 690142 - DNA, 33 bp, Homo sapien
aggccatcaagatcaatttccctaaagcaggat

SEQ ID NO: 690143 - DNA, 33 bp, Homo sapien
tgtgtacctgacatgacagcaagtctaataaag

SEQ ID NO: 690144 - DNA, 33 bp, Homo sapien
tgtgtacctgacatgatagcaagtctaataaag

SEQ ID NO: 690145 - DNA, 33 bp, Homo sapien
gataaaatgttcttgacgaatggttatcattac

SEQ ID NO: 690146 - DNA, 33 bp, Homo sapien
gataaaatgttcttgatgaatggttatcattac

SEQ ID NO: 690147 - DNA, 33 bp, Homo sapien
ctttcctcttaggcccaaaatcctaactgtctg

SEQ ID NO: 690148 - DNA, 33 bp, Homo sapien
ctttcctcttaggcccgaaatcctaactgtctg

SEQ ID NO: 690149 - DNA, 33 bp, Homo sapien
ccaaaggaaggaacaaagtggctgtatgcagaa

SEQ ID NO: 690150 - DNA, 33 bp, Homo sapien
ccaaaggaaggaacaaggtggctgtatgcagaa

SEQ ID NO: 690151 - DNA, 33 bp, Homo sapien
gtatgtcctggccaggaaggaagctcttagttc

SEQ ID NO: 690152 - DNA, 33 bp, Homo sapien
gtatgtcctggccaggcaggaagctcttagttc

SEQ ID NO: 690153 - DNA, 33 bp, Homo sapien
atagcccaatggtcagaacaagttatatatacc

SEQ ID NO: 690154 - DNA, 33 bp, Homo sapien
atagcccaatggtcaggacaagttatatatacc

SEQ ID NO: 690155 - DNA, 33 bp, Homo sapien
taaagattcttattgacgaattattgtccttca

SEQ ID NO: 690156 - DNA, 33 bp, Homo sapien
taaagattcttattgatgaattattgtccttca

SEQ ID NO: 690157 - DNA, 33 bp, Homo sapien
gaggcaggtgtaaccactcagtcaatgttcaga

SEQ ID NO: 690158 - DNA, 33 bp, Homo sapien
gaggcaggtgtaaccattcagtcaatgttcaga

SEQ ID NO: 690159 - DNA, 33 bp, Homo sapien
attgggaccacctggacaattcaggctcctctc

SEQ ID NO: 690160 - DNA, 33 bp, Homo sapien
attgggaccacctggataattcaggctcctctc

SEQ ID NO: 690161 - DNA, 33 bp, Homo sapien
gcatgaactggcctggaagcattaaatactctc

SEQ ID NO: 690162 - DNA, 33 bp, Homo sapien
gcatgaactggcctgggagcattaaatactctc

SEQ ID NO: 690163 - DNA, 33 bp, Homo sapien
ttttacacaagttcaactcccagttctgttgct

SEQ ID NO: 690164 - DNA, 33 bp, Homo sapien
ttttacacaagttcaattcccagttctgttgct

SEQ ID NO: 690165 - DNA, 33 bp, Homo sapien
gttcaccaaatatccacgtgttcccctacattt

SEQ ID NO: 690166 - DNA, 33 bp, Homo sapien
gttcaccaaatatccatgtgttcccctacattt

SEQ ID NO: 690167 - DNA, 33 bp, Homo sapien
ttttgcggttagattacgattatctctttatct

SEQ ID NO: 690168 - DNA, 33 bp, Homo sapien
ttttgcggttagattatgattatctctttatct

SEQ ID NO: 690169 - DNA, 33 bp, Homo sapien
ggcctccagaactttgaaaggatacgtttctgt

SEQ ID NO: 690170 - DNA, 33 bp, Homo sapien
ggcctccagaactttgcaaggatacgtttctgt

SEQ ID NO: 690171 - DNA, 33 bp, Homo sapien
tttagagcttcagccaatatcttgctcctgagt

SEQ ID NO: 690172 - DNA, 33 bp, Homo sapien
tttagagcttcagccagtatcttgctcctgagt

SEQ ID NO: 690173 - DNA, 33 bp, Homo sapien
ttctgaattctgttggcatatcactttctgtag

SEQ ID NO: 690174 - DNA, 33 bp, Homo sapien
ttctgaattctgttggtatatcactttctgtag

SEQ ID NO: 690175 - DNA, 33 bp, Homo sapien
gaaaggtatttgttgacagtagcctacaacttt

SEQ ID NO: 690176 - DNA, 33 bp, Homo sapien
gaaaggtatttgttgagagtagcctacaacttt

SEQ ID NO: 690177 - DNA, 33 bp, Homo sapien
attcatttctaaaatcactacctagaacttcac

SEQ ID NO: 690178 - DNA, 33 bp, Homo sapien
attcatttctaaaatcgctacctagaacttcac

SEQ ID NO: 690179 - DNA, 33 bp, Homo sapien
tttaggtaccaacaaaagtaggtgttttgagcc

SEQ ID NO: 690180 - DNA, 33 bp, Homo sapien
tttaggtaccaacaaaggtaggtgttttgagcc

SEQ ID NO: 690181 - DNA, 33 bp, Homo sapien
gaccctggctacttgacagaacaaacgcttcct

SEQ ID NO: 690182 - DNA, 33 bp, Homo sapien
gaccctggctacttgatagaacaaacgcttcct

SEQ ID NO: 690183 - DNA, 33 bp, Homo sapien
tcattaaataaagttacgtacgtaggctacctg

SEQ ID NO: 690184 - DNA, 33 bp, Homo sapien
tcattaaataaagttatgtacgtaggctacctg

SEQ ID NO: 690185 - DNA, 33 bp, Homo sapien
accaagttgcaattcaataagtggtggtgtttt

SEQ ID NO: 690186 - DNA, 33 bp, Homo sapien
accaagttgcaattcagtaagtggtggtgtttt

SEQ ID NO: 690187 - DNA, 33 bp, Homo sapien
tctcccttttctatgcactcaactctcatggct

SEQ ID NO: 690188 - DNA, 33 bp, Homo sapien
tctcccttttctatgcgctcaactctcatggct

SEQ ID NO: 690189 - DNA, 33 bp, Homo sapien
ctattagtacttagcagattatgtgcaggcagc

SEQ ID NO: 690190 - DNA, 33 bp, Homo sapien
ctattagtacttagcatattatgtgcaggcagc

SEQ ID NO: 690191 - DNA, 33 bp, Homo sapien
acataggcaaaattcccgatattatgagttggg

SEQ ID NO: 690192 - DNA, 33 bp, Homo sapien
acataggcaaaattcctgatattatgagttggg

SEQ ID NO: 690193 - DNA, 33 bp, Homo sapien
ttaaagctaattatcacaaatcagcctaagtaa

SEQ ID NO: 690194 - DNA, 33 bp, Homo sapien
ttaaagctaattatcataaatcagcctaagtaa

SEQ ID NO: 690195 - DNA, 33 bp, Homo sapien
tgcatttattctcaacagtatgaatcccaaatt

SEQ ID NO: 690196 - DNA, 33 bp, Homo sapien
tgcatttattctcaacggtatgaatcccaaatt

SEQ ID NO: 690197 - DNA, 33 bp, Homo sapien
atattatgaatgaaaacgatggtgatacatagc

SEQ ID NO: 690198 - DNA, 33 bp, Homo sapien
atattatgaatgaaaatgatggtgatacatagc

SEQ ID NO: 690199 - DNA, 33 bp, Homo sapien
tgctctctccttatgacgatacaatagtctttt

SEQ ID NO: 690200 - DNA, 33 bp, Homo sapien
tgctctctccttatgatgatacaatagtctttt

SEQ ID NO: 690201 - DNA, 33 bp, Homo sapien
tacttttattaaataactgtcagcattttatat

SEQ ID NO: 690202 - DNA, 33 bp, Homo sapien
tacttttattaaataattgtcagcattttatat

SEQ ID NO: 690203 - DNA, 33 bp, Homo sapien
taggagagaaattccacgatcagagaagtaaaa

SEQ ID NO: 690204 - DNA, 33 bp, Homo sapien
taggagagaaattccatgatcagagaagtaaaa

SEQ ID NO: 690205 - DNA, 33 bp, Homo sapien
aactgccacatttgggaagaactcatttggact

SEQ ID NO: 690206 - DNA, 33 bp, Homo sapien
aactgccacatttggggagaactcatttggact

SEQ ID NO: 690207 - DNA, 33 bp, Homo sapien
actggtcctttcctcaaggttggatattataca

SEQ ID NO: 690208 - DNA, 33 bp, Homo sapien
actggtcctttcctcagggttggatattataca

SEQ ID NO: 690209 - DNA, 33 bp, Homo sapien
gtgattcacaaacatccgactccatacagaaaa

SEQ ID NO: 690210 - DNA, 33 bp, Homo sapien
gtgattcacaaacatctgactccatacagaaaa

SEQ ID NO: 690211 - DNA, 33 bp, Homo sapien
gcaccggactttccgccattatcccatcattct

SEQ ID NO: 690212 - DNA, 33 bp, Homo sapien
gcaccggactttccgctattatcccatcattct

SEQ ID NO: 690213 - DNA, 33 bp, Homo sapien
catcaaaattgactagaagactggtgtgaccca

SEQ ID NO: 690214 - DNA, 33 bp, Homo sapien
catcaaaattgactagcagactggtgtgaccca

SEQ ID NO: 690215 - DNA, 33 bp, Homo sapien
agcaacttgcaaagacaaaagggagttctaggg

SEQ ID NO: 690216 - DNA, 33 bp, Homo sapien
agcaacttgcaaagactaaagggagttctaggg

SEQ ID NO: 690217 - DNA, 33 bp, Homo sapien
atatttgattgaaccaaggctttgtgcattatc

SEQ ID NO: 690218 - DNA, 33 bp, Homo sapien
atatttgattgaaccatggctttgtgcattatc

SEQ ID NO: 690219 - DNA, 33 bp, Homo sapien
tcttattctttctctcgctgttttgcagtggca

SEQ ID NO: 690220 - DNA, 33 bp, Homo sapien
tcttattctttctctctctgttttgcagtggca

SEQ ID NO: 690221 - DNA, 33 bp, Homo sapien
aataattacaaaataactctgggtacggtggct

SEQ ID NO: 690222 - DNA, 33 bp, Homo sapien
aataattacaaaataagtctgggtacggtggct

SEQ ID NO: 690223 - DNA, 33 bp, Homo sapien
atagaagggttataagacactaaacagatgatt

SEQ ID NO: 690224 - DNA, 33 bp, Homo sapien
atagaagggttataagtcactaaacagatgatt

SEQ ID NO: 690225 - DNA, 33 bp, Homo sapien
ctgtctcattttctcaactctctagcttgatga

SEQ ID NO: 690226 - DNA, 33 bp, Homo sapien
ctgtctcattttctcagctctctagcttgatga

SEQ ID NO: 690227 - DNA, 33 bp, Homo sapien
gctgtgtttcacagccactcacaacagttaact

SEQ ID NO: 690228 - DNA, 33 bp, Homo sapien
gctgtgtttcacagccgctcacaacagttaact

SEQ ID NO: 690229 - DNA, 33 bp, Homo sapien
tcttccctaatgtccacgaaaccattgagaata

SEQ ID NO: 690230 - DNA, 33 bp, Homo sapien
tcttccctaatgtccaggaaaccattgagaata

SEQ ID NO: 690231 - DNA, 33 bp, Homo sapien
ctgcacctattttgcccgatctgaaattgcact

SEQ ID NO: 690232 - DNA, 33 bp, Homo sapien
ctgcacctattttgcctgatctgaaattgcact

SEQ ID NO: 690233 - DNA, 33 bp, Homo sapien
gaaaaactgcactgtcacttttggactggcaca

SEQ ID NO: 690234 - DNA, 33 bp, Homo sapien
gaaaaactgcactgtcgcttttggactggcaca

SEQ ID NO: 690235 - DNA, 33 bp, Homo sapien
cactggccacctgacaaaggtttcgagtgttgg

SEQ ID NO: 690236 - DNA, 33 bp, Homo sapien
cactggccacctgacagaggtttcgagtgttgg

SEQ ID NO: 690237 - DNA, 33 bp, Homo sapien
cactcatcaggcagaaaaactggattacaatcc

SEQ ID NO: 690238 - DNA, 33 bp, Homo sapien
cactcatcaggcagaagaactggattacaatcc

SEQ ID NO: 690239 - DNA, 33 bp, Homo sapien
gtcaattgtacttcaaaatagctgataaaaaag

SEQ ID NO: 690240 - DNA, 33 bp, Homo sapien
gtcaattgtacttcaatatagctgataaaaaag

SEQ ID NO: 690241 - DNA, 33 bp, Homo sapien
atttgtttcttgttcacctactttctgacgggg

SEQ ID NO: 690242 - DNA, 33 bp, Homo sapien
atttgtttcttgttcatctactttctgacgggg

SEQ ID NO: 690243 - DNA, 33 bp, Homo sapien
taaacacagattgaaaatagcagcctttgattc

SEQ ID NO: 690244 - DNA, 33 bp, Homo sapien
taaacacagattgaaagtagcagcctttgattc

SEQ ID NO: 690245 - DNA, 33 bp, Homo sapien
agtacacaaattcctccacaaagagttgttgtt

SEQ ID NO: 690246 - DNA, 33 bp, Homo sapien
agtacacaaattcctctacaaagagttgttgtt

SEQ ID NO: 690247 - DNA, 33 bp, Homo sapien
gtgaacaaatttctaccacttcatcttgttcta

SEQ ID NO: 690248 - DNA, 33 bp, Homo sapien
gtgaacaaatttctactacttcatcttgttcta

SEQ ID NO: 690249 - DNA, 33 bp, Homo sapien
agtaaaatggagataagtaaagttcctctctca

SEQ ID NO: 690250 - DNA, 33 bp, Homo sapien
agtaaaatggagataattaaagttcctctctca

SEQ ID NO: 690251 - DNA, 33 bp, Homo sapien
gcttatagcccttgaacgcctatgtactctctc

SEQ ID NO: 690252 - DNA, 33 bp, Homo sapien
gcttatagcccttgaatgcctatgtactctctc

SEQ ID NO: 690253 - DNA, 33 bp, Homo sapien
aactaatatttaagcaaagtcatgaaggcagag

SEQ ID NO: 690254 - DNA, 33 bp, Homo sapien
aactaatatttaagcagagtcatgaaggcagag

SEQ ID NO: 690255 - DNA, 33 bp, Homo sapien
cccaaatggactaagacataaagagcaagatca

SEQ ID NO: 690256 - DNA, 33 bp, Homo sapien
cccaaatggactaagatataaagagcaagatca

SEQ ID NO: 690257 - DNA, 33 bp, Homo sapien
tgtgtttgctactatcacataaataacttaaca

SEQ ID NO: 690258 - DNA, 33 bp, Homo sapien
tgtgtttgctactatcgcataaataacttaaca

SEQ ID NO: 690259 - DNA, 33 bp, Homo sapien
gtgaagatgggaaaaaatgaggatgattgtgtt

SEQ ID NO: 690260 - DNA, 33 bp, Homo sapien
gtgaagatgggaaaaagtgaggatgattgtgtt

SEQ ID NO: 690261 - DNA, 33 bp, Homo sapien
aacttctcagctagtggaagcaagtcagtgaat

SEQ ID NO: 690262 - DNA, 33 bp, Homo sapien
aacttctcagctagtgtaagcaagtcagtgaat

SEQ ID NO: 690263 - DNA, 33 bp, Homo sapien
atgtgggttggaattccatttgatcccattaac

SEQ ID NO: 690264 - DNA, 33 bp, Homo sapien
atgtgggttggaattctatttgatcccattaac

SEQ ID NO: 690265 - DNA, 33 bp, Homo sapien
tcatctctgtgtgacccaagaagctgtaacatg

SEQ ID NO: 690266 - DNA, 33 bp, Homo sapien
tcatctctgtgtgacctaagaagctgtaacatg

SEQ ID NO: 690267 - DNA, 33 bp, Homo sapien
gtcagacagggagctacgttatcctaatacctt

SEQ ID NO: 690268 - DNA, 33 bp, Homo sapien
gtcagacagggagctaggttatcctaatacctt

SEQ ID NO: 690269 - DNA, 33 bp, Homo sapien
tctgaacttgatactacagatttaccatagccc

SEQ ID NO: 690270 - DNA, 33 bp, Homo sapien
tctgaacttgatactatagatttaccatagccc

SEQ ID NO: 690271 - DNA, 33 bp, Homo sapien
tatttactctgtgtccaaaactagtaactccaa

SEQ ID NO: 690272 - DNA, 33 bp, Homo sapien
tatttactctgtgtccgaaactagtaactccaa

SEQ ID NO: 690273 - DNA, 33 bp, Homo sapien
tattcactgacatgaaactgagttattaatcat

SEQ ID NO: 690274 - DNA, 33 bp, Homo sapien
tattcactgacatgaacctgagttattaatcat

SEQ ID NO: 690275 - DNA, 33 bp, Homo sapien
attttcttatatctcccgaaagctaatttttat

SEQ ID NO: 690276 - DNA, 33 bp, Homo sapien
attttcttatatctccggaaagctaatttttat

SEQ ID NO: 690277 - DNA, 33 bp, Homo sapien
ggagaaagaaggagtcaatgacaatggtgtgct

SEQ ID NO: 690278 - DNA, 33 bp, Homo sapien
ggagaaagaaggagtcgatgacaatggtgtgct

SEQ ID NO: 690279 - DNA, 33 bp, Homo sapien
acaattgggagaactagccttgactggaaccag

SEQ ID NO: 690280 - DNA, 33 bp, Homo sapien
acaattgggagaactatccttgactggaaccag

SEQ ID NO: 690281 - DNA, 33 bp, Homo sapien
cactgtggcatctataagtccagctccctggat

SEQ ID NO: 690282 - DNA, 33 bp, Homo sapien
cactgtggcatctataggtccagctccctggat

SEQ ID NO: 690283 - DNA, 33 bp, Homo sapien
tggtcctcagtgaacaagatacagagcccactc

SEQ ID NO: 690284 - DNA, 33 bp, Homo sapien
tggtcctcagtgaacacgatacagagcccactc

SEQ ID NO: 690285 - DNA, 33 bp, Homo sapien
tatagcaagcacagtaaaaatatagctgggtga

SEQ ID NO: 690286 - DNA, 33 bp, Homo sapien
tatagcaagcacagtacaaatatagctgggtga

SEQ ID NO: 690287 - DNA, 33 bp, Homo sapien
caggtgggagtccatacgacctttttaatgggc

SEQ ID NO: 690288 - DNA, 33 bp, Homo sapien
caggtgggagtccatatgacctttttaatgggc

SEQ ID NO: 690289 - DNA, 33 bp, Homo sapien
ctttgctccttttaggaatgtagcagaaccgtt

SEQ ID NO: 690290 - DNA, 33 bp, Homo sapien
ctttgctccttttaggcatgtagcagaaccgtt

SEQ ID NO: 690291 - DNA, 33 bp, Homo sapien
ccaacaagcaaacagacgcaaagaaattagatg

SEQ ID NO: 690292 - DNA, 33 bp, Homo sapien
ccaacaagcaaacagaggcaaagaaattagatg

SEQ ID NO: 690293 - DNA, 33 bp, Homo sapien
agtccctctcacactgaaggaagctcaggtcat

SEQ ID NO: 690294 - DNA, 33 bp, Homo sapien
agtccctctcacactgtaggaagctcaggtcat

SEQ ID NO: 690295 - DNA, 33 bp, Homo sapien
agagtagagattgcaacaggcagcgagtaaagc

SEQ ID NO: 690296 - DNA, 33 bp, Homo sapien
agagtagagattgcaataggcagcgagtaaagc

SEQ ID NO: 690297 - DNA, 33 bp, Homo sapien
tttacaaatctgtttaccaggggacttgaattc

SEQ ID NO: 690298 - DNA, 33 bp, Homo sapien
tttacaaatctgtttagcaggggacttgaattc

SEQ ID NO: 690299 - DNA, 33 bp, Homo sapien
tgagaaactggaattacattatggagatggaag

SEQ ID NO: 690300 - DNA, 33 bp, Homo sapien
tgagaaactggaattatattatggagatggaag

SEQ ID NO: 690301 - DNA, 33 bp, Homo sapien
aaggttggggactgacagcttatagcattttct

SEQ ID NO: 690302 - DNA, 33 bp, Homo sapien
aaggttggggactgacggcttatagcattttct

SEQ ID NO: 690303 - DNA, 33 bp, Homo sapien
atgcagtaagcatcaacaattgttatccatcat

SEQ ID NO: 690304 - DNA, 33 bp, Homo sapien
atgcagtaagcatcaataattgttatccatcat

SEQ ID NO: 690305 - DNA, 33 bp, Homo sapien
catccgctagtatacaaggtcttcaaggacgtg

SEQ ID NO: 690306 - DNA, 33 bp, Homo sapien
catccgctagtatacagggtcttcaaggacgtg

SEQ ID NO: 690307 - DNA, 33 bp, Homo sapien
aggccatgcatgcttcaaaagcgcacttagttt

SEQ ID NO: 690308 - DNA, 33 bp, Homo sapien
aggccatgcatgcttcgaaagcgcacttagttt

SEQ ID NO: 690309 - DNA, 33 bp, Homo sapien
ctccaggttactcaccccgtgtcttcccactcc

SEQ ID NO: 690310 - DNA, 33 bp, Homo sapien
ctccaggttactcacctcgtgtcttcccactcc

SEQ ID NO: 690311 - DNA, 33 bp, Homo sapien
aatagcctttcacctacggcaagagtagctaag

SEQ ID NO: 690312 - DNA, 33 bp, Homo sapien
aatagcctttcacctatggcaagagtagctaag

SEQ ID NO: 690313 - DNA, 33 bp, Homo sapien
ctgccagtgccggatgccaaggggtggctcaag

SEQ ID NO: 690314 - DNA, 33 bp, Homo sapien
ctgccagtgccggatgtcaaggggtggctcaag

SEQ ID NO: 690315 - DNA, 33 bp, Homo sapien
aaaaacaaactaaccaatgaatgaatgaagaca

SEQ ID NO: 690316 - DNA, 33 bp, Homo sapien
aaaaacaaactaaccagtgaatgaatgaagaca

SEQ ID NO: 690317 - DNA, 33 bp, Homo sapien
ctcacgggatataagccccatgcccagtttcct

SEQ ID NO: 690318 - DNA, 33 bp, Homo sapien
ctcacgggatataagctccatgcccagtttcct

SEQ ID NO: 690319 - DNA, 33 bp, Homo sapien
ttacctctctctgctacatttggtaagctgtgt

SEQ ID NO: 690320 - DNA, 33 bp, Homo sapien
ttacctctctctgctatatttggtaagctgtgt

SEQ ID NO: 690321 - DNA, 33 bp, Homo sapien
taggctgtgttattagaactattgtgtagatga

SEQ ID NO: 690322 - DNA, 33 bp, Homo sapien
taggctgtgttattagcactattgtgtagatga

SEQ ID NO: 690323 - DNA, 33 bp, Homo sapien
acaaggatggaatacaatgaaaaacctgtgtgt

SEQ ID NO: 690324 - DNA, 33 bp, Homo sapien
acaaggatggaatacagtgaaaaacctgtgtgt

SEQ ID NO: 690325 - DNA, 33 bp, Homo sapien
gtctcaagacaaagtcactgaattagggaagaa

SEQ ID NO: 690326 - DNA, 33 bp, Homo sapien
gtctcaagacaaagtctctgaattagggaagaa

SEQ ID NO: 690327 - DNA, 33 bp, Homo sapien
accaaactgggtgttacagtctgggtttgtatc

SEQ ID NO: 690328 - DNA, 33 bp, Homo sapien
accaaactgggtgttatagtctgggtttgtatc

SEQ ID NO: 690329 - DNA, 33 bp, Homo sapien
caaactcataacctgtaaaattgtgttttgatt

SEQ ID NO: 690330 - DNA, 33 bp, Homo sapien
caaactcataacctgtgaaattgtgttttgatt

SEQ ID NO: 690331 - DNA, 33 bp, Homo sapien
tacaccacatatgcccagacttatctaaccaag

SEQ ID NO: 690332 - DNA, 33 bp, Homo sapien
tacaccacatatgcccggacttatctaaccaag

SEQ ID NO: 690333 - DNA, 33 bp, Homo sapien
cctttatagacttctacaatgaatgtataaatt

SEQ ID NO: 690334 - DNA, 33 bp, Homo sapien
cctttatagacttctagaatgaatgtataaatt

SEQ ID NO: 690335 - DNA, 33 bp, Homo sapien
atgtaaatgacatgacagaattaatggagagct

SEQ ID NO: 690336 - DNA, 33 bp, Homo sapien
atgtaaatgacatgactgaattaatggagagct

SEQ ID NO: 690337 - DNA, 33 bp, Homo sapien
gatgctatgaagatcacgtatggtaggtaggca

SEQ ID NO: 690338 - DNA, 33 bp, Homo sapien
gatgctatgaagatcatgtatggtaggtaggca

SEQ ID NO: 690339 - DNA, 33 bp, Homo sapien
taccacatgggtccaaatctgcttagtgaaaaa

SEQ ID NO: 690340 - DNA, 33 bp, Homo sapien
taccacatgggtccaagtctgcttagtgaaaaa

SEQ ID NO: 690341 - DNA, 33 bp, Homo sapien
tgagagtttgaaagcacggactggcgtgataat

SEQ ID NO: 690342 - DNA, 33 bp, Homo sapien
tgagagtttgaaagcatggactggcgtgataat

SEQ ID NO: 690343 - DNA, 33 bp, Homo sapien
aataacttttggatgaaaattcactgtgtggca

SEQ ID NO: 690344 - DNA, 33 bp, Homo sapien
aataacttttggatgagaattcactgtgtggca

SEQ ID NO: 690345 - DNA, 33 bp, Homo sapien
tcatgtaagattagaacggcttccatccttaca

SEQ ID NO: 690346 - DNA, 33 bp, Homo sapien
tcatgtaagattagaagggcttccatccttaca

SEQ ID NO: 690347 - DNA, 33 bp, Homo sapien
tatttgccaggttagactagcaactgaaaaaaa

SEQ ID NO: 690348 - DNA, 33 bp, Homo sapien
tatttgccaggttagattagcaactgaaaaaaa

SEQ ID NO: 690349 - DNA, 33 bp, Homo sapien
cctctgcattcttcacaggaaggaaaaataagc

SEQ ID NO: 690350 - DNA, 33 bp, Homo sapien
cctctgcattcttcacgggaaggaaaaataagc

SEQ ID NO: 690351 - DNA, 33 bp, Homo sapien
gccagtgtggctggaaaggtgaatgagagattc

SEQ ID NO: 690352 - DNA, 33 bp, Homo sapien
gccagtgtggctggaagggtgaatgagagattc

SEQ ID NO: 690353 - DNA, 33 bp, Homo sapien
tggcttatctttgtatcagcagcagaggacaca

SEQ ID NO: 690354 - DNA, 33 bp, Homo sapien
tggcttatctttgtattagcagcagaggacaca

SEQ ID NO: 690355 - DNA, 33 bp, Homo sapien
tttcttcctgccttgacacaattgggacctgtg

SEQ ID NO: 690356 - DNA, 33 bp, Homo sapien
tttcttcctgccttgatacaattgggacctgtg

SEQ ID NO: 690357 - DNA, 33 bp, Homo sapien
tcaatatccattaaacaaataagccacaataat

SEQ ID NO: 690358 - DNA, 33 bp, Homo sapien
tcaatatccattaaaccaataagccacaataat

SEQ ID NO: 690359 - DNA, 33 bp, Homo sapien
gcctggaaacccagcgaccaaactcgtggattc

SEQ ID NO: 690360 - DNA, 33 bp, Homo sapien
gcctggaaacccagcgtccaaactcgtggattc

SEQ ID NO: 690361 - DNA, 33 bp, Homo sapien
gaagaaggactgatcaagacagcaatacacttt

SEQ ID NO: 690362 - DNA, 33 bp, Homo sapien
gaagaaggactgatcaggacagcaatacacttt

SEQ ID NO: 690363 - DNA, 33 bp, Homo sapien
aggcatctgccactacacgtggttaatattttg

SEQ ID NO: 690364 - DNA, 33 bp, Homo sapien
aggcatctgccactacgcgtggttaatattttg

SEQ ID NO: 690365 - DNA, 33 bp, Homo sapien
ctccaacaaccaaaccaaaggaaacacagaact

SEQ ID NO: 690366 - DNA, 33 bp, Homo sapien
ctccaacaaccaaaccgaaggaaacacagaact

SEQ ID NO: 690367 - DNA, 33 bp, Homo sapien
aatgagagctttttcaatatctgttctgggtct

SEQ ID NO: 690368 - DNA, 33 bp, Homo sapien
aatgagagctttttcagtatctgttctgggtct

SEQ ID NO: 690369 - DNA, 33 bp, Homo sapien
aaggattgctgtattacagaaaaattggaaata

SEQ ID NO: 690370 - DNA, 33 bp, Homo sapien
aaggattgctgtattagagaaaaattggaaata

SEQ ID NO: 690371 - DNA, 33 bp, Homo sapien
catcaccatttccaacacttgcctagcagatgt

SEQ ID NO: 690372 - DNA, 33 bp, Homo sapien
catcaccatttccaactcttgcctagcagatgt

SEQ ID NO: 690373 - DNA, 33 bp, Homo sapien
atctccctaagctttgaatccctttttctactt

SEQ ID NO: 690374 - DNA, 33 bp, Homo sapien
atctccctaagctttggatccctttttctactt

SEQ ID NO: 690375 - DNA, 33 bp, Homo sapien
gaaggacagtggtagacggaaatccttccagtg

SEQ ID NO: 690376 - DNA, 33 bp, Homo sapien
gaaggacagtggtagatggaaatccttccagtg

SEQ ID NO: 690377 - DNA, 33 bp, Homo sapien
tatacacttcatgggccgcatctattggtttgg

SEQ ID NO: 690378 - DNA, 33 bp, Homo sapien
tatacacttcatgggctgcatctattggtttgg

SEQ ID NO: 690379 - DNA, 33 bp, Homo sapien
gtcataaaatatcaagcagaagagttaacatca

SEQ ID NO: 690380 - DNA, 33 bp, Homo sapien
gtcataaaatatcaaggagaagagttaacatca

SEQ ID NO: 690381 - DNA, 33 bp, Homo sapien
tatcctaatggtcacacatcacaataccttcac

SEQ ID NO: 690382 - DNA, 33 bp, Homo sapien
tatcctaatggtcacagatcacaataccttcac

SEQ ID NO: 690383 - DNA, 33 bp, Homo sapien
ttcttgctctaaaaacaagaacctgaatctttt

SEQ ID NO: 690384 - DNA, 33 bp, Homo sapien
ttcttgctctaaaaacgagaacctgaatctttt

SEQ ID NO: 690385 - DNA, 33 bp, Homo sapien
cattaacaccaaaacaaatagcagtctcaacat

SEQ ID NO: 690386 - DNA, 33 bp, Homo sapien
cattaacaccaaaacagatagcagtctcaacat

SEQ ID NO: 690387 - DNA, 33 bp, Homo sapien
tctttgaaagcaactaaaggtcccctagattat

SEQ ID NO: 690388 - DNA, 33 bp, Homo sapien
tctttgaaagcaactagaggtcccctagattat

SEQ ID NO: 690389 - DNA, 33 bp, Homo sapien
agcaagattgtgactacatctcaccttagagca

SEQ ID NO: 690390 - DNA, 33 bp, Homo sapien
agcaagattgtgactatatctcaccttagagca

SEQ ID NO: 690391 - DNA, 33 bp, Homo sapien
aagtaaggaaaccgtaaggctggaggctgccat

SEQ ID NO: 690392 - DNA, 33 bp, Homo sapien
aagtaaggaaaccgtacggctggaggctgccat

SEQ ID NO: 690393 - DNA, 33 bp, Homo sapien
ccacagaagtatctcaaccattactgttaatgc

SEQ ID NO: 690394 - DNA, 33 bp, Homo sapien
ccacagaagtatctcatccattactgttaatgc

SEQ ID NO: 690395 - DNA, 33 bp, Homo sapien
aggagtatggtttaacagtaacaaactggggag

SEQ ID NO: 690396 - DNA, 33 bp, Homo sapien
aggagtatggtttaacggtaacaaactggggag

SEQ ID NO: 690397 - DNA, 33 bp, Homo sapien
tacctgtcagtcaaggcccattaaatgagatga
